United States Patent Application Publication US 2025/0215492 A1 - sequence listing, part 6

SEQ ID NO: 83922 - DNA, 120 bp, synthetic construct
  source 1..120: mol_type = other DNA
ataagacagacattcccagagcagccgtttatagacctcccccaggaatgaattctttccccagtgtattaatattaatattccttgctaggaaaaaaatttagtgatatctctcctact

SEQ ID NO: 83923 - DNA, 120 bp, synthetic construct
  source 1..120: mol_type = other DNA
acactccagcacttcaaccctcttactacatcagaattccacactgtcaatgaaaagaggcaaacttcataaaatatttgaagagatttattctgagccaaatacgagtgaccacagccc

SEQ ID NO: 83924 - DNA, 120 bp, synthetic construct
  source 1..120: mol_type = other DNA
gtaaatactcagggttcattgtatcttgccaagaagattaaggacagtgacacacaaggagtgagtttattggccggtgctatgttgcctgctctttactgaacacatggctggcaaaaa

SEQ ID NO: 83925 - DNA, 120 bp, synthetic construct
  source 1..120: mol_type = other DNA
cctccctttcctttctgcaagaaaaatcctcttttaaacagggtttgaaaacccaccccaccccacccactcacccaccctgggcactctctgatctctgaggttcctgatccggctgag

SEQ ID NO: 83926 - DNA, 120 bp, synthetic construct
  source 1..120: mol_type = other DNA
tcgcctctcaattctgtcctcagcacagccatcagagatccttttaagaaagaagtcatatcatggccctcttctgctcaaaactgtcctctaactccccatcccactcagagcaaaggt

SEQ ID NO: 83927 - DNA, 120 bp, synthetic construct
  source 1..120: mol_type = other DNA
tatggacccaattttacaaacaaatacaaatctaaattaggctctgctttagattcatgagttgggattggagtcagcacgaagatcactggaatcagggaagggagagagggcaggaga

SEQ ID NO: 83928 - DNA, 120 bp, synthetic construct
  source 1..120: mol_type = other DNA
tctcacctttacaagtgatgagagactcatcagagccctgggcactgttgctgcctggggtagaacaaaaaaaaagacctggtcagagcccgcaggagatgtgggacaagaggaattatg

SEQ ID NO: 83929 - DNA, 120 bp, synthetic construct
  source 1..120: mol_type = other DNA
agatgtgaccccccattcccctccttaccccagctcagggtgaggggctcttgcagcccctcgtgctgcatatggcacgtgtatctctgctcttgtccagaaggcaccaccacagctgcc

SEQ ID NO: 83930 - DNA, 120 bp, synthetic construct
  source 1..120: mol_type = other DNA
cttcccgttctccaggtatctgcggagccactccacgcacgtgccctccaggtaggctctcagctgctccgccgcacgggccgcctccaacttgcgctgggtgatctgagccgcggtgtc

SEQ ID NO: 83931 - DNA, 120 bp, synthetic construct
  source 1..120: mol_type = other DNA
tgattggcttctctagaacccgacacccaatgggagtgggaattggggacgcgtcatgagtattcaggaagaaggacccgacgcaggttgggagaagtgaaactcaggggagtggagaat

SEQ ID NO: 83932 - DNA, 120 bp, synthetic construct
  source 1..120: mol_type = other DNA
gtcccaatgctcttcaccagcgctccagcactgcccgttttcgtgaactatgcacatctaagcagtgtgcatattttatttggacacttgatatttttgtaacccctttttaaaaaaaaa

SEQ ID NO: 83933 - DNA, 120 bp, synthetic construct
  source 1..120: mol_type = other DNA
cccttcagcctgaagaacgtcctttaaaattacatgtagtacaggacccctaggaaatgaattttatgggtttgatgatctaacaatgcttttatttttgccttctttcctccccccccg

SEQ ID NO: 83934 - DNA, 120 bp, synthetic construct
  source 1..120: mol_type = other DNA
gcaatagcagacattcctattttttccatattcttgccagtgttaagacttatcatatgtctttttaactttacctgctctaggtgatgtgtgatggtttctcattgtggttttaacttg

SEQ ID NO: 83935 - DNA, 120 bp, synthetic construct
  source 1..120: mol_type = other DNA
cacagcaaaggaactatacacaatgatgatggataaaaacatcagcttgattataatggatgctcaaagaatgcaggattatcaggattcctgtattttacattctctcagtgttcctga

SEQ ID NO: 83936 - DNA, 120 bp, synthetic construct
  source 1..120: mol_type = other DNA
aggctcatattcatgcagaaactgctcttctaatggagaaaaacaaataagaaaaagaacttcaggaaagacagcaagggaaacaaaaagaaactgaggagggaagaacacgagcaaaaa

SEQ ID NO: 83937 - DNA, 120 bp, synthetic construct
  source 1..120: mol_type = other DNA
catttggctgattatttcaaccgaaactgttatcaggatgacattaacaagtcaaatttgttaggggcataaaggtgaagtggcagaagaatttggtataatcatgaaagccccgtggac

SEQ ID NO: 83938 - DNA, 120 bp, synthetic construct
  source 1..120: mol_type = other DNA
cttagcaagtattgcagtaagcatcacttacaggtaccatttatttcaaaacaacttttttagtctgctccaaagttaaaataattaactagctaagcattattattctactggtctaaa

SEQ ID NO: 83939 - DNA, 120 bp, synthetic construct
  source 1..120: mol_type = other DNA
atggatgaagctggaagtcatcatcctcagcaaactaacacgggaacagaaaacaaagcacctcatgttctcattcctaagtgagagttgaacaatgacaacacatggatacagggaggg

SEQ ID NO: 83940 - DNA, 120 bp, synthetic construct
  source 1..120: mol_type = other DNA
ctctgtgccagaagaaggcccacctgatggagatccaggtgaatggaggcactgtggctgagaagctggactgggctggtgagaggctcaagcaccaggtacctgtgaaccaagtgtttg

SEQ ID NO: 83941 - DNA, 120 bp, synthetic construct
  source 1..120: mol_type = other DNA
tagcaaactaaggcaggaacagaaaaccaattaccacatgttctcacttataagtaggagttatatgatgagaacacatggacacgcagaagggaacaacacacactggggtccacttga

SEQ ID NO: 83942 - DNA, 120 bp, synthetic construct
  source 1..120: mol_type = other DNA
ggttgcaagatttctctatttatgggtactagtacatttttaactgaaagtggactgtgaaatgttaagaagagttaaattctgaaggaaattgagacacaaaaaccattcaaaagatta

SEQ ID NO: 83943 - DNA, 120 bp, synthetic construct
  source 1..120: mol_type = other DNA
gagacagtcctcattagcgttgaggattcagggagatcgagatgggctgggcaggaaggttcttacttggaacctggaggatgagcaatgacattcctctctccaccttaaagctcatcc

SEQ ID NO: 83944 - DNA, 120 bp, synthetic construct
  source 1..120: mol_type = other DNA
taatcaccagggatagatgtttgtggggcaaaccagaagccccatcatttgctccagcccagcaataaactctttcttccctcaaataaaaacacaacctgacttttacgatcatcaatt

SEQ ID NO: 83945 - DNA, 120 bp, synthetic construct
  source 1..120: mol_type = other DNA
gaaatcaagagtggctactctagggtggggagggtggtttatgactgagtaggacccaaagatgccagcaaagtaggcctctacattaaaaaaaaaaagagagagaaaaattaaacagag

SEQ ID NO: 83946 - DNA, 120 bp, synthetic construct
  source 1..120: mol_type = other DNA
gataaccacgtgtttctaggataaggcaaaggccctgctcatggattcatccgtaatctgaacacagcacatgaagagtgaacagctgtcaatatctactttcacctcaatgtaaacttt

SEQ ID NO: 83947 - DNA, 120 bp, synthetic construct
  source 1..120: mol_type = other DNA
atatcacatcattaatacaaaaggtgctcagctgcgggattataataccattgagtgctgagaccacttgaaatcttaagtacattcttagcatatggtctcctggctgtcacccagcct

SEQ ID NO: 83948 - DNA, 120 bp, synthetic construct
  source 1..120: mol_type = other DNA
cttcttctttccagaggtcaaataaatgggaaggatcagtatagaacttcagcctgtctttatcatctccatgtgctctcatgctattcaggggaggtggtcaatcactctgattgtaaa

SEQ ID NO: 83949 - DNA, 120 bp, synthetic construct
  source 1..120: mol_type = other DNA
gccatctcaaaacttctgtggacctcttccagaatactttcattttcttttttttctgtttgagaatttccacttagtatcttacgtggtttcagcaggggtttctgggtgtgtgtcctg

SEQ ID NO: 83950 - DNA, 120 bp, synthetic construct
  source 1..120: mol_type = other DNA
tgagacaaatatggatccaggcaccagaaactgtcaagttagatttctaaaattaaaataagattagagctgggtgcagtggctcatgtctgtaatgccacaactttgggaggccaaggt

SEQ ID NO: 83951 - DNA, 120 bp, synthetic construct
  source 1..120: mol_type = other DNA
aaatgtcattttgatccaggcaaaagtcaagcatatctgccatttggccctaaatgcttatttggatattgttgagtgtgtgtgtgtgtgtgtgtgtgtgtgtgtgtgtgtgtgtgtgtg

SEQ ID NO: 83952 - DNA, 120 bp, synthetic construct
  source 1..120: mol_type = other DNA
tttggaatagaagacagagttcaggtagcactcagagtgggaaatttaatagagtgttctcctcatttcaccaggatcccaaagccagctcctcagtataaggaaaacatccttgcttga

SEQ ID NO: 83953 - DNA, 120 bp, synthetic construct
  source 1..120: mol_type = other DNA
tgcatataaaagaatattctgcgggtctttttatggtatctttccaagctattgttggattgtccagtacttcacgttctccaaccttgtaagtaatgaatgtacaagttcaactgtaca

SEQ ID NO: 83954 - DNA, 120 bp, synthetic construct
  source 1..120: mol_type = other DNA
catcttctggagtcatggtaacactccgggtattctgggaaaacagtgatttcaaaatacagtttgtcttgttgagactaggaatttggaaaattccagtctgtgaagtgaagggagagg

SEQ ID NO: 83955 - DNA, 120 bp, synthetic construct
  source 1..120: mol_type = other DNA
tcactgacgttatgggaaatcagaaaactctgggatggctgggagaatatgtgcatatagacatctgtagagtgggtgacaaataaatgaaaccacctaaatatttaccccaggggagta

SEQ ID NO: 83956 - DNA, 120 bp, synthetic construct
  source 1..120: mol_type = other DNA
caaataatatacaaaaggcccataagcacatagaaacatgttcaacatcattaagcatcagggaaatgcacatcaacccaaaaatgagatactatttcccacccactagaatggctataa

SEQ ID NO: 83957 - DNA, 120 bp, synthetic construct
  source 1..120: mol_type = other DNA
caaataaacatagtaacaagtgataatgagctgtctggaatgtcttcctagagaactggctgaagcacatgcatgcaaaaggaaggcaatggctgaagaatcaaggcagaactacagtgg

SEQ ID NO: 83958 - DNA, 120 bp, synthetic construct
  source 1..120: mol_type = other DNA
gagaatacattggtgttgttttaagccacatagttgtggtaatttgttatagcagcagcaggatactataataataccagtcaccattggagctcctggaagctgcagtagggaggtcag

SEQ ID NO: 83959 - DNA, 120 bp, synthetic construct
  source 1..120: mol_type = other DNA
ctgacagaccccagtatgtgatgtttccctccttgtgtccacatgttctcattgttcaactcctgcttataagtgagaacatgcggtgtttggttttctgtttctgtgttagtttgctaa

SEQ ID NO: 83960 - DNA, 120 bp, synthetic construct
  source 1..120: mol_type = other DNA
cagaattgcatgaagaataagagtgcagacggtgtcctaaatacagtgctgagattcatgtagaagcacaggaggaagcaactgtgtaagtatccagagtcctatgaagtagggatttca

SEQ ID NO: 83961 - DNA, 120 bp, synthetic construct
  source 1..120: mol_type = other DNA
ccttcagcatggctgacgtggttattgtcacaacctaccttccaacgataaataaactccaacagattacctttgcttatggaggccaatgagcaatttgatggcaaattgattctactc

SEQ ID NO: 83962 - DNA, 120 bp, synthetic construct
  source 1..120: mol_type = other DNA
tatgaggagcagaactttaatttctgtcttaatttcttgctgaaactggtaacagtggttgcatccaggcaaggaatttggaagaattgtggatggggtggagaacgaaatttgctttgc

SEQ ID NO: 83963 - DNA, 120 bp, synthetic construct
  source 1..120: mol_type = other DNA
caaagtgctgggattacagacttgagccaccgcgcccagccaaattaatgccattcttgcatgtataacgtggtatctcatggtgaaccccacatttatttagcaaacatttattaggca

SEQ ID NO: 83964 - DNA, 120 bp, synthetic construct
  source 1..120: mol_type = other DNA
gacccccagtaattttgtcgtgtccatgtgggaagtgagctgaggcttggcaagaggatcttagcccatatggtccaaaaaatagtagaaatatttctttagaagacacaaattccctaa

SEQ ID NO: 83965 - DNA, 120 bp, synthetic construct
  source 1..120: mol_type = other DNA
tagaaatgtgggataatacatgtgtgttgttgtaagctgctaagtttgtggcaatttcttacatagcaatggatagctgaaaacacctcccacagctttcactgagttaagcgacccttg

SEQ ID NO: 83966 - DNA, 120 bp, synthetic construct
  source 1..120: mol_type = other DNA
acttcctagtgacctcagtttccttgtctgtaaaatggggctgatagctgtctctaggtcatagggctcttgtgaggtttaaatgatttaattcatgtaaatcccttaggaacgtgactg

SEQ ID NO: 83967 - DNA, 120 bp, synthetic construct
  source 1..120: mol_type = other DNA
ggctctagaaggaacagggacagagtttaacttaaccccctcgggtgatgcaccctcaggtccagttttttggttctaacattggtgataccacttttcagtcttaaaatgtctttttcg

SEQ ID NO: 83968 - DNA, 120 bp, synthetic construct
  source 1..120: mol_type = other DNA
ctcccaggtgtgatggatcctccaagccgctctttgagccgctgtccaggtctgcaggtcctcgttcagggacatgaaatctccttgtcgtaggcggacttaaagtgtccttcgaggaag

SEQ ID NO: 83969 - DNA, 120 bp, synthetic construct
  source 1..120: mol_type = other DNA
ccagttctccctaaggtcagggcccacaaaggaacaggaagggggttccgggacacaggatccggcttctctgggtatcttggagtccaggaaggatcctggagatctcccactttatga

SEQ ID NO: 83970 - DNA, 120 bp, synthetic construct
  source 1..120: mol_type = other DNA
agtgcttttcatagtcttgcaacacattttgaatccctggttctcatttcacactgactgcctcacagagtgaagacgatgagaagtatcttcatactatattcccacgttcgtctatcg

SEQ ID NO: 83971 - DNA, 120 bp, synthetic construct
  source 1..120: mol_type = other DNA
taaaaaggtttgaaaagaaggcacaaaactcttataatttgcaaatggtaatatgctgaatgcagaaaatacaaatgattagaacactcttgaagttaataagatgcatatatatataaa

SEQ ID NO: 83972 - DNA, 120 bp, synthetic construct
  source 1..120: mol_type = other DNA
tgcaggttacaacaaagtattaaccccagggtaatctttgacaggattaaagacattaaagttgagctcccagattatttggggttttccattccccagtggacagcgataaatgactaa

SEQ ID NO: 83973 - DNA, 120 bp, synthetic construct
  source 1..120: mol_type = other DNA
cccacgtgatggaaagcgcagtcaaatttgagaaacactgtgctaggccacagttgaattcgggttttaattagctaacctggctgactattaacatcactcttaggtgttcaaaataac

SEQ ID NO: 83974 - DNA, 120 bp, synthetic construct
  source 1..120: mol_type = other DNA
aggtgcctgtcaagctaggaaagttgccaatgatagaaaaaacactcctgaagtgaaaactcaaaatttatggatttacttcattgtatagagagacatattataaagccgtggattatc

SEQ ID NO: 83975 - DNA, 120 bp, synthetic construct
  source 1..120: mol_type = other DNA
atcagaatgagggtgaactctaacgacagaaaagggattgttattgctatgggaattggtatgaaaacttctgggttttttttctgagttttgtttctttttcacacggatcttcccttt

SEQ ID NO: 83976 - DNA, 120 bp, synthetic construct
  source 1..120: mol_type = other DNA
tgaacacctcacacagcctgttaaattaatcagaaacatttcactgtgaatgtggaagggaagatgaacagaattttaaacacattgggtgtgtacagaggatcagaatcttgaatttag

SEQ ID NO: 83977 - DNA, 120 bp, synthetic construct
  source 1..120: mol_type = other DNA
ctactcataggtttagctgtggtcctgctatagagtttgttaagaaaacttccctgagttgttttaaatggtcttttgaaagccagacactgcaatcctataatcattggaattgggaac

SEQ ID NO: 83978 - DNA, 120 bp, synthetic construct
  source 1..120: mol_type = other DNA
acactaggatagtcaggattttgaatccctgtgtcctttccctccatctctaccagagaccacttgtggaaaaaaaagacacgaatgtcagaggtgaatccaggcccatggatccattgt

SEQ ID NO: 83979 - DNA, 120 bp, synthetic construct
  source 1..120: mol_type = other DNA
attccggtaccagcctttcaactggaaagaggatgctttcccaggggaacaacttctcctgctgtgctggcttattttctttgtatttggaggacaaaaaagttgatgtaataaaaagaa

SEQ ID NO: 83980 - DNA, 120 bp, synthetic construct
  source 1..120: mol_type = other DNA
atatccttctctatccttccaatttcaacttccgagtgtcgttagatccaaagtgagaatcttttttttttgagacggagtctcactctgtttcccaagctggagtgcagtggtatgatc

SEQ ID NO: 83981 - DNA, 120 bp, synthetic construct
  source 1..120: mol_type = other DNA
gattggaaacctaaagtgtagttgctactgtcatcttgaggcagaattttttcttctctgggaagactcacatttcgcccaaaggccttcaagtgattcaaaaagtcccacccacatttt

SEQ ID NO: 83982 - DNA, 120 bp, synthetic construct
  source 1..120: mol_type = other DNA
ggattacaggcatgagccactgtgctggccacaactagtatttataaatacttttttgttgtttttcactaaccatcccatattcccattgctttcagcaagtccctcagctgatcaggt

SEQ ID NO: 83983 - DNA, 120 bp, synthetic construct
  source 1..120: mol_type = other DNA
aaagaaactgaatatatgaatgattggtgtacctgaaagagatggggagaatggaaccaatttggaaaacatttcaggatatgatccatgagaacttccccaacctagctagacaggcca

SEQ ID NO: 83984 - DNA, 120 bp, synthetic construct
  source 1..120: mol_type = other DNA
caaagaagggcattacataatggtaaagggttcaattcaacaaggagatctaactatctgaaatatatatgcatcctgtacaggaatacccagattcataaagtaggttcctagagacct

SEQ ID NO: 83985 - DNA, 120 bp, synthetic construct
  source 1..120: mol_type = other DNA
tcaagtgattctcctgcctcagcctctcgagtagcttggattataggcatgtgtcaccatgcccggttaatttttttgtatttttaatagagatgaggtttctccatgttggtcaggctg

SEQ ID NO: 83986 - DNA, 120 bp, synthetic construct
  source 1..120: mol_type = other DNA
aaggaacacacttcaaaataataaaagccaattatgacaaacccacagcgagcatcatactgatgggcaaaggctggaagcatttcccttgaaaactgacacaagacaaggatgccttct

SEQ ID NO: 83987 - DNA, 120 bp, synthetic construct
  source 1..120: mol_type = other DNA
ttcacctgaagccaaaaaagagcctgaatagccaaggcaatcctaaacaaaaggaacaaagctggaggtattacactacctgattttttttttttgagacggagtctctaccctgttgtc

SEQ ID NO: 83988 - DNA, 120 bp, synthetic construct
  source 1..120: mol_type = other DNA
cagccaacaaacatgaaaaaatgctcaacatcactgataattagagaaatgcaaatcaaaaccacagtgagatgccatttcacaccagtcagaatgactattattaaaaagtcaaaaaat

SEQ ID NO: 83989 - DNA, 120 bp, synthetic construct
  source 1..120: mol_type = other DNA
attaagcttgaagtcgcaaagaaaacgaacacttgaacaaaggatttctcagcaaggcagtttttacttctgtggaagggtgctacctgtaagcctgattgccatgagagcacccagaac

SEQ ID NO: 83990 - DNA, 120 bp, synthetic construct
  source 1..120: mol_type = other DNA
cattgagttccaatcataacacaaaccctgcctttttctgctagtatcatgtctagtgctattctattttcccaagtcatctgtctggtgggtcctagttgctcagctattccctcatag

SEQ ID NO: 83991 - DNA, 120 bp, synthetic construct
  source 1..120: mol_type = other DNA
attttgactgtggatggaatatttaatccattccacccaggcatttgcatcctgagaccctgtttcaatggctagagtttgcctcaggtcttttacttctactacagctactttggcttt

SEQ ID NO: 83992 - DNA, 120 bp, synthetic construct
  source 1..120: mol_type = other DNA
aggagtggagtctgtgctaggagaccttgagtcctgagggaagaaagagtggaagacagaccaaatacataatttctaaggaactgatcttttgtttcgatcataggaaggtcagtagta

SEQ ID NO: 83993 - DNA, 120 bp, synthetic construct
  source 1..120: mol_type = other DNA
tacccactttccttctgagttttcctcagctcctattttttttagtttttcctgatctgcttgagagaagatagggagtgcagctgaagatggaagacaaggggttagtcaaaaaatggg

SEQ ID NO: 83994 - DNA, 120 bp, synthetic construct
  source 1..120: mol_type = other DNA
ctgggtcaagaatttttgacaagaaggctgtgggttgccaatggcctccatgtgtttgagtaagtacccctaaggctactcattacctacattaacaaaaagatgaaagggcaattctaa

SEQ ID NO: 83995 - DNA, 120 bp, synthetic construct
  source 1..120: mol_type = other DNA
aacttggattggggaaattcgtaattttcctcggtttccttcctttgaccatacatctgaatggatgtatccctcatttagagtagcaagcaaatttaaggaagggaggagatttccttg

SEQ ID NO: 83996 - DNA, 120 bp, synthetic construct
  source 1..120: mol_type = other DNA
tggtcatagcagccctatgcgtcatgctcctttcttcccctgaaaaaagaatgcctatgatggacattaactcagcccagtatacaactggagtcctaaaaattgatgaatttgatctgt

SEQ ID NO: 83997 - DNA, 120 bp, synthetic construct
  source 1..120: mol_type = other DNA
aggactatcagaggtgatttcactgtctgccttttcctttttaccttctgtcttactcagggtatttcccatgttgaatactggttaggctcagtcccttgaactagagatttttcacct

SEQ ID NO: 83998 - DNA, 120 bp, synthetic construct
  source 1..120: mol_type = other DNA
aagagcataatctgcgagctgggacatgtctgggcatgtccaggcagatccaggcagactaggggacaaaggagttaggccttggttcaagtacaagaacatagaatgtgtttatttctt

SEQ ID NO: 83999 - DNA, 120 bp, synthetic construct
  source 1..120: mol_type = other DNA
atgatctgtctcatgctgaggttgggatgttgaagtcccctactattattgtattggagtctatctttcttgttagatgtagtaatatttgttttatgagtctaggttctccagtgttta

SEQ ID NO: 84000 - DNA, 120 bp, synthetic construct
  source 1..120: mol_type = other DNA
tatggccagttttggggccagtttacggccagatttttggaggcctgttcccaacagctttgttcctatcacattgttgttttcgggttgttttatatgtcctttattactgtctttttc

SEQ ID NO: 84001 - DNA, 120 bp, synthetic construct
  source 1..120: mol_type = other DNA
gaaatctgctgttagtctgatggggtttcctttataggtgactaaacactttcctcttgctatttttaggatttgcgttttaccttatactatagaaagtctgattatatgccatggtga

SEQ ID NO: 84002 - DNA, 120 bp, synthetic construct
  source 1..120: mol_type = other DNA
gtgaaaatgtgctggggactgagatgccacatgagacagtcttcaggctccagtggtggcagtggtgtgctgagtgttcctatctttgtgccccaaggtggtatatactggcatttgtgt

SEQ ID NO: 84003 - DNA, 120 bp, synthetic construct
  source 1..120: mol_type = other DNA
gcattttccttttaggactctaaagatgttgctcatctgtctcctcatttgcattgtttccaatgaaataactgctgtcatctttattattattcttattttttcactttcgctttttca

SEQ ID NO: 84004 - DNA, 120 bp, synthetic construct
  source 1..120: mol_type = other DNA
acatatacatcatggaatactatgcagccataaagaaggatgagttcatgtcctttgtagggacatggatgaagctggaaaccatcattctgagcaaactatcacaaggacagaaaacca

SEQ ID NO: 84005 - DNA, 120 bp, synthetic construct
  source 1..120: mol_type = other DNA
tggtaatttgaggggttcattaatgtaagatctgttgatacctgatatagattggatgttgttcttgtgcagatctcatgtcgagatgtgatccccagcattataggtgggcctggaggg

SEQ ID NO: 84006 - DNA, 120 bp, synthetic construct
  source 1..120: mol_type = other DNA
gagcttacaggtcttaggtagatttaaagattctctgatttgtgatagataaggaagcaaagcttctttacacagcttccttacacagttgggggcagtagagaggaatgttcaggcctg

SEQ ID NO: 84007 - DNA, 120 bp, synthetic construct
  source 1..120: mol_type = other DNA
cactggaatgatgactgtaattcacctcaacttgcttttctcatacctgatgcagtggtcccaggactagggatgcaaatagagttcagaaacaggaattattcctgagcaagaaactgt

SEQ ID NO: 84008 - DNA, 120 bp, synthetic construct
  source 1..120: mol_type = other DNA
ccagggtgtgatctgtggtccaataaaaatatttggtcttttccctgtttcctgacaaccaggttctaaaacatttgcaatctcctcagtgataaacatgacttcaacatggcaatgaga

SEQ ID NO: 84009 - DNA, 120 bp, synthetic construct
  source 1..120: mol_type = other DNA
attagattctcatagaagcatgaaccctattgtgaactctgcatgcaagagatctaggttgcatgctccttatgaagcgctaatgcctgatcatctgaggtacaacagtttcatccgaaa

SEQ ID NO: 84010 - DNA, 120 bp, synthetic construct
  source 1..120: mol_type = other DNA
tgactgagacctgtctcagacgttttttggtttacatggctatagcaacttcctgagttctttgtgttagtttaagaattctcaatccttgggaggtgagaaacccctgactttgcagcc

SEQ ID NO: 84011 - DNA, 120 bp, synthetic construct
  source 1..120: mol_type = other DNA
acccgcttactacatcagaattccacactgtcaatgaaaagagtcaaactcagtaacatatttaaagagatttattctgagccaacaatgagtgaccacagcccatgacacagccctcag

SEQ ID NO: 84012 - DNA, 120 bp, synthetic construct
  source 1..120: mol_type = other DNA
ctaagtgttcgtcatctcacgccaagaagattaaggacactgacacacgaggagtgagttaggaccaaagggtttaataggcaaaagaaagacaaagggaaacagctccttcttgtgaga

SEQ ID NO: 84013 - DNA, 120 bp, synthetic construct
  source 1..120: mol_type = other DNA
acaataaaactagcccccaataccagatatacgactttctgtgtacattacagaaatgtggtttccatagttttctccaagaagtgagtgagaaatgagtctgcgggcgagtgtcagaga

SEQ ID NO: 84014 - DNA, 120 bp, synthetic construct
  source 1..120: mol_type = other DNA
gtctcatatatatggtgtgacctcctaaatctatttctccagcccagtcctttcccctaaactctggagttgtctgtccaaattccaccccagctcccccacctgccttcctagtagaca

SEQ ID NO: 84015 - DNA, 120 bp, synthetic construct
  source 1..120: mol_type = other DNA
gaacatatgctacaaaaggccagagatttttcttttacttcagtggtgttccccagatgcagaaccattctgtcctatgtctggccaatgacaaaggtcagttgaatgaatgatcactgt

SEQ ID NO: 84016 - DNA, 120 bp, synthetic construct
  source 1..120: mol_type = other DNA
aatttatattcagattcttattttcagtagggaagtaagaagttgcagctcagtgcacgtaaagttgagacagagatggagacatccagccccacctctctggaacaagaaagatgactg

SEQ ID NO: 84017 - DNA, 120 bp, synthetic construct
  source 1..120: mol_type = other DNA
catccatccttcattgtcacatgtgctgcacaaaagagtaagtgctggcacacagggtcccaggctgcgttagcccctgtgtgcatgctgcttcccagtaatgaggcagggaacacttct

SEQ ID NO: 84018 - DNA, 120 bp, synthetic construct
  source 1..120: mol_type = other DNA
aaaagtcacggttcccaaggctgctgcaggggtcaaaggggacccctgatcagtattctagggactgtcttcccctccatttcctcagagacgtcattccttaattgtctagagagaaga

SEQ ID NO: 84019 - DNA, 120 bp, synthetic construct
  source 1..120: mol_type = other DNA
ctcgctctggttgtagtagccgcgcaggttccgcaggctctctcggtcagtctgtgcctgggccttgtagatctgtgtgttccggtcccaatactccggcccctcctgctctatccacgg

SEQ ID NO: 84020 - DNA, 120 bp, synthetic construct
  source 1..120: mol_type = other DNA
ctgaatgattagaattccaatttgtaaaagacctgtgtcaaaacagcattacaattaaactctcaaagctcctaagttttactttcccagactgtggatctgtaactctgggttgttgca

SEQ ID NO: 84021 - DNA, 120 bp, synthetic construct
  source 1..120: mol_type = other DNA
gttttaattctcctagtggcttttggctatatttctttacacaatagcaaagaatggaaacccgattccttgacttttcacagtgaagttcaggttatattaagctgcatccagcaaaat

SEQ ID NO: 84022 - DNA, 120 bp, synthetic construct
  source 1..120: mol_type = other DNA
gccactataaataactgcttacaagtgtggccttacatttttatttcttttggataaatacatatttgtggaattgctgggccatgtggtaatagatgggtaactgtataagaaactgcc

SEQ ID NO: 84023 - DNA, 120 bp, synthetic construct
  source 1..120: mol_type = other DNA
agcaaagacatggaaccaacccacatgcccatcaatgatagtctgggtaaagaaaatgtggtagatatacaccatggaatactacacggccataaaaaggaatgagttcatgtcctttgc

SEQ ID NO: 84024 - DNA, 120 bp, synthetic construct
  source 1..120: mol_type = other DNA
tctctgcccttcattggagtgttgattcatataggtttttgtcattattgatatgataagtttcacgtctaccatgttattttcccggtttttgtttctctgttcctcttgtcctgatca

SEQ ID NO: 84025 - DNA, 120 bp, synthetic construct
  source 1..120: mol_type = other DNA
gcaattcaggacgctaaggcaagaggattgcttgagatcaggagttggagaccagcttgaacaacattgtgagaacctcgtctctaaaagatataaaaataagtaaacttagctgggcac

SEQ ID NO: 84026 - DNA, 120 bp, synthetic construct
  source 1..120: mol_type = other DNA
tagttaccagatttaggggctaagtagtcaccacatcattatgagtatgtacatattgctcattgttgagaaaaacagagtattatgctcttgcttcctgccttgtgcttccttctgccc

SEQ ID NO: 84027 - DNA, 120 bp, synthetic construct
  source 1..120: mol_type = other DNA
ctgtctctgcctcccaaaatgctgagccactgtattacaggcatgagccactgtgcctggccagtttttcttttattctctctctactttcttcatttctcaaaggcatctcaaactcag

SEQ ID NO: 84028 - DNA, 120 bp, synthetic construct
  source 1..120: mol_type = other DNA
caaacctctgggtatacacgtaaggagctttcggtatttcccactagtgaaacttctcagttggagggtatgtgcatcttcatctttaagaaatactaccaacatttgaaaagcccgaca

SEQ ID NO: 84029 - DNA, 120 bp, synthetic construct
  source 1..120: mol_type = other DNA
tttagcaaacgaaccatgacagcagcggtgagctcctccaagcccgctcgctacaccaggacgcgcggccaagattggccggaaggtttttacttggaaactggaggatgagccatgaca

SEQ ID NO: 84030 - DNA, 120 bp, synthetic construct
  source 1..120: mol_type = other DNA
ctttcctcccccaaataaaaatacatcctgacttttacgatcataacttctttgttctattttatatttttatcatccaaaactatgatttagttttacctttagaaatatgcttttgtt

SEQ ID NO: 84031 - DNA, 120 bp, synthetic construct
  source 1..120: mol_type = other DNA
cactatgtgaaactccactgcccacttgtggattgtccttctttctccacgcatgctgtccttcactcaaatatactttgctgatgttttgaagcaattctatctacgctaagaagaatc

SEQ ID NO: 84032 - DNA, 120 bp, synthetic construct
  source 1..120: mol_type = other DNA
ttttttccgttcaggcatatccagactgttttacacataagttctaccaaaactttgaagaaggttactgaacttatacgtaatattcaagagaatgaggaaacatagagaaagccagta

SEQ ID NO: 84033 - DNA, 120 bp, synthetic construct
  source 1..120: mol_type = other DNA
accctattgtttcggctgaaaagcttcttaagctgaaaggcaacttcagttaagtctcagggtacaaaatcagtgtgcagaagccataagcattcctatacaccaacaatagacaagcag

SEQ ID NO: 84034 - DNA, 120 bp, synthetic construct
  source 1..120: mol_type = other DNA
atgtgactatggagagcattgtttcaaaatgttttaacaaatatatcattgaagttcttgctattttattcaatttcagccactattctttttagttgatttttttgtcaatcttaaatt

SEQ ID NO: 84035 - DNA, 120 bp, synthetic construct
  source 1..120: mol_type = other DNA
ctgtcgaaagtcaaagacaaacagagcatcttgaaaacaacaagagaagggactcattgggtacaaggatcctccatgagattaactgccaagtgttcttcagaaaccatggagttcaga

SEQ ID NO: 84036 - DNA, 120 bp, synthetic construct
  source 1..120: mol_type = other DNA
tagaaagcctcctttcatgcagggaccagccccacagggtcagtgggtctctccctttgtgtggtgatgagagagtgtagaaataaagacacaagacaaagagataaaagaaaagacagc

SEQ ID NO: 84037 - DNA, 120 bp, synthetic construct
  source 1..120: mol_type = other DNA
aatgactttctgtctcgcttccaaatgctcagatgcaactctggggctaacttcaggggaagttaggagattatccaaataagatggttcactgggagaaagaatgtttggctttaatgt

SEQ ID NO: 84038 - DNA, 120 bp, synthetic construct
  source 1..120: mol_type = other DNA
cagggctccagcaatgttccagcctcagcctcctgagtagctgggactacaggtgcatgccaccatgtctggcctcatttcattgttattttacttcaaatgctttattttaaatgttaa

SEQ ID NO: 84039 - DNA, 120 bp, synthetic construct
  source 1..120: mol_type = other DNA
ggcaactccctcagagaagaccattaccttttccttagggaaagctggattaacttcgccaaatgtggttgaatgtaactggcaaataattctcagaggaatttaggagttcagtgtctt

SEQ ID NO: 84040 - DNA, 120 bp, synthetic construct
  source 1..120: mol_type = other DNA
gagaccatcaggatgtctatggaaggctgcttcatgctacaagggcagagttaagtctttggtatagagactggttggcaaagttgaaaatgttgccccaggtccttttggggattattt

SEQ ID NO: 84041 - DNA, 120 bp, synthetic construct
  source 1..120: mol_type = other DNA
ttatggaatgtggacccctccctagggagtctcccaggctcaaagtcttccctcaactccagaaatgcaaacccaacactgacctcacggagttctgaaggttaaggaggagacacgtga

SEQ ID NO: 84042 - DNA, 120 bp, synthetic construct
  source 1..120: mol_type = other DNA
agggccagggtcccagctccccacaccccagccaccacaccttcttctgcttttttttttcccattattgtttctttctttctttttctttctttctttttttttttgtcaaatctcaag

SEQ ID NO: 84043 - DNA, 120 bp, synthetic construct
  source 1..120: mol_type = other DNA
cttgtaggggatgaatccagaaaaagcctctgttacaaatcaaaatggacatgccggaagtattagctcaaatcaaccttgtcctgtctaaccacttactgacccaagataccacttgga

SEQ ID NO: 84044 - DNA, 120 bp, synthetic construct
  source 1..120: mol_type = other DNA
ttaaaaagattctgttcctctagaaccactcttcgtaccacagtctctatcagtccagattcttcagagaagcagaaccaataaggtgtgtgtgtgtgtgtgtgtgtgtgtgtgtgtatt

SEQ ID NO: 84045 - DNA, 120 bp, synthetic construct
  source 1..120: mol_type = other DNA
cccagggcaggaaacatgaagaaagcaggtgtgaggactgaaccaactgcacggtatgtaaagacatacttggtacatagtagatacaaagttagctttggtctttggtgaattcatgaa

SEQ ID NO: 84046 - DNA, 120 bp, synthetic construct
  source 1..120: mol_type = other DNA
gtataataaataacatgaagtttgacaacccaaaacaacaaatacttatcatctcccacagtttccagtggtcaggaatctgggagagatttccttgagtgcttctggctcagggcctct

SEQ ID NO: 84047 - DNA, 120 bp, synthetic construct
  source 1..120: mol_type = other DNA
gggtgaatataagggatgggacatgcagccacactctcttccatcccttggtttctggacccaagtttcttcctactgagaatacagcaccgtagtgatgtctctgattcaataaatgca

SEQ ID NO: 84048 - DNA, 120 bp, synthetic construct
  source 1..120: mol_type = other DNA
ccaatctataactctgtaggtcacacagaagccaattcatacaaccacttggaattacgtggttctcagtgtcctgtggtcaagaattctatctgatcagggccagcaacactaaaagtt

SEQ ID NO: 84049 - DNA, 120 bp, synthetic construct
  source 1..120: mol_type = other DNA
tgcaatcaagaccactacttggtcaagtctgaagtaatcctgttcattctttaggtcctattgggcttctgcaaggacagaatacacggagataataggcaactccagcactatcccacc

SEQ ID NO: 84050 - DNA, 120 bp, synthetic construct
  source 1..120: mol_type = other DNA
tcatggtaactgtgacctctgacttttgcagatcactgccaccacttgatctagctgaagtagttctagctggaagaatagagaattaaaagaaatctttgtgaagccaccactcaggtt

SEQ ID NO: 84051 - DNA, 120 bp, synthetic construct
  source 1..120: mol_type = other DNA
cactctggggtgttactaccttcctaatcactccggtgtcctccactctcaggattttaaatatcatctagacacagatggctcccaaatatatatctctacatatttctataatcaaaa

SEQ ID NO: 84052 - DNA, 120 bp, synthetic construct
  source 1..120: mol_type = other DNA
acagcatgattaattaaatgcagtttgtttggtgaaggaaattttgttcaaatcttggtctaagtgggaaagggattctaggggatccagtgcagcagttatgggtttcagtatgctcac

SEQ ID NO: 84053 - DNA, 120 bp, synthetic construct
  source 1..120: mol_type = other DNA
gagatttttggtattccttcattagtcagagctgaagatctacatatatgtctaccaagcaagtgtgcatgtcccactagccagtttgttagtcttgccaatgcaccacaacgtagcagc

SEQ ID NO: 84054 - DNA, 120 bp, synthetic construct
  source 1..120: mol_type = other DNA
aaagtggctgggaaaagattttccaaatcctagtgatgggcacagggccccctaaagttcacttttggaaccttcccatctgtcttgttctcctttcatcagggacatccatgcccctca

SEQ ID NO: 84055 - DNA, 120 bp, synthetic construct
  source 1..120: mol_type = other DNA
ggacatttggacttttttttttttttttttgagacagagttttgctcttatcacccaggctggagtgtagtggcacgattttggctcactgcaagctctgcgtctcgagttccagcgatt

SEQ ID NO: 84056 - DNA, 120 bp, synthetic construct
  source 1..120: mol_type = other DNA
ctcctgggttcaagagattctccttcctcaacctcctaagtagctgggattacaggcacacgtcaccacacctggctactttttgtatttttagtagagacagagtttcaccatattggc

SEQ ID NO: 84057 - DNA, 120 bp, synthetic construct
  source 1..120: mol_type = other DNA
aggatgagctctaattcccatttgaaatgctcactctgactattgtgtgggtgatggacagcgggtgtgagagtcagcaggcagcccagctggaaggccttctggtttactatcttggag

SEQ ID NO: 84058 - DNA, 120 bp, synthetic construct
  source 1..120: mol_type = other DNA
cctaagctttctgggggtgagggccttgacaccgtgctgttctgatgaatataactgtcccagctcctgaaataaaagcacaggtgcacaaaataccgactgttgcaagcaatgcctagg

SEQ ID NO: 84059 - DNA, 120 bp, synthetic construct
  source 1..120: mol_type = other DNA
ttgggaaaccagccggagtgggagataaggagtctactttgcaaaggacacatgtgagcctcctcctagtttgaactcatgagtagcagctaacagccaggacccttgtgtcgggcacgt

SEQ ID NO: 84060 - DNA, 120 bp, synthetic construct
  source 1..120: mol_type = other DNA
aaggctagttcagcctacgcctagaaatgaagaagggcagtttagcggttggaagcaagatggggtcagttaggtttgatgtctttcactgtcatcatttccttagttataattttgcaa

SEQ ID NO: 84061 - DNA, 120 bp, synthetic construct
  source 1..120: mol_type = other DNA
atagcttcgagtaagtacaaagacatgtaagagagtttatctaaagagcatgtttacctttgatcatttgtaggactgctctctccgggggactgcgaccagattaattacccacaggtg

SEQ ID NO: 84062 - DNA, 120 bp, synthetic construct
  source 1..120: mol_type = other DNA
ttgcttatgtgaaacaaaacaaaacaaaaaccctgttcttgtgcccaggagacacaccctgacacatctggaggtagagggtcatgctgtctgcaacttaccctcacaggctctgaaata

SEQ ID NO: 84063 - DNA, 120 bp, synthetic construct
  source 1..120: mol_type = other DNA
tttcctactcacccggatccgaatcctccgcggtgctgtttcaagagagccggattccagatcacgctccagcccggactcggaattcctgccctgcgggtctgcattttcataacgggc

SEQ ID NO: 84064 - DNA, 120 bp, synthetic construct
  source 1..120: mol_type = other DNA
agctcaagaccatctcggcctcccctagcccaagagaggactggcttcatgactccctgaaaccatttctaaatgccttagaacaaaccttgcatattcattattgttattgaactatta

SEQ ID NO: 84065 - DNA, 120 bp, synthetic construct
  source 1..120: mol_type = other DNA
ggacagcattcttattattgagaattgagaattcatatgccacacaatttatccttttaaagtgtgcagctcagtggcttctagcgtaatcacaaggttgtgccaccgtcaccactgtct

SEQ ID NO: 84066 - DNA, 120 bp, synthetic construct
  source 1..120: mol_type = other DNA
ctgaggaggaagagaggatgatatggtggcagacgtatagagagtctttgtagatctctcacattggaggggactatggtcggaggtacagatgtcctaaggcaggctggaaaagggagt

SEQ ID NO: 84067 - DNA, 120 bp, synthetic construct
  source 1..120: mol_type = other DNA
tgactaagtttccgcggcgccttctccccggccactgcttgagccgctgagagggtggcgacgtcggggccatggggctgggcccggtctttctgcttctggctggcatcttcccttttg

SEQ ID NO: 84068 - DNA, 120 bp, synthetic construct; identical to SEQ ID NO: 27569
  source 1..120: mol_type = other DNA

SEQ ID NO: 84069 - DNA, 120 bp, synthetic construct; identical to SEQ ID NO: 27570
  source 1..120: mol_type = other DNA

SEQ ID NO: 84070 - DNA, 120 bp, synthetic construct
  source 1..120: mol_type = other DNA
tttgctgtgcagaagcctttttacttgatatgatcccatttatgcaattttactttggttacctgtgcttgtggggtattactttaaaaatctttgcccagtccaatatcctagagagtt

SEQ ID NO: 84071 - DNA, 120 bp, synthetic construct
  source 1..120: mol_type = other DNA
tcccaaagtgctgggattacaggcatgagccaccacgcccagccacatcactgttttatagtttttattggagaggtctttcacttcttcagttaggtttattcctcagtattttatttt

SEQ ID NO: 84072 - DNA, 120 bp, synthetic construct
  source 1..120: mol_type = other DNA
atttaagcagaatcatgtaatgtttgtctttttgtttctggcttatttcacttataatatttttgaggttcggtgggcacagtggctcacgcctggatttccagcactttgggaggctga

SEQ ID NO: 84073 - DNA, 120 bp, synthetic construct
  source 1..120: mol_type = other DNA
tatatagtgcaaattaagggtccaattttattttaacaccccctgcccccagaactatttgctgaaaagatcaactgactctttgtcacctgctcaccccagtggacactagctgttcca

SEQ ID NO: 84074 - DNA, 120 bp, synthetic construct
  source 1..120: mol_type = other DNA
acagtgggcagaagatgtcctgggaaataagacatgggacagagagaccagggacttgacagggaacggaaaggacctcaggatgaccctggctcatatcaaggaccagaaagaaggtga

SEQ ID NO: 84075 - DNA, 120 bp, synthetic construct
  source 1..120: mol_type = other DNA
ctggaagaactgggccccagagtgaggacagacttgcaggtcaggggtcccggagggcttcagccagagtgagaacagtgaagagaaacagccctgttcctctcccctccttagagggga

SEQ ID NO: 84076 - DNA, 120 bp, synthetic construct
  source 1..120: mol_type = other DNA
gtgtctcttgaactcactagggcgcatccaggtggggtgagctgggaatcacgtgctgaatgctaagggcctggatgatcacggcctcagagggagcaaatagtaaaggcagctgtgatc

SEQ ID NO: 84077 - DNA, 120 bp, synthetic construct
  source 1..120: mol_type = other DNA
atgtccagtaaagatattcgtaatttcagctctataatcttaataggatttcctctaatattgtgaagcatattatatgaaacaggaacacaaatttctcaaaattcctgcgatgtccaa

SEQ ID NO: 84078 - DNA, 120 bp, synthetic construct
  source 1..120: mol_type = other DNA
ggcaggggctgggaaaagcaaggagggaggaagaaaaaagtgggggcctcatcttccctcagagaaagggcaaatctggttttggagcaactgaagagagaaaagtccccagggaataaa

SEQ ID NO: 84079 - DNA, 120 bp, synthetic construct
  source 1..120: mol_type = other DNA
tctcaaaaaaaaaaaaaaaaaaagacagagtctcactctgtcacccaggctgcagttcagtgacatgatctcagctcgttgcagcctccgcctcccgggttcaagcacttctcttgcctc

SEQ ID NO: 84080 - DNA, 120 bp, synthetic construct
  source 1..120: mol_type = other DNA
ttggaggttttctgattttgaagaatcccagtcagtcaggttctggcgtaaagtgactgctggggaggtgtggactgaatgaatgaagaataaatgaaccaggaaagtggacatgcaaga

SEQ ID NO: 84081 - DNA, 120 bp, synthetic construct
  source 1..120: mol_type = other DNA
ctgcttgatttttccgttgcagtcattatctgttgcacagcacagtggtgaatgcaatagttaattgtacctgttccctttcactcttcccattctttcatcttcccgatgtatttctgt

SEQ ID NO: 84082 - DNA, 120 bp, synthetic construct
  source 1..120: mol_type = other DNA
gtgctgggattacagaggtaagccactgcacccagccgtattactcttttaagaaattacagactttggatattccactttaccttcttggaaatgtccctcctgggcccttctcgctgc

SEQ ID NO: 84083 - DNA, 120 bp, synthetic construct
  source 1..120: mol_type = other DNA
tcaccttgaaagctgaaactctgtgcccctttcacaaaaatccttattacctggaagttttacctggcagccaccattctaccttcacattcatcaagtttgactgttttagacacctca

SEQ ID NO: 84084 - DNA, 120 bp, synthetic construct
  source 1..120: mol_type = other DNA
atggtgggaatagcagggacatagtttagacaaggtcattgagcaagacgtttctgagaacttgaccactggttatctgagaagagacctgaatcgtgtgaggagtgagtcatgtgaatc

SEQ ID NO: 84085 - DNA, 120 bp, synthetic construct
  source 1..120: mol_type = other DNA
gcaccatctgtggaagtgaggctgacacatttgcaaaatgcattgagcactagtacaccatgcatttatttacttttctttactccacagttgttttgaggaggcttccagtgacaaaca

SEQ ID NO: 84086 - DNA, 120 bp, synthetic construct
  source 1..120: mol_type = other DNA
tagtgcagaggatcatggactgttgcagttatggcaacaaaaaatttctccagacatagctcctgtcctctggtgggaaaatctcccctggatgagaacactagtttgagaggtagagac

SEQ ID NO: 84087 - DNA, 120 bp, synthetic construct
  source 1..120: mol_type = other DNA
atagctgaagcagcataaaacctagtttctagtagagggatgcaaaaagggaggagaattggtaagttagagttttttggcaaaggactgacaatgcgccacatggataggacttctatt

SEQ ID NO: 84088 - DNA, 120 bp, synthetic construct
  source 1..120: mol_type = other DNA
caccctaatcttcttatgcaaataggctttccacttggctgacaccatgttgtctgctccctgctgcacacgtggttggaaaggaaaagagaagatggagccgccatttgaacatgccta

SEQ ID NO: 84089 - DNA, 120 bp, synthetic construct
  source 1..120: mol_type = other DNA
ggtggagagagcaggatcacttgagaccaggagctcaagaccaacctgggcaacacagcaagaccctgtgtcttaccaataaaataataataataatatagagaaatgtcatacattctt

SEQ ID NO: 84090 - DNA, 120 bp, synthetic construct
  source 1..120: mol_type = other DNA
gtaaatctacttttagttccctaaggaatctccatactgttttctatagtgattgtactagtttacattcctgccagctgtgtaaaagtgttccctttttaccacatccacaccaacacc

SEQ ID NO: 84091 - DNA, 120 bp, synthetic construct
  source 1..120: mol_type = other DNA
caattcggatgccctttatttctttctcttgtctgattgctctggctagaactttcaatacaatgttgaagacaagtggtgaaagtggacatccttaccttgtttcagttatcgggggaa

SEQ ID NO: 84092 - DNA, 120 bp, synthetic construct
  source 1..120: mol_type = other DNA
aaatgctaaggactctacttctaatagtgtggagaatgctgatagtccctggcatgaactgtttagagagtaacgcaaaataaatgcatttcacactattcactgctcctgagaggcaag

SEQ ID NO: 84093 - DNA, 120 bp, synthetic construct
  source 1..120: mol_type = other DNA
aaggactctgcttttaatgttgcagctcggggagttaaagaaggtcgtaatagtttattttcttggttagctgaaatatggattaaaaggtggcccactgtgagcaagctggaaatgtct

SEQ ID NO: 84094 - DNA, 120 bp, synthetic construct
  source 1..120: mol_type = other DNA
ttaattttcccaattaatgcatcatttccccaatgcaatttccccaattaatgcataattggcataggaatagttagcagctggcagaacccccacactggcatgctgactggtagagtg

SEQ ID NO: 84095 - DNA, 120 bp, synthetic construct
  source 1..120: mol_type = other DNA
gcatttggctcctcctacaaccaagaaagaggcacaatgcctagtgggccgatttggattttggaggcaacacattcctcatttgggtatgttactccggcccatttatcaagtgacctg

SEQ ID NO: 84096 - DNA, 120 bp, synthetic construct
  source 1..120: mol_type = other DNA
acaaagaaatttggggaagaggtttgtggatggacctctctggtcaaaacccacaaagatatttgtatcccatgtgagtgcccaccaatgggtgatctaagcagaggaggattttaataa

SEQ ID NO: 84097 - DNA, 120 bp, synthetic construct
  source 1..120: mol_type = other DNA
tagttccagagggaggaatgctgccaccaggagacacaacatcgatttcattaaactagaagttaagattgccacctggatactttgggctcctcctacatttaagtcaacaggctatga

SEQ ID NO: 84098 - DNA, 120 bp, synthetic construct
  source 1..120: mol_type = other DNA
tgagggtattgccaaaagagattaacatttgagacagtggaccagggaaggcagatccattcttaatctggtgggcacagtctaatcagctgccagcaaatataaagcaagaagaaaaat

SEQ ID NO: 84099 - DNA, 120 bp, synthetic construct
  source 1..120: mol_type = other DNA
ggtttgaccttagattgtctttttgtgctctttcagacattttcatgtaggcatttaatgctatgaactttcgtcttagtacttcttttgctgtattccagggttttaataggttgtgtc

SEQ ID NO: 84100 - DNA, 120 bp, synthetic construct
  source 1..120: mol_type = other DNA
caggttgttgccttaataccttgttttttccatttcatagtgttgttgaagagtgatggctaaatgtatccagcataattcacctacacttagttttctagataattgagttgggtggcc

SEQ ID NO: 84101 - DNA, 120 bp, synthetic construct
  source 1..120: mol_type = other DNA
gaaagtttggaacttcctagagactcagagggctccgaagacaggaagatatgggaaagcttgaaacttcctagagacttgttgaatggttttgaccaaaatgctgatagtaatatggac

SEQ ID NO: 84102 - DNA, 120 bp, synthetic construct
  source 1..120: mol_type = other DNA
gggtacccagaggtggggacagatgctaacaggtccatcttataagtgcaacatgaaatttaaggtcagggaatctcttaacttttcttgaaggacctcatatttagcttcttgactcaa

SEQ ID NO: 84103 - DNA, 120 bp, synthetic construct
  source 1..120: mol_type = other DNA
cagtgcagaacatggcaagacttcagcaaatacatcagtcagctggatgaaggaggcaggtgtgagccagcaaaaaaaagcttgtgattttattggagcatgaatttaaaagtgttgatg

SEQ ID NO: 84104 - DNA, 120 bp, synthetic construct
  source 1..120: mol_type = other DNA
gcctctttgcatggctctttctggcctttcaaaagcgccagagacatcagaaatgaaatcgtacacacttattcggagttttccacaatcattgaaatttctgtgagtgccaaagttaag

SEQ ID NO: 84105 - DNA, 120 bp, synthetic construct
  source 1..120: mol_type = other DNA
cactggaactgtaggtcaattaaacctttttctttataagggggggggaggaagaggaggaggaaaaaggaggagggtgaaaggagtcagggaggagagaaaagtgggaagtgtttcttt

SEQ ID NO: 84106 - DNA, 120 bp, synthetic construct
  source 1..120: mol_type = other DNA
atttttgtcttttcagttgtggctattctatctggggtaagatgacatctcattgtggttttgatttgcatttccctaatgattagtgatgttgaacatttttttatgtatctgttggcc

SEQ ID NO: 84107 - DNA, 120 bp, synthetic construct
  source 1..120: mol_type = other DNA
tctgattcatgagcatggaatatctttccatttgtttgtgtcctcttctttctttcatcagtgttgtatagatttatttttaagagatctttgacttccttgcataaacttattcctagg

SEQ ID NO: 84108 - DNA, 120 bp, synthetic construct
  source 1..120: mol_type = other DNA
ttttggtataatgtataggaaggaactaaaggctgatgaggatgggagtgttggaatagatgttctgtgcatgagtacccccttcatcctctctgtctcccaagaaccaaaaaatactct

SEQ ID NO: 84109 - DNA, 120 bp, synthetic construct
  source 1..120: mol_type = other DNA
ttatttgggtaggaaaatctttcttttttattttatttttttttccagccagggtctcattctgtcactcaggctaaattacagtggcccgatcatggctcactgcagccttgacctccc

SEQ ID NO: 84110 - DNA, 120 bp, synthetic construct
  source 1..120: mol_type = other DNA
aacaattaataactaattaataattagttaccatagctttctgtaaccttttgaacttttttgttttattattatactttaagttttagggtacatatgcacattgtgcaggttagttac

SEQ ID NO: 84111 - DNA, 120 bp, synthetic construct
  source 1..120: mol_type = other DNA
ttttggcttttgttgccattgcttggtgttttagacatgaagtcctttataaactttttaaacttttctactcttttgtaatagcacttagcttaaaacgtcaacacattatacagctct

SEQ ID NO: 84112 - DNA, 120 bp, synthetic construct
  source 1..120: mol_type = other DNA
agccacaaaacagcaaccagcacaggactatcaccttttggagaatggaagttcctgaaagggagattcacatccttatcagctttctttccagaagcatttgccaaaatacaatgaaga

SEQ ID NO: 84113 - DNA, 120 bp, synthetic construct
  source 1..120: mol_type = other DNA
taagaaattgagttctaaatacattccttcccaccagagaaactccatgcccagacttcttcacctgtcaattctttcaaaaactttttaaaaggcatgtcagccttatacagtcttcct

SEQ ID NO: 84114 - DNA, 120 bp, synthetic construct
  source 1..120: mol_type = other DNA
gtaaacaccttccaactaattttatgaggcaacataagtcagacaaggacctaaacatgacaattatattacaagaaaaataaactcatcatcaaaatgatctgatgaacatagccacca

SEQ ID NO: 84115 - DNA, 120 bp, synthetic construct
  source 1..120: mol_type = other DNA
ataccgtttatccacaaagtgatccatggagtcaatgcaattgtaataaaactcccaacagttttttttgtgggaattgacatgctccttctaaaatgtatacaaaaatgtgaggagctt

SEQ ID NO: 84116 - DNA, 120 bp, synthetic construct
  source 1..120: mol_type = other DNA
cataccactctgactttcctcagtgttttctggtatgaaattggctgttaatctcaatgaggatcccttgtacatgatgcattatttgtttcttgctgctgtccaagttctctctgcttc

SEQ ID NO: 84117 - DNA, 120 bp, synthetic construct
  source 1..120: mol_type = other DNA
gggagtggtgatgattcttaacgagcatgctgcctttcaagcatctgtttaacaaagcacatcttgcaccgcccttaatccatttaaccctgagtggacacagcacatgtttcagagagc

SEQ ID NO: 84118 - DNA, 120 bp, synthetic construct
  source 1..120: mol_type = other DNA
gggtggctggcctggcagaggggctcctcacttcccagtaggggcggctgggcagaggcgcccctcacctcccggacggggcagctggctgggcggggagctgaccccacctccctccca

SEQ ID NO: 84119 - DNA, 120 bp, synthetic construct
  source 1..120: mol_type = other DNA
gagaggggagaggggagaggcagaggcagaggcagaggcagagcaggaattcagatttttttttttccttatatttttaatgagtctttatttggtgagatattgttcttctggttcctt

SEQ ID NO: 84120 - DNA, 120 bp, synthetic construct
  source 1..120: mol_type = other DNA
atcattccatgccccaggcatctgtgactagtatttgcctttaaatgcttttgacaaacattgctatggagacctctccaatcttaataaagttccaagaggagtgaagcaaagaccagc

SEQ ID NO: 84121 - DNA, 120 bp, synthetic construct
  source 1..120: mol_type = other DNA
tgctttctgctttttcaattttctctccttctctggttttgaacaaatacatgttactctcactcacaactataaagcgaacttaggaaacaatctatagggagagtttgttgatgattg

SEQ ID NO: 84122 - DNA, 120 bp, synthetic construct
  source 1..120: mol_type = other DNA
gtagtcccagctatgagagtgtctgaggcagaaggatatcttgagtacaggcatttgggtttagcctgagaaatatttgagtctagcctgggaaacatatcaagaccacatctcaaaaaa

SEQ ID NO: 84123 - DNA, 120 bp, synthetic construct
  source 1..120: mol_type = other DNA
ctcatacctgatgcagtggtctcaggactagggatgcaaataaaagtccaggcacaggaattattcctgagcaagaaaccgttaacatatttaaaaaccattatgcaagactgcctaagg

SEQ ID NO: 84124 - DNA, 120 bp, synthetic construct
  source 1..120: mol_type = other DNA
tggttaaagaccaggaagtgatctgtgatccaataaatatatttggtctttgcccctagtccctgacaggcaggtcctaaaacgcttgcagtccctcagtgataagcatgattttaatat

SEQ ID NO: 84125 - DNA, 120 bp, synthetic construct
  source 1..120: mol_type = other DNA
aaggggactgctgatcagtgttccagggatttgctccagattaatctgagtcatggaaaaactgcctttcttttgtttctaaacaaatacctgcaaagacaaaagaccacataaatcccc

SEQ ID NO: 84126 - DNA, 120 bp, synthetic construct
  source 1..120: mol_type = other DNA
ggaaaaggcaatagactgagatgcaagtgtgcccccaagtgatgggcagaaggagagaaggtgttttggatgcattctagaacacaggtaatctaaggagagttgatcaaggccgtggaa

SEQ ID NO: 84127 - DNA, 120 bp, synthetic construct
  source 1..120: mol_type = other DNA
cttccaggatggaaggagtgcaatgtagtcaactcctcacttagggtctggttggtcacctaaagaaatagagccctaccagggaagatcattgggttcaaatgctgatgagtaggacat

SEQ ID NO: 84128 - DNA, 120 bp, synthetic construct
  source 1..120: mol_type = other DNA
ctgtaaaacttcactgcagtggccacttctgaatctctgtaaggtttatttatcttcaccctctggagagaagatgttttaccaaagcctctagtgtaccttcctcctcttactcatcca

SEQ ID NO: 84129 - DNA, 120 bp, synthetic construct
  source 1..120: mol_type = other DNA
tccacaagattcaccctgggacatacgatcatttttgatttggccagaatggaggcagtttcagaggtttccctttggccttcagcacaatgagagcccttactccacagactagggatg

SEQ ID NO: 84130 - DNA, 120 bp, synthetic construct
  source 1..120: mol_type = other DNA
aatgtctccatcccacaggccaaattcccccagcctcattattccctcttctacatgttccggggcaactaagtcaggtctagcttgtgagataccggcatcattttttcccagtctaca

SEQ ID NO: 84131 - DNA, 120 bp, synthetic construct
  source 1..120: mol_type = other DNA
ttggctgaatgtcaaacatctctggaggtctgtaaccctcacaatgatatcttcagctaccattccacactatctaccctttcgctacaggaaacaagggcctctccatgagacactgca

SEQ ID NO: 84132 - DNA, 120 bp, synthetic construct
  source 1..120: mol_type = other DNA
tgggcctttaaaggagagacaatcctgtctttgtttctcctgttctctcaattattgaatcgaagaagccaatggcaagtatggtctgagagcaaacgtagcaatagatttcaggcggca

SEQ ID NO: 84133 - DNA, 120 bp, synthetic construct
  source 1..120: mol_type = other DNA
attgatgtactacagggcagactccaagcctggaaagcaggcacataggcaatgagtggttcactgatattacgtcacagcatatgataaaatgatagtataagtatcctcagagcctgt

SEQ ID NO: 84134 - DNA, 120 bp, synthetic construct
  source 1..120: mol_type = other DNA
aaaataatcttgcaattttaaggtccttaatcttcatcacatcagtattttcccttttgccatgtaatgcaacctactcgtgggtgcccaggattgagattggacgtctttgggaaccat

SEQ ID NO: 84135 - DNA, 120 bp, synthetic construct
  source 1..120: mol_type = other DNA
gcttggggctgcctgctataaactattgggggttcgtccattttggagttataacctaaggcagaaactcagatggttcaaatgtcctcttcatgaagcaatgttatcagcgtatcattt

SEQ ID NO: 84136 - DNA, 120 bp, synthetic construct
  source 1..120: mol_type = other DNA
aaggtcattctgggccagcaagaagagggaaagggaaattacagtcatacttcagatatatgcaggtttggctccagaccatggcaacaaagcaagtcacacaaatttttcagtttccca

SEQ ID NO: 84137 - DNA, 120 bp, synthetic construct
  source 1..120: mol_type = other DNA
tgagtgctgaatgaaaccatctgagccagtttcctcatctgcaaaccagtgacataattcctgccttgcagagtttcagaagaataagtgagaaaagacacagtgccaagagaaacagac

SEQ ID NO: 84138 - DNA, 120 bp, synthetic construct
  source 1..120: mol_type = other DNA
agtgctgacttgagtgtgtgtgtgtggctgcacacgtgtgtgcatgtgtgcacaagtgggaattggagtgtgtgtacacgtgtgtaagtgtgagtgtgagagtggagcatgaatgtgcag

SEQ ID NO: 84139 - DNA, 120 bp, synthetic construct
  source 1..120: mol_type = other DNA
tgagatctaaactaagccatttgggtaaactgtctcagaatttaaagcatcagcagtcacaagctatcagtatcagtgacgattctttcactccatggtctagtccaacgagactggtca

SEQ ID NO: 84140 - DNA, 120 bp, synthetic construct
  source 1..120: mol_type = other DNA
ctgccagcacctctgtaatgtgtgtcttctttctttgtcatctctttcctgccaggaccctgactgtcccacagaagaagtgacaagaatttatttatgacatgacaataacacatgtat

SEQ ID NO: 84141 - DNA, 120 bp, synthetic construct
  source 1..120: mol_type = other DNA
attttatcacatcttcagaaaacactatgcagaagataactgtagagcaagacatctatttagggtgagtgagtcacagtggagatctgggagggagaccctgtaaccctttcattccaa

SEQ ID NO: 84142 - DNA, 120 bp, synthetic construct
  source 1..120: mol_type = other DNA
atggtcctgagtgttgctaccctgctgttctcatctgtgaatgcagccagaccactttcttcctctgatataaataacttggaggatctgtcaccagacacctcatatctacatattaat

SEQ ID NO: 84143 - DNA, 120 bp, synthetic construct
  source 1..120: mol_type = other DNA
acatttcaaatctctgctcctcatttcacaccatctggctcatgaggtgaaggtgatgagaagtgtcttcagacaatactccgaggtttgtctatcagagtcatagtcatatattacata

SEQ ID NO: 84144 - DNA, 120 bp, synthetic construct
  source 1..120: mol_type = other DNA
cacctcaggagctggacatggtattcattataatttctgatgaggaactagagaggtctcatagcatatagaccttgatcaaattgggtcatggtggagtcaggcaaaactctgcaatga

SEQ ID NO: 84145 - DNA, 120 bp, synthetic construct
  source 1..120: mol_type = other DNA
ttggcctcccaaagtgctgggattacaagcgtgagcctccgcgcccggccgcagaaacagaaaaatttaagtgatggcctttactcctagacagggcttttttaggaacatgcaccttaa

SEQ ID NO: 84146 - DNA, 120 bp, synthetic construct
  source 1..120: mol_type = other DNA
cactccagcctgggcgacagaccaagactccatctcaaaaaaaaaaaaaaaaaaagaacactaccaaaacaagggagccgaagtttagttttccctggaaggtgagcactccctgagcct

SEQ ID NO: 84147 - DNA, 120 bp, synthetic construct
  source 1..120: mol_type = other DNA
ctactgtactgagtactggactgccagtggggagtggcggatgtcttgaatttggtgaatgcctttatattgctacaaagtgttttttttttttggttgtttgttttgagacggagtctc

SEQ ID NO: 84148 - DNA, 120 bp, synthetic construct
  source 1..120: mol_type = other DNA
tatattgcagatgggcctgcaaactggaaatgttttcaggaaaggcagtatggcaatttctgtctaaattaaaaatgcatacacccagtagtcccacttctagaaatgtgtccaaaaata

SEQ ID NO: 84149 - DNA, 120 bp, synthetic construct
  source 1..120: mol_type = other DNA
attttgttcaaatcttggtctaagtgggaaagggattctaggggatccagtgcagcagttatgggtttcagtatgctcacgacgccctccagtgtttgtgtgggctcatggatgccatat

SEQ ID NO: 84150 - DNA, 120 bp, synthetic construct; identical to SEQ ID NO: 84053
  source 1..120: mol_type = other DNA

SEQ ID NO: 84151 - DNA, 120 bp, synthetic construct
  source 1..120: mol_type = other DNA
aaaacccacaggccaaaaatggctgggaaaagattttccaaatcctagtgctgggcacagggcccactgaaattcactttcggaaacttcccatctgtctcgttctcctctcatcaggat

SEQ ID NO: 84152 - DNA, 120 bp, synthetic construct
  source 1..120: mol_type = other DNA
agtaactccgtggagaaccacacatttatttgcttactttaattctacagcaacattcgaggtggcttactgcaacaaacccagtgtaataaatacatacgaattactttaaaataacac

SEQ ID NO: 84153 - DNA, 120 bp, synthetic construct
  source 1..120: mol_type = other DNA
agacccagtctctaccaaaaaaaaaaagaaaagaaaagaaaagaaaaaaatacacacacacacacacacacacacacacatactgggtgtggtggctccagtctgtagtcccagctactc

SEQ ID NO: 84154 - DNA, 120 bp, synthetic construct
  source 1..120: mol_type = other DNA
acaaagccgatttatcaaggcaggggaattacaatagagaaagagtaattcatgcagagccggccgtgcgggagaccagagttttattactcaaatcagtctccccgaaaactctgatca

SEQ ID NO: 84155 - DNA, 120 bp, synthetic construct
  source 1..120: mol_type = other DNA
tagaacgaacattcttgagactttagatctaagccagcctgatttctgaaagccttggaccgtttccaaaatcaaatcaatactccaggaacaagatctgcctcgactttgtctccatcc

SEQ ID NO: 84156 - DNA, 120 bp, synthetic construct
  source 1..120: mol_type = other DNA
ctgacctcaggtgatctgcccaccttggccttccaaagttctgggattacaggcgtgagccactgggcccagcctccttaaccttttaaaaaaggttaaaagtatgctgggcacttcttt

SEQ ID NO: 84157 - DNA, 120 bp, synthetic construct
  source 1..120: mol_type = other DNA
gccttccaggggtgaagtgttttcggaccccggaatctgtgggcggcctgcgggaggggctgaggcgcagttccctactcacccaggtccgaatccaccgcggtgctgtttccagcgagt

SEQ ID NO: 84158 - DNA, 120 bp, synthetic construct
  source 1..120: mol_type = other DNA
gagctcaagaccttcttggcctcccctagcccaggggaggactggcttcatgtctccctgaaaccgcttctaaatgccttagaacaaaccttaaatattcattattattattgaactatt

SEQ ID NO: 84159 - DNA, 120 bp, synthetic construct
  source 1..120: mol_type = other DNA
agaccactgcctagatgtcccaatgactaagaatgtgcgctggggacaagccaattctcttagtagaggctttccagacagaattcttattattgagaattgagaattcacatgccacac

SEQ ID NO: 84160 - DNA, 120 bp, synthetic construct
  source 1..120: mol_type = other DNA
tagagagtccttgtagatctgtcatattgaaggggactatggtcccagaggtacagatgtcctaaaacaggctggaaaagggagtctggagagagcttggtgttgtaatgaaccatgggg

SEQ ID NO: 84161 - DNA, 120 bp, synthetic construct
  source 1..120: mol_type = other DNA
gttttcactggataagcggtcgctgagcggggcgcaggtgactaaatttcgacggggtcttctcacgggtttcattcagttggccactgctgagcagctgagaaggtggcgacgtagggg

SEQ ID NO: 84162 - DNA, 120 bp, synthetic construct; identical to SEQ ID NO: 27571
  source 1..120: mol_type = other DNA

SEQ ID NO: 84163 - DNA, 120 bp, synthetic construct; identical to SEQ ID NO: 27572
  source 1..120: mol_type = other DNA

SEQ ID NO: 84164 - DNA, 120 bp, synthetic construct
  source 1..120: mol_type = other DNA
ggagttttgatttgccttcatctgatgacgaatgatgttgagcaccttttgatatacctgtttgccatttgtatgtcttcttttgagaaatgactattcagatcttttgctcatttttaa

SEQ ID NO: 84165 - DNA, 120 bp, synthetic construct
  source 1..120: mol_type = other DNA
ttgggaggccgagtcaggtggatcacttgagatcaggagttcaagaccagcctgatcaacatggggaaaccccgcctctactaaaaatacaaaattagccaggcgtggtggcatatgcct

SEQ ID NO: 84166 - DNA, 120 bp, synthetic construct
  source 1..120: mol_type = other DNA
tacctggaatacattccacttggtcatgaagaatgatctttttaatatactgttgaatgtggtttgctagtatttcattgatgatatttgcctcaatgttcatcagggatataggcctgt

SEQ ID NO: 84167 - DNA, 120 bp, synthetic construct
  source 1..120: mol_type = other DNA
aaacttgctgtgtgtgtgtgtgtgtgtgtgtgtgtgtgtgtgtgtgataatagccaccctgattggtttgaagtggtatctcattgtggtttggatttgcattttcctaatgagtactga

SEQ ID NO: 84168 - DNA, 120 bp, synthetic construct
  source 1..120: mol_type = other DNA
gctgaaaagatcaactgactctttgtcacctgctcaccccagtggacactagctgttccatccaattgctgtcctggggccttgtcatgctactcttccactttgaacccaagcccacac

SEQ ID NO: 84169 - DNA, 120 bp, synthetic construct
  source 1..120: mol_type = other DNA
agtaatgggaggccttctccaggaaagttggagacagagagcagggacctgtctcttcccgctggatctggctgggggtggggatgaggaatagggtcagggaggctcagcagggtggtg

SEQ ID NO: 84170 - DNA, 120 bp, synthetic construct
  source 1..120: mol_type = other DNA
ctggaggaattaggccccagggtgaggacagacttacagaaggtccggtatctgtgagggattcagccagagtgagaacagtggagaggagcagccctgttccctgcatctcccttagag

SEQ ID NO: 84171 - DNA, 120 bp, synthetic construct
  source 1..120: mol_type = other DNA
tggagaggaatccaaggagaggcgatgcccacccgtgtgcctcctccaggaggcactttccaggttcccactacctggcctccctgagtttccttgcagatgacacagatgaatagataa

SEQ ID NO: 84172 - DNA, 120 bp, synthetic construct
  source 1..120: mol_type = other DNA
aatttcagctctataatcttaataggatttcctctaatactgctgttgtaaagcatattaaataaaacaggaactcaaatttggagccccctctccagaagggtctgtgtggagatggtg

SEQ ID NO: 84173 - DNA, 120 bp, synthetic construct
  source 1..120: mol_type = other DNA
catcttctctcagagaaagggcgaatctgattttggggcaactgaagagagaaaagtccttagggaataaacacaacactgcacccagtggagcatttacccgtttccctcttctccaga

SEQ ID NO: 84174 - DNA, 120 bp, synthetic construct
  source 1..120: mol_type = other DNA
ccttgttccaaatatactcttttgtctttctctttattcccacgttcgccctttgttcagtccaatacagggttgtggggcccttaacagtgccatattaattggtatcattatttctgt

SEQ ID NO: 84175 - DNA, 120 bp, synthetic construct
  source 1..120: mol_type = other DNA
agaacctgcaggtgacagagaaggcttcccctcaactgtctcctatcaggttcttccaggcatcaaggaatagacctgggacattgcctccagtgacatgaacacacccagaagtgaggt

SEQ ID NO: 84176 - DNA, 120 bp, synthetic construct
  source 1..120: mol_type = other DNA
caccgcacctggcctgttctctttttttctctatgctcctccttgaaattttattgtctggctgagttttccatagtttgcattttgctggctccaccccaaggcatagtttaatatgga

SEQ ID NO: 84177 - DNA, 120 bp, synthetic construct
  source 1..120: mol_type = other DNA
cttgatgaaggtgttgtttatccgagtttttacttgggcaaaatccactgcccacctgtgatttgtccacctttctccatgcatgttgtccttcattcaagtttacatttctggtgtttt

SEQ ID NO: 84178 - DNA, 120 bp, synthetic construct
  source 1..120: mol_type = other DNA
tctatctctgcccaactatatacagattgtttcacagggaagtcctactaaaccttcaaagaaggttattggacttatttaaaatattcaagagaatggagcaaaatacagaaagctagg

SEQ ID NO: 84179 - DNA, 120 bp, synthetic construct
  source 1..120: mol_type = other DNA
tgcagcacttatacaccatggtacgctacccagccaaaaaaacaagaacgaaatcatgtccttcacagcaacatggatggaggtggagaccattattctaagcaaattaatgtaggaaca

SEQ ID NO: 84180 - DNA, 120 bp, synthetic construct
  source 1..120: mol_type = other DNA
ctggcttctcacttgccaacatcactctgacctggctgcaggaaggggaggagccaactctggactcaagactcaaggggaccagacccaggaagatgagacatatcagggctgggcagc

SEQ ID NO: 84181 - DNA, 120 bp, synthetic construct
  source 1..120: mol_type = other DNA
gtggcatgatctcagctcactgcaacctctgcctccccgactcaagcaattctcctgtctcaggctcccaagtagctgggattacaggcatgagccaccatgcccagctaatttttgtat

SEQ ID NO: 84182 - DNA, 120 bp, synthetic construct
  source 1..120: mol_type = other DNA
agaaatgatgtgatgaggacactcccctctatggtattcttcccttaaacccataaccccaatctaatcataaggaagcatcaggcaaacccaaagtgagggacatcctacaaattatct

SEQ ID NO: 84183 - DNA, 120 bp, synthetic construct
  source 1..120: mol_type = other DNA
acaaggaaaacatgaaacccaaagggaactgcagtgagagcacaaagattctagatactgcgagcagatggatggagggtgttctcctgagctacagaagcaatggtctagtggttaaga

SEQ ID NO: 84184 - DNA, 120 bp, synthetic construct
  source 1..120: mol_type = other DNA
ccagcctgggcgacagagttaagactccatctcaaaaaaaagagaaaaaagaaaaaccgggaatcatttgtgttgggtccagcatttgccatggacaagatgccaggacctgtatgcttt

SEQ ID NO: 84185 - DNA, 120 bp, synthetic construct
  source 1..120: mol_type = other DNA
aatggtgagaaactaaaagcttgcctgctaagatcagaacaaggcaggaatgaccctctcaacacagcttttcaacgttgtactggaagtcctagctaaagtagtaagacaagaaaagga

SEQ ID NO: 84186 - DNA, 120 bp, synthetic construct
  source 1..120: mol_type = other DNA
taggagaaaaataaagtcaaagaccaccactacctgacttagactttctataaagccatagtaatcaagacagagtggtgattagcatagccattgtgggaaacagtatggaggttctgc

SEQ ID NO: 84187 - DNA, 120 bp, synthetic construct
  source 1..120: mol_type = other DNA
ctctcttaaaaggttactgtgaaagccacctgtgacagtaacagaaagtgcccagcagggtctctgacacttagtaatgtaatctctctcactgtaatgtaatggctaaacttcaacatc

SEQ ID NO: 84188 - DNA, 120 bp, synthetic construct
  source 1..120: mol_type = other DNA
atgagggcctggctgcagtatcatcccatagtgagaggtggaagggcaaagaggctgaactgatttctatcatgccatacaatggcattaatctattcaatctaatcaaccctgaaaggt

SEQ ID NO: 84189 - DNA, 120 bp, synthetic construct
  source 1..120: mol_type = other DNA
tcatttagattgtcttgcaaaagtctcatttgttgttttttctaaatggctgctaatcttttaaattaacagatagagggccaggcacggtggttcacacctgtaatcccagcactctgg

SEQ ID NO: 84190 - DNA, 120 bp, synthetic construct
  source 1..120: mol_type = other DNA
ccccttaaacttttacaaaggttctgggttctttttccacttaagtgggaaaaagtcagctaatgaggaacgtaaagtctttggcctcatctaaaggtgctttggcccgcaagtgtgaga

SEQ ID NO: 84191 - DNA, 120 bp, synthetic construct
  source 1..120: mol_type = other DNA
gtacaaaaaactgtgtatatacttaatggagtctcgctctgtcacccaggctggagtgcagtgccacgattttggctcactgcaacctccgcctcctgagttcaagccattctcctgctc

SEQ ID NO: 84192 - DNA, 120 bp, synthetic construct
  source 1..120: mol_type = other DNA
gcatctgcaaagagcaataaagggaagcacaataaaaggtacatctgcaaaggggaatcagcacttaagcaaggtcaggatgagctttcaagtcaggtggacctagacatgaaccctcca

SEQ ID NO: 84193 - DNA, 120 bp, synthetic construct
  source 1..120: mol_type = other DNA
aagttctaccacactattggtggttctcgccatgcagcttggagaaggtgcaatactctccagctccacagctaccgctaatgtttgtaaaattcatacctaataaacactagatcaaaa

SEQ ID NO: 84194 - DNA, 120 bp, synthetic construct
  source 1..120: mol_type = other DNA
tactaccacccagaggcctatgcccaagacaggaagctacctggccttctcagtacaggtgtccttaaacgaccggttcaaaaacgaatagggaaggtggaatttctcacttccagccac

SEQ ID NO: 84195 - DNA, 120 bp, synthetic construct
  source 1..120: mol_type = other DNA
tgaaccagtcaagtgtccattatgcatcagatgcccatgacctatgtgatgggatttcggacaaacacactaaggaacagggaggacctaaagggtttcatgagatcagtactcactgta

SEQ ID NO: 84196 - DNA, 120 bp, synthetic construct
  source 1..120: mol_type = other DNA
agcagaaaaggaaatataactttacttcagcactgatttttccctaaggaagctggcctctgaggtagcacagagttcagaaatcaaaattgccagacatgctaggagatgaggatgaga

SEQ ID NO: 84197 - DNA, 120 bp, synthetic construct; identical to SEQ ID NO: 27573
  source 1..120: mol_type = other DNA

SEQ ID NO: 84198 - DNA, 120 bp, synthetic construct; identical to SEQ ID NO: 27574
  source 1..120: mol_type = other DNA

SEQ ID NO: 84199 - DNA, 120 bp, synthetic construct
  source 1..120: mol_type = other DNA
ttaaaaaaaacaaaaaaatttttttaagaaaaaaaatctaccaccccattcaggacacccctccccaacacatattgggggaaacggggcacggcacgcgttgggttcaggaaaaaaacc

SEQ ID NO: 84200 - DNA, 120 bp, synthetic construct
  source 1..120: mol_type = other DNA
ttagaggtagacttcccagtgaggtgaagattgctggaaatagtaacaacacaatggaaagagcaatggacttggaatcaagaagtgggatcagattccagctgtttgttttaaccaagc

SEQ ID NO: 84201 - DNA, 120 bp, synthetic construct
  source 1..120: mol_type = other DNA
aataaacatcatttggctccaaagaacaactccccagcattagccaagccccagcactgccactcaccgagctgttcaagcatcttatcacattcatccaaaataaagtgtttaatgtgt

SEQ ID NO: 84202 - DNA, 120 bp, synthetic construct
  source 1..120: mol_type = other DNA
gaggtggagattgcagtgaggcgagattgagccactgtactccagcctggatgacagagcgagactccatctcaaaaaataaaaaataaataaataaaggacagcaagaaatcaccagat

SEQ ID NO: 84203 - DNA, 120 bp, synthetic construct
  source 1..120: mol_type = other DNA
tgagattacaggtgtaagccattgtgcacttggccagaatcctcaatattcacacaccactggagctgttttaaagtttccggctttctctgccacataccccaaaattattaaactgat

SEQ ID NO: 84204 - DNA, 120 bp, synthetic construct
  source 1..120: mol_type = other DNA
gactaaaagttggggggggaggaagataaattagacttcagtctccagataactctacctttttcaccatgccaagcccatttcttaccactcaattctcaaagtctagtatttacctgg

SEQ ID NO: 84205 - DNA, 120 bp, synthetic construct
  source 1..120: mol_type = other DNA
tctagccttaagtataaacccttaccaccacctgagcaacgacaaacacatctttgtattgtacccttaaagagcccaatgagcactacatgcccaagagaaaatttaccttctgacgga

SEQ ID NO: 84206 - DNA, 120 bp, synthetic construct
  source 1..120: mol_type = other DNA
gctgtttaagcaagccttgtgtaattagcatgggggggaggggcggtgcaagacaaatggctcggccacaaaaaaacaaaattcatgtctccaccctacaataagaaagctaataggtga

SEQ ID NO: 84207 - DNA, 120 bp, synthetic construct
  source 1..120: mol_type = other DNA
aaaaccgtttctaacttcactgctaccgccagtaacaaaagatataaaggaaactaacgtctcccccccactgttatctttattctcttatcctactcctctccatgcccctcatctctt

SEQ ID NO: 84208 - DNA, 120 bp, synthetic construct
  source 1..120: mol_type = other DNA
tttttcctgaatgaaacatttgctatccccgtctttgagatggggagctacaaaagtaagacctgatgtcctgctgtgtaataaaacaacaaacgtttggccctctccctgttaacatac

SEQ ID NO: 84209 - DNA, 120 bp, synthetic construct
  source 1..120: mol_type = other DNA
tgcaaggtaaaggggcaaagagcacttgctcctacactccagcttttctctacagttgcgatctatagtcctcagattcccaaatgaggaaccatgtttctcactttagagaaataataa

SEQ ID NO: 84210 - DNA, 120 bp, synthetic construct
  source 1..120: mol_type = other DNA
ctgaatcactgctacaacatgcaaggaactgtgctagactttacagaatgattcctaatcattgaagcaaccctcacaaggtaggcattattatcatcccagtttcacagaggaggacat

SEQ ID NO: 84211 - DNA, 120 bp, synthetic construct
  source 1..120: mol_type = other DNA
gttaatcatactccacatagatgttatactttacacagactgtggcattccgcccacaagctctatgtggccttcaaaactcccagactctcctacatatcatcacaaagtttcaccaat

SEQ ID NO: 84212 - DNA, 120 bp, synthetic construct
  source 1..120: mol_type = other DNA
gcttacaacaggttagccatcccagtcggaaaggtctagggatgaggcaggggcggagacgggggagtactgaggtgagagaaggagaacttgattggtggtaacagaggaagcataaag

SEQ ID NO: 84213 - DNA, 120 bp, synthetic construct
  source 1..120: mol_type = other DNA
tgatgagtaacccctccccccaggttccagaggaagaagcctccacatctgtctgccgggtacatgatattcaatttctagatcattattggagattatctgtgactttttaaaactcag

SEQ ID NO: 84214 - DNA, 120 bp, synthetic construct
  source 1..120: mol_type = other DNA
ctagggaaggagttaaccaagttggcatgtggctgtcatttgtccctttacattactgagctaccattgtctgaagaacccaacattccccaaagatcaactggtcttcaaatttcacat

SEQ ID NO: 84215 - DNA, 120 bp, synthetic construct
  source 1..120: mol_type = other DNA
attacaggtgtgagccaccacacctggccttgttcctgtttttgttatcaacaggtccatactcccttaaccacaattctaaactcaaaaacactctgagaaccaacatttttcatcagg

SEQ ID NO: 84216 - DNA, 120 bp, synthetic construct
  source 1..120: mol_type = other DNA
aacagggacatgcagcttacctctgtgagcccaatttgcctcgcaaaaatgggagttttgttttttgttttgttttgtttttttgagatggagtttccctgttgttgcccaggctagagt

SEQ ID NO: 84217 - DNA, 120 bp, synthetic construct
  source 1..120: mol_type = other DNA
atggccttctaactccttggttgaaaggcccatctcattcagcttccagcttcctttttcttttccttttgagacggagtcttgctttgtcgcccaggctggagtgcagtggcatgatct

SEQ ID NO: 84218 - DNA, 120 bp, synthetic construct
  source 1..120: mol_type = other DNA
tcccaaagtgttgggattacaggcgtgagccacagcgcctggccaaaatgtttttatgtttatttttcttagtatgaaactccagcgtattaaagagcattgagaacggttgatctggta

SEQ ID NO: 84219 - DNA, 120 bp, synthetic construct
  source 1..120: mol_type = other DNA
aatcaaaaagtaaattccagcagattaaatacctgaatatgacaggaaggtacacaccaaattcatgggacagatggcctggggaggaatgaaacttggaaggcggtatcacggtaaact

SEQ ID NO: 84220 - DNA, 120 bp, synthetic construct
  source 1..120: mol_type = other DNA
ggcagagtttgcagtgagcaagatcatgccaccgcactgcagcctgggcaacagggtgagaccttgtctcaaaaagaaaaaaaaagcttttttaaagatagatagaagaaaatgtttgca

SEQ ID NO: 84221 - DNA, 120 bp, synthetic construct
  source 1..120: mol_type = other DNA
cctacagccccaccacccataggctagaatttttacatattttttgccagtctattttttttctttttttttttttttttttgagatgggagtctccctctgttgcccaggctggagtgc

SEQ ID NO: 84222 - DNA, 120 bp, synthetic construct
  source 1..120: mol_type = other DNA
gtagccagcttttttcaaacacatgcctcagttgtagtggctgtttaatattatgtttttatagttggaggccctactccttaaaacctatgaatgtaaacctcccatgcaagcctgagc

SEQ ID NO: 84223 - DNA, 120 bp, synthetic construct
  source 1..120: mol_type = other DNA
tgacaatatttttaagtgaaaagtggaatacatagtcaaagaatttgggcactgccttggtggctggaggcaggtcagaaaatgtcagttggcatggtagaacttctaggacgctgaaat

SEQ ID NO: 84224 - DNA, 120 bp, synthetic construct
  source 1..120: mol_type = other DNA
gaggacgagtggcaggaagtcatggggaggtttgaaggtgagaagtccactgctatccacagctgcccttccccactggctgctttccatctgcatgaatgcgtcacactaggctcctct

SEQ ID NO: 84225 - DNA, 120 bp, synthetic construct
  source 1..120: mol_type = other DNA
agccctaagaaggcccagtttgccatccagtctcactccactccctacactggggtcttgtccaccctgcaatctgtggctggagaaatagatgcgaacagaggcaaaaaggggaacaaa

SEQ ID NO: 84226 - DNA, 120 bp, synthetic construct
  source 1..120: mol_type = other DNA
cttggcaaaaagaaaggacagggctgcaaggagagtacagacatgtgctggtgagtgcactgtctgcatagttacaccagagcatcttatcaatcagaaacttatctttcaggttttgag

SEQ ID NO: 84227 - DNA, 120 bp, synthetic construct
  source 1..120: mol_type = other DNA
gggcaggtttggattaagttaggaaaaggatctgggagggactctgttcagtgtaggtcaactgagcattatgtagcccaaagataaatttaaaccctgcttcaagcttacaatctagtg

SEQ ID NO: 84228 - DNA, 120 bp, synthetic construct
  source 1..120: mol_type = other DNA
atagttataatgtataggtatgcctgcttagggtaataaagtgctcaatgaaggtttgaggtaccagcatgactctcaggtggagatttccagaaagcaggtctggagctcaagagaagt

SEQ ID NO: 84229 - DNA, 120 bp, synthetic construct
  source 1..120: mol_type = other DNA
gctcacccttgtaatcccagcgctttgggaggctgaggtgggcagactatagatatcaggagttcaaaaccaacctagccaacatagtgaaatgctgtctttactaaaaatacaaaaatt

SEQ ID NO: 84230 - DNA, 120 bp, synthetic construct
  source 1..120: mol_type = other DNA
cggcggtaagagattctaaaatgcagacaaagtggagttgaaattgttgaccatgcagtacatgttaaatcaacaagcaaaaccaggaaagcagaagcagccggaagtcttggtaagaat

SEQ ID NO: 84231 - DNA, 120 bp, synthetic construct
  source 1..120: mol_type = other DNA
cactgcactccagcctgggtgacagagcaataccttgtctcaaaaaacaaacaaacaaggatgatggtagggataagatgtggagaaagactgagctagttatacaagttgttaagagca

SEQ ID NO: 84232 - DNA, 120 bp, synthetic construct
  source 1..120: mol_type = other DNA
ttttccatccatcagaatcctgcttctctcccagtatctacatctcccacccatcaatccatcatctagtcctgttgtttctacccctggaatgtataatatatcccaaacttgtctact

SEQ ID NO: 84233 - DNA, 120 bp, synthetic construct
  source 1..120: mol_type = other DNA
gaccagcctggccaagatggtgtactttctctactaaaagtacaaaaattagccaggcatggtggcatgcacctataatcccagctactcaggaggctaagacaggagaatcgtttgaac

SEQ ID NO: 84234 - DNA, 120 bp, synthetic construct
  source 1..120: mol_type = other DNA
gaaatgctttgctcccaaacttttacctggtcactattttttgtcatttgggtctcagctccagtgccacccaaacactcaaagaggattttgctgactactgtatttaaaagtagctcc

SEQ ID NO: 84235 - DNA, 120 bp, synthetic construct
  source 1..120: mol_type = other DNA
gtcttacccttccttcctctgtgtctctcatgtctccccatcacccttcttgccttcccttttttgtctttcaatgtcccattcttcctctttaatttaaatttctctctgtgtctcact

SEQ ID NO: 84236 - DNA, 120 bp, synthetic construct
  source 1..120: mol_type = other DNA
aaagaaattttctgacctatctcatctgatagtaggttataagaccctcattccagaagaggttctgccctatacctgggaggaaggaatgctgtacagagagaccaagaagaatatggc

SEQ ID NO: 84237 - DNA, 120 bp, synthetic construct
  source 1..120: mol_type = other DNA
agaaatgagtacattctgtgtgatttcatttatatgatgccccaaaccaggaggaaataatctatggtgataaaagtgagagagtggttggttatctttggagggtatcagcagggaggg

SEQ ID NO: 84238 - DNA, 120 bp, synthetic construct
  source 1..120: mol_type = other DNA
atatataatggaccttcttgatgtgaaacctgccagatgggctggaaagtccgtatactgggacaagtatgatttgagttgtttgggacaaggacaggggtacaagagaaggaaatgggc

SEQ ID NO: 84239 - DNA, 120 bp, synthetic construct
  source 1..120: mol_type = other DNA
tgtctctctctctctctctctttctctgcaggttctccccatgacaccacctgaacgtctcttcctcccaagggtgtgtggcaccaccctacacctcctccttctggggctgctgctggt

SEQ ID NO: 84240 - DNA, 120 bp, synthetic construct
  source 1..120: mol_type = other DNA
gaacttggaaaaatccagaaagaaaaaataattgatttcaagaccttctccccattctgcctccattctgaccatttcaggggtcgtcaccacctctcctttggccattccaacagctca

SEQ ID NO: 84241 - DNA, 120 bp, synthetic construct
  source 1..120: mol_type = other DNA
tatggaagtcgagtatggggacccccccttaacgaagacagggccatgtagagggccccagggagtgaaagagcctccaggacctccaggtatggaatacaggggacgtttaagaagata

SEQ ID NO: 84242 - DNA, 120 bp, synthetic construct
  source 1..120: mol_type = other DNA
aaggacagcagaggaccagctaagagggagagaagcaactacagaccccccctgaaaacaaccctcagacgccacatcccctgacaagctgccaggcaggttctcttcctctcacatact

SEQ ID NO: 84243 - DNA, 120 bp, synthetic construct
  source 1..120: mol_type = other DNA
tttaaagttttggtcttgggggaggatggatggaggtgaaagtaggggggtattttctaggaagtttaagggtctcagctttttcttttctctctcctcttcaggatcatcttctcgaac

SEQ ID NO: 84244 - DNA, 120 bp, synthetic construct
  source 1..120: mol_type = other DNA
agcttagaactttaagcaacaagaccaccacttcgaaacctgggattcaggaatgtgtggcctgcacagtgaagtgctggcaaccactaagaattcaaactggggcctccagaactcact

SEQ ID NO: 84245 - DNA, 120 bp, synthetic construct
  source 1..120: mol_type = other DNA
cctacataaacaaagcccaacagaatattccccatcccccaggaaacaagagcctgaacctaattacctctccctcagggcatgggaatttccaactctgggaattccaatccttgctgg

SEQ ID NO: 84246 - DNA, 120 bp, synthetic construct
  source 1..120: mol_type = other DNA
aggagtttgaggttacagtaagctatgatcatgccactgtacccccgtctgggtgacagaacgagaccctgtctcaaaaaaataataattccaaaaacaaatatggagacggaaattgag

SEQ ID NO: 84247 - DNA, 120 bp, synthetic construct
  source 1..120: mol_type = other DNA
aagacgtgtgtcgcaactcagcatctttatcggcagcactgaagctttccattctttattttcatcaggttcaaaatcaatttccaaacagtctcctacatttttcccactgccatgggg

SEQ ID NO: 84248 - DNA, 120 bp, synthetic construct
  source 1..120: mol_type = other DNA
cagaactggaaccttcggattatttacactcttattcaggtcttggaggtccttacctatgaggtgggcagctgggagcccggggctgagatctgtttctggctcctcctctggcagctt

SEQ ID NO: 84249 - DNA, 120 bp, synthetic construct
  source 1..120: mol_type = other DNA
tctctgaactggggaagaagttgaggttagggagacaggctctcagggtggaaccaaaggggtctttagacatcttctggctcagcagagagagaaactgaggcccagggagggaaggta

SEQ ID NO: 84250 - DNA, 120 bp, synthetic construct
  source 1..120: mol_type = other DNA
gcaacaggctgagactctctctctcaaaaaaaaaaaaaaaaaaaaaaaaagagtcaagggaagaaagaccaggtccaaggaagctggaagtggctccaatcatctccccttcttggtaac

SEQ ID NO: 84251 - DNA, 120 bp, synthetic construct
  source 1..120: mol_type = other DNA
tctgtcttaaaaacaaaaacaaacaaacaaaacagtattaggccaggcgagatggctcacacctataatcccagcactttaggagaccaaggcaggtggatcacttgaggtcaagagttt

SEQ ID NO: 84252 - DNA, 120 bp, synthetic construct
  source 1..120: mol_type = other DNA
aaaacaaaacaaacaaacaaaaaaccctgaatattattcagcatggggaacatggaggatggggagaagggtgggggaggaagtagaaggttcttgaatttggaaggggaaacgcaaatt

SEQ ID NO: 84253 - DNA, 120 bp, synthetic construct
  source 1..120: mol_type = other DNA
cagagtggggtgaagctaagatgaggggagggagagtatgggtttgagtttccctgggccgtcgaggaatcctctgagtctctgctccccaaagaaattaaagacaattcatttctgtgc

SEQ ID NO: 84254 - DNA, 120 bp, synthetic construct
  source 1..120: mol_type = other DNA
gcccagaaacctggtaagaggtgaggtattaaggtctgggatggagaagctctgagggtatatttttctgcctctaaaactgttggagagggaatctgagaaagctgcaaccaaccagga

SEQ ID NO: 84255 - DNA, 120 bp, synthetic construct
  source 1..120: mol_type = other DNA
tgagggacctgacctcaggggcagagacaagagaggcaccaaggaggatccaagagctgactatgcctgcattgctgagaacaaacccacctgagcaccccagacaccttcctcaaccca

SEQ ID NO: 84256 - DNA, 120 bp, synthetic construct
  source 1..120: mol_type = other DNA
ctgacagcatagaatccagcccgaaggaggaggactgtaccagcccctagctgaggatgttctgcatggggcaatggagacgggggttggggaagaagtgcacacaggctcagggaggga

SEQ ID NO: 84257 - DNA, 120 bp, synthetic construct
  source 1..120: mol_type = other DNA
accaactctcactctcaccctctgccatcattctccagccagttcagtagtaacttgtctagctgaaatgtaaaccatcatggtgaaattaagctcattaatgaatgcagctgcctagtt

SEQ ID NO: 84258 - DNA, 120 bp, synthetic construct
  source 1..120: mol_type = other DNA
ctggccaacatggtgaaacctcgtctctactaaaaatacacaagttagccagcagtaatggcatgcacctgtaatcctagctacttgggaggctgagacaggagaatcatttttacccag

SEQ ID NO: 84259 - DNA, 120 bp, synthetic construct
  source 1..120: mol_type = other DNA
gatctctcaaactaaaaagcctcacagtgggtgacacagagagactgtgaattgggggagtccactgagtgtcacctttggagcagtcccactcctccctcagagccgtgtgtttcagcc

SEQ ID NO: 84260 - DNA, 120 bp, synthetic construct
  source 1..120: mol_type = other DNA
tcaagcaattctcttgcctcagcctcccaagtagctgggattacaggcgcacatcaccaagcccagctaaattttgtattttttgtagagacagggttttaccatgttggccaggctggt

SEQ ID NO: 84261 - DNA, 120 bp, synthetic construct
  source 1..120: mol_type = other DNA
aatcattttaaagaaatcttgtttttcggagcagtagacctcaacagtaggcttaaaatattcagtaaaccagcggggcatagtggcttacacttgtaatcccagcactttgggaggcca

SEQ ID NO: 84262 - DNA, 120 bp, synthetic construct
  source 1..120: mol_type = other DNA
ggaggatcatttgactctggaaggcagaggtttcaatgagttgagatcatgctgctgtactacagcctgggcaacatattgagaccgtgtctcaaaaaaaaacaaacaaacaaaaaaaag

SEQ ID NO: 84263 - DNA, 120 bp, synthetic construct
  source 1..120: mol_type = other DNA
aaactcctgggctcaagtgatttgcccactcgacctctcaaagtactgggattacaagcatgagccactgcgcttggccaacctcagctctacaaaaaagaaaaaaaaagtccaggcaca

SEQ ID NO: 84264 - DNA, 120 bp, synthetic construct
  source 1..120: mol_type = other DNA
aatcctcctgcctcagcctcccaagtagcttggaatactggtatgtgccatcacacctgactttttacttttatttatttttgaaagacagcatcttgctatgttgtccaggtctcaaac

SEQ ID NO: 84265 - DNA, 120 bp, synthetic construct
  source 1..120: mol_type = other DNA
aagtaattcagagctttcttttggagaagcagtcatctcatggttaagaatgctggtttggaatgagtctaggttcaaatgtcagctcccccgcaatccccacaattatgttatacaacc

SEQ ID NO: 84266 - DNA, 120 bp, synthetic construct
  source 1..120: mol_type = other DNA
ttcgagaccagtctggccaacatggtgaatccccatctctactaaaaatacaaaacttagccagacgtggtggtgcgtgcctgtaatcccagctacttgggtggctgaggcacgagaatc

SEQ ID NO: 84267 - DNA, 120 bp, synthetic construct
  source 1..120: mol_type = other DNA
actgcatccatcctggccaaggatggaacttttctaaagaaattattcccaggcactcaagaggaaaggcaacaaataaaacagtgttgaagtggatgtgcactggtctctgtttttgtg

SEQ ID NO: 84268 - DNA, 120 bp, synthetic construct
  source 1..120: mol_type = other DNA
ttttttttttttttgagacagagttttgctgttgttgctggagtgcaatggcgtgatcttggttcaccgcaacctctgcctcccaggttcaagcgattctcctgccccagcctccagagt

SEQ ID NO: 84269 - DNA, 120 bp, synthetic construct
  source 1..120: mol_type = other DNA
cattttaccatttttaacctctgtagacttttttcttgggacagagtcttgctctgttacccaggttggaatgcagtagtgcaattatagttcactgctgccttgacctcctgggctcaa

SEQ ID NO: 84270 - DNA, 120 bp, synthetic construct
  source 1..120: mol_type = other DNA
ttatggctcaatctgctatgaaacttcttgtacccatctcgcaaatgccttttcaataccctaagtgtgcaacttcacagttatttcaccttgtccactccaatcatcaccttgactctc

SEQ ID NO: 84271 - DNA, 120 bp, synthetic construct
  source 1..120: mol_type = other DNA
tccattttgcttctgaaagatcgcaggtgtctttcccttgctcttcattccactggttgctaaatccctcatcaactcaaggggaaacgagcagagttgcttctctgatgggtagtgtgg

SEQ ID NO: 84272 - DNA, 120 bp, synthetic construct
  source 1..120: mol_type = other DNA
gttttcccttcccatctctccccatctacataccttattcttttactccatttctcttccttccccatttctctctgggtgagagaatgaaggaaggctagtgactagtcacctcttccc

SEQ ID NO: 84273 - DNA, 120 bp, synthetic construct
  source 1..120: mol_type = other DNA
gatatttccactcccaggctcaaaggggtgaggggagagagaggttacagcagtggttcttagttattttgtgccacagatccctttggcattctagtaaagcataaaatttaaaaaata

SEQ ID NO: 84274 - DNA, 120 bp, synthetic construct
  source 1..120: mol_type = other DNA
ttgagaccagcctgggcaacatagtgaaaccccatctctactaaaaatacaaaaaaataatggcatgaacccaggaagtggagcttgcagtaagctgagatcctgtcactgcacaccagc

SEQ ID NO: 84275 - DNA, 120 bp, synthetic construct
  source 1..120: mol_type = other DNA
ccagcatcttcttgcatgtctattcttttcccctcatctctgtttccttctcagaaggccctgagtttccttctccacccgcttgtcttcctatatacccttcagtattcactttttttg

SEQ ID NO: 84276 - DNA, 120 bp, synthetic construct
  source 1..120: mol_type = other DNA
actgcactccagcctgggcgacagagcgagactccatccccccacaaaaaaaaaggccaggcgcggtggctcatacctgtaatcccaacactttgggaggccaaggcggtcagatcacaa

SEQ ID NO: 84277 - DNA, 120 bp, synthetic construct
  source 1..120: mol_type = other DNA
tgttttggtctccatcctggctcctggccagacctcctaaagcccttgtaatttcctaaatgataaagtgaagggagcttttgttattcataacaagctcttttcaaccacaactgagtt

SEQ ID NO: 84278 - DNA, 120 bp, synthetic construct
  source 1..120: mol_type = other DNA
actgcactccagcctggccaacagagcaagactccatctcaaaacaaaataaaacaaacaaacaaaaaaaactgagattctttgcaaagagcctggaataacttccttttagtcctggac

SEQ ID NO: 84279 - DNA, 120 bp, synthetic construct
  source 1..120: mol_type = other DNA
atgtggaggttgaagtgagccaagatcgcgccactgcactccagtctagcgacagatggagactctgtctcaaaaaaaaaaaaataagtatttttctttctagccgtatatccaccttac

SEQ ID NO: 84280 - DNA, 120 bp, synthetic construct
  source 1..120: mol_type = other DNA
agcctggccaacttggtgaaaccccatctctactaaaaatacaaaaattagccgggtatagtggtgatcgcctgtaatcccagctattcgttaggctgaggcaggagaatcgcttgaacc

SEQ ID NO: 84281 - DNA, 120 bp, synthetic construct
  source 1..120: mol_type = other DNA
ctggccacctagcacctttaatatacttatttatttgtattgtctgccttccccaattagatcaaccatgaagacaagagttttcatttgttgggttctctgggcctagaggcatgtctg

SEQ ID NO: 84282 - DNA, 120 bp, synthetic construct
  source 1..120: mol_type = other DNA
agtgtgcaaacctgatgtcagcctcactccctggctcttctgtccacaaacgctgtttctttaagtaccactttcagttcctccaaagaatctacttaaactcttaaattcctgatctct

SEQ ID NO: 84283 - DNA, 120 bp, synthetic construct
  source 1..120: mol_type = other DNA
ggagggatgagggctgattaatttttttcaccccacaggaggaaaagctttcggactgctgaaggcccagcaggaagagaggctggatgagatcaacaaggtagaaggaagaactaaggg

SEQ ID NO: 84284 - DNA, 120 bp, synthetic construct
  source 1..120: mol_type = other DNA
tgatgctgggcaagagatctgccatcctaaaaatgtgagtgtcaatttccaacctcccctgtacttacctgttttctcctcccccatccctacccttgtccacaggctcaacatttctac

SEQ ID NO: 84285 - DNA, 120 bp, synthetic construct
  source 1..120: mol_type = other DNA
ataaagtgacctatgctattgtgcctgacatatcataagccctcaataatgtttaaaacttgaatgagccggggccgatggcttatgcctgtaatcccagcactttgggaggatggggtg

SEQ ID NO: 84286 - DNA, 120 bp, synthetic construct
  source 1..120: mol_type = other DNA
gtaacaaaacggtatgtgtggtagccggccggggagaagggagaagagaatcattttggaagtttgaaaacagaagtcatcttaaatcttactgagcctctgactaaaattctcatctga

SEQ ID NO: 84287 - DNA, 120 bp, synthetic construct
  source 1..120: mol_type = other DNA
attctcccgactcagcctcccgagtagctgggatcataggcatgcgccaccacgcctgggtaattgtatttttagtagagacggggtttctccatgttggtcaggctggtctcgaactcg

SEQ ID NO: 84288 - DNA, 120 bp, synthetic construct
  source 1..120: mol_type = other DNA
tggattggtctgtctagccacctcatttgcatgacgtaatataataactggaaggccccgcccctctggtgcatttccccgctccaaccacctcctcaaactcacggcaaagggatgcga

SEQ ID NO: 84289 - DNA, 120 bp, synthetic construct
  source 1..120: mol_type = other DNA
attcaggatccgtagtctgcccctaaccacccaccgtcttggcttcagggggtgacccctgcgcctgggtccgtaactccctaccctccgctgcgctcctggcttttcacccccatttgt

SEQ ID NO: 84290 - DNA, 120 bp, synthetic construct
  source 1..120: mol_type = other DNA
agatgggatatttcaaatacttgaggttcctatagcctgggagtatgtacagccctagttgttctatgaggatttctctggtaccaacccccattccggctgagcaagctcataaaatcc

SEQ ID NO: 84291 - DNA, 120 bp, synthetic construct
  source 1..120: mol_type = other DNA
gttccctgtctttggacacgtaagaattggaggaaaataaatgtggatttgggaaactttgaggccagcttgcttcttgcaggctcatgatcaaccaatctcacataaaagtattgaatg

SEQ ID NO: 84292 - DNA, 120 bp, synthetic construct
  source 1..120: mol_type = other DNA
caaaattaatttgtccttatatttgtaaatggtagcaatgggcatgatttcagtcctgagtctccaccagttggagaagtcagggaggcatctcaggtgtgaataaccttcccattctgt

SEQ ID NO: 84293 - DNA, 120 bp, synthetic construct
  source 1..120: mol_type = other DNA
cttccacttttatagcatgtcctcaggaaatgtcttctgtctcctgttctgcatccccatcctaataggtggaagggcatcaagcctactgtcacgattctctcgagaggaatttccgac

SEQ ID NO: 84294 - DNA, 120 bp, synthetic construct
  source 1..120: mol_type = other DNA
gggtcgtccctctattctcaaagaggataatctcaaagagtttgatcagttggatcaggagaatgatgatggttgggcaggtaagtggatattaagggtcaagaatttggatcttgaaag

SEQ ID NO: 84295 - DNA, 120 bp, synthetic construct
  source 1..120: mol_type = other DNA
agtatattagttgcagctgattttaatttcactgttgatctgctcacagcagggattcccaatcagcttctggtgaggaacggccccctgaagcagatggcaaaaagggcaactccccca

SEQ ID NO: 84296 - DNA, 120 bp, synthetic construct
  source 1..120: mol_type = other DNA
tcaagcgactcgatgaaaagtttggggcacctgacaagcggctcaaagcagagcctgctgccccacctgctgccccttctaccccagctccaccacctgcagtccctaaagaactccctg

SEQ ID NO: 84297 - DNA, 120 bp, synthetic construct
  source 1..120: mol_type = other DNA
caccaccataggctcatgagaggccatgaagtgctttaatgggtcttaaatgggaggggcttcaatagaatagatgttgaatagaatattttagtcttaagggagctagagatgagacgt

SEQ ID NO: 84298 - DNA, 120 bp, synthetic construct
  source 1..120: mol_type = other DNA
atattagggtcttactgtgactctggtacgataggttttgcccatcatagtgatgagggaagggcatatgcttggcactgctgagatagctctgttgcaaaaatgggcttagttaagaaa

SEQ ID NO: 84299 - DNA, 120 bp, synthetic construct
  source 1..120: mol_type = other DNA
gtaatcccagcattttgggaggctgaggcaagaagattgcttgagcccagcagttcgagactagcctcggcaactggatgccatctctgccaaaacaaacagaaaaatagtaaaagagag

SEQ ID NO: 84300 - DNA, 120 bp, synthetic construct
  source 1..120: mol_type = other DNA
ctcaagataaccaaggggaagctagggggccccaaggagaccccacccaatggaaatctttcccctgccccaaggcttcggagggactattcgtatgaaagagtgggtcctacctcttgc

SEQ ID NO: 84301 - DNA, 120 bp, synthetic construct
  source 1..120: mol_type = other DNA
gtggaggtggagccgtaccaggtatttcagccatgtcccgcggagatctgagccagagagccaaggatttgagtaaacggagcttctcaagtcagcggccaggcatggaacggcagaatc

SEQ ID NO: 84302 - DNA, 120 bp, synthetic construct
  source 1..120: mol_type = other DNA
gtttctgcagggagcaagggtagaagaattgggaggtggagtagagaggaaaagttagggtcagtggcagagccaggcagatgctgaccctttttctctttcccagacccccactttgag

SEQ ID NO: 84303 - DNA, 120 bp, synthetic construct
  source 1..120: mol_type = other DNA
cctcctaggagaccaccacctgccccccacgatggggacagaaaggtaaaagaccaaaaaaggataaggggaatgtttccaggaatctgactttggccctacctttttctgctttttctc

SEQ ID NO: 84304 - DNA, 120 bp, synthetic construct
  source 1..120: mol_type = other DNA
agttgtgagataccactttgtcacatcatttttctccctactttttgcttctatgggtgggatggtgatcttttttcttgaccacagatactaaagctgtttcaaccgtgctcctctcct

SEQ ID NO: 84305 - DNA, 120 bp, synthetic construct
  source 1..120: mol_type = other DNA
acttgggagtagggattctgtatttcaaggtaggcagctcatgatttttttcccctcagctgcatccagtggaactaaagccgttccaggattatcaaaaactgagcagcaaccttgggg

SEQ ID NO: 84306 - DNA, 120 bp, synthetic construct
  source 1..120: mol_type = other DNA
tgagctgttgaaactaaaaacatgaccatcgtattggatctttaaatttttgtgagtctggaatttgggctgagctcagctggataaatctgcttttttgtgccagtgagcgaggtcaac

SEQ ID NO: 84307 - DNA, 120 bp, synthetic construct
  source 1..120: mol_type = other DNA
gatcgggccactgcactccagcctgggagacagcaatactctgtctcaaaaaaaaaaaaaaacaaacatcaaaactggcttgtacaatttagcgtgctgagtagaacacaacagtgttcc

SEQ ID NO: 84308 - DNA, 120 bp, synthetic construct
  source 1..120: mol_type = other DNA
ggggaaattaagagtccaggatgtggtttttacagcagaaatgccttcctaattctctttggcactagccaaaactaaagtgaatgtgcttgaacgtgctcttcaaaacgaaaggcagaa

SEQ ID NO: 84309 - DNA, 120 bp, synthetic construct
  source 1..120: mol_type = other DNA
tctttctgctccctgaacttccattggctcctcaggaagtggctgtgaaattaaagaacaccatacttcctctcagatctctccagttctctcaagtaccctgaccccatcgcccaacag

SEQ ID NO: 84310 - DNA, 120 bp, synthetic construct
  source 1..120: mol_type = other DNA
gaaaggaatagagaagggttactcacaaaactctcccgcacatactcttctagccccgtgatcaatgtgtgggttgccatctgtggaggaaacagaacaggtttagttcaaagcctcagt

SEQ ID NO: 84311 - DNA, 120 bp, synthetic construct
  source 1..120: mol_type = other DNA
gttacattctgatcttcactgcttaaagcagaagtatggtaggtatttaacagagtcaggcagcacaacttacctacctcttcctctgaacaggctgtcagaaagcagtgacactaatta

SEQ ID NO: 84312 - DNA, 120 bp, synthetic construct
  source 1..120: mol_type = other DNA
gcagtgagccaagattgtacactgcactccagcctagcaacagagtgagactccatctcaaaaaaaaaaaaaaaaaaaaaaaaagctgaaacctgaagacacaagacactacagcagccc

SEQ ID NO: 84313 - DNA, 120 bp, synthetic construct
  source 1..120: mol_type = other DNA
taactatatccttctgagatcaggcatacttcaggcccataatcccccaatcagaaagcctgcctttccctccatctaaacagggagaggtactcccttcaccacacaaacacacctcca

SEQ ID NO: 84314 - DNA, 120 bp, synthetic construct
  source 1..120: mol_type = other DNA
tgctgcgcacaaccagccaaacacaaaaaggcagaaaatatcaagctggagtccatctcactaataaaagcaataatgcctactgagaataccatgtcctccaaaactttcagttatatc

SEQ ID NO: 84315 - DNA, 120 bp, synthetic construct
  source 1..120: mol_type = other DNA
caaacgattctcctgcctctgcctcccaagtagctgggattaagttgcctgccaccacacccggctaatttttgtttttttttttttttttttttttttgagacagagtctcgctctatc

SEQ ID NO: 84316 - DNA, 120 bp, synthetic construct
  source 1..120: mol_type = other DNA
ctgcggttggggccctcctcgacactgaaggtaggggagagtcaggataccaaaggcagggtaagactgctgcagaggattactctacaggagactgaacagagaaagtatcctaactag

SEQ ID NO: 84317 - DNA, 120 bp, synthetic construct
  source 1..120: mol_type = other DNA
agagccgtcactctggggaaagggtaagggaagttgttctgggagaagccaacactaaggcctccacacctccaattcattccctggagccctacctccttttctccttaaagactgaga

SEQ ID NO: 84318 - DNA, 120 bp, synthetic construct
  source 1..120: mol_type = other DNA
cactacccgtttgtcttgaccgtgagatcattactgtgcaaacccttaaactaaagtaacagctgtcaaaatacagacaataaatttggcttggcgcggtggctcacacctgtaatccca

SEQ ID NO: 84319 - DNA, 120 bp, synthetic construct
  source 1..120: mol_type = other DNA
ccaggtaatatcacattttagaaaaccatggaccaccccacatgcaatttgtctccaagtattacaggagtaaagacacagatagctatgtccaaggctttaagctcaagagactcaagc

SEQ ID NO: 84320 - DNA, 120 bp, synthetic construct
  source 1..120: mol_type = other DNA
aaaagaaaatctggtgaccagaaaatcaagctcatctctcaggctaaggggcctaaacgaggaaaagctaaaggtgtcttccagaactagtgaggtgtctcacctgggcccccacaataa

SEQ ID NO: 84321 - DNA, 120 bp, synthetic construct
  source 1..120: mol_type = other DNA
gatagtatttggggatctcgaagcgatacttccggctccccccaggtccccaagctttacttttgtggggcacgacgagaaagtccgcagccccaaacagtgagtttctgagggcgagtc

SEQ ID NO: 84322 - DNA, 120 bp, synthetic construct
  source 1..120: mol_type = other DNA
gtcctccagaaagacacatcgctgttggggtgtccaacctttctgggattcgtagtttatacccaggtcctggttatattttagttaagagttctaataagcagctgtttaatgagcact

SEQ ID NO: 84323 - DNA, 120 bp, synthetic construct
  source 1..120: mol_type = other DNA
tggtcacccaaattttgtttgttttttaactaaatcgcaagcctcagccctcggcaaattttttgtggcagtccatgggatataaatttatcaagctaggtgtggtggctcatgcctgta

SEQ ID NO: 84324 - DNA, 120 bp, synthetic construct
  source 1..120: mol_type = other DNA
gtgaatgtgtcagtgaacactgccagggtatacatatttttctaattgtaaactaaagagagcaatccaccgtgccccagcacctgcatcatacctgttctaaagcatttaccaagttgt

SEQ ID NO: 84325 - DNA, 120 bp, synthetic construct
  source 1..120: mol_type = other DNA
aagaggaaaagtcatttaatgactctttgtcatggatccaatccccagttggaaagaggaaggcagccaacacctctacccctaaatcttgctgttttgactgatgaagaggttgaaccc

SEQ ID NO: 84326 - DNA, 120 bp, synthetic construct
  source 1..120: mol_type = other DNA
ctcaaaaaaaaaaaaaagaagctgggacactatggttggggtgatgctcattctttcctccttgccaccaccacctctgcaggaaagatgggctctgtgtgccccggaaatggatctacc

SEQ ID NO: 84327 - DNA, 120 bp, synthetic construct
  source 1..120: mol_type = other DNA
gatcctctaccacctaaactcccagctggacggtgtcagtaagaacagagtggcagtaactctcactttgtagtggtatatttaggatttgatgtgacacagttatttattgctgagtga

SEQ ID NO: 84328 - DNA, 120 bp, synthetic construct
  source 1..120: mol_type = other DNA
ccagcaccaaggcctgcaggagaccaaagaggcaggcgaagtgcaaagggtgggcagtaagtaggctcagaacagcatggagcccatgcagggcagccaggaaggacagtaggccatgta

SEQ ID NO: 84329 - DNA, 120 bp, synthetic construct
  source 1..120: mol_type = other DNA
ctcaagtgtggcaagtagtttgcttcctcttcagttctggggtaaaggggggcatacccaaattcattcaccatccacacccccacaatctgagattccaagaatctcagatctgacaag

SEQ ID NO: 84330 - DNA, 120 bp, synthetic construct
  source 1..120: mol_type = other DNA
atccaagacttcatgaaaggctttcccagaaaagaaaaaatgaggagtcttgcgacttgaacagccctcccctgcccgtctgcaaatttgaattcctggatttcacaacagtgagctctt

SEQ ID NO: 84331 - DNA, 120 bp, synthetic construct
  source 1..120: mol_type = other DNA
gacttgcatgtggctcccaggcttctgtttggcttcctcaaaatagcttccagaaaagtgaataaaccacaaatggttgatttatttctgactctcagcccgtctctcacgaagacagag

SEQ ID NO: 84332 - DNA, 120 bp, synthetic construct
  source 1..120: mol_type = other DNA
cgacagagtgagatgagtgagactttgtctcaaaaaaaaaaaaaaaaaaaaaagggacaaattgccttccttcctacttaacagtgagggatccaggctggtccaaaggtggtggtgagt

SEQ ID NO: 84333 - DNA, 120 bp, synthetic construct
  source 1..120: mol_type = other DNA
tcaagggatctcccttgtccatgtcttcctgatgctccttctgccactgcttctgctgctggtgccttcattattcttcttttctttctctttctttctctggcaggttcagtctgagat

SEQ ID NO: 84334 - DNA, 120 bp, synthetic construct
  source 1..120: mol_type = other DNA
atgcgtggcgacaacaacaacaaaaaccacaacccacattacttgagggctcgggcgtgcgcaaagctccgggttcagtttcccgcgctggaactttttcaatagtaaacgagcaaagct

SEQ ID NO: 84335 - DNA, 120 bp, synthetic construct
  source 1..120: mol_type = other DNA
tagttcgctttctctcatttagccagtttctttctctaccggggactccgtgtcccggcatccaccgcggcacctgacccttggcgcttgcgtgttgccctcttccccaccctccctaat

SEQ ID NO: 84336 - DNA, 120 bp, synthetic construct
  source 1..120: mol_type = other DNA
cagacgttccttcacatattccacttctgcactgttctcttacatgctatttgaaaacttcctatcagcaaagagtcccccctataaaccccgacgaacctgtgctaaagtggcaaaact

SEQ ID NO: 84337 - DNA, 120 bp, synthetic construct
  source 1..120: mol_type = other DNA
ggagcctggtgaggcaccctcagggttgttttgtgtgtgtgcgtgcactatttttctcttcaaatctctattcacttgcctgaattttgaaatttcctttggttctctgatttctttaac

SEQ ID NO: 84338 - DNA, 120 bp, synthetic construct
  source 1..120: mol_type = other DNA
tctttacatctacctgccaaccccttccattgtattcacctcagttggaaaagtaccagcaaggagactttggttactgtcctcgtgtgtactgtgagaaccagccaatgcttcccattg

SEQ ID NO: 84339 - DNA, 120 bp, synthetic construct
  source 1..120: mol_type = other DNA
gaaaaccaggacagatttgtgctcagtggattgggtggtgtttttagtatggagcagaacagaattcctaggactgcgtgtgatgaaatgcaaggtcaaaaggaaaagacaaagcatatt

SEQ ID NO: 84340 - DNA, 120 bp, synthetic construct
  source 1..120: mol_type = other DNA
tcccgacatccggacgtgccacttctgcctcgtagaagacccttctgtaggatgcatttcaggctcagagaagtgtaccatcagcagctcatccctgtgcatggtgatcaccatctatta

SEQ ID NO: 84341 - DNA, 120 bp, synthetic construct
  source 1..120: mol_type = other DNA
gccgcatgtacttgttcctcaatagttcaggacttttggttcttccccaggctggactcttgacacctcacccttcctgaattccacagtgcaaatatctttctgtaacaccctcagcat

SEQ ID NO: 84342 - DNA, 120 bp, synthetic construct
  source 1..120: mol_type = other DNA
gagactccgtctccaaaaaaaaggatgaggaatagaattctgtgcagatgtcctgacttggcaattttgtgtccctgcctcactgtctccaccaacccccgcctgtcctagtgttgttct

SEQ ID NO: 84343 - DNA, 120 bp, synthetic construct
  source 1..120: mol_type = other DNA
ggtttgagaccagcctgaccaacatggtgaaatcttgtctctactaaatatgaaaaattagctgggcatggtggctcatgcttgtaatcccagctacttgggaggctgaggcaggagaat

SEQ ID NO: 84344 - DNA, 120 bp, synthetic construct
  source 1..120: mol_type = other DNA
cagccccaccttggtcacctgtcaagtagggatagtgcctcagatgattgagaaaacacatgtaaatgtgcatacacaagtagaagttaaggccttttccccctcaaaaaaatatatttg

SEQ ID NO: 84345 - DNA, 120 bp, synthetic construct
  source 1..120: mol_type = other DNA
caggcagatcacttgaagtcaggagttcgagaccagcctggccaactggtgaaaccccgtctctactaataaaatataaaaattagccaggtgtggtggcatgtgcttgtaatcccagct

SEQ ID NO: 84346 - DNA, 120 bp, synthetic construct
  source 1..120: mol_type = other DNA
aaatcctctcatccccacactcataagtcaaaaaaaaaagaaaaagaaaagattcctgtagttaggcatgggtggacatgcccagtgttcaccagccatggaactccactgaagttccca

SEQ ID NO: 84347 - DNA, 120 bp, synthetic construct
  source 1..120: mol_type = other DNA
taaaatgcacatagtaataatacctgcctcagcggattgcaagtgtttagaacagtgcctagcacatattatgtgttacgtttttgctaacttaagaaaggtggggggtcggtggaagag

SEQ ID NO: 84348 - DNA, 120 bp, synthetic construct
  source 1..120: mol_type = other DNA
aaaaaaaagacaggattggagcaatgtcttatgggattatgggaacaagacttggggtgcagcttaggaggctgagagagtttccgtttgggagagtgctgggcccatgacaggagaagg

SEQ ID NO: 84349 - DNA, 120 bp, synthetic construct
  source 1..120: mol_type = other DNA
ggaggtggaggttgcagtgagccgagatctcgccactgcactccggcctgggatacagagcgagactccatctcaaaaataataataataataaatttttaaaaatcttcagattgcaca

SEQ ID NO: 84350 - DNA, 120 bp, synthetic construct
  source 1..120: mol_type = other DNA
tttgctgttggactgaacgaggggtgagggaacaggggtaggcttgcacaaggaagtggtaccattttccaagataggaaacatgtggtctgtctcaaaaaaaaaaaaaaaaaagcaaat

SEQ ID NO: 84351 - DNA, 120 bp, synthetic construct
  source 1..120: mol_type = other DNA
atgcctgtaatcccagcactttgggaggccaaggtgggggatcattcgaggtcaggagttcgcaaccagcctgagcaacatggtgaaaccccgtctctatcaaaaaatacaaaaacatta

SEQ ID NO: 84352 - DNA, 120 bp, synthetic construct
  source 1..120: mol_type = other DNA
taattaatcccgtctttgttgcgttttgctcctctcctgtccacccagcagggccagcccagggcgcgctaagagtccagagagttcgtttccatggtgacgggttccgcgaaggttttc

SEQ ID NO: 84353 - DNA, 120 bp, synthetic construct
  source 1..120: mol_type = other DNA
tttgctatatagggtgaggagtggacaggggcctgcttccacccctgggtggggattagttctgaaaacaaacacagctgctctgaaccttattgcatagggagtaatctgaagtaggct

SEQ ID NO: 84354 - DNA, 120 bp, synthetic construct
  source 1..120: mol_type = other DNA
tttcaagaagagcttcatgcactgggtttggagaagacacagaaatttagccagagactccatctaggacattagaacattgtcgcccacgttaagtatcttgctcaaaagaatggagtt

SEQ ID NO: 84355 - DNA, 120 bp, synthetic construct
  source 1..120: mol_type = other DNA
cagcctgggcaacatagtaagactccatctccaaaaaaataaaaaaaactgccaggcaacaaaccaatgggtggaagagggatttattcactgtgttccacaaggtccaaagttagagat

SEQ ID NO: 84356 - DNA, 120 bp, synthetic construct
  source 1..120: mol_type = other DNA
ctttttattaattattaggaataatccattcatgtaatgcaggatgtatgttggagaaggttaagtacagccacatgaatgaggggaaacgtgcaagaggaacagtggtgagaaggggga

SEQ ID NO: 84357 - DNA, 120 bp, synthetic construct
  source 1..120: mol_type = other DNA
ggggatacctacggaggaagtgccaggacaggtcagggctgattttttttcattcaccatccctgaaccttcctccctccttccctgtgctggtatcagtatctgtgtgtgtacactgcc

SEQ ID NO: 84358 - DNA, 120 bp, synthetic construct
  source 1..120: mol_type = other DNA
tgggataaaggtgaagggatggcagagacaaagcccttgcccaacataaaggtcctcactattcacggagaaagaaaactgaggcccccagacaaaggagtcctcctgcttccaacaatg

SEQ ID NO: 84359 - DNA, 120 bp, synthetic construct
  source 1..120: mol_type = other DNA
ctatgacaggcagagaaggtgtagaaggaagggatggtaggagaggttgttctctccagaagacggatgtgtacaatgagatctacctcctcctctcctgctagccccgcactgtgggga

SEQ ID NO: 84360 - DNA, 120 bp, synthetic construct
  source 1..120: mol_type = other DNA
tttccttggaagattaccagctggatctctttcaggaaggggactatggagatgtttttcctttctcgttttcgggtctgttatcttctgtgaccattgctattgtgtggtatgctgatt

SEQ ID NO: 84361 - DNA, 120 bp, synthetic construct
  source 1..120: mol_type = other DNA
ggttaacaaaccccaaccctgttgaggcctggggactgtgctggggaccatcccagccctagcactcacagactgtaaggcctgctttacccctgaccttcacagctttactttcctctt

SEQ ID NO: 84362 - DNA, 120 bp, synthetic construct
  source 1..120: mol_type = other DNA
acataaatatggataaaaatgactttgccataaatgatctacacaaaccatacagcactaggcccaatgagtgacagctattttacaatggagcgcccactcccagagcactcctgaaat

SEQ ID NO: 84363 - DNA, 120 bp, synthetic construct
  source 1..120: mol_type = other DNA
tggcctgtctgccctcttccaagctaagaacctaacactctgcttttctaaaaaactaagtctgacccatccccaggaggagtggctgaaggtgctagtgcttttgagtgacgggtagta

SEQ ID NO: 84364 - DNA, 120 bp, synthetic construct
  source 1..120: mol_type = other DNA
gcccggcctagctgtgtcttaatacttgactatattcgtcccccaccccctgagctcctagcactctattttgagggtttttattttctgcacagaaattttttgacatttcaaaaataa

SEQ ID NO: 84365 - DNA, 120 bp, synthetic construct
  source 1..120: mol_type = other DNA
gctcacacctataatcccagcactttggaaggccaaggcaggcagatcgtctgcagtcaggagttcaagactagcctggccaacatgatgaaaccctgtctctgctaaaaatacaaaaat

SEQ ID NO: 84366 - DNA, 120 bp, synthetic construct
  source 1..120: mol_type = other DNA
gaaaaaagaaacattgtggaatgtttctagtttagccagttcttacaggtgagggagggggaagattgttctagcagaatattccattagaagtggtagggaggaaaaattcctcaggtg

SEQ ID NO: 84367 - DNA, 120 bp, synthetic construct
  source 1..120: mol_type = other DNA
atattctagccccttgccatctggcttcagagtctccgactcctgcccataattacttcctcactgaattcctgactcttctatcctcattctcttcaactgtactactcagcattctcc

SEQ ID NO: 84368 - DNA, 120 bp, synthetic construct
  source 1..120: mol_type = other DNA
tttatattttgttctctggacttttctgtattttttcttttttcttttttttgagacagttttgctcttgttgcccaggcgggagtgcaatgatgtgctctcggctcactgcaacctccg

SEQ ID NO: 84369 - DNA, 120 bp, synthetic construct
  source 1..120: mol_type = other DNA
tgggggacagagcgagactccgtctcaaaaaaaaaaaaaaaaaaaaagaaaaccatgcccttgttgtcttcggtgttctacctcaaacatgcacatcccttttgaattttatataaatga

SEQ ID NO: 84370 - DNA, 120 bp, synthetic construct
  source 1..120: mol_type = other DNA
ggattacaggcatgagccaccacacccggccacacagaacatattttatccatcctactatttgtagccactggagttgtttccagcttaggattattacaaacaatgttgtatgctgta

SEQ ID NO: 84371 - DNA, 120 bp, synthetic construct
  source 1..120: mol_type = other DNA
acacacacctgccattccaggcatatactatacactctgagcaagatggacaacctgagggatatcatatcatatttggtgtatgacaccatgaatacagtaggtgctcagtatttgttg

SEQ ID NO: 84372 - DNA, 120 bp, synthetic construct
  source 1..120: mol_type = other DNA
gatttttgctccttttccacagcctagtttcaaatggattgcaggcgcgtgcatgtggggagaagggttagtttgagaagaaagaaaagacacctagacaatctaagaaggaaagaaaag

SEQ ID NO: 84373 - DNA, 120 bp, synthetic construct
  source 1..120: mol_type = other DNA
accgggcatggttcaataatttttttctgtctcattattggcagactctagagcgacagcggaaacgaggggtgagattaggagtacttgataagagtaaccgaaaacataaggtgtcta

SEQ ID NO: 84374 - DNA, 120 bp, synthetic construct
  source 1..120: mol_type = other DNA
agcccgggagtttgagatcgctccatgcactccagcctgggtgacagagccagaccctgcctcaaaataataacaataataattgaaaaaataaaaaaagaaagaggtaaacgaaaagct

SEQ ID NO: 84375 - DNA, 120 bp, synthetic construct
  source 1..120: mol_type = other DNA
tgaactcctgacctcaggtgatccgcctgtctcatcctcccaaagtggtgggattacaggcatgagcaaccgagtccggcctggaatattctatttatttatttatttatttatttatta

SEQ ID NO: 84376 - DNA, 120 bp, synthetic construct
  source 1..120: mol_type = other DNA
cattccaaatcatttacgggacactgactcgatacacagtcttgtgctgggttctgtggaggaccaacataaaaactcaaactcagtttcttcactcatagctgacatttcttttctttt

SEQ ID NO: 84377 - DNA, 120 bp, synthetic construct
  source 1..120: mol_type = other DNA
ctgacactagggaagacccagaggcaacgagggtccaggttatgcagtttcctttataaaataagaagaatgagtaaatgcttccagaaaagtagaaatgagtagaagagatgtgggcat

SEQ ID NO: 84378 - DNA, 120 bp, synthetic construct
  source 1..120: mol_type = other DNA
ataattttttgtacttttagtagagacgagatttcaccattttggccaggctggtatcaacctcctgacttctagtgatctgcctgcctcagtctcccaaagtgctgggattataggcat

SEQ ID NO: 84379 - DNA, 120 bp, synthetic construct
  source 1..120: mol_type = other DNA
ccaaagtgttaggattataggtgtgagccaccacgcctggccttttttttttttttttttttttttttgggatggagacttgttctgttggccaggctggaatgcagtggcacgatcttg

SEQ ID NO: 84380 - DNA, 120 bp, synthetic construct
  source 1..120: mol_type = other DNA
agcttacaaagtcttctgttggaagagcccaccagactgtggaggggaagcctctctttggggcacagggacagggcccctcactacctccctcccatccctctggtctggcccttacta

SEQ ID NO: 84381 - DNA, 120 bp, synthetic construct
  source 1..120: mol_type = other DNA
gggactgaaggaaaggaggagcattattctgtgatgtaacctacaaaaaggtttggtctcctgtcttgtagcagcagtggagggatggccctgagcccatagtactgtggggttgagggg

SEQ ID NO: 84382 - DNA, 120 bp, synthetic construct
  source 1..120: mol_type = other DNA
ttttgtgtctctgctcaagcttgggccttactggaaaaaagctttctcagaagtctcacctaaaggcttcaggctgcaggggcttaaactaagccattggcaagaaaaaggacgaaaatg

SEQ ID NO: 84383 - DNA, 120 bp, synthetic construct
  source 1..120: mol_type = other DNA
ctggagaagggccattggaccagagtcctacctgaagtgccaatactgatgccacaagcttcatcgtcccgacactcggtgggaacagggtggcagggtttggtgaagccacagatgtag

SEQ ID NO: 84384 - DNA, 120 bp, synthetic construct
  source 1..120: mol_type = other DNA
cataaaaagagtgagacaaaaagccagacccagcagcagggaagttgagggggtcagtgaaaaagttaagtaaatggcaccagagacagataggaaaatagaaattgacattgaccaaag

SEQ ID NO: 84385 - DNA, 120 bp, synthetic construct; identical to SEQ ID NO: 27575
  source 1..120: mol_type = other DNA

SEQ ID NO: 84386 - DNA, 120 bp, synthetic construct; identical to SEQ ID NO: 27576
  source 1..120: mol_type = other DNA

SEQ ID NO: 84387 - DNA, 120 bp, synthetic construct
  source 1..120: mol_type = other DNA
agttgagaccagcctgggcaacatagggagaccctgtctctacaaaaaacaaacaaacaaacaaacaaacagattaaaaaattagttgggtgtggtggcacatgcttgtagtcctagcta

SEQ ID NO: 84388 - DNA, 120 bp, synthetic construct
  source 1..120: mol_type = other DNA
aagcaagaatactgcagaagtgatgttgcatccttcttgctgcatcacatcaggagtttacaaggtcaatgcattaactttgatcacttggtttcagggaggtgttttttgagggggctg

SEQ ID NO: 84389 - DNA, 120 bp, synthetic construct
  source 1..120: mol_type = other DNA
ttcttggcaatacatcaggggtgtggcctaaatttaggatatgagttgttgtgtgccacctggagacactggaagggaggatgaagacctgaaaaacctgtttctccattttccccagcc

SEQ ID NO: 84390 - DNA, 120 bp, synthetic construct
  source 1..120: mol_type = other DNA
ttctcttttcttagtctgatcttccttctgcacatccttacccaccactcccccagtcctggttctatcacttgctggccatggacctgttactgtctctgttttttgtttttttgtttt

SEQ ID NO: 84391 - DNA, 120 bp, synthetic construct
  source 1..120: mol_type = other DNA
gtttggaggtgagtcaagagggacagaactatgaagaaaaacatggggctggagatagatggaatgtgaggaagataccatggggaaagaatgtggatggtgaaggaggagatggaaact

SEQ ID NO: 84392 - DNA, 120 bp, synthetic construct
  source 1..120: mol_type = other DNA
gagagaaatgggtctttcttggaggtggggaggatggatggagacctggctttttgagaaatagagcaaggaggctgtcatagggaagcctggtcttggtggcacaggagagctgagcca

SEQ ID NO: 84393 - DNA, 120 bp, synthetic construct
  source 1..120: mol_type = other DNA
aaacctgccaacttgggcagggtaccaagccaggaggaacagcatgggcacagagaggtgaggtagaagctaaaataagaatagaaatagtaggccgggtgtggtggctcacacctgtaa

SEQ ID NO: 84394 - DNA, 120 bp, synthetic construct
  source 1..120: mol_type = other DNA
agttgtgatagacgcagaggggctgaagcaagataagggccgcctagtagggtgggttgtgtgtgggaagatccaggatggctggagtgcagaacagagaagagaaagaggagacgggat

SEQ ID NO: 84395 - DNA, 120 bp, synthetic construct
  source 1..120: mol_type = other DNA
ggtagagtctaagttgtttccggtctgagccttcaagttgctgggctgtccttggcgtggcgagtcccaggagaaccagtgagacaagactggtggttctcaaagactcatatgtccctt

SEQ ID NO: 84396 - DNA, 120 bp, synthetic construct
  source 1..120: mol_type = other DNA
ctctcctataacctccatgtctccctcaccaccagtgtcctctctatacccaatcaagccctagctccttttttttttttttttgagacggagtctcgctctgttgcccaggctggagtg

SEQ ID NO: 84397 - DNA, 120 bp, synthetic construct
  source 1..120: mol_type = other DNA
caaaatgtctttgcccagtgcaattccttcttcctgtattacccctttccctccttcacactatctgcctggctaattcttatttatccttagttcaagtatggccttttctgggaaggt

SEQ ID NO: 84398 - DNA, 120 bp, synthetic construct
  source 1..120: mol_type = other DNA
acctcaggctgagccaggccactcttccagccagctcagagtggccccacccaggcttctagagaaggtacccttccttcctcccactaggaaagcctgaaactcttttctctgatggtg

SEQ ID NO: 84399 - DNA, 120 bp, synthetic construct
  source 1..120: mol_type = other DNA
cgagactggcacagtggagacggcgaagtcctagggagagcgaagggaggtattcaggggcgcgggaggggtgatggggtatcttcaaacataggctgctctctgcctctcatttcctca

SEQ ID NO: 84400 - DNA, 120 bp, synthetic construct
  source 1..120: mol_type = other DNA
tccaaccgctcggatttcttagttttcttgtttcttcacctgtctgggagaagaaacagaaaaggaggagacagagaaaaagacatgcagacaagggcgttgggggtggttaagagcgcc

SEQ ID NO: 84401 - DNA, 120 bp, synthetic construct
  source 1..120: mol_type = other DNA
ccccccgaggacagagttggtggagaagggagtccccgtcttcaagcctcggggactgggagctctggcttttagcgcgggtccttgtgtaggcgagctcatatactacgatggggcagg

SEQ ID NO: 84402 - DNA, 120 bp, synthetic construct
  source 1..120: mol_type = other DNA
ccaggccgacatgataaaaccagctcaactcctcactgtcttgtactgtcgttagccttccttctcacttactgaaatcctggcttttaataaccagccatttttcctgagtttttaaaa

SEQ ID NO: 84403 - DNA, 120 bp, synthetic construct
  source 1..120: mol_type = other DNA
gacttacatcatggaatataattatctcaagcagtggtcttgttagcaatgactgctgcaaaggactggggtggggtctgccattggtagcaatttatgaaaaccaccctaagaaagaaa

SEQ ID NO: 84404 - DNA, 120 bp, synthetic construct
  source 1..120: mol_type = other DNA
ctctactaaaaatacaaaaattagctgggcgtggtgatgcacgtctgtaatcccagctactcaggaggctgaggcaggagaattgcttgaacccggcaggcagaggttgcagtgagctga

SEQ ID NO: 84405 - DNA, 120 bp, synthetic construct
  source 1..120: mol_type = other DNA
ttccatttctgcaaactgtctgtttcccagaatctccctgctccacctctccactttctgagtgcccctatacctgggagggcacagcactgcctccagaaattcctcaatcttgttggt

SEQ ID NO: 84406 - DNA, 120 bp, synthetic construct
  source 1..120: mol_type = other DNA
tgccctctaattagcaagtggtgacctcattggcccaagggacacctccccctaagctgagggtgattcatctctctgtctccggcttccttcctgtcaaggatgtgggggaagggacag

SEQ ID NO: 84407 - DNA, 120 bp, synthetic construct
  source 1..120: mol_type = other DNA
ccagtcctggggatattcaatgccacccgatcacctctccagctctgcttttcaaactccgatcccagtctcctgttttgttccgcccctccaaagcttcccaatttacttgctctcact

SEQ ID NO: 84408 - DNA, 120 bp, synthetic construct
  source 1..120: mol_type = other DNA
aggatggggatgggggtgttaaggaggagtcctgaaaacctccttgtttctccgacctctcctgaacacaggactcttttctgcctcagtttccctgcttcattaatctgagtacaaccc

SEQ ID NO: 84409 - DNA, 120 bp, synthetic construct
  source 1..120: mol_type = other DNA
aaagaaagatcagacagaatagtgggagtagagtccttggggacacctaaataaataagcagggaggacataggaggagcagctctctctccagtaaccttgatttctattaaaccttta

SEQ ID NO: 84410 - DNA, 120 bp, synthetic construct
  source 1..120: mol_type = other DNA
ggtaaactagtccctaatctcttcacaccccagattggaaggtgggtccctccctgacactccccagagctgtcaccaacctcctccaagtttctatagctccattgctcaacagatttg

SEQ ID NO: 84411 - DNA, 120 bp, synthetic construct
  source 1..120: mol_type = other DNA
aacaggcacggtagggctgagacagaagtcctgcttgtttccgcttatttatttgaaacaccgctcatttaggtcttactttgtttgccaggcactgttctaagctctgtataaatatta

SEQ ID NO: 84412 - DNA, 120 bp, synthetic construct
  source 1..120: mol_type = other DNA
agctggccgaggtctctgaggggagtagaaacttgaatggagagttgatgggaagttagaataaaagagggttgggagccgggcgcggtggctcacacctgtaatcttagcactttggga

SEQ ID NO: 84413 - DNA, 120 bp, synthetic construct
  source 1..120: mol_type = other DNA
aagtgctgggactacaggtgtgagtcaccacgcccagccatgttttacttacattaactcacctcactgtctagcatattttgtgttgctgtaaggaaatacctgactctgagtaatttg

SEQ ID NO: 84414 - DNA, 120 bp, synthetic construct
  source 1..120: mol_type = other DNA
tggccacaaatatatatgacgtatttacaatgtttcaggtgcttcagattcagccctgggcaaatcagtcatgtctgttctccaggggtttacagcctagtgacaacatccagaacatcc

SEQ ID NO: 84415 - DNA, 120 bp, synthetic construct
  source 1..120: mol_type = other DNA
atcaccaaaccaaaaggcactgcctcagtgacccttattatgatccataaggcacttctataactttcctaggtttacaataagaacaggagtgtactatcctaattagatattaaggca

SEQ ID NO: 84416 - DNA, 120 bp, synthetic construct
  source 1..120: mol_type = other DNA
aaaggaagtggagttgtggaacgaactcagactgcttcctgcttttttgttttctgtcctcaggactcatctggtgaacatagatcaagacacttacaggtaaagaggtggaggcatgct

SEQ ID NO: 84417 - DNA, 120 bp, synthetic construct
  source 1..120: mol_type = other DNA
cttgagcatcttcccatactttgtggctgtacagtgttgttgcatatcagccattactttaccaattctgtgttccttccctgggtttgtatgaatgtttctactagttgggtacctgtt

SEQ ID NO: 84418 - DNA, 120 bp, synthetic construct
  source 1..120: mol_type = other DNA
ggccgtccagttttttacatatgtgtgttgggctcttgagttttttgtttgtttgtttgttttttagatggaatcttgctgtgtcacccaggctggagtgcagtggtacaatttaggctc

SEQ ID NO: 84419 - DNA, 120 bp, synthetic construct
  source 1..120: mol_type = other DNA
cccacacatactacacactaatgcatgaattccatatgcacactacatactaaagcctactaatggcagtatacagattctcacatacaccaccccacctagtagtagtaaagcaactgc

SEQ ID NO: 84420 - DNA, 120 bp, synthetic construct
  source 1..120: mol_type = other DNA
taatttttgtattttcagtagaggcggggtttcaccatgttggtcaggctggtctcgaactcctggtgatccgcccacctcggcctcccaaagtgctgggattacaggcatgagtcactg

SEQ ID NO: 84421 - DNA, 120 bp, synthetic construct
  source 1..120: mol_type = other DNA
caggtacctgtaaggagttgatgtgcaccttctttgtgctcacatagtgcttgtttatgtttttctagttgcactgtcacatcatgttagaattagcagtcagtgaatctgcttgcctcc

SEQ ID NO: 84422 - DNA, 120 bp, synthetic construct
  source 1..120: mol_type = other DNA
tgttaaatttacagtttggtttaactaaagtctctcccagtacgagcagggcgtgagtcagagatacctaagtgtttagtgcagcgcatgtgctttctaaagtggggatggctatttaca

SEQ ID NO: 84423 - DNA, 120 bp, synthetic construct
  source 1..120: mol_type = other DNA
accactgcactccagcctggacaacagagcaagactctgtctcagaaaaaaaaaaaaagatgtaaataataatactatcgggccaggtgcagtggcttatgcttgtaatcccagcacttt

SEQ ID NO: 84424 - DNA, 120 bp, synthetic construct
  source 1..120: mol_type = other DNA
gggcagatcacgaggtcaagagatcgagatcattctggccaacatagtgaaaccctgactctactaaaaatacaacaattagctgggcatggtggcgcatacctgcagtcccagctactc

SEQ ID NO: 84425 - DNA, 120 bp, synthetic construct
  source 1..120: mol_type = other DNA
agaaaacagcggctgtaaccttgtctgactgtagctgattctgaaacgcatgaagttgtcccacaccaaggtcagcgactggcaggttctctacaaggtaaggccttccttcttgaatcc

SEQ ID NO: 84426 - DNA, 120 bp, synthetic construct
  source 1..120: mol_type = other DNA
ggttttgttgtcgtttgtttgtttttttaaataaggtcctgctttgtcacccatactagagcagagtggtgcagtcatatttcattgcagcctctaacttctgggctcaagcaatcctcc

SEQ ID NO: 84427 - DNA, 120 bp, synthetic construct
  source 1..120: mol_type = other DNA
ctcagatgatctgcctgccccggcctcccaaagtgctgggattacaggcgtgagccattgcacctgaccaattttttattttttgtagagacaggatctcactatgttgctcaaggtggt

SEQ ID NO: 84428 - DNA, 120 bp, synthetic construct
  source 1..120: mol_type = other DNA
tgtactatttggttgccaagtgatagaaatcatatagaaatacagaaaattgcttgatatttcccccactcttttttttttgagacagagtcttgctctgtcaccaggctggagtgcagt

SEQ ID NO: 84429 - DNA, 120 bp, synthetic construct
  source 1..120: mol_type = other DNA
tttagagtttgcacaaccctctatcaaagcacctaccacctcacttttaaatcttctgcatgtatttctgtcttccttcctagactgtgagcacatctgggacagggaccatatcttttt

SEQ ID NO: 84430 - DNA, 120 bp, synthetic construct
  source 1..120: mol_type = other DNA
taagaaacagtacttatctcctcaggtggactttgagggcagccttgctgaaaatcgcttcacagtcctccccaacatagatcctgaaattgatgagagtgagtgttgggtgtggatggg

SEQ ID NO: 84431 - DNA, 120 bp, synthetic construct
  source 1..120: mol_type = other DNA
ctgcactatcgtagtgcccgaaccaaggagctggatgcattgctgggggacctgcactgcgagatccggggtgaggaaaagccagaggttatatgcattgtaagatgtttaaaaaaagca

SEQ ID NO: 84432 - DNA, 120 bp, synthetic construct
  source 1..120: mol_type = other DNA
cctcttcactgattctaaattagcccacagggctatggtcaggattcggggaggagagacagagtcagtgtgtctgttacctatttctcctgtttcaccctgtccatttctctttgatgt

SEQ ID NO: 84433 - DNA, 120 bp, synthetic construct
  source 1..120: mol_type = other DNA
aggatgaaggagcatgacagtgaggctgggcctctggaatggaatagggctgtgtgggcagaaaagaaatagaacacgagacagggaaaggcagtgcaagtgcagaggggcatatggggt

SEQ ID NO: 84434 - DNA, 120 bp, synthetic construct
  source 1..120: mol_type = other DNA
ctcccctctgcccagggatttggttgtccattctgccataaatcttgcgattttctctcttcttcagttgccagacattagtggataagtttatgaaactggatttggaagatcctaacc

SEQ ID NO: 84435 - DNA, 120 bp, synthetic construct
  source 1..120: mol_type = other DNA
gagcttcttcctttgggtgagtatcagcccaacaagaggtcccaggggaactctctcaatagatctgccctttatatttccattcaacttgagggcccacagtgttcccgcctgcctccc

SEQ ID NO: 84436 - DNA, 120 bp, synthetic construct
  source 1..120: mol_type = other DNA
agattcaaaaggtgaacatctgtttgcagaatctgattcatgagaaggtgagtttattgttttcagtttagacttttgggaagttggactagagaggggagttgttggggtcagtgctgg

SEQ ID NO: 84437 - DNA, 120 bp, synthetic construct
  source 1..120: mol_type = other DNA
agtgatcctcctgcctcagcctcccagagtgctgggattacaggcgtgagccactgcacccagccccagtctcgaagtttctaagaaaggaaagggatgtgatggagaaagaaaaccttc

SEQ ID NO: 84438 - DNA, 120 bp, synthetic construct
  source 1..120: mol_type = other DNA
accctgtgatggaaagtagtggttcctcacctgcggggctggggccgataccaggagccggaggaaagcatgagtcgggggtactgggttggcttctcgtccccctgcagtcacagtcac

SEQ ID NO: 84439 - DNA, 120 bp, synthetic construct
  source 1..120: mol_type = other DNA
ctggggagtatggatgggaaaataggttaccttcgaggggtattgatggggagcatcaggagggagttctggggtgctggaaatgttctatatcctgaactgggtgtattatatgaaatc

SEQ ID NO: 84440 - DNA, 120 bp, synthetic construct
  source 1..120: mol_type = other DNA
accacaacaggagggtccaggggaagagtcaccttgagggattggcaggaccagaaaatggggaagaagatgaggtatgggatgaggaacaaagaagaaaggggagatagaaagaaacca

SEQ ID NO: 84441 - DNA, 120 bp, synthetic construct
  source 1..120: mol_type = other DNA
aatcccagcactgtgggaggccaaggtaggcggatcacttgcggtcaggagtacgaaaccagcctggccaaaaaaacggtgaaaccccggctctactaaaaaaatacaaaaattagccag

SEQ ID NO: 84442 - DNA, 120 bp, synthetic construct
  source 1..120: mol_type = other DNA
tggtgagaaaggcatccttgggggaggcatccgtgaagacaaagatatctgagagtggaggtgtgtgcagcagggccagctggcagggaaggcaacgaccagtgttaacaatggcagtag

SEQ ID NO: 84443 - DNA, 120 bp, synthetic construct
  source 1..120: mol_type = other DNA
ccctgaaaaaaatggtggcatttcctgtaggcctttattggctacatgtgcgtatataaaaaaaaaaatggtcacacctattatcccagcactttgagaggctgaagtgggaggatcact

SEQ ID NO: 84444 - DNA, 120 bp, synthetic construct
  source 1..120: mol_type = other DNA
tagctagttatctcagatgcttcccagaagcctggccccaacaaccccatcttgataccaatctctgtctataggaaatggagagaattgaaaatggcggccgggcacggtggctcacac

SEQ ID NO: 84445 - DNA, 120 bp, synthetic construct
  source 1..120: mol_type = other DNA
ttctttcttttcttttttttttttttttttttttttttttgtgacagagctttttgctcttgttgcccaggctggagtgcaaaggcacgatctcggggctcaccgcaacctctgcctcct

SEQ ID NO: 84446 - DNA, 120 bp, synthetic construct
  source 1..120: mol_type = other DNA
ttggggaaagggatctggagagtggaggtcaaaaacccactgcctcctaagaaaatgaggccctttcaggcctggcctgaccctctcacccctcagcaagggttcagcaagaaatgatga

SEQ ID NO: 84447 - DNA, 120 bp, synthetic construct
  source 1..120: mol_type = other DNA
tgccatagcaaaggcatacgggcctacaggacagagatcctgtaagggaatgactttctccccttacttctggggaactttcttgtctggtacctggaggtttcgggggatgagttccaa

SEQ ID NO: 84448 - DNA, 120 bp, synthetic construct
  source 1..120: mol_type = other DNA
cacccagttgctatgactgtagaaatcctggtccggaggacaggagaaggggagtgaggcactagtctggcctttctcaccatctccagcactaatatgccactcctttgagttccccat

SEQ ID NO: 84449 - DNA, 120 bp, synthetic construct
  source 1..120: mol_type = other DNA
ttggattgactgttgcccaccttatctcagcaactgacactcaaggctgggtatgagggtcctgagccccacaaaggagggacagtcccggacctttctaaggagggggactcctaattt

SEQ ID NO: 84450 - DNA, 120 bp, synthetic construct
  source 1..120: mol_type = other DNA
cccaaggattcaggcacccagcccctctgctcccctctctgcccccaccacagacgacaagaggattttgtgggaaaatattttattgctgccatccccatggtgagccgctgggggtga

SEQ ID NO: 84451 - DNA, 120 bp, synthetic construct
  source 1..120: mol_type = other DNA
agggttgggtacagagtccagcttccagaccaggattggtttttgttttgttttgttttttttccagacagggtcttctctctgttgcccaggctcaagtgcagtggcatgatctcggct

SEQ ID NO: 84452 - DNA, 120 bp, synthetic construct
  source 1..120: mol_type = other DNA
atccgccacttccaggaaacctgccagggagggagaaaggtgaggcctagctccatggagacaggaaaccaagcagtcactgccggacactgggtcccagagtaggctgaggggacagtg

SEQ ID NO: 84453 - DNA, 120 bp, synthetic construct
  source 1..120: mol_type = other DNA
atgggcaaatcttcatccagagtctgatgagtccaaagcaaccacctatgtgccaggatctgggaagaagtgacaggccccagcccccaatgcgctgggctttccctttaactgtctgtc

SEQ ID NO: 84454 - DNA, 120 bp, synthetic construct
  source 1..120: mol_type = other DNA
cccgaccaggactgtgtctggtctaccccactgtgaacctcaggtcccactgagtgtccccaagagctcgttgagcgcctttatgtgaatcagaagcactccttcctctgggaagatgaa

SEQ ID NO: 84455 - DNA, 120 bp, synthetic construct
  source 1..120: mol_type = other DNA
gctgggtcactgacagtgacaaagtaggctgggatgcgatggccccaccacagctgcctggaaatgcaccactccctgcaaatgtcggggaggagaaatcagggagggcctgatggagcc

SEQ ID NO: 84456 - DNA, 120 bp, synthetic construct
  source 1..120: mol_type = other DNA
cttgtctaatacagtcccttgagaaccaccccaagctctgtctatttggctgaagcttattttctttttctctgagagaagatggacagctagggtgcagctccagtcttttcctctccc

SEQ ID NO: 84457 - DNA, 120 bp, synthetic construct
  source 1..120: mol_type = other DNA
atgttggccaggctagtctcgaactcgtgaccttatgattcacctgcctcagcctcccaaagcgctgggattacaggcatgagccaccgtgcctggctatttaactttttaaaaatgcac

SEQ ID NO: 84458 - DNA, 120 bp, synthetic construct
  source 1..120: mol_type = other DNA
gagtactttccttctttccttgagggggagagaggactaagggaacacaagagcaggcaacaagccttgtaatgctgcagatggcgaggaagacaatcagctggggacaagtactggtgc

SEQ ID NO: 84459 - DNA, 120 bp, synthetic construct
  source 1..120: mol_type = other DNA
aaagcagaggcttcaggcaaggagtcagtggactaaataaagaagcagggaggccggacgcggtggctcacgcctgtaatcccagaactttgggaggctgaggtgggtggatcacctcag

SEQ ID NO: 84460 - DNA, 120 bp, synthetic construct
  source 1..120: mol_type = other DNA
gaggctcctgccaaacaggatagcaaaagttctaattgttaaaataagttactaaacaggaacaaaatagtacctggaaacagatacaagcaaatttagtgtttgtgaaagttggcactt

SEQ ID NO: 84461 - DNA, 120 bp, synthetic construct
  source 1..120: mol_type = other DNA
tcaattaaaaaaaaaaaagtagtcattctgttttcatgtaaacaaacttggaggccaggtatggtggttcatgcctgtagtcccagcactttgggagactgaggcaggaggattgcttga

SEQ ID NO: 84462 - DNA, 120 bp, synthetic construct
  source 1..120: mol_type = other DNA
aaaccgagagagactctgtctcaaaaaaacaaaaaaaacaaaaaaaaaaacaggccaggcgcggtgggtcacgcctgtaatcccagcactttgggaggccgaggtgagcagatcatgagg

SEQ ID NO: 84463 - DNA, 120 bp, synthetic construct
  source 1..120: mol_type = other DNA
tcagaaaggtacaaagtaaaacaacagaggtatttttttgcccatcagattggcaaaactaattaggcaaccctaatgctcaggcttagcaagggtggggaaatgaacactctcacagca

SEQ ID NO: 84464 - DNA, 120 bp, synthetic construct
  source 1..120: mol_type = other DNA
aatcgcttgaacctaggaggtggaggttgcggtgagccgagatcatgccactgtactccagcctgagcaaaaagagtgaaactctgtctcaaaaaaaaaaaaaaaaaaaaaaaaaaaaag

SEQ ID NO: 84465 - DNA, 120 bp, synthetic construct
  source 1..120: mol_type = other DNA
aattaaataaagaaagaagggatagaagagagtctgcaagtggcggtgttgcatgggagtactggactaggagaggaagctaaatgatcagattggaatgacagagagaagtgtagcacc

SEQ ID NO: 84466 - DNA, 120 bp, synthetic construct
  source 1..120: mol_type = other DNA
ttctgcttctgttggaatttctctagcttctcccgtttctttgcctctttcttgagctgagcagctgtctttgggagggcaggagcctcggggcctagagagaggtgcagaaattcagac

SEQ ID NO: 84467 - DNA, 120 bp, synthetic construct
  source 1..120: mol_type = other DNA
accatcctggctaacatggtgaaacctcatctctactaaaaatacaaaaaaaaaatagccaggcgtggtggcgggcgcctgtagtcccagctactcgggaggctgaggcaggagaatggc

SEQ ID NO: 84468 - DNA, 120 bp, synthetic construct
  source 1..120: mol_type = other DNA
cagaagagagggactctattttatttgtttgtttggacagacattctgaatgcaaggactctattgtagatagggtgatcacaatatgagggagcaagtcagggtctgccacattcattc

SEQ ID NO: 84469 - DNA, 120 bp, synthetic construct
  source 1..120: mol_type = other DNA
cccatagcgagcggctatgagggctcggaggctggggaaggcatctgggtgaggggagacgtagagggtggacatagttatgagaaggtccgaacgaagtggaaaaacctaaggagaaag

SEQ ID NO: 84470 - DNA, 120 bp, synthetic construct
  source 1..120: mol_type = other DNA
gaggtccatttgccgaggccctggcgtccagcttcctctttgagcctcatctcctcatgtatgaaaaaagggtgacggccgggcgcagtggctcacgcctataatcccagcactttggga

SEQ ID NO: 84471 - DNA, 120 bp, synthetic construct
  source 1..120: mol_type = other DNA
aactgatttggttggattggtgaagtctggtagcatgaaatgtatcttatgacactatcacattaatggaaggacagcaagcactccagttgcaggtatggtataagcaaaaggccacag

SEQ ID NO: 84472 - DNA, 120 bp, synthetic construct
  source 1..120: mol_type = other DNA
tcctcttctccacagaccccaactcaccatgtgagggtatttctcagggtctgtgacactgatgtcagttagtttgatgttgagatactaggaaaggaagatgaacaccattattattat

SEQ ID NO: 84473 - DNA, 120 bp, synthetic construct
  source 1..120: mol_type = other DNA
cccaaagtgctgggattacaggtgtgaaccactgtccccggccaaaccaacctattcttaacagctaccattaaacaactggtaaaggctagacctgtattctatatagtatttgtaatc

SEQ ID NO: 84474 - DNA, 120 bp, synthetic construct
  source 1..120: mol_type = other DNA
ttgaggaatgctatcaaaacaccagtgctctttgagagaatggtgcaaaaatttaaaaaaacagcctttggctgggaatggttgttcacgcctataatccaagcattctgggaggctgag

SEQ ID NO: 84475 - DNA, 120 bp, synthetic construct
  source 1..120: mol_type = other DNA
aagactccgtctcaaaaaaaaaaaaatacaaaaattagctgggcattgtggtgtgcacctgtaatcccagctactcaggaggtgaggcacgagaatcacttgaacccaggaggaaaaaaa

SEQ ID NO: 84476 - DNA, 120 bp, synthetic construct
  source 1..120: mol_type = other DNA
gcaacagagtgagaccctgtctcaaggaaaaaaaaggagaaagatcttctttctcatcccaacagaaaagtcactttaaagccacacacatattggctcacacctgtagtcactgcactt

SEQ ID NO: 84477 - DNA, 120 bp, synthetic construct
  source 1..120: mol_type = other DNA
aacccgggaggcagaggttgcggtgagccgagatcacgccattgcactccagcctgggcgacagggcaagactctgtctcaaaaacaaaataaaataaaaaaaataaaggtactttaggg

SEQ ID NO: 84478 - DNA, 120 bp, synthetic construct
  source 1..120: mol_type = other DNA
cactgcactacagcctggacaacagagtgagacccccatctcaaaaaaataaatgtggaagacgcttttgggaagagaatacaattgatcccatctttctaaaggataatgaggtaacag

SEQ ID NO: 84479 - DNA, 120 bp, synthetic construct
  source 1..120: mol_type = other DNA
ttcggatattatttttctttctttaagcacctatcatataactggcctatgctaggtattagatacactacatggtttcaccatgttggccaggctgttctcgctctcttgacctcgtga

SEQ ID NO: 84480 - DNA, 120 bp, synthetic construct
  source 1..120: mol_type = other DNA
gattacaggcatgagccacacgtccagcccgtgagccactgcgcctgacctgtatttactctttaaactatatattgctttgtattgttttccaatacacgatacaatctctaagcttat

SEQ ID NO: 84481 - DNA, 120 bp, synthetic construct
  source 1..120: mol_type = other DNA
atatcccatttgttctcagtgcctcctcaatgaacctgagaaacagtacagtactaaagatgaagataaaaactccggacctaactccagcctaggggtacaaaggccagatcccccgcc

SEQ ID NO: 84482 - DNA, 120 bp, synthetic construct
  source 1..120: mol_type = other DNA
acagagcaagactccgtctcaaaaaaaaaaaaaaaaaaaatgaccgggagcagtggctcacacctgtaatcccagcactttgggcggccaaggcaagtggatcgcctgaggtcaggagtt

SEQ ID NO: 84483 - DNA, 120 bp, synthetic construct
  source 1..120: mol_type = other DNA
tcggcctcccaaagtgctgggattacaggcgtgagccactgtgcccagctggtaaaaatattttttcatggactgagacttcataaaacttgtatttgtcatcttgcatagacatactta

SEQ ID NO: 84484 - DNA, 120 bp, synthetic construct
  source 1..120: mol_type = other DNA
cagcctgggtgacagggcgagactgtctctcaaaacacacacacacacacacacacacacacacacacacacaaaatgagttcatgaaaattcaaatactttacccttaccaatttaatc

SEQ ID NO: 84485 - DNA, 120 bp, synthetic construct
  source 1..120: mol_type = other DNA
gcccttgtcattggtgatggtgatcttgttcaccttgccggtgctcttgtccgtggctgtgacattgagaataccattggcatcaatgtcaaacgtcacctcgatctgaggaactcccct

SEQ ID NO: 84486 - DNA, 120 bp, synthetic construct
  source 1..120: mol_type = other DNA
gtcaataccatcgaagagatttcctcagggtagaaagctttattctcccctttgtaggacacaaggactttgggcttgcctccttcattaatcacttgaaaaggccaaagtttcatatct

SEQ ID NO: 84487 - DNA, 120 bp, synthetic construct
  source 1..120: mol_type = other DNA
gctcaaacgatccttcagccccagcctccccaagtactgggattacaggagtgaacatctcgcccagcctattttttattttttattgtggtaaaatacatacaaattgtaccatcttaa

SEQ ID NO: 84488 - DNA, 120 bp, synthetic construct
  source 1..120: mol_type = other DNA
ccaccgcacccggcctatatacattttgcttatctatctctcgatggatacagattacagaatttacagaataatgttgctatgagcaagcctatacaaatacatggagacgctactgtc

SEQ ID NO: 84489 - DNA, 120 bp, synthetic construct; identical to SEQ ID NO: 27577
  source 1..120: mol_type = other DNA

SEQ ID NO: 84490 - DNA, 120 bp, synthetic construct; identical to SEQ ID NO: 27578
  source 1..120: mol_type = other DNA

SEQ ID NO: 84491 - DNA, 120 bp, synthetic construct; identical to SEQ ID NO: 27579
  source 1..120: mol_type = other DNA

SEQ ID NO: 84492 - DNA, 120 bp, synthetic construct; identical to SEQ ID NO: 27580
  source 1..120: mol_type = other DNA

SEQ ID NO: 84493 - DNA, 120 bp, synthetic construct; identical to SEQ ID NO: 27581
  source 1..120: mol_type = other DNA

SEQ ID NO: 84494 - DNA, 120 bp, synthetic construct
  source 1..120: mol_type = other DNA
gagattgcgccactgcactccagcctaggtgacagagcgagactccatctcaaaaaataaaaattgtgtcggccaggcgcagtggctcatgcctgtaatcccagcactttgggaggccga

SEQ ID NO: 84495 - DNA, 120 bp, synthetic construct
  source 1..120: mol_type = other DNA
agatggggaaggacctaccaaatgcctttgttgacacagtagagaagtcatcagacataacattgaatggaggcaataagagagttcctatggccctatcaagcttattagtaggtgttt

SEQ ID NO: 84496 - DNA, 120 bp, synthetic construct
  source 1..120: mol_type = other DNA
aaggaaatgaggttatttcttgggggagccaatattggcgatttctgagggagcgatccttacgtgaatataaaaaattgtgacagccaccattcctcctgctaactgatctaaatccat

SEQ ID NO: 84497 - DNA, 120 bp, synthetic construct
  source 1..120: mol_type = other DNA
caaggcgagaactgctgtgtcattcttagggacactccccaacaaactgcgccacccgagtctctccctcctctcgccagccggccctaaaacatcaaggttagtcaggactctatattt

SEQ ID NO: 84498 - DNA, 120 bp, synthetic construct
  source 1..120: mol_type = other DNA
agtgcctgccttggcttcctaaagcactgggattaccgacctgagtcaccacacgcagttcagttattgttaattatgttttagagatgaacacgtcgaaacttgtgttatttagtcaat

SEQ ID NO: 84499 - DNA, 120 bp, synthetic construct
  source 1..120: mol_type = other DNA
gcaattaaacttgtgactggatttctgccttgggaagcatccagtctgaaaggaaagaaaaggccggcgtggtgcttcatgcctgtaattccagcactttgggcggcccagacgggcgga

SEQ ID NO: 84500 - DNA, 120 bp, synthetic construct
  source 1..120: mol_type = other DNA
aagtagctgggattacaggcatgcgccaccatgcccaggtaattttttttttttttttttttggtatttttagtagagaccggctttctccatgttggtcaggctggtctcgaatttctg

SEQ ID NO: 84501 - DNA, 120 bp, synthetic construct
  source 1..120: mol_type = other DNA
ctgtctctattaaaaatacaaaaattagcccggcgtggtggcacatcctgtaattccagctattggggaggctgaggcagcagaattgtttgaaccccaggggcagaggttgcaatgagc

SEQ ID NO: 84502 - DNA, 120 bp, synthetic construct; identical to SEQ ID NO: 27582
  source 1..120: mol_type = other DNA

SEQ ID NO: 84503 - DNA, 120 bp, synthetic construct; identical to SEQ ID NO: 27583
  source 1..120: mol_type = other DNA

SEQ ID NO: 84504 - DNA, 120 bp, synthetic construct; identical to SEQ ID NO: 27584
  source 1..120: mol_type = other DNA

SEQ ID NO: 84505 - DNA, 120 bp, synthetic construct; identical to SEQ ID NO: 27585
  source 1..120: mol_type = other DNA

SEQ ID NO: 84506 - DNA, 120 bp, synthetic construct
  source 1..120: mol_type = other DNA
cttagtcaggagaaataaattgtatttttttttttttgaaacgggatattgctctgtcacccaggctggagcacagtagagctcactgtagtctcaaactcctgggttcaagcaatcctc

SEQ ID NO: 84507 - DNA, 120 bp, synthetic construct
  source 1..120: mol_type = other DNA
ttgagattgcgccactgtactccaccctgggtgacagagcaatacttcatctcaaaaaaacataaataaaacggttaaagtcctgtgttgcacctttgtgtaaatccttaccctctaggg

SEQ ID NO: 84508 - DNA, 120 bp, synthetic construct
  source 1..120: mol_type = other DNA
tgggctcaattgatccttagcctcctgattagctgggactacacgtgtatgccaccacccatagctaatcttttttttatatacttgccaggcagtagagggaacaaatactttagcttt

SEQ ID NO: 84509 - DNA, 120 bp, synthetic construct
  source 1..120: mol_type = other DNA
atacgcgtttataaatgggggcgataggaaagggtccagaaaggatttgaaatgacttatgagtttcaataatttttttttttttgagacagagtctcgccctgtcgcccaggctggagt

SEQ ID NO: 84510 - DNA, 120 bp, synthetic construct
  source 1..120: mol_type = other DNA
atatttgcccagaggagtgtgaaacatactttcctggtctttctttcactttgttttatttctgtgtggacaaacaatggggaaaatgccgcgcgtctagccaggcagataagaaaacaa

SEQ ID NO: 84511 - DNA, 120 bp, synthetic construct
  source 1..120: mol_type = other DNA
ggctggaatgcagtggcaagaacacaattcagtgcggccttcaactcccgggtttaaccgattctcccaccttagccaattttttcctttttttttttttttttttgagatggagtcttg

SEQ ID NO: 84512 - DNA, 120 bp, synthetic construct
  source 1..120: mol_type = other DNA
tatatactgggactgttgtgttttctttgagtgtactagatctctttccagaagagcttcccttgatccagatctccctaattgggaatgatgatttcacagactagagtctccgatgct

SEQ ID NO: 84513 - DNA, 120 bp, synthetic construct
  source 1..120: mol_type = other DNA
ctgtattacagggtctcactttgtgcacaggctggtcttcaactcctgcctcagtgagccactgtgccccaccccaacatgttttgtgtgttttttgagactgtcttgctctgtcatcca

SEQ ID NO: 84514 - DNA, 120 bp, synthetic construct
  source 1..120: mol_type = other DNA
attgcacttcaccctgggcaacagagcaagactccatctcaaaaaaaaaaaagctgtagataatggggtcccactatggtgctcaagctggtctgaaactcctgggctcaagtgattgtc

SEQ ID NO: 84515 - DNA, 120 bp, synthetic construct
  source 1..120: mol_type = other DNA
acttccagcctggcgacaggctccgtcttaaaaaaaaagaaagatgaagccccgtgagctagttaatgctgagttaggcttaactcttaagcctaatattagagattcttggttgggtga

SEQ ID NO: 84516 - DNA, 120 bp, synthetic construct
  source 1..120: mol_type = other DNA
cattttaattttgcgtatcttttgaactttgtaaaaatggaatgattcaccagacacgagacaacatttttcttttttggggggatggagtcttgcactgtcgcccaggctagagtgcag

SEQ ID NO: 84517 - DNA, 120 bp, synthetic construct
  source 1..120: mol_type = other DNA
ctatcttggctcaccacaacctctgcctcctgggttcaagcgattctcctgccttatcctgccaagtagctgggattatatgccaccacgcccggctaattttgtatttttattagagat

SEQ ID NO: 84518 - DNA, 120 bp, synthetic construct
  source 1..120: mol_type = other DNA
aatcacttgaacctggcaggcggaggttgcagtgagctgagatcatgccattatgctctagcctgggcaacaagaatgaaactacatctcaaaatacatacatacatacatacagttaac

SEQ ID NO: 84519 - DNA, 120 bp, synthetic construct
  source 1..120: mol_type = other DNA
tcacgccattctcctgcctcagcctcccgagtagcaggaactacaggtgctagccaccacgcctggctaatttttttgtattttaggtagagacgaggtttcaccgtgttagccaggatg

SEQ ID NO: 84520 - DNA, 120 bp, synthetic construct
  source 1..120: mol_type = other DNA
agctccgcctcccgggttcacgccattctcctgcctcagcctcccgattagctgggaatacaggcgtccaccactacacccggctaattttttgtatatttagtagagacggggtttcac

SEQ ID NO: 84521 - DNA, 120 bp, synthetic construct
  source 1..120: mol_type = other DNA
agtcacagccgcaggctttgtggggtacacccaaacctgcaccaacagaactcatggatgaaatttgcatcttttgggttgtgaggaaattctagagcccagaaataaccttaaaaactt

SEQ ID NO: 84522 - DNA, 120 bp, synthetic construct
  source 1..120: mol_type = other DNA
agtagctgggattacaggtggtgccaccacgtctggataatttttgtatttttagtagagacaaggtttcaccgtgttggtcaggttggtcttgaactcctgaccttgtgattcacctgc

SEQ ID NO: 84523 - DNA, 120 bp, synthetic construct
  source 1..120: mol_type = other DNA
agagccatgattgttccactcactgctctccggcctgtgcgacagaccaagaccctgtatctaaaaggaagaaaaaagaaaattggcaaaaacaatgatattagcatctgtatgtactta

SEQ ID NO: 84524 - DNA, 120 bp, synthetic construct
  source 1..120: mol_type = other DNA
gtgagtgtggctggggggagagagtgagagagtagaggaggaaaaagtttaaaacagtttgggagtttggagagtttttcgtgaaacacagactcatcaacctttttattttttcactct

SEQ ID NO: 84525 - DNA, 120 bp, synthetic construct
  source 1..120: mol_type = other DNA
gatctcggctcacttcagccttcccctctcgggttcaagcgattctcctgcctcagcctcctcagtagctggcattacaggcatgcactaccacgcctggctaatttttgtatttttagt

SEQ ID NO: 84526 - DNA, 120 bp, synthetic construct
  source 1..120: mol_type = other DNA
aggatcacttgagcccaggagtttaagaccagcctgggcaacatagtgggaccctgtttctacaaaaatgaaaatattagctgggcttggtggcaagtgcctgtagtcccagctactcag

SEQ ID NO: 84527 - DNA, 120 bp, synthetic construct
  source 1..120: mol_type = other DNA
ctcttggagcggcaggctggcccacaagccccgggcagggcagtgaggggtttagcacctgggccagcagcttgctgtgctcgatttctcacggggccttagctgcctcaccacaggaca

SEQ ID NO: 84528 - DNA, 120 bp, synthetic construct
  source 1..120: mol_type = other DNA
ttaagaactgtaacactccccgtgagggtctgcggcctcattctttaaatcaatgagaccaagaacccaccaattgtgaacacagaacaatgttgaaattctaagtttccataaactttc

SEQ ID NO: 84529 - DNA, 120 bp, synthetic construct
  source 1..120: mol_type = other DNA
tcccggacggggtggctgccgggcggagatgctcctcacttcccagatggggtggctgcggggcggagaggctcctcacttctcagacggggcagttgccgggcggaggggctcctcact

SEQ ID NO: 84530 - DNA, 120 bp, synthetic construct
  source 1..120: mol_type = other DNA
gaggatcccttgaacttcagtctgaatctaacctgggcaacatggcaagactccatctgtaaaaagcaacaacactagattctcagcttttgttcgtttgtttaagacagtctcgctgtg

SEQ ID NO: 84531 - DNA, 120 bp, synthetic construct
  source 1..120: mol_type = other DNA
gggagtattgcctgaggtcaggagttcgagaccagtctggccaacatggtgaaaccgggtctctactaaaaataccaaaaaattagccgagcgtggtggcaggcgcctgtaatcccagct

SEQ ID NO: 84532 - DNA, 120 bp, synthetic construct
  source 1..120: mol_type = other DNA
agatcaagccatcctcccatgtagctaggactataggtgtgcgttaccatgcttggctaatttttaaattttttagacatggggtattgccatgttgcccaggatgccctttaatttgat

SEQ ID NO: 84533 - DNA, 120 bp, synthetic construct
  source 1..120: mol_type = other DNA
gctcaagcctgtaatcccagcactttgagagaacatggccggcagattgcttgagctcagcagtttgagaccaacctaggcaatatagtgagactttgtctctactaaaaattaaaaaaa

SEQ ID NO: 84534 - DNA, 120 bp, synthetic construct
  source 1..120: mol_type = other DNA
taaaaattttaagttacaaacattttgattgatagtcagtcatggtggtgcacctagtccttactctgaaaccaaatatcctgccatctggggactttcaccagccctgtcggttatctt

SEQ ID NO: 84535 - DNA, 120 bp, synthetic construct
  source 1..120: mol_type = other DNA
tgcagctaccacagggtccacgagctcagggtcgaaggtcacatcacggggccttagtgtatcacaggcatcatagctgcggaggacaattcggcagtggcagtggtagttgttctggtt

SEQ ID NO: 84536 - DNA, 120 bp, synthetic construct
  source 1..120: mol_type = other DNA
ggaaacaccatcatccttgctccataccaacatggtagaggccacctggcagccggccttgtgagcacaaagggagtagaaaagaaatactactcctgtctcaacatcgctcactactgc

SEQ ID NO: 84537 - DNA, 120 bp, synthetic construct
  source 1..120: mol_type = other DNA
tcaacaaagacaaacttgtcttgggggttttaggaacccacgttccgatgggagagggaggatctaatggggatcccgagtaggggatggggtcccagaacaagaaagaggaacacgaag

SEQ ID NO: 84538 - DNA, 120 bp, synthetic construct
  source 1..120: mol_type = other DNA
ttactgagttaacaaaatatctttaataaaatctttttgtttgtttgttttgttttggagacagagtctgtcacccaggttggagtgcagtggcgcgatctcggctcactgcaacctctg

SEQ ID NO: 84539 - DNA, 120 bp, synthetic construct
  source 1..120: mol_type = other DNA
aaccctgaatggatgcatgctgtagagtaagaaaatcccctgccgctacagccacctgctgggaagtctctctaatggctcttttttttttttaatcttttttctttgttttgagacgga

SEQ ID NO: 84540 - DNA, 120 bp, synthetic construct
  source 1..120: mol_type = other DNA
gtgccagaagttagggcaggttgagggtgagaggcctggcaatgctgagagtgaaattggcttcgtaatttgtggggactggtgcaaaatgaaaattgttcacgtttcaagatggcaaga

SEQ ID NO: 84541 - DNA, 120 bp, synthetic construct
  source 1..120: mol_type = other DNA
tccagaagagccccaggaccccatagatttgcagattgaagacagaacgttggattaggcctttggatgagtagccctggaagacgcacatcagccctgggcacgaggagttcacaaggt

SEQ ID NO: 84542 - DNA, 120 bp, synthetic construct
  source 1..120: mol_type = other DNA
tcacaaattaaaaagcaaccctttctagcaaatataaccaaaaaaatttttttttgacacagggtctcgctctgttgcccaggctggagtacagtggctcaatctcagctcactgcaacc

SEQ ID NO: 84543 - DNA, 120 bp, synthetic construct
  source 1..120: mol_type = other DNA
gagtagctgggattacaggcacctgctaccatgcctggctaatttttgtacttttagtggagacaggtttttgtcatgttggccaggctggtctcaaactcctgacctcaggtgatctgc

SEQ ID NO: 84544 - DNA, 120 bp, synthetic construct
  source 1..120: mol_type = other DNA
aagaccctgtctcaaaacaaacaaacaaacaaacaaacaaacaaacaaacaggagtaggctgagactcagagggtgaagtggttgatggtcctcaagtcagagcaatgtcctggggaggg

SEQ ID NO: 84545 - DNA, 120 bp, synthetic construct
  source 1..120: mol_type = other DNA
tactccggaggctgaggcaggagaatggcgtgaacccgggaggcggagtttgcagtgagctgacatcgcaccactgcactccagcctggtcgacagagcgagactccgtctcaaaaaaaa

SEQ ID NO: 84546 - DNA, 120 bp, synthetic construct
  source 1..120: mol_type = other DNA
tcctcccagcagtagtagatgccgtatgccagcacgcccagcactcccaggatcagcaccagcaccaggggcccagccaccaggcgcagaagcaagataaacagtaggctcaagaccaga

SEQ ID NO: 84547 - DNA, 120 bp, synthetic construct
  source 1..120: mol_type = other DNA
tgactcagacatctccagaggctctgccccagagacagcatccacactccctggccaggcttccaggctctcctgtgcaaatccagcccatgttcccttctactctgtacctttgctctt

SEQ ID NO: 84548 - DNA, 120 bp, synthetic construct
  source 1..120: mol_type = other DNA
aagatgaggaaacaaggttcagagaggttgcatagttgggtcaagaccatagggctggaaagtgctagaatttatattcagatctacttgactttgaagtattcacttgagatactcctt

SEQ ID NO: 84549 - DNA, 120 bp, synthetic construct
  source 1..120: mol_type = other DNA
cagccacgttcacttataacatttgaacaaatatccttctagccttttccctgtgcatatataaaaatgatatgtgtgcaggctgggcgtggtggctcatgtctgtaatcccagcacttt

SEQ ID NO: 84550 - DNA, 120 bp, synthetic construct
  source 1..120: mol_type = other DNA
tctcgtgcccaccctggcccttctgggcgacagtgatgaggttaggggcaatattcaccatattccagggtacccctggcagacaaaagttcctgttttttgtatagaagacttccccaa

SEQ ID NO: 84551 - DNA, 120 bp, synthetic construct
  source 1..120: mol_type = other DNA
actcaagaagctaactgtccagcaatggttcttaacgtggcctggagttgtcagattcagggaggctgaggtggggtggggacagcagggaaaggctgtggaagagcacggacaggtctg

SEQ ID NO: 84552 - DNA, 120 bp, synthetic construct
  source 1..120: mol_type = other DNA
cacttgagcacaggagttcgagcctgcagtgaacccccatctccaaaacacaaaaagaaagaaaacctttttctgggtgggtaaactttcttctgaagtaaaagacagaaaagcacacaa

SEQ ID NO: 84553 - DNA, 120 bp, synthetic construct
  source 1..120: mol_type = other DNA
accacacagacccacagcccctcagggaggtcatggcctcttcccctatctgccccaggccctaccttaccctctggttcaaggctatggggaaagaaactggagacaaaggtgtcaacc

SEQ ID NO: 84554 - DNA, 120 bp, synthetic construct
  source 1..120: mol_type = other DNA
ttacagggaccctggcctcactggttgcaggctctgcagcacaggacactcccagcatccagccctattctgctcagggccccaacctgccaccttccatctcggctttgtttcctaggg

SEQ ID NO: 84555 - DNA, 120 bp, synthetic construct
  source 1..120: mol_type = other DNA
tggagtagccaggattacaggtgcctgccaccacgcccagcaaattttttctattttgaaagatggggtttcaccaagttggccaggctggtcttgaactcctgatctcaggtgattcgc

SEQ ID NO: 84556 - DNA, 120 bp, synthetic construct
  source 1..120: mol_type = other DNA
cttctccagatgggatctgagccccttgtatgttctatggactttcagcatcagcattgcctggggactttttagaaatgcagaatcctgggccccatcccaagcctactgattcaaaat

SEQ ID NO: 84557 - DNA, 120 bp, synthetic construct
  source 1..120: mol_type = other DNA
tacaggagtggcaaggaactcaaggcatgattcggggcaagagcacccacacatatctggacaccagagggaggagaggagccagctatctaaggagggtgagcagacatgggagattca

SEQ ID NO: 84558 - DNA, 120 bp, synthetic construct
  source 1..120: mol_type = other DNA
gagacatgtgactcatcagggcagatggctgagagggaggcctggcagtcagcagtggccatgtatccccttcccaccaggtgttaaggtgctcccggtgacttactcgcagatgaaggt

SEQ ID NO: 84559 - DNA, 120 bp, synthetic construct
  source 1..120: mol_type = other DNA
tttggggtccatgtgttacaacagtgggtggtgatggtcctagggtgacgggtaatcagtatggtggtgtccccagggctactgggagctcatatgataccttgctgtgacctaggaaaa

SEQ ID NO: 84560 - DNA, 120 bp, synthetic construct
  source 1..120: mol_type = other DNA
tgagttgaagcgcaaaccacacgtcggagcgctcgggagtcaggtcccatgctgtgtccccctctttgttccgcagctcagggttggccccacgtgacaggaataacctgaagaggggac

SEQ ID NO: 84561 - DNA, 120 bp, synthetic construct
  source 1..120: mol_type = other DNA
aacaaacaaaaatgggactagtagcgtctaccatctgatgccagagagaaaataaagtaattgttctctttccaaaaaatacagccaggagctggtcatggaggtgcatgcctgtagtcc

SEQ ID NO: 84562 - DNA, 120 bp, synthetic construct
  source 1..120: mol_type = other DNA
aagaatgaagagaaatacaaatgaggaagaagaaagcaatgaggacagacacgagcagtgtgaggtcagatgtaggaaaggcggcccaaagcctgaggccaagccaaggaacccaggcac

SEQ ID NO: 84563 - DNA, 120 bp, synthetic construct
  source 1..120: mol_type = other DNA
tttatcagaataaggagtcaaaggcatcagctctgcctgaattcaaaccctgccttgcttctcagtaccactgtgcactgtgcaaggtccctaacctctctgtgcaagccaaggctaaca

SEQ ID NO: 84564 - DNA, 120 bp, synthetic construct
  source 1..120: mol_type = other DNA
atggtcacctcttgagcttcagaagcatcctccccacagtggggacagaagaccatcccattcagctgagacacacaggccttgtggaagcggtgggccacacggaagtcagggtggcac

SEQ ID NO: 84565 - DNA, 120 bp, synthetic construct
  source 1..120: mol_type = other DNA
agcccacaccattcactcctgacacagagacagagagagtgagagtgcgagctcacaggtgcctggacgcgtgggtacatgcaggtggacatgcgagagcgtgtgtgtgcgtgcacacac

SEQ ID NO: 84566 - DNA, 120 bp, synthetic construct
  source 1..120: mol_type = other DNA
tcttcttggcacctgaagctgattccgcctctagatctatcagtttacaagaaatatgggcagagaggatgtgtcaatctccacccaatcagccaactcctaaatgtgaaaaattctgta

SEQ ID NO: 84567 - DNA, 120 bp, synthetic construct
  source 1..120: mol_type = other DNA
caagatcacgccactgcactccagcctgggtgacagtgtgagactccatctcaaaaaacaaaaacaaacaaacaaacaaacacaaagaagatggggaaacctaaatactgagagagacct

SEQ ID NO: 84568 - DNA, 120 bp, synthetic construct
  source 1..120: mol_type = other DNA
cagtacatgtctgttaaatggtcatttcattagctgattaaaaaaaaaagaatactaaatcccatgtgcagggtggtggccacctttgtggatgaaacgggcagaatacacattgaaaat

SEQ ID NO: 84569 - DNA, 120 bp, synthetic construct
  source 1..120: mol_type = other DNA
cctatcaccgaaaccttcagaacagaccacatcaagccaccgggggtgggggatgggactgacctgaggtcacctttcccagtgagtggacatcatcactcatgcggaaatgctgtattt

SEQ ID NO: 84570 - DNA, 120 bp, synthetic construct
  source 1..120: mol_type = other DNA
ctgtatgattacacttagataaagtacttactcaaatttatagagaaagaaaggacagtggtccttgccaggggctagggggtggagggaatggagagttatgttttaatgggtacagag

SEQ ID NO: 84571 - DNA, 120 bp, synthetic construct
  source 1..120: mol_type = other DNA
attacaggcgtgagccactgcgcctggcctaaaattgttttttagatggtaaattttacgtgacactagtcccctcttatccagttcatcagcagtgatggtggcatattgttagaattg

SEQ ID NO: 84572 - DNA, 120 bp, synthetic construct
  source 1..120: mol_type = other DNA
aggcaggaagattgctgaagcccagcagtttgagaccagcctgggcaacatagtgaaactgtcttcaaaaacaaaacaaaacaaacaaaaaaacccctacttataactgctgctaatcag

SEQ ID NO: 84573 - DNA, 120 bp, synthetic construct
  source 1..120: mol_type = other DNA
taggacaggaaccccccttgctgggggaagaggggaatgactttgtggcatggcctagaaaacaggcaagcaaaaggcaagataagaaagaaggcaagagtcagaaatttcccaccaacc

SEQ ID NO: 84574 - DNA, 120 bp, synthetic construct
  source 1..120: mol_type = other DNA
gtaacaagcggagcttctgaacttctcggctctcggcagcggctgtatttcctctggcctggttgggcttttcccgcctctggttgcttttctgcctttctagtttttgggttaccagat

SEQ ID NO: 84575 - DNA, 120 bp, synthetic construct
  source 1..120: mol_type = other DNA
agctcatccctagcactgatcctaagtccctcaaatagagttcatgtgcatccccacgactgccaatcacttgtactgtgaggtacctggctaagtgttgagattgcagaactggtggag

SEQ ID NO: 84576 - DNA, 120 bp, synthetic construct
  source 1..120: mol_type = other DNA
cctttctgccccagaccccccaccccccaattctcctgggccaaagagccctttttccacgcagcccaggggccccagcctcctggcctccacgcctgcgcggctagcggatgaggacgt

SEQ ID NO: 84577 - DNA, 120 bp, synthetic construct
  source 1..120: mol_type = other DNA
gagggggtagaggaggtgggggtgggggcttcggggctggctttggggtcctggctggagggaggagggacttggtggcgctgatgctgctcacaaggctagcctcactgaccccatcct

SEQ ID NO: 84578 - DNA, 120 bp, synthetic construct; identical to SEQ ID NO: 27586
  source 1..120: mol_type = other DNA

SEQ ID NO: 84579 - DNA, 120 bp, synthetic construct; identical to SEQ ID NO: 27587
  source 1..120: mol_type = other DNA

SEQ ID NO: 84580 - DNA, 120 bp, synthetic construct
  source 1..120: mol_type = other DNA
atgcaacaaatgattgttgaagtaattcctctttggctcagccagcatccacccataaaaagtttgttcttgagctgaaactgaattcttgaactcaagggatgctgtttggcaggaggg

SEQ ID NO: 84581 - DNA, 120 bp, synthetic construct
  source 1..120: mol_type = other DNA
ggattacaggcgtgagccactgcgcctgacccaaaagaactttaaaaattctgtttttctatctcatctcttcttttccgcattgccaaacttctcagaagaatagttcacattccagtg

SEQ ID NO: 84582 - DNA, 120 bp, synthetic construct
  source 1..120: mol_type = other DNA
gtcttttaaaaaaaaaattaggattcttagtgagctttagaaataaaatctgggctgggcactgtggcttatgcctgtaatcccagcactttgggaagctgaggtgggaggatcacttaa

SEQ ID NO: 84583 - DNA, 120 bp, synthetic construct
  source 1..120: mol_type = other DNA
aagtgcctgcaccactcccatccatctgcaaaaccaccttttctgaactcccatccatcccccttgactgctcctcaatgctggctcctcctccttcttcagagctccttatccctagct

SEQ ID NO: 84584 - DNA, 120 bp, synthetic construct
  source 1..120: mol_type = other DNA
attgtaaagttttgttcaaaatttaaaaaatataagagggtacaaggctgggtgtggtggcttacgcctgtaaactcagcacttttgggaagccaagggaagaggatcacttgaaaccag

SEQ ID NO: 84585 - DNA, 120 bp, synthetic construct
  source 1..120: mol_type = other DNA
gccattttttttttttttttaattaaaagtggcaagactgggtcttcccgtgttgcccagtcattgatcttgaattcttgggttcaagtgatactcctgccttggcctcccaaagtgttg

SEQ ID NO: 84586 - DNA, 120 bp, synthetic construct
  source 1..120: mol_type = other DNA
gtttcagtatctatgcagttgtaggttttcccggacagtttagttttgtctgtttgaccatcacacagatgaatcatactgtacatgttctggggctggccttttcactcaacattatgg

SEQ ID NO: 84587 - DNA, 120 bp, synthetic construct
  source 1..120: mol_type = other DNA
tttttttttgttttttgtttttttttgagacagcgtctcactctgttgccccggctagagtacagtggtgcgatcttggctcactgcaacctctgcctcccgggttcaagggattctcct

SEQ ID NO: 84588 - DNA, 120 bp, synthetic construct
  source 1..120: mol_type = other DNA
taaaaatgaatcatgagcccagcacggtggcccacacctgtaatcccagcactttgggaggctgaggcagatgaatcacttgaggtcaggagttcaagaccagcctggccaacatgatga

SEQ ID NO: 84589 - DNA, 120 bp, synthetic construct
  source 1..120: mol_type = other DNA
tttttttttctctctcttttttttttgagacagagtctcgctctgttgcccaggctggagtgcagtggcacactgcagcctccgcctcccgggttcaagcaattctcctgcctcagcctc

SEQ ID NO: 84590 - DNA, 120 bp, synthetic construct
  source 1..120: mol_type = other DNA
ctgggaggcagaggctgcagtgagctgagatcatatcactacactccagcctgagtgacagagcgggactctatctcaaaaaagaaaaaaaaaaaaaaagagattggttaccacattgat

SEQ ID NO: 84591 - DNA, 120 bp, synthetic construct
  source 1..120: mol_type = other DNA
ataaaacgaagcaaagacattgccatctatactcagctgacgttaagtaaaggagtttactcttttttttttgagatggagtctcattctgtcaccctggctggagtgtagtggcgtgat

SEQ ID NO: 84592 - DNA, 120 bp, synthetic construct
  source 1..120: mol_type = other DNA
tgcactccagcctgggcaacagagtgagactccgtctcaaaaaaaaaaaagaagactatagttaatgaacaagcaatcggccgggcgcggtggttcacgcctgtaatcccagcactgtgg

SEQ ID NO: 84593 - DNA, 120 bp, synthetic construct
  source 1..120: mol_type = other DNA
acaaacaaccctggaatctcagtagcttaacacaacagttttatttctcactattgctctctgttgggtcagtaggagtgttagagtctctgatcatcatagtcactcaggcatccagat

SEQ ID NO: 84594 - DNA, 120 bp, synthetic construct
  source 1..120: mol_type = other DNA
cgtctcaaaaaaaaaaaaaaaaaaaagagtgatgtcactgttgtgtgcagtggagttcgattcccccaggccctcctgaggagagagctgaatgtctccagacgctttccacctgaagga

SEQ ID NO: 84595 - DNA, 120 bp, synthetic construct
  source 1..120: mol_type = other DNA
tgcaatatacccatgtaacaaacctgcacctgtaccccctgtatctaaaataaaagttggaattttaaaaaaagaaaaaaaggccaggcgcggtggctcatgcctgtaatcccagcactt

SEQ ID NO: 84596 - DNA, 120 bp, synthetic construct
  source 1..120: mol_type = other DNA
gaggatcatgtgagcccaggagtttgtggttacagtgagctgtgattgcaccactaaactccagcctgggtgacagtgagaccctgtctttaacttaaaaaaaaaaaaaaatcctggctg

SEQ ID NO: 84597 - DNA, 120 bp, synthetic construct
  source 1..120: mol_type = other DNA
ccttgaataggtatcatatgtacccagtgaaaactacaaggagtaataaaggggatttggtgaaaattaagttgccttctttacctcccacctcattttccagcccccagttctccccag

SEQ ID NO: 84598 - DNA, 120 bp, synthetic construct
  source 1..120: mol_type = other DNA
atgtgagccccaggctatccttttgtcaagagggtactggtacccagaactgggaaggggatgaatatctccccactccccaggataaaggaaaacattagagaggaattttcaatgaaa

SEQ ID NO: 84599 - DNA, 120 bp, synthetic construct
  source 1..120: mol_type = other DNA
aaccaaagccaattctgttgctgacctgaaagatgctatttacttggggtggaaataggatgggggagggcattggcttgaccttacttggatagctcattgtttaaaaaaaaaactcct

SEQ ID NO: 84600 - DNA, 120 bp, synthetic construct
  source 1..120: mol_type = other DNA
aggacagatccactaaaaccaccaagaggcttgcagagcaatgctgaatccccatctaaagtcacacattaaggctgtgaaccaggccaagccagactagttttccaatttgggggttga

SEQ ID NO: 84601 - DNA, 120 bp, synthetic construct
  source 1..120: mol_type = other DNA
cagtggactataactgactttttgccaatggaatatgaatggaagagtggggtgggaggcagacttgatggagaccctgtttcaaccatgcagacaaggacaatttccaaaggcatgaac

SEQ ID NO: 84602 - DNA, 120 bp, synthetic construct
  source 1..120: mol_type = other DNA
acatggtttggctttgttataaccaagctagaataacagcagcttaaatggtctgagcataagtggtccaggtcaatcctattagctctacaggattggagagcagggcctctttaattt

SEQ ID NO: 84603 - DNA, 120 bp, synthetic construct
  source 1..120: mol_type = other DNA
tttattttttggtcatattacttatccactgagagtcagccgagtattgcgctttttttttcttttttgagacagagtctccctatgtcacccaggctgaagtgcagtggtgtgatctcg

SEQ ID NO: 84604 - DNA, 120 bp, synthetic construct
  source 1..120: mol_type = other DNA
gccactttggagtccctaacaccaggatgtcctgattttcatgcacttagccctgtccaaggggagtctcaatttgtgtactcttttttttttttttgagacagagtcttgctcttgtca

SEQ ID NO: 84605 - DNA, 120 bp, synthetic construct
  source 1..120: mol_type = other DNA
caatcttcctatttatcaagaagttctaaaaaaattagtttcacccccctcggaagtttatcttcaagaagacagaactgttctaggctctcaggaagtaaaacccacttggtacaaccc

SEQ ID NO: 84606 - DNA, 120 bp, synthetic construct
  source 1..120: mol_type = other DNA
tttgctcagggtgctacaccaggggccaccccagaacttttgtttaggagttgctcagggtgggacttaacctgactagatggcaaagttgcttttgcagagggcttttcaaaatatcca

SEQ ID NO: 84607 - DNA, 120 bp, synthetic construct
  source 1..120: mol_type = other DNA
cttttctaagtgcctcaaagcaagacttcatattcaggccccacagattgttgtagggaagatatgctgggagagagtcaagtactgtgctttaatgccttgcctttaaagccaggtttg

SEQ ID NO: 84608 - DNA, 120 bp, synthetic construct
  source 1..120: mol_type = other DNA
aaacaaaaaacaaaaaaaacagcccctggaatctgataaatgccatgtacacttttttttttttttgagacggagtctagctcttgttgcccaggctggagtgcaatggcgcaatctcag

SEQ ID NO: 84609 - DNA, 120 bp, synthetic construct; identical to SEQ ID NO: 27588
  source 1..120: mol_type = other DNA

SEQ ID NO: 84610 - DNA, 120 bp, synthetic construct
  source 1..120: mol_type = other DNA
tttccccacctttcccccctttctattccacaaaaccgtcattgtcatcatggccccttctcaatgagctgttgggtacacctcccagacggggtggtggccgggcagaggggctcctca

SEQ ID NO: 84611 - DNA, 120 bp, synthetic construct
  source 1..120: mol_type = other DNA
atcattgagcactgagtgaacgagactccgtctgcaatcccagcacctcgggaggccgaggctggtggatcactcgcggttaggagctggagaccagcccggccaacacagcgaaacccc

SEQ ID NO: 84612 - DNA, 120 bp, synthetic construct
  source 1..120: mol_type = other DNA
acagaaccctactcttatgacttccctgaggacgtggcccctgccctgggcacttccttctcccacatgcttggggccaccaatcccacccagaagacaaagggtgagtgtttgaggtgg

SEQ ID NO: 84613 - DNA, 120 bp, synthetic construct
  source 1..120: mol_type = other DNA
gcttggatccgggaggtggaggttgcagtgggctgagatcacgccattgcactccagcctgggcaactagagcaaaactctgtctcaaaaaaataaataaaataaaataaaataaaataa

SEQ ID NO: 84614 - DNA, 120 bp, synthetic construct
  source 1..120: mol_type = other DNA
tgtgagcgttgccattatcacctttgcctcagagcccaaagtcctcatgtctgtcctgaacgacaactcccgggatatgactgaggtgatcagcagcctggaaaatgccaactataaagg

SEQ ID NO: 84615 - DNA, 120 bp, synthetic construct
  source 1..120: mol_type = other DNA
aaagtttgaacaagcaatgatgccacatctctatctgaatggcaaatgtctgagtttatcaaaacaatcgataaattgcatttccaggccgggtgcagtggctcatgcctgtagtaatcc

SEQ ID NO: 84616 - DNA, 120 bp, synthetic construct
  source 1..120: mol_type = other DNA
ctgtagtcccagcactttgggaggccaaagcgggtggatcacttgaggttaggagtttgagatcagactggctaacatggtgaaaccccgtctctactaaaaatacaaaaccattagctg

SEQ ID NO: 84617 - DNA, 120 bp, synthetic construct
  source 1..120: mol_type = other DNA
gcaatggcgcgatttcggctcaccgcaacctccgcctcccaggttcaagcgattctcctgcctcctgagtagctgggattacaggcatgtgccaccacacccggctaattttgtatattt

SEQ ID NO: 84618 - DNA, 120 bp, synthetic construct
  source 1..120: mol_type = other DNA
ctgcagcctcaaattcctggtttcaagtgatcccctcaactcagcttcccaaagtggtaggattacaggtatgagccactatgctcagcccgtcttcacaaattttttaaaattaatttt

SEQ ID NO: 84619 - DNA, 120 bp, synthetic construct
  source 1..120: mol_type = other DNA
acagctggctaactaaggctttggcagttgcagcctctaaaggaaaaattcctcaggttcagactaaacacaaattgcactgacctttgatcagaaagtaatttcagagagagagatgct

SEQ ID NO: 84620 - DNA, 120 bp, synthetic construct
  source 1..120: mol_type = other DNA
cctctgtgtcattacatgctgttctcttatatagataggagacccactacctgtgtctttgtgtccaaattcctttcttctttttctgttcatttgtttgagacagagtctcgctctgtc

SEQ ID NO: 84621 - DNA, 120 bp, synthetic construct
  source 1..120: mol_type = other DNA
cctttttccaaataaagtcacagatactggggattaggactcgaacacatctttctgggggacacaattccaccattacagggaataaacaggataagaaaaccatagaacccagcaggt

SEQ ID NO: 84622 - DNA, 120 bp, synthetic construct
  source 1..120: mol_type = other DNA
ggcatgtcactattaaggtaccaggaaggaggggcagggcttggattccagaggtaaaagcggccatgggccagacatactgcaatctctgaaaatcacctgttcccctgcagcccaaga

SEQ ID NO: 84623 - DNA, 120 bp, synthetic construct
  source 1..120: mol_type = other DNA
ggtaaaaggaccagcaccaacatccccttctcttgactatagagaatgaactgctgaacaaacagagtgttcctgctcattttgtcgccttgaatgggagcaaactgaacattaacctta

SEQ ID NO: 84624 - DNA, 120 bp, synthetic construct
  source 1..120: mol_type = other DNA
tctggtgagctggggtctttacaacccctgccttggctctgctgacaaaaactcccgcaaaagggcccctcgtagcaaggtcccgccgccacgagactttcacatcaatctcttccgcat

SEQ ID NO: 84625 - DNA, 120 bp, synthetic construct
  source 1..120: mol_type = other DNA
gaacacagattgtataaaaggctgggggctggtggggagcaggggaagggaatgtgaccaggtctaggtctggagtttcagcttggacactgagccaagcagacaagcaaagcaagccag

SEQ ID NO: 84626 - DNA, 120 bp, synthetic construct
  source 1..120: mol_type = other DNA
cttgatgacttctacttgtccccccttctcaaagcaatccactgtccaagaccacacgacttcgagaacggggaatactggccccggtctccctactacaatgtgagtgatgagatctct

SEQ ID NO: 84627 - DNA, 120 bp, synthetic construct
  source 1..120: mol_type = other DNA
ggctccatgaacatctacctggtgctagatggatcagacagcattggggccagcaacttcacaggagccaaaaagtgtctagtcaacttaattgagaaggtggaatcctcctatccctga

SEQ ID NO: 84628 - DNA, 120 bp, synthetic construct
  source 1..120: mol_type = other DNA
ccccaccttctcagaccagcatgtggcccttaagtccacttgtaacactatacccatggttggggccctgaatgtgactcatagctggctgttcatctctcctgtgacccttcataagga

SEQ ID NO: 84629 - DNA, 120 bp, synthetic construct
  source 1..120: mol_type = other DNA
accatagcagttttctcctaacacgaggaaacaaatacccgtggtctttccctttctccttttgggcctttgctccccatagactcctacccaaaaggctgctgccatttgggaatgaag

SEQ ID NO: 84630 - DNA, 120 bp, synthetic construct
  source 1..120: mol_type = other DNA
ttgctgttctccttgtcctttataggcccatttgtctcccctgcaccgagggaacaactcgagctttgaggcttcctccaactaccacttgccagcaacaaagtaagacatacttggcaa

SEQ ID NO: 84631 - DNA, 120 bp, synthetic construct
  source 1..120: mol_type = other DNA
ttgcctgcgtgtgtcaagaacgaggctgagctgggtccctagtctgattcctttaggtcagctaagacacaagcaggaacagccatgcttccaggattaggaattctactgaatgatcca

SEQ ID NO: 84632 - DNA, 120 bp, synthetic construct
  source 1..120: mol_type = other DNA
gtcaattctagttcctttcttttgcctgaagggccactgtagctgagcccttctttctgctcactcctttcccaggaaaatctactttcagggaaaatggattattcacactaagaaatg

SEQ ID NO: 84633 - DNA, 120 bp, synthetic construct
  source 1..120: mol_type = other DNA
gaggggaggcagaggatggggaggaaaacattacagataaaccaaagaagttattccaggagttgctatcctaggaggagactgaataaggaatctgagaatgtgagtttttctgtgtga

SEQ ID NO: 84634 - DNA, 120 bp, synthetic construct
  source 1..120: mol_type = other DNA
tggtcctagttctcgaagtcgatcactagaagacacaaagctggggagatgcagactgaagatcaaaggggggttttaccttctcccctcagaccctgtggagactcaatattccctcta

SEQ ID NO: 84635 - DNA, 120 bp, synthetic construct
  source 1..120: mol_type = other DNA
gatctccactcactgcaacctctgcctcctgggttcaagtgattctctggcctcagcctcctcagtaactgggactataagtgtgcaccaccacattctgctaattttttttttttttga

SEQ ID NO: 84636 - DNA, 120 bp, synthetic construct
  source 1..120: mol_type = other DNA
atttcccctgtcactcacagcgtttgacaccaccttggctggttgtgctgctgctactttgcttcttcagagccagcaatgcctttttctgggaacaagggtgagaagagagaggtaagt

SEQ ID NO: 84637 - DNA, 120 bp, synthetic construct
  source 1..120: mol_type = other DNA
catttgaacaggagtgaagaagtctgttcaaaaaaaaagactgagaaatttgttgagagaccattacaatggcccacatgaatgtcaataaagccctgctcgggggaatgcacagtgaag

SEQ ID NO: 84638 - DNA, 120 bp, synthetic construct
  source 1..120: mol_type = other DNA
cgctggtcgggatcatccagcattccctcctgtctccagggatcacagacaccagcacctttaggtaccatgtggttcaaggagggacaaatatccactccgtcggaaagacgatggcac

SEQ ID NO: 84639 - DNA, 120 bp, synthetic construct
  source 1..120: mol_type = other DNA
tctgggacccctttttctaaaatcagtgagtctccaatttcagtgtgcttcatgattagccagggagctttttaaaaatgcacattcctaggtccagcctccatgtttctgaaatccaaa

SEQ ID NO: 84640 - DNA, 120 bp, synthetic construct
  source 1..120: mol_type = other DNA
agatagactttgagaaaggtaaggtggggctctgagtctgagccttgaggaggaagagcccaggctatcactgggctactgctagccctcccatgtttttgagaaaattagaaaaagata

SEQ ID NO: 84641 - DNA, 120 bp, synthetic construct
  source 1..120: mol_type = other DNA
tgttggtgatttctatcgcctcattccccagccagccttccaggtactttggccccatcttcacacgctcctctacctctttctgggtcacactcccagccgaccccttgtctcctctat

SEQ ID NO: 84642 - DNA, 120 bp, synthetic construct
  source 1..120: mol_type = other DNA
ggggagtcaatccttggcctcttctccccagctccatgctgtacagtggctcagatgttattcgggacctggagtgggtcatctttgatgaggttcactatatcaacgatgtcgaggtaa

SEQ ID NO: 84643 - DNA, 120 bp, synthetic construct
  source 1..120: mol_type = other DNA
agcacctgtttttcctcctatcttttttttccccttgtcccccaggggttttgacttgagctttgagcactgccccagttaacactagctcacctctcattggttcaggaactcaacctc

SEQ ID NO: 84644 - DNA, 120 bp, synthetic construct
  source 1..120: mol_type = other DNA
gactttacagctattagactggtaaaatttaggaaactagttcatgccgagtgttgccagagatataggaggttgtagggttctgggaatcctttacgggatgcctagccagtttggaat

SEQ ID NO: 84645 - DNA, 120 bp, synthetic construct
  source 1..120: mol_type = other DNA
gtagctacataagtaaaatgaggaaaacaataatacctgccctatagatttgcctggagagttcagtgagatcccataagtaacaactgggatggtgccttatgcctacaaagtaaggtg

SEQ ID NO: 84646 - DNA, 120 bp, synthetic construct
  source 1..120: mol_type = other DNA
gtgaatccaaggatgagattggagcccatctcttccagttttctcccatgtgaatatggagctagatggggcctttgagtccatttatttcagtttgctcccttatgttacagaagaggt

SEQ ID NO: 84647 - DNA, 120 bp, synthetic construct
  source 1..120: mol_type = other DNA
accccaagaagtctgctctgatcgcttgacttggttgcccctctctactggtgagctctgcatggttgcttcctgattcctgcccaagggtgggtatctggtctctgcctttgatgtcta

SEQ ID NO: 84648 - DNA, 120 bp, synthetic construct
  source 1..120: mol_type = other DNA
ctcgaccctgtcaatgacctgcagctcaaagatatgtcagttgtagagggtgggctccgggcccggaagctggaggagctgatccagggggctcagtgtgtacacagcccccgttttcct

SEQ ID NO: 84649 - DNA, 120 bp, synthetic construct
  source 1..120: mol_type = other DNA
ttgtggcctgaaccagacggtggaggaatttgtgggggagctgaattttgggctggttgaggttgtatatgagtgggcccggggcatggtgagtacctgaggtttgggattttgcagacg

SEQ ID NO: 84650 - DNA, 120 bp, synthetic construct
  source 1..120: mol_type = other DNA
tttggggatacgggtgggagctgcaacatcgttcccttaccctgacatattcaaacatcttcatggtaggaaaggtcttgagggaagagacaaaaccgtctgggttacggaagccagcaa

SEQ ID NO: 84651 - DNA, 120 bp, synthetic construct
  source 1..120: mol_type = other DNA
gactgattctcaccccggctttggctctcctaattttagagggtaggtacgggtctccagatatactgcctaccacgctttgctcacccctccaaccggcctcggtgttccaggagccag

SEQ ID NO: 84652 - DNA, 120 bp, synthetic construct
  source 1..120: mol_type = other DNA
acgacaagttgacgctcctttcgtcatcacctggtctaggagggacgcccggggagaccgtacgtcactgctctgcgccggaagaccctattttcaggttctcttccctccattcctacc

SEQ ID NO: 84653 - DNA, 120 bp, synthetic construct
  source 1..120: mol_type = other DNA
caggacaactcagactttccagatgactgcgtggctggtggtattaggagcacatttagttgttggactacagataatgtgtttaattttatacaagttgagttgatggtgcatgtggag

SEQ ID NO: 84654 - DNA, 120 bp, synthetic construct
  source 1..120: mol_type = other DNA
tgagctgagatagcaccgctgcaccccaccctgggtgatagagctagactttgtctcaaaaaaaaaaaaaaaaaaagtaacccaggaagaggcctactgtgaaagtaaagagatttttga

SEQ ID NO: 84655 - DNA, 120 bp, synthetic construct
  source 1..120: mol_type = other DNA
gcaattctcctgcctcactgtcctgattagctgagactacaggcacgcgccaccatgcccagctaattttggtatttttagtagagatgggggtttcatcatgttggccataatggtctt

SEQ ID NO: 84656 - DNA, 120 bp, synthetic construct
  source 1..120: mol_type = other DNA
ggcagggggctgacccccccacctccctcctggagggggcggctgccgggcggagatgctcctcacttctcagacggggcggctgccgggcggagggtctcctcccttctcagacgggga

SEQ ID NO: 84657 - DNA, 120 bp, synthetic construct
  source 1..120: mol_type = other DNA
ataaatgccctccatgttccaattacttttttttttttgagacagtgtcttaccctgtcaccaagctggagtgcagtggtatgatcttggctcactgcaacctctgcctcctgagttcaa

SEQ ID NO: 84658 - DNA, 120 bp, synthetic construct
  source 1..120: mol_type = other DNA
ccatctcgcccggcctacttagatgttatattagtggtaattcctgttatcctgtgagctctttagtgtctaaacaattttttttaagagatggggtctcactgtgttgcccagttgcaa

SEQ ID NO: 84659 - DNA, 120 bp, synthetic construct
  source 1..120: mol_type = other DNA
ttgggggagacagggaacttgggaaacagaaataaaaacaaaagaaagaatttccctgcccccacatcccatggagagggcacagggccctggtaaatagtaatatgagggagagagaca

SEQ ID NO: 84660 - DNA, 120 bp, synthetic construct
  source 1..120: mol_type = other DNA
agcgcagaagactctgattcctctcctcggtcctaagaccgaatgtgtgtcaggacatgtggtcagggaagagaagctatttaactgaaccagtaatagtagcaggaaaagaaaaagtgg

SEQ ID NO: 84661 - DNA, 120 bp, synthetic construct
  source 1..120: mol_type = other DNA
caagttctaagttctcctcacagcttgagcctaggcgtctggctccagccttgtctttctcctgcacagcatctctaccacttcaggaaccctcctccgcctgccagagacatgaagatt

SEQ ID NO: 84662 - DNA, 120 bp, synthetic construct
  source 1..120: mol_type = other DNA
ataccctgatacagatatacctggtagggggaggtgctcaggcactggaatgagaggagttaacggggaaggacagggttatttctgggccaagattcagagtttcccatggacacccag

SEQ ID NO: 84663 - DNA, 120 bp, synthetic construct
  source 1..120: mol_type = other DNA
atgagtttggtgccccctaagtgagataacctgaaagaaagtgccacacagaaggggtgcttaggaaacatttgtcccctgctccctctgtggagtttgacccaccctccccttgcacat

SEQ ID NO: 84664 - DNA, 120 bp, synthetic construct
  source 1..120: mol_type = other DNA
gtacatctatgggaagccagtgcagggggtggcatatgtgcgctttgggctcctagatgaggatggtaagaagactttctttcgggggctggagagtcagaccaaggtaggaaggagaat

SEQ ID NO: 84665 - DNA, 120 bp, synthetic construct
  source 1..120: mol_type = other DNA
atagagttttaaatgaatctcctttgtgctcaaacagcatgtctttaaattatcggagagtagctggtggaagtgggcttagctagaagactgcatgtctgtccaatgcttcaaaggagg

SEQ ID NO: 84666 - DNA, 120 bp, synthetic construct
  source 1..120: mol_type = other DNA
atggaaggagaggctttctaaggtctattgagggaaaccagtatccaaactcctttcttagtttttatcagtaacacagatgtttttacaccgaacgtggaattaatacaggtgaaaagg

SEQ ID NO: 84667 - DNA, 120 bp, synthetic construct; identical to SEQ ID NO: 1465
  source 1..120: mol_type = other DNA

SEQ ID NO: 84668 - DNA, 120 bp, synthetic construct
  source 1..120: mol_type = other DNA
gtgtggttagtgtgaagtagggaacacaatgaattataaaggcaagtctgagtcaatcctactgacctgggcttgctgaattttgttttcaattactgataactctttcatggcctcggg

SEQ ID NO: 84669 - DNA, 120 bp, synthetic construct
  source 1..120: mol_type = other DNA
ggctgaggaggaggtggccattctggacatttctctacaggaaccgtgggctgaacaattttttgagtaggtttagggagactggggagattggcataaatcatcttcagactctccttt

SEQ ID NO: 84670 - DNA, 120 bp, synthetic construct
  source 1..120: mol_type = other DNA
tacaataacttagatctaagaagcagatgttcagggcaaaacagtgaaagggtagcagtgcgtcacaggcataatctacagcagaagcgctttaaatgaatctcctttgtgctcaaacag

SEQ ID NO: 84671 - DNA, 120 bp, synthetic construct
  source 1..120: mol_type = other DNA
ggtcccaaggatccatggcctgacttggggggaaggtggggtacttggctctgagctactaccctattcgcacctgaccccctctccaggtatctgcaggctccccacatccagcgatag

SEQ ID NO: 84672 - DNA, 120 bp, synthetic construct
  source 1..120: mol_type = other DNA
ccttggacacagctctgtatgctgcaggcagcaagtcccacaagcccctcaacatgggcaaggtttgtccagaccctctccacagctctctcacccctccatggctcatccccctgcttc

SEQ ID NO: 84673 - DNA, 120 bp, synthetic construct
  source 1..120: mol_type = other DNA
gaacggtcccctcctcactcccgtccaccgtggtcccccagccctggagatcctgcaggaggaggacctgattgatgaggatgacattcccgtgcgcagcttcttcccagagaactggct

SEQ ID NO: 84674 - DNA, 120 bp, synthetic construct
  source 1..120: mol_type = other DNA
tacaattctgatccaactctgtccctggagttgaaactcaaagttctgggggagtctgcgctagcagggcaggctgtagtcctgtgtgacctcacaaccatgttttccctgagacagaag

SEQ ID NO: 84675 - DNA, 120 bp, synthetic construct
  source 1..120: mol_type = other DNA
cataatgagaagcaagtccttatccccaaccctcctttcctgccctccaggctcacagcctttgtgttgaaggtcctgagtttggcccaggagcaggtaggaggctcgcctgagaaactg

SEQ ID NO: 84676 - DNA, 120 bp, synthetic construct
  source 1..120: mol_type = other DNA
aagggccaggggaccaggctcttctccctgccttcctgtttactcgtggtctcccttcactttcagataacctgtactggggctcagtcactggttctcagagcaatgccgtgtcgccca

SEQ ID NO: 84677 - DNA, 120 bp, synthetic construct
  source 1..120: mol_type = other DNA
gctgttttgaggaaggagataagttattggagccgcaaaaacaggtttgcttgtgcccttctaacatcgccttcccttttctgttgctgaagttttccttgggcagcaagatcaatgtga

SEQ ID NO: 84678 - DNA, 120 bp, synthetic construct
  source 1..120: mol_type = other DNA
tcacatgtcccacgtcctctccctgccccttgctgagccaggtccttcgtacctacaatgtcctggacatgaagaacacgacctgccaggacctacagatagaagtgacagtcaaaggcc

SEQ ID NO: 84679 - DNA, 120 bp, synthetic construct
  source 1..120: mol_type = other DNA
tatttggctaaaatagttatcaaccctcttacggctctcaaaacatttttatttatttatttagtaaagacagggtctcgctctgttgcccaggctggtcttgaactcccggcctcaagc

SEQ ID NO: 84680 - DNA, 120 bp, synthetic construct
  source 1..120: mol_type = other DNA
ccagcgcaaccctgtacgactactacaaccccggtgagcactgcaggacaccctgaaattcaggagaactttggcataggtgccctcctatgggacaatggacaccggggtagtgagggg

SEQ ID NO: 84681 - DNA, 120 bp, synthetic construct
  source 1..120: mol_type = other DNA
aatcagatgcgcaacttcctggttcgagcctcctgccgccttcgcttggaacctgggaaagaatatttgatcatgggtctggatggggccacctatgacctcgagggacagtgagtcatc

SEQ ID NO: 84682 - DNA, 120 bp, synthetic construct
  source 1..120: mol_type = other DNA
tctgttatcagtggaatgaggtgactttcccggagttgtgcaatcctcaggtccggcagtgtcttcttccagttactggtttcaaacaagccaaaagtctgactttggtgtgtttgtgaa

SEQ ID NO: 84683 - DNA, 120 bp, synthetic construct
  source 1..120: mol_type = other DNA
agctgtcattgcccaaccccagaaatcccaatcctgttttctccctctcagtcctgatcatggattcagcagcagcgaactcgccaatgtagtgggtggcacagccagggtcttgactct

SEQ ID NO: 84684 - DNA, 120 bp, synthetic construct
  source 1..120: mol_type = other DNA
ttctgggcacttttgtgagtgaaaggaggcactaataacaatcacactgggatacctgtatatactggaatgccccaggcaaaccaggcttaaactgtattactctatctgtagcttaaa

SEQ ID NO: 84685 - DNA, 120 bp, synthetic construct
  source 1..120: mol_type = other DNA
attttttctttcttaaacaaattttttttttgttagagatggggtcttgctatgttgcccaggctggtcttgaattcctggtctcaagtgatcctcccacctcggcctcaagtgggagcc

SEQ ID NO: 84686 - DNA, 120 bp, synthetic construct; identical to SEQ ID NO: 27622
  source 1..120: mol_type = other DNA

SEQ ID NO: 84687 - DNA, 120 bp, synthetic construct; identical to SEQ ID NO: 27623
  source 1..120: mol_type = other DNA

SEQ ID NO: 84688 - DNA, 120 bp, synthetic construct; identical to SEQ ID NO: 27624
  source 1..120: mol_type = other DNA

SEQ ID NO: 84689 - DNA, 120 bp, synthetic construct; identical to SEQ ID NO: 27625
  source 1..120: mol_type = other DNA

SEQ ID NO: 84690 - DNA, 120 bp, synthetic construct
  source 1..120: mol_type = other DNA
aactcccacccatgccgttttcttgactcccacctggagtttctgggtccgggcccggccgtccacctgcacactctgaggctcccctgaaaacgttggggatcgagggttacccaggga

SEQ ID NO: 84691 - DNA, 120 bp, synthetic construct; identical to SEQ ID NO: 27627
  source 1..120: mol_type = other DNA

SEQ ID NO: 84692 - DNA, 120 bp, synthetic construct; identical to SEQ ID NO: 27628
  source 1..120: mol_type = other DNA

SEQ ID NO: 84693 - DNA, 120 bp, synthetic construct
  source 1..120: mol_type = other DNA
aagttctcctcacagcttgagcctaggcgtctggctccagccttgtctttctcctgcacagcatctctaccacttcaggaaccctcctccgcctgccagagacatgaagattctgctcat

SEQ ID NO: 84694 - DNA, 120 bp, synthetic construct; identical to SEQ ID NO: 84662
  source 1..120: mol_type = other DNA

SEQ ID NO: 84695 - DNA, 120 bp, synthetic construct; identical to SEQ ID NO: 84663
  source 1..120: mol_type = other DNA

SEQ ID NO: 84696 - DNA, 120 bp, synthetic construct; identical to SEQ ID NO: 84664
  source 1..120: mol_type = other DNA

SEQ ID NO: 84697 - DNA, 120 bp, synthetic construct; identical to SEQ ID NO: 84665
  source 1..120: mol_type = other DNA

SEQ ID NO: 84698 - DNA, 120 bp, synthetic construct; identical to SEQ ID NO: 84666
  source 1..120: mol_type = other DNA

SEQ ID NO: 84699 - DNA, 120 bp, synthetic construct; identical to SEQ ID NO: 1465
  source 1..120: mol_type = other DNA

SEQ ID NO: 84700 - DNA, 120 bp, synthetic construct; identical to SEQ ID NO: 84668
  source 1..120: mol_type = other DNA

SEQ ID NO: 84701 - DNA, 120 bp, synthetic construct; identical to SEQ ID NO: 84669
  source 1..120: mol_type = other DNA

SEQ ID NO: 84702 - DNA, 120 bp, synthetic construct; identical to SEQ ID NO: 84670
  source 1..120: mol_type = other DNA

SEQ ID NO: 84703 - DNA, 120 bp, synthetic construct; identical to SEQ ID NO: 84671
  source 1..120: mol_type = other DNA

SEQ ID NO: 84704 - DNA, 120 bp, synthetic construct; identical to SEQ ID NO: 84672
  source 1..120: mol_type = other DNA

SEQ ID NO: 84705 - DNA, 120 bp, synthetic construct; identical to SEQ ID NO: 84673
  source 1..120: mol_type = other DNA

SEQ ID NO: 84706 - DNA, 120 bp, synthetic construct; identical to SEQ ID NO: 84674
  source 1..120: mol_type = other DNA

SEQ ID NO: 84707 - DNA, 120 bp, synthetic construct; identical to SEQ ID NO: 84675
  source 1..120: mol_type = other DNA

SEQ ID NO: 84708 - DNA, 120 bp, synthetic construct; identical to SEQ ID NO: 84676
  source 1..120: mol_type = other DNA

SEQ ID NO: 84709 - DNA, 120 bp, synthetic construct; identical to SEQ ID NO: 84677
  source 1..120: mol_type = other DNA

SEQ ID NO: 84710 - DNA, 120 bp, synthetic construct; identical to SEQ ID NO: 84678
  source 1..120: mol_type = other DNA

SEQ ID NO: 84711 - DNA, 120 bp, synthetic construct; identical to SEQ ID NO: 84679
  source 1..120: mol_type = other DNA

SEQ ID NO: 84712 - DNA, 120 bp, synthetic construct; identical to SEQ ID NO: 84680
  source 1..120: mol_type = other DNA

SEQ ID NO: 84713 - DNA, 120 bp, synthetic construct; identical to SEQ ID NO: 84681
  source 1..120: mol_type = other DNA

SEQ ID NO: 84714 - DNA, 120 bp, synthetic construct; identical to SEQ ID NO: 84682
  source 1..120: mol_type = other DNA

SEQ ID NO: 84715 - DNA, 120 bp, synthetic construct; identical to SEQ ID NO: 84683
  source 1..120: mol_type = other DNA

SEQ ID NO: 84716 - DNA, 120 bp, synthetic construct; identical to SEQ ID NO: 84684
  source 1..120: mol_type = other DNA

SEQ ID NO: 84717 - DNA, 120 bp, synthetic construct
  source 1..120: mol_type = other DNA
tctttcttaaaaaaatttttttttaagagatgggttcttgctatgctgcccaggctggtcttaaattcctagtctcaaatgatcctcccacctcagcctcaagtgtgagccacctttggg

SEQ ID NO: 84718 - DNA, 120 bp, synthetic construct; identical to SEQ ID NO: 27622
  source 1..120: mol_type = other DNA

SEQ ID NO: 84719 - DNA, 120 bp, synthetic construct; identical to SEQ ID NO: 27623
  source 1..120: mol_type = other DNA

SEQ ID NO: 84720 - DNA, 120 bp, synthetic construct; identical to SEQ ID NO: 27624
  source 1..120: mol_type = other DNA

SEQ ID NO: 84721 - DNA, 120 bp, synthetic construct; identical to SEQ ID NO: 27625
  source 1..120: mol_type = other DNA

SEQ ID NO: 84722 - DNA, 120 bp, synthetic construct; identical to SEQ ID NO: 27626
  source 1..120: mol_type = other DNA

SEQ ID NO: 84723 - DNA, 120 bp, synthetic construct; identical to SEQ ID NO: 27627
  source 1..120: mol_type = other DNA

SEQ ID NO: 84724 - DNA, 120 bp, synthetic construct; identical to SEQ ID NO: 27628
  source 1..120: mol_type = other DNA

SEQ ID NO: 84725 - DNA, 120 bp, synthetic construct; identical to SEQ ID NO: 27629
  source 1..120: mol_type = other DNA

SEQ ID NO: 84726 - DNA, 120 bp, synthetic construct
  source 1..120: mol_type = other DNA
gaggcagctctggaaaaggtggaggctggactgggactcacctgtggtgctgtcagcagagatggggcccagtcgtttcctgcctgacagaccatagagcaggaacctgtatttcctact

SEQ ID NO: 84727 - DNA, 120 bp, synthetic construct
  source 1..120: mol_type = other DNA
catttcttagcggcctcctctaaaacgcttgttttagaatctgtgccctgcattgctgtaagcagctcacaaacagtggtgcatttaaccctcgcacaacatatgaagtgggtgccatta

SEQ ID NO: 84728 - DNA, 120 bp, synthetic construct
  source 1..120: mol_type = other DNA
gagcggctcctcaggggcctccggggcctcagtgctgggttctgtggggctgggggtctcttcctctgcagtggagaaggagggagagagagtgagggggatgtccttgggtcctgggga

SEQ ID NO: 84729 - DNA, 120 bp, synthetic construct
  source 1..120: mol_type = other DNA
agctcttcatcctctcctcccctgcggcctttcctatccctcaccctgacccccctgccctcggcccccacctcacccccacctcccaacacccaggccacctctccctgtccctccagc

SEQ ID NO: 84730 - DNA, 120 bp, synthetic construct
  source 1..120: mol_type = other DNA
gtttccaaatctgttactgggaggagctttgctacaaaggtgttctgtgatttgcacacaaatattcatagcagcattattcttgatagctaagaggtggaagcaacccagatgtccatc

SEQ ID NO: 84731 - DNA, 120 bp, synthetic construct
  source 1..120: mol_type = other DNA
attgagccactgtactccagcctgggtgacaaagcgagactctatctcaaaaaaaaaaaaaagaaagaaagaaaaagaaagaaatgcatggtctcttgccctaggccaagcctgctgaat

SEQ ID NO: 84732 - DNA, 120 bp, synthetic construct
  source 1..120: mol_type = other DNA
gccctactgcacactcaccagttaaaccaacagcagacacggggcccacgcgctggccaccgtggaagccgtacaggttcatcttgtacttgtggtctggctccaggcccgagatggtga

SEQ ID NO: 84733 - DNA, 120 bp, synthetic construct
  source 1..120: mol_type = other DNA
tcacacaggcacagctgctggggccatctcagcacagacctgggcaaccacatcctcatccctgggagaccccaggcctggtgagtggtcccctcctctgctcccacacttcaggatgat

SEQ ID NO: 84734 - DNA, 120 bp, synthetic construct
  source 1..120: mol_type = other DNA
gcataattccatccattcaattttaggtgagtttctggaggtcgttggccagaggacattgataccctaaaattacagtgtccggatcagggcaaggaattctttgctgaatgaacaaat

SEQ ID NO: 84735 - DNA, 120 bp, synthetic construct
  source 1..120: mol_type = other DNA
aagggaaggagggagaaaccatggccactactgggtatgtgaggtcatttcagaaaagcccattcttggggctgggtggtcctgctcaactgacagctaacacacatgacaagttccagg

SEQ ID NO: 84736 - DNA, 120 bp, synthetic construct
  source 1..120: mol_type = other DNA
ttcctggatccagctcctcaccagctgccagcagcctcagagcatctttaccctgaattcccctggataccttcctaccccacctccagtccccgatcctagtttgagccactgtcacct

SEQ ID NO: 84737 - DNA, 120 bp, synthetic construct
  source 1..120: mol_type = other DNA
ccacatcctcttgtggggctgaaaggtaatatagggggatacagagtttaagggtttaagggcaacttgctttgctggtgctgtcaacagaggtcatacatcaaatgtgcccctccagag

SEQ ID NO: 84738 - DNA, 120 bp, synthetic construct
  source 1..120: mol_type = other DNA
tggatcacctgaggttgggaattcgagtctagcttggccaatatcatgaaacccggtctctactgaaaatacaaaaattagccaggcgtggtggcatgcacctgtaatcccagctactca

SEQ ID NO: 84739 - DNA, 120 bp, synthetic construct
  source 1..120: mol_type = other DNA
tcaggagtttgagcagcctgaccaacatggagaaactccctctctactaaaaatacaaaattagccagatgtggtggcgcatgcctgtaatcccagctactcgggaggctgaggcaggag

SEQ ID NO: 84740 - DNA, 120 bp, synthetic construct
  source 1..120: mol_type = other DNA
tataacaaagaatgctgttattaagatggaaagaaaggaaaattctcgtaagtcaggcttggtgtgcgcctgacatatttcactcttggaggttatcagtggttgaccattagagggagg

SEQ ID NO: 84741 - DNA, 120 bp, synthetic construct
  source 1..120: mol_type = other DNA
gaagccgtacaggttcatcttgtacttgttgtctggctccaggccggagatggtgaccctgtcctcatgtcctggcacccgtgttgccttgggctgcccatccccattcttgtactggac

SEQ ID NO: 84742 - DNA, 120 bp, synthetic construct
  source 1..120: mol_type = other DNA
caagatcacgccactgcactccatcctgggagacagcgagactccttctcaagaaaaaaacaaacaaacaaaaacaaacaaacaaacaaaaaacagcaatcagggccaggcgtggtggct

SEQ ID NO: 84743 - DNA, 120 bp, synthetic construct
  source 1..120: mol_type = other DNA
tacaatttttcccactgaaatcagtgataattatgagaatttgccctaagcggttttcaggaactacctaccttcctcagaagggaaagactgcagttatctctcattgtgtgtgagagc

SEQ ID NO: 84744 - DNA, 120 bp, synthetic construct
  source 1..120: mol_type = other DNA
gggggctaggaagagatagaaacagaatcttttctcttgctgcaaggaggtgttgaggccccagctgtcttgaattcaggtcagaaggtgggcccagtctggccctaacttaagatcgat

SEQ ID NO: 84745 - DNA, 120 bp, synthetic construct
  source 1..120: mol_type = other DNA
gttcgtttttaaaatactgcagtagtataaccacacaatgcaatactgtttggcaataaaaagcagtgtagtggctgagagagagcaggtggctcatgcctgctatcccagcactttgta

SEQ ID NO: 84746 - DNA, 120 bp, synthetic construct
  source 1..120: mol_type = other DNA
aagaaagaaagaaagaaagaaagaaagaaagaaaacattctagtgattctagtggaggaagtgggtggggcagagatgagccagactggccagaagtcgatatttgattgaaggaggatg

SEQ ID NO: 84747 - DNA, 120 bp, synthetic construct
  source 1..120: mol_type = other DNA
ggtactggggaaaaggagggagaagccaaggctatgactgggggacccgaggtcagttcagagaggcctactcttggggctgggtggtcctgctcagctgacagctaacacacatgacaa

SEQ ID NO: 84748 - DNA, 120 bp, synthetic construct
  source 1..120: mol_type = other DNA
atgtcattccggtcacctcctatgcggaccatttggagttgcccgtctctatctgtgtactggatttcgaaggagtcaaattctccctcagtcaccatccaggagagatgcagggtgtgt

SEQ ID NO: 84749 - DNA, 120 bp, synthetic construct
  source 1..120: mol_type = other DNA
gacgctttgttccagtatcatccatagcactccgggcttctgagatggagacacggagaggaaacggctgagctgtttctggaagactgggtgacctcgacgggcaggattgagaggtct

SEQ ID NO: 84750 - DNA, 120 bp, synthetic construct
  source 1..120: mol_type = other DNA
tacgacacaggtagttctcacccttctccgttccctttcttattctgcaccggctggcccgggagaactaaggctcccactgggcctggtgaaggagcgtgggctgcctgtgagaatgtt

SEQ ID NO: 84751 - DNA, 120 bp, synthetic construct
  source 1..120: mol_type = other DNA
attacaggcatgagtcactgtgctagccccatgtggcttttcaaatgagacagagcaggtggacaaagggaagactcagcagagggagtgaagagaagggtgggaaggctgtggcctcag

SEQ ID NO: 84752 - DNA, 120 bp, synthetic construct
  source 1..120: mol_type = other DNA
aacatggcgaaaccctgtttctactaaaaatacaaaaaattagctgggtgtggtggcacgtgcccgtaatcccagttactcgggaggctgaggcaggagaattgcttgaacttgggaagc

SEQ ID NO: 84753 - DNA, 120 bp, synthetic construct
  source 1..120: mol_type = other DNA
tcacccgtcacgatgaccacagacagggggcccatgcgttgcccatcatgtagtccatacatgttcatcttatattttctctcaggctccaggttgtagactgtgacctctcgctggtct

SEQ ID NO: 84754 - DNA, 120 bp, synthetic construct
  source 1..120: mol_type = other DNA
aattccatctatatgccaatgactccagatttacaccctctgtccagacctctcctgaaccccagactagtgttcgtgcaacgtcttccttggaggcctacttgtgtgtcaaactcaaca

SEQ ID NO: 84755 - DNA, 120 bp, synthetic construct
  source 1..120: mol_type = other DNA
tttccccaccactcatcactgtcacatccggtgccactgacatatttgtgcaatttgttgcctgtccctctccactagaatgtgagctcctcaggcaggagctctgctttattcactgct

SEQ ID NO: 84756 - DNA, 120 bp, synthetic construct
  source 1..120: mol_type = other DNA
aagatgccagacatgttacatcaccacctttaaccgtgacaacaagctgggcagcgtttactccctcctgaatatgaggaagctgaggttccaggagaggaggtaagtttttcaagatca

SEQ ID NO: 84757 - DNA, 120 bp, synthetic construct
  source 1..120: mol_type = other DNA
attttttaatctttccccttatagtaaaagttatttttgagaaaggtgtgtctttgtttctgtgagcaaaggaaaaaagagattcccctcactgtgactaaaccgggcaggtcagcccga

SEQ ID NO: 84758 - DNA, 120 bp, synthetic construct
  source 1..120: mol_type = other DNA
aaaaaaaaaaaaaaaaaagacaagaaagaaaagaaagcttgcttcaagctgtactgatgaagaggccaatgtctcacgcgcattctcccatccaagtactaaccagacctgaccctgctt

SEQ ID NO: 84759 - DNA, 120 bp, synthetic construct
  source 1..120: mol_type = other DNA
aagagatagaggcataaagggctgctggctttgctgctgctgcccacagatgacagccatggaaatgcccttacgctgtgggctcaggggctctgtagcctttgtatttgccattcggtc

SEQ ID NO: 84760 - DNA, 120 bp, synthetic construct
  source 1..120: mol_type = other DNA
ctaagtgttatacatatattaactcatgtaattccaacagctctgtgcagagggactgaaatccagccacctgacagaagggaaagctgaggcacagagaggttaagcaatttgcacaag

SEQ ID NO: 84761 - DNA, 120 bp, synthetic construct
  source 1..120: mol_type = other DNA
gaggttcatcttatacttccggtcgggatccaggccggggacagtaacctcattctcatcccccgcaacaggcactgcctggggctgcccctgtgcatccttgtactggaccatgaatga

SEQ ID NO: 84762 - DNA, 120 bp, synthetic construct
  source 1..120: mol_type = other DNA
acaaaagtgcatttgctgagggagtacagagggactgaaatccagccagcactctgcttgccgagctgtgtgccctggtgaggagtggtgtccactttaaggaatgggtgccttctttca

SEQ ID NO: 84763 - DNA, 120 bp, synthetic construct
  source 1..120: mol_type = other DNA
ctcctgacctataaagtaggcatgcctcccaggtgtgctttatggggtgtgatgatccacttagagaacatcttgatcacaactgactctcaataaatgcacaaaaggtatttatgtaag

SEQ ID NO: 84764 - DNA, 120 bp, synthetic construct
  source 1..120: mol_type = other DNA
aaacctcttcagggcagtacagagggcagggtgttactgctgtcactcacagatcttggcttcagccaccagcggaccatgcctcttcttgccaacaaacccatacaggacaaatttgta

SEQ ID NO: 84765 - DNA, 120 bp, synthetic construct
  source 1..120: mol_type = other DNA
aaagctgcaggtggagggccagggaccttcagcctctctcctggaatctctgtcccaccctcggcctttttacctctgcctctttcccctctccccacccatccttatcattgttttaag

SEQ ID NO: 84766 - DNA, 120 bp, synthetic construct
  source 1..120: mol_type = other DNA
gaaggggcagggtgagaaaaagaggagagtccagtatgagaactagaaaggaatccccagtccccaggttctgccctccagcctctaagagccttgttctacttctacttctggttccct

SEQ ID NO: 84767 - DNA, 120 bp, synthetic construct
  source 1..120: mol_type = other DNA
ggcagtgggaggaattcatgaatgcaggctccaacggcaggtgaggctggacaagggataggtgtcccgtggccccagcccacactacctgtggtggtgatgaaggcgtaggacttggag

SEQ ID NO: 84768 - DNA, 120 bp, synthetic construct
  source 1..120: mol_type = other DNA
gagtcggggaagagaacatgagctacagcgaggtgggtgtccccctgtcacaggaaaagaaaaatatccaggtatctgttaagaaacctcgaggtttagtggaaaatcactgctgtgaga

SEQ ID NO: 84769 - DNA, 120 bp, synthetic construct
  source 1..120: mol_type = other DNA
caggtgggtgtctggttcttcaatcatcatctttccttccaagagcctagcccccatccagccccttccttctgccctcccggagggcagattccctctctagtccagatctccactcag

SEQ ID NO: 84770 - DNA, 120 bp, synthetic construct
  source 1..120: mol_type = other DNA
gaaccacctgctcaaagttccacaaatatgtttcctgattgttgattttgtacctggcatcatgctgggcattggagacacaaaaataaaatatatggtccctgtcctcaggtagctgag

SEQ ID NO: 84771 - DNA, 120 bp, synthetic construct
  source 1..120: mol_type = other DNA
tatatatatcctttagacacttcttggttcctcctgagatccatctgggaacagtcccctgaaagtccatcaacctaacccatgtctcctacgtctcctagcaccatcttactggtctga

SEQ ID NO: 84772 - DNA, 120 bp, synthetic construct
  source 1..120: mol_type = other DNA
acaaggaatatctgaacctctttctcattcaggaactcatctccctcagtttccccatgctttctctcacattcatagtggagctagcactttgcaaaatagcaacattccttcacttag

SEQ ID NO: 84773 - DNA, 120 bp, synthetic construct
  source 1..120: mol_type = other DNA
caactggaaagcggcgcccttgacaacaccaaggatcggtttgtatttatttactcagagcaggagacaactgctgccctaaaagctcctcttatctcaagtgtttattttaattcttct

SEQ ID NO: 84774 - DNA, 120 bp, synthetic construct
  source 1..120: mol_type = other DNA
aactggtttgcatgtactgatgacaaggaggtgggagatgaagttcacagactcaaaattattgcaacagcctagacagcttggcccaaaccaaaaaagataacattgaacagggccaaa

SEQ ID NO: 84775 - DNA, 120 bp, synthetic construct
  source 1..120: mol_type = other DNA
gggtccactctgtccgaactgttgtctcctccaagagatgcatcctcatgccctcaatggttggcacctctgcccaagagaatgggttagggaaagctggttagcacaaggcaaccaccc

SEQ ID NO: 84776 - DNA, 120 bp, synthetic construct
  source 1..120: mol_type = other DNA
tggaggggcaggtgcggatgctgcagtcctcactcacgtagccttcccaacagatgcacacaccgtcctggcacacgccgtgctggctgcagtcattcgggcactgcctcacaccgcaat

SEQ ID NO: 84777 - DNA, 120 bp, synthetic construct
  source 1..120: mol_type = other DNA
ccacagtcctcgccagtgtagccggggttacacacgcagcgcccattctcacagcgccccctctgactgcaaccgcgagggcagctcctcatgccacagtcgtcaccagtgtagcctggg

SEQ ID NO: 84778 - DNA, 120 bp, synthetic construct
  source 1..120: mol_type = other DNA
cacagccagtggaagggggcaggttaatgcggtgggtgaataccacctgcttctcccctccttccactgtgtgctcgtaaagctgagaagaggggcttcccactccagcccccactgtgt

SEQ ID NO: 84779 - DNA, 120 bp, synthetic construct
  source 1..120: mol_type = other DNA
agggcagtcttccattactctctatcacaatatcctgttcctgttcttcatggcatttactgctgcctgagttatcagtttacttattacctttctctcaatgctacaatgggagctcct

SEQ ID NO: 84780 - DNA, 120 bp, synthetic construct
  source 1..120: mol_type = other DNA
atatcaagacttattttaaaggtgcaaggatagacagatgaaacagaatagggcccagaaacaggcccacacatatgtggtcaactaattaacgacaaaagtgcccctgcagttaagagg

SEQ ID NO: 84781 - DNA, 120 bp, synthetic construct
  source 1..120: mol_type = other DNA
acaaaatttcaggtcatcaaattacatcattaagagaataagaaggcagctgggtgtggtggttcacacctgaaatcccagcactttgggaggctgaagtgggcggatcatgaggtcaag

SEQ ID NO: 84782 - DNA, 120 bp, synthetic construct
  source 1..120: mol_type = other DNA
ggtctcaaactcctgacctcaagtgatctgccttggcctcccaaagttattaggattacaggcatgggccaccacacccaccctatttcattttattttaagataaactctacctctgtc

SEQ ID NO: 84783 - DNA, 120 bp, synthetic construct
  source 1..120: mol_type = other DNA
agctaccaaaaaaagaaaaaagaaaaaagaaaacactctgaataatgccgtttatatgaggttcaaaaacaggcagaggctgggtgcagtggctcatgcctgtaatcccggcactttggg

SEQ ID NO: 84784 - DNA, 120 bp, synthetic construct
  source 1..120: mol_type = other DNA
atccccaatctcacaccccctccagccaccacatatttctctcctctacttcatggccacagttgtcaaaatttatttgtatttgatgtttacatttccttatagcctatgcatgcctca

SEQ ID NO: 84785 - DNA, 120 bp, synthetic construct
  source 1..120: mol_type = other DNA
ttaattcatttccttctctcccacttaccttcattctaatccaagcttccatccgcctcttgcctgacaactgcaattgcctcctggctgctttttttttctttttttttgagacagggt

SEQ ID NO: 84786 - DNA, 120 bp, synthetic construct
  source 1..120: mol_type = other DNA
tatccctgcatctggcacataactggtgctcaataaatatttaccgactatatgaatgaatgaaaagttcaatgtaaacgcaggactagcattaaggctggaaccaagggcaggaccaag

SEQ ID NO: 84787 - DNA, 120 bp, synthetic construct
  source 1..120: mol_type = other DNA
acgcacacatcttctggctttctactcttaaacttttctcctggatcagagaaaaaggagtaattggggctaccagccatcacattctgctaccagccagcaagagacggaaagggagct

SEQ ID NO: 84788 - DNA, 120 bp, synthetic construct
  source 1..120: mol_type = other DNA
tgctcttctctcggtactgggcaagcaaagaattgggtgtctcttgtgtctccccttcaccattccccctgccactatgtctggggtggttctctgtagtgtgtgtttggagagagatat

SEQ ID NO: 84789 - DNA, 120 bp, synthetic construct
  source 1..120: mol_type = other DNA
cgtgagtcatgagtgcagagctctggccaagaacaagttttaggatcctctctgcaggctctgtgcacgtcccagacccgagtcctgactgtcccatttcagtatttcctaaagagatct

SEQ ID NO: 84790 - DNA, 120 bp, synthetic construct
  source 1..120: mol_type = other DNA
ctccctgtctagcatcactgtctcaccataccctcatctcaacccccagccccggtcttacctcccacgtcctttccctatgccatttttagctcaccctaatttttgcccaacttgaca

SEQ ID NO: 84791 - DNA, 120 bp, synthetic construct
  source 1..120: mol_type = other DNA
cccacataagtctgttgggtgtttccctagcttcatctccccatgtgctgccctgacaaggagctgaaaaagagactttgctacagaggagaaatatcccagctgagtgggaacccacta

SEQ ID NO: 84792 - DNA, 120 bp, synthetic construct
  source 1..120: mol_type = other DNA
catttgattcaccctttggtttccaggctcatggagaagctcatgtcttgtatgttcacatcttgtaagaaaagcaccaagccttgcacagtgtaggtgaccaataaatgcaagtcaaca

SEQ ID NO: 84793 - DNA, 120 bp, synthetic construct
  source 1..120: mol_type = other DNA
aaggaagggtttggacccttaaaacttcctttgcctagagacatgggtgtggggagaagggaggaggaaggacatttctatctcgtgacaaaagaaagtcacacaattgttttgttctct

SEQ ID NO: 84794 - DNA, 120 bp, synthetic construct
  source 1..120: mol_type = other DNA
caccctgcatcaggtacccactcaccgtccttctcaatccttcctgccaccacaatccctcagccaagagaggtctgatgtctcatccacaccaaagtgccagctgtcccttgccaatca

SEQ ID NO: 84795 - DNA, 120 bp, synthetic construct
  source 1..120: mol_type = other DNA
aatgcacagcctagccaggcatggtggctcacacctgtaatcccagcactttgggaggccgaagtgggcagcctggccaatatggtgaaaccctatctctattaaaaatacaaaaattag

SEQ ID NO: 84796 - DNA, 120 bp, synthetic construct
  source 1..120: mol_type = other DNA
taacactagagaaacaaaataaaaaatatgcagcagctcaccacccaccccacaactgaacctcacacaatcccctcaaacaaagaagccaggactgggggttcacaggaatgagaggag

SEQ ID NO: 84797 - DNA, 120 bp, synthetic construct
  source 1..120: mol_type = other DNA
aggccagaagggtggaggcaaagatgccaacaagctccccagccctactctacatccccccactgaagacagactgctgggaacctggggtgacagagatggaagggcaggagaaactca

SEQ ID NO: 84798 - DNA, 120 bp, synthetic construct
  source 1..120: mol_type = other DNA
aagcaggaaggagacaacacttggagactgcccagcactcccacaacaaagaaggcgatgacggcaagagaaagctttgggtccccctcactgaaagcggggagaagaccaactcatacc

SEQ ID NO: 84799 - DNA, 120 bp, synthetic construct
  source 1..120: mol_type = other DNA
gcaacagaacaaggctccatctccaagaaaaaaagacaaataatggagcaggaaggggctggccagacacatcatcggtgccaaggacaccagaaccatttgtatataagcagaaggaaa

SEQ ID NO: 84800 - DNA, 120 bp, synthetic construct
  source 1..120: mol_type = other DNA
agcaaacctaaaggaccctaaaactacctggagttgatattcatatagaaacaggagtccattctgaccctcagaatgatctaatgggtccgtttcctcacttttttctcctaggtatcg

SEQ ID NO: 84801 - DNA, 120 bp, synthetic construct
  source 1..120: mol_type = other DNA
tgattctcctgcctcagcctcccgaggagctgggattacaggcgcctgccaccactccacgctaatttttgtatttttagtagagacaaggtttcaccacgttggccaggctggtcttaa

SEQ ID NO: 84802 - DNA, 120 bp, synthetic construct
  source 1..120: mol_type = other DNA
atcgcgccattgcactccagcctgggcaagaagagcaaaactccatctcaaaaaaataaaaaagagggttaagatggggaaatgggtcctttctctttgaacctgaaaataaaactcttc

SEQ ID NO: 84803 - DNA, 120 bp, synthetic construct
  source 1..120: mol_type = other DNA
tgggtagagcgagactctgtctcaaaaaaaaaaaaaaaaaaaacttcccttcccggtcctccagtcactcagattccctacacagagataaccactatcagaactatttaaccatggctg

SEQ ID NO: 84804 - DNA, 120 bp, synthetic construct
  source 1..120: mol_type = other DNA
ttgtgtatcttttttataacatgtattaatctgctagatataatctgtttgtccctccaaatccactttccatccctccctgctgtgctccctgagatccagggagaatctgaatggact

SEQ ID NO: 84805 - DNA, 120 bp, synthetic construct
  source 1..120: mol_type = other DNA
gtcctttaaaactctcaggaaacccttcttccaggggcacatcccagattcagcgccaatgtggatgaaatgtcccctcttatgagctttcatggtaccctctagtgatttttttttttt

SEQ ID NO: 84806 - DNA, 120 bp, synthetic construct
  source 1..120: mol_type = other DNA
tgcacttcagcccgagcgacagtgtgagactctgtctcaacaacaacaaaaatgtttataataaaatgttgggtggaggggaatcacacagatacatatgccctaaactgctcacaagtt

SEQ ID NO: 84807 - DNA, 120 bp, synthetic construct
  source 1..120: mol_type = other DNA
tcaggaggtcaaggctacagtgagctgtgaccctgtcactacactgtagtttgggtgacagagggaggccctatctcaaaaaaaagcaaaaaacaaaaaacaaacaaacaaaaaaatctt

SEQ ID NO: 84808 - DNA, 120 bp, synthetic construct
  source 1..120: mol_type = other DNA
ggttagagaaaggctggggacacaataccgggacatcctgctccgggcaacggaagagctgcgtctgctcctcggccacttcatctaggccagaatacaaggtgctgtctgcaagaaatg

SEQ ID NO: 84809 - DNA, 120 bp, synthetic construct
  source 1..120: mol_type = other DNA
tgagaatgggatatgggctgaaaccttccctctggccccccacccccaaatctcacagcacagaccacaattcacaagttcctgtctcttttaaggtttaacttttaatcagccaaacat

SEQ ID NO: 84810 - DNA, 120 bp, synthetic construct
  source 1..120: mol_type = other DNA
tcccttccacggtgagtgaacagttttggtcagaaagggatgaaccaggttcaggtcagcacctgaaaagaaaaccaaacaatgctaatagcagggttcttatttagactcctttctcgt

SEQ ID NO: 84811 - DNA, 120 bp, synthetic construct
  source 1..120: mol_type = other DNA
agcgagactagagactccgtctcaaacaaaaaaaaaaaaaaaaaaaaaaaaaaaaggtgggccgggcgcggtggctcacgcctgtaatcccagcactttgggaggttgaggtcaggagtt

SEQ ID NO: 84812 - DNA, 120 bp, synthetic construct
  source 1..120: mol_type = other DNA
gtctcaaacaaacaaacaaacaaacaaaaagtcaaagtgtagagaagtcctggaatggagactgggggcggatgacaatagagtggagaatggcagaggtcgtggtaaatgatagtggca

SEQ ID NO: 84813 - DNA, 120 bp, synthetic construct
  source 1..120: mol_type = other DNA
tgtgcctcagactataaaaaccatgccaggacagccaggaagggagacggtttcatcattagccaaagacttgtgtcaaaacaattctctccctggttttgtttgtttgtttttgttttt

SEQ ID NO: 84814 - DNA, 120 bp, synthetic construct
  source 1..120: mol_type = other DNA
agatagccatggacctgtagattccccctagtcttaacttgagaaacacaggactaggaagggaccaacaacctgtgaagattcagaaataggaaagagtggccaggcgcagtggctcat

SEQ ID NO: 84815 - DNA, 120 bp, synthetic construct
  source 1..120: mol_type = other DNA
agatcacatgaggtcaggagttcgagaccagcctggtcaacattgtaaaaccccatctctactaataaaatataaaaattagccaggtgtggtagcgggcgcctgtaatcccagctactt

SEQ ID NO: 84816 - DNA, 120 bp, synthetic construct
  source 1..120: mol_type = other DNA
gttcaggagctggcttgaggtagtttgccagctagtggttgtttcatcttgttcctgcacacagagcatatgatgcttgccctctaaatggatgaagtagaatttttttcttattcattc

SEQ ID NO: 84817 - DNA, 120 bp, synthetic construct
  source 1..120: mol_type = other DNA
gcaggagggaggcagcctttttggcagtgaagtgtttaatgataacagcttcaccttactaaacgctggccatgcattatgaccgtaatactcagcattgttctaaatgtcttgtatata

SEQ ID NO: 84818 - DNA, 120 bp, synthetic construct
  source 1..120: mol_type = other DNA
gctatatttattgatgatgatgattattattatttatagagtcttgctctgttgcccaagctggagtgcagtagtgtggtcatggctcaccgcagccttgacctcctgggcttaagtgat

SEQ ID NO: 84819 - DNA, 120 bp, synthetic construct
  source 1..120: mol_type = other DNA
ctgaactcaagtgatccatctgcctcagcctcccaaagtgctgggattacagatatgaaccactgcacctggcaggataatttttttcttctttcttttcttttttttcccccacaattt

SEQ ID NO: 84820 - DNA, 120 bp, synthetic construct
  source 1..120: mol_type = other DNA
cctcagcctcctgagtagctgggattacaggcacgtgctaccatgcctggctaattttgatatttttagtagagacggggtttcaccacattggccaggctggtctcaaactcctgacct

SEQ ID NO: 84821 - DNA, 120 bp, synthetic construct
  source 1..120: mol_type = other DNA
gcctacatgcagtatggcattcaccaaagtctatcagtaactaattttgtttcaactagagggtcagaggcaaaaaaattcttgctaagtctgattaagctgtgagggccccagtacctt

SEQ ID NO: 84822 - DNA, 120 bp, synthetic construct
  source 1..120: mol_type = other DNA
cactccagcctgggtgacagagggagactccatctcaaaaaaaaaaaaaaaaaaaaaagaaagcaaaaacaagaggtaaaatcttccccagtatagttaaggctccctgaatttcccttt

SEQ ID NO: 84823 - DNA, 120 bp, synthetic construct
  source 1..120: mol_type = other DNA
gcaaccaagttgaaggtatgacatagggcgagagggaagcagggagaaataaatcactgcaagagaagggcagggtgctagagaatctgcatgaacattgaaaacaaaaataataaaacg

SEQ ID NO: 84824 - DNA, 120 bp, synthetic construct
  source 1..120: mol_type = other DNA
ttgtgccactgcactccagtctgggcgacagagccagactccatctcaaaaaaaaaaaataaaataaaaataaaaaaaattagctgggaggatcacttgagaccgggagatcgaagctca

SEQ ID NO: 84825 - DNA, 120 bp, synthetic construct
  source 1..120: mol_type = other DNA
ggcctcccaaagtgctaggattacaggagtgagccaccgcgcccggccacacattgtaacattttatttcctcatgagggaggagtctgggtgaggttaagagatctgagattaagaaac

SEQ ID NO: 84826 - DNA, 120 bp, synthetic construct
  source 1..120: mol_type = other DNA
ttgaacgcctgacctcaggtgatccacccacctcggcctcccaaagtgctgagattatatgtgtgagccaccgcgctcggcctaggctaattttttttttttttttttttttgagacgga

SEQ ID NO: 84827 - DNA, 120 bp, synthetic construct
  source 1..120: mol_type = other DNA
tgggaaagctgatgcaataatcctaatgaggtaatttttccagcaagggctggggaaaaattacagattcaaaagacattgtggtggcagaactgactaggcttgagagcacaccaaaaa

SEQ ID NO: 84828 - DNA, 120 bp, synthetic construct
  source 1..120: mol_type = other DNA
tgtttttcaagaagtttggtaaggtaggcacattaaatgcgaaacatccaagggcgaacccatgatattcacacctcaccccaccctcctcccacatctcctatcacatttcctatctca

SEQ ID NO: 84829 - DNA, 120 bp, synthetic construct
  source 1..120: mol_type = other DNA
ccaggaacttcccaaatgtccttaaaaaaagcaaaaggaaaggttctgggattagcaagaaaataggcagatacctgggtggaggagggacaaaaatgtacttgcaaaaaacaggagtgt

SEQ ID NO: 84830 - DNA, 120 bp, synthetic construct
  source 1..120: mol_type = other DNA
tctctaagatggtccccagaacgcccagaactccctgtccccgcccccaaaccgagtatgcccctgccccctacctgcacggccttgaagatggcaatgatgccagtaggccagaagcaa

SEQ ID NO: 84831 - DNA, 120 bp, synthetic construct
  source 1..120: mol_type = other DNA
tccctgcccttgttcctctatcctaccagcccccagcgtatccccaatttcaagtcctgtatcgcgtccccctctttcccatgtccctgtctgcccggcactcaccgtgcccaccgggta

SEQ ID NO: 84832 - DNA, 120 bp, synthetic construct
  source 1..120: mol_type = other DNA
ctagtcctgtgtgtgcgtatgcgtagacatgcaaccctgtgttaatatgtgctcaattcaacagttgtataaacacatgtgggatgacatgtgttccactctgctgttccttcagtgggg

SEQ ID NO: 84833 - DNA, 120 bp, synthetic construct
  source 1..120: mol_type = other DNA
ggactaaggaaaggaaggaaggagaactctctggagtctcccccaccaagactcagtgattgtattgtgggaggaagtgaacaggttctcagtggagttaataacccaggtgcctccaga

SEQ ID NO: 84834 - DNA, 120 bp, synthetic construct
  source 1..120: mol_type = other DNA
catcgtcactctacaccattctgagcgcaaaaatgttttgattgagacaaatttagaccaagcaatgaccttgtaaacagagagaggggctcagacatgctgagaaatccttatctctag

SEQ ID NO: 84835 - DNA, 120 bp, synthetic construct
  source 1..120: mol_type = other DNA
ggcctaaatggatcgctccgcctgtttcctccccagcacctagggcgcaatggaatattccattgcccctcctgtcctgggtctgtgttgcggggaacgctcgcgcggttgccagagaaa

SEQ ID NO: 84836 - DNA, 120 bp, synthetic construct
  source 1..120: mol_type = other DNA
gagcttcttagcctatccccggtggctgcattgcccccttcccacagacacaccccgggactgtggtgacagtgctcgatctcttcgatgggagagagagcttgcgacccctgtgggaac

SEQ ID NO: 84837 - DNA, 120 bp, synthetic construct
  source 1..120: mol_type = other DNA
gtggggatgctgaactggggcttccatggatcaggtcagttgcttccacctctgctacaaccaatagcagtgatgacaataaagataacttacatttattgagttatttgaacaggctct

SEQ ID NO: 84838 - DNA, 120 bp, synthetic construct
  source 1..120: mol_type = other DNA
agcctggccaacatggtgaaaccccatctctactaaaaatacaaaaaaaatttagctgaatgtgggcacacgcttgtaatcccagctactcaggatgctgagtcaggagaattgcttgaa

SEQ ID NO: 84839 - DNA, 120 bp, synthetic construct
  source 1..120: mol_type = other DNA
tcccaaccccttgtatcaagccagtcactaagtcctgctgactcttctcctctccatccctatcaccccctcccccactttataaaaacttttaattttgaaattcttatagattcatag

SEQ ID NO: 84840 - DNA, 120 bp, synthetic construct
  source 1..120: mol_type = other DNA
taagtatactcacatcattgtaaaaccatcacccatcagcaccatccatctccagaacttctttttccccaaactgaaaccgtatacccattaaaaaatagactgggtgtggtggctcac

SEQ ID NO: 84841 - DNA, 120 bp, synthetic construct
  source 1..120: mol_type = other DNA
cttgtgatccgcctgcttcggcctcccaaagtgttgggattacaggcgtgagccactgcgcctggccaatatatatctctctctatatatagatagatatatattttttgagttggagtc

SEQ ID NO: 84842 - DNA, 120 bp, synthetic construct
  source 1..120: mol_type = other DNA
ggctgcagtgagccgagatctcaccattgcactcctgcctgggtgacagagtaagaccctgtctcaaaaaaaaaaaaaaaagttaccaaaatagcaaaaagcagtcatttatactcctca

SEQ ID NO: 84843 - DNA, 120 bp, synthetic construct
  source 1..120: mol_type = other DNA
cggccagtaatgcatttttgatggggtttctacagaagtgaggtcgtatcttcagtgtatcacctcatgaagtacattatatccagtaaggtagttttgagtgtcctccctgctacctgt

SEQ ID NO: 84844 - DNA, 120 bp, synthetic construct
  source 1..120: mol_type = other DNA
gtccagagaccaagtggtggccttggaaagcagatgtcaggctttggtgtgcctgtgaccacctcattgctcccatattatcccccatttttagtagagacggggttttagtagagactt

SEQ ID NO: 84845 - DNA, 120 bp, synthetic construct
  source 1..120: mol_type = other DNA
cctcctcttccttgaaagaaggaattttggctgagacaatagggccctgtctgttctggcatggggggtggtggctgactcaattctgttccccctaagccctaacaaatgtcatgaaga

SEQ ID NO: 84846 - DNA, 120 bp, synthetic construct
  source 1..120: mol_type = other DNA
attacaggtgtgagccaccgcgcccaaccagctagggttttgaaggtatgaagttataagagggcatgttaaagacaggagggttggccaggcatggtggctcacacctgtaatcccagc

SEQ ID NO: 84847 - DNA, 120 bp, synthetic construct
  source 1..120: mol_type = other DNA
tctcaggagccttctgctgggggtggggcttcacaggaggcaaaacataactgtaagtttagaatgggggtgagaggctgtcatctggagggagagcggggggcctcagtagcctcttga

SEQ ID NO: 84848 - DNA, 120 bp, synthetic construct
  source 1..120: mol_type = other DNA
gggtagtggtcacactcttggtctcctttgtccctagttcgggaggcggaaaaagatgagcgcgctctgaagcaggagattcacgagctgcgagggcgcctggagcggctggagcaggtg

SEQ ID NO: 84849 - DNA, 120 bp, synthetic construct
  source 1..120: mol_type = other DNA
tgggggcaggttgcctgggcaagaactgcttcttcaattccttaacaaatgcaaccaccaacacccagatctctctctctctttattttcagtttttttgctgttatccagataattaat

SEQ ID NO: 84850 - DNA, 120 bp, synthetic construct
  source 1..120: mol_type = other DNA
agagtggagactgcaccgaggcaagagtccatggatggggccaagagggggcaggagtggcgctgtatccacattcacttcagaagttgaagattccaaagaggagaataagtggggaga

SEQ ID NO: 84851 - DNA, 120 bp, synthetic construct
  source 1..120: mol_type = other DNA
tggtttctcgttccctcaggaaacacccagaccctcacctgggggagaaagagggtcaaagaagacaaatacatatggaggagtcagaataggtgtgatgttataatgggacctttgagg

SEQ ID NO: 84852 - DNA, 120 bp, synthetic construct
  source 1..120: mol_type = other DNA
tactgtctttctgaccacctttgcagtcctctccccattccctgtctctggtctctctcagtcttttctacacacaccatgcccccttcccccaatccactactcactttgtacccttag

SEQ ID NO: 84853 - DNA, 120 bp, synthetic construct
  source 1..120: mol_type = other DNA
cggaggttgcagtgagccaagatcacgccactgcactctagcctgggcaatggagtgagactccatttccaaaaaaaaaaaaagaaattataatcttttggatgttatcagattcaagaa

SEQ ID NO: 84854 - DNA, 120 bp, synthetic construct
  source 1..120: mol_type = other DNA
gtaacaattcacaaaaagggtgttcaggcaaatacctgtcattcctactgaggccacaggcactgtcttcccatgatgggaagggctatgctcaaaggtaagcctattgccaagcgagaa

SEQ ID NO: 84855 - DNA, 120 bp, synthetic construct
  source 1..120: mol_type = other DNA
ggtgctcaataaacacttgctgaacagattctaaggctgtatacccacccatagagccacagttaatgacagagatggcggttctgatcacaaattagatagttatcctcttgagtagaa

SEQ ID NO: 84856 - DNA, 120 bp, synthetic construct
  source 1..120: mol_type = other DNA
gaaaataacacaccatttctacacagcctatggatagcattgggacaacctagttgcacacaagccattaaacatgtcaaaggcacacagactcaatgtagaaaacatggctcccataag

SEQ ID NO: 84857 - DNA, 120 bp, synthetic construct
  source 1..120: mol_type = other DNA
aaactctggcatctcctccccacatctaccagtgtcctcttgcgagccccgccccagggctctccctcggtctttgcccccatctctggctccagctgcatcttttttttctctaactcc

SEQ ID NO: 84858 - DNA, 120 bp, synthetic construct
  source 1..120: mol_type = other DNA
aggactgttacctaattctgctcctttagtcacagtgagggtcagtgattgtaggaaaagcccaaactccccggggtccaacctgggaagaagaccctatttctgatgggcaaattataa

SEQ ID NO: 84859 - DNA, 120 bp, synthetic construct
  source 1..120: mol_type = other DNA
tccaatagcaatccggacattctctaaaagaggaagcgaaggaaagaaaggggcttatagtgggcgaggtctataggtagtcccgagcaaattgcttatggctttggttatgactgacaa

SEQ ID NO: 84860 - DNA, 120 bp, synthetic construct
  source 1..120: mol_type = other DNA
agacttgaaaggttaaagggtcataaagatagggacattattgagcttgaaagtgagtaatgggggaatgtgctagtaaaggggtttggtttggagtgatggggttggggttgaaaagag

SEQ ID NO: 84861 - DNA, 120 bp, synthetic construct
  source 1..120: mol_type = other DNA
tgagtcttcttgtccagttgtgtcccttccttgacagatttgccggcttcctgtctgactttttctgcctccctagggattccagccatttggtgataccgggggcttccacttctcatt

SEQ ID NO: 84862 - DNA, 120 bp, synthetic construct
  source 1..120: mol_type = other DNA
catacacacacacagacacacaagagcaagatgtgtcaggtgtttaatcatcattgtggggggctctggttgtagaagaaagcttggcaaggtggggttatacaggagagagattataca

SEQ ID NO: 84863 - DNA, 120 bp, synthetic construct
  source 1..120: mol_type = other DNA
tcagcctcccaaagtgttgggattacaggcgtgagccaccgcgcccagccgtctgttcctttttttagctcagagggaagaagggagaggcttggctgctctcttggcagaatttgggtg

SEQ ID NO: 84864 - DNA, 120 bp, synthetic construct
  source 1..120: mol_type = other DNA
cattagctccgactgcagtgtgaagagccctgtctcagggtgtctcctggtctgttccttcacagatactcctatgatgggaggataagacaaattatcccagggtgggtgtgggagtga

SEQ ID NO: 84865 - DNA, 120 bp, synthetic construct
  source 1..120: mol_type = other DNA
cttacacttcagcaccagtggctcgccaatccgggctgtgatgttttgagcacctactactgcccctgggagatagcaccatggtagaggggtaggaagggaatgagggctaacaaaatt

SEQ ID NO: 84866 - DNA, 120 bp, synthetic construct; identical to SEQ ID NO: 27633
  source 1..120: mol_type = other DNA

SEQ ID NO: 84867 - DNA, 120 bp, synthetic construct; identical to SEQ ID NO: 27634
  source 1..120: mol_type = other DNA

SEQ ID NO: 84868 - DNA, 120 bp, synthetic construct
  source 1..120: mol_type = other DNA
agagagggaagagtgtaatagagcccgtgatggtagaggatgaaccacaactctcaactcttgtggggacatgctactatactccaattatccacaaaataacattccaacacacagaaa

SEQ ID NO: 84869 - DNA, 120 bp, synthetic construct
  source 1..120: mol_type = other DNA
gcgctttcgtctacagaggagggagaagagcagtgaggaggatgttgatgtcctggcagggctgtcacatggcatgaccccagagtcaccattgtcatggagtaccatgttgtgcagcat

SEQ ID NO: 84870 - DNA, 120 bp, synthetic construct
  source 1..120: mol_type = other DNA
tcacactctagccctataatgaacagggttctgttcccagagttgagcaatccggggggggcccacataccagttttctccttgatttcacacaggacgctaaagagagcaggcttcatt

SEQ ID NO: 84871 - DNA, 120 bp, synthetic construct
  source 1..120: mol_type = other DNA
tttgagagggatcacttttctatgggctcccaggaataaggagagaagagagctgttggatcctggagagggccctggagttggggggggctcccagaagattcagaacatgtgaacggg

SEQ ID NO: 84872 - DNA, 120 bp, synthetic construct
  source 1..120: mol_type = other DNA
gctcagttcatatttcttgttctaatgactcccctccctgttctacttaattaaaaccgaagaggggggctgggggagataattagggaggtctccagccgctgcttaatgagccagtaa

SEQ ID NO: 84873 - DNA, 120 bp, synthetic construct
  source 1..120: mol_type = other DNA
gaggttcttgagaggatcaagggttggtatggggaggcatataggaaacctgtgaaggcgatggggtgcctagggagaaacaggagtagagccccaaagagaacaggggccaagagacca

SEQ ID NO: 84874 - DNA, 120 bp, synthetic construct
  source 1..120: mol_type = other DNA
tttcctctctgtgtgtctctgttcctgcctcagtttgcccaagcctttcaaggcccctgtgtccctacatttctgccccaggtcctctcacctcccttctttcccagtgtcagcctcccc

SEQ ID NO: 84875 - DNA, 120 bp, synthetic construct
  source 1..120: mol_type = other DNA
gaggttgcggtgaactgagattgtgccactgcgctccagcctaggtgacagagcgagactccgtctccaaaataaaataaaataaaaaatacactctattcaggagacaagatgtgtacc

SEQ ID NO: 84876 - DNA, 120 bp, synthetic construct
  source 1..120: mol_type = other DNA
agatcattaggcattagattcccgtaagaagcgagaaacttagatcccttgcatgcacagttcacaatagggttcgagttcctatgagaatttaatgcttatgctgatctgacaggaggt

SEQ ID NO: 84877 - DNA, 120 bp, synthetic construct
  source 1..120: mol_type = other DNA
tttaggagagaaactaaactcacaacccttcattttgggggatccatcttaaaaccaggaaggccttccagcctgccttttaatgggtaatcatttttggaattcctccctaccatgtat

SEQ ID NO: 84878 - DNA, 120 bp, synthetic construct
  source 1..120: mol_type = other DNA
ggcccctatcccttcaggctttgcgggttaccgcactttccatctctcgtgcgcctgactgttttgtgggaagccctctgtcccatctaaccctgttgtcctgggcatctttatcggctc

SEQ ID NO: 84879 - DNA, 120 bp, synthetic construct
  source 1..120: mol_type = other DNA
tccttgtcaaactctaggggatgcttctgtccagctttacttgtaagctcgccccattccctgtagggacctcagtgtgtgctaacctggcagacctcccgagcatcagcagccacagca

SEQ ID NO: 84880 - DNA, 120 bp, synthetic construct
  source 1..120: mol_type = other DNA
gcagtggttttctcaaacgagtctggatcagattcacctgaagggcttgttaaaacagattgcctaacattttaaattcctgagtcagtagctctgtagtggagcccaataatttgcatt

SEQ ID NO: 84881 - DNA, 120 bp, synthetic construct
  source 1..120: mol_type = other DNA
tgattactattgggagacctttggacaagtttagtagccggtctttgcctcggtttccttatctgcaaaatggggatgataatatagattgaggttgggcacagtggctcatgcctgtaa

SEQ ID NO: 84882 - DNA, 120 bp, synthetic construct
  source 1..120: mol_type = other DNA
aacacttttgttcccaagcatttcagataagggatactcaaccagcagtacgtgcctcatggggttgtgggggaggattaaatgaggtaacaatgtaaaatgcttagagtaaggcacaaa

SEQ ID NO: 84883 - DNA, 120 bp, synthetic construct
  source 1..120: mol_type = other DNA
aaacctgtagaggaggcacctcagagacctctgtattggtccctggctccctttcctccctctgccctcttaaaaaaactggtgtctggcccttccctccacctagcttcttacccagca

SEQ ID NO: 84884 - DNA, 120 bp, synthetic construct
  source 1..120: mol_type = other DNA
cccctgtttagtgatggttattagggtggaaactccctggagcccaaggctgtggccacactgtaactcagagccatctacgtccttcctcctcctctcacccacccctctccttccctg

SEQ ID NO: 84885 - DNA, 120 bp, synthetic construct
  source 1..120: mol_type = other DNA
agccttcccaatagctgggattacagccatgcaccaccacgcccagctaatttgtatttttagtagagacagggtttctccatgtttgtcaggctggtctcgaatgcccgacctcaggtg

SEQ ID NO: 84886 - DNA, 120 bp, synthetic construct
  source 1..120: mol_type = other DNA
ctgtaattatgggggagattagatgtcacacactgcatcagtcactgcctccatcctagctcattcctggatgttggcccagtgctagatgtgcaggtgaagggatcctggggcatcttt

SEQ ID NO: 84887 - DNA, 120 bp, synthetic construct
  source 1..120: mol_type = other DNA
gttatctcattcgatttttactttgcacgtaaggaagctgagtctctgaaaggttagtgacttgtgcaagtcaaatagctataggtggcagagctgggaatcaatgaaggtctgtgactc

SEQ ID NO: 84888 - DNA, 120 bp, synthetic construct
  source 1..120: mol_type = other DNA
aggtgaattgcttgagcccgggaggtagaggttgcagtgagctgagattgcaccactacattccagcctgagtgacagagcaagactctgtctcaaaaaaaaaaagctgtggttctatat

SEQ ID NO: 84889 - DNA, 120 bp, synthetic construct
  source 1..120: mol_type = other DNA
gctagaggtaccacactacctaacttaaaaatatactataaagctatagtaaccaaaacagcatggtgctggcataaaaaacagacacatagaccaatggaatgtaatagagagcccaga

SEQ ID NO: 84890 - DNA, 120 bp, synthetic construct
  source 1..120: mol_type = other DNA
atacaaaatagattaaagccttacatgtacagctggaaacttgaagccactaaaaaaaaaattcagccgggcacggtgggtcacacctgtaatcctcaaacacaaggtcaggagtttgag

SEQ ID NO: 84891 - DNA, 120 bp, synthetic construct
  source 1..120: mol_type = other DNA
tgaaaccccatctctactaaaaatacaaaaaattagccaagcatggtggtccacgcctgtgatcccagttacttgggaggctgaagtacaagaatcgcttgaatctgggaggcagaggtt

SEQ ID NO: 84892 - DNA, 120 bp, synthetic construct
  source 1..120: mol_type = other DNA
tgatagatatcccaattaccctgatttgatcatgatacattgtatgcatgtatcaaaatatcacatgtgtccaggtgcggtggctcatacctgtaatcttatcactttggcaggctgagc

SEQ ID NO: 84893 - DNA, 120 bp, synthetic construct
  source 1..120: mol_type = other DNA
gcagtgggacaaagggtgaaggtgaaagcacagacttgagaaaacttcaggagataaagtggcatgactttgtggttagttgggtgtgtggggttaaaaaaaataaaaggaggtgaaatg

SEQ ID NO: 84894 - DNA, 120 bp, synthetic construct
  source 1..120: mol_type = other DNA
gaatcacttgaacctaggaggtgaaggttgcagtgagccgagatcgtgccactgcactccaccctgggtgacagactgggactccatctcaaaaataaataaataaataaataaataaat

SEQ ID NO: 84895 - DNA, 120 bp, synthetic construct
  source 1..120: mol_type = other DNA
tttgtctgtgtggttttgattctcagatggttgttttggccaaaagctgtgtggaagcccacaggaacggggcaggtgagaacacccatattttcttcatttgctctccagtcagtgccg

SEQ ID NO: 84896 - DNA, 120 bp, synthetic construct
  source 1..120: mol_type = other DNA
tacaccccccacccccatcaaaacgacagctcactgccatccaattaatttttatttatatgatattttattgtttttagatagggtcttgctctgttacccaggcagtggtgccatcag

SEQ ID NO: 84897 - DNA, 120 bp, synthetic construct
  source 1..120: mol_type = other DNA
tggcctctttcttcagtgactttgctctcagcaccgcccccatcctccccaacacctgctcattttctccaactagatatatgcatctatatatctagttggagatatatatatatatat

SEQ ID NO: 84898 - DNA, 120 bp, synthetic construct
  source 1..120: mol_type = other DNA
ttgccttactcactccctatgaacccatgaacctgtccttcaatgggtccctattgcctttaagatattgtttaactttctcagaatgatatgcagagtcctgcaggacatgacatttgt

SEQ ID NO: 84899 - DNA, 120 bp, synthetic construct
  source 1..120: mol_type = other DNA
cttgtaatatcctgcacgtttttctctcagagcacctctgtgggctatgatcaacaggagacttgttggtctctctgtattagacttaaagtcacatgaagatggcaactgtcttactca

SEQ ID NO: 84900 - DNA, 120 bp, synthetic construct
  source 1..120: mol_type = other DNA
actttgggcaagctggtcaaccctctaggccccagtttcctgttctgtgtaaaaggggaataataatggaacctacctcatggtactgttaaaaagattaaatgacataacgcctgaaaa

SEQ ID NO: 84901 - DNA, 120 bp, synthetic construct
  source 1..120: mol_type = other DNA
cctcaaggtacaaataggaacaaattggcttggagaatgagtcccgcttcttgttctccctgggtgggcctccatgctagggagaacagagatcccaaagtggaggaatttgaagtgcat

SEQ ID NO: 84902 - DNA, 120 bp, synthetic construct
  source 1..120: mol_type = other DNA
gtttatgaactgctcttctaccctctcttgctgggctgctgtgtacagtggaccaggttgtgcagcctctatgatgactatgaaatgaatggcagcttccccccaagttgaggaatgcat

SEQ ID NO: 84903 - DNA, 120 bp, synthetic construct
  source 1..120: mol_type = other DNA
cagacacatgtcttccaagtggcacaggagtcctggaggggtaagagggggtgaggctctcaaaggccacttgaagctcctagcagtcctcctggtgcttctctcaccctccttctctac

SEQ ID NO: 84904 - DNA, 120 bp, synthetic construct
  source 1..120: mol_type = other DNA
agaggacagagggagccgtttctagcattgtacgaattctagcccatctgaggttacccagtgctcactctggattatctctgggtctcattttcatatttccttccctttattaccata

SEQ ID NO: 84905 - DNA, 120 bp, synthetic construct
  source 1..120: mol_type = other DNA
gatggtgcacaaagggggctcatggcacccttaatttggaaatattttaacattttagcaatcagtacaaccatgctggtgaatgttggttgtgggtaagtggattgccaagaattggca

SEQ ID NO: 84906 - DNA, 120 bp, synthetic construct
  source 1..120: mol_type = other DNA
gaatggctgagacttcgaagagatttcctcccggaaaggccgagcattgagccatccggggggtggggacagctggactaagaaagggcttagtaggcctgacctttcatgtccccatct

SEQ ID NO: 84907 - DNA, 120 bp, synthetic construct
  source 1..120: mol_type = other DNA
caaatgggcaagatgctggccggttttggggaaatcttggtcttcctgttgtaggggaatgttaagactgtcattatcagtgataaatgaacatagtctaccctaaattttgcagtctga

SEQ ID NO: 84908 - DNA, 120 bp, synthetic construct
  source 1..120: mol_type = other DNA
tgagtacagtaccttaaatgtactttgcctttcattatattgacttttttttttttttttttgagacagtccaggctggattgcagtggcacgaccttggctcactgcaacctccaccgc

SEQ ID NO: 84909 - DNA, 120 bp, synthetic construct
  source 1..120: mol_type = other DNA
cggcctcccaaagtgctaggattataggtgtgagccaccgcgcccagaccttcggtaaatatccttgaacttacatatttgcatggctaattattgccttaggctaaattctagaagtga

SEQ ID NO: 84910 - DNA, 120 bp, synthetic construct
  source 1..120: mol_type = other DNA
gaccagggtggtaccatcatcactacagtgaactgcagcatgccagggatacagatagttccctctgggaaatgaccctttttcctacagtatttcatcaaatagagattcattttatta

SEQ ID NO: 84911 - DNA, 120 bp, synthetic construct
  source 1..120: mol_type = other DNA
tccagaactgacctgatcttctcccttaaccttctcttccttcctgatagaattgagttttgcagttctattctttccattgtttaggcccaaatccttgaagatattgctgactcctct

SEQ ID NO: 84912 - DNA, 120 bp, synthetic construct
  source 1..120: mol_type = other DNA
aagtgctgggattacaggcatgagccactgccccccagccaaggcccttccctctctaacctcatctttgattacttctcaccatccagccccattagcttcctgctgttcttgaaacag

SEQ ID NO: 84913 - DNA, 120 bp, synthetic construct
  source 1..120: mol_type = other DNA
acagataccaagtaaatatgaaatataatatcagatagcgataaggagtatgagatgatataaggcagggtgaggggagagagaacttgggggctactttagattgggaggttggtcggg

SEQ ID NO: 84914 - DNA, 120 bp, synthetic construct
  source 1..120: mol_type = other DNA
gtgagagatgattggggcatggtgagtctgatttggaatatattttaaaactagagtgggtatagtttgactgaataaggggtacacaggttgggtctccaggaagtggactttgagatt

SEQ ID NO: 84915 - DNA, 120 bp, synthetic construct
  source 1..120: mol_type = other DNA
atgatactttcttacatctacacaagcaataaaatagtattttgtttttggagacagggtcctggtatgtcacccagtctggagtgccatggtgcaatcatagttcactgcagcctcaac

SEQ ID NO: 84916 - DNA, 120 bp, synthetic construct
  source 1..120: mol_type = other DNA
ttcaggcattgtttctttgagtacattttcctgctccattctctctctcttcttcttaaatgctgatgacagaacgttagttagctcttttgttacagtcccataaatgaacctctgttc

SEQ ID NO: 84917 - DNA, 120 bp, synthetic construct
  source 1..120: mol_type = other DNA
cacctcccaggttcaagtgattctcctgcctcagtctctcgaatagctgggattataggcatctgccaccatgtctggctaatttttgtatttttagtagagatggtgttttgccatgtt

SEQ ID NO: 84918 - DNA, 120 bp, synthetic construct
  source 1..120: mol_type = other DNA
agactctggatcttatttaagtctgttttagtgatcatcctttgacaccgcactagttgagcaaagagggtgctgcctcactgctgtcaggttgggggagaggcccaggttcctcacctg

SEQ ID NO: 84919 - DNA, 120 bp, synthetic construct
  source 1..120: mol_type = other DNA
tgggttcctaggtatctacctaagaaaaatgaaagcaggccgggtgtggtggctcacgtctgtaatcccaggaatttgggaggccgaggtgggcggatcacctgaggtcaggagtttgag

SEQ ID NO: 84920 - DNA, 120 bp, synthetic construct
  source 1..120: mol_type = other DNA
gtgaaagaagctagactcaaaaggctgcaggaatccacttacatgaaatgtctaaaataggcaaatctatagagacagaaagattagtgattgtctagggctcaggtttggaatgggggc

SEQ ID NO: 84921 - DNA, 120 bp, synthetic construct
  source 1..120: mol_type = other DNA
ctgggcaacagagcgagacactgtctaaagaaaaaaaaaattcaggaccactctggttccatctctactcccaacctccataccagattattttagaacaaatcccagatatgatatgat

SEQ ID NO: 84922 - DNA, 120 bp, synthetic construct
  source 1..120: mol_type = other DNA
cacctggtgtctttttgtctgttccaggattccatatttcttttccttttttttttgagtcgaaattttgctcttgttgcccaggctggattgcaatggtgtgatcttggctcactgcaa

SEQ ID NO: 84923 - DNA, 120 bp, synthetic construct
  source 1..120: mol_type = other DNA
ggcagattgatgccattctttcccctttatttagcagctttcagaataatgagtttgttctctagcatctgccaaaggtaaccaatgaccctttatttagtatcactatgagtcagttga

SEQ ID NO: 84924 - DNA, 120 bp, synthetic construct
  source 1..120: mol_type = other DNA
tctaattccatcacaggttatctgctgggtgtttctaatggccaacttgaagtttgtaaatgtttgatgagcatggttgagtatttttatccaaccacttcagctgcttggatgcaggca

SEQ ID NO: 84925 - DNA, 120 bp, synthetic construct
  source 1..120: mol_type = other DNA
gtgaattttaatgaataaaacatctgggattaaaactcttttttttcctccattttttgagatagggtcttgctgtgttgcccaggctggagtgcagtggtgcgatcttggctcactgca

SEQ ID NO: 84926 - DNA, 120 bp, synthetic construct
  source 1..120: mol_type = other DNA
ggagccctcgctgatagccttgggcctttttcacttgtttttctaactttggggacaaaagattttctttctttctttctttctttccttccttccttccttccttccttccttctttct

SEQ ID NO: 84927 - DNA, 120 bp, synthetic construct
  source 1..120: mol_type = other DNA
cgtgtatatttttttttcgttgttgtttctctgcctctctcgccaaactatatggagccctggctaaggatagaggactgtcagatgtgttttcaggggaatcgctgttttcttcacatc

SEQ ID NO: 84928 - DNA, 120 bp, synthetic construct
  source 1..120: mol_type = other DNA
agaggactgtcggatgtgttttcagtggaatcactgttttcttcacattcttcacatcagccacctcctccactccccaccaggatgtcaactgaaacatgtctcagtccaaattcttta

SEQ ID NO: 84929 - DNA, 120 bp, synthetic construct
  source 1..120: mol_type = other DNA
agcttgaggtctttagtgtctggtttccttcgctcccttccacggttctaagattgttttctgcatcctccgtacccctccctcggtgtcttcctgctgggaactgctctttctgtctgc

SEQ ID NO: 84930 - DNA, 120 bp, synthetic construct
  source 1..120: mol_type = other DNA
taggccttttcacctaacttggttttcagattcctcccactaggacttgtgtgtttcagccttaaccatggatgggcctgacctacacgggattgagagggtcagtaaattcgtccccac

SEQ ID NO: 84931 - DNA, 120 bp, synthetic construct
  source 1..120: mol_type = other DNA
ggagctggaccctataaacatttcttctttgccattgggcacaacgttagactttgacagtaaattgcactggaaggaatactgcaagacatagcagagaaaacagcttcattctagttc

SEQ ID NO: 84932 - DNA, 120 bp, synthetic construct
  source 1..120: mol_type = other DNA
atatttgtattgtttggccccttctcagaaatcaccttttttgccatcttcctttgtctttgcctttttgtgtcgttctgtcatggagaaggataccataggatagaacacaggcctagg

SEQ ID NO: 84933 - DNA, 120 bp, synthetic construct
  source 1..120: mol_type = other DNA
tctttggagataccttgtgcatctgtggttaagtcataaccctagttaaggctcattggtttcaggtgggaggttatccttggtagagagttcaaaagccagaaatatcagctgtttgtt

SEQ ID NO: 84934 - DNA, 120 bp, synthetic construct
  source 1..120: mol_type = other DNA
ggcaagtgtgtctgttttcctaaccatcttttttctttttctttttttgagacagggtcttgctctatcacccaggctggaatacagtggtgagaacatagcttactgcagccttgacct

SEQ ID NO: 84935 - DNA, 120 bp, synthetic construct
  source 1..120: mol_type = other DNA
gcccacctcggccttccaaagtgctgggattataggtgtaagccactgtgccaggccgagaaatagaaattttaaggccttttagttcatgtgacttcagtgatctttggtaaataaaga

SEQ ID NO: 84936 - DNA, 120 bp, synthetic construct
  source 1..120: mol_type = other DNA
ctaaaaatacaaaaaattagctgggcatggtggcacgtgcctataattctagctactcagtaggctgaggcaggagaattgcttgattctgagaggcggaggttgcggtgagcttagatc

SEQ ID NO: 84937 - DNA, 120 bp, synthetic construct
  source 1..120: mol_type = other DNA
accaggtgattttgatgcatgcttaagtttgagaatcacttggctagagcacaggtgaagggagaaaatttgtatggaaaatctgtatggaagcaggaatgccacttccactgagatatg

SEQ ID NO: 84938 - DNA, 120 bp, synthetic construct
  source 1..120: mol_type = other DNA
tcattatgttggtaatgaccaaaatacaatgttgaataaaagtgatgatagtagtctccttgtcttcataattttaatgagaatgcatcccaactttctctttttggaagatgtgtttca

SEQ ID NO: 84939 - DNA, 120 bp, synthetic construct
  source 1..120: mol_type = other DNA
tgggggaaagttaggttcatggatgtgcagaccaagaataagggaaagatctcagccctaactccttcttatacagattttcaataggtccatctttttcaggtttaccctcttacccta

SEQ ID NO: 84940 - DNA, 120 bp, synthetic construct
  source 1..120: mol_type = other DNA
cggtaggtttccttcctccgcctgcctcttaaataacgtggtatctcgcagtttggctgaaacctgaattaaatgcaatgcttttttgacttttactttctcccagaacaacagttgtga

SEQ ID NO: 84941 - DNA, 120 bp, synthetic construct
  source 1..120: mol_type = other DNA
aagtttcctcggagtattatctctggatataagcttctgggctgataggtcttattttttagcagttgaaaaatgttgtgctactttcttcctgttttgggttttttggtgagaaatcca

SEQ ID NO: 84942 - DNA, 120 bp, synthetic construct
  source 1..120: mol_type = other DNA
aagtctttgctactgtgaatagtgccacaataaacatgtgtgcatgtgtctttactatagaatgatttataatcatttgggtatatgcccagtattgggattgctgggtcaaatggtatt

SEQ ID NO: 84943 - DNA, 120 bp, synthetic construct
  source 1..120: mol_type = other DNA
agtactatgctgttttgggtactgtagtcttgtagtatagtttgaaatcaggtagcatgatacctctagctttgttcttcttgcccaggattgtcttggctacgcaggctcttttttggt

SEQ ID NO: 84944 - DNA, 120 bp, synthetic construct
  source 1..120: mol_type = other DNA
ttggtatcaggatgatgctggcctcataaaatgagttagggaggagtccctatttttctattgtttggaatagtttcagaaggtatggtaccagttcctctttgtacctctggtagaatt

SEQ ID NO: 84945 - DNA, 120 bp, synthetic construct
  source 1..120: mol_type = other DNA
taaatgtgtcccagagattctggtacattgtgtcttcattttcattggtttcaaagaacatttttagttctgccttcatttcattatttacccagtagtcattcaggaacaggttgttca

SEQ ID NO: 84946 - DNA, 120 bp, synthetic construct
  source 1..120: mol_type = other DNA
agtgtggctggatatgaaattctgggttgaaaattcttttctttcagaacgttggatattggcccccactctcttctgtcttatagggtttctgcagagagttcggctgatagtctgatg

SEQ ID NO: 84947 - DNA, 120 bp, synthetic construct
  source 1..120: mol_type = other DNA
taacctttttttaaggtttttagcttctttgcattggcttagaacatgcttcttgagcttgtagttttttgttattacccaccttctgaagcctacttctgtcagttcatcaaactcatt

SEQ ID NO: 84948 - DNA, 120 bp, synthetic construct
  source 1..120: mol_type = other DNA
ggggagtgaacggttctgtctcgctggtgttccaggcgccactggggtatggaaaaaagaaaaaaagctcctacagctagttcagtgtctgcccaattggccacccagttttgtgcttga

SEQ ID NO: 84949 - DNA, 120 bp, synthetic construct
  source 1..120: mol_type = other DNA
agctatgtcagcattcttttttttttttaattatactttaagttctaggatatatatgcacaatgtgcaggttagttacatgtctatacatgtgccatgttggtgtgctgcacccattaa

SEQ ID NO: 84950 - DNA, 120 bp, synthetic construct
  source 1..120: mol_type = other DNA
tcttttgctgtgcagaagctctttagtttaattagatcccatttgtcaattttggcatttgttgccattgcttttggtgttttagacatgaagtccttgcccatgcctatgtcctgaatg

SEQ ID NO: 84951 - DNA, 120 bp, synthetic construct
  source 1..120: mol_type = other DNA
tgtcttgacccatgtttatgggccatgatgcaaatgttaatttagtgttcaaagtctttatggtgctattctggcttgtcctacttgtgtgctacttagaggtcaatctgaagcctggtg

SEQ ID NO: 84952 - DNA, 120 bp, synthetic construct
  source 1..120: mol_type = other DNA
tgaaatctacttggaaaaatgaagtatctatctgtatgtatactcaggcattgaagaaagttaatgatttaacttaaatgttaatagcagagtcattttaagggatgaggatggttatag

SEQ ID NO: 84953 - DNA, 120 bp, synthetic construct
  source 1..120: mol_type = other DNA
ataaaagtggtttgggaactgtgtggagggcagtctcccttagtaggtgtttaggaagactttacaaatgagatgacatttgacctgaatcgcaaataagtaggagcttgtcggatggat

SEQ ID NO: 84954 - DNA, 120 bp, synthetic construct
  source 1..120: mol_type = other DNA
aatggactacatccaaacaattatgaggaacaattgtgaggaactcagttccagaaacttttgtatccagtaactgataaatagataagtaatgtactaatggaaaaaactcgatcaaat

SEQ ID NO: 84955 - DNA, 120 bp, synthetic construct
  source 1..120: mol_type = other DNA
cattgcagaacatggaatttagggaggacaaattttgatgaatcaaataggtatagtgatatgggtagaagattggtttactttatcataattccttaaatacatattgtgtacttgatt

SEQ ID NO: 84956 - DNA, 120 bp, synthetic construct
  source 1..120: mol_type = other DNA
ttcaattcttcagcacatggaactttctccaggatagaccacatgatagagcacaaaacaagtctcaataaatttaagaaaactgaaattatgttaagcactgtctcagaccacagtgaa

SEQ ID NO: 84957 - DNA, 120 bp, synthetic construct
  source 1..120: mol_type = other DNA
aatccaccatgatcaagtgggtttcatagcagggatgcagggatggtctaacatatgcacgtcaataaatgtaatacaccacataaacaattaaaaacaaaaatcacatgatcatctcaa

SEQ ID NO: 84958 - DNA, 120 bp, synthetic construct
  source 1..120: mol_type = other DNA
atcattcttcacagaactagaaaaaaaaatcctaaaattcatatggaaccaaagaagagcccaaatagccaaagcaaggctaagggaaaagaacaaatctggaggcatcacattacctga

SEQ ID NO: 84959 - DNA, 120 bp, synthetic construct
  source 1..120: mol_type = other DNA
ctgtagatgagcaactcatctttttaaagtatagttactgaactgattctgagaaatctttagagagaaaaaactcaacagtacaaattaactaattgggaaagttagaatgtcctttct

SEQ ID NO: 84960 - DNA, 120 bp, synthetic construct
  source 1..120: mol_type = other DNA
aagactacaaattgggttcactgtatactgcttgggtgatgggtgcatcaaagtctcacaaatcaccgctaaagaacttactagtgtaaccaaataccacctgtccccctaaaacctatg

SEQ ID NO: 84961 - DNA, 120 bp, synthetic construct
  source 1..120: mol_type = other DNA
tcccccatttccctgctcccagtacctggtaaccaccattctactctctgcttcttcgttcaactttttaagattccacatataagtgagatcatgtggtatttatctttctgtgcctta

SEQ ID NO: 84962 - DNA, 120 bp, synthetic construct
  source 1..120: mol_type = other DNA
agggtggaggtccatcttctgtaactgcttcctgctgattttatgggcataggccctgatatggtttggatttgtgtccctgcccaaatcttatgtcaaattttaatccccaatgtcgga

SEQ ID NO: 84963 - DNA, 120 bp, synthetic construct
  source 1..120: mol_type = other DNA
gacattactgtaaagttttaagatgcaccctcctaaagcaggaataatgaaaatggactggacacatagtagtgaaactgtgtaacaccaagacaaagacaaaattctaaatattaccag

SEQ ID NO: 84964 - DNA, 120 bp, synthetic construct
  source 1..120: mol_type = other DNA
atagaatttaaatcagaaattactatttgaaataaagaatactggaagttcctgggaaagatggctgaataggaacagctctggtctgcagctcccagtgagaccaatgcagaaggcggg

SEQ ID NO: 84965 - DNA, 120 bp, synthetic construct
  source 1..120: mol_type = other DNA
cagggcatctttgaaagaaaggcagccccagtcaggggcttatatgtaaaactcccatcttcctgggacagagcacctgggggaaggggcggctgtgggagcagcttcagcagacttaaa

SEQ ID NO: 84966 - DNA, 120 bp, synthetic construct
  source 1..120: mol_type = other DNA
atgccgaaaattccaaaaaccagaatgcctcttctccttcaaatgattgcaatgcctctccagcaagagcacaaaactggacagagaatgagtttgacgaactgacagaagtaggcttca

SEQ ID NO: 84967 - DNA, 120 bp, synthetic construct
  source 1..120: mol_type = other DNA
acaccaaaatataaagaccaacgacactatgaagaaactgcaccaactaatatgcaaaataaccaactagcaccaggaggacaggatcaaattcacacataacaatattaaccttaaatg

SEQ ID NO: 84968 - DNA, 120 bp, synthetic construct
  source 1..120: mol_type = other DNA
tcaataaacataatccatcacatgaacagaaccaatgacaaaacccacatgattatctcaatagatacagaaaaggccttcgattaaatttgataccccttcatgctaaaaacactcaat

SEQ ID NO: 84969 - DNA, 120 bp, synthetic construct
  source 1..120: mol_type = other DNA
aaagctggaggcatcatgctacctgacttcaaactatactataaggctacagtaactaaaagaacatgggactggtaccaaaactgatatatagaccaatagaacagaagagaggcttca

SEQ ID NO: 84970 - DNA, 120 bp, synthetic construct
  source 1..120: mol_type = other DNA
taaaaaagaatgagttcatgttctttgcaggaacatggatgaagctataaaccatcattctcagcaaactaacacaggaacagaaaactaaacactgcatgttcttgctcataagtggga

SEQ ID NO: 84971 - DNA, 120 bp, synthetic construct
  source 1..120: mol_type = other DNA
tcattttcagccagaatgctatttttttagaggggagtcaggtaaaattaaagttcatgtggtggaacatattccaaaagagccaagaaaacaaagaacaaagagcagaatgagacatgc

SEQ ID NO: 84972 - DNA, 120 bp, synthetic construct
  source 1..120: mol_type = other DNA
catctgtgtggctgcaaaggacatttcattcttgttaatggctgggtagtattccatggtatatatgtaccacatttctttatccagtccactactgatgggcacctaagttgattccgt

SEQ ID NO: 84973 - DNA, 120 bp, synthetic construct
  source 1..120: mol_type = other DNA
tttgcttgagcccaggagtttgagaccagcctgggcaacataagacctcatctctagcaaacctaaaaaataaaaaattagttgggcatggtggcgtgcatttgtagtcccaactactca

SEQ ID NO: 84974 - DNA, 120 bp, synthetic construct
  source 1..120: mol_type = other DNA
tttggcaatggcagaatcatttagccaaaggcaaaaggttggaaacaagctaaatgtctatctttaaggaaatggttgaataagcagtaattcattcacactactggatgctgtgctatt

SEQ ID NO: 84975 - DNA, 120 bp, synthetic construct
  source 1..120: mol_type = other DNA
tcttgaacttctgatctcatgatctaccctcctcggcctcccaaagtgctggaattacagacatgagccccacacccagccaggaaattgcatttttaatgcactactaactcagggagt

SEQ ID NO: 84976 - DNA, 120 bp, synthetic construct
  source 1..120: mol_type = other DNA
tagctgggcttggtggtgcactcctgtaatcccagctacttaggaggctgaggcatgagaatcgcttgaacccaggaggaggaggttgcagtgagccaagatcatgccactgcactccag

SEQ ID NO: 84977 - DNA, 120 bp, synthetic construct
  source 1..120: mol_type = other DNA
ttctgcaacttcctgcacacttgagtctttctctcctgaaggcatttagtttatccacatcccatgattgaactaaatgtatattcagggtgtgggctaaccagcacagtattgaacagt

SEQ ID NO: 84978 - DNA, 120 bp, synthetic construct
  source 1..120: mol_type = other DNA
tactgcacctggagcatggcacgacagcctttaaccctttacctttcttttactctttgtaattcactcagcatatcaacaccttatccatctgctgtgacatattgtataccactactc

SEQ ID NO: 84979 - DNA, 120 bp, synthetic construct
  source 1..120: mol_type = other DNA
caaaactctccttcttttcttgggcttcctgtccttttagtacacctgactcactcttctttacttgggattccagtgtttctggtacactcacctcagtgttctttacttgggattctg

SEQ ID NO: 84980 - DNA, 120 bp, synthetic construct
  source 1..120: mol_type = other DNA
taaatgaactgacatttgttcagtggattatggctaatgaataatgcttagtggctaacagaggatgtattctgaaaagaaatagaatttgttttaaggaaaaattgtgggaggaagcaa

SEQ ID NO: 84981 - DNA, 120 bp, synthetic construct
  source 1..120: mol_type = other DNA
ttgcagtgggctgggattgcaccactgcactccagtctaggtgacagagtgatactccatctcacacacacacacacaaaaaaaaaaaaaaaaaaaaagaagacctaggtttattattcc

SEQ ID NO: 84982 - DNA, 120 bp, synthetic construct
  source 1..120: mol_type = other DNA
ctcggcctcccaaagtgctgggattacaggcgtgagccaccacacccagccaattacaggaaaatttcttgcttaaaagtgaattattggacttttcgttttttacatttagggtttgat

SEQ ID NO: 84983 - DNA, 120 bp, synthetic construct
  source 1..120: mol_type = other DNA
tctcccagatttcaagatagttcatacatcttttccttctcttggacctcataatcatctaacacatacagtgtaaatcttcataatataaagacttggaagccctggctgcaagtacat

SEQ ID NO: 84984 - DNA, 120 bp, synthetic construct
  source 1..120: mol_type = other DNA
ggatgttggcgcattataatttttctgaatgcatactgtttcttgtaccatgaatcaaaagaaattaatttccccggctgggtgcagtggctcacgcctgtaatcccagcactttgggat

SEQ ID NO: 84985 - DNA, 120 bp, synthetic construct
  source 1..120: mol_type = other DNA
ggaggcaatgtgttagtatgggaagagtgggaagagtgtgtattttggagataggacatcctgggtttaaatcctgacaccaatgtttaccaactctttaaccttgggtaaatacctgag

SEQ ID NO: 84986 - DNA, 120 bp, synthetic construct
  source 1..120: mol_type = other DNA
aaagaaagatcagtgaggattttctaactcaagagaaacccaccttccaatagtatccttcctaggtgaacttagaaacaggacttggagggagcacaaaactctgtttcatcctcagga

SEQ ID NO: 84987 - DNA, 120 bp, synthetic construct
  source 1..120: mol_type = other DNA
acattattttttgacattgatacgaatttttttttaatatatttttttgagacagggtctcagtctcccaggctgcagtgcagtggcatgaacatggctcactgcagcttccacttccgg

SEQ ID NO: 84988 - DNA, 120 bp, synthetic construct
  source 1..120: mol_type = other DNA
caatgtctaaaatagtattttattgggacatacccatgctcattcttttatatattgtctatgactgtttttgtgctacaacagcagggttgagtagttgtgacagagactttaaggctt

SEQ ID NO: 84989 - DNA, 120 bp, synthetic construct
  source 1..120: mol_type = other DNA
gttccagctatatggtacttgctatcttgcttttcctcaaatagtctggaaatgttcctaccctagggtggtttacttgttgtcttctctgattgaaatattcccccctcagatattgcc

SEQ ID NO: 84990 - DNA, 120 bp, synthetic construct
  source 1..120: mol_type = other DNA
accaaaatagaaaccaaaaacaacaaaagtgtcagtgcaaataaaggaatcgagatgctacaaaagaccagaggaaactgagaaaaacagtaggagcttactggttgctattggaccaat

SEQ ID NO: 84991 - DNA, 120 bp, synthetic construct
  source 1..120: mol_type = other DNA
tttcctgggccttgaagcatgacaagattacgaaggaattcttaacaggacccgtttaggattaaaacaagtttattggggggtctgaagaaactccccaggccttcacaaacaagttta

SEQ ID NO: 84992 - DNA, 120 bp, synthetic construct
  source 1..120: mol_type = other DNA
tttaaaggaccttcacccattcctgcatgtaagttaggacaattttagaacactaagataaaatgcaaaaacagcaatcatggaatttttgaaactaactgtacgactaagggggaatta

SEQ ID NO: 84993 - DNA, 120 bp, synthetic construct
  source 1..120: mol_type = other DNA
taggctaacaaagtattcattttgcagtatttccatttttttagtgcattttcttatgattttgaggaaattttgctttctctccacatttctattttgttccttgtattgttagtgctt

SEQ ID NO: 84994 - DNA, 120 bp, synthetic construct
  source 1..120: mol_type = other DNA
ctttggcctcccaaagcgctggaattacaggcatgagccaccgcacctggccaattgcctggtatgttttaaaattccttcatttaaatttttctgtgtgtcaccttattttaggtatat

SEQ ID NO: 84995 - DNA, 120 bp, synthetic construct
  source 1..120: mol_type = other DNA
ctgagtagctgtgactacaggcatgcaccaccacactcacctgatgtttgtattttttgtagagacaggatttcaccatggtgcccagcctggtctccaactcctgagctcaagcaatcc

SEQ ID NO: 84996 - DNA, 120 bp, synthetic construct
  source 1..120: mol_type = other DNA
tttttgcaggtgatctgcttctctggttgtctttatgatttgctttttaatgtctgtcagcttactacgatgagttttggcacatgtaagtgtgtgtgtgtgtgtatatatctgtctgtg

SEQ ID NO: 84997 - DNA, 120 bp, synthetic construct
  source 1..120: mol_type = other DNA
tgatatagagtatatgcttggatggggggcagaatgtttagtgggatttttcttgttactcccaaattgacaagtaggatcacaaagctgaggaaaaagaggttataacttcccattacc

SEQ ID NO: 84998 - DNA, 120 bp, synthetic construct
  source 1..120: mol_type = other DNA
aatatgtattgtacaagacatttgggtgtctgctctagatgacatcaaaggacagtcagtctcaggttctcagagaaaagaacctacaactaacagaggaaggagattgcatgccccaaa

SEQ ID NO: 84999 - DNA, 120 bp, synthetic construct; identical to SEQ ID NO: 27636
  source 1..120: mol_type = other DNA

SEQ ID NO: 85000 - DNA, 120 bp, synthetic construct
  source 1..120: mol_type = other DNA
aagctgctacctctgtttcctcatcccctcaccattcctcccaagagcttaactttagctttcctttctttatatgtgttcctatattccatttctgctccttggaaatcactcttaccc

SEQ ID NO: 85001 - DNA, 120 bp, synthetic construct
  source 1..120: mol_type = other DNA
ttaatttcaggctgaggaatcccagcgatgttaggtttgcttaaatcatttgtaactgagatatgagaaccaaatttgcattttggaaaggtaggacatagtgtgaaaggcggtttcacg

SEQ ID NO: 85002 - DNA, 120 bp, synthetic construct
  source 1..120: mol_type = other DNA
ccttaaaggccctcttcatttactggacccaacagctttgggtatagtctcgggtagagactgccatatctttctgtttcctttgaatagcattataatgtttgagagaacactgaaagc

SEQ ID NO: 85003 - DNA, 120 bp, synthetic construct
  source 1..120: mol_type = other DNA
agtgtgcctgagactggccactaggagaggagagggttttaagaggggttggcctgagtgtttttaataatttaacatgattagaaaattatggtatgctaccaggctacagtaagcaaa

SEQ ID NO: 85004 - DNA, 120 bp, synthetic construct
  source 1..120: mol_type = other DNA
caaccattgtgggaaacagtgtggcaattcctcaaagaccccaaaacggagctaccattcgacccagcaatcccatttctggctatatgcccaaagtaataaaaattgttctatcataaa

SEQ ID NO: 85005 - DNA, 120 bp, synthetic construct; identical to SEQ ID NO: 27635
  source 1..120: mol_type = other DNA

SEQ ID NO: 85006 - DNA, 120 bp, synthetic construct; identical to SEQ ID NO: 27636
  source 1..120: mol_type = other DNA

SEQ ID NO: 85007 - DNA, 120 bp, synthetic construct; identical to SEQ ID NO: 27637
  source 1..120: mol_type = other DNA

SEQ ID NO: 85008 - DNA, 120 bp, synthetic construct
  source 1..120: mol_type = other DNA
tttttcctgcccatactctctgatgacttctctgaaaaggacactatgccttcaatttggattttggcttgtaatttctagctgtgagaccagtaatcccttctcctgacctcaggtggg

SEQ ID NO: 85009 - DNA, 120 bp, synthetic construct
  source 1..120: mol_type = other DNA
tgagtcactgttggtatgtgttaccttggaagctgagtttagaactaaaataatgggaaatactacagttacgaatcaaaaaggttgacttgcagtcctaatcttgaagactttgggtaa

SEQ ID NO: 85010 - DNA, 120 bp, synthetic construct
  source 1..120: mol_type = other DNA
tgaaagaaacaaggttccctctagggaggtatatttgtgtaggggagaaacttggacacctttctgggtctaaattatgattctatgactatgtattcttgagtaagtatttggctcagt

SEQ ID NO: 85011 - DNA, 120 bp, synthetic construct
  source 1..120: mol_type = other DNA
ttgacctgctgataaactttctcccctgccctttattttttaataaaatagtaagtttgattttttccatagagttatttaaaaggtgagagaatgatgtgtcacatgaaagcaaaacac

SEQ ID NO: 85012 - DNA, 120 bp, synthetic construct
  source 1..120: mol_type = other DNA
catgttgcaactcaagttccaatagacatcagtggactttgataagtgcaccacagagaaacaaataaataactgactaattgcctgtatagatgacttatctagaaagcagaaatggat

SEQ ID NO: 85013 - DNA, 120 bp, synthetic construct
  source 1..120: mol_type = other DNA
cacaactgtgaagttaggaaagtctgtcaaagcaagagatggctagtgctccatccagccgaagaggtcgaagtggttctggaaacttaggtggtggtcatggaggtggtttcggtggga

SEQ ID NO: 85014 - DNA, 120 bp, synthetic construct
  source 1..120: mol_type = other DNA
acactgctggagataattgagtttcactcatgaagggaaatggtcaaacttacaagaggatcctgtagctgaaaaacaaagataaatcaacgtgtacagcctgctgaaagaggagctagt

SEQ ID NO: 85015 - DNA, 120 bp, synthetic construct
  source 1..120: mol_type = other DNA
cttctagaggttcataatgtcttaaacttatatgtacttttgtcagtctaattttctttttctttttttttttctttttgagacagagtcttgctctgttgcccaggctggagtgcagtg

SEQ ID NO: 85016 - DNA, 120 bp, synthetic construct
  source 1..120: mol_type = other DNA
gtgatccacccaccttggcctcccaaagtgctaggattacaggcatgagccaccttgcctggccaaatttttgtatttttagtagagacggggtttcaccatgtttgtcaggctggtctc

SEQ ID NO: 85017 - DNA, 120 bp, synthetic construct
  source 1..120: mol_type = other DNA
atagttagaaccagaattcagggcagtaaatatccagttttaatggtcgtagtgtggttgtgtgggatgctgcctgccctctacacattttgggtttgttttcccaagttatcttatagg

SEQ ID NO: 85018 - DNA, 120 bp, synthetic construct
  source 1..120: mol_type = other DNA
tagggcatttgagacagggaacaggccctctagacactgtagaagatcaaggaacctggagggagaaggatagataaggtacttaccattggatccaggatattgtactaaaaaatagaa

SEQ ID NO: 85019 - DNA, 120 bp, synthetic construct
  source 1..120: mol_type = other DNA
aatataattggttgcccagagagatggttagtgttaatccaaactgcaccattttgtaagcctccagcaatttgaagaccttggtaaaagtgaaacattccacgggggttcgggctgtga

SEQ ID NO: 85020 - DNA, 120 bp, synthetic construct
  source 1..120: mol_type = other DNA
caaggtgaaggtttttataggatccttgccaacctaagggatactagggaaaggcaaaactttgttattaggtattaacattactgatggtagggaaaggtgaaacacttcctgtcagta

SEQ ID NO: 85021 - DNA, 120 bp, synthetic construct
  source 1..120: mol_type = other DNA
gcctcccaaagtgctgggattactgcacccagccgaaagcctgttatgttatttagcaacactgcttacataagaatgatccttgatgttagactgcatctgaactgggagaattgtaaa

SEQ ID NO: 85022 - DNA, 120 bp, synthetic construct
  source 1..120: mol_type = other DNA
cttcctttccggtttcaatttgtgactttttgtacctttatttttattctctttctcaacatactcatttcccttctttattctcttatgtgccaattcacttactctttctgcttccaa

SEQ ID NO: 85023 - DNA, 120 bp, synthetic construct
  source 1..120: mol_type = other DNA
catggaaagcacagcaggaagtttaggtgctgggttctaagtctttattaagtattggctctacagagctagattatatgctgaagtggaaacagcttaggaccatctctagcaggatat

SEQ ID NO: 85024 - DNA, 120 bp, synthetic construct
  source 1..120: mol_type = other DNA
acaatataagggacctacaggaatggaggcctcctcctgctttcagtgatggttgaaaatcttcagagggttgggaaagactcactccatattaatctgttatgcctctatttttcttct

SEQ ID NO: 85025 - DNA, 120 bp, synthetic construct
  source 1..120: mol_type = other DNA
caaatgtagacaccaggagcaaaatttccacttcagtggaggaacaaattaagtttataaatgcttctttcttcatcttggaggatcccggttactggtggaatctgccagctggaactg

SEQ ID NO: 85026 - DNA, 120 bp, synthetic construct
  source 1..120: mol_type = other DNA
gaaaccctgatgagtttcatctttcttgtctttggctttaaggtcactcttggtgtggggaatctgcagggctggaaaagctggttaaatttggaccaagtgcattcatctttttatttc

SEQ ID NO: 85027 - DNA, 120 bp, synthetic construct
  source 1..120: mol_type = other DNA
gagcatgactcaagggtgtttatctcagggagtttcagatcaagcatttactacatatttgatttacatggaaaggcagcaagaaggtaagtaggcattttccttttttccttaggagac

SEQ ID NO: 85028 - DNA, 120 bp, synthetic construct
  source 1..120: mol_type = other DNA
tttcctcatctctaaaacagaagttgtgtcctctgtcttacctatattgtgaagttgcagtgaaaaatcaggagtaataacagaagggaaagatgaaaagttgtattagaaatgttatgg

SEQ ID NO: 85029 - DNA, 120 bp, synthetic construct
  source 1..120: mol_type = other DNA
attcctgacctaaagtaatatggaataatgaggagaaaggaatttttctttctttttttttttgagacaatctctctctgtcacccagactggagtgcagtggcacagtctcggctcact

SEQ ID NO: 85030 - DNA, 120 bp, synthetic construct
  source 1..120: mol_type = other DNA
aagaaacaactttgctagtaggaaatgtgaccctaatatgcaaccacaaatgtaatagtcagtatgaaaacttttgtaggaaaagcacatagatcagaaaaaaaaccctgtccagtcagg

SEQ ID NO: 85031 - DNA, 120 bp, synthetic construct
  source 1..120: mol_type = other DNA
agattaaataacttgcctatgttcaaataaatagtaagtagggagctgggatacaactccagttagcctggctctagagtctgcatacttaactgctaggcaatactcctctgtaaattg

SEQ ID NO: 85032 - DNA, 120 bp, synthetic construct
  source 1..120: mol_type = other DNA
ctgtaggtaggctcataaagtggccacacttgcaagtgatcccatgtcttttcccccttagacactatgcaggagtgaaagtttcaggggaatattcagctttactatatttccaatatt

SEQ ID NO: 85033 - DNA, 120 bp, synthetic construct
  source 1..120: mol_type = other DNA
aagcgtttatggtactgaaacaaccaagaacttgctcaattcccttgtaaattgtgctagatacccacatctctaagtgcacgccaattgcttaaaagcatcagcgttaatccccctttg

SEQ ID NO: 85034 - DNA, 120 bp, synthetic construct
  source 1..120: mol_type = other DNA
accgaaatcattttagaaaggggacccttgattaggtctcattaagtacaatgggccatcaactactagaatgcttgggtttgaattctggttcctctacttactagctgtgttactctg

SEQ ID NO: 85035 - DNA, 120 bp, synthetic construct
  source 1..120: mol_type = other DNA
gggattacaggcgtgagccaccgcgcccggccgtcatatcctcatttaatttactcaccatccaaagacaattcctcatcttaaggatgcttattatcataatgctttttataattccta

SEQ ID NO: 85036 - DNA, 120 bp, synthetic construct
  source 1..120: mol_type = other DNA
agctgggaccacaggtgcacaccaccatgccagctaattttttattcattgtagagacagggtctcactctgttgttgaggctgtgatgtctggttttttgtatgtttgttttagaaaaa

SEQ ID NO: 85037 - DNA, 120 bp, synthetic construct
  source 1..120: mol_type = other DNA
cttaggtatagcagctgcagtgctctaaatgatttcccctttggagggtttttatggcaagcctgcctcacatgggtcctctgcagattttgctgaagaaactgaatatttgagtttatt

SEQ ID NO: 85038 - DNA, 120 bp, synthetic construct
  source 1..120: mol_type = other DNA
tgctcaatgatggggaaggaaaaggaggtgagggacaaaatctcagcagggttagggaatgttccttagttctgtgacacactaaagagacttagaatttggaaatatgaaatttccctc

SEQ ID NO: 85039 - DNA, 120 bp, synthetic construct
  source 1..120: mol_type = other DNA
gaggacatttttctgtccctataagtcttctttcattggtgattctgctgctctgttctttccttctctacctttcctccacctcttcctctctctccttaattttctttctgttttccc

SEQ ID NO: 85040 - DNA, 120 bp, synthetic construct
  source 1..120: mol_type = other DNA
taatacaacgtggttgactatttccccaaaattcccttgtagttaggtgtggctatatgcttgagttctagccaatctaatgttgttagaagtgatatgaaagtcatccaggcttgtttg

SEQ ID NO: 85041 - DNA, 120 bp, synthetic construct
  source 1..120: mol_type = other DNA
ttttgtctttaaaaagaataccacaaacaagatggagaatttggaaagagtagtttggagggaagatggtcaaataaaagttattatctagtcttggaagaagataccgattatctttaa

SEQ ID NO: 85042 - DNA, 120 bp, synthetic construct
  source 1..120: mol_type = other DNA
gagcacagcagggtggctagatacaaaatctactctcaaatatacaacatataacttatattccaacaataattatttgtaaaatccatgtagagagatagtattcacatccgaaacaaa

SEQ ID NO: 85043 - DNA, 120 bp, synthetic construct
  source 1..120: mol_type = other DNA
atgaacaagcaatttatatagggtgaagcctcactagctagtaagcctatgagaagatactcaatttcaggagtgagcagggaatgcagattttaaaaattgtatacgtattcaagtggc

SEQ ID NO: 85044 - DNA, 120 bp, synthetic construct
  source 1..120: mol_type = other DNA
aaagcacttacctagagagttggttgatggtgctaaaatacacacacagaaaacatgaggtgaatcatgagagtttggatccctaatctttacatatcagcttcagttgctgtcaccccc

SEQ ID NO: 85045 - DNA, 120 bp, synthetic construct
  source 1..120: mol_type = other DNA
aagatatactcagaaatgtgaagacaatagtatttttttttcagcttcttttctgaaaatgagtgctctccttccatacttggcagtcattgtgatgggaattaagtacaaaacacattc

SEQ ID NO: 85046 - DNA, 120 bp, synthetic construct
  source 1..120: mol_type = other DNA
agaaataatggagggaagactagcagggcgtgggaacctagaaacttaggatgactgagatttataggttatgttagggggactggaaagtcagagaaatagtcatttgggtttatgaat

SEQ ID NO: 85047 - DNA, 120 bp, synthetic construct
  source 1..120: mol_type = other DNA
tactggaggccttggacagccagggagggatttttgggtagctcacctttgtgtggttgacagggttgtttgtagatattcaatattaataaaatgaaaaaatgctcaccagaatgacta

SEQ ID NO: 85048 - DNA, 120 bp, synthetic construct
  source 1..120: mol_type = other DNA
agagtgtgatgttccccttcctgtgtccatgtgttctcattgttcaattcttctttgggtatatacccagtaatgggatggctgggtcaaatagtatttctagttctagatccctgagga

SEQ ID NO: 85049 - DNA, 120 bp, synthetic construct; identical to SEQ ID NO: 27638
  source 1..120: mol_type = other DNA

SEQ ID NO: 85050 - DNA, 120 bp, synthetic construct
  source 1..120: mol_type = other DNA
tccagcttcatccatgtccctacaaaggacatgaactcatcattttttattgctgcatagtattccatggtgtatatgtgccacatattcttaatctggtgtatcattgatggacttttg

SEQ ID NO: 85051 - DNA, 120 bp, synthetic construct
  source 1..120: mol_type = other DNA
acacggtgaaaccctgtctctactaaaaatacaaaaattagccgggcgtagtggcaggcgcctgtagtcccagcaactcgggaggctgaggcaggagaatggcgtgaacccgggaggcag

SEQ ID NO: 85052 - DNA, 120 bp, synthetic construct
  source 1..120: mol_type = other DNA
taagtatagccacccctaccgtcttttgttttccatttgcatggagcatcttcttttcatccctttactttcattctatatgtatccttagagctggagtgtgtctgctacaggcagcat

SEQ ID NO: 85053 - DNA, 120 bp, synthetic construct
  source 1..120: mol_type = other DNA
ttgacataatgtcttggagaagtcttctttgggttaaatacaattggagagttttgagtttcatatatcgagatgtctatatctcttcacagatttggaaagtttttagcaattatgcct

SEQ ID NO: 85054 - DNA, 120 bp, synthetic construct
  source 1..120: mol_type = other DNA
ctcaagtttgtgtccttttttccaatcccacaaagtcaaactgactgtgagatgtttccttttgttgtccatggtggctcatttggggactcagcctagatgggagagtgaaatgtgtga

SEQ ID NO: 85055 - DNA, 120 bp, synthetic construct
  source 1..120: mol_type = other DNA
cagactcctatattaatttcttagcaatacaataatttaccactttgtgttgaatatgcatgtcgggatcctaaaagagaagataaaaacataatgagattttacttcaacaagtgagtc

SEQ ID NO: 85056 - DNA, 120 bp, synthetic construct
  source 1..120: mol_type = other DNA
gttagggatagccatggtacattgaaattagtggtactggtgtgtcccttcaaaaaagtagacagcgcattgccgtcttctcataactctcacgtttcaaaacctgaatttgatatccag

SEQ ID NO: 85057 - DNA, 120 bp, synthetic construct
  source 1..120: mol_type = other DNA
accctaactgtgttcactctcgttattctaggatacattatattttttggtccggccacttcactaaggccatcttcatgaatggatttaggctttttactgaaccatctgttccagtgc

SEQ ID NO: 85058 - DNA, 120 bp, synthetic construct
  source 1..120: mol_type = other DNA
cccttggagctcaggtaattttcttttaaaatattcttattacttttgctaaactctgtgatttttttttttttttgagatggagtcttgcactgtcacccaggctggagtgcaatggcg

SEQ ID NO: 85059 - DNA, 120 bp, synthetic construct
  source 1..120: mol_type = other DNA
ttcctcctcagttgaaccctttactccccaggcaggaagaatgttaaagggaatcagtggtctacgaagctatccactggggtatggggaaaatattagaacttctattttctgtgtaat

SEQ ID NO: 85060 - DNA, 120 bp, synthetic construct
  source 1..120: mol_type = other DNA
actcatcggggaggaaaggataactagatggtgtactcagtactactgtatattccttttcttcctttagtgtctgaaatgccctgtctatagggcagttagaagatggtccaccctatt

SEQ ID NO: 85061 - DNA, 120 bp, synthetic construct
  source 1..120: mol_type = other DNA
tgtaactcttttttttaattttttttgaagatagagtttcactcttgttgcccaggctggagagcagtggcaccatttcggctcactgcaacctccacttcctgggtttaagcaattctc

SEQ ID NO: 85062 - DNA, 120 bp, synthetic construct
  source 1..120: mol_type = other DNA
aatccagtccagaggtctatggtgctaggaagagtgagccagtaaatgggatctcataagccactgtggagaacaaggaagagtaataacaccttttattgagtgtctattgactacaaa

SEQ ID NO: 85063 - DNA, 120 bp, synthetic construct
  source 1..120: mol_type = other DNA
ttctgatctaattttataaagtctccattctttcctgaatgtaacgtttgatgtttctgcccggttagcttagtcattagctaatgattgaacagagacaatgcctagaaccaaagcaaa

SEQ ID NO: 85064 - DNA, 120 bp, synthetic construct
  source 1..120: mol_type = other DNA
ccagggtacacctgttaactactaaagatatggccagaacagttatctcattctaaaagtttatccactcccatacaaggtttaatttctttcaccagggtgaaacatctcagggtacaa

SEQ ID NO: 85065 - DNA, 120 bp, synthetic construct
  source 1..120: mol_type = other DNA
tgtgcctgtaaaaatcctgagaccctagcaggcagggacagaagcggctggacgtcaaaaggaacacatcagtggaagaacacacaagtggctggatgtcaagagggacacatcggttaa

SEQ ID NO: 85066 - DNA, 120 bp, synthetic construct
  source 1..120: mol_type = other DNA
gttttcaaggaatatgaagtggccagtgtcactggtatgaactgatccaggaaaacaacagtaggaaaataagttagaaagataatggatcagccaggcatggtggctcatgcctgtaat

SEQ ID NO: 85067 - DNA, 120 bp, synthetic construct
  source 1..120: mol_type = other DNA
agctgtttattgattaacagagggcttctaaagggcagttatttagataagaacttcttagatgagagtgcaacttcgctgagcgtagtagattctaatcttaggccctttgccatagac

SEQ ID NO: 85068 - DNA, 120 bp, synthetic construct
  source 1..120: mol_type = other DNA
tatggtaacaccaatgtttatctattccctgggccaatctactaaattatcatgatatggataataatcctccatggcaatgtcaaagatggtatttaaatagacatttgatagatagat

SEQ ID NO: 85069 - DNA, 120 bp, synthetic construct
  source 1..120: mol_type = other DNA
cttcctacagccatggattggaaaacttaatattactaaggtgacaatattatccaatgtgatagggagattcaatgtaattccttaccaaaatcttaatggcattattttttggataga

SEQ ID NO: 85070 - DNA, 120 bp, synthetic construct
  source 1..120: mol_type = other DNA
gcaacaatatcctctagcaatgtaagaatagaagaaaattttctgagtctactaaatagtgccagggaagaatcaaaagctaacatcaataacagtagtgttgtattgctcactttaccc

SEQ ID NO: 85071 - DNA, 120 bp, synthetic construct
  source 1..120: mol_type = other DNA
gaaatatgtgtccacaatagacttgaaagagaatgttcatagcaattttattaataatagcccaaacctagaaacatccaggtatccatcagcagaaaaatgagtggaaaaaactgaagc

SEQ ID NO: 85072 - DNA, 120 bp, synthetic construct
  source 1..120: mol_type = other DNA
tgtgccaccaaactcagctaattttttgatgtgtgtagaaatggggcctcactatgttgcccaggctggtctcaaattcctgtccttaagctaccctcccatcttggccttcgaaagtgc

SEQ ID NO: 85073 - DNA, 120 bp, synthetic construct
  source 1..120: mol_type = other DNA
tgtcataagtgtggcttctctctggattatgattactcacttactacagtggttcccaaaatgcaagcctaagctgaatcctagtagttcttctttgaatgcagcagctttgcccttgat

SEQ ID NO: 85074 - DNA, 120 bp, synthetic construct
  source 1..120: mol_type = other DNA
aggaagctctgtattctccttactttctcaacctttgatcctaacagaggcagtttctttttctttttttttttaattgatcattcttgggtgtttctcgcagagggggatttggcaggg

SEQ ID NO: 85075 - DNA, 120 bp, synthetic construct
  source 1..120: mol_type = other DNA
ggaagaggcgctcctcacttcctaggtgggatggcggccgggcagagacgctcctcattttccagactgggcagccaggcagaggggctcctcacatcccagacgatgggcggccaggca

SEQ ID NO: 85076 - DNA, 120 bp, synthetic construct
  source 1..120: mol_type = other DNA
tgactggaaatactataggacttaattttaagaacaagcaataacgtaacaggcgtttgaagaataggcaggaccccatcctgaaaaccttaccctggaacactttcaggtgtgacagcc

SEQ ID NO: 85077 - DNA, 120 bp, synthetic construct
  source 1..120: mol_type = other DNA
acttctttaacgagttgtgatagagatgttgcccaggaagctaatgttctattagcataataagcagcgaagtgttggcacctctgctgtctccactggagcatcttctaggtacattca

SEQ ID NO: 85078 - DNA, 120 bp, synthetic construct
  source 1..120: mol_type = other DNA
aatatgagcttctcctgctttttgtttgtttgtgtatttttgtttgtttgtttgttttttctttgacggagtctcgctctgtcaccaggctggagtgctgtggcaccatctctgctcact

SEQ ID NO: 85079 - DNA, 120 bp, synthetic construct
  source 1..120: mol_type = other DNA
attaatagttataatcaaatggacatggtggatgagaagggatttctggacatgcgagccctaaacatgggggtaacaacaaaacaggaacaaatggggtggaactgtggtatagaacac

SEQ ID NO: 85080 - DNA, 120 bp, synthetic construct
  source 1..120: mol_type = other DNA
ctagacaagaaggaaaaaaatcactgtcctcatggaagttaaattgtactgacaaaggaggaaaatgtcagggagttaacaattcagtctctgtggcttcctcctgtcctctccctgaaa

SEQ ID NO: 85081 - DNA, 120 bp, synthetic construct
  source 1..120: mol_type = other DNA
gctaagggaaagaagccacatacacatacacatacacagatagtttatggttccatttatataaaatattcagaatagaaaagttcatagggacagaaagtagattacctggggagtagg

SEQ ID NO: 85082 - DNA, 120 bp, synthetic construct
  source 1..120: mol_type = other DNA
tattttttattttctcagttccacctatgtggacaattaattgtcaccatcttaaataaactgatcaggccaggtgtggtggctcatgcctgtaattccagcactttgggaggccgaggc

SEQ ID NO: 85083 - DNA, 120 bp, synthetic construct
  source 1..120: mol_type = other DNA
atggggcttggaagagaggggatggcccagaactcatttcttttgcaatccattgcctaaaactcactgtcaggtgacacagagatgactctttctttgcaacatgtgcttggcaacctc

SEQ ID NO: 85084 - DNA, 120 bp, synthetic construct
  source 1..120: mol_type = other DNA
acgtcatcctggactctaaaatggaaacccaagaatcccttgaaactgtgaaactgggacaatattaagattgtacttttcatctgagcagcttctaggctggagagaagggagagaatt

SEQ ID NO: 85085 - DNA, 120 bp, synthetic construct
  source 1..120: mol_type = other DNA
agtgggcagcaatttcactgggaggaaagaaggggatgtggagggcttggggaagggagaaaagcttaagggggattgcactccacttagggatgaggctggctggagcattttcttatt

SEQ ID NO: 85086 - DNA, 120 bp, synthetic construct
  source 1..120: mol_type = other DNA
ggtattgaatacaaaatatctatctagaattcttacttaccaccttcagatccaaactggcctcctggtagacatcatctttttcaaaaaggcagcggtactgcccgtcgtccgaaggtc

SEQ ID NO: 85087 - DNA, 120 bp, synthetic construct
  source 1..120: mol_type = other DNA
tcatgccactgcactccaggctgggtgacaaagcgagactttaaaaacaaacaaacaaaaaacacccagaataaagtgaacagtttataaatttggccccagatgcctctgtacctgact

SEQ ID NO: 85088 - DNA, 120 bp, synthetic construct
  source 1..120: mol_type = other DNA
tgacgtggtaatagggaggggtttaaaaacatgtctcatgtggacttttggtaatgatatttgaagaagctttcctctaggtggactttatagtaccttgtaagtctggtccagccgcta

SEQ ID NO: 85089 - DNA, 120 bp, synthetic construct
  source 1..120: mol_type = other DNA
ccctgtttgttaataattgatgttctactagaatacaagctccttgggagccactatgcctaacccactttttttttctttcaattttaagttccggggtacatgtgcaggatgtgcagg

SEQ ID NO: 85090 - DNA, 120 bp, synthetic construct
  source 1..120: mol_type = other DNA
ttatttttataaatgaaaaacattatttgtaagactacaagcagtgatttcagtcttaggacttccatagagagctgggtgtcccatcattagagctcacctgcaaagcttccgtgccca

SEQ ID NO: 85091 - DNA, 120 bp, synthetic construct
  source 1..120: mol_type = other DNA
ctcaggaggctgaagcaggagaatagcttgaatccaggagatggaggttgcagtgagccaagatggcgccattgcactccagcttgggcaacagagcgagactccgtctcaaaaaaaaaa

SEQ ID NO: 85092 - DNA, 120 bp, synthetic construct
  source 1..120: mol_type = other DNA
tccacaggtgtgtgccagcacctcgtacttacccagctcagtctggagtttctctggaaaaagaacaagaataacatattaaggaatttggtgtaagggaaaggagagaaactatttttt

SEQ ID NO: 85093 - DNA, 120 bp, synthetic construct
  source 1..120: mol_type = other DNA
ttttatggctttcaatacatattgctatatgatagataatgtctcttgataaaaatacgaggtgctatggtgcagtccctgggacctctcctgctgatctgagcatgtgggtcctagagg

SEQ ID NO: 85094 - DNA, 120 bp, synthetic construct
  source 1..120: mol_type = other DNA
tctatttaacgtgaaactcccacacccaaactaaggggactatattttccataaatgggaattctgtcttaatcacttgctggtaaaagagagatccactcccttcccttggacccttag

SEQ ID NO: 85095 - DNA, 120 bp, synthetic construct
  source 1..120: mol_type = other DNA
gatgattcaaaaggatttcctcaactgtcacaaagcttaccacaaattaatatatctctgcctcttgagaccctgtgtctttccccagatattcacctgctactttgagcagcaagcttg

SEQ ID NO: 85096 - DNA, 120 bp, synthetic construct
  source 1..120: mol_type = other DNA
tggcaggaggccaattactgggactatgtacaatgcagttttcacaaggacattttgtgctggattaaggacactggtttgtctagagatttttgggtcttccaaacaaattctaagaca

SEQ ID NO: 85097 - DNA, 120 bp, synthetic construct
  source 1..120: mol_type = other DNA
taaagcctgtgctggcctctgagatgtagttactgctgttattctcattaaaaagatgaaagaactaaggtatgaggtgctcaagtaactttccaaaggtgactcagctaggagtggagg

SEQ ID NO: 85098 - DNA, 120 bp, synthetic construct
  source 1..120: mol_type = other DNA
atgattgtaacctctgtattgtaccctccagtgaaaaaagacaactccaatatgaagagcccctttctttctgcctgaacttccttacaaaagccttccaacttgtaacagactttggac

SEQ ID NO: 85099 - DNA, 120 bp, synthetic construct
  source 1..120: mol_type = other DNA
aaggaaacttatatgagcccattcacaatacctagatcgaaaagggcagtatgatatttatgtgaaaatggggttgggtgttagaagacagtgcagaccatgagcaccttgccacctgaa

SEQ ID NO: 85100 - DNA, 120 bp, synthetic construct
  source 1..120: mol_type = other DNA
ctgaatttcaaggcctatcctgcactgctaaaactcatatcaaagaaaattgcaaattactacgtatcatgcatgggtcattagaacttttttcagtaaaagcctcaaatgttgctcctc

SEQ ID NO: 85101 - DNA, 120 bp, synthetic construct
  source 1..120: mol_type = other DNA
taaaacaatacatttttatagagaaagctaaaataagatttctaggagacaaagtgaattgggtttttgtgtgtgtgtgtgtgaccttggacatctttctttacttttttgagcctgtat

SEQ ID NO: 85102 - DNA, 120 bp, synthetic construct
  source 1..120: mol_type = other DNA
tcctaacagctataatcctctcaacagtgaaactccggggacaagtggactttggctgggttcagttgtgaattctgcagacgtgcacacaaaatcatgacactggcaattctcaccttc

SEQ ID NO: 85103 - DNA, 120 bp, synthetic construct
  source 1..120: mol_type = other DNA
agactctggaaggctccaacagtgggatgaaagtttgctgcctaaaatgctgggatggaatgttccagcaagaggagagtggcatcaaggacataacagtgatcgtcaccactgtgggaa

SEQ ID NO: 85104 - DNA, 120 bp, synthetic construct
  source 1..120: mol_type = other DNA
ataactccctcagccactagacgacaaaagaagccctgagtttaggctgactgagattttcattctagctttgctatacatttgggcaagctttactttgggtaagtctgttctttccag

SEQ ID NO: 85105 - DNA, 120 bp, synthetic construct
  source 1..120: mol_type = other DNA
aaaagaaagaaaagagaagaaaggaggaagggcaggcagtagaacttctgaataggaaaatgcccaaacatttagggatggaggactgaggtattcttagttctggctgacctacagtct

SEQ ID NO: 85106 - DNA, 120 bp, synthetic construct
  source 1..120: mol_type = other DNA
gaaacttcccaaatcttaactgccaatatctttctttctaaaattgtgtttttgtatttcgtggtaaactcagttcaaagccgcggatgggggcaggaataggaaaactgctgctgctgc

SEQ ID NO: 85107 - DNA, 120 bp, synthetic construct
  source 1..120: mol_type = other DNA
atggagttgctccggctcaaacacctctgacatttgtggacacgtagaaaaggataattaatgggttagcaggatgaaaggaaaactataccccaaaggatagcctagccattgaaattg

SEQ ID NO: 85108 - DNA, 120 bp, synthetic construct
  source 1..120: mol_type = other DNA
gatgaataaaatgacatcctagagatgaccattggatttggcaacatggagctaacacatgtcagtgacaaggagttcagttaaagatgtggactgtagcctgatctgtgaagagtggaa

SEQ ID NO: 85109 - DNA, 120 bp, synthetic construct
  source 1..120: mol_type = other DNA
ttttcatatcaattatagttatttatactatatagttatttatagttaaattcataaatggaaatagcttttttttttgagacggagtcttgctctgttgcccaggctggagtgcagtgg

SEQ ID NO: 85110 - DNA, 120 bp, synthetic construct
  source 1..120: mol_type = other DNA
atcatcaaatgacacaggcaatctggtctgtgtctttctccaaagatgatttcaatatttaaaggggaaaagtgggctgacagggaaagagagaaggtatggcaatccacatgttgcaag

SEQ ID NO: 85111 - DNA, 120 bp, synthetic construct
  source 1..120: mol_type = other DNA
acagatcatccttcataggaactgaatcctgagttctaactaactaatcctagactagatttgggtgatttgagatattaatgaccttagcctcatagcctcattgcctgacacaagcaa

SEQ ID NO: 85112 - DNA, 120 bp, synthetic construct
  source 1..120: mol_type = other DNA
agaacttattcatcttgcataactaaaatgttatattggttgaacagtaactcccccatttaccttgcccccagtctctggcaaccaccaacctattctctgtttctatgagattggcta

SEQ ID NO: 85113 - DNA, 120 bp, synthetic construct
  source 1..120: mol_type = other DNA
ttcttctctcatttcttctttattagtctggttagcggtctatctattgatctttttttacaaaaaaaaaaaaacccagctcctggattcattgattttttgaagggtttttcatgtctc

SEQ ID NO: 85114 - DNA, 120 bp, synthetic construct
  source 1..120: mol_type = other DNA
tatcctgccagtacactacaggtgtaataaaacatcatggatgacccatctcctcttccatgattacatcctaaattgctatgccagagaaatagagaggcattgtctgaaaaataccat

SEQ ID NO: 85115 - DNA, 120 bp, synthetic construct
  source 1..120: mol_type = other DNA
gctatggcccctgaagacattttggtaggacaagatgtggaagtgggaaacagtgatattgatgatcctgactctgagtaggcctaggctaatgtgtgtgtttcttagatttttttttaa

SEQ ID NO: 85116 - DNA, 120 bp, synthetic construct
  source 1..120: mol_type = other DNA
tttagctaagtgatgcctgacttcagttttgccccatttctagagcatagtcctccatgactttcaatgaaaaacccgatagctttcatctcctcaatcctgaagagctgaaggagattt

SEQ ID NO: 85117 - DNA, 120 bp, synthetic construct
  source 1..120: mol_type = other DNA
gaataagattttaaattgtgctttctgaaaaactggatatagaaacagacaatggccagaccatatataaaaataggcctggctgggcatggtggctcacgcctgtaatcccagcacttt

SEQ ID NO: 85118 - DNA, 120 bp, synthetic construct
  source 1..120: mol_type = other DNA
attttaagttggagatattgtctgttggtactaaatcaatttccccctgttttgtgcttttttccacatcacttggggttgaagcctggacaccacttcttccagagtccctttcttagg

SEQ ID NO: 85119 - DNA, 120 bp, synthetic construct
  source 1..120: mol_type = other DNA
gttttctactttatcacatgtgtagattcatgtaaccaccactgtgatcaaaatacagaactatattccatcaccacaaagatcttcctcatgccactcgccctccttaagagtcacacc

SEQ ID NO: 85120 - DNA, 120 bp, synthetic construct
  source 1..120: mol_type = other DNA
ggggttgggaacccctgggctaattgatgcgaacaagatttaagttcctgtggcttatttctggtcacaaacacatcaccaaactcctaaataaagactcagaacacttctaatattaaa

SEQ ID NO: 85121 - DNA, 120 bp, synthetic construct
  source 1..120: mol_type = other DNA
agtcctggaggctgggaagtccaagatcaagatgctgacaggttcaattcctggtgaacttagaactgaaggctctctggcaggggtgccttgtggctgcaggctgggtatagaaactca

SEQ ID NO: 85122 - DNA, 120 bp, synthetic construct
  source 1..120: mol_type = other DNA
taaaatgaaaattgccgatgtatcaatacccgggggcagggagtattctcaggtttaactaaatactcatattcaagtttttaccataggccacacctggctctcagattcacttagaag

SEQ ID NO: 85123 - DNA, 120 bp, synthetic construct
  source 1..120: mol_type = other DNA
aagcatcctgacttaagaaatccttgatctttcataaggtgtctgaatactcaatgtcaaaaacacttatgaagaattaaacactgttgaccacaagagggaaacctagtcccagttata

SEQ ID NO: 85124 - DNA, 120 bp, synthetic construct
  source 1..120: mol_type = other DNA
ccatctttcttatcaggaggctctagtgattccttctccacacttctaacttctcatcttcacactccttgtcttcctaacttcactacagtaagtgttttacatgtttagaactcagct

SEQ ID NO: 85125 - DNA, 120 bp, synthetic construct
  source 1..120: mol_type = other DNA
ttgtggtctttcctcagtatcagctaagaggccattaacacagatatctgtttatggacatgcgacactgttgttcacctcttttgcagaattcataaagaaatgatggggaaaacacat

SEQ ID NO: 85126 - DNA, 120 bp, synthetic construct
  source 1..120: mol_type = other DNA
gcacaagagaaaagctttacttggaacatcatccaggctcagagaacacaaatatttcatttccagtaagacgtttctggtctttttctcttcctccccttccctgaacctaccctagat

SEQ ID NO: 85127 - DNA, 120 bp, synthetic construct
  source 1..120: mol_type = other DNA
ttctcaagttaaagcaatgaaacttgtagttggccggcaggaaaatattctgagatgtggattcaaagtttctaagtgtgcacacgtacacacacacacccctacctgcatgcattttgt

SEQ ID NO: 85128 - DNA, 120 bp, synthetic construct
  source 1..120: mol_type = other DNA
tgggaatagatgtaagaatattacatctctcaggcttgctctgccccaggtttctgaacatggaatacatttctccagtgaaactcagtattatgagatttgggaggtggaagttaggcc

SEQ ID NO: 85129 - DNA, 120 bp, synthetic construct
  source 1..120: mol_type = other DNA
tagcgatctaggagttaatgccacagtgtgttcaaagccctttgatgcgatcagataatcagtaatgtatggaatatttgtgttcataacttgtgagaacggctgcatggcaggacaaga

SEQ ID NO: 85130 - DNA, 120 bp, synthetic construct
  source 1..120: mol_type = other DNA
gcggagattacaatgagctgagatcacgccaccaactccagcttgggcgacagagcaagactccgtctaaaaaaaaaaaaaaaaaaaaaaagaataggctttgcccactatactctctca

SEQ ID NO: 85131 - DNA, 120 bp, synthetic construct
  source 1..120: mol_type = other DNA
tgatttgcattttaatggtcagactctattacaccccacattctcttttcttttattcttgtctgttctgcctcactcccgagctctactgactcccaacagagcgcccaagaagaaaat

SEQ ID NO: 85132 - DNA, 120 bp, synthetic construct
  source 1..120: mol_type = other DNA
tattattctctctcatctccagagcaacattggtgctgttgtaaagatgtactgtagaaaagtattcttcacccagcgtgacccccacagaaggtgtcaggtagacttgaaataagcaaa

SEQ ID NO: 85133 - DNA, 120 bp, synthetic construct
  source 1..120: mol_type = other DNA
aaaacaaacccctgacaggatcaaaaccacagcagggctacataataggaaaactatacataaataggtagaataatctgctcaggatcactaggtaagttgctgaataagaattcaaga

SEQ ID NO: 85134 - DNA, 120 bp, synthetic construct
  source 1..120: mol_type = other DNA
ggaagtccttggatatcttatacctcaatattggctcaatttcttggggagggggtgctgtcagagattgttatctgaggatgtgacatagatttctcagggcacaatttcaactacttt

SEQ ID NO: 85135 - DNA, 120 bp, synthetic construct
  source 1..120: mol_type = other DNA
atggagatatctgagggaggaaaacagggtggggaaaggaaatgtaatgcatttaagagacaaggtaggaacagatgtggctcttgatttctctttgctagaacgaatcagacattcgta

SEQ ID NO: 85136 - DNA, 120 bp, synthetic construct
  source 1..120: mol_type = other DNA
atcaccatgcaatgcctctggaataaaacatacaggagtctgtctctgctatggaatgccccatggggcatctcttgtgtacttattgtttaaggtttcctcaaactgtgatttttctga

SEQ ID NO: 85137 - DNA, 120 bp, synthetic construct
  source 1..120: mol_type = other DNA
ctagaacctgccataaaccactaaggtaaactattcatgatagtgtggtagactgcaaataaatgctgttgaaatgagttaggcttgggtttcatcttggctgtatcatttactagctat

SEQ ID NO: 85138 - DNA, 120 bp, synthetic construct
  source 1..120: mol_type = other DNA
aaaaaaacaaaaaattagccgggtgtggtggcgggtgcctgtagtcccagctactcgagaagttgaggcaggaaaatggcgtgaacccaggaggcagagcttgcagtaagccgagatcgc

SEQ ID NO: 85139 - DNA, 120 bp, synthetic construct
  source 1..120: mol_type = other DNA
caactagaatatcttccaaaatggctgtatcattttgcattcctaccagcaacgaatgagagtccctgttgttctatatccttgccagcatttggtattctggggtttgggatttcagca

SEQ ID NO: 85140 - DNA, 120 bp, synthetic construct
  source 1..120: mol_type = other DNA
gccccagcgtctacacttttttttttttttgagacagagtctcgctctgttgccagactggagtgccgtgatgcgatctcggctcactgcaacctccgcctcccaggttcaagcaattct

SEQ ID NO: 85141 - DNA, 120 bp, synthetic construct
  source 1..120: mol_type = other DNA
ccactttcatcatattgatttttcctttttttttttttttttttttttgcgatagagtctggctctgtcgcccaggctggagtgcaatggcgtgatttcggctcactgaaacctctgcct

SEQ ID NO: 85142 - DNA, 120 bp, synthetic construct
  source 1..120: mol_type = other DNA
ttgaactaaccttgcatcaccaagataaagcatacttgatcattgtagattagctttttaatgtactgctggattcagtttgccagtattttgtggaggatttttgcataaatcttcatc

SEQ ID NO: 85143 - DNA, 120 bp, synthetic construct
  source 1..120: mol_type = other DNA
ggtctttctttttcatgtgggcatttgatgcataaatttcccacttaacactgccttagctgtgtcccagagattctggtatgttgtatcgttgttctcatcagttttaaagaacttctc

SEQ ID NO: 85144 - DNA, 120 bp, synthetic construct
  source 1..120: mol_type = other DNA
atgtgggaaattttggaacttcctagagacttgttgaatgcctttgcccaaaatgctgatggtgatgtggacaataatgtccaggctaaggtagtctcagatggaaatgaggaacttgtt

SEQ ID NO: 85145 - DNA, 120 bp, synthetic construct
  source 1..120: mol_type = other DNA
ctaaaaggggccaacatagagctcaggccacggcttcagaggatgcaagccccaagccttggcagcttccatgtggtgttgagcctacgtgtacacagaagtcaagagttgaggtttggg

SEQ ID NO: 85146 - DNA, 120 bp, synthetic construct
  source 1..120: mol_type = other DNA
acctggtgggaggtaatttaatcatggggtaggtctttcccgtactattcttgtgatagtgaataagtctcatgagatttgatggttttatgaaggggagtttccctgcacaagtcctct

SEQ ID NO: 85147 - DNA, 120 bp, synthetic construct
  source 1..120: mol_type = other DNA
gcggaggttgcagtgagccaagatcccaccactgcactccagcctgacaacagagaaagactccatcttaaaaaaaaaaaaaaacctcagtaaactaggcattggaggaacatacttcaa

SEQ ID NO: 85148 - DNA, 120 bp, synthetic construct
  source 1..120: mol_type = other DNA
aaagtaagaggtactatgttgctcaacttcaaactatactatgaggccacagtaaccaaaacagcatggtactggtacaaaagcagacacacagacaaatggaacagaatagagagtcca

SEQ ID NO: 85149 - DNA, 120 bp, synthetic construct
  source 1..120: mol_type = other DNA
acaactgtcttggtaaattcttttaccctggcgccactggcccagatagttattgctcacctgcaacagaaaatatttgcaaactatgcatctgacaaaggtctaatatccagaatctat

SEQ ID NO: 85150 - DNA, 120 bp, synthetic construct
  source 1..120: mol_type = other DNA
ttacagctcttaaaggtggtgcgtcctgagttgttcgttcctcctggtgggtttgttgtcttgctggcttcaggagtgaagctgcagaccttagcagtgagtgttacagctcataaaggt

SEQ ID NO: 85151 - DNA, 120 bp, synthetic construct
  source 1..120: mol_type = other DNA
ccctcacattatcatttctcatctcttctcccctaaactttcatgccaacagcagactaggtaagtttccctttcctgcatctctaatgattcagggcgattaaggtctccttctccagc

SEQ ID NO: 85152 - DNA, 120 bp, synthetic construct
  source 1..120: mol_type = other DNA
caaacgggaaaaatagacctcatccctccgctggaggagcttaaagagaagtgaaattgatggcaaaaaaccaaacacgcaacaccttatacaggaacgaaaaatgttaagagaagtgtg

SEQ ID NO: 85153 - DNA, 120 bp, synthetic construct
  source 1..120: mol_type = other DNA
aatggcttccagcttcatccatgtctctgcaaaggacgtgatctcattcctctttatggctgcatagtattccgtggtgtatatgtaccacagtgaatagaaagcatcttacattatcag

SEQ ID NO: 85154 - DNA, 120 bp, synthetic construct
  source 1..120: mol_type = other DNA
ttcttaatttctgtgtcactggtccactactcactgcctcagctaattcattttctaactttcagtttcctactcccaacaatacaaggaggcatcaaattaccaaccttggacagaggc

SEQ ID NO: 85155 - DNA, 120 bp, synthetic construct
  source 1..120: mol_type = other DNA
cagcgtgcacatagggaagttttcaaatgataaatgcaaaatgaatgaaagtttctcctttacattgggactagcagaccttgcatctctctcccaccctgagacacaccctgtacataa

SEQ ID NO: 85156 - DNA, 120 bp, synthetic construct
  source 1..120: mol_type = other DNA
gtctctggttcacaggtcatccagcttctttgttcattttctttagatccagctggctccctgatcccagagcatagtctttccctgaggctcgctactcaaaagagtcaaacttcatcc

SEQ ID NO: 85157 - DNA, 120 bp, synthetic construct
  source 1..120: mol_type = other DNA
taaagggacagagtacaaaagagagaaattttaaagctgggggagacatcacacgttggtaggatccacagtgccccacaagccacaaaaaccagcaagtttttattagggattttcaaa

SEQ ID NO: 85158 - DNA, 120 bp, synthetic construct
  source 1..120: mol_type = other DNA
ggtccctgacttcccgcaacataatattaatggactctccttgtaacctcccaggagcttccaatatgtttaaataaaacttaattccttactatggccaccaaggccgaatatgatgca

SEQ ID NO: 85159 - DNA, 120 bp, synthetic construct
  source 1..120: mol_type = other DNA
ccagcctgggcaacagagcgagactccatctcaaaaaaaaaaaaaaaagaattatcggtttttttttttttaatagtttaagttctagggtacatgtgcacaatgtgcaggtttgttaca

SEQ ID NO: 85160 - DNA, 120 bp, synthetic construct
  source 1..120: mol_type = other DNA
ttttggtgttttagacatgaagtccttgcccatgcctatgtcctgaatggtattgcctaggttttcttctagggtttttatggttttaggtctaacatttaagtctttactccatcttga

SEQ ID NO: 85161 - DNA, 120 bp, synthetic construct
  source 1..120: mol_type = other DNA
agggaaagctttcagtttttgcccattcagtatgatattggctgtgggtttgtcataaatagctcttattattttgagatacatcccatcaatacctaatttattgagagtttttagcat

SEQ ID NO: 85162 - DNA, 120 bp, synthetic construct
  source 1..120: mol_type = other DNA
gctagaattagtttctaaaactgaacatgaattgactctccttgtaaccatccagtagtgtctcacatctatttaaataaaattcaggctgggtacggagactaatgactgtaatcccag

SEQ ID NO: 85163 - DNA, 120 bp, synthetic construct
  source 1..120: mol_type = other DNA
tcaaactccagcactctttcattttgatgtcacactagaccccttctcctcccggtgtgaaatacaggcaaagttcttctttctcctccttctagttgtaagaattcacagataaagatt

SEQ ID NO: 85164 - DNA, 120 bp, synthetic construct
  source 1..120: mol_type = other DNA
agcatgtaggacatgtaggagaaatttctatagaaaggttagaagagattcgtaataaacactaagctgggccaggttttccgaggatgccttaagttctttaggcacgaaagaacaccc

SEQ ID NO: 85165 - DNA, 120 bp, synthetic construct
  source 1..120: mol_type = other DNA
aatttccttctttaaaggattgtttttaaattagtacttgaaagatttgatccagttgcatgtaaaacactttaattgggtccgattgtgagccagctctgtgctggtcagtgatgtgtt

SEQ ID NO: 85166 - DNA, 120 bp, synthetic construct
  source 1..120: mol_type = other DNA
caaactgctggggttacaggcgtgagccatcgtgcctggccacattatgttttaaaataatgaatattttatgtgaagagtgttcaatccctcattcttggttcccattatgatttcctc

SEQ ID NO: 85167 - DNA, 120 bp, synthetic construct
  source 1..120: mol_type = other DNA
ggtatggcaaagttgtttctaccttttctggagctattttgacattccatttagttaaagcctactttgtttcttagaataaccgatgtaagatttgatctgtaggagtggccaaaagaa

SEQ ID NO: 85168 - DNA, 120 bp, synthetic construct
  source 1..120: mol_type = other DNA
acatggctgtccatccggaccaagacaaggtaaaatgtcagcactctgttgaacacttttagctgctcctactcccactagggatgtggaggttagtctgagagaccatactgggggtca

SEQ ID NO: 85169 - DNA, 120 bp, synthetic construct
  source 1..120: mol_type = other DNA
acaaggtcaggagatcgagaccatcctggctaacatggtgaaaccccatctcttaaacaaatacaaaaaattagctgggcgtagtggcaggtgcctgtagccccagctacttgggaggct

SEQ ID NO: 85170 - DNA, 120 bp, synthetic construct
  source 1..120: mol_type = other DNA
tgaagggtagaaggcgcacagcaccaaatacagatactagcaatcctaaagtgaacaggctctgtacaccattatttaccacactcctttcaattccttcaacaacttaaactctagtgg

SEQ ID NO: 85171 - DNA, 120 bp, synthetic construct
  source 1..120: mol_type = other DNA
tagaaaccactatggtgtcgccctgtcgctgtttgaacatcactatgccatggaccctgttggactgaacagaggaggatgaatgtggaaataaagacaaaagagtatatttggaagaag

SEQ ID NO: 85172 - DNA, 120 bp, synthetic construct
  source 1..120: mol_type = other DNA
ttttggaccaggtaattctttgttggtgatggaggctgttgtgtacattgcaggttctctagaagtgtccctggcttctactcattaaatatcagaagaaatccctgttgtgacaaccaa

SEQ ID NO: 85173 - DNA, 120 bp, synthetic construct
  source 1..120: mol_type = other DNA
taggaacctgtattttatttggcaacctcaggccaacttgctagtcaaacctcagaacaaggagtgatttaatacttccttgtgttcttcaacacatgcccaggagagacatatagaact

SEQ ID NO: 85174 - DNA, 120 bp, synthetic construct
  source 1..120: mol_type = other DNA
tcaaaggcctggtacgcagtcactgcaaaatgttatacggcatgtactgatggagaccagattcattttattcatcactccattctcatgatttagagtagtagctggcatattctaagt

SEQ ID NO: 85175 - DNA, 120 bp, synthetic construct
  source 1..120: mol_type = other DNA
tgaaggtgcctttgtatagcacttaccctaacaatgtgataaggtcaactgtgcaatcgaagtattcaggggtctgagagattgatcaaggactcaaagtcagctgttgacagaaaaaca

SEQ ID NO: 85176 - DNA, 120 bp, synthetic construct
  source 1..120: mol_type = other DNA
aaatttgtgaaaaaaagaaattaattgtgatagtagtaatccaggaaatccagctaaggttcatgttagtatttcaggataaaagggtggtgatgctggcagtggcgagctgtccagagt

SEQ ID NO: 85177 - DNA, 120 bp, synthetic construct
  source 1..120: mol_type = other DNA
ttgccacctcagtcacagggaagccaagggaagatgggcatgtaatatttgaagtaagtttcttatagggagcatgtcgaagagtcattgcttttcactctggcatttgtctttttacac

SEQ ID NO: 85178 - DNA, 120 bp, synthetic construct
  source 1..120: mol_type = other DNA
ggacgcaaaggctgcagttagccgtggtcgcgccactgccctccagcctgggttttttttttttagatggatcaaaactccatctaaaaaacaaaaaacaaacaaaaaaaaaaaagtaaa

SEQ ID NO: 85179 - DNA, 120 bp, synthetic construct
  source 1..120: mol_type = other DNA
aaaaggaaaagcacttgcagttacgtttgatgagatctgtgtaaactttacatcaagacctgaagggaactctacaacaaataggaattaagagaccaataactcttatgaggtaaattc

SEQ ID NO: 85180 - DNA, 120 bp, synthetic construct
  source 1..120: mol_type = other DNA
ttttctgaatatactataccattttgatggttctttggtgaattttctggtgtttgagctggttatttgcagtgaggggagcaggagattttatgtgatcgcttcatcctgaattgtctg

SEQ ID NO: 85181 - DNA, 120 bp, synthetic construct
  source 1..120: mol_type = other DNA
cttagtaacagaattaaacagaaatatccaggctcattgggttggtctctttctgatcatgtgcaagcagttctgttgctgtgttctcatcctctggaggaaaaagctaaagcagggttt

SEQ ID NO: 85182 - DNA, 120 bp, synthetic construct
  source 1..120: mol_type = other DNA
aaaaaagcacaccccaagccagcatgactttgtaagacttactaataaataacaaatttctgtacctatggtttacagaatccaagcagaatttctagaatattacagatagaataggcg

SEQ ID NO: 85183 - DNA, 120 bp, synthetic construct
  source 1..120: mol_type = other DNA
cccagactgaagcccttgtgtgcaagacctagactgaacctggtgttttagtaacaaaagtatcctatgaagtagtttcactgacctaaaattgtcctagactccaccttcttatccatt

SEQ ID NO: 85184 - DNA, 120 bp, synthetic construct
  source 1..120: mol_type = other DNA
caaaataaccagagactactccctttgcaaacccccaccttttctgcctggcatacggtaaatgaaaattacctctgattgcttgttttttgcaactaatcagatgtttgcataggagta

SEQ ID NO: 85185 - DNA, 120 bp, synthetic construct
  source 1..120: mol_type = other DNA
cattcttccttggcaatacttgtcatctcagtgatggctttgtgtgaggccagggtaggagctagacaaatccagggtatttcagtaacaaaagcatcatacaaagtagtttccctaact

SEQ ID NO: 85186 - DNA, 120 bp, synthetic construct
  source 1..120: mol_type = other DNA
aaactttttacttggaaatcattatagagtcacaggaaattgcaaagacagtacagagaacatatgcttacccttttgagaggtgaagccagctggacttctgggtcgagtggggacttg

SEQ ID NO: 85187 - DNA, 120 bp, synthetic construct
  source 1..120: mol_type = other DNA
aattggtgggttcttggtctcgctgacttcaagaatgaagctgtggaccttcgtggtgagtgtaacggttcttttttttttttttcatacagagtctccctctgtcacccaggctggagt

SEQ ID NO: 85188 - DNA, 120 bp, synthetic construct
  source 1..120: mol_type = other DNA
tggtgcgtttacaatccttcagatagacagaaaagttctccaagtccccatctgtcccagaagcccagccggcttcacctgtcaccagcattcgctgcaggactctgcagcacccagccc

SEQ ID NO: 85189 - DNA, 120 bp, synthetic construct
  source 1..120: mol_type = other DNA
tatagccctcaacttcatttttggggcataacatctttataggacaggggtaaagtcccaatactaacaggagaatgcttaggactctaacagttttttgagaatgcgttggtaagggcc

SEQ ID NO: 85190 - DNA, 120 bp, synthetic construct
  source 1..120: mol_type = other DNA
atgataagccttctctaatctccccacccagaaggaaacaagcaaagaaatctccaagggaccacaacccccctgggctatcggttatgtccccttcaagctgtaggggaaggggaattt

SEQ ID NO: 85191 - DNA, 120 bp, synthetic construct
  source 1..120: mol_type = other DNA
taaaaaagattgtctaatgagaaacaagccacccccttgcccatgtccactatgtcaaggcaatcactggaggtgcactgccccagagtgcaaaggttctctgggccagaagcccccaac

SEQ ID NO: 85192 - DNA, 120 bp, synthetic construct
  source 1..120: mol_type = other DNA
ctgtaatcccagcactttgggaggctgaggcgggcagatgatgaggtcacgagattgaggccatcctggctaacacagtgaaaacccgtctctactaaaaatacaaaaaaattagctggg

SEQ ID NO: 85193 - DNA, 120 bp, synthetic construct
  source 1..120: mol_type = other DNA
catcagcacagggccatacaactaatacctctacttatagggttaggaatggctagtgctacagaaaccggaatagcaggtttatctacttcattatcctactaccacacactctcaaag

SEQ ID NO: 85194 - DNA, 120 bp, synthetic construct
  source 1..120: mol_type = other DNA
cactcaccacaagggtctgcagcttcattcttgatgtcagcaagacctagaacccaccagaaggaataaattctggacacactttcacccagtttttccaaatgtttatatcttaagtag

SEQ ID NO: 85195 - DNA, 120 bp, synthetic construct
  source 1..120: mol_type = other DNA
gtgtgtagtgctataatatcaagttcttaatttgcatttcccggatggctagtgatttattgtgcttatttgccatgtatatatatcttctgtgataaaatgtctcttcataccttttgc

SEQ ID NO: 85196 - DNA, 120 bp, synthetic construct
  source 1..120: mol_type = other DNA
taaatcttgctggaatttagagagaaatggtattaaatctggatatcaaattggggagagttgacatctttactatatttaggtttttagttgattaacacagtaaatctctccatgtct

SEQ ID NO: 85197 - DNA, 120 bp, synthetic construct
  source 1..120: mol_type = other DNA
tgcagtgagccgagactgcaccattgcactccagcctgggtgacagatgcgatgtttcttctttagtttgttaatatgatggatgacattgattgatttcaaacattaaaccagacttgc

SEQ ID NO: 85198 - DNA, 120 bp, synthetic construct
  source 1..120: mol_type = other DNA
gacctcaggtaatctgtccctttggcctcccaaaatgctggggttacaggcgtgagtcaccaagttctgcccttatattcattttttttcttcttcttgctttaggttattttagactac

SEQ ID NO: 85199 - DNA, 120 bp, synthetic construct
  source 1..120: mol_type = other DNA
gtgagctcttatgactgccatctactttttgttttcttttttgtttcctttggtttttgcttctctgttttcttttcttgtttttcgatgtgttcctgaagcaatatttaaaattccatt

SEQ ID NO: 85200 - DNA, 120 bp, synthetic construct
  source 1..120: mol_type = other DNA
ccactgtcatttaatttattttctcctgggcatgaagtgtcatttctatcttgttgctttcaagatttttggcataaatttcttcgggtttatcttcatttgggtttgcccagattcttg

SEQ ID NO: 85201 - DNA, 120 bp, synthetic construct
  source 1..120: mol_type = other DNA
ttctcattgttcaattcccacctatgagtgtttggttttctgtccttgtgatagttcgctgagaatgatggtttccagcttcatccatgtccctgcaaagaggagctggtaccattcctt

SEQ ID NO: 85202 - DNA, 120 bp, synthetic construct
  source 1..120: mol_type = other DNA
aagcactgctcaatgaaataaaagaggacacaaacaaatagaagaatactccatgctcatgaataggaagaatcagtatcctgaaaatggccatactgcctaaggtaatttatagattca

SEQ ID NO: 85203 - DNA, 120 bp, synthetic construct
  source 1..120: mol_type = other DNA
gacacatgaaaaatgcaaatgtacatcatcagagaaatgcaaatcaaaaccacaatgagataccatcttgcaccagttagaatggtgatcattaaaaagtcaggaaacaacagatgctgg

SEQ ID NO: 85204 - DNA, 120 bp, synthetic construct
  source 1..120: mol_type = other DNA
ctgggcaaaatcaggtacttagaaaataaaaataatactataaatgacgagttaatgggtgcagcccaccaacatggcacatgtatacgtatgtaacaaaactccacgttatgcacatgc

SEQ ID NO: 85205 - DNA, 120 bp, synthetic construct
  source 1..120: mol_type = other DNA
tgggcaattttgtccatcttactaatttgtaatttgataagactgttcctagaatatactccgtatgattttattcttgtgaaaataattgggactagttttatagtcatagtagttcta

SEQ ID NO: 85206 - DNA, 120 bp, synthetic construct
  source 1..120: mol_type = other DNA
agaatggaaatactgtattatccaaactactcacaggtttacaccaatctatgctcacagtgccacacacagcaccaaatgtcattctgcagtgtgctgtcacttcacatgttgcatagc

SEQ ID NO: 85207 - DNA, 120 bp, synthetic construct
  source 1..120: mol_type = other DNA
cctcaggtactccacgggtggtgttgaggctggtccccaacaggggagaaatagtttattacactgctgtttgaatttggatttttcagttcattggtgagtttgagcaaatatttatat

SEQ ID NO: 85208 - DNA, 120 bp, synthetic construct
  source 1..120: mol_type = other DNA
gggttgaaacttgccctgggaaaactgccctcatgttcatgttcaggggagcctgtcagataagtctatttttgttcccttttactgttgaatgatattgctttgcatggatgtagttta

SEQ ID NO: 85209 - DNA, 120 bp, synthetic construct
  source 1..120: mol_type = other DNA
atgaatttacctcataaaataacatgtcagcatacttgaattctaaaaacaatcctttttgcttgctttttggttttattgtaattgagttaacggctgacatttcatactctctctctc

SEQ ID NO: 85210 - DNA, 120 bp, synthetic construct; identical to SEQ ID NO: 27639
  source 1..120: mol_type = other DNA

SEQ ID NO: 85211 - DNA, 120 bp, synthetic construct; identical to SEQ ID NO: 27640
  source 1..120: mol_type = other DNA

SEQ ID NO: 85212 - DNA, 120 bp, synthetic construct; identical to SEQ ID NO: 27641
  source 1..120: mol_type = other DNA

SEQ ID NO: 85213 - DNA, 120 bp, synthetic construct; identical to SEQ ID NO: 27642
  source 1..120: mol_type = other DNA

SEQ ID NO: 85214 - DNA, 120 bp, synthetic construct; identical to SEQ ID NO: 27643
  source 1..120: mol_type = other DNA

SEQ ID NO: 85215 - DNA, 120 bp, synthetic construct; identical to SEQ ID NO: 27644
  source 1..120: mol_type = other DNA

SEQ ID NO: 85216 - DNA, 120 bp, synthetic construct
  source 1..120: mol_type = other DNA
tgcatctctaaggacacgagacaaccaaggtctcctctctctccagccccctgcacccacctcccatgtcacctccccacagaggcctccaaggataagaagaagccccctcctgcctcc

SEQ ID NO: 85217 - DNA, 120 bp, synthetic construct; identical to SEQ ID NO: 27645
  source 1..120: mol_type = other DNA

SEQ ID NO: 85218 - DNA, 120 bp, synthetic construct; identical to SEQ ID NO: 27646
  source 1..120: mol_type = other DNA

SEQ ID NO: 85219 - DNA, 120 bp, synthetic construct; identical to SEQ ID NO: 27647
  source 1..120: mol_type = other DNA

SEQ ID NO: 85220 - DNA, 120 bp, synthetic construct; identical to SEQ ID NO: 27648
  source 1..120: mol_type = other DNA

SEQ ID NO: 85221 - DNA, 120 bp, synthetic construct; identical to SEQ ID NO: 27649
  source 1..120: mol_type = other DNA

SEQ ID NO: 85222 - DNA, 120 bp, synthetic construct
  source 1..120: mol_type = other DNA
atcaagaccatcctggccaacatggtgaaaccctgtctttactaaaaataccaaaattagctgggcgtggtggtgcactcctgtaatcccagctacttgggaggctgaggcaggagaatc

SEQ ID NO: 85223 - DNA, 120 bp, synthetic construct; identical to SEQ ID NO: 27650
  source 1..120: mol_type = other DNA

SEQ ID NO: 85224 - DNA, 120 bp, synthetic construct; identical to SEQ ID NO: 27651
  source 1..120: mol_type = other DNA

SEQ ID NO: 85225 - DNA, 120 bp, synthetic construct; identical to SEQ ID NO: 27652
  source 1..120: mol_type = other DNA

SEQ ID NO: 85226 - DNA, 120 bp, synthetic construct; identical to SEQ ID NO: 27653
  source 1..120: mol_type = other DNA

SEQ ID NO: 85227 - DNA, 120 bp, synthetic construct
  source 1..120: mol_type = other DNA
atgtgaggagcccctctgcccggccgcccagtctgggaagtgaggagagcctcttcccggccgtcatcccgtctaagaagtgaggagcgtctctgccctgctgcccatcgtctgagatgt

SEQ ID NO: 85228 - DNA, 120 bp, synthetic construct
  source 1..120: mol_type = other DNA
atgtgaagagtgttcaatccctcattcttggttcccattatgatttcctcatttgattgaggctatagcactttatattatgtttctcttgttttatcataagggaagataaaagacgac

SEQ ID NO: 85229 - DNA, 120 bp, synthetic construct
  source 1..120: mol_type = other DNA
aaagtgcctcacttactttgggaaaacatacttctattaatatagaaagttcaaaatttcatgggtaaaagtcactattgtccctggatttgagaataaactatgtctctataccccaat

SEQ ID NO: 85230 - DNA, 120 bp, synthetic construct
  source 1..120: mol_type = other DNA
ccaggctatgtgaaggtgggacaggggctacctgcagactccaaggattgagtgggagtcctgccctctacgcagcaggatccaggcctctctgcactccatgctttcaaggacgtgaag

SEQ ID NO: 85231 - DNA, 120 bp, synthetic construct
  source 1..120: mol_type = other DNA
aattacagagaaagttcatagagttcccacagcccttcttccctaaagcatccctctgctcagtttctcctattattaacatcctgcatcagtgtggtacacttgttactactgatgaag

SEQ ID NO: 85232 - DNA, 120 bp, synthetic construct
  source 1..120: mol_type = other DNA
atgcatataggttttctcctgtcttttcctagctggatagcttacttctctttaatgttgaataacaacccatggtatggatgtaccacaatttgtttatccactcacttactggaggac

SEQ ID NO: 85233 - DNA, 120 bp, synthetic construct
  source 1..120: mol_type = other DNA
gggagttcctacatacctccttccctaaaatggccctctgttcagtttattttactattaacatccatacaactaatacccctacttgtagggttaggaatggctactgctacaggaacc

SEQ ID NO: 85234 - DNA, 120 bp, synthetic construct
  source 1..120: mol_type = other DNA
aatttgtttcctctaggatccaggccaacaagctgcagatggtcttacaaagggaaccccaaatgagctcagctaacaacttctaccaaggacccctgaactgagccactgaccctttca

SEQ ID NO: 85235 - DNA, 120 bp, synthetic construct
  source 1..120: mol_type = other DNA
gttcttgaagtcagcgagaccaagaacccaccggaaggaataaattcctgacacagaaggactgtcccattttacattctcaccatcagtgtatgagaaattcaatttttctgcattctc

SEQ ID NO: 85236 - DNA, 120 bp, synthetic construct
  source 1..120: mol_type = other DNA
actgtagcctatattacctccattgaattattttgcatctttgtcaaaatgagttcatataggtgtatttctggattctctatgctgctccactaatctatgtctatccctgcactaatg

SEQ ID NO: 85237 - DNA, 120 bp, synthetic construct
  source 1..120: mol_type = other DNA
gcttttgattttaggaaatgctggcctcataaagtaagttgggatgtcttcccttctcttctgctttctggaggaaattttgcagacttgtgttaattctactgaaatgtttggtagatt

SEQ ID NO: 85238 - DNA, 120 bp, synthetic construct
  source 1..120: mol_type = other DNA
atgttgtattttcattatcacttagttgaacatactttttattttccttaagacatctttttttttgagatggagtcttgcactgtcgcccaggctggagtgcagtggcatgatctcagc

SEQ ID NO: 85239 - DNA, 120 bp, synthetic construct
  source 1..120: mol_type = other DNA
ttctggttcagctccgttgcttccagggagcacagtctgtatgatttcaattctttacatttgttgaagttccttttatggtccagggtatgagcgatgttggtaaatattccatggaca

SEQ ID NO: 85240 - DNA, 120 bp, synthetic construct
  source 1..120: mol_type = other DNA
aaacccagatctgacaatgttgtaatttttgcctcaaccatcaaactaatttataaacgtgaagaagagaagtctgttgtatagaaagaaaagtctgttgtcaaagaaagcagaaatggc

SEQ ID NO: 85241 - DNA, 120 bp, synthetic construct
  source 1..120: mol_type = other DNA
gttgcgccactgccctccagcctgggtgacagagcaagactccatctaaaaaacaaaaaaaaaaaaaaaagaaaaaaaaatgtcataatagaaccttcattttataataatatttttctg

SEQ ID NO: 85242 - DNA, 120 bp, synthetic construct
  source 1..120: mol_type = other DNA
tcattacattaactgaaggaaggagaatacacatggcaaccacctggatagagtcttgaaatatgatttgacagaactcagcacttggccttaattttttaaaaatctatttgcaaactt

SEQ ID NO: 85243 - DNA, 120 bp, synthetic construct
  source 1..120: mol_type = other DNA
cagtagtgaagctgcatcttcgcggtgagtgttacaactcataaaagcagcgtggacccagagtcagcagtagcaacatttattgcaaaaagtgaaagaacaaagcttccacagtatgga

SEQ ID NO: 85244 - DNA, 120 bp, synthetic construct
  source 1..120: mol_type = other DNA
ctctgaggactgccagcacgctgtcacctctcaccatcttagctgtaatccatgggttctcactcagttcacaggagatctggttgtttaaaggagtgcgactcttccccactttctctg

SEQ ID NO: 85245 - DNA, 120 bp, synthetic construct
  source 1..120: mol_type = other DNA
cctcgtgatccacccgctttggcctcccaaagttctgggattacaggtgtgagccaccacacctagcgacgatgtcttattttttaaaaaaagaattattttaacaggtttattgaagca

SEQ ID NO: 85246 - DNA, 120 bp, synthetic construct
  source 1..120: mol_type = other DNA
tcttcaaacataattgtaatgttgatgatactattagaaataacatctgtcagctgaacacggtggctcacgcctgtagtctcaacactttgggaggccaaggcaggcagatcacaaggt

SEQ ID NO: 85247 - DNA, 120 bp, synthetic construct
  source 1..120: mol_type = other DNA
agacccaaaaaccctgaattgaggatgcctgtcaggaatctctaggccttcatgtgaaatttaactacaaatactaacaacctaataataccacaatgtttcatttccctaccctgaaat

SEQ ID NO: 85248 - DNA, 120 bp, synthetic construct
  source 1..120: mol_type = other DNA
ctctggaatgaaaaactatatactaatttaaaggtacagattcacaatattgtagacggggttaagaaaaagttctgattgacttgctggctggtttctcatctcaatgtttgacaagtt

SEQ ID NO: 85249 - DNA, 120 bp, synthetic construct
  source 1..120: mol_type = other DNA
ctttcctattatttctgtctcatgccttatcacctctgccatcattctagggaaactgaatctctttctgaaagaggattaaaaggtattacctgttggctgaagtccagagtgtcctgg

SEQ ID NO: 85250 - DNA, 120 bp, synthetic construct
  source 1..120: mol_type = other DNA
ttctggggaaaaaatttattttttctgggggaaaaatggttttcaaatcacactgaacagttacaaggtccaggcatcaaactcattcaaatattacagccttgatgtaaggcacaagtt

SEQ ID NO: 85251 - DNA, 120 bp, synthetic construct
  source 1..120: mol_type = other DNA
cctccagcacagctggccatacgccctcacagtgtcatcggcctggaatttaatcgtgatagtgtggacctatcagatttgagagatgttataaaaaattttatttgtttcttcatagct

SEQ ID NO: 85252 - DNA, 120 bp, synthetic construct
  source 1..120: mol_type = other DNA
tttttgtatttttagtagagatggggtttcactgtgttagacaagatggtctccatcttatgacctcgtgatctgcccgccttggtgctgggattacaggcataagccactgcacccagc

SEQ ID NO: 85253 - DNA, 120 bp, synthetic construct
  source 1..120: mol_type = other DNA
aaagaacccacaaaatcactgagaaaaatactaagccctggagataacagaaaatagatcattgtccattacctaccaaatacaatagggaattcttagagcagtaattataattgggca

SEQ ID NO: 85254 - DNA, 120 bp, synthetic construct
  source 1..120: mol_type = other DNA
acctcgcggctgcactgtgaagctctcaaaaaaccccgtaattgtatctgcagtagtcgtccatcttgtcccgcttctcctccgggatgcccttctggctgttccagttctctgcgacag

SEQ ID NO: 85255 - DNA, 120 bp, synthetic construct
  source 1..120: mol_type = other DNA
cattttcaggtttaggaaataccatgtacaaaagcttgaattgatgaacttcttcaggaaaccagaagaaagttcactaaagcagagagactgaagggaaagagggtaaaatattagcct

SEQ ID NO: 85256 - DNA, 120 bp, synthetic construct
  source 1..120: mol_type = other DNA
agatactgaacttgcattgactaaattgccacagtccctgttggactgaacaaaggaggatgaatgggtgaataaagacaaaagacagaagagtatatttggaagaaggggtcagggcgc

SEQ ID NO: 85257 - DNA, 120 bp, synthetic construct
  source 1..120: mol_type = other DNA
agtttgtaactcagtgttaattttattctgaagtagccacgcttggtcagccataggcatccagttctccatgtaatgagctgtttgaatagaactatgaaaagctgcagaggacatcac

SEQ ID NO: 85258 - DNA, 120 bp, synthetic construct
  source 1..120: mol_type = other DNA
agtcagcacgattagggcaattggcctgggaatggtcggttagcacaccagttacattaatagaactaagacttaagaagtacatgagttttctgtagtgactcaaccatgtttgagctt

SEQ ID NO: 85259 - DNA, 120 bp, synthetic construct
  source 1..120: mol_type = other DNA
caggaaattttgaaaagcatgactagcataagcaggtccattgtcagtttttaattgtttaggtatccccatatgagcaaatgacaacagaaatgttgccgcacatgaccagctgtctca

SEQ ID NO: 85260 - DNA, 120 bp, synthetic construct
  source 1..120: mol_type = other DNA
ggcttctgcctctttggtcaattgctgtgggaaatctaatgaagaatctccttgtagggtttcataaagatgtgtaagttgataagtggcaatacctagcatcgggtgcagccaattaat

SEQ ID NO: 85261 - DNA, 120 bp, synthetic construct
  source 1..120: mol_type = other DNA
tgtaagtctcatattctatgctgtaagtctcaatcccatatattgattgctgtatttgcaacataaggctgaaaagtacatgactgtccatccggaccaagacaaggtaaaatgtcagca

SEQ ID NO: 85262 - DNA, 120 bp, synthetic construct
  source 1..120: mol_type = other DNA
acaaagtgctggtgttttttctgttgggtggagcactgcattgtacggtcctttctgtccggagatctggcagcattcctttttaaaatgtccagtttttccacaattataacattttcc

SEQ ID NO: 85263 - DNA, 120 bp, synthetic construct
  source 1..120: mol_type = other DNA
ataggccaatttttattctccttctcttgtttttttattttcaattggagctgtgggtgggacaacagattctttcagaacatcactcctgctgtccagcaagctaagaaggagataatg

SEQ ID NO: 85264 - DNA, 120 bp, synthetic construct
  source 1..120: mol_type = other DNA
tagatgtcccagcagataaccttaaggaacccggcaccatggagttattgccctcagcaaaccgtctggtggccagcacagaggagagtttgcccctattctgtactcatgataaacagt

SEQ ID NO: 85265 - DNA, 120 bp, synthetic construct
  source 1..120: mol_type = other DNA
ggtcccagtacagtgctatgtttccagaaaatgaacttgtggagaaccaagatttactgatttccttgcctttataatcagtcatcaaatcatatcatttatctgttatagcatcttctt

SEQ ID NO: 85266 - DNA, 120 bp, synthetic construct
  source 1..120: mol_type = other DNA
agacacaatctggtcactaatcactaatgatggacagactctcaatctccagaatcagaaaatctgaatggaaacatgatcttttctgcttgggtcaatttttactaaccataagccttt

SEQ ID NO: 85267 - DNA, 120 bp, synthetic construct
  source 1..120: mol_type = other DNA
cacccactttgtgatactcattggcttctcccttcttcttgaaaaaaatctattttccttgacttacatgcattgtgttctcttggtttttcttcaacatccctggggctccctctcagt

SEQ ID NO: 85268 - DNA, 120 bp, synthetic construct
  source 1..120: mol_type = other DNA
ctcaggtacagctgcctaagcatatgaaccaaagttgggtggatccaattctctctttccataaacctgatgtcttttcttcagtgctggtgctgacattttacgaatttgactaaagtg

SEQ ID NO: 85269 - DNA, 120 bp, synthetic construct
  source 1..120: mol_type = other DNA
ctctttgggcatcacccatttgtcatctccttctaagactccagtgacacaaatttcataccttttattatagtcttacagatttatcagcatgaaataatactaaatattatgaataac

SEQ ID NO: 85270 - DNA, 120 bp, synthetic construct
  source 1..120: mol_type = other DNA
gagttaggcaatgataatggcaagaaaaatatatcaaagagataataattgcatccaggtaaaatggtcattatttactgttgacataatcagatacttacaaaataaaaacaatagaca

SEQ ID NO: 85271 - DNA, 120 bp, synthetic construct; identical to SEQ ID NO: 27654
  source 1..120: mol_type = other DNA

SEQ ID NO: 85272 - DNA, 120 bp, synthetic construct; identical to SEQ ID NO: 27655
  source 1..120: mol_type = other DNA

SEQ ID NO: 85273 - DNA, 120 bp, synthetic construct; identical to SEQ ID NO: 27656
  source 1..120: mol_type = other DNA

SEQ ID NO: 85274 - DNA, 120 bp, synthetic construct; identical to SEQ ID NO: 27657
  source 1..120: mol_type = other DNA

SEQ ID NO: 85275 - DNA, 120 bp, synthetic construct; identical to SEQ ID NO: 27658
  source 1..120: mol_type = other DNA

SEQ ID NO: 85276 - DNA, 120 bp, synthetic construct
  source 1..120: mol_type = other DNA
atgcattgcctttttaaatgttaggtttacttttattgacaagtaaaaattgtatagtatatttatgttgtacagcatgaagttctgatatatgcctatagtgtggaatgactaaatcaa

SEQ ID NO: 85277 - DNA, 120 bp, synthetic construct
  source 1..120: mol_type = other DNA
tatttgtccctgcccatgtcctgcagattggtccattttaaagagtgctgattggtccattttaaagagtggtgattggcccattttaaaagtgctgattggtccattttaaagagtgct

SEQ ID NO: 85278 - DNA, 120 bp, synthetic construct; identical to SEQ ID NO: 27659
  source 1..120: mol_type = other DNA

SEQ ID NO: 85279 - DNA, 120 bp, synthetic construct; identical to SEQ ID NO: 27660
  source 1..120: mol_type = other DNA

SEQ ID NO: 85280 - DNA, 120 bp, synthetic construct; identical to SEQ ID NO: 27661
  source 1..120: mol_type = other DNA

SEQ ID NO: 85281 - DNA, 120 bp, synthetic construct; identical to SEQ ID NO: 27662
  source 1..120: mol_type = other DNA

SEQ ID NO: 85282 - DNA, 120 bp, synthetic construct; identical to SEQ ID NO: 27663
  source 1..120: mol_type = other DNA

SEQ ID NO: 85283 - DNA, 120 bp, synthetic construct; identical to SEQ ID NO: 27664
  source 1..120: mol_type = other DNA

SEQ ID NO: 85284 - DNA, 120 bp, synthetic construct; identical to SEQ ID NO: 27665
  source 1..120: mol_type = other DNA

SEQ ID NO: 85285 - DNA, 120 bp, synthetic construct; identical to SEQ ID NO: 27666
  source 1..120: mol_type = other DNA

SEQ ID NO: 85286 - DNA, 120 bp, synthetic construct; identical to SEQ ID NO: 27667
  source 1..120: mol_type = other DNA

SEQ ID NO: 85287 - DNA, 120 bp, synthetic construct; identical to SEQ ID NO: 27668
  source 1..120: mol_type = other DNA

SEQ ID NO: 85288 - DNA, 120 bp, synthetic construct; identical to SEQ ID NO: 27669
  source 1..120: mol_type = other DNA

SEQ ID NO: 85289 - DNA, 120 bp, synthetic construct; identical to SEQ ID NO: 27670
  source 1..120: mol_type = other DNA

SEQ ID NO: 85290 - DNA, 120 bp, synthetic construct
  source 1..120: mol_type = other DNA
ggtgtggtaatctaggaaaggaagctaaggttcaccttagtattacaggataaaagtggaggcaaaaataagtaattctacatcaagaatgtactaaaatacagttaaagagaaactttc

SEQ ID NO: 85291 - DNA, 120 bp, synthetic construct
  source 1..120: mol_type = other DNA
cattttggaaaaataggctcttttggctatcagcaagccctggttatcatagaatgtctgccacttgtccaagcagtcacaaaatgttctcaggagttttcagaaagcaaccaccactaa

SEQ ID NO: 85292 - DNA, 120 bp, synthetic construct
  source 1..120: mol_type = other DNA
caaagcacatcttgcaccgcccttaatccatttaaccctgagtggacacagcacatgtttcagagagcacagggttgggggtaaggatcccaaggcagaggaatttttcttagcgcagaa

SEQ ID NO: 85293 - DNA, 120 bp, synthetic construct
  source 1..120: mol_type = other DNA
gtagaggtattatttttcaaaatttcattttggtgctccactagcccactccccagtgactgcagtgtggacagtgaagaaattgatgaacctgttgaactgtaccaacttctcaatctg

SEQ ID NO: 85294 - DNA, 120 bp, synthetic construct
  source 1..120: mol_type = other DNA
ggcaaaatacataggcatgggtttattttctctccagaacaggagttaaacactaaattctttttttttgagacagagtctcgctctgttgccaggctggagtgcagtggcatgatcttg

SEQ ID NO: 85295 - DNA, 120 bp, synthetic construct
  source 1..120: mol_type = other DNA
agccagttacagaaagacaaatattgcataattcctgttatatgaggtaactaaaacactcaagctcatagaagcagcgaatacaatagtatagttaacaagagttgggggctgggggaa

SEQ ID NO: 85296 - DNA, 120 bp, synthetic construct
  source 1..120: mol_type = other DNA
tggtactggcataacagtagacacatcaacggatgaaacagaatacagagcccagaaatgaatctacttatttatgaccaagttattttcaataaagttaccaagaacacacaatgggaa

SEQ ID NO: 85297 - DNA, 120 bp, synthetic construct
  source 1..120: mol_type = other DNA
aacatggtgaaaccctgtctctactaaaaaatagaaaaaaaggaaaaaaaaaattagctgggcatggcagcatgcacctgtaagccccagctatttgggagtctgaggcaggagaatagc

SEQ ID NO: 85298 - DNA, 120 bp, synthetic construct
  source 1..120: mol_type = other DNA
agcagagggtagaatagtgattatcagaggctgcagattgggaggaataggaagacattagtcaaagagtataaagtagcagacagacaggaggaataaatgaaaagtttttaaggtgat

SEQ ID NO: 85299 - DNA, 120 bp, synthetic construct
  source 1..120: mol_type = other DNA
agccgcattgaatgggaacagtgaatagtgtgaaaataatgagaaaatattggggcaagtccactgattcccacaggatgttctagaaaagctcttgactaggcctccaaagtaaacaca

SEQ ID NO: 85300 - DNA, 120 bp, synthetic construct
  source 1..120: mol_type = other DNA
cacgaggtcaggagatggagaccatcctagctaacatggtgaaacctatctctactaaaaatagagtggtggggcatgcctgtagtcccagctactcgggaggctgaggcaggagaatgt

SEQ ID NO: 85301 - DNA, 120 bp, synthetic construct
  source 1..120: mol_type = other DNA
aagggatcagtatgcctatccgtcggtgtgttggttctttccttccggttgagacattttgtagaaaaaagagagaaatttactggaaatccccatcccttcacaaatagttgttgctgt

SEQ ID NO: 85302 - DNA, 120 bp, synthetic construct
  source 1..120: mol_type = other DNA
agcgagctgagattgcgccactgcactccagcctgggtgacagagcaagactctgtctcaaataaatacaaataaataaataaataaatatttatttgtttattactgggatatgattag

SEQ ID NO: 85303 - DNA, 120 bp, synthetic construct
  source 1..120: mol_type = other DNA
agtgtttgtggttaggaaaagagaaataagaacaacagcagaatgcaccgtcaggtactttggaagtcacagaagggaaaagggcaggaaaatcggaaatatcggcacacatgttaatga

SEQ ID NO: 85304 - DNA, 120 bp, synthetic construct
  source 1..120: mol_type = other DNA
agaatcgcttgaacctgaaaggcagaggttgttgtgaactgagatcacgccactgccctccagcctgggcaacagagtgaggctatctctgaaaaaaaaaaaaaaaaaaaaaaaaaaaaa

SEQ ID NO: 85305 - DNA, 120 bp, synthetic construct
  source 1..120: mol_type = other DNA
gattatctatcctggttcccaggctctgtgctttaagatgaagcaggtcagttttctggacaaagggactttatgaaaacctccattacttatcagttttcttcctatgcaaccactgag

SEQ ID NO: 85306 - DNA, 120 bp, synthetic construct
  source 1..120: mol_type = other DNA
gcaatcgattcgtttataaaatacaataagagcacaaatttgttggttttcaaacatgagccaaattgttaaaacagtttacacactggccgggcacggtggctcacgactgtaatcccg

SEQ ID NO: 85307 - DNA, 120 bp, synthetic construct
  source 1..120: mol_type = other DNA
aggttacttcgtttcagggaaggcattccagcttcttgcactaggcatttcaagaaagaaaagcattcctggaaatccccaatcggtcacaggcatgtttctccaaccaataggaataga

SEQ ID NO: 85308 - DNA, 120 bp, synthetic construct
  source 1..120: mol_type = other DNA
cagagctccttggggttcagttagtgaatatagttacatagtagaatgggaataaaaacactgtattcatggtcatgaggtcagaattctggcacccaacccacaccttggtcaagtaat

SEQ ID NO: 85309 - DNA, 120 bp, synthetic construct
  source 1..120: mol_type = other DNA
ctggcccatctggcacctttttaagtttgataagaaacatttacaatctagtctgtctgaagcctgctacttggaggcttcatccgcatgataaataacaaccttagtctccacaacctc

SEQ ID NO: 85310 - DNA, 120 bp, synthetic construct
  source 1..120: mol_type = other DNA
cgagaaacataagagatcactttttactgcaatacacaatttatgatgattagcatcaggaggcattttacgcacatacttgcaacactcggacttaccacagcagcaacagaaggtggc

SEQ ID NO: 85311 - DNA, 120 bp, synthetic construct
  source 1..120: mol_type = other DNA
acgcacaacttcctgatattctgtgcttgccaattcgtaagtaagggtgaaaaagttgaaactccttgtcttttgtatgaaccagtagttggaaaagtgtgtcacacctcatgcaggaag

SEQ ID NO: 85312 - DNA, 120 bp, synthetic construct
  source 1..120: mol_type = other DNA
agctccatatgagagggctttatttctaggaagggcaggaattcggaatccctcatcctgcccacagctacctgttgctgagactatgtcccagacaagtgcagttgagaagtgagagga

SEQ ID NO: 85313 - DNA, 120 bp, synthetic construct
  source 1..120: mol_type = other DNA
taacactgtgggatgaggagatgaagatagactttattaaaataatccagacaatcattgttaatcacataaacaaacaagcaaataagaataacaagcacaatgtgggggtagtaccca

SEQ ID NO: 85314 - DNA, 120 bp, synthetic construct
  source 1..120: mol_type = other DNA
gaaaattttgctgtaagtttccctgtgtctttctctccctctctcccttccccctccccaaaactaaagatgaaaggaatgttaactgtccgtttttctgtgaccagcaaaccttatcta

SEQ ID NO: 85315 - DNA, 120 bp, synthetic construct
  source 1..120: mol_type = other DNA
ttttctgttttcatacagtggaagtggtgaataagctccctcagcttcttttacaagagtactaattccattaatgaggactctaccctcataacctaatcacctcccaaagaccccacc

SEQ ID NO: 85316 - DNA, 120 bp, synthetic construct
  source 1..120: mol_type = other DNA
tgcactccagcctgggtgacagagcaagactccatctcaaaaaacaaacaaacgaacaaacaaaaataaccactgcttcctatattacctcattctcatgtgtgctttttcaggtacaaa

SEQ ID NO: 85317 - DNA, 120 bp, synthetic construct
  source 1..120: mol_type = other DNA
gagcaattgtttaagactagcctacaagttagttacacatgcaaataaacagtttggtttctttactagttatacatagaaagaaacaggttggtaagattttgcccggctagtcctcaa

SEQ ID NO: 85318 - DNA, 120 bp, synthetic construct
  source 1..120: mol_type = other DNA
ccactccagggatgacagctagtttgtgaaaaggaagcatagcaggtcaatacataatgtgaaaagatttccacccttattagtaatcagataaacacatttcaaatcactaggaagtat

SEQ ID NO: 85319 - DNA, 120 bp, synthetic construct
  source 1..120: mol_type = other DNA
ttaatttatagatggtaactccaattaccacttcaatgaccccagtgggtcattattgccatagaaagaagtggtaacctctgggtgttgccatagcaatggtaaactgacatggcacac

SEQ ID NO: 85320 - DNA, 120 bp, synthetic construct
  source 1..120: mol_type = other DNA
tggcccagagctgtgcacctaccctcactttcataccacattaatttcagatccttattgtcatgggtttcccaactacttttttttcttcaggggaaacctccacaatgtagtttctaa

SEQ ID NO: 85321 - DNA, 120 bp, synthetic construct
  source 1..120: mol_type = other DNA
gtgcacaactcagtagcatttagtgcattcaccatgttgtacaaccatcacttctatgtagttccataacattttcatcacctccaaaggagaccttgtacccattaaacagtcactccc

SEQ ID NO: 85322 - DNA, 120 bp, synthetic construct
  source 1..120: mol_type = other DNA
tagttacatatgtatacatgtgccatgctggtgcgctgcacccactaactcgtaaaaaatgtttaaataaatactatttcaagtgtgtggtgatgtttttatagccattaaagataagat

SEQ ID NO: 85323 - DNA, 120 bp, synthetic construct
  source 1..120: mol_type = other DNA
cggtgccatgtagcctggtctaagctcagggacatttctatggtttttgacaaagctgcaaaattttattagccataacatgtttgaacctgtaagatttctaagtaagtctgacagtaa

SEQ ID NO: 85324 - DNA, 120 bp, synthetic construct
  source 1..120: mol_type = other DNA
cactctgaagttagactgcatgggcttgaattctggctccatttcttactattggtatagctttagtcaggtatccaacccttccatgctacaatttcctaattggtaaaatgggggagg

SEQ ID NO: 85325 - DNA, 120 bp, synthetic construct
  source 1..120: mol_type = other DNA
ttctttcctttttttttttttcttttttcttttttcttttttttcctttttgagacagagtttcgctcttgttgcccaggctggagcacagtggtgcgatcttggctcactgcaacctcc

SEQ ID NO: 85326 - DNA, 120 bp, synthetic construct
  source 1..120: mol_type = other DNA
tgtcaactctgtctcctgtattttgaagctctgtttttaggtgcatatgcacttaagattgttatgtctctttagagaaataaccctttatcattaagtgatgtctgtctttatccctat

SEQ ID NO: 85327 - DNA, 120 bp, synthetic construct
  source 1..120: mol_type = other DNA
gtgtggttcccctctatgtgtccatgtatgtgttattataatttcgctcccactcataagtgagaacatgcggtatttggttttctgttcctgtattagtctgctaaggatagtggtctc

SEQ ID NO: 85328 - DNA, 120 bp, synthetic construct
  source 1..120: mol_type = other DNA
taagtttcttatagatgctggatatcagacctttgttggatgcatagtttacaaaacttttctcccattctgtatgttgtctgtccactctgctgatagtttcttttgctgtgcagaagc

SEQ ID NO: 85329 - DNA, 120 bp, synthetic construct
  source 1..120: mol_type = other DNA
tgtacattaggactggggagttcctgggaggagaatcaatcactgctggacatgaggaatatcagtctccagacagtcagctctgtaaactgattcagatgattaagaatttcagtccaa

SEQ ID NO: 85330 - DNA, 120 bp, synthetic construct
  source 1..120: mol_type = other DNA
ctcccttgagaaagcttcactgtgtttttagtgcagattagtaaagataagatcttgactggtaggtgagtgggtggaatttatttcaaatatgggggctctccaatccttgcacaccaa

SEQ ID NO: 85331 - DNA, 120 bp, synthetic construct
  source 1..120: mol_type = other DNA
ttactttgctactctagactctcttattattgtgaagcagctttaactactgcaagacagaagtcttggccttcagagtaaaacttcaccagtgcataaagtcagactaaagcaatttga

SEQ ID NO: 85332 - DNA, 120 bp, synthetic construct
  source 1..120: mol_type = other DNA
ttcccttcaccccacaggatgtgaggtctgaaacggcaccctcaacttcccatccaagatacaattctaatcctacatttaacaccctaacttcttaactggagttgagttatttaaact

SEQ ID NO: 85333 - DNA, 120 bp, synthetic construct
  source 1..120: mol_type = other DNA
agttgtaaggtttgtgcttgttttaggtgattttggggaggatttaagaaagagggattttgcttttaattggattctgacagaaagtggagggttggggtggcaatgttatgattgggt

SEQ ID NO: 85334 - DNA, 120 bp, synthetic construct
  source 1..120: mol_type = other DNA
tcatatagttactatagacagccccatctgacattataacccctttttattgccctggccaaaaccacctggagcttttgagcacttgagaagaacttacccagctggatttatacaagt

SEQ ID NO: 85335 - DNA, 120 bp, synthetic construct
  source 1..120: mol_type = other DNA
attgtgggtgagtgcatgagtgagggatgttctctggagctgaaaaacagtaaattgaaggaaaagagataaagcgatttgcagagaaactgtagagatttcctaagggccctttcagta

SEQ ID NO: 85336 - DNA, 120 bp, synthetic construct
  source 1..120: mol_type = other DNA
aacccaaattacctgttcttcacctcatctaataaagtcctataaaaagaaaagtgggccagacaaggtggctcatgcctgtaatcccagcactttgggaggccgaggcaggaggatcat

SEQ ID NO: 85337 - DNA, 120 bp, synthetic construct
  source 1..120: mol_type = other DNA
tataccaattcagtcataaaatataattttccatatttttgtggaggaagaggcccatacaagcaagaatgctcggggctcacatgtcagaatgcagccttggtcatgactgatcctggc

SEQ ID NO: 85338 - DNA, 120 bp, synthetic construct
  source 1..120: mol_type = other DNA
tgtaaggctgtcgatatcctcctcagagaacttactacagtacattgtatctgttcccttacctacctgactcttccactattcagtttgttccttaatagtagaccatgcctgattggt

SEQ ID NO: 85339 - DNA, 120 bp, synthetic construct; identical to SEQ ID NO: 27671
  source 1..120: mol_type = other DNA

SEQ ID NO: 85340 - DNA, 120 bp, synthetic construct; identical to SEQ ID NO: 27672
  source 1..120: mol_type = other DNA

SEQ ID NO: 85341 - DNA, 120 bp, synthetic construct; identical to SEQ ID NO: 27673
  source 1..120: mol_type = other DNA

SEQ ID NO: 85342 - DNA, 120 bp, synthetic construct
  source 1..120: mol_type = other DNA
ctgaatgaagctgtactagataaccatgtagctttccctgtgccactctggcatgaaggagacagtatagtgaatatggctacaggatgtttcttggaaacatgccaatatcttcagaaa

SEQ ID NO: 85343 - DNA, 120 bp, synthetic construct
  source 1..120: mol_type = other DNA
ccagaatgagagaggctgagattggattggtaagagaactcttagcactagaagttgtaatatttgactttggttttcaactctctaagagggaatatattccctccttatggcccataa

SEQ ID NO: 85344 - DNA, 120 bp, synthetic construct
  source 1..120: mol_type = other DNA
gtgtgtctgtaatataaggggtatactgaatggcataatgaccagagtcatgcagaaatctacaaatgctgcccaactcagactccttcctcaagcagcactgtggaaagcaaatttaat

SEQ ID NO: 85345 - DNA, 120 bp, synthetic construct
  source 1..120: mol_type = other DNA
cttcatgcacagactggcacatagtaagtagtcgataggtgttaacaatttgtgttattgttattttctggagtccaactaacaaatcccacagtgaatgacatcacagggatgcaacca

SEQ ID NO: 85346 - DNA, 120 bp, synthetic construct
  source 1..120: mol_type = other DNA
aacataggcagagaagcattctgtttgaagttatgttagtttttaggctcttctcatttttatcacagttaggaaaccctgagtatccaaatccttcctaagtctatgggaacctctcag

SEQ ID NO: 85347 - DNA, 120 bp, synthetic construct
  source 1..120: mol_type = other DNA
ataaactaggtattgatggaacatatctcaaaataataagagctatttatgacaaacccacagccaatatcttactgaatgggcaaaaactggaagcattgcctttgaaaaccagcacga

SEQ ID NO: 85348 - DNA, 120 bp, synthetic construct
  source 1..120: mol_type = other DNA
ggctagccatatgtagaaagctgaaactcgatcccttccttacaccttatataaacatgaactcaagatgcattaaagacttaaacataaaacctaaaaccataaaaaccccagaagaaa

SEQ ID NO: 85349 - DNA, 120 bp, synthetic construct
  source 1..120: mol_type = other DNA
gaacaatgagaacacatggacacagggaggtgaacattacacacaggggcctgtcggggagtcgggggttgggggagggatagcattaggagaaatacctaatgtaaattacgagttgat

SEQ ID NO: 85350 - DNA, 120 bp, synthetic construct
  source 1..120: mol_type = other DNA
cagtgagccgagatcgagccactgcactccagcctgggtgtcagagcgcgattccgtctcaaagcaaaaaaaaaaaaaaaaagacaatgaaatgtaatatgtggtagaaaagctaaaaca

SEQ ID NO: 85351 - DNA, 120 bp, synthetic construct
  source 1..120: mol_type = other DNA
aatcaggaaatgggaaggtaaagaatccaggaaactgaatttaatgcaggacctcactgaaaagggatcctactatagcagttccttggcaagcaaagaatgtctgatacatgagtgata

SEQ ID NO: 85352 - DNA, 120 bp, synthetic construct
  source 1..120: mol_type = other DNA
ttgttgttgttgttgttgttgtttgagacagagtctcactctgtcacccaggctgcagtgcaatggtgtggtctcagctcactgcaacctctgcctcccaggtgattctcccacctcagc

SEQ ID NO: 85353 - DNA, 120 bp, synthetic construct
  source 1..120: mol_type = other DNA
tgatcataccactgcattccagccagaactaggccctgtctcaaaaaaaaaaaagtacaaagtttcagttagacaggaggaataagtactggagatcgactgtacagcatggtgactacg

SEQ ID NO: 85354 - DNA, 120 bp, synthetic construct
  source 1..120: mol_type = other DNA
aattgctaagagagattttaaatattcataccacaaaaaaagtgaagtgatggatatgttaattagcctggtttaatcacatgtatcaaaaagtcatgtagtaccctgtaaatgcagtta

SEQ ID NO: 85355 - DNA, 120 bp, synthetic construct
  source 1..120: mol_type = other DNA
taacagggtaatagaatatcacaaggcaagtggaggcagggcgagatcacaggaccacgggactgaggcgaaattaaaattgctaatgaagtttcaggcaccattgtcattgataacatc

SEQ ID NO: 85356 - DNA, 120 bp, synthetic construct
  source 1..120: mol_type = other DNA
tgccatggcttcagccggtccctccgtttggggtccctgacttcccgcaacaatttatacaggatgtacttgtaattctaatgaaattatccattaaagatcatattatccagtgaaatt

SEQ ID NO: 85357 - DNA, 120 bp, synthetic construct
  source 1..120: mol_type = other DNA
tgacttttaacaagcatgctgccttcaagcatttgtttaacaaagcacatcctgctttgttaaaccttgagttgacacagcatatgtttctgcaagcacagggttggggatagggataca

SEQ ID NO: 85358 - DNA, 120 bp, synthetic construct
  source 1..120: mol_type = other DNA
catcccgtgcacaggacaatgtgtttgagaggtgtgcatgttacccaggcttggccaatcagaatgtttcctaaagttgtcaaaactctggtagacaagtctagaaacatatataacaga

SEQ ID NO: 85359 - DNA, 120 bp, synthetic construct; identical to SEQ ID NO: 27674
  source 1..120: mol_type = other DNA

SEQ ID NO: 85360 - DNA, 120 bp, synthetic construct; identical to SEQ ID NO: 27675
  source 1..120: mol_type = other DNA

SEQ ID NO: 85361 - DNA, 120 bp, synthetic construct; identical to SEQ ID NO: 27676
  source 1..120: mol_type = other DNA

SEQ ID NO: 85362 - DNA, 120 bp, synthetic construct; identical to SEQ ID NO: 27677
  source 1..120: mol_type = other DNA

SEQ ID NO: 85363 - DNA, 120 bp, synthetic construct; identical to SEQ ID NO: 27678
  source 1..120: mol_type = other DNA

SEQ ID NO: 85364 - DNA, 120 bp, synthetic construct; identical to SEQ ID NO: 27679
  source 1..120: mol_type = other DNA

SEQ ID NO: 85365 - DNA, 120 bp, synthetic construct; identical to SEQ ID NO: 27680
  source 1..120: mol_type = other DNA

SEQ ID NO: 85366 - DNA, 120 bp, synthetic construct
  source 1..120: mol_type = other DNA
tctctgggcagacattttttttgtgaaggttctcaatccagtgcctggcactgtgacgtcttcaaattgtactggatgaacatctgaggtgaaaatttcctctcgattatagaagagctg

SEQ ID NO: 85367 - DNA, 120 bp, synthetic construct
  source 1..120: mol_type = other DNA
atcaggctcctcttgacagtgactaggggcaatactaatggttataaagcaattagaacaacgcctggcaaacattacttctgacctcaaccaagacaataaatatctccacttctcttc

SEQ ID NO: 85368 - DNA, 120 bp, synthetic construct
  source 1..120: mol_type = other DNA
tcaccagaaggaccatccaggaccctaccctgcatttacttcaggaatcaagaatcactgtatattctgaaaggttctgtggcttccttaatgccaatggtaataaaactagaaatgctg

SEQ ID NO: 85369 - DNA, 120 bp, synthetic construct
  source 1..120: mol_type = other DNA
ccctagtgatgcctgggatatttccagagacagctcttcccccagcctctagattagtagtcaccatgctccttcattcccagaaaaaatttaaatatttctctgtgagatctttataat

SEQ ID NO: 85370 - DNA, 120 bp, synthetic construct
  source 1..120: mol_type = other DNA
gtgatccatgcttttgccaaagagggttttgagaacttcagtatttaaaagagaaagagcaagcaggaggggaaggagaaaaaaaaggaggaagagtaggccatgatacaagtggttaca

SEQ ID NO: 85371 - DNA, 120 bp, synthetic construct
  source 1..120: mol_type = other DNA
ttgaattgtatctcccagaattcccacatgttgtgggagggacccagggggaggtaattcgatcatgggagccagtctttcccatgctattctcataatagtgaataagcctcacaatat

SEQ ID NO: 85372 - DNA, 120 bp, synthetic construct
  source 1..120: mol_type = other DNA
aggaaaaagtggttttgtggaccaggcccagcgtccccttgctgtgtgcagcctagggacttggtgccctgtgttccagctcctccagccatggctgaaagaggccaatgtacagctcag

SEQ ID NO: 85373 - DNA, 120 bp, synthetic construct
  source 1..120: mol_type = other DNA
ctgccctgctggatttcagacttgtgtgtgccttgtaacccctttgttctggccaatttctcctatttggaatggctgtatttacccaatacctgtacctccattgtatctaaaaagtaa

SEQ ID NO: 85374 - DNA, 120 bp, synthetic construct
  source 1..120: mol_type = other DNA
gtagagaagctcttcagtttaattagatcccatttgtcagcatttgcttttgttgcaattgcttttgatgttcttgtcatgaagtctttgcccatgtctatgtcctgagtggtgttgcct

SEQ ID NO: 85375 - DNA, 120 bp, synthetic construct
  source 1..120: mol_type = other DNA
ctgttgttggcgtataggaatgcttgtgatttctgcacattgattttgcatcctgagactgctgaagttccttatgagcttaagaagttttggactgagacaatgggattttctaggatc

SEQ ID NO: 85376 - DNA, 120 bp, synthetic construct
  source 1..120: mol_type = other DNA
ttgggaaggtgtatgtgtctaggaatttcttttagatttttttagtttatgtgcataaaggtgtttatagtattctctgatggttgtttgtacttccatggggtcagtggtgatatcccc

SEQ ID NO: 85377 - DNA, 120 bp, synthetic construct
  source 1..120: mol_type = other DNA
tcgtcatttagcattaggtatatctcctaatgctatccctcccctctctcccccaccccacaacagtccccggtgtgtgatgttccccttcctgtgtccatgtgttctcattgttcaatt

SEQ ID NO: 85378 - DNA, 120 bp, synthetic construct
  source 1..120: mol_type = other DNA
gtttggccagatatgaaattctagattggaaattattttctttaagaatgttgaatattggcccccaatctcctctggcttgtagggtgtctgctgagaggtctgctgttactcttacgg

SEQ ID NO: 85379 - DNA, 120 bp, synthetic construct
  source 1..120: mol_type = other DNA
gtcagaactgtcctgtatgaactgtccagcaacccctgttggaaggtctcacctagtcaggaggcatgggatcatgggatcaaggatctgcttaaggaagcactctggctgcccattggt

SEQ ID NO: 85380 - DNA, 120 bp, synthetic construct
  source 1..120: mol_type = other DNA
cctgggtctaagtaatgctcctgccttagcctaccaagtagctgggattacaggtatgaggcaccatgcctgaccatattttggatattgatctcttatgagatatactatttgtcaaca

SEQ ID NO: 85381 - DNA, 120 bp, synthetic construct
  source 1..120: mol_type = other DNA
ctcttctgagtctccaatgtccattttaccactctgcatgcctttgtgtacccatagcctagctcccacttgtaagtgagaacatacggtatttgtttttcctttcctgagttagaagtt

SEQ ID NO: 85382 - DNA, 120 bp, synthetic construct
  source 1..120: mol_type = other DNA
ctcaaactcctgggctcaagcaatcctccagccctggcctcccaaactgttgggattgccacacttgacctatttttaaaatttacttttactatttgtttctctttgtgtttcactctg

SEQ ID NO: 85383 - DNA, 120 bp, synthetic construct
  source 1..120: mol_type = other DNA
agtttgggcataccaaccacaatccatcatgcaattaaagcagtacatttgaaaccagacttcagcaggtttaaaaactaggtggttgttctggtttggtgatagatactacaatcccag

SEQ ID NO: 85384 - DNA, 120 bp, synthetic construct
  source 1..120: mol_type = other DNA
cacaaacagtcaaagacaacatcctagagggcaatgtcttccagccagcaccattcaattattcttttggactgactacatctaggtaatgggtatatatcattatcccattgctacgtc

SEQ ID NO: 85385 - DNA, 120 bp, synthetic construct
  source 1..120: mol_type = other DNA
ttcacaggaaaaaaaatgagaggcaccatattagagtatggcagcttggatccctgaatcaccagcttgagaagagctactcacaaatcatcagtatcttcctactgttacattagtgag

SEQ ID NO: 85386 - DNA, 120 bp, synthetic construct
  source 1..120: mol_type = other DNA
gattcacagaagttgtgcttgagttaaaccactaagtactttccttgccagccaatgagaagaagtgaagcagcatcatttgtctctggctgactgagccagtaagtctgttacagaaaa

SEQ ID NO: 85387 - DNA, 120 bp, synthetic construct
  source 1..120: mol_type = other DNA
aggaggcaagtttttgcaatatacttgaacaacatggcacctatgtggaatggaagagaaagcagcgtagtggtgaggaaattctggtgggtgaagacattctcaggtgaaatttttaga

SEQ ID NO: 85388 - DNA, 120 bp, synthetic construct
  source 1..120: mol_type = other DNA
aagactcaagtcacagagacattgtaattctcatctgagtttggggtcctcttccaagctcactgcctgttggcagaattcatttccacatatgactgaggtccatagcaactataaata

SEQ ID NO: 85389 - DNA, 120 bp, synthetic construct
  source 1..120: mol_type = other DNA
ttttattagatgcacctatatttatagttgctatgttttccttttcttttctttctttttttagacaaagtctggctctatcgcccaggctggagtgcagtggtgcaatctcggctcact

SEQ ID NO: 85390 - DNA, 120 bp, synthetic construct
  source 1..120: mol_type = other DNA
tggcctgtctctggactcaactcaacatcccatgtcctcgctcagactatataactctagacccagcctgttaatatggactgcttgtattttttcagagaaacctctaaaagaaattat

SEQ ID NO: 85391 - DNA, 120 bp, synthetic construct
  source 1..120: mol_type = other DNA
aatttaatgaagttggtagctatattctggttatgtacaagaatgtatccttttcttaggaaatacacactgaagtacttaaggataaagagttctgatgagtgcaatttcaggaaaaaa

SEQ ID NO: 85392 - DNA, 120 bp, synthetic construct
  source 1..120: mol_type = other DNA
ctcctcggcctcccaaagtgctgggattacaggtgtgagccactgcacctggcctcaaaatttaaataattaggtaacaaactatgacacaattatatacagtccttcaaaacaatgttt

SEQ ID NO: 85393 - DNA, 120 bp, synthetic construct
  source 1..120: mol_type = other DNA
gcagaaattcaaaggatcattagtggctactatgagcaactatatgctataaattggaaaacctagaagaaatggacaaagtcctagacacatgcaacctaccaagattaaaacaggaaa

SEQ ID NO: 85394 - DNA, 120 bp, synthetic construct
  source 1..120: mol_type = other DNA
cacagctagtatcatactgaatggggaaaaactgaaagtcttttttctaagatctggaacatgacaaggatgccactgtcaccactgttattcaacatagtactggaagtcctagctaga

SEQ ID NO: 85395 - DNA, 120 bp, synthetic construct
  source 1..120: mol_type = other DNA
tctccaggacattggtctaggcaaaaatttcctgagtgatactctacaaacacaagcaaccaaagcaccaatggagaaatgggattacatcaagttaaaaagcttctgaacacaaaggat

SEQ ID NO: 85396 - DNA, 120 bp, synthetic construct
  source 1..120: mol_type = other DNA
aggttggaaaggtagtgggggatcagggagggagggatatggggatggttaatgggaaaaaattggaaagaatgaacaagatctactatttgatagcacaacagggtgactatagtaaat

SEQ ID NO: 85397 - DNA, 120 bp, synthetic construct
  source 1..120: mol_type = other DNA
gtgcaggtgatacacaaaggatctgctggtctgcacatcagactcaatattctctactacaaggagacaggatataagcccagtccatctgcttcgttctttgacagtacatttcattca

SEQ ID NO: 85398 - DNA, 120 bp, synthetic construct
  source 1..120: mol_type = other DNA
catgactatgttgtccaacttttgtaatacatatcaacaaatatctacctgttatatccatttttaagaaatacataaaatgtaataacttgtacttttctcacccttctttgcttttct

SEQ ID NO: 85399 - DNA, 120 bp, synthetic construct
  source 1..120: mol_type = other DNA
ttgctcctcagattgcagacggtctactgtgggacttcaccttgtgatcatgtgagtcaacacgctttaataaactcccctttatacatacatctatcatattagttctatccctctaga

SEQ ID NO: 85400 - DNA, 120 bp, synthetic construct
  source 1..120: mol_type = other DNA
gaatagggttagcagtagcttcatctacaaggagaaaactcaagagatcttgaatataactgacagaataatagagtactgtgtttaaaaatacagggattggccgggcgcggtggctca

SEQ ID NO: 85401 - DNA, 120 bp, synthetic construct
  source 1..120: mol_type = other DNA
cagccatgcttctttgcttctcaaacatccaaaactgcatctcagattgcatcatattctgagcacatggaaggaagagtacgggaaataagagtggctgtgttaccaccctcaaggaat

SEQ ID NO: 85402 - DNA, 120 bp, synthetic construct
  source 1..120: mol_type = other DNA
ttcccaccctcctattttttttaagactcagaaccactacttgaacactctaattgataactgcttagttatttctcacctgccttaaagagtgtttcttcattatgctcaagaatgaga

SEQ ID NO: 85403 - DNA, 120 bp, synthetic construct
  source 1..120: mol_type = other DNA
ccatggcctgtcctcccacacaggtagaaattctgcaccataagttgaggtgaaggaagttggtgaaagcatactctggccaaaataatactgattttgctgtttttattaggattcagt

SEQ ID NO: 85404 - DNA, 120 bp, synthetic construct
  source 1..120: mol_type = other DNA
ttctcttcctggtaagactgcatctttctgcttgagctttgttctaccatctactgctttagactgaaaagcactctcaggggaaactcacagtaaacgttgaactcacctagttacttt

SEQ ID NO: 85405 - DNA, 120 bp, synthetic construct
  source 1..120: mol_type = other DNA
gatggatatgtgtcaggtgtcagagataagaatatgttcaaagaatggtagatacatgctctttacacagataggcaaaaaataaccagaagaaagaatgcataccacaaatacctaaat

SEQ ID NO: 85406 - DNA, 120 bp, synthetic construct
  source 1..120: mol_type = other DNA
accttaagaaggtagaaaaaggaaagcaaactaaatctaaagaagatagaaggtagaaagaaggaattaaaaagcaaagatgtggaaccaacccaaatgcccatcagtgatagactggat

SEQ ID NO: 85407 - DNA, 120 bp, synthetic construct
  source 1..120: mol_type = other DNA
gaaagcctgtggctacaaagaatgttgagccatagattccatcagagataataaagcggcctcgaaatattctgagacttgtagaagaatgaaatagactcctaagaggatcgtggtaag

SEQ ID NO: 85408 - DNA, 120 bp, synthetic construct
  source 1..120: mol_type = other DNA
attattaaacacccctctaaccatcagactaaccaagctgattaccaagttatcacctgaagcaaatggaacgtttctgcatctggcttgttttacagcctatcccttaaccaatgcctc

SEQ ID NO: 85409 - DNA, 120 bp, synthetic construct
  source 1..120: mol_type = other DNA
aaagctaagggaataccaacacaaccaaatagattcttagtttgggaacaaaatcatagcatgagtcaccccattcctgggccctctcctaatgatatgcctaggactaactttcttacc

SEQ ID NO: 85410 - DNA, 120 bp, synthetic construct
  source 1..120: mol_type = other DNA
atgagtgagaatacgcggtgtttggttttttgttcttgcgatagtttactgagaatgatggtttccaatttcatccatgtccctacaaaggatatgaactcatcactttttatggctgca

SEQ ID NO: 85411 - DNA, 120 bp, synthetic construct
  source 1..120: mol_type = other DNA
attccttcctcctcccagccactagtgaccaccattctactttctgtctctgtttgatcactcaaggtggtctcataaggtagaatcatacaatatctgccttttttgtgactggcttat

SEQ ID NO: 85412 - DNA, 120 bp, synthetic construct
  source 1..120: mol_type = other DNA
gtgcttaagttatgtgtcagtctaaaagaaacgctactattaaatcctcaattatgaaaatcttactcttcaatcatgagctgaagaatagcaatacaagttgttgattgctcttctgga

SEQ ID NO: 85413 - DNA, 120 bp, synthetic construct
  source 1..120: mol_type = other DNA
gttttatattgtgttgtgaaattgtcaaagataaaaactcgtacacttgtatagagcccttatcatgaatggagcttgcaggactggaagttgctctgggtgaatcagcgagtgagtggt

SEQ ID NO: 85414 - DNA, 120 bp, synthetic construct
  source 1..120: mol_type = other DNA
tcagctccattataatctcgtgatgaccaacttatatatgttccttccttgactgaactgtcgttatgtggtgcatgattgtattacactgtgagctctgggtcccattaaaattctagg

SEQ ID NO: 85415 - DNA, 120 bp, synthetic construct
  source 1..120: mol_type = other DNA
agccaggagacaaaagaggaaaaaccctaggaactcactcccttactattatttctccaagttctgacttccctccctaatattcatgctattttgtacttttcaaggtccacagatagc

SEQ ID NO: 85416 - DNA, 120 bp, synthetic construct
  source 1..120: mol_type = other DNA
gccaccagtctggactgaaagagactgaggttgtttaaaatgtaaaagggcaatggatctgcaactctctatgtaaaagaaacaggctgagaaagttgttcaaagtgccgatcatcctat

SEQ ID NO: 85417 - DNA, 120 bp, synthetic construct
  source 1..120: mol_type = other DNA
gaaagaaaaagaaagaaagagaaagaaagaggaaagaaacacacgaaaaggtggctcaccagtcacggcacacttattttagagaaaacaaacctgagaggcgccttctggccgagttag

SEQ ID NO: 85418 - DNA, 120 bp, synthetic construct
  source 1..120: mol_type = other DNA
ttggccaaggttagcagtgccacctagctgacccagacatataagcatattgttatctgccactggtgatttgtgttgtttgtaatgcagcattgttgtgacaacagatgactaatacac

SEQ ID NO: 85419 - DNA, 120 bp, synthetic construct
  source 1..120: mol_type = other DNA
ccagcacttctgctccctgcttccctatcatttaaagggaccacactcttgccttcctagcactcacgtaccattttcaagcagagaaaagaacaagtagctacactaggatttgcctga

SEQ ID NO: 85420 - DNA, 120 bp, synthetic construct
  source 1..120: mol_type = other DNA
catgtgcagataccacacggcgagagatgaaggaagagaaagaggaggaaggttccaggctctttttaacaatcagacctcacaggaactaatagtgtgagaagatgtttaacatattct

SEQ ID NO: 85421 - DNA, 120 bp, synthetic construct
  source 1..120: mol_type = other DNA
ggatgaagggaaattagagcagaattgcttatttacattatttcaaacttccaaccatgaaaggaaaaggtttgggatcttgtttgtaaagccaagtgtgtgtgtgtgtgtgtgtgtgtg

SEQ ID NO: 85422 - DNA, 120 bp, synthetic construct
  source 1..120: mol_type = other DNA
ctgtgattttctggaaacttcctggccacagcagactgaaagggacattgtggtaatgctggcttctctagactgaaccaaagcctatgtcttgaaagattaaaaagagataatgagctt

SEQ ID NO: 85423 - DNA, 120 bp, synthetic construct
  source 1..120: mol_type = other DNA
ttgagacttgaactcctactctagttggcactatatgtaggaatatggattctgggtgtctgttttcagtgatcattattaccttgatcagagagagtcctcagcatctttgccctcaag

SEQ ID NO: 85424 - DNA, 120 bp, synthetic construct
  source 1..120: mol_type = other DNA
cgaacgaggaagagggcaccctagacatcaaagtatattataaaataataatgtgtgatattggcacaggagtaccaaaacattcccaagaaaggaggaaagatttcagaaacaggtgaa

SEQ ID NO: 85425 - DNA, 120 bp, synthetic construct
  source 1..120: mol_type = other DNA
gtttgttatgggtgttgtttaggcatttaagataacctaaaactctaaacaacagacacattcaccaagtgaagccttggttctatgtcaacatattgccaaacaaatatacatttgtac

SEQ ID NO: 85426 - DNA, 120 bp, synthetic construct
  source 1..120: mol_type = other DNA
tagcagttgtgtggaaaatgaactgtaggaatcaagaaggaagtagggtgatgaggtgggaggctatttcaacaattcaggaggaaaatggcagtatcttaaagtcaagtggctacaaag

SEQ ID NO: 85427 - DNA, 120 bp, synthetic construct
  source 1..120: mol_type = other DNA
cctgtattaaaggtagattcgtctattatttcatcatagtttgtaggaccaatgagagccatgttcaaagcagttaaggagaaattcatatcaccagagttcctggagttgaaggttttt

SEQ ID NO: 85428 - DNA, 120 bp, synthetic construct
  source 1..120: mol_type = other DNA
gtagagagatggcagggaggaaaagagttggacagagagacaacccaagagacagataataaattatatatgcacacacacacacacacatatatatatacgcacacacatatatatatg

SEQ ID NO: 85429 - DNA, 120 bp, synthetic construct
  source 1..120: mol_type = other DNA
atttatggtccaaacagggacagcagacagcagagagcagagctctcattatcatggtagtaagcaaacatttaggaaatttcttgcaggcaggaatttaggaaagacaagaacaagcaa

SEQ ID NO: 85430 - DNA, 120 bp, synthetic construct
  source 1..120: mol_type = other DNA
ctctttctccctctcctcaggcctccctattccctaagaacacaagaacattaaaattggccaattagtaaccctacaatggcatctaagtaaagtcacttgtctctcactttaaatcaa

SEQ ID NO: 85431 - DNA, 120 bp, synthetic construct
  source 1..120: mol_type = other DNA
gaatattttaagcctattgttgggacccattgcccagacaaaaatattcctctcaaaatgctactgctcattgacaaggtacctagtcatccaagagctctgatggagatgtacaaggag

SEQ ID NO: 85432 - DNA, 120 bp, synthetic construct
  source 1..120: mol_type = other DNA
aaccaaaatcgcaatatatctgaagtgcactttactctgttaaagtgaacacaaaacatcagcttgaaggggcctgtggaaggcagaagaggatgttgaaatgctttggtgatgcatagg

SEQ ID NO: 85433 - DNA, 120 bp, synthetic construct
  source 1..120: mol_type = other DNA
gggcagcatggatggatgaggaggaggggaaaaaggagacgacaactcctcaaggatatgtccttctataaccccacagaccatctccaagacatcagccctaaggtcaaaacctagaac

SEQ ID NO: 85434 - DNA, 120 bp, synthetic construct
  source 1..120: mol_type = other DNA
gattttttataaaacaaagatcttcatgtttaaataaatctttagctccattattcacaggttgtagggaaaactggctagccatatgcagaaaactgaaactggaccccttccttacac

SEQ ID NO: 85435 - DNA, 120 bp, synthetic construct
  source 1..120: mol_type = other DNA
aggggtcaccataaaaacctgggagaaaaggaggtcagttctcagtaagtccttttgacttaagaaagtggtccaatttcagtttctgcatatggctagccagttttcccaacaccattt

SEQ ID NO: 85436 - DNA, 120 bp, synthetic construct
  source 1..120: mol_type = other DNA
gacagtgtggcgattcttcaaggatatagtaccagaaatatcatttgacccagcaattccatttttggttatatacccaaaggattataaatcattctactataaagatacatgcatatg

SEQ ID NO: 85437 - DNA, 120 bp, synthetic construct
  source 1..120: mol_type = other DNA
tgtttttctgccttcttttggattagtttttgccctaggattttacatatatgtataatatactttcaaatataccttagctcagtatgctccaaatttctctctctctcattcattgtg

SEQ ID NO: 85438 - DNA, 120 bp, synthetic construct
  source 1..120: mol_type = other DNA
cactggcagaaaaaaatgcattctctcactttgctaagagcctctgtttccccttttcttccttttcacccaatactcaaccttcaagttgtcctactcacccttcaagttgtctgtgaa

SEQ ID NO: 85439 - DNA, 120 bp, synthetic construct
  source 1..120: mol_type = other DNA
ctctacccaatacctgccagtagcaccctccccagtaatgacaacaaaagtatctccagacattgtcaaacatcacttgcaggaattttctattggcctcattttagaatgtctgtctta

SEQ ID NO: 85440 - DNA, 120 bp, synthetic construct
  source 1..120: mol_type = other DNA
aggactttttcttttttcttttcttttttttttttttttttttttttttgagacggagtctcgccctgtcgccagactggagtgcgtggagtgtagtggtgcgatcttggctcactgcaa

SEQ ID NO: 85441 - DNA, 120 bp, synthetic construct
  source 1..120: mol_type = other DNA
ctgtagcatcccatctctactacttacgagccatgtgaccctgggaaaagtcctttacctctctgagttttaatgtcctccttgaaaaatgtggatgatactaaagtatgacaagtattt

SEQ ID NO: 85442 - DNA, 120 bp, synthetic construct
  source 1..120: mol_type = other DNA
ggtaaagaagcagcaatcactctttcgagagatgtgcctggttatttttgtagtttggacaatattcatgttttgtctgggtgcagacgtgatgactgagtggccttattttctgtctca

SEQ ID NO: 85443 - DNA, 120 bp, synthetic construct
  source 1..120: mol_type = other DNA
gaacccaggaggcagagcttgcagtgagccgagatagcaccactgcagtccggcctgggccaaagagtgagactccgtcttaaaataaataaataaataaaataaaataaaataaattat

SEQ ID NO: 85444 - DNA, 120 bp, synthetic construct
  source 1..120: mol_type = other DNA
attatggcagttcctcctttaggaaaccagagctccaaccgactctctttgctacctgtgctattggagtttaccaaggacgttgttctgtttatattatatccagagactatagcctgg

SEQ ID NO: 85445 - DNA, 120 bp, synthetic construct
  source 1..120: mol_type = other DNA
tgtaaaacaaaagttggaaagtcaaatagttaaaaggggaagtgaactggaagctactctaaactttcacaaccttattaaccatggctgctcccattctgattttgtttggcagtggaa

SEQ ID NO: 85446 - DNA, 120 bp, synthetic construct
  source 1..120: mol_type = other DNA
tcattcaatacacatgtttgagcacacaatgagctaacttttgggaattcaaagataaaaaatcatgctgtctgccttgcagagggtgcacaaaccagtgatggaaacagtatggggcac

SEQ ID NO: 85447 - DNA, 120 bp, synthetic construct
  source 1..120: mol_type = other DNA
ccctggcatcctcggataagctcgctgcccattagaggaaaaagggtttaatttacctgagtcctcgagtgaatgtaattgttgaatcagaacactatagatatttagtaacctccttca

SEQ ID NO: 85448 - DNA, 120 bp, synthetic construct
  source 1..120: mol_type = other DNA
agacgaaagagactgtctggcagttgcctatgtttagcaaatttataagttttgacccgcagagtgcactgagaaatatggctgtgggaaaacacaccttggaattcatgatgagacagt

SEQ ID NO: 85449 - DNA, 120 bp, synthetic construct
  source 1..120: mol_type = other DNA
cagagctcacagagactttggtctgcgccctggggttgtctgtgggcctcatgggcattgtggtgggcactgtcttcatcatccaaggcctgcgttcagttggtgcttccagacaccaag

SEQ ID NO: 85450 - DNA, 120 bp, synthetic construct
  source 1..120: mol_type = other DNA
ccagccacccctcaattcaggtaccaacgaaccctctgcccttggctcagaatggttatagcagaaatacaaaaaaaaaaaaaaagtctgtactaatttcaatatggctcttaaaaggaa

SEQ ID NO: 85451 - DNA, 120 bp, synthetic construct
  source 1..120: mol_type = other DNA
atctctcagaggaaatgggtccacagggacctgagagctctaaacagctatgaaatctgccaggatatttctgtccatgctatctgcatcagtgagtttaaaatgtaataggagaaaaaa

SEQ ID NO: 85452 - DNA, 120 bp, synthetic construct
  source 1..120: mol_type = other DNA
acctctgtcatgaaggatgttactagtgggggaggctatgcatgtgtgggaacagagagcatatgggatacatctatctgtactctacaatttttctgggaacctaaaacttctctaaaa

SEQ ID NO: 85453 - DNA, 120 bp, synthetic construct
  source 1..120: mol_type = other DNA
cgaggctgcagtgagctaggactgactgcaccactgcactcgctccagcctgggcaacacagcgagaccccgtctctaaaaataaataaataaatgaataaataaataaaaattacaaaa

SEQ ID NO: 85454 - DNA, 120 bp, synthetic construct
  source 1..120: mol_type = other DNA
ccctgtccaaggcctgcccaagactgtaagaacctctcaggaatgcaactataaagaatgtgtatgcaggaactaataataacaaaggaaagcaaagtaatgcttgctttattattggct

SEQ ID NO: 85455 - DNA, 120 bp, synthetic construct
  source 1..120: mol_type = other DNA
tggaatagtcttgtcaggtatttagcaaaattaacagactcacttctaaatatctcattttcaaaatttcagaacttcaggtgttatagaaaagtcataaaatattccagtggcggaaac

SEQ ID NO: 85456 - DNA, 120 bp, synthetic construct
  source 1..120: mol_type = other DNA
agttacaaaaaaaatggactgttattcttcggcctaagctattcagaagctgcaagagcccctcagagtcggcccaaattagagcaggttgtatactcctatactgaccaatcattatag

SEQ ID NO: 85457 - DNA, 120 bp, synthetic construct
  source 1..120: mol_type = other DNA
tgaagatcaattgtgcagcatggtgactagttaacaatatcatacagttgtcccttggcatccatgagggattggttctaggacccttcctggataccaaaatataagaatgctcaagtc

SEQ ID NO: 85458 - DNA, 120 bp, synthetic construct
  source 1..120: mol_type = other DNA
agtttccatcgtctcatcgtgcatctacttgcaagttccattggctagtattagtcaaatgatcccaacctaacagcagaaaagactgggagatgtaaagaaccttatggcatattgacg

SEQ ID NO: 85459 - DNA, 120 bp, synthetic construct
  source 1..120: mol_type = other DNA
tgcacaggatggtgtgtttgggaggtgtgcatgttacccaggcttggacaatcagaatctttccccaaattattaaaactctggtagacacttcagaaacatatacaacaaagacagaca

SEQ ID NO: 85460 - DNA, 120 bp, synthetic construct
  source 1..120: mol_type = other DNA
taaatgattttgtttgtcatgcttctcttgacaggtctgtggggggagaatggaaacagagatgccccttggggcctgagtagacacagcttgcagtgcacaggcagaggctctgggtca

SEQ ID NO: 85461 - DNA, 120 bp, synthetic construct
  source 1..120: mol_type = other DNA
attctcttgcctcaacctcccaagtagccgggattacagatgcacaccaccacgtccagctaatttttgtatttttagtagagatgcggtttcaccatggctcttccctcttatgcctgt

SEQ ID NO: 85462 - DNA, 120 bp, synthetic construct
  source 1..120: mol_type = other DNA
gtaattaacaatgttggaggtagagcctggtgggaggtgactggatcattagaccagattcttgtcaccatctcccttagtactgtcattacaatagtgagttctcatgagatctggtta

SEQ ID NO: 85463 - DNA, 120 bp, synthetic construct; identical to SEQ ID NO: 27681
  source 1..120: mol_type = other DNA

SEQ ID NO: 85464 - DNA, 120 bp, synthetic construct; identical to SEQ ID NO: 27682
  source 1..120: mol_type = other DNA

SEQ ID NO: 85465 - DNA, 120 bp, synthetic construct
  source 1..120: mol_type = other DNA
attcgggcagaaagaactgcttagcgaaggtaaggcacgaggaggcaaacgcataaggcacaaggcaagaacatgcagagcagaggacaaggccgatggacggggaggctggggacacac

SEQ ID NO: 85466 - DNA, 120 bp, synthetic construct
  source 1..120: mol_type = other DNA
atctcggagacagagttatccacataaatttgagagttcaagggaataacgagaaaggttcaggaattaagcttgttctcatcctgatgtaagtattctcttggtccctgggcaagagac

SEQ ID NO: 85467 - DNA, 120 bp, synthetic construct
  source 1..120: mol_type = other DNA
gtggaaataaaaatgcaacatagctctatttcccaaaaagaataaatggtgataaaagactgtgttctgagatcatggagatcaccatcccccatactccaacccaaggagagcctgttc

SEQ ID NO: 85468 - DNA, 120 bp, synthetic construct
  source 1..120: mol_type = other DNA
gcctcctccactgttatgtgtaactatcaggctaataggaggaacaagaaaaaaaaaagttgacacccagccctactggcaagtgattctttattatgcaagaaggtattgcattcatgc

SEQ ID NO: 85469 - DNA, 120 bp, synthetic construct
  source 1..120: mol_type = other DNA
ccctcaggtttattctggggctgtgaggcaaagtctacgtcaaacctagggactccccagtctcatgggcctcttcaaacagacttttttcttttcttttcctttttttttattttcctt

SEQ ID NO: 85470 - DNA, 120 bp, synthetic construct
  source 1..120: mol_type = other DNA
aaaaaggttgtggactccttctttgtggaatcaagggagaaatcatcttccctggtcagcatctcttagaatctgtgcctggtcagtgcagttgaatgtaaacacaggagtcatcctgtc

SEQ ID NO: 85471 - DNA, 120 bp, synthetic construct
  source 1..120: mol_type = other DNA
acttctggttccctagtaatgcctgggatatttccagagacaactcttccccagcttctagatttgtagtcatcatgtgccttcattcccagacaaaccttaaatatctctctatgagat

SEQ ID NO: 85472 - DNA, 120 bp, synthetic construct
  source 1..120: mol_type = other DNA
aggagggaaggtaggcaatgacacaagtggttacattcttgtgagtctgattagcctcagtaaatctacattttacatgtgaaaagagggagtagaggaaaaagtcacttatgcaaaaac

SEQ ID NO: 85473 - DNA, 120 bp, synthetic construct
  source 1..120: mol_type = other DNA
gacttccagttttcccagcaccattgttgaaaaggctgtcctttccgcatttaatggccctggcactcctgttgaaaatcgtttgactatatatgtcaggataatttcctggttttgata

SEQ ID NO: 85474 - DNA, 120 bp, synthetic construct
  source 1..120: mol_type = other DNA
tatgtccaccatgcactggctacctgtttatctgagtctggtgaaacagaacacactcacacacaaattatgtgaagcagttttattacttacagatcagtagcaagggacagaagaagc

SEQ ID NO: 85475 - DNA, 120 bp, synthetic construct
  source 1..120: mol_type = other DNA
gtcttctgggcaggggcgtgactacacctgtaaagataagctaccaatttacattgccatggtaaaattttaacagaaacaccttagagtaaagatcttgcagctcacaaggactttcct

SEQ ID NO: 85476 - DNA, 120 bp, synthetic construct
  source 1..120: mol_type = other DNA
tttctcaggaaaaaaaatgaaaggcaccatattggactatgggagcttggaattctgaatcaccacctggagaaaagtgactcacaaatcttcaatatcctccttctgctacattagtga

SEQ ID NO: 85477 - DNA, 120 bp, synthetic construct
  source 1..120: mol_type = other DNA
atgcctggctgttccagacagggaagcttgctttacctgaaggaagtggtcactagaccagaatgtaaccaaatacaggattctgctttaaaaaaaaaaaaaaaaaagattcacaaaagt

SEQ ID NO: 85478 - DNA, 120 bp, synthetic construct
  source 1..120: mol_type = other DNA
atgttacaggttatattcttcacttcttcaaagtacataagggcccactctactcttctggagtctatccaaatttgtagggtaatgggctgtagctaatgaggaatggaactcagtggg

SEQ ID NO: 85479 - DNA, 120 bp, synthetic construct
  source 1..120: mol_type = other DNA
ctagccactgtcataacaaattagtagaaactttgcagcttaaaacaacacccatttattatctcagttttctaggtcagaagtctaggcaaagctcaactgggctctctgcttaggatc

SEQ ID NO: 85480 - DNA, 120 bp, synthetic construct
  source 1..120: mol_type = other DNA
ttaaaggaaaataattttataaggtatgtacaacagggggtgatagatattcctgggggccatcttagaattctgctttccttctcacctcttcagccctctggccacctgtaattcatg

SEQ ID NO: 85481 - DNA, 120 bp, synthetic construct
  source 1..120: mol_type = other DNA
cctgatgattgcaatagaatacctgaaactgggtaatttataaagaatcaaaatttatttctggaggctgggaagtccaagagcatggtgccagcatctggtgagagcctccttgctagt

SEQ ID NO: 85482 - DNA, 120 bp, synthetic construct
  source 1..120: mol_type = other DNA
ggtggcagtcccactgtcacagcaccactagatatttccctggggaggactccctgtagcagttccaaccccacagttcctctcagcattgccctagcagaggctcttggtggttgaagg

SEQ ID NO: 85483 - DNA, 120 bp, synthetic construct
  source 1..120: mol_type = other DNA
ttctttctacacagacacagtaacaatctgatccctcttgcttttccccacagtggtggccctgcccctgtggcagttttctccttgggttcccaggcagtctgatacatcctttgaaat

SEQ ID NO: 85484 - DNA, 120 bp, synthetic construct
  source 1..120: mol_type = other DNA
cctgaccactcaaatcatcacaaaggagttccagacttttcctagtcttcttgacttcttctaagccctcaccaaaatcaccctttatcaccagaattgacatttaaggcaatacaggct

SEQ ID NO: 85485 - DNA, 120 bp, synthetic construct
  source 1..120: mol_type = other DNA
tccttatatctatagcatacaagtgtttgaaaacattctcctcaacctcctttaaaatcatggggagcccaacctcagctcctagccagaagcagaaagtcaaaatttggctgtctttcc

SEQ ID NO: 85486 - DNA, 120 bp, synthetic construct
  source 1..120: mol_type = other DNA
cgtgagccaccgtgcccggcctgttttcttttcttaactattattttaagttcggggtacatgtgcagttttgttacataggtaacctgtgtcatggaggtttgttgtacagattatttt

SEQ ID NO: 85487 - DNA, 120 bp, synthetic construct
  source 1..120: mol_type = other DNA
ggagaaataagatccttttcagacaggcaaatgctgagcaaattcattaccaccaaacctaccttacaagagcttctgaaggaagcactaaatatgaaaaggaaagactgttaccagcca

SEQ ID NO: 85488 - DNA, 120 bp, synthetic construct
  source 1..120: mol_type = other DNA
tagcatgtgtatcaggctgggatggcaggtggattcattctaacctctaccttgagatgtgttttcagactctgttaaggtttacgttgctcatttctggcatccttcacataagaatta

SEQ ID NO: 85489 - DNA, 120 bp, synthetic construct
  source 1..120: mol_type = other DNA
atgagcctgtcatggcctgcatggaagttcactactgataagcactttgtttctttattcccttactcagctttcctcttttgtagcttcatagcaagaatcacaacctaacactgcatt

SEQ ID NO: 85490 - DNA, 120 bp, synthetic construct
  source 1..120: mol_type = other DNA
aaatacagggattacctacagaggaactaaacatagtaatataataaaattgcaagaaggatgccagagacataaaattgttggtggtctaaattatctgctttcagataattagataac

SEQ ID NO: 85491 - DNA, 120 bp, synthetic construct
  source 1..120: mol_type = other DNA
acaaatctcctctcttacactgcatttcctgcccacaccctgcttccccatgcgttaagttagcagccttttttccctcttgttgttttctgccttctgatatttcagataagaaatctg

SEQ ID NO: 85492 - DNA, 120 bp, synthetic construct
  source 1..120: mol_type = other DNA
atcttgcataaccatttagaggatgctatcctgaaaaagataatcagttttacagagaagtcttggtagctctgaggctattaataaccccagttactacagtaacaaccgggaggtgaa

SEQ ID NO: 85493 - DNA, 120 bp, synthetic construct
  source 1..120: mol_type = other DNA
agagcttctacacagcaaaagaaactaccaacacagtaaaaagacaacccacagaatgggagaaaatttttcaatctatgcgtctgacaaagatctacaattcagcatctataaggaact

SEQ ID NO: 85494 - DNA, 120 bp, synthetic construct
  source 1..120: mol_type = other DNA
catgtgcttttcttaacagactatgaggtaattattattatctaaattttcagataaggaaaacatctttcagtttgagtaccttgcccaagatcacagctcataatttgttttaatgat

SEQ ID NO: 85495 - DNA, 120 bp, synthetic construct
  source 1..120: mol_type = other DNA
ttcgtgaaagaataagaaggccagtgaggctggaacagaacgggttggttggacaattataggagacaagattggacaagtacacatgtaagacatggtaaggagatttgattttatcct

SEQ ID NO: 85496 - DNA, 120 bp, synthetic construct
  source 1..120: mol_type = other DNA
tttttacattactaaaggggaaaacacgaaatacaaagctgtcacctggcttccgtcaacagtgatctgatgatgaacggtgtcccctcagaatataaaggtgttctttgaacgttcaca

SEQ ID NO: 85497 - DNA, 120 bp, synthetic construct
  source 1..120: mol_type = other DNA
gattatgaggcttgtacttgtactgatttatttatgtatttgtctctgtttgttttttagagatgcgggggggtctcactgtgttgcctaggctggtcttgaactcctgacctctagtta

SEQ ID NO: 85498 - DNA, 120 bp, synthetic construct
  source 1..120: mol_type = other DNA
atcactctggagattccaagagttttaggagctgaagggcaggaaccagggtcagaaaccaaatatatacttcctattatatcacaatatcacacacactagcttgggtcaatcagttgc

SEQ ID NO: 85499 - DNA, 120 bp, synthetic construct
  source 1..120: mol_type = other DNA
atctttttcccttcactcatattctcaacatttccagaaccagagagagagagacagagaaacagagaagttctgacctcaacaccaccttttcctacagaatatgtggcacccgtattt

SEQ ID NO: 85500 - DNA, 120 bp, synthetic construct
  source 1..120: mol_type = other DNA
agcagcaataagatcgattgaggaattatctcacgtactaaaacagaagacctatcattttgtgggaggtagtagccatgaatccaaatcaagcctagtagtagtacattccccagcgtg

SEQ ID NO: 85501 - DNA, 120 bp, synthetic construct
  source 1..120: mol_type = other DNA
tggtgcgatctcctctcactgcaacctccgcctccccattagcagggattacagtcgcacaccaccacacccggctaattttttttttgtatttttagtagagaaggagtttcaccatgt

SEQ ID NO: 85502 - DNA, 120 bp, synthetic construct
  source 1..120: mol_type = other DNA
atctggaattttatttgatgattagtctagcatcgtaatggtgtccttcgtgttgacgtgaaaacccagtcttccttcagttcatttcccgtttattagggatgcaaaactccagccaca

SEQ ID NO: 85503 - DNA, 120 bp, synthetic construct
  source 1..120: mol_type = other DNA
gctgaattctggagacggaaaatattaataagacacggagtcctgcttaccacccaggagacatattagcaaacaaaggggcacagcagaaatgtgtgtaaaattaggacattgaagtca

SEQ ID NO: 85504 - DNA, 120 bp, synthetic construct
  source 1..120: mol_type = other DNA
gatctgaatctatgaaacctgtgaatctgttaccttacatggcaaaagggactttgcattagtgattagattaaggatcttgagatggggagattattctggattagccaagtggtcctg

SEQ ID NO: 85505 - DNA, 120 bp, synthetic construct
  source 1..120: mol_type = other DNA
tagctccatcgcttcctacccatatgaacttgcgtgtcttaattaacctccctaagcctccactttctcatttgtaaaatgggactatctactagaatttctgtctggaaagaggaatgg

SEQ ID NO: 85506 - DNA, 120 bp, synthetic construct
  source 1..120: mol_type = other DNA
tctcgatctcctgacctcgtgatctgctcacctcagcctcccaaagtgctgggattataggcgtgagccacattttttattttctaaaatgaaaatgttgatatttaatttttaatcccc

SEQ ID NO: 85507 - DNA, 120 bp, synthetic construct
  source 1..120: mol_type = other DNA
aacttcatgtaggcattaaatagaaaggatacagctcatttgacaaccagtagaacaggcagctatttaaagaagcgtaatccaagttaatgatgtacatatatgaggtattagaatacg

SEQ ID NO: 85508 - DNA, 120 bp, synthetic construct
  source 1..120: mol_type = other DNA
ggcattccaggagtgttatgtaagtggaatcatttagtagacaacattttgcaattttttttttcactcagcataattccctggtgattcatccaggtcgtggtgcctgtatccagtttg

SEQ ID NO: 85509 - DNA, 120 bp, synthetic construct
  source 1..120: mol_type = other DNA
tactttgacttcctcttttcctatttggctgctctttattcttttctcttgcctgattgccctggcaaggacttccagtactatgttgaataggagtaatgagagggggcattcttgtct

SEQ ID NO: 85510 - DNA, 120 bp, synthetic construct
  source 1..120: mol_type = other DNA
aaaccagctcctggattcattgatcttttgaatcatttttgtgtctcaatctccttccattcagttctggattttggttatttcttgtcttctgctagccttgagattggttggctgtga

SEQ ID NO: 85511 - DNA, 120 bp, synthetic construct
  source 1..120: mol_type = other DNA
tttgatcctatgtgtgtcactgcatgacacacatgagtcttttgaagacagcatactaataggccttggttctttatccagattaccactctgtgccttttaattggggcactagcccat

SEQ ID NO: 85512 - DNA, 120 bp, synthetic construct
  source 1..120: mol_type = other DNA
caatgatcttcatttctatccttattctgaattacatatctgtcatttcagccatctcagcccagttcagaatccttgctcgagaggtgatgtggtcgtttggagaacagaagacactct

SEQ ID NO: 85513 - DNA, 120 bp, synthetic construct
  source 1..120: mol_type = other DNA
caccaaggctctgtctgcaatggctgtcaggagggaattggtggggggtgaattacactcctatatgctggtgaggcaaggaaaacaaaacccacccagcagacatgtaccagcaaaatg

SEQ ID NO: 85514 - DNA, 120 bp, synthetic construct
  source 1..120: mol_type = other DNA
gatttttatagccacaaaactgactttcgactatgaagtgcaagaacttcctggtgtggactgtatatgccgtcccaaaattcatatgatgaaatcgtaacgcccaaggtgacagtacca

SEQ ID NO: 85515 - DNA, 120 bp, synthetic construct
  source 1..120: mol_type = other DNA
cacagttgggaaaagaaggaaagtttccataaccatttcagctatcgtaactgttcttccttgataagacaccaaaactcaagaaatggcagattcttaaaggttagttgcagtgtggaa

SEQ ID NO: 85516 - DNA, 120 bp, synthetic construct
  source 1..120: mol_type = other DNA
ggaatccatggaccacaccttgaaaaccaccacatgacagggatatcaacataaggaatgatggtgagcattaaacatatctctactcacagaactaagactaacaagggagcaagtagt

SEQ ID NO: 85517 - DNA, 120 bp, synthetic construct
  source 1..120: mol_type = other DNA
actgataaacgtatctaggttgtttctctaaacactgaaactttgtcccagccctgagccaggttccttaaaccttcatataagctccataccctgaccccctcgctgcagacataccta

SEQ ID NO: 85518 - DNA, 120 bp, synthetic construct
  source 1..120: mol_type = other DNA
tgctaacatcacaaaaagaaacagctggaaattatgtctctcatggtgaaaggccacaacaccacgtatagattttccaaaggaaaagattgaaccagagtctgatccagcctctgcatc

SEQ ID NO: 85519 - DNA, 120 bp, synthetic construct
  source 1..120: mol_type = other DNA
ggaagagagttattcccagaacattgacctcatgaatgtcctttacctcacccagggcccagactactcatcactacttcaggctccagagagagaagcttcagtgaggaccttagcatg

SEQ ID NO: 85520 - DNA, 120 bp, synthetic construct
  source 1..120: mol_type = other DNA
caaagaattagaggacaccagttcatagggttggaagcacataatgaggtgattagatctcctcatttcttggaagatatgaggatagatatctgccatgttttctcccaccctaaccca

SEQ ID NO: 85521 - DNA, 120 bp, synthetic construct
  source 1..120: mol_type = other DNA
acaaacatccccacatcactgtcgaaacgtacatactcctccaagttaaagatgaatctgaccacaaactgcaccttttctgtcccgttggtgaagtaacagtcagcctttgcctgaatc

SEQ ID NO: 85522 - DNA, 120 bp, synthetic construct
  source 1..120: mol_type = other DNA
tggacattataaactcagggcggtttctattctctgagaataatgatctctcctggccaggtttgttcctcttttgtatttaatgaaactaacatgcaaaggggattctgttcttagcac

SEQ ID NO: 85523 - DNA, 120 bp, synthetic construct
  source 1..120: mol_type = other DNA
ttttctggcttccccaggattggaaactcctcagattgacaaccaatcaagatagaagagttttgcatcatcaggtactgggtaggatactttcacaaagttgtgtcatacaactcaacc

SEQ ID NO: 85524 - DNA, 120 bp, synthetic construct
  source 1..120: mol_type = other DNA
agaacagaaggactatattacgtgatttcactcatatgtggaatctaaaaaagttgacctcatcgaagtaaagagtacgttaggagttaccagaggctggggagtcaggggtagaaatgg

SEQ ID NO: 85525 - DNA, 120 bp, synthetic construct
  source 1..120: mol_type = other DNA
atggtaaccacaagttcacttcagtgacttttttcaggtcgatggccaaggcatcaaatcttccagggccatgaccttgaacttctagcttccagaactgtgagaaataaatttctgttc

SEQ ID NO: 85526 - DNA, 120 bp, synthetic construct
  source 1..120: mol_type = other DNA
tgtatgaatgagaaacaactgttctttaaagaaggtactggcttggttaccacagcctggcctgacttgacttaactgctacaggacaggagctaggaggctgacccctctccctccaca

SEQ ID NO: 85527 - DNA, 120 bp, synthetic construct
  source 1..120: mol_type = other DNA
ctgtaaggaaatcatatcctacctaaccaaaggaaatcagtgatctcacatgacaagcaaggaatggcatagagcctggcatgggaactaagaagagaaagcaataagcttcagttagca

SEQ ID NO: 85528 - DNA, 120 bp, synthetic construct
  source 1..120: mol_type = other DNA
gggaaaggatgtaagaaacaaaagaaatagttagaatttggggtgtccaaagcaaactcatgatcccacctagtgagaatccatttggaaactgaggaaccaaaggctttgggctccaat

SEQ ID NO: 85529 - DNA, 120 bp, synthetic construct
  source 1..120: mol_type = other DNA
atcttctatcttctgtgttcatacttttttttttttttttttttgaggcagagtctcactgtgccgcccaggctggagtgcagtggtgcgatcttggctcgctacaacctttgcctccca

SEQ ID NO: 85530 - DNA, 120 bp, synthetic construct
  source 1..120: mol_type = other DNA
cacttagttccctcttcctttagataattcctattagttttaaataatgaacaatcacaaaactagctcatatcctctcccttcctctttctgtgtgtgtgtctacctttgtagtcttaa

SEQ ID NO: 85531 - DNA, 120 bp, synthetic construct
  source 1..120: mol_type = other DNA
ctcatctttgctcccttatccttctgggtttagtatctctgttacttacatgataatattaaaaagcaaatgataactacaatacaatgctactttcacccagaagattgtcaaaatttt

SEQ ID NO: 85532 - DNA, 120 bp, synthetic construct
  source 1..120: mol_type = other DNA
ttagatggcatcagactcaagcaggtgctcctctagctgacagctctaaaacacaaggaagatctttgttttccttattccctagtcctttccccacaaaattctgacaattacgcattt

SEQ ID NO: 85533 - DNA, 120 bp, synthetic construct
  source 1..120: mol_type = other DNA
cctgttttatgaataaaggacatttgtgggagagaaaggaatcaggccagagttctttctctccaaatgcctattttaccctctgtgaaatttgagagatggatgggtgtggagctgcaa

SEQ ID NO: 85534 - DNA, 120 bp, synthetic construct
  source 1..120: mol_type = other DNA
cacagaatttagaaaaatgactttgtgaagaatggccggaagagggaagctaatggtagagaaacctctctggtgatgggatcatcttaagtctatgagtgaagactataacaacgggac

SEQ ID NO: 85535 - DNA, 120 bp, synthetic construct
  source 1..120: mol_type = other DNA
aagcacacagtgtccaaatctccatcgtgcctgcaactcaggaacagctatctggccgcacagctctagggaaactcaaagcaggaacagctctgggtcctggagacgcccctgagaaga

SEQ ID NO: 85536 - DNA, 120 bp, synthetic construct
  source 1..120: mol_type = other DNA
ctggcttcccttctcccctacatctgaggaaatcagagaaattcccttcctcagatacaagtgacacagacaacacacaaggagggacaagtgcacagcaggtacttccagtaggacctc

SEQ ID NO: 85537 - DNA, 120 bp, synthetic construct
  source 1..120: mol_type = other DNA
aaaagagttaagggcctgccccttctccctcaaaatccctccatttctcttcttagcagaggcaagaccaggttctcagaggcaaatgaactataggctgtgatgtccaattatgcatta

SEQ ID NO: 85538 - DNA, 120 bp, synthetic construct
  source 1..120: mol_type = other DNA
ctacttcagctaatacatgaagaatgatagagtatctcccttttgcagccctaattctgtcatggatgtaggtactgctcatcagtggctgatgttgccacaaatagagaaccagacatt

SEQ ID NO: 85539 - DNA, 120 bp, synthetic construct
  source 1..120: mol_type = other DNA
ttttggttttgtattgtattgttaaaaagaacaaataaagcccaaggcccaggagtccacaaagaaaaagagagggaaaaaaggagagcaggcttggcttctcgctcacctgcacatagc

SEQ ID NO: 85540 - DNA, 120 bp, synthetic construct
  source 1..120: mol_type = other DNA
gcctcatgccactagatttggcagtgatttcttggatataacaccaaacgcacaggcaacaaaaaatagataaatcagacttcatcagaatttaaaacgtttgtgcatcaaagaactcta

SEQ ID NO: 85541 - DNA, 120 bp, synthetic construct
  source 1..120: mol_type = other DNA
ctaagtatatacccaaaagaaccaaaagcagggtttcaaacaggtgtacactcatgtccacagcagcataattcacaacagccaaaaggtggaaacaacgcaaatgtccattgacagatg

SEQ ID NO: 85542 - DNA, 120 bp, synthetic construct
  source 1..120: mol_type = other DNA
atatgctgagcatgaagccatacagccccaccactttcaccaggcttcgcaagagcacattggcatttaaaggaagccagttactcatcagggtggtatccgagctcagccgtgagttca

SEQ ID NO: 85543 - DNA, 120 bp, synthetic construct
  source 1..120: mol_type = other DNA
agtatttatggagtgcactctgtactagacacaatagaaaactacaatagaagggaaaagatattgtgaaaacaagtatcccagtgcttgcttctgtcccagcgtccctcaggcttgtcc

SEQ ID NO: 85544 - DNA, 120 bp, synthetic construct
  source 1..120: mol_type = other DNA
ttgagtatgtctagaaagagaaaggaaagcaagtgaagggaaaagagtaatgattctggaaagaaaggtgataagcctcagagtaagatcttcagggactggcaagatgagctgggaaag

SEQ ID NO: 85545 - DNA, 120 bp, synthetic construct
  source 1..120: mol_type = other DNA
gcttcagcagcctccacatcaagactttgttgttcacctggtcctgctccttctcctgggctccaggagggctcagaacagcccacagtgaccagctgagccccgcagccccgtacccca

SEQ ID NO: 85546 - DNA, 120 bp, synthetic construct
  source 1..120: mol_type = other DNA
tctggttcgcactgtacaggcctgcaatgagtctcactcgcctttagtggcggttactctgggatataaaactgcaaaaatgtttctttatcattaagtaaaatacagttgtctcaaggg

SEQ ID NO: 85547 - DNA, 120 bp, synthetic construct
  source 1..120: mol_type = other DNA
ggattccagatcaccattttgaaatgttacctgtgtgactaccaaggagtcacttaaagtttaaaatagtggtggtggggaggagggattttaagtaggggctcgctaaagttttacaac

SEQ ID NO: 85548 - DNA, 120 bp, synthetic construct
  source 1..120: mol_type = other DNA
caccattattgattggcttcccggtactggtgcagcaggtcactgacatctgtactttctactttcacccaaccatcttccttcatgtggtacactgtggacaaatgagaaaagaacatg

SEQ ID NO: 85549 - DNA, 120 bp, synthetic construct
  source 1..120: mol_type = other DNA
ggccaataaatagtccatggatatactgaaacagttctataaccaagcactctatatgccatgcatcttgtcagggagggagtaggagtatatgatgggaaacagatctgtcatccatag

SEQ ID NO: 85550 - DNA, 120 bp, synthetic construct
  source 1..120: mol_type = other DNA
cagtgtgtcctaaatcaatatccacttccactttgttgcagagttggcctcctgtggaaaggagagcccagctccccagattctgcctgctggagcgtatacactcactaatgtaggacc

SEQ ID NO: 85551 - DNA, 120 bp, synthetic construct
  source 1..120: mol_type = other DNA
tccactcctcagcgcccgcctccctgcatccctaggggcttccctactgccccgacctgcattccccggggtaaagcgagctctggagatcgcatagagaaactgtagtgtcctgggtcc

SEQ ID NO: 85552 - DNA, 120 bp, synthetic construct
  source 1..120: mol_type = other DNA
tgttggcctcatctacccagcaactgtcgacgtcacacgacctgggcctccctgaatgggagatatttactaggcaatcccgcctactgttctgaggtttcccctccaggtgcagcttca

SEQ ID NO: 85553 - DNA, 120 bp, synthetic construct
  source 1..120: mol_type = other DNA
gggagacacctgtgtttccagggctgggactgacctcacaggatcactgctggctctgctaacaaccccaaggacaccaacgtttcccattctgagtacttctccgcaaaccctttgttt

SEQ ID NO: 85554 - DNA, 120 bp, synthetic construct
  source 1..120: mol_type = other DNA
tttaactgattctaggtgtctttgcctcgtcttctatctctactccttggggaggcatccaatggaactggatttgggaactgagaactgcaaggactggtttgtataattatgatgtta

SEQ ID NO: 85555 - DNA, 120 bp, synthetic construct
  source 1..120: mol_type = other DNA
gagatcgaagactcaaaatctttattgagaacatgtcacaaaatcatactacctccctcctgactacaccaccatctccacccaaggtctcttatcattccctaacccctctttcagagt

SEQ ID NO: 85556 - DNA, 120 bp, synthetic construct
  source 1..120: mol_type = other DNA
tactctggggtagatggagagcagtacctagagggaggtaagaatagtgaaagtgaggtagtctgcttgccagcattatgtgaagcaagaagggtaaagaatggaaggacatcacacaga

SEQ ID NO: 85557 - DNA, 120 bp, synthetic construct
  source 1..120: mol_type = other DNA
aaagaggaaacagtctcagagaaggtaaatttgttgtcatgatcacaagacaagtaaattgcatcatcaagccaggatcttcggatcactggcgtagctctctttccagtgcatcacaga

SEQ ID NO: 85558 - DNA, 120 bp, synthetic construct
  source 1..120: mol_type = other DNA
ggaaaatgactcagaacgggttggggatcaaattcttaaagacagattgtggggagaagctagaaaagaagacccagagagtatggaggttaatgttgagcaacctgggaacatggacca

SEQ ID NO: 85559 - DNA, 120 bp, synthetic construct
  source 1..120: mol_type = other DNA
gcagtttcagcatttagggtcttggcctcagtttccttctctgtcagatgaggcagttggtctctatgagctcaaaatttccaggtttgaaattctatggtttctatctaaggatacata

SEQ ID NO: 85560 - DNA, 120 bp, synthetic construct
  source 1..120: mol_type = other DNA
aaacactgacgtctcaatcccgaacctaaataggctgccctggaactcactaccctgtggttgctctaccagaactttcaggattttattaggaaggctggagatcatgaagtagaaaag

SEQ ID NO: 85561 - DNA, 120 bp, synthetic construct
  source 1..120: mol_type = other DNA
gcgctggcgagaagctcagccatttaggggaaagcgaaatcgaaagcggccgcctgctcactagataacgcctacttccaaaagtggcctgcccagactattttggtagcaagcgtggaa

SEQ ID NO: 85562 - DNA, 120 bp, synthetic construct
  source 1..120: mol_type = other DNA
ctggcttctgctctggactactgccaccactcgtggcttgggggcggctttgttagagaggaatagcctctaacttgaagttaaccctgttctttgaccctctattcatgataagtcggt

SEQ ID NO: 85563 - DNA, 120 bp, synthetic construct
  source 1..120: mol_type = other DNA
atgaagcaatagagaaagtggaaagatgaagggaaaaaaagcctgtactgacagtcagctctggcctgttactgtgtaatctttgagccagtcacttcgcctctctgggaatgtttcttc

SEQ ID NO: 85564 - DNA, 120 bp, synthetic construct
  source 1..120: mol_type = other DNA
tgtcaaagaaatttgagagacattgaatgatcaccctcaaaaattcctgagttctggttgggtgcagtggctcacatctataatctcagcactttgggatgccgaggtgggcagatattt

SEQ ID NO: 85565 - DNA, 120 bp, synthetic construct
  source 1..120: mol_type = other DNA
tattcctaatatttccctcaggatagaactggaggaacctccacttgttttggctgctgcaaatgtggtgagaaatatcagctataaatatcgagaggacttgtctgcacatctcatggt

SEQ ID NO: 85566 - DNA, 120 bp, synthetic construct
  source 1..120: mol_type = other DNA
tacttgagcccaggagtttgaggccagcctaggcaagatggtgaaaccctgtctccacaaaaaacaataaaaaaaagtaaaaaaaaaaatgaactgggcatagtggtgcacacctgtagt

SEQ ID NO: 85567 - DNA, 120 bp, synthetic construct
  source 1..120: mol_type = other DNA
gatcacgtactgaatgattttgaagtagtacaaacaataaaaattctcattccgcatcatcatgcggtccatgatgatgaggccgcaagtgaggtgatgggactctttcctttaaggcta

SEQ ID NO: 85568 - DNA, 120 bp, synthetic construct
  source 1..120: mol_type = other DNA
ttgcacttcctgagtgacaggagtgaactctcatatccttttctgtcaaaagatggtgctgaatgatttctaaggtagtttacagttccaacattcaatgccattttgctaacaagtggg

SEQ ID NO: 85569 - DNA, 120 bp, synthetic construct
  source 1..120: mol_type = other DNA
agaatcgcttgaacccgggaggcaaaggtggcagtgagccaagattgcgccattgcactccacctggacgacaagagagaaattccatctcaaaaaaaaaaaaaaaaaaaaaaattagaa

SEQ ID NO: 85570 - DNA, 120 bp, synthetic construct
  source 1..120: mol_type = other DNA
gaacccaggaggcagaggttgcagtgagctgagattgtgccactgccctccagcctgggcaacagagtaagacactgtcttaaaaaaaaaaaaaaaaaaaaagaaaaagaaagaaagaaa

SEQ ID NO: 85571 - DNA, 120 bp, synthetic construct
  source 1..120: mol_type = other DNA
aaataattatttatgaaccgaattcaacaatattacaaataataatactgggaggccgaggtgggaggatcgcctgaggccaggagttcaagaccagcattgtcaacatactgagatcct

SEQ ID NO: 85572 - DNA, 120 bp, synthetic construct
  source 1..120: mol_type = other DNA
aagagttcaattgaggattgggatttagaaaggaaggcaggaattaagaataatccttagttctcttcctaatttgcacctctctcactgatacacatgtattattttctttttatgtct

SEQ ID NO: 85573 - DNA, 120 bp, synthetic construct
  source 1..120: mol_type = other DNA
accatagcctagccaagttaacacataaaattaactatcacttggctcaaggtgaaacttccagatcaatgtggcaggagtgttgaggaaggaagtgaactcggttctaaccaagtagga

SEQ ID NO: 85574 - DNA, 120 bp, synthetic construct
  source 1..120: mol_type = other DNA
atcattttattatctctcatgaatctgtgaattactggactttaagagccactgatgtagtccatgaaccaaaacacatattcacggcagccactccacccagcacctcacacctgtgat

SEQ ID NO: 85575 - DNA, 120 bp, synthetic construct
  source 1..120: mol_type = other DNA
taacctctaatcgcacagggctggccgggttcgtcttaggcaaattacaatccctgaaacactctggttttgatcaggcagaattatgagcaaaggttcaagtgtgatataaaataatca

SEQ ID NO: 85576 - DNA, 120 bp, synthetic construct
  source 1..120: mol_type = other DNA
ttgatgctatcagcacaaagcactaaaagttatcaaggtattaagtgagagcattctgataagaaaccaccgctagctgggcagattatgctaaagggaaagaaaaagttttttctctgt

SEQ ID NO: 85577 - DNA, 120 bp, synthetic construct
  source 1..120: mol_type = other DNA
cataatgagaccctgtctctatgaataataataataaaattagtcaggcatagttcgatgtgtcatagtcctagatactctgaaggctgaggcaggaggatcacttgagcccaggagttc

SEQ ID NO: 85578 - DNA, 120 bp, synthetic construct
  source 1..120: mol_type = other DNA
gccagctaaaacagtttaaataagaccaatagccttataacataatgcctgaaatgtccaagtttcaattggaaattatttgtcatatcaggaaccaggaatatctcaaattgaattttt

SEQ ID NO: 85579 - DNA, 120 bp, synthetic construct
  source 1..120: mol_type = other DNA
tgtaagcccgaaggaggtcaccacctttttccagtgctgaaaggaaaaaaaaatatcaacttagaacactatatcagcaaaaatatccagggaaattaagacatacagagatgagggaaa

SEQ ID NO: 85580 - DNA, 120 bp, synthetic construct
  source 1..120: mol_type = other DNA
tgaccatcctggctaacatggtgaaactccatctttactaaaggtacaaaaattagccagctgtggtggcacaagcctgtagccccagctactcgggaggctgaagcaggagaatctctt

SEQ ID NO: 85581 - DNA, 120 bp, synthetic construct
  source 1..120: mol_type = other DNA
ctccaataggccccagtatgtgtttttcctctttgtgtccatgtgtccatcatttagcccccacttatgagaacatgcagtatttggttttctgtacctgcaatagtttgctaaggataa

SEQ ID NO: 85582 - DNA, 120 bp, synthetic construct
  source 1..120: mol_type = other DNA
acatgtggtgtttggttttctgttcctgcattagtttgatgaggataatggcttccagcttcatccatgtctctgcaaataacaggatctcattcctttttatggctgtatagtattcca

SEQ ID NO: 85583 - DNA, 120 bp, synthetic construct
  source 1..120: mol_type = other DNA
aagactcagaaaaaaagacgacagaagatagaagctaccaacatcagaaatgaaatgggatatcatcaaagattctacagacatcaaaaggataacaaaagaatactatgaacaattcta

SEQ ID NO: 85584 - DNA, 120 bp, synthetic construct
  source 1..120: mol_type = other DNA
cagtgttggaagttctagacagtgcaataggcatgaaaaaggagattaaaggcatacagattgtgaagtaagaaataaacagctcccatttgtaagtgacatgattgtctatgtagaaaa

SEQ ID NO: 85585 - DNA, 120 bp, synthetic construct
  source 1..120: mol_type = other DNA
aggtaacaccaaagagattaagcacagaaagtgatattgattaaaaagttgaaagtaaaatctaccttggctggaactgaacattcagatccatctctagaggaaaatctaacatgaatc

SEQ ID NO: 85586 - DNA, 120 bp, synthetic construct
  source 1..120: mol_type = other DNA
gattattttggcactaacaaaaattgtatacaatccatcagttgtatggctagaaatgaaaccatcactaaaccaagacacacagggctttcctgcacttagtttcaggaaaaagttcca

SEQ ID NO: 85587 - DNA, 120 bp, synthetic construct
  source 1..120: mol_type = other DNA
tattttttttagtagagacggggtttcaccgtggtagtcaggatggtctcgatctcctgacctcgtgatccacctgcctcggcctcccaaagtgctgggattacaggcgtgagccaccgc

SEQ ID NO: 85588 - DNA, 120 bp, synthetic construct
  source 1..120: mol_type = other DNA
catagtctttgtctgctggacgatatgtcgccaggatgttcatttcatcccacttctgggattttttgctcagctgctcgtggacactcccacggggatgttcggccgacgccaccatag

SEQ ID NO: 85589 - DNA, 120 bp, synthetic construct
  source 1..120: mol_type = other DNA
ggagttcgaggctgtcataagctgtgacacaccactgtactctagcctgggtgactgagcaagactctgtttcaaaaaaaaaaaaaaatgtcagagaaatgcaataccttaacctttacc

SEQ ID NO: 85590 - DNA, 120 bp, synthetic construct
  source 1..120: mol_type = other DNA
accatcctgcccagcaactgtactcctgggtatttagccccaagaaatgaaaacttgcatacacaaatacacaagcacagacaatgccttcacacaaaaccttgtatgcaaatgtttgtc

SEQ ID NO: 85591 - DNA, 120 bp, synthetic construct
  source 1..120: mol_type = other DNA
gatgggggtgggaaggaggtgaaccgaccataaaagggcaagataagggatacttggagtgacaaaaatactgtcttgactgtaatattgacattgacacaaatgtcaatatcctgattg

SEQ ID NO: 85592 - DNA, 120 bp, synthetic construct
  source 1..120: mol_type = other DNA
ttcttccattctgatcacagatattacagatgtaagagatcacaggctccagtcatctaagggttctccaactagaaatagacctggtatggctgatgctactaatacctgccatgttcc

SEQ ID NO: 85593 - DNA, 120 bp, synthetic construct
  source 1..120: mol_type = other DNA
gagtgcaagaccccaaaaccagttcctgacactctttctgtcttcagcctgtggattcttatcacttccacagaagaaaattggctctaagattatccggagtacttcccaaatctatta

SEQ ID NO: 85594 - DNA, 120 bp, synthetic construct
  source 1..120: mol_type = other DNA
tgcaagctccgcctcctgggttcacgccattctcctgcctcagcctcccgagtagctgggactacaggcgcccgccaccacgcaaggctaattttttgtgtttttagtagagacgggggt

SEQ ID NO: 85595 - DNA, 120 bp, synthetic construct
  source 1..120: mol_type = other DNA
gtttctttacccatgccttttattatatcccatccccaactgaaccctatctcgacctggtcaataggtgtgagacccagatattcttatccgggagatgctatttctttttttccagag

SEQ ID NO: 85596 - DNA, 120 bp, synthetic construct
  source 1..120: mol_type = other DNA
catggcatatttatgtggaactgtgccatttcttttcctacttattctgaataaattgagcattcctggaccagatattagtggaagactcctattggatgggggtgggatgatgggttg

SEQ ID NO: 85597 - DNA, 120 bp, synthetic construct
  source 1..120: mol_type = other DNA
aaagtatgctaaaagctcttaaatgtgtcaatttatctttcctaacaaagcacatttttttccctaactttcaaagacttgtttaggatatgaaggcttataacttatgggtagttggtg

SEQ ID NO: 85598 - DNA, 120 bp, synthetic construct
  source 1..120: mol_type = other DNA
ccttggcctcccaaagtgctgggattacaggtataagccattgccaccagcactttttgaatagcaaatacacacacacacacacacagaccatctttactgagcagaaaaatttagatt

SEQ ID NO: 85599 - DNA, 120 bp, synthetic construct
  source 1..120: mol_type = other DNA
ggtagagctgctatgctttaggatattctcagcttcaactctacaaaatgccaatttttttccaagtagattatttcagtttgaagtccaccatcagagtatgagttcccctcaccctac

SEQ ID NO: 85600 - DNA, 120 bp, synthetic construct
  source 1..120: mol_type = other DNA
tattcctgattacagtggacccttcaacaatgcgagggttagtagcgctgaccacctgtgcagtcaaaaatctgcacataatttttgactcctccaaaactttactaatagcctactgtt

SEQ ID NO: 85601 - DNA, 120 bp, synthetic construct
  source 1..120: mol_type = other DNA
ccaactttttttttggtctgttgttaaaagcccccctatcccatgcctaagtaataagtaatctcaatattacattccatctcatataataaaatttgacttcctaaaagggcttgcttc

SEQ ID NO: 85602 - DNA, 120 bp, synthetic construct
  source 1..120: mol_type = other DNA
tcttttggtctcaacataaatgggttctgacctgcagtttcaagccaatacgttacagtaagagtaaatgtagggtttctcccagttttatctggcagtcccaaagtcaggatcagagta

SEQ ID NO: 85603 - DNA, 120 bp, synthetic construct
  source 1..120: mol_type = other DNA
tttctggtccaaccctcttctgcgcctaacactggcacctccttttcttccggctgatgaataattgtccgcaaaccagcctctctggggcactgaggggcgggaaggttagaaggagcc

SEQ ID NO: 85604 - DNA, 120 bp, synthetic construct
  source 1..120: mol_type = other DNA
gagaagggtttgcccaggccttcagacactttactttgtgggagatgtatgtgctgagtgtccctgctctggagggattgttaaagaatccaggttcttggggagtgtctcaggagaaca

SEQ ID NO: 85605 - DNA, 120 bp, synthetic construct
  source 1..120: mol_type = other DNA
caacaattcagaatgatcaaaaatccctgtgtgtagagacatgaatctataggaatatcacacatagtgagcacaactgtgagtgaaatcccatgtttcatgcatcccagcagtcccaaa

SEQ ID NO: 85606 - DNA, 120 bp, synthetic construct
  source 1..120: mol_type = other DNA
ctgagccaggaacctggataatgaccagaaagtcacccagacacctgagaaatgcctcccttatatccaagagatccctgtgtgtagaacacatgaatctattggaatatcacacacagt

SEQ ID NO: 85607 - DNA, 120 bp, synthetic construct
  source 1..120: mol_type = other DNA
aacacaagaaggaggaagaatagctcaggggtcttcccttcacatctctcctacaaggattgtgaaatgtcatatgcctcctcccatagacttagatagacctaaaattgtcaacatgtg

SEQ ID NO: 85608 - DNA, 120 bp, synthetic construct
  source 1..120: mol_type = other DNA
aatgcttgggaccaaaagtgtgttggatttcagattatcttggattttaaaatatttgtatatacataatgagatatcttgaggccgggacccaagtctaagcatgaagttcacttatgt

SEQ ID NO: 85609 - DNA, 120 bp, synthetic construct
  source 1..120: mol_type = other DNA
acagtgtgtcagcctccaagcgggagaaattaatccaaaataaatgaagctggatttctaaagtttagagcatcacatccaagattgcatttgggaacattctgttttgtatccatacac

SEQ ID NO: 85610 - DNA, 120 bp, synthetic construct
  source 1..120: mol_type = other DNA
gctgagtcaggaggatcacttgagaccagaagttcaggaattcaagactggcttgagcaacatagcaagacttcatttcaaaacaaacagaaaaaagccaccaccttcagtatttcttgc

SEQ ID NO: 85611 - DNA, 120 bp, synthetic construct
  source 1..120: mol_type = other DNA
tgtaactgttaaactgtccaaaaaaagtctgtttttataaatggaggcatggttttatatggactaaaatactatgattgcctttttattttacacatggtgaaattagagcaggacata

SEQ ID NO: 85612 - DNA, 120 bp, synthetic construct
  source 1..120: mol_type = other DNA
tcgtacaagccaatctgcatttcctctagtggaaactgtatagctggtcatctttccaggacccttttatcaagaaacaatgcagcttctacatttgtgctgcttctacaccaaaacagc

SEQ ID NO: 85613 - DNA, 120 bp, synthetic construct
  source 1..120: mol_type = other DNA
aaatagcatccacctatccatcctcagagagcaacagttttactgttatttagaaaaagcaactatttcaggctgcaggttgtgcacatcagcacttcccagctctctactaatatggga

SEQ ID NO: 85614 - DNA, 120 bp, synthetic construct
  source 1..120: mol_type = other DNA
actgcactccagcctgagcgacagagagactctgtctaaaaaaaaaaaaaaaaagctataataagatcagcttactagacaatacagtgaaatgggggaagctagagaagagaggtgggc

SEQ ID NO: 85615 - DNA, 120 bp, synthetic construct
  source 1..120: mol_type = other DNA
tggtgtttccatgaaagaaaagaaaaagtggctaattcagcttgcaactcaaacaagtgtttttccaaaagacaactatatttcagcatgcagtagaagtgttttatgggtacatcacat

SEQ ID NO: 85616 - DNA, 120 bp, synthetic construct
  source 1..120: mol_type = other DNA
gttgtgctcagtttctttggaatagatttctcctttttatgaggaatcagataacttgctgatatgtcaatgtcatccttttcagcatctctagacataggcaatctagacaccagaaaa

SEQ ID NO: 85617 - DNA, 120 bp, synthetic construct
  source 1..120: mol_type = other DNA
gtttatatgccctagagacctgaagacattctcaaatacaaaaacaaagaagtatgcataaggatgttcattgcaggtttgcttataattggtggaaagtcaggggatgcccatcagtgc

SEQ ID NO: 85618 - DNA, 120 bp, synthetic construct
  source 1..120: mol_type = other DNA
ctcctaaatagtgatgtggccttgggcaagctctttcaagtttctgtgagctccagcttttccttatctgtgtggtaaaagaatatgagactatgtctgcgctctctttcagattataag

SEQ ID NO: 85619 - DNA, 120 bp, synthetic construct
  source 1..120: mol_type = other DNA
agaacttagtgcttggttatatataggtaggcattgttttctaaaaacactggtttacaaaatggaatgtgcacactacagggaatgtgcaaatgatccttgaggatacaggaaggaagt

SEQ ID NO: 85620 - DNA, 120 bp, synthetic construct
  source 1..120: mol_type = other DNA
attaaccagcttacatatgcttcttaaattttagtgtacataagaattgctaagaagtaggcttaaatgcaaattctcaggctccagcccagggatcctaattcagcagttctagaggtt

SEQ ID NO: 85621 - DNA, 120 bp, synthetic construct
  source 1..120: mol_type = other DNA
ttattaactgtgacttcattttggttccaattctgtccagagaaatttgaatgctggagttttgggaattttaaggctttgagcaaggaacattttatgatcctctgcttaccacttgtt

SEQ ID NO: 85622 - DNA, 120 bp, synthetic construct
  source 1..120: mol_type = other DNA
agttaggacacaacctggtgacagcccttcctggtagcaactactgagcattgcaaggagaagaaattgggatgggtgcctataaagagaaaaactctctttttaaccttcaaatctaaa

SEQ ID NO: 85623 - DNA, 120 bp, synthetic construct
  source 1..120: mol_type = other DNA
cactttgccctttgaggaccagaaataaagcttccagttcctgtgaaatggcaaataggtaggttcaggcttccagctccctcacccaaaattaatttttgtaaaggtagagaagcaaaa

SEQ ID NO: 85624 - DNA, 120 bp, synthetic construct
  source 1..120: mol_type = other DNA
agataatcccagaagacagtaggaaagaataaagacatcaaaaatataaaagaaagttcagcaaaatgtatgctagaaatagaagtatcaacatctgaatcataagagaactcacagtga

SEQ ID NO: 85625 - DNA, 120 bp, synthetic construct
  source 1..120: mol_type = other DNA
taaaagagggtaaatgaatgtgtgtgtgtgtaatatctacttggtaggagaattggcattagagggagggaagtagaaaatcaaaagaacataagagtatgctaaagaacttaggaggca

SEQ ID NO: 85626 - DNA, 120 bp, synthetic construct
  source 1..120: mol_type = other DNA
gccacactgtcttccacaatggttgaactaatttacactcccaccaacggtgtaaaaacgttcatttttctccataacctagccagcatctgttattttttgactttgtaatagtagcca

SEQ ID NO: 85627 - DNA, 120 bp, synthetic construct
  source 1..120: mol_type = other DNA
cctgggagacagaggttgtggtaagccgagatcgcaccattgcacactagcctgggcaacaagagcaaaaactccgtctcaaaaaaataataataataataatagtttttctagctctgt

SEQ ID NO: 85628 - DNA, 120 bp, synthetic construct
  source 1..120: mol_type = other DNA
cgagtagctgggattacaggtgtgccaccatgcccagctaattttttgtatttttagtagaaacagggtttcaccatgctagccaggctggtcttgaacttctgacctcaggtgatatac

SEQ ID NO: 85629 - DNA, 120 bp, synthetic construct
  source 1..120: mol_type = other DNA
acagcctcacaatttataaagcaacaagtgaaagaactacagttagaagttgagttttttaaaaatacatttgatgatttttacaaaccctctctcaaaaactggtagataaactagacc

SEQ ID NO: 85630 - DNA, 120 bp, synthetic construct
  source 1..120: mol_type = other DNA
cacttactaggaaacacaaaaaaagaccaaaatcaataagctgagtgttcaactcaaacgctaggtaaagaggaagagaatacacccaaaggaggaaggaaatagtaaagatagtcataa

SEQ ID NO: 85631 - DNA, 120 bp, synthetic construct
  source 1..120: mol_type = other DNA
cttagaaagtaactgttcagttctaggcaaataccatagcaataactgtgactctactgccattcacaccagaaagaccaagtgggagacctaaactttcaccctcttgaagctgtaaca

SEQ ID NO: 85632 - DNA, 120 bp, synthetic construct
  source 1..120: mol_type = other DNA
gtgtcccacagaatcccatgttgaagccctaaccaccaatgggactatatttggagatagggccttttacagaagtaattcaggttaaatgaattcataagggtagggccatgattcaat

SEQ ID NO: 85633 - DNA, 120 bp, synthetic construct
  source 1..120: mol_type = other DNA
gaagacagaggttgccgtgagcagagattgtgccgctgcactccagcctaggtgacaagatgagactttgtctcaaaaaaaacacaaaacaaacaaaaacaacaataaaaccacacaaat

SEQ ID NO: 85634 - DNA, 120 bp, synthetic construct
  source 1..120: mol_type = other DNA
caccatcaaccaacaggatcaaatccacatttacaggacactccacccatcaatagcagaatacacattggctcttttttgttgtttttcttttccggttttactaggtgcaaggggtac

SEQ ID NO: 85635 - DNA, 120 bp, synthetic construct
  source 1..120: mol_type = other DNA
tccctaatgattagttatactgagcatttttttcacatgcttgttggccgcacagaatatacattcttttgaagtgtccatgcaacatataccaagttggactatatccagggccataaa

SEQ ID NO: 85636 - DNA, 120 bp, synthetic construct
  source 1..120: mol_type = other DNA
tggagaaggctttgtacactgttggcaggaatataaattagtacaaccaccatggagaacagcttggaagttcctccaaaaaaattaaaattgagctaccatatgatccagcaatcccac

SEQ ID NO: 85637 - DNA, 120 bp, synthetic construct
  source 1..120: mol_type = other DNA
caaattaataattcaaactctcatctcaagagcccagaaaaagaagatcaaaatacatccaaagaagaaaggaaggccgagcactgtggctcacgcctgtaatcccaatagtttgggagg

SEQ ID NO: 85638 - DNA, 120 bp, synthetic construct
  source 1..120: mol_type = other DNA
aaaatatttgcaaatcatgtatccaacaaaggactagtatctagaatatataacaacttatcaaaactcaggccaggccccctggctcatgcctgtaatcccagcactttgggaggctga

SEQ ID NO: 85639 - DNA, 120 bp, synthetic construct
  source 1..120: mol_type = other DNA
caattcagcaggtacactcctgggcatttgctccagagacattaagacttatgtccacacaaaaacttatattcatatcagccaaatctggaaacaacccagatgtgatggacagatggc

SEQ ID NO: 85640 - DNA, 120 bp, synthetic construct
  source 1..120: mol_type = other DNA
cgcagatgatactattatctacctggaaaaagagagagacagagagaatatcaataacaacaatgacaacaacaacaacaaaaaccccactaaaaccaataagaggatcgagcaaggttg

SEQ ID NO: 85641 - DNA, 120 bp, synthetic construct
  source 1..120: mol_type = other DNA
agccaatcgccaaaagacaaaaactccatgattgcacttgtacagggtatctgaagtagtcagattcatagaaacagaatgtagagtgatagtagccaggggctagaggaagagagaaat

SEQ ID NO: 85642 - DNA, 120 bp, synthetic construct
  source 1..120: mol_type = other DNA
gtccccggcctctttggaccttggggtagtaacagctatcctccacccagttctttgtaaatactttgctaataaataaactttccttgaaatgtcctatttcgagtatgccatctgttt

SEQ ID NO: 85643 - DNA, 120 bp, synthetic construct
  source 1..120: mol_type = other DNA
tttttttcctctctttctctcacatgtgctcaagtgcacacacacacacacacacacgcactccttttttggcaatccattatgtttacattccattctcctcatgcagcatccattctc

SEQ ID NO: 85644 - DNA, 120 bp, synthetic construct
  source 1..120: mol_type = other DNA
atgtagagattaagttccttccactgacttcttctgttaaccccttccagaagagatgctctaattccaaggatgcttctgaagaaattatggaggtgttccaaatcaactcatttcttg

SEQ ID NO: 85645 - DNA, 120 bp, synthetic construct
  source 1..120: mol_type = other DNA
gaggtgagtaagctgttaattcccttccttgcccatactctgtgactccaacccaccacagttgaatttctccttatgaattataaatcagaaaacggccccaaattctgtcatgtctaa

SEQ ID NO: 85646 - DNA, 120 bp, synthetic construct
  source 1..120: mol_type = other DNA
aaagggcaagtagggaaacagaccaacagagatgttaccttctgaataattggacccaggaagaggagtgtaacctaagagaggaagatacttgattataccagtctttgtggatgaaaa

SEQ ID NO: 85647 - DNA, 120 bp, synthetic construct
  source 1..120: mol_type = other DNA
ctcagattcttttcccatgataaaatgaacactccatttctaaagggaggctcttgtgcacgctgtgaggagacgttccccaggaaagttcaagtgagcatgtgatttccactctcttct

SEQ ID NO: 85648 - DNA, 120 bp, synthetic construct
  source 1..120: mol_type = other DNA
ctaccatgtaccatgtatcgatccacatctcattttctctgctttgaccctaattccatccatctgccatacacttactccagtcccgaaggatgggctcaggagccccagtgtgctcta

SEQ ID NO: 85649 - DNA, 120 bp, synthetic construct
  source 1..120: mol_type = other DNA
gcaattctgagaaaggtggttcagaaaccacccttgagacacactgttctgtactgtggagatcttcaagtttactttcacaaacttcaagccattgtcaatgcaagagtttaagggtga

SEQ ID NO: 85650 - DNA, 120 bp, synthetic construct
  source 1..120: mol_type = other DNA
tacagacgtatatttaggagctctgcacagagctttgtctttgaccctggttcctgacatagagtgcctaatcgcttagaatttcctagataacaggagtgtcttttgttctaatgaggt

SEQ ID NO: 85651 - DNA, 120 bp, synthetic construct
  source 1..120: mol_type = other DNA
tttgtaggcaagttggacagaagatgtgggtaatttgggaacctactacttgtgattggtgtctgaaatggaggcagtcttatgggactgagtctttaacctttggtgtctatgttaact

SEQ ID NO: 85652 - DNA, 120 bp, synthetic construct
  source 1..120: mol_type = other DNA
cagaagccccagcctgggtagatgatctccagacactgagcagaatactatattgcccgggtcccttgaccccccaaatgagtgatgtggggatacccagcccctagatattaaatctgt

SEQ ID NO: 85653 - DNA, 120 bp, synthetic construct
  source 1..120: mol_type = other DNA
tcccctactataccctgttccctgggggcaggtccctgcattatgaagccactaggaaaatgagataaagctttcctacttttcttcccctgaaaagacagattttgttttttatttttt

SEQ ID NO: 85654 - DNA, 120 bp, synthetic construct
  source 1..120: mol_type = other DNA
tgtatttgcgtatttatttttttcacaggttttttttttgaaagtctcactctgtcgcctaggctggagtacagtgggataatctcggctcactgcaatcttcgcctcctgggttcaaat

SEQ ID NO: 85655 - DNA, 120 bp, synthetic construct
  source 1..120: mol_type = other DNA
tcacgcttgtaatcccagcactttgggaggctgaggaaggcatatcacctgaggtcaggagtttgagaccagcctggcaaacatggtgaaaccccgtctctacaaaaaatacaaaaatta

SEQ ID NO: 85656 - DNA, 120 bp, synthetic construct
  source 1..120: mol_type = other DNA
tttccacctctagccaattcaaaataacatttcagttgctctgtccattgttacttatttgttaattattgatatagcaccgggaccgaagaggtatggagccccaaccaggttcccaca

SEQ ID NO: 85657 - DNA, 120 bp, synthetic construct
  source 1..120: mol_type = other DNA
tcagttcgcaggttcttggggcagacggttttaactgaagtctccattttataaacacaaaattgctcaaccagttaatcacgcctcatagcataagaccacattcgtgacttcagtgtc

SEQ ID NO: 85658 - DNA, 120 bp, synthetic construct
  source 1..120: mol_type = other DNA
caaattaaaacaacaaaataccactctacacccaccatgttgccaacatttgaaagtcaaataattacaagcattagtgagcataaagggaaatgtgaactatcttgctctgttgatggg

SEQ ID NO: 85659 - DNA, 120 bp, synthetic construct
  source 1..120: mol_type = other DNA
ccaccaacagaccaagatattacagttcacattttcctttatcctcgctaatacttatttgactttcaaatgttggcaacatggtgggtgtagagtggtaagggggacaccattgttatc

SEQ ID NO: 85660 - DNA, 120 bp, synthetic construct
  source 1..120: mol_type = other DNA
gttttccctatttccctccctaacgaggtcaagctgtgttcaggttaaggcatgctgaatttgaaacgacaacccactcaagttgagatatccagaaacaaataccatgagttaagaaag

SEQ ID NO: 85661 - DNA, 120 bp, synthetic construct
  source 1..120: mol_type = other DNA
atggatctatccctttttgcccccaaaaggaccagaattccagggagaaagcctcaccccaataggcaattgctgtgtagcggtcaatttcgtgagtcacaatgcaggagaaaatgtcag

SEQ ID NO: 85662 - DNA, 120 bp, synthetic construct
  source 1..120: mol_type = other DNA
agtacactgtgtgcaggaatgtgtggttttgcaggtcatctggccacattggagtaggagctgcaaaggacacagggtgaggttcagggaggtgggagccttctcctccaacttaaaaaa

SEQ ID NO: 85663 - DNA, 120 bp, synthetic construct
  source 1..120: mol_type = other DNA
tggaggctgaggcaggaggattgcttgtgcctaggaagttggggctgcagtgagccatgattgtgccactggactccagcccaggtgacagaatgagcccgtctcaaaaaatatatatat

SEQ ID NO: 85664 - DNA, 120 bp, synthetic construct
  source 1..120: mol_type = other DNA
ataaaataatccctcttctttgaagctcttggcaggaatcgctcagccagcaggaaacctttaacccaatacccagaaaaacagacatttggaggaagagggatcttccagattattctt

SEQ ID NO: 85665 - DNA, 120 bp, synthetic construct
  source 1..120: mol_type = other DNA
gcatcttccccaagtaaacccccagggctcttcggaccctgccttctcctccctcctggctcttcctctttctcaaaaaaacttattctccttcaggcattagctctaattcatttggca

SEQ ID NO: 85666 - DNA, 120 bp, synthetic construct
  source 1..120: mol_type = other DNA
tcataataagaggaggcggaggagatagaatatcaagataattaggaagtagaatctaaagggtttggctactgattagctgtgggagtgggaaggtggaggagtcaaagatatctcaga

SEQ ID NO: 85667 - DNA, 120 bp, synthetic construct
  source 1..120: mol_type = other DNA
ggaaatacacacctggctgactcctaagctaagcagttcaaaacacagtagaggagggtgtgtgtgtcactgagacaaagataataacgagtacactgaaataccctggtttgtaagaat

SEQ ID NO: 85668 - DNA, 120 bp, synthetic construct
  source 1..120: mol_type = other DNA
tttttctgtaaagggccagatggcaaatattttagacattgtgggctatcagatctctgtcatgagtactcaactgtggcacgaaagcctccatgcacaatatgtaaatgaaggagagtg

SEQ ID NO: 85669 - DNA, 120 bp, synthetic construct
  source 1..120: mol_type = other DNA
actacctccatcataagtatctcaggaatagtctctcatcagtttggaaagtaataattgtgggcaagagatgagcaaggcagccagttctgctttgcagtagttcactgtctactttgt

SEQ ID NO: 85670 - DNA, 120 bp, synthetic construct
  source 1..120: mol_type = other DNA
ttaagtattggtgttccctggagttttgtcctcaacctttactcttcttagactatacacttgccctggatggtcctctcatttactcccacatgccttctgttaccacccatttgctaa

SEQ ID NO: 85671 - DNA, 120 bp, synthetic construct
  source 1..120: mol_type = other DNA
agctccaagcacacacagaagagaagaatctaataaactccaatgtactctcatgaatgtcaacaattttcaacatttaacattcttccattcttgtttcatctattgttctgcattttt

SEQ ID NO: 85672 - DNA, 120 bp, synthetic construct
  source 1..120: mol_type = other DNA
acccataatgacctgaagtctacttacctacttctatatgtcttttcaggtgaaatctcactcctctcaggaagccttccttgaacccagagttgagattaatagcctcttcagtacgtt

SEQ ID NO: 85673 - DNA, 120 bp, synthetic construct
  source 1..120: mol_type = other DNA
cccattatataaacaagaaaactgggactcagaaaggttcatttatttagcaaatatttattggccaccttctgtgtctagcagtatgctctgtatcagatacctgccatcatcacactt

SEQ ID NO: 85674 - DNA, 120 bp, synthetic construct
  source 1..120: mol_type = other DNA
ccaactgattttcaacaaaggtaccaagatattcaatgggaaaaggacacactcttcattaaatggtgctgggaacactgaataacaatatgcagaaaaatacaactacacccccatctc

SEQ ID NO: 85675 - DNA, 120 bp, synthetic construct
  source 1..120: mol_type = other DNA
aaataagtcagacacagaaaaaaaaatatcacgttctcataagtgggagctaaaaaagttgatcttatggaggtagagggtagaatgatggttaccagagactgggaaagggagggggtg

SEQ ID NO: 85676 - DNA, 120 bp, synthetic construct
  source 1..120: mol_type = other DNA
cttaaggagtcctgatttaatcagtcattcaatgaacatgacatccttcctggaaccatctcctgttctagcttcctcacattatgttgctctgcttctccttgagatcttccattggtt

SEQ ID NO: 85677 - DNA, 120 bp, synthetic construct
  source 1..120: mol_type = other DNA
ccaatgccatgctcttggacttccaagcaactggaactgagccaaataaactactgtttataaattacccagtctgtggtattctgtgatagcatcagaaaacagactaagacgtccttt

SEQ ID NO: 85678 - DNA, 120 bp, synthetic construct
  source 1..120: mol_type = other DNA
tccatatagaaagtgcacatgtgtaaaacacagaggcatgaaacaaaatgatgtgtctgggaaacagttcaatacagctggaatatagggcccaagaggaagtggttagacatgaggctg

SEQ ID NO: 85679 - DNA, 120 bp, synthetic construct
  source 1..120: mol_type = other DNA
atactggtgtctgagagttatcccagtgggaatatttagtagaaagtttagcttagagagctgtctgaactaaagattcagacttcagaggctttgagccatggagtcagattacctaga

SEQ ID NO: 85680 - DNA, 120 bp, synthetic construct
  source 1..120: mol_type = other DNA
gtttaaacggtccactacgaaataaatagagaaggaaaagttatcagctggtaaatatcgtagaaggtagagcggtccagggactcacaggtctcactaaagaaaagtctagcgtaggtt

SEQ ID NO: 85681 - DNA, 120 bp, synthetic construct
  source 1..120: mol_type = other DNA
atgtcagtcaagtgcttaaccaatggtggggagtccgggagggggattcttggggttcaggaaagaatcctgagagtgggaagatttgtccttcaaaccttttacagccaatgggagcgt

SEQ ID NO: 85682 - DNA, 120 bp, synthetic construct
  source 1..120: mol_type = other DNA
gatagaggatcgggaggcagtgattttccggaatgcagggaataaacgagagcaatgtctggctgcccttttcctaaggcctagtattttctcagcctcctaagtttttattccatggcc

SEQ ID NO: 85683 - DNA, 120 bp, synthetic construct
  source 1..120: mol_type = other DNA
tgtggcgtgtggggggaaaggtccgagctcgcctggagggggagggtttttcccttaagtcatccctcccaggacttgctttttctgctctgagccggacgccggaatggagtttgagga

SEQ ID NO: 85684 - DNA, 120 bp, synthetic construct
  source 1..120: mol_type = other DNA
gcactcttctgcctggtgactgacaccttggaaatgaagtttatgacgtcatcgttgcggctggccaatagaaaaagctcccgcggagaggtgttccttccccttcgactcagcttcttc

SEQ ID NO: 85685 - DNA, 120 bp, synthetic construct
  source 1..120: mol_type = other DNA
tcaagatgctgcaaaacgtgactccccacaataagtacgtttccgcgagccgcgtgtgggaaggggatgttgcagggcggcggcacaggggtgtggggcgccgtgttgggagtactgagc

SEQ ID NO: 85686 - DNA, 120 bp, synthetic construct
  source 1..120: mol_type = other DNA
agttacgggctgtgaagtctgacaaattcttccttgtctgaatttgtttttaagttgatatggttcttcctctgggtttctagtctatgttctgttgtggcgtgaactacccagaccttg

SEQ ID NO: 85687 - DNA, 120 bp, synthetic construct
  source 1..120: mol_type = other DNA
ttcccatttctcccctgtagggcagttagctaccagatttctgggtatcttggtcctttgtgattgatccgaccgcttgctgtaactatcttggcatctttccttgtgccctccatgtgt

SEQ ID NO: 85688 - DNA, 120 bp, synthetic construct
  source 1..120: mol_type = other DNA
actctagatggtactattgaacacagtgatgtgacttcagagctctagttgaaggttatttagaacacttcatacttgggggtggtggtcctgtttcttagaaatcaccagagacctgag

SEQ ID NO: 85689 - DNA, 120 bp, synthetic construct
  source 1..120: mol_type = other DNA
gacttgcctgactctcagcaacaacaccagagctctaagaaaggaaagctttcagaacagttaaaacattgcaatggcattttgaaggagttactctctaagaagcatgctgcctatgct

SEQ ID NO: 85690 - DNA, 120 bp, synthetic construct
  source 1..120: mol_type = other DNA
ttggagtttgaaaaataaatggtatggggagttattttgtcatgtgtgctgcatagcctcaacgtgagggtctcactgttctgtacagttgtaaattggagctatatcacttggtggctg

SEQ ID NO: 85691 - DNA, 120 bp, synthetic construct
  source 1..120: mol_type = other DNA
gatgaaactgttccacctcagatcattgggccattggattcccataaggagcatgcagcctggatatgtaccatgcgcacttcacagtagggttcatgcttctatgagaatctaatgctt

SEQ ID NO: 85692 - DNA, 120 bp, synthetic construct
  source 1..120: mol_type = other DNA
tctttttaaagacatgttattgcctacttacagtcgagcaaaatgctctgtttcactatacagtgtcccagtagcccacctcttacttggccattgaatggaaaaacagaagctccactc

SEQ ID NO: 85693 - DNA, 120 bp, synthetic construct
  source 1..120: mol_type = other DNA
ttattgacaaatgaagattcagacttgaacgtctttaactttcgaatttgttctgcagcgaatgagaaaacagagtcatcctctgcacagcaagtagcagtgtcacgccttagcgcttcc

SEQ ID NO: 85694 - DNA, 120 bp, synthetic construct
  source 1..120: mol_type = other DNA
accaagaactcaaaattttgaggtaggctttaggtttttccctgtggcactggatgtgtgaattttctcctgagcagacttaaaatatgagaaaagggtgggaggtagccgaacataagt

SEQ ID NO: 85695 - DNA, 120 bp, synthetic construct
  source 1..120: mol_type = other DNA
acaaacccttgtttgggctttcttgctaacttgtgtgcaccagtgaaagctcttgagctccctttgagctctggttcccttttgagaataacagatgttgaggattcgtaagtacttaat

SEQ ID NO: 85696 - DNA, 120 bp, synthetic construct
  source 1..120: mol_type = other DNA
tgtagacctggacgttgccaagccagagggtataaggtgaagataagacaaggtcttatcatggagtttgcttagcacgaatagggtgcaattattaaccatcatggtgtggtaattata

SEQ ID NO: 85697 - DNA, 120 bp, synthetic construct
  source 1..120: mol_type = other DNA
atcctgtgaggtacatcttgtctgcatttaacagataaagaaatgaggcacagagagattagtcaatttgcccaacatcaccacattgtcagtgagcactggaggtgggttttgaaacca

SEQ ID NO: 85698 - DNA, 120 bp, synthetic construct
  source 1..120: mol_type = other DNA
atttatttatttatttttaagaaagaggatttctgtcacccaggctggagtgcagtggtgtgatcatagctcactgtagcttcgaccttctgggctcaagtaatgctcttgcctcagcct

SEQ ID NO: 85699 - DNA, 120 bp, synthetic construct
  source 1..120: mol_type = other DNA
tttccagatcaaactgttctacttcagatcaccaggcattagattctcaaaaggagtttgcaaccttccctcgcatgctcagttcacaatagggtttgcagtcctgtgagaatctaatgc

SEQ ID NO: 85700 - DNA, 120 bp, synthetic construct
  source 1..120: mol_type = other DNA
tctccagcgataagcatttttgctggtgtttgacaaacaaaaaaagagcagttcttctattagctgccactgtcagacctcatggagtcagttgctattctaattgctgagactatgaga

SEQ ID NO: 85701 - DNA, 120 bp, synthetic construct
  source 1..120: mol_type = other DNA
ctgtttccaaccacaataacacaacccactgatttactgttcttaaatccatctctgctattcaggctgattcccagtgatctcatgtccttctatcactgcctttggtcttgcaaatag

SEQ ID NO: 85702 - DNA, 120 bp, synthetic construct
  source 1..120: mol_type = other DNA
tcctgcttcagcctcccaagtagctgggattacaggcacctgccaccatgctggactaatttttgtatttttagtagagacgggttttcgccatgttggccaggctggtctcaaactcct

SEQ ID NO: 85703 - DNA, 120 bp, synthetic construct
  source 1..120: mol_type = other DNA
ccactcatcagtttatgggcacttaggttgattccatacctctgcaattgtgaattctatgtctttttgatataatgacttcttttcttttgggtagatacccaggagtgggactgctag

SEQ ID NO: 85704 - DNA, 120 bp, synthetic construct
  source 1..120: mol_type = other DNA
gtttcgttttattatttttatttttatttttttttgagatggagtcttgtttgtcacccaggctagagtgcaatggtacggtctcggctcactgcaacctccacctcctgggttcaagtg

SEQ ID NO: 85705 - DNA, 120 bp, synthetic construct
  source 1..120: mol_type = other DNA
tggaggagtctttagcgttttctaggtataagattatgttattggcaaacagagataatttgacttcctcttttccaatttgggtgtgctttcccttgtctgttttctctggctaggact

SEQ ID NO: 85706 - DNA, 120 bp, synthetic construct
  source 1..120: mol_type = other DNA
tgttgtgttctttcctggctttggcatcaggtaacactggcttcacagaatgagttggggaggattctctctttcttaatcttttggaatagtttcaataggattggtaccagttcttct

SEQ ID NO: 85707 - DNA, 120 bp, synthetic construct
  source 1..120: mol_type = other DNA
tttactttttttttttttggtttttttttttttttttttttttgaaatggagtctcgctttgtcgcccaggctggagtgcagtggcgggatctcagctcactgcaagctccgcctctcgg

SEQ ID NO: 85708 - DNA, 120 bp, synthetic construct
  source 1..120: mol_type = other DNA
tgcactccagcctgggcaacagagcgagactctgtctcaaaaaaaaaaaaaagttattcaattggtgacatacatcaacttgtgagttcaggaatctagtgctctctcctttaatttcct

SEQ ID NO: 85709 - DNA, 120 bp, synthetic construct
  source 1..120: mol_type = other DNA
aaagatgacttgatacataaccgtggtactgtaatcatactaaacaaaactgaaaacagctctctaatatcatcgattaccagttcatattcaaatttccccatttgtctgaaaagtgct

SEQ ID NO: 85710 - DNA, 120 bp, synthetic construct
  source 1..120: mol_type = other DNA
tactcacacttgctttgtattttccataactcaggcctggaactggtcacttctccaagaagctctatttcctttgagtgggaaatgatatttacacactacaatctgtgcattgaggat

SEQ ID NO: 85711 - DNA, 120 bp, synthetic construct
  source 1..120: mol_type = other DNA
gcactccagcactccagccttggctggcaacagagcaagaccctgtctaaaaaaacaacaaacaacaaacaacaacaacaacaaaaaatagagagagaagagagagagtaagtgtattcc

SEQ ID NO: 85712 - DNA, 120 bp, synthetic construct
  source 1..120: mol_type = other DNA
tatatatatatattgttgctggctacagtcaccccagtctgctatcaaacattggaacttattttttctatctcctcattctttttaacagctttgcattactccattgtgcagatgtac

SEQ ID NO: 85713 - DNA, 120 bp, synthetic construct
  source 1..120: mol_type = other DNA
caaattacaagtcataggtagcaacctcctaaaccacaaggaggagaggagaggaagtgaagtcgctcctctgcgtgcacgatcacttgtctggaagcttttctgaagtcagagagaaag

SEQ ID NO: 85714 - DNA, 120 bp, synthetic construct
  source 1..120: mol_type = other DNA
agaatgatgcttttctttttcctttgtttgtatttaggtttgtcacacaagacaatagcacatgtcaccgccaaggcctttcctcttctggctttggatttcccaaaatctgaagctcac

SEQ ID NO: 85715 - DNA, 120 bp, synthetic construct
  source 1..120: mol_type = other DNA
tagaattttgactggttggtggaggaaggcaggtccagcacagagaatagtttgtgcaaaggcagggaggagtaaacatgcgacaacagttttctgtgacttaagcattgatcattttca

SEQ ID NO: 85716 - DNA, 120 bp, synthetic construct
  source 1..120: mol_type = other DNA
tgatctcagagtgaccgctgtatcatcaagggcaaggagttaagaatggagcagacagaaggttctgggagagttatatctggtgataaaattgacagaatacctgatgtgtttgattgt

SEQ ID NO: 85717 - DNA, 120 bp, synthetic construct
  source 1..120: mol_type = other DNA
aggacagagatgagagaaacacctttccaatgatgcatcaagttaacgtctaagcaaaagatcagcagagatcagagattgttgggtacacacgtatcttgtgatgtcttctgagaacca

SEQ ID NO: 85718 - DNA, 120 bp, synthetic construct
  source 1..120: mol_type = other DNA
tgggtggatcacgaggtcaagagatggaggccatcctggccaacatgatgaaaccccgtctctacttaaaatacaaaaattagctgagtgtagtggcgcacacctgtagtcccagctact

SEQ ID NO: 85719 - DNA, 120 bp, synthetic construct
  source 1..120: mol_type = other DNA
tcgtgaggaacaggataatctgcatccctttcagggtaaacctgaactcaggaggcaaatttcatgaagtccatgtgaaatggctcattcacaaagtaacacacaatgggccaaatggag

SEQ ID NO: 85720 - DNA, 120 bp, synthetic construct
  source 1..120: mol_type = other DNA
ggcatctggtggtggaataggcacctggagctctaggagagaaaggaaggagttggtggtatatgaaaggattctagagtaaaggaaacctggggccaggagggtgcatggggagggggc

SEQ ID NO: 85721 - DNA, 120 bp, synthetic construct
  source 1..120: mol_type = other DNA
cgccgtaagactggtagaaggcgggtccgtaggagcccatgtggtcagctgtgtttggcgagttcagggtcaaggagagagaaaaaaatgtgtctgtctcatccacaatatgtgattgtt

SEQ ID NO: 85722 - DNA, 120 bp, synthetic construct
  source 1..120: mol_type = other DNA
atcttcatttaggtccagagtggatgtgacagagatgagggggattgggtgtctcttggtgaaggaagttgcccataaaccagagagcgagaggaacaagcatcctccatgccacctcct

SEQ ID NO: 85723 - DNA, 120 bp, synthetic construct
  source 1..120: mol_type = other DNA
gtctgtgtaaagagaaatctaaccaaattaggccatgtgtcaaagaccatgaaatcgatgattttcaacttggagggagctaggaaatcatgcgggtctctggttccaaatgagaatcac

SEQ ID NO: 85724 - DNA, 120 bp, synthetic construct
  source 1..120: mol_type = other DNA
ctcagcctcccagagtagctgggactataggcatgccccacaattcctggcctatgaatggtatatttaaatctctaactgtgactgtaggtttttcaacttgtttctaatttttaaatc

SEQ ID NO: 85725 - DNA, 120 bp, synthetic construct
  source 1..120: mol_type = other DNA
cttggctattttttttttttttttgtattttagtagagacggggtttcaccgtgttgcccaggcttatcctcctgagctcaggcaatctgcctggctcggcctcacaaactgctaggatt

SEQ ID NO: 85726 - DNA, 120 bp, synthetic construct
  source 1..120: mol_type = other DNA
gctggtctatattttctaccacttctttcaaggacatagatggtcctgtttgctgtttttcttttgaggtgtcggcactccctaaaggtattattttgacccactagtggccatctgtgt

SEQ ID NO: 85727 - DNA, 120 bp, synthetic construct
  source 1..120: mol_type = other DNA
ggacatgatccccttcctcaaggactgtgctgtcctgtgcagtagccacaagccacctgtagctattaagccaaaaaaaactctaagtataaaatgccctgggatttgaagacttaatta

SEQ ID NO: 85728 - DNA, 120 bp, synthetic construct
  source 1..120: mol_type = other DNA
accccaaaattggccatcgaaaggcatagatacagcccttcctgtttaaaagaggtatttttgaaaaacttcaaatgtcttctgggaaaggcacaatctttcacggtttcttctcttccc

SEQ ID NO: 85729 - DNA, 120 bp, synthetic construct
  source 1..120: mol_type = other DNA
gatgacaatggtgacagagtgtttttcatcttcccaagtgtcctcacaaaaacagagagtgcaattgggatagcaaaggaaaatatccacaggcagtgtctctttatcagaccagggata

SEQ ID NO: 85730 - DNA, 120 bp, synthetic construct
  source 1..120: mol_type = other DNA
aagggaattcttaattctgccctaggtaggagaagctagagagaagatgacgtttgaactgtgccttggaggataaatacaagtctactgatgcggagaagaggatgagagccttgcaag

SEQ ID NO: 85731 - DNA, 120 bp, synthetic construct
  source 1..120: mol_type = other DNA
actgcagtctgacttccttgtccatgacctcagtgggacagaaattgattgccaaggtcaccaaatctttatctttgtggagttttctgctgctttcatcacagtagatcattccacttt

SEQ ID NO: 85732 - DNA, 120 bp, synthetic construct
  source 1..120: mol_type = other DNA
cttcttgagaaatattctgccggacacaaatgaacactcttagttcacactgcccattggcacacgagggcatggagagtgttctctatggagaagtaggtgcttacagcagaaatagcc

SEQ ID NO: 85733 - DNA, 120 bp, synthetic construct
  source 1..120: mol_type = other DNA
agaagcagcatcaatggtgtggtgataatccaaggacatgatagaacttcaggggataaacacacacggattctagagaaaaactgtatacacggccagcgtggattagtctcaaagcca

SEQ ID NO: 85734 - DNA, 120 bp, synthetic construct
  source 1..120: mol_type = other DNA
ttagggaatggggtggtcactatgagaggaataaaagatgtccactgtagacagcatatatggtgcaagtctataatcttggaaaaagtcagactacattaatcttgttcaccaaatcct

SEQ ID NO: 85735 - DNA, 120 bp, synthetic construct
  source 1..120: mol_type = other DNA
ctcagaatggaacctaccttgctggcaacttgatcttggacttccagactctgagaaaataagtttaagtttaagccacccagcctgtggtatcttgttatggtggccctggctaactaa

SEQ ID NO: 85736 - DNA, 120 bp, synthetic construct
  source 1..120: mol_type = other DNA
caacagatcctggtttagtgagtgctgtgctctgaaaagctgtgcgggcatggtaacctccacctagatttcaaaggatgctctggaaagccacagtgcgtaggcagaaagccaccatgt

SEQ ID NO: 85737 - DNA, 120 bp, synthetic construct
  source 1..120: mol_type = other DNA
gaatcatgtgataattttatttgtaaactttttaggaaatctcatactgttttccatggtggctgcaccatttacattcctaccaacagtgcaccaggattccagttcttgacatcctcg

SEQ ID NO: 85738 - DNA, 120 bp, synthetic construct
  source 1..120: mol_type = other DNA
tgtacaagggttcccttttctccacacccttgccagcacttgttacctgcctttggcaatagtcattctaacagttgtgagatggtatctcactgtggttttaattttcatttctctgat

SEQ ID NO: 85739 - DNA, 120 bp, synthetic construct
  source 1..120: mol_type = other DNA
ctgcagatcactttgggtagtacagacattttaacaatattgattcttataatctataaacacaggatatctttccatttgtttgtgacttcttcaatttccttcatcagtgttttatag

SEQ ID NO: 85740 - DNA, 120 bp, synthetic construct
  source 1..120: mol_type = other DNA
taatgtgctgttgcattcattttgctagtattttgctgaggatgtttataggctatttgtcattgttgctgctgttgagttgtagaagctccttatatattctggatattaacttcttac

SEQ ID NO: 85741 - DNA, 120 bp, synthetic construct
  source 1..120: mol_type = other DNA
tttactgtacccatagtgtcccgtatttgcatgggactcaaatatatatgtcttgaatctagacaagggatattgtgttttaagaagttataacaatgaacaaattccattcgcccagag

SEQ ID NO: 85742 - DNA, 120 bp, synthetic construct
  source 1..120: mol_type = other DNA
atcaaacactccccttgtaacattcatatctgctctgggacagaaatctgtcctttggacaccagagtaggaggtttaagaaaggccaaacgttgatacaatccaactgatgtagagtga

SEQ ID NO: 85743 - DNA, 120 bp, synthetic construct
  source 1..120: mol_type = other DNA
aatgagcttccgtattaattctcattattctgacaacagactctagaatccagccatattctactgtttggagccagccagggactttccaagtattcacagtgaaacactggcttccat

SEQ ID NO: 85744 - DNA, 120 bp, synthetic construct
  source 1..120: mol_type = other DNA
tacatctagtcttactgtttggagccttataaaaagatctcatgagcagccccctgggaatagcatgtctttgttctctgagaggcaatgatttttatctggaccccacataacttttcc

SEQ ID NO: 85745 - DNA, 120 bp, synthetic construct
  source 1..120: mol_type = other DNA
ttgtttttgtttttgcttcatgcttatgaggatttggcatattgctgcatgagttgagaaatgttcctttattcccccgtcttttggaatcgcttgtgtaaggttagcaaatgccttcac

SEQ ID NO: 85746 - DNA, 120 bp, synthetic construct
  source 1..120: mol_type = other DNA
cagctaacttatattttatttttcgtagagataggatctcatcatgtggtccaggctggttttgaacttcctaggctcaagcaatcctcttgccttagcctcccaaagtactgggattac

SEQ ID NO: 85747 - DNA, 120 bp, synthetic construct
  source 1..120: mol_type = other DNA
gccaggctaatttttgtatgtttagtagagatggggttacatcatgttggccaggctgatctcaaactcctgacttcaagcaatccaccctccttggcctcccagagtgctgggattaca

SEQ ID NO: 85748 - DNA, 120 bp, synthetic construct
  source 1..120: mol_type = other DNA
cctttttggtgtctttatttccttacatggatttgactatattacactatattctagtgtcctttcacttcagcctgaaagtattttagtacagctgtcttgctaatgatgaaatctctg

SEQ ID NO: 85749 - DNA, 120 bp, synthetic construct
  source 1..120: mol_type = other DNA
ctgccttgctcaaatctgctgtcaagccagtctggtgaaattttcatttctgttattgtatttttcaactccagaatttctatttggttcttttcttatataattcctgttgctgtagtc

SEQ ID NO: 85750 - DNA, 120 bp, synthetic construct
  source 1..120: mol_type = other DNA
ccaaggccagtccaagaagaaagcttacaatcttctcaggtctttcctaagtatgcaccccatcctacatatgtacatggccttctagatttccaggaatatgatggaaataatcaaagc

SEQ ID NO: 85751 - DNA, 120 bp, synthetic construct
  source 1..120: mol_type = other DNA
aagttattcattatttttctcagtgatgcacttttcttccagaaggaattagccctatcctctgttaggcatatagagtagaaaatgatccttattttaatctggaatggatctgacttg

SEQ ID NO: 85752 - DNA, 120 bp, synthetic construct
  source 1..120: mol_type = other DNA
atctgggagataaccgaatgatgtgttatgactaccataatctaccactttgaccagcaaaccatagtcactccttgttgggagaatacaatggatcaaacatacattatgtctgggact

SEQ ID NO: 85753 - DNA, 120 bp, synthetic construct
  source 1..120: mol_type = other DNA
tgcaagaaggggtcccgaatattaagtctttttagattaaaggtaagtcagcctctgtataaggacaatttcattcctatacttgctcttattttctttcctttttctctggatttggct

SEQ ID NO: 85754 - DNA, 120 bp, synthetic construct
  source 1..120: mol_type = other DNA
ttccaagcaatggtgaataagagttcccttttctccatatccttgccaacacctgtggtttttttgttttgtttgtttgtttgttttgtctttttcatagtagccatcccaactggggta

SEQ ID NO: 85755 - DNA, 120 bp, synthetic construct
  source 1..120: mol_type = other DNA
gtctttaatctatcttgagttgatttttgtatatggtgagaagtaggggtccagtttcattcttctgcatatggttatccagtgttcccagcaccatttatagaaaaggatgtcatatcc

SEQ ID NO: 85756 - DNA, 120 bp, synthetic construct
  source 1..120: mol_type = other DNA
ctctttaaggaaactccacactgttttccatagtggttgtaccagtttacattcccaccagcagtggaaaattgttctctgttcaccacatccttgccaacatctattattttttgattt

SEQ ID NO: 85757 - DNA, 120 bp, synthetic construct
  source 1..120: mol_type = other DNA
acatttataccagtaccatgctgtcttggtgactatggccttatattatattttgaaatcaggtaatgtgatgcctccagatctgttctttttggttagtcttgctttggctatgtgggc

SEQ ID NO: 85758 - DNA, 120 bp, synthetic construct
  source 1..120: mol_type = other DNA
ggctgcatagtattccatggtgtatatgtgccacattttcttaatccagtctatcattgttggacatttggattggttccaagtctttgctattgtgaatagtgccgcaataaatatacg

SEQ ID NO: 85759 - DNA, 120 bp, synthetic construct
  source 1..120: mol_type = other DNA
ttgcacctatgttcatcagggatattggtatgtggttttcctttttttctgcctattcccagttttagtgttagggtgatactggcttcatagaatgaattagggaaaattctctctttc

SEQ ID NO: 85760 - DNA, 120 bp, synthetic construct
  source 1..120: mol_type = other DNA
gcctcccaaagtgccaggattacaggtgtgagccaccgtgcccggccttcctagagtttctgataaattgtgtcactattatggttcagttcaaagatttttaaaatttccatcttgatt

SEQ ID NO: 85761 - DNA, 120 bp, synthetic construct
  source 1..120: mol_type = other DNA
aatgtggaactttctagagacttgttgaataatgatatggacaatgaaatccaggctgagatggtttcagatggagatgaggaacttgttgggaactgaagcaaaggtgactcttgttat

SEQ ID NO: 85762 - DNA, 120 bp, synthetic construct
  source 1..120: mol_type = other DNA
accagtactctactcttttggttactacagccttgtaaaatgttttgaactcaggtattgtgatacttccagctttgttctttttgctcaggatggctttgcctattcaggatcttttat

SEQ ID NO: 85763 - DNA, 120 bp, synthetic construct
  source 1..120: mol_type = other DNA
tctgtatgtatcaggatattcacctgtagttttctttcttggagcatccttgtctgggtttgccattagggtaatgctagcctcacagaatgagtttgggagaattccctcttcttcaac

SEQ ID NO: 85764 - DNA, 120 bp, synthetic construct
  source 1..120: mol_type = other DNA
atttccaagttcggggcgggggattgttcaggctaaggtttcatcatgggacaacagttatcagctcaacagaaacagtatataaaagtattgaaatggctgcttaaagctagcagagcc

SEQ ID NO: 85765 - DNA, 120 bp, synthetic construct
  source 1..120: mol_type = other DNA
cctaaaatcaagtgtctttgtgtgctctcagggcttgggactgaattcctgaaagtggagtttagcagggatcttttataaatgttcaacaagggcctcaggagccatttgttgagtttt

SEQ ID NO: 85766 - DNA, 120 bp, synthetic construct
  source 1..120: mol_type = other DNA
ccacggaaaggaaaggggaaaggaagttttgggagcacaggagccacaggagtatatgggaatcaattaatcactgatcagagacccatgattatcttaaaaattggaaataataatttt

SEQ ID NO: 85767 - DNA, 120 bp, synthetic construct
  source 1..120: mol_type = other DNA
cttgttgatttcattggaatgtgcttcctcaagggatgctaaacagtcctaccaactgtcagtatcatgtaaatcaagctttgctcccagtagaaaagaatttcctaattgcaagattat

SEQ ID NO: 85768 - DNA, 120 bp, synthetic construct
  source 1..120: mol_type = other DNA
ataattcactcactcgatctgggtttactagcattcagagaggtgagatcggggccctgatattggccttggaaactttttctactcagccatcaatatagttagtgattctgcctactt

SEQ ID NO: 85769 - DNA, 120 bp, synthetic construct
  source 1..120: mol_type = other DNA
ctgcaacactattggcacaagccttatttacccttaatttttaaaatgtagatgacaaatttcaatcaactatagagaaacactttttgctaaaacctctcaagacataaaacctgcagt

SEQ ID NO: 85770 - DNA, 120 bp, synthetic construct
  source 1..120: mol_type = other DNA
aagaaatgcctttaaagtcttagctgcaggtagcttcaaatcaggtaatgcaatcaatgactctttcccaaacattccttcctgtgctaaagaacaaagctgggaaagtaatggattcca

SEQ ID NO: 85771 - DNA, 120 bp, synthetic construct
  source 1..120: mol_type = other DNA
atgcactggtattctaacagcaactaaactgcgactgggcgcataaacatatctgcgtcacttctctatcatagaatcaatcaatacatagttgggatgaagtgaaacaacacctctggg

SEQ ID NO: 85772 - DNA, 120 bp, synthetic construct
  source 1..120: mol_type = other DNA
ggactccagcaccaagcaggttttccttagcaatttacaacctgaagctccaaggaaaaactattttagcatacaccaaaactattcccatgtgccaacaggtaaggagacttgtactta

SEQ ID NO: 85773 - DNA, 120 bp, synthetic construct
  source 1..120: mol_type = other DNA
aaaagggcttttctatgtgagctgaaaacagaaagagagagcaaatgggaggatgggctggagtaatcttgtttgaagttctctcatcctaaggaagaaccttttcttcctctgtcatac

SEQ ID NO: 85774 - DNA, 120 bp, synthetic construct
  source 1..120: mol_type = other DNA
ttgctcatctctctacactcattctcctgcagatctcagtcaccctcatggcatcaatcatgatgccacagaaaaacccattagtgtatagtctctggcttcatctcagtatatgtactg

SEQ ID NO: 85775 - DNA, 120 bp, synthetic construct
  source 1..120: mol_type = other DNA
ggtacacctcccagacggggtggtggcggggcagaggggctcctcacttcccagtaggcgcggccgggcagaggcgcccctcacttcccggatggggtggctggccgggcggggggctga

SEQ ID NO: 85776 - DNA, 120 bp, synthetic construct
  source 1..120: mol_type = other DNA
aatacgaaaaccagtcaggtgtggcggcgcgcgcctgcaatcgcaggcactcggcaagctgaggcaggagaatcaggcagggaggttgcagtgagccgtgatggcagcagtatcgtccag

SEQ ID NO: 85777 - DNA, 120 bp, synthetic construct
  source 1..120: mol_type = other DNA
tagaattaatcatacagacattaaaagtattatgacagtattatgacagaatactatggattaatcaatgaagccatctgacctggaaaccatttggccttctctgtgagaaggattttt

SEQ ID NO: 85778 - DNA, 120 bp, synthetic construct
  source 1..120: mol_type = other DNA
tttgatagtgtgctttcatattcactcagttcaaaatattttctaattttccttctgactctttttaaatccaggtgctgtttagcagtatactttttaatttctaggtatttgggactt

SEQ ID NO: 85779 - DNA, 120 bp, synthetic construct
  source 1..120: mol_type = other DNA
cccatgccctgacagaccctggtgtgaggtgttcccctccctgtgtccatgtgttctaattgttgaactcccacttacgagtgagaacgtgtggtgtttggttttctgttcctgtgttag

SEQ ID NO: 85780 - DNA, 120 bp, synthetic construct; identical to SEQ ID NO: 27683
  source 1..120: mol_type = other DNA

SEQ ID NO: 85781 - DNA, 120 bp, synthetic construct; identical to SEQ ID NO: 27684
  source 1..120: mol_type = other DNA

SEQ ID NO: 85782 - DNA, 120 bp, synthetic construct
  source 1..120: mol_type = other DNA
cacctgcaaatcaataagaaaatgatggaagcacatagtacaaaaatggacaatgaatgtgaacaggcaatttatagaaaaggaacccccaagtggctaatcagtcctaattatagcccc

SEQ ID NO: 85783 - DNA, 120 bp, synthetic construct
  source 1..120: mol_type = other DNA
tagtgccatgtttcgcgtacagcctgcagatctgtgagccatttaaagctcttttcttcgtaaattaggtaacttcagatattcctttatagcaatgcaaaatggactaatgcatggaca

SEQ ID NO: 85784 - DNA, 120 bp, synthetic construct
  source 1..120: mol_type = other DNA
tactcagttagttatcggtgttgttgttgttatgtggctgaatgcttttaacccattagaagatcaatgaacacttatcagattgaatttttcctcccttccttacattctacaaatcct

SEQ ID NO: 85785 - DNA, 120 bp, synthetic construct
  source 1..120: mol_type = other DNA
agattttatggcagctctgaatcacagagaggggtatcacaccactgaccagcctcactctgctcacctttctctctcctgagaagagaggatgcaagcccttgctgtagtgggatcagc

SEQ ID NO: 85786 - DNA, 120 bp, synthetic construct
  source 1..120: mol_type = other DNA
tgctaaggtcatacggctactggcggaactagtagagaggttttctctcccattaagatcttaatttttctatgacacagatgtaaaattgtttttagagtcatgggggtgggggaatgg

SEQ ID NO: 85787 - DNA, 120 bp, synthetic construct; identical to SEQ ID NO: 27688
  source 1..120: mol_type = other DNA

SEQ ID NO: 85788 - DNA, 120 bp, synthetic construct; identical to SEQ ID NO: 27689
  source 1..120: mol_type = other DNA

SEQ ID NO: 85789 - DNA, 120 bp, synthetic construct; identical to SEQ ID NO: 27690
  source 1..120: mol_type = other DNA

SEQ ID NO: 85790 - DNA, 120 bp, synthetic construct
  source 1..120: mol_type = other DNA
aatgttttccattatgttccttctcccgagccccacccccatcccagacagtcagatgatctttgatgttttttggtcactatattttaaatcatgttttatgttatgttgtcaatattt

SEQ ID NO: 85791 - DNA, 120 bp, synthetic construct
  source 1..120: mol_type = other DNA
cgaggaagtatttgtctaattatctatggcaggtaaatgacaaggagaaaagtcccacccaggcagttactaaaaaaactgagtttttctccacaatcctctcctggccccttaatccta

SEQ ID NO: 85792 - DNA, 120 bp, synthetic construct
  source 1..120: mol_type = other DNA
gtagatgggccagcagaatatttgagatcaccttcagagcaaagaaaacgcataatctccccaaacatcatgacttatctgactggttaaaatgagtatcactgtctttcctccgtcatc

SEQ ID NO: 85793 - DNA, 120 bp, synthetic construct
  source 1..120: mol_type = other DNA
caaggaagcagtaaccaagtgaaaaatctcttcttcctgctgcctccctgtggctggtgtaatattatggcatctatgatccattgtttttctctcaggatactctcaggatatttcttt

SEQ ID NO: 85794 - DNA, 120 bp, synthetic construct
  source 1..120: mol_type = other DNA
acacctagaaggtactgacatcatgtcacctcctcatctttcagggtagcaaggttggaatctcctgaatacagcccctcaagccctaaaacctcttatctattaccttgggttcattgt

SEQ ID NO: 85795 - DNA, 120 bp, synthetic construct
  source 1..120: mol_type = other DNA
ttcttattcttgaatgaaaaacgttctcttactggtgattgaggaggagaaacaaagactaacaaatgaaaatgggagaatccacactcagagtggggcaattgaacaggcaggggcgga

SEQ ID NO: 85796 - DNA, 120 bp, synthetic construct
  source 1..120: mol_type = other DNA
tcatggaaagagtcacccagccggccatcagagtcaccaaccccagtaccagggtgcacagctaagaaaatgagtagaaagttcatgtccacgttttgtgtgtaaataaaaccataaaaa

SEQ ID NO: 85797 - DNA, 120 bp, synthetic construct
  source 1..120: mol_type = other DNA
cgcttaggaccacagaactcggtactaggaaaactcctattttaaaatccagccctgggtgggaagatttgggaagaatcgttaatattgagagagagagggagaaagaggattagatga

SEQ ID NO: 85798 - DNA, 120 bp, synthetic construct
  source 1..120: mol_type = other DNA
aggctgagtgtggcgcatcctcctcggggctgagatggattttacttgtcttgggttccccacggctgtcacagggcagtgtctcagttcattcgtctttttccttcaggaagtctgggt

SEQ ID NO: 85799 - DNA, 120 bp, synthetic construct
  source 1..120: mol_type = other DNA
tcagctccctagaggttcccatgtagccagataagtattgtcagaacactgaagatttttgaaaaatgaaaaagagaaggttggagatgtgtcttcagaagactactaagggtgctggct

SEQ ID NO: 85800 - DNA, 120 bp, synthetic construct
  source 1..120: mol_type = other DNA
cttgatgagctgttctctagggtagtcctctgaaagagctgttctctagtggatctccctgaatgaactgttctctaggagcacttgacccttttctgtgtttgttttttgttttgtgtt

SEQ ID NO: 85801 - DNA, 120 bp, synthetic construct
  source 1..120: mol_type = other DNA
acccttacccactagcctaatcacattattcctattttcaacatctaggaatcaattacatagtgaacatgcctaagaaataataatctgggcagatgcagtggctcaggcccgtaatcc

SEQ ID NO: 85802 - DNA, 120 bp, synthetic construct
  source 1..120: mol_type = other DNA
ctgaagattcatagttctcccccttgtcagagaatctagggacactgactggtctcgaaaccctcacacttaggaactgacctcacacataggaacagttctcttccttcagcattttag

SEQ ID NO: 85803 - DNA, 120 bp, synthetic construct
  source 1..120: mol_type = other DNA
gataacttgtcttttacccccacagggttcctgagctcactgaaaagactattgtgccttaggaaaagcatttgctgtgtttcgttagcatctggctccaggacagaccttcaacttcca

SEQ ID NO: 85804 - DNA, 120 bp, synthetic construct
  source 1..120: mol_type = other DNA
accttttggtcaaggtagaggacatgtttgttgtaagctttctttttcgtgtagaggatggattcttcactcctgatacacacaatcagtgcacagcagctctcttatacatccagttga

SEQ ID NO: 85805 - DNA, 120 bp, synthetic construct
  source 1..120: mol_type = other DNA
acaagagctgagagaccatccaaactgggaccaccttgtcactagacttcaaattttcaatattgatagagtgttttctaagagtcaggccctttgctgagtgctatgtgcagcaggatc

SEQ ID NO: 85806 - DNA, 120 bp, synthetic construct
  source 1..120: mol_type = other DNA
taataaaatacttctacaagagatatttatggaggacctactgtgtaccaggagcaatgctaggcattatggatatcagcagcctttggctcctgaaaagcttacacactacctcctggc

SEQ ID NO: 85807 - DNA, 120 bp, synthetic construct
  source 1..120: mol_type = other DNA
aatagaaaactaaaatagagtagagaatatcaaagaaattgtcatgggaagcaaagaatcgccttccaaagggccctgtcctgatcttattgcagatgagggtgtcctcccacatttcca

SEQ ID NO: 85808 - DNA, 120 bp, synthetic construct
  source 1..120: mol_type = other DNA
tggcagtaaaacatcaatgctcaaagagcccctggtgaagtgtttctctttcccactcttcacccctaacttgttacctcgtcttttccactctgtccctaatacacctataggatgact

SEQ ID NO: 85809 - DNA, 120 bp, synthetic construct
  source 1..120: mol_type = other DNA
catcatggcctctagttctatgtgtggcagagaggccctcccatccctccagctggactctagaggaacaggcagctataggcagtgccatttgtggcccaagtctgtttggaccattga

SEQ ID NO: 85810 - DNA, 120 bp, synthetic construct
  source 1..120: mol_type = other DNA
tcttgtggagtgtagttttcaagtgtagtttcacctggaaatacaagttgttggcatttgaaagacctatgggatagtatcttagctttacctgatacataagaagcagcaactggttga

SEQ ID NO: 85811 - DNA, 120 bp, synthetic construct
  source 1..120: mol_type = other DNA
ccacaggaatcactaaatcacatgccagaagtagggatatgaagaagtcgagaataaccacgcaacgtggagaattgtggcatccgtgcctgcaaaggtgataattaagtgattgagaga

SEQ ID NO: 85812 - DNA, 120 bp, synthetic construct
  source 1..120: mol_type = other DNA
acagactgttcacctgacaagaaatatcttgaggaactcacttcacagatccctcaagaaaggaaccactgcaggagaatacccagaaaatcgaaagaattcacagatccttttaaagaa

SEQ ID NO: 85813 - DNA, 120 bp, synthetic construct
  source 1..120: mol_type = other DNA
agcaaaacctgcctcgccaactgcatgggagctgggtgaagcctattgctaccaggtttcccctacttctctggtgacagaggcagccataatgccctctggaacataattccattggct

SEQ ID NO: 85814 - DNA, 120 bp, synthetic construct
  source 1..120: mol_type = other DNA
tgacctaagaatgattggcattcttgaggaagaacaaaaatctaaaagtttggaaaacatatttgagggaataatcaaggaaaacttccctggcctcgctagagatctacacaaccaaat

SEQ ID NO: 85815 - DNA, 120 bp, synthetic construct
  source 1..120: mol_type = other DNA
taacactctccacttaaaagatacagaatggcaggaaggataaaaattcagcaaccaagtatcttcagtcttcaagagtcatctaatgtgtaaggactcacaaaaacttaaggtaaagga

SEQ ID NO: 85816 - DNA, 120 bp, synthetic construct
  source 1..120: mol_type = other DNA
aaatgccactgatattacagaaatataaaatatcattcaaggctaatatgaacacattcacaggcacaaactagaaaacctagagaagacagattcctggaaatatacaaccctcctaga

SEQ ID NO: 85817 - DNA, 120 bp, synthetic construct
  source 1..120: mol_type = other DNA
cagtgaccaagctgagaattaaatcaagaactcaaccccttttatagtagctgcaaaaaaataaaatacttaggaatatacctaaccaaggaggtttactgggggaaccagcccccaata

SEQ ID NO: 85818 - DNA, 120 bp, synthetic construct
  source 1..120: mol_type = other DNA
cttcccgcaatagaggttaaacacctgtacgaggaaaattaaaaacactgccgaaagaaattatagatgacactaacaagtagaaccacgtcccatgctcatggaagggtagaatcaaca

SEQ ID NO: 85819 - DNA, 120 bp, synthetic construct
  source 1..120: mol_type = other DNA
atcaaaaccactatgtgataccaacttactcctgtaacaatggtcataatttaaaaataaaaaaaaaaatagacgttggggtaggtgtgatgaaaagagaacacttctatgctactggtg

SEQ ID NO: 85820 - DNA, 120 bp, synthetic construct
  source 1..120: mol_type = other DNA
tgaggaggaggcctgagcatatgtggggaaggcacagatgaacacataggagggatctctaagaaaacaatggccaccaggtcactgctagactcaccacagggccttctaaaccagggg

SEQ ID NO: 85821 - DNA, 120 bp, synthetic construct
  source 1..120: mol_type = other DNA
aatccaggccatagccaagataagggtggggagaaggtgaaacattcaccaccaccccaactccccaaaacaaagatcttcagaatgcccctctccaccttcatcctgacagcaatgatc

SEQ ID NO: 85822 - DNA, 120 bp, synthetic construct
  source 1..120: mol_type = other DNA
tggagagatgaagactgaaggatagaataagtggctgtggacagtcctgccacataagtggacatctagttattctgcagagatcagcagtcctgaagataggaaatgcaaatcaaaatt

SEQ ID NO: 85823 - DNA, 120 bp, synthetic construct
  source 1..120: mol_type = other DNA
gtccagaaaacagtcaggagaaagaaatctttaggaaatcctcctggtacccgagagaaatacacacagagtgagaggcaaagagagccaccacccctttcctcctggtgtctgattcca

SEQ ID NO: 85824 - DNA, 120 bp, synthetic construct
  source 1..120: mol_type = other DNA
tttctgaaatgacttctgttgaacttctgactccactctacttcctccttcctggaaatctttacctccttggcttatgtgccagtatattctactaattcttctgcctctctgcttctc

SEQ ID NO: 85825 - DNA, 120 bp, synthetic construct
  source 1..120: mol_type = other DNA
taaggaatcattgaaggattttaagcaggagagtgatggcgcatttgcaatttaggaagatcactacggcaacagtgggcagcatgagtgaaagaagttggttcaagaggcaagactaat

SEQ ID NO: 85826 - DNA, 120 bp, synthetic construct
  source 1..120: mol_type = other DNA
agagagagtgtctctagggtaggatgcagactgaaggcaaggttgttttttattagttggttcatggttatgttgcttttttcccccgtaggttatagtggtacaggtagtatttggtta

SEQ ID NO: 85827 - DNA, 120 bp, synthetic construct
  source 1..120: mol_type = other DNA
tttgcctgtgttcattgtagattctggatattagtcctttgtcagatgtatagattgtgactactctgtgggttgtctgtttattctgctgatggttccttttgccgtgcaaaagctctt

SEQ ID NO: 85828 - DNA, 120 bp, synthetic construct
  source 1..120: mol_type = other DNA
atctaatttgaccttaagagccctgctgtaaaggcaggtcatatcatccccatactgaagacaaagaactgaagtccaagacaggcagtgtccttcaagctgcatacttccatggtagtg

SEQ ID NO: 85829 - DNA, 120 bp, synthetic construct
  source 1..120: mol_type = other DNA
atcaaactcacctcctataggataggttgctatccaccaggtctattctctctccaggaacatggacacagtaaataaggggaggtgctcaggggtcaagttgcttgtctatggggaaat

SEQ ID NO: 85830 - DNA, 120 bp, synthetic construct
  source 1..120: mol_type = other DNA
caaagcccctcacctattacctcaggttcattgtccgggaaagggtggacaaactgcacttgtagtcacaggggtgctgagaactaaccagcagaatggctcagccctgggaactggaga

SEQ ID NO: 85831 - DNA, 120 bp, synthetic construct
  source 1..120: mol_type = other DNA
gatccagtcagcaaacagccaacaaacacttttcaaccattaagatctggtgcccatggaaagtcttcttgaggttttccagtagctcataagctgatccagttcctctttcatatgcat

SEQ ID NO: 85832 - DNA, 120 bp, synthetic construct
  source 1..120: mol_type = other DNA
agttgctaatttgtagaacatgaaacaggtgtccaaaacaaaccttaatttgctgtgtgcaaatcacagcaccttaatttccccactgtgaccaggaacagatcaggtctgaagaggctc

SEQ ID NO: 85833 - DNA, 120 bp, synthetic construct
  source 1..120: mol_type = other DNA
atggaaatgcatttctgcatttccagcatgcagagatgtccagcatgcagaacagcaagagcaacttgaggtattctcaagaaactggcagagaagagagagaacctagctgtagaaagg

SEQ ID NO: 85834 - DNA, 120 bp, synthetic construct
  source 1..120: mol_type = other DNA
cctaagggaccttagtgccaggagggaaggggactttgagctggggattgatgggaggagcccaaccggagcttgtcaggagggtgagcacggagattgggctgagcatggagtgaggag

SEQ ID NO: 85835 - DNA, 120 bp, synthetic construct
  source 1..120: mol_type = other DNA
ctttctagctgcctaaaaataatttcttaataactcctgtattatttcctccctcaggagacgtaaccataactgctgttagggggtgttggacgacgattctttctggctacttcctgc

SEQ ID NO: 85836 - DNA, 120 bp, synthetic construct
  source 1..120: mol_type = other DNA
agaattccacattgtgggtgccacagtatacagttctattgcaaataacagcatgatgataacaattcccacaaaagtgacgtagtaaataatttccatttaaaactttacttgccaaga

SEQ ID NO: 85837 - DNA, 120 bp, synthetic construct
  source 1..120: mol_type = other DNA
gtggaaatgttagctatctttcccctgcttaatttaagtgcacttgcaagaactattagttcagctaattgagtgcttgtgtctggggagagacattagagtgactattgcttgtcctgc

SEQ ID NO: 85838 - DNA, 120 bp, synthetic construct
  source 1..120: mol_type = other DNA
tacagtttccttctaatatcaagagctgcctgtgtaataaacttgtctttacaatgagccatcccttgactgaattaggggctaaggaagtgtgctctattagtgcctctctcagccttt

SEQ ID NO: 85839 - DNA, 120 bp, synthetic construct
  source 1..120: mol_type = other DNA
aggaaaggtgctgtgcctggatgtgcacataggccagatttatgtttgactttacacaaacatctcagtgcagtaaacagcagtattaccaccagcatgtctcacctccagccataaggc

SEQ ID NO: 85840 - DNA, 120 bp, synthetic construct
  source 1..120: mol_type = other DNA
tctgtcacccatctagaaaaagaagtgagaataaaagtatcctttcgtccccattctttcattgtgacccagggtggaggagaagacagtggaagtgtcctccctactgttttctctcct

SEQ ID NO: 85841 - DNA, 120 bp, synthetic construct
  source 1..120: mol_type = other DNA
tttcccagcctcatgcgatggtgaagttctccatgaaaggaaactggtatgaagagattcttgagattaaagaacagatttgacgtttgctctatactcaccactccgatgtttctatct

SEQ ID NO: 85842 - DNA, 120 bp, synthetic construct
  source 1..120: mol_type = other DNA
acatgggtttaggaaagttgctggcgtaattggttgagagaggtgtccaaataaaagtaatacaatttgcaaaatctgtcactaagacttcatagaggcccaaatcagcgacatggcagc

SEQ ID NO: 85843 - DNA, 120 bp, synthetic construct
  source 1..120: mol_type = other DNA
taagaaactgctattattgtccagggaaatcataataagggcatgaattagaataaagaaaaacacaggggtaggggagacggaggaaagaggaggatagaagttctggccattccagtg

SEQ ID NO: 85844 - DNA, 120 bp, synthetic construct
  source 1..120: mol_type = other DNA
tttgcatcaggatagagcactcaaaagataaggtagtgtcgctgctgattaaatattctttgtccaaaggctgttaatcagtggctgatagataagatttcttttaaatgtgctacaaac

SEQ ID NO: 85845 - DNA, 120 bp, synthetic construct
  source 1..120: mol_type = other DNA
ttttcttctatagaagacactgagtgtagttttaacctggggacaatggagacttgcctgcccccggcctaggaggtcctaaggattcatagttcctctccttgtccaagaatctaggga

SEQ ID NO: 85846 - DNA, 120 bp, synthetic construct
  source 1..120: mol_type = other DNA
cttaaaggaagggggccagcaacctgggattactgttttttacctccacagggttgctgaccttgcctaaaagactaatgtaccttggaacaagcattttctgtttctttagtcccagta

SEQ ID NO: 85847 - DNA, 120 bp, synthetic construct
  source 1..120: mol_type = other DNA
aggtagaagacatgtttggtctaagctttccttttcgtgtagaggatggattcttaactcctgatacacataatgagcactcagtggctctctgatacatccagttgttggcttccttct

SEQ ID NO: 85848 - DNA, 120 bp, synthetic construct
  source 1..120: mol_type = other DNA
tcccttcattttctgcccctcacagtgtgaataaactctcacagatgccagaccatctccttcttgtccaggtgcacaaataactgctcatcttcatcagattcaaacatatactcccca

SEQ ID NO: 85849 - DNA, 120 bp, synthetic construct
  source 1..120: mol_type = other DNA
ggaggttacagtgggctgagattgcgccactgcactccagactgggtgacggagtgagactctgtctcgaaaaaaaaaaacagaaaaaagaaaaaaagaaaaacttcagctgaattcaat

SEQ ID NO: 85850 - DNA, 120 bp, synthetic construct
  source 1..120: mol_type = other DNA
ctttcgagagaatacagtgcaccaggtagactactattatgactatcaggaggataataccaagagtttggagtatgctccttacacagggtccccataaaccaaaccacccaaaattaa

SEQ ID NO: 85851 - DNA, 120 bp, synthetic construct
  source 1..120: mol_type = other DNA
gaagaaacttccctggttagctttaccttacgggttccaatgggtgtatatttccaagaatgtggagggatccttctcagttgtgagatcatgaagccaaagttcacggttctgatgttt

SEQ ID NO: 85852 - DNA, 120 bp, synthetic construct
  source 1..120: mol_type = other DNA
acaccatattctagaattgtgcctacttgtgaagttttcagaaattgcaccagcattaagcaattaactgtggaaatgaccttccttccttccctccttccttccttccttccttccact

SEQ ID NO: 85853 - DNA, 120 bp, synthetic construct
  source 1..120: mol_type = other DNA
gcaggcatggaccactgcgcccagcctaaaataatcattttaaatctcttattacttgactttagccaggccaaacagccaatatgtctggcttttgaactttaccaaaggtaatctccc

SEQ ID NO: 85854 - DNA, 120 bp, synthetic construct
  source 1..120: mol_type = other DNA
cccagcctcacaaatcctttttatcattaattaaaactttgcagaggagacagtgatttttactactcctacaaccgtttccacacagagagaggccagaagcctgactgctaagaaatt

SEQ ID NO: 85855 - DNA, 120 bp, synthetic construct
  source 1..120: mol_type = other DNA
tcaaaaaaaaaaaaaaaagaaagatagaaaaaggaaagaagagaaagagagaaagaaaagcattgtctgcagcagggtggggaaggcaaagagttcagggaggacagagaaggacccacc

SEQ ID NO: 85856 - DNA, 120 bp, synthetic construct
  source 1..120: mol_type = other DNA
tttagtaaaaaaaaaaaaaaaaattttatttgagacacagtctctgtcacccaggctggagtgcagtattatgatctcagctcatggcagcctccacctcctgggttcaagtgattcttg

SEQ ID NO: 85857 - DNA, 120 bp, synthetic construct
  source 1..120: mol_type = other DNA
gattggttacagctcaatgtttgcctaacttgaacacagttcaaacagttagctacatatgattggccaaaactcagtgattggcacaagtgtaggctatggtctgtttacacctccact

SEQ ID NO: 85858 - DNA, 120 bp, synthetic construct
  source 1..120: mol_type = other DNA
acacacggatgttgagggtcctccactgagtttatgggctagagaattactcacctacagaaacgaagcccaaagaaaaaacagatgaaaaacatgatatacaagctgtgctacagagat

SEQ ID NO: 85859 - DNA, 120 bp, synthetic construct
  source 1..120: mol_type = other DNA
aagtagggatatgaaggagtccagaatacccaacgtggagaactggggcatcagtgactgcaaaggtaatgaaaaatgaaataatcgagagaaggtaagatgttctgtttggaacatgct

SEQ ID NO: 85860 - DNA, 120 bp, synthetic construct
  source 1..120: mol_type = other DNA
aaagaagaagaagaaaaagaagaagaagaggaggagggggagggagaaaaggaaggaaggaaggaaggaaaaaaacccacattgcagactcctatttgaggaagctgacctctacaatct

SEQ ID NO: 85861 - DNA, 120 bp, synthetic construct
  source 1..120: mol_type = other DNA
ttattttatttcttcttcatataaaaatgtggtgaggctgggcgcacagctgaatgaaatttaaaagagtcagctgggcatggtggctcatgcctgtaatcccagcactttgggaggctg

SEQ ID NO: 85862 - DNA, 120 bp, synthetic construct
  source 1..120: mol_type = other DNA
atgatcaagtcttcttattaaataggagtgcaactgatagaggatcttcttacatttgctttatttcatggtgctgcccaaattcatgctgtaccctcagcagcaaggagtgggaccatt

SEQ ID NO: 85863 - DNA, 120 bp, synthetic construct
  source 1..120: mol_type = other DNA
tgcagtgagctgagaccacaccattgcactccagcctgggcaacaagagcaaaactccatcccccactcccaaaaaaaaaaaaaaagttatcaggaaaacttatagttgctacaatatta

SEQ ID NO: 85864 - DNA, 120 bp, synthetic construct
  source 1..120: mol_type = other DNA
ttcggccgactgaatgatgcagtgagctgaaatcacaccactgcacttcagcctgggcaacagagtgagactctgtctccaaaaaaaagaaaaagaaagtcatatattggtacagaagat

SEQ ID NO: 85865 - DNA, 120 bp, synthetic construct
  source 1..120: mol_type = other DNA
tgacaaggagaagcaggtctcccttgattttctgtttggccaagaatttatcctaacatggtaccatcagaatactgtcagaaagctgtgagtcaactcagatttctcaccattgagtca

SEQ ID NO: 85866 - DNA, 120 bp, synthetic construct
  source 1..120: mol_type = other DNA
gaaagccttcgacatcgtatttgcaagaaagaaagtgtacatagttagacagtcctagtatctgtaaagtgggtgtgatcatcggagagcaatcccttgagcagtgctgtcctatacaat

SEQ ID NO: 85867 - DNA, 120 bp, synthetic construct
  source 1..120: mol_type = other DNA
gggcatgttatctgaacttacgattgcaactgtgggagctggaaaagctcttaagaacctctagaattccacttccccacaaaacaacgtaatatgaaatagtgacaaatccctaggaga

SEQ ID NO: 85868 - DNA, 120 bp, synthetic construct
  source 1..120: mol_type = other DNA
tcccaggttcaagcaattctcctgccttagccccaagtagctgggattatagatgcgcaccaccatatccagctaatttttgtatttttagtagagacggggtttcaccatgctggccag

SEQ ID NO: 85869 - DNA, 120 bp, synthetic construct
  source 1..120: mol_type = other DNA
cctgtctctactaaaaacacaaaaaaattagctgggcatgtatctggggaacccacccctaatatttcaatgcaggttctttctattttccctaagtgtcggccagtctgagaaataaag

SEQ ID NO: 85870 - DNA, 120 bp, synthetic construct
  source 1..120: mol_type = other DNA
taaatgtccatattaaaatgaaatcttcataatttatgttcctctgcctcggctccagctggtccctccatttggggtccctgacttcccgcaacaggcatggtggcaggcacctgtaat

SEQ ID NO: 85871 - DNA, 120 bp, synthetic construct
  source 1..120: mol_type = other DNA
acacaaacatgaaagctggaattcaagcagtcatattggacctgagagagaagagctatgttgaggctggtggaagaaaaagatagatagaaggaacctgagtctctgacacttaaacac

SEQ ID NO: 85872 - DNA, 120 bp, synthetic construct
  source 1..120: mol_type = other DNA
gggtaacattgtaggagggtggagtgtaaacatatgaagagtctggaaccctgatggcatcattaaatgctcaaaccaatgctggaagctgtcatcctcagatttcttatgagaaaaatg

SEQ ID NO: 85873 - DNA, 120 bp, synthetic construct
  source 1..120: mol_type = other DNA
acacaagtccctttgctcacgccccaaatgggttgaatccagatctctaagggtgagcacaggtgggcatgactatttttaacagttcttctagattagtgattcccaatttttttaaat

SEQ ID NO: 85874 - DNA, 120 bp, synthetic construct
  source 1..120: mol_type = other DNA
caaatttattgtttagaaaagtgcatagggcccgcagaagtcacaatgcagccctggatataacggccatgaaagtttatgtgctgaatcacaaagtggcaaaatatgaactggcagaga

SEQ ID NO: 85875 - DNA, 120 bp, synthetic construct
  source 1..120: mol_type = other DNA
tctccccagggccccaatcaaacagggtgctatttctcatcttctccctaaccctaatgtctctgaaacatgtttgttgggtttggggtttgtttgtttctatagatttgcagttctaaa

SEQ ID NO: 85876 - DNA, 120 bp, synthetic construct
  source 1..120: mol_type = other DNA
atcacctgagcataagaagtcaagcctatagtgagccatgattgcaccactgcatgctagcctaggcaaggggagtgagaccctatctcaaaaacaaaaaacaaacaaaaaaagagaggc

SEQ ID NO: 85877 - DNA, 120 bp, synthetic construct
  source 1..120: mol_type = other DNA
tgcccagctaatttttaaattatttttttgtagagaaaaagggccgtgcgtgatggctcatacctgtaatctcagcactttgggaggccgagatgggcagatctcttgagcccaggagtt

SEQ ID NO: 85878 - DNA, 120 bp, synthetic construct
  source 1..120: mol_type = other DNA
gccagcgcacaattccatcatatcacttgccttttcaaacaccatctatgactcttagtttttgggttcaagttcaactccttccataagcagtcaatacttttcagaatttggcccctc

SEQ ID NO: 85879 - DNA, 120 bp, synthetic construct
  source 1..120: mol_type = other DNA
tatccaccaccggacccctgacagatgagatcaggggcttcttcctccattcggccttcggggtcagggggttcagcgggtgacaagggagaggcgtctgagggaccgggattattcagc

SEQ ID NO: 85880 - DNA, 120 bp, synthetic construct
  source 1..120: mol_type = other DNA
cattgtttgtaattttatgctagtcacccaggctttgtaaactctgggccctgacaccccagctggacagggcttgcagggtatctggattaagccatacaattctggtaaccacttagc

SEQ ID NO: 85881 - DNA, 120 bp, synthetic construct
  source 1..120: mol_type = other DNA
ctccctagatagtgaggagccctcttgggaggtggcacagagctgatgttgtgggattccaggtgggcctggttccgaatggacaggatcagacagagacggtcctatcccatgaagcag

SEQ ID NO: 85882 - DNA, 120 bp, synthetic construct
  source 1..120: mol_type = other DNA
ggaaggcaagggctgggaaagaagtgaggggctgagtgggagccaggagactgggggtacacgaaaggcaaagtgagcatcagaggaccggtgaaaaggaaaagaagaaagagctaagaa

SEQ ID NO: 85883 - DNA, 120 bp, synthetic construct
  source 1..120: mol_type = other DNA
gtcttcttgggcatctgaatgggcagtggctggatcacctcgcctgggggaccctgggtgcagggacagatggagagggcaagagacaaggttggtgtgagggtgaagtgtggcagcagt

SEQ ID NO: 85884 - DNA, 120 bp, synthetic construct
  source 1..120: mol_type = other DNA
tgctcacccgggggcccaatcagtccaatgagacctgggtggccctagagaagggtgcaggcagtcaagagaatgcaaagaggagtcatgtggatgggggagaagggccaagaggacatg

SEQ ID NO: 85885 - DNA, 120 bp, synthetic construct
  source 1..120: mol_type = other DNA
agcaggaccctgcaggtggagtgggaaggaagagcacatgaggccgtgggcagccaggctcaactcttcccccttcctgtcctagacacacacatacacatgcacacacacacgtgcata

SEQ ID NO: 85886 - DNA, 120 bp, synthetic construct
  source 1..120: mol_type = other DNA
ctggctcaccatcctcgcctcggtcacccttagcaccatcctggccctgcagaagtgaagcaaggtcagaggtgggcccccaacctggctggcatcacctccaaaactgtcaatacccca

SEQ ID NO: 85887 - DNA, 120 bp, synthetic construct
  source 1..120: mol_type = other DNA
ggaatcttgaagatcagggatgcagcctctgcttccgagacaccttcagccatcccctactcccctcagtgacaatgggacatacacagaaagtcaagcctacaaggggagttccctagt

SEQ ID NO: 85888 - DNA, 120 bp, synthetic construct
  source 1..120: mol_type = other DNA
acatcagcgccattgggtccagctggacctcgaggtcctggggggccaggtggtccctgggggaaacagatacaccacagatgaggaagggaagtgagatggctgagcatgaatggtgga

SEQ ID NO: 85889 - DNA, 120 bp, synthetic construct
  source 1..120: mol_type = other DNA
aagagaagagagtcagagacaccaaaacagggagagagatcaggtgggactgaggttaaaggccaggaggtcagaagtcaaggtcatggacacttacatgttcacccttgttccctttgg

SEQ ID NO: 85890 - DNA, 120 bp, synthetic construct
  source 1..120: mol_type = other DNA
accttcattccccttcaaaccaggtccaccctatgaaccagacatttggggaagatgagacttcacgaaaagagaagggtgagagctggagagggaagacaggctccaaaagatggaagt

SEQ ID NO: 85891 - DNA, 120 bp, synthetic construct
  source 1..120: mol_type = other DNA
ccattctctcctagggacaaacctacctgaggtcccaccactcctggaggaccaggggggccggtcttcccttggaaaccctaggcgaggaagagaggagaatgcagtgaaagcaggtgt

SEQ ID NO: 85892 - DNA, 120 bp, synthetic construct
  source 1..120: mol_type = other DNA
gcagttggagccttgtagagaccattcaccttagctccagacttcccagtggcacctcggggtccccgctgaccccgtggaccctacagagggaagaggagttgtcagagaaacccaaat

SEQ ID NO: 85893 - DNA, 120 bp, synthetic construct
  source 1..120: mol_type = other DNA
tgcctgacttttgttgtctctccttcccgtgagtggattttccccaattctagtgctgggatcccacctcccctgcgcctacagaggtatcaggtccttcagggtcactgtgatctagct

SEQ ID NO: 85894 - DNA, 120 bp, synthetic construct
  source 1..120: mol_type = other DNA
tagtgtagtgatgggagggcaggcatgacacagaccatggggctatcatcctgtaggggtcaggctcccaagggaacacagcactggaactgtggagtctggagactcaggagaataaac

SEQ ID NO: 85895 - DNA, 120 bp, synthetic construct
  source 1..120: mol_type = other DNA
ccctacacttcttccaacccaaatttcctgtgacctagtgaagccaactgtccatggacaagcaccaccagtgacctttcagtgcaagggtcactaaaggagctctgaggtcatgcactg

SEQ ID NO: 85896 - DNA, 120 bp, synthetic construct
  source 1..120: mol_type = other DNA
tccaatccatcccaaacccaagcaaacacagctggcccaggcctgcagtgtgtgggactgtggatctgtgggcttgtgggctttggttttgtttttcttgaagatttatttcctatgccc

SEQ ID NO: 85897 - DNA, 120 bp, synthetic construct
  source 1..120: mol_type = other DNA
gtgctgatcctggggaagcctggagaactaggtcatccccaagaaacaactgagcccagcgtgggctgaaggctacaggcttcagggaggggcccaagcctgttaccttcactccaggat

SEQ ID NO: 85898 - DNA, 120 bp, synthetic construct
  source 1..120: mol_type = other DNA
aaagccatgggaccctcccagccagaggctttctccagcgtttctgccccttgccccaggttctgcccatccagcatttcccatggcttccagataatcacttagaggattccagaaact

SEQ ID NO: 85899 - DNA, 120 bp, synthetic construct
  source 1..120: mol_type = other DNA
agaacagatctgggaatctgggaagcgttgattggagggatgctcccgagttctgaggaggaggcctgggcatatgtggggaaggctcagatgagcacatagaaggggtttctaagaaaa

SEQ ID NO: 85900 - DNA, 120 bp, synthetic construct
  source 1..120: mol_type = other DNA
actccctccctagaaccttaagaaaccttccacacatttaccccaatacatcataaaagaatctctctaagattgtgggtagatttttatttggggtaagaggagggcatggacccacat

SEQ ID NO: 85901 - DNA, 120 bp, synthetic construct
  source 1..120: mol_type = other DNA
ctctccaccttcattctgaccaaacagcaatgatccgtttcaaaattctctgaaatcccatatcaaccccaaatacccagagagcagcataaaggaaaggcagtagaagctcaagggagg

SEQ ID NO: 85902 - DNA, 120 bp, synthetic construct
  source 1..120: mol_type = other DNA
gtaagacatttggcaaaggaaggcaggtagtaatcttttcaagcaacatatacatcatatgtgaacagaaaatgacaagtcacagatgggaaatagctcacagccaacagccaaggatcg

SEQ ID NO: 85903 - DNA, 120 bp, synthetic construct
  source 1..120: mol_type = other DNA
ggctggacttagagagtcaagcaggcccatagttctagagtgacccaaagacagaggccatcgatggaaatgaggaagaaccctccggccagaggaggggctggtccatcaagacgtcat

SEQ ID NO: 85904 - DNA, 120 bp, synthetic construct
  source 1..120: mol_type = other DNA
atgattgctgggggtgctgggagaaagggaagaaatgaaggggtcccttgagtttacctgataatcaggggttgtccccgtagtcatcacatcataataggggggctcgtagtcatagta

SEQ ID NO: 85905 - DNA, 120 bp, synthetic construct
  source 1..120: mol_type = other DNA
attcttcataacaactctttttatttttagatgaaaataaaaaggctgatgaatgaggactaggaggagggggtgatgggaatagggagatgagggtggggaggacaactaaggaggaga

SEQ ID NO: 85906 - DNA, 120 bp, synthetic construct
  source 1..120: mol_type = other DNA
atagagactttatattctcttctttgttctccttgtccagcaggtattcagaaaatgttgactggcttggagggtgaatggagggatgggtgaatggagggatggatgaatggatagatg

SEQ ID NO: 85907 - DNA, 120 bp, synthetic construct
  source 1..120: mol_type = other DNA
gtagtgggcacaagataggggaccagaagtcaatcctgcctctgattgctctggttacctcaaagacttcttcatccagaatacgggcaccaaagatgatcactccatgggtgtccaata

SEQ ID NO: 85908 - DNA, 120 bp, synthetic construct
  source 1..120: mol_type = other DNA
agagagaaatctttgggaaatcctcctagtaaccgagagagatacacacagagtgagaggcaaagggagccgccacaacccctttcctcctggtgtctgatcctaggccccatcccatta

SEQ ID NO: 85909 - DNA, 120 bp, synthetic construct
  source 1..120: mol_type = other DNA
cctggaacctcaatcctgtctcaccacccccaccaaccccaccacctgggacccaaagattcaagatccagcccaccagccctgtctaactagaactcagcttcctagggctcaaactcc

SEQ ID NO: 85910 - DNA, 120 bp, synthetic construct
  source 1..120: mol_type = other DNA
cctggccctgggcttcactgtcctcacatcttggaagttcttccttctgtaatctaatctaaatcttttgtgctgccattctgaccattttctctctaaagcagagaagaattgaatagt

SEQ ID NO: 85911 - DNA, 120 bp, synthetic construct
  source 1..120: mol_type = other DNA
cggctgcaccgctccatggctgagaagccgaaacgccgggtcccagggacccaggtcggcctgagacgctggatgccctgaggctgacagaagacagggagcagactatgagcctcagac

SEQ ID NO: 85912 - DNA, 120 bp, synthetic construct
  source 1..120: mol_type = other DNA
ccgacaaacacaggatagtcaggtccaaggagatgcaaatgggggacgcggttagggagtcccagagccgaggtagagggggagcagtggtaagatgagcgagcagtcgactctggttgg

SEQ ID NO: 85913 - DNA, 120 bp, synthetic construct
  source 1..120: mol_type = other DNA
aacacccacctccaccactggcatttcttagtcaacctgggaaagtacagtacttctttgagtctaactgcaagtctctatcctcacaggaaattaaaaatagcagatcggttcctacat

SEQ ID NO: 85914 - DNA, 120 bp, synthetic construct
  source 1..120: mol_type = other DNA
tccagtgatgcatacactttctcccgcaggacctccacctcactagggttggagaggcccttggcatctgggatggcagggaagagaggaggaagagaaatgaagacaaaccaaatcagg

SEQ ID NO: 85915 - DNA, 120 bp, synthetic construct
  source 1..120: mol_type = other DNA
cagcaatatgacctgatcatccagaggcaaggaggaaaagtgtgggatcctcttcgcccactcaacaagcgtgaatagctgtttgtcagctgcctgacagatgttagtcacagggtcatt

SEQ ID NO: 85916 - DNA, 120 bp, synthetic construct
  source 1..120: mol_type = other DNA
ggcaggtaagtcagtcgggaagggtgaggtaggtaaaagaattagggaggaatttaaatggagagcctactacatggttaaaaaaaacatgccaagattcaacctgagaaagctgattga

SEQ ID NO: 85917 - DNA, 120 bp, synthetic construct
  source 1..120: mol_type = other DNA
ctgcgaagggagagagaaatcaaatatcgccctctagaggagagagagcagtccacccttccagagaggtacacagtctgagtgggataagggagaagggcatgtggtctaagacgcctg

SEQ ID NO: 85918 - DNA, 120 bp, synthetic construct
  source 1..120: mol_type = other DNA
gaagacttattgggaagcagaatgtcacagaagtgatggaaatcattccctaccactaagcaaggccctgcaatgcacattccagaggctgtcatttacactgcagtctatgtgaaaggc

SEQ ID NO: 85919 - DNA, 120 bp, synthetic construct
  source 1..120: mol_type = other DNA
agtctgagggaggggtatgtacaggcacacagacacacaagagacagaagagacaaaaaaagaaaatgagtcttcaaacatccaactagagactttaattctctaataccccaccgtgcc

SEQ ID NO: 85920 - DNA, 120 bp, synthetic construct
  source 1..120: mol_type = other DNA
catgatccctggctgagagtagggataccgaagaggtcccagggattcccaaggattgatcggaggattagctgagcacgaggaagcccctgagagaaagactctggcctggattgggtc

SEQ ID NO: 85921 - DNA, 120 bp, synthetic construct
  source 1..120: mol_type = other DNA
tggacatacccacgatcacgaccatggacattcacatgaggatttacaccatggccatagccatggctactcccatgagagcctctaccacagaggacatggacatgaccatgagcatag

SEQ ID NO: 85922 - DNA, 120 bp, synthetic construct
  source 1..120: mol_type = other DNA
ggaattgttgcctttcttgtcgtggagaaatttgtgagacatgtgaaaggaggacatggtcacagtcatggacatggacacgctcacagtcatacacgtggaagtcatggacatggaaga

SEQ ID NO: 85923 - DNA, 120 bp, synthetic construct
  source 1..120: mol_type = other DNA
ccatctgaatggtttagtggagtcttacacacacacgcctactcaatcagaaagtctgtggaaaggacctctgatctcttaagatttttcagaaattgtctattctagactgctccctct

SEQ ID NO: 85924 - DNA, 120 bp, synthetic construct
  source 1..120: mol_type = other DNA
agtttcctttctcccaccagttggtggaggcttcagggaagaccagagtcctggacagagagggtaacaggaggagtcggggataaacatcaaacatcaatcgtgtgtcctgatttggga

SEQ ID NO: 85925 - DNA, 120 bp, synthetic construct
  source 1..120: mol_type = other DNA
tgtcgttgtgtcctgtgcgggcatcacccaggatgagtttctgctgcacatgtctgaggatgactgggacaaagtcatagctgtcaacctcaaggtggcgatctctgaacctgcgacgtt

SEQ ID NO: 85926 - DNA, 120 bp, synthetic construct
  source 1..120: mol_type = other DNA
gtgggagattatggctgttttgggtctatgggagtgagcagaattctgccctctccccaccattctcatagatgtggcagatgtggtcgcattcttggcatctgaagatagtggatacat

SEQ ID NO: 85927 - DNA, 120 bp, synthetic construct
  source 1..120: mol_type = other DNA
ttcatggccccatcttggtgtccagtctggccttgaaagggggtcttggaacaggtggccctcccccacccctctcctttctctgagtccccccctcccctttctctccaccttacaata

SEQ ID NO: 85928 - DNA, 120 bp, synthetic construct
  source 1..120: mol_type = other DNA
ggtaaggggaatcccgggcacatcgggacctaggtgtgttctcaggactagaaggctaaagcggcagatcttttgcagccttttcccccgggatcctggaatgggggttacggagaagtg

SEQ ID NO: 85929 - DNA, 120 bp, synthetic construct
  source 1..120: mol_type = other DNA
attctgccttgcctggccctacctttgaatcaccttaatctttccaaagcactttcgcatttagctcatttaatcctcaaaacagccctgccagagaggtggaacaagtattattatctt

SEQ ID NO: 85930 - DNA, 120 bp, synthetic construct
  source 1..120: mol_type = other DNA
cgggtaataggagagacatgtttgagatgagatgaaggggtacaaagttagggccctctcactggtcttggttcagcctaggcttcagttcccttgactgaccactcagggcttcccttc

SEQ ID NO: 85931 - DNA, 120 bp, synthetic construct
  source 1..120: mol_type = other DNA
ttctagaagttagaacagtagagcgattttgagaataagccccggattcatactgctggaagttaaatcacctcctaggccagcatctctcagtctttcatgtgtatccagattacctgt

SEQ ID NO: 85932 - DNA, 120 bp, synthetic construct
  source 1..120: mol_type = other DNA
actgagaaaccaaagatcacctagatttccatcagaagtgggctttgcccaaacccaaaataccaccccaacccagaatccattttggaaagcccctacctccagtcctcatctgaggcg

SEQ ID NO: 85933 - DNA, 120 bp, synthetic construct
  source 1..120: mol_type = other DNA
tttatacaaagtatctatatgagattcttctatattgtacagagtggggcaaaacacgcccccatctgctgccttttctattgccctgcaacgtcccatctatacgaggtgttggagaag

SEQ ID NO: 85934 - DNA, 120 bp, synthetic construct
  source 1..120: mol_type = other DNA
gaagaggaatcgcctctccagaaccgactgctgttccttccaccacccgtaacctctctgcccctcacttcctgtttcctctgctctgggtacccccagcccctctggccccaaattcct

SEQ ID NO: 85935 - DNA, 120 bp, synthetic construct
  source 1..120: mol_type = other DNA
gcatttcctttccaagtccttcagtccctcccaaccaagcctatgttactgggtcaggcaaggtgagagatataaagtatgcaaaagaaaacgttactattttgttgaggaacaagatac

SEQ ID NO: 85936 - DNA, 120 bp, synthetic construct
  source 1..120: mol_type = other DNA
aaccacttcttcagttgggtgtggggcttagcctctcctctcccacctctgtctcctctgcttcctcctcccccatgctgctctcacctctctcccctctccctgcaggctgggagcaaa

SEQ ID NO: 85937 - DNA, 120 bp, synthetic construct
  source 1..120: mol_type = other DNA
caggctctactgcttgcctctgtggctgtggtttcacttggaacacccacctgccatgacaccaggcctcatatgtggagaggaatgagatgaacacagtggggaggcagggaatcagag

SEQ ID NO: 85938 - DNA, 120 bp, synthetic construct
  source 1..120: mol_type = other DNA
tataaaaataaaaacagaaaaaaaatagataacttaatttccagagatctccaggacaaccccctaccatcaaatcctagtcccccaactaatcccacccaacccccagaggctactggg

SEQ ID NO: 85939 - DNA, 120 bp, synthetic construct
  source 1..120: mol_type = other DNA
caaatctgattgtttcagtcagcctccttaaacctattcagtggttttccattgatcttaggttaaagacccaagtccttaacctgacctctaaggccctgcaaggggtggcccctcctc

SEQ ID NO: 85940 - DNA, 120 bp, synthetic construct
  source 1..120: mol_type = other DNA
gaggccaaggcaagaggattgcttgagctcagaagttcaagaccagcctgggcaacatagtgagacttcgtctctacaaaatattttttcaacttttattttaagttccggagtacaagt

SEQ ID NO: 85941 - DNA, 120 bp, synthetic construct
  source 1..120: mol_type = other DNA
taatttttttgtatttttagtagagacagggtttcactatgtcggtcaggctggtctcgaactcctgatccacctgcctcaggcttcctaagtgctgggattacaagtgtgagccaccac

SEQ ID NO: 85942 - DNA, 120 bp, synthetic construct
  source 1..120: mol_type = other DNA
caaatctaaaaattcagtacaattctaagcaaaactccaatcagatattttatggaacttgacagactgttcttaaaattctttttttttttgagacggagtctcactctgttaccgagg

SEQ ID NO: 85943 - DNA, 120 bp, synthetic construct
  source 1..120: mol_type = other DNA
atcacttgagctcaggaggtcaagaccagcctggacaacatgctgagacatcatctctacaaaaatacaaaaatagtagccgagcatggtgatgcatgcctgtggtcccagctactcagg

SEQ ID NO: 85944 - DNA, 120 bp, synthetic construct
  source 1..120: mol_type = other DNA
ttctattcaatatagtactagaagttctagtcagaacagataggcaagagaaagaaatacaagacatccaaattggtcaatgttgaccaggttggcctcgaactcatagcctcgcctccc

SEQ ID NO: 85945 - DNA, 120 bp, synthetic construct
  source 1..120: mol_type = other DNA
aaggcacaagaattacttgaatctgggaggcagaggttgccaagaccacaccactgcactccagcctgaagaacagagagagactgcctccaaaaaaaaaaaaaaaaaaaaaaactactc

SEQ ID NO: 85946 - DNA, 120 bp, synthetic construct
  source 1..120: mol_type = other DNA
gctcaagtgatcctcctgccttggcctcccaaagtgctggaattacaaacataagccactgcatccagccaaaaatctgattttacaatgggcaaatgatctgaaaaaacatttctcaaa

SEQ ID NO: 85947 - DNA, 120 bp, synthetic construct
  source 1..120: mol_type = other DNA
acaacagagtgagaccctgtctcaaaataaatttaaaaaaataaataaataaaataaaattgcagaagcagagaatagaatggtggctgcacaggggctagggggcggggggcgggtgtg

SEQ ID NO: 85948 - DNA, 120 bp, synthetic construct
  source 1..120: mol_type = other DNA
caataaaggaaaatattgatacatatgaccacgttaaaacatttttaagcttttataagaaatcacataggccgggcgcgatggctcaagcctgtaatcccagcactttgggaggccaag

SEQ ID NO: 85949 - DNA, 120 bp, synthetic construct
  source 1..120: mol_type = other DNA
gcgaggataaaaatggtcattgcagtatcagttaattgtcaagaagaagtggaaataagctaactgttgttaagtaaaatggataaataaagtatggtttgttcttataatgggatacta

SEQ ID NO: 85950 - DNA, 120 bp, synthetic construct
  source 1..120: mol_type = other DNA
aaaatctcataagaaccttacttggcaacgaaagtgccccaaaactgagaagacccagactcttccttcaatgatctagatcaatttgcacctcaaattcctgtaagggccaggcaagta

SEQ ID NO: 85951 - DNA, 120 bp, synthetic construct
  source 1..120: mol_type = other DNA
aggtagaaggattgcctgagcctgggaggttgaggctgtagtgagccatgattgtgccactgcactccagcctggtgacagagtgagaccctgtctcaaaaaaatatatacatatttatt

SEQ ID NO: 85952 - DNA, 120 bp, synthetic construct
  source 1..120: mol_type = other DNA
tggcattttgtatctgtaggtccacacctatggattcaaccaactgaagaataaaaatatttttaaaatatatatggccagtccgggcgcggtggctcacgcctgtaatcccagcacttt

SEQ ID NO: 85953 - DNA, 120 bp, synthetic construct
  source 1..120: mol_type = other DNA
agaggtaatatttaacaagctggttaaagtgatttcacttacatgtttccactgcttaaatcctccctacactccaaagcagtacatgcttcagaatccaggcagaggcacaacctcaga

SEQ ID NO: 85954 - DNA, 120 bp, synthetic construct
  source 1..120: mol_type = other DNA
caaatcctggaggccaaaaaacgacagtgtttcaagaaagaactggccagcaacgtcagctactagtggcagttcaagtaagaagaaaacgaaacaatggacttaatgacataaagttca

SEQ ID NO: 85955 - DNA, 120 bp, synthetic construct
  source 1..120: mol_type = other DNA
tgcctcagcctcccaaagtgctcggattgattacgggcatgagccactgtgcccagcccttttttttttttttaaacatagaaattgttgagtgactactaaaacattcttggaccatat

SEQ ID NO: 85956 - DNA, 120 bp, synthetic construct
  source 1..120: mol_type = other DNA
gtgacccaccacacctgactaatttttgtatttttttttttttgtagagacagggtttttctctgttgcccaggtgggtcttgaactcctgagcttaagtaatccacctgccttgaactc

SEQ ID NO: 85957 - DNA, 120 bp, synthetic construct
  source 1..120: mol_type = other DNA
atgacaatgagaatgtgtggccgagttggagaggagaagattcttggggattaagtggccaggttattgagaggtcaagtagggaatggatcctccaggtggacaatgaagtctcccaga

SEQ ID NO: 85958 - DNA, 120 bp, synthetic construct
  source 1..120: mol_type = other DNA
aaacatggtgaaaccccatctctactaaaaaaaatacaaacattagccaggtgtggtggtatgcacctgtaatcccagctacttgggaagcttaggtaggaggatgacttgagcccagaa

SEQ ID NO: 85959 - DNA, 120 bp, synthetic construct
  source 1..120: mol_type = other DNA
cccaagtagctagaaccacaagcacatgccaccatacccagctaagttttgaattttttatagagacgggtttttgccatgttgcccaggctggtctcaaactcttgagctcaagtgatt

SEQ ID NO: 85960 - DNA, 120 bp, synthetic construct
  source 1..120: mol_type = other DNA
cttttctaatggtggggcatctagctctcctgcaaatgtacaaaatgtcaatgctaggaatgcagaatttctgcaaagaaaaccccccaaacccactgatcctaaaaacaggggagataa

SEQ ID NO: 85961 - DNA, 120 bp, synthetic construct
  source 1..120: mol_type = other DNA
aaaaattagctgggcatggtggtggatgcctgcaatcccagctactcgggagctgaggcagagagtcgcttgaaccctggaggcggaggttgcagcgagccgagattgcaccactgcact

SEQ ID NO: 85962 - DNA, 120 bp, synthetic construct
  source 1..120: mol_type = other DNA
tctttcattcattcaatcacactttagcttaggtgcagctgggaagggacttcgcggatgtaattaaagtcacaaattggtttatcttgaggtaatccaaagggagactgtgcaggagag

SEQ ID NO: 85963 - DNA, 120 bp, synthetic construct
  source 1..120: mol_type = other DNA
aggctacactgcaaggggtattttgtcactaacatttttttataattgctggtgcgcagtatcaataaaaagttggcttcaggctgggcgcagtggctcacacctgtaatcctagcactt

SEQ ID NO: 85964 - DNA, 120 bp, synthetic construct
  source 1..120: mol_type = other DNA
aggcattcctaattaccctggttgtaagataatacaaaacaggaaatgacagcatcattagagatttaaggtttcttaactttttacgtctaggacaggttttggaagtctggtgaagtc

SEQ ID NO: 85965 - DNA, 120 bp, synthetic construct
  source 1..120: mol_type = other DNA
cgagaattgcttggcccagggaggtggcagttgtggtgagctgagatcgtgccgttgcactctagcctgggcaacaagagtgaaactccgtctcaaaaaaaaaaagaaagaaagaaaaga

SEQ ID NO: 85966 - DNA, 120 bp, synthetic construct
  source 1..120: mol_type = other DNA
ctaatttttgtatttttggtagagacagagtttcgccatgttgctcaggctagtctcgaactcctgtgctcaagtgatctgcccacctcagcctcccaaagtgctaggattacaggcgtg

SEQ ID NO: 85967 - DNA, 120 bp, synthetic construct
  source 1..120: mol_type = other DNA
gcaattctcctgcctcagcctctcgagtagctgagattacaggtatgtgccaccatgcctagctgattttttatatttttagtagagatggggtttctccatgttggtcaggctggtctt

SEQ ID NO: 85968 - DNA, 120 bp, synthetic construct
  source 1..120: mol_type = other DNA
agctgtgttcttataaacttccaaatgagatgaagataaacttctgctgagaggggcatggtcatgacttacagtttgggcaggacaaagtattttccatcacacacacacacacacaca

SEQ ID NO: 85969 - DNA, 120 bp, synthetic construct
  source 1..120: mol_type = other DNA
attacctgaaacaggaagaacacctcctcataaggctggtatgtgaattcaattagatgaaatatgtgctctccgagatcaaggactttgatttagtctctgctgaatccgcagtgccta

SEQ ID NO: 85970 - DNA, 120 bp, synthetic construct
  source 1..120: mol_type = other DNA
tatcttaaaatcagaaaagccacccatcttaagtggagggtgggtgggtccatatttacaggaatggaagaaaggaggatgttccctctcttttgtccacgttcagcagctctgaaatta

SEQ ID NO: 85971 - DNA, 120 bp, synthetic construct
  source 1..120: mol_type = other DNA
cattccaggtctgcccctcagtgacttctgcaacaacacgcgcttctcgatcagctctgaggatttgggttctgcgacggacaggggaaggaaagaaggaaggctgtgaagaaccgtggt

SEQ ID NO: 85972 - DNA, 120 bp, synthetic construct
  source 1..120: mol_type = other DNA
acacaggaaacgtaacatttttccttaactgcgcctctcttcttaggccttaaaggggtccccgtgtctctccagtctagagcctaagttcaaacgaggcgtataggcgaggacagcagg

SEQ ID NO: 85973 - DNA, 120 bp, synthetic construct
  source 1..120: mol_type = other DNA
agggtatggaatggggtgcagaagtccatggagatgaccggcagatctcagggcggtttctggcacatcagaagttgggcttatgcttcttgagctccaccataaggtggtgaatgttga

SEQ ID NO: 85974 - DNA, 120 bp, synthetic construct
  source 1..120: mol_type = other DNA
tccagtctttcatactctattcccccaccatgtaatctgcatcctttcatttttcttttccacttcccttaccactgatcccatcattaccatattttcctcataccttcttcccctcga

SEQ ID NO: 85975 - DNA, 120 bp, synthetic construct
  source 1..120: mol_type = other DNA
aaggactcagaatgtagcacagacagaagatggaaaattttgagatagtaggagatacagaaatctaattaatgtatctaggcactgaaattgatggctactaacatcacaaagagagcc

SEQ ID NO: 85976 - DNA, 120 bp, synthetic construct
  source 1..120: mol_type = other DNA
aggatcacttgagcccaggagttcgaggctgcagggagttatatcatgctactacactccagcctgggcactacagcaaggccctatctcaaaaataattttcttaataaaaataacatt

SEQ ID NO: 85977 - DNA, 120 bp, synthetic construct
  source 1..120: mol_type = other DNA
aattttaagtatatcttttttttctttttttttttcggaaacagggtcttgctccatcacccacgctggagtgcagtggcacaatcacagctcactacaacctcaactttcctggctcag

SEQ ID NO: 85978 - DNA, 120 bp, synthetic construct
  source 1..120: mol_type = other DNA
atgacgaggtcagatcaagaccatcctggctaacatggtgaaaccccccgtctctactaaaaatacaaaatacaaaaaaaataccgggcatggtgctgggcacctgtagtctcagctact

SEQ ID NO: 85979 - DNA, 120 bp, synthetic construct
  source 1..120: mol_type = other DNA
ctgagacaagagaagcacttgaacccaggaattcaaggctgcagtgagctatgattgtgccactgcactccaacctgagtgacagagcaaaacctgtctcaaaaaaaaaaaaaaaaaaaa

SEQ ID NO: 85980 - DNA, 120 bp, synthetic construct
  source 1..120: mol_type = other DNA
atcttcctgccttggcctcccaaagtgctgggattacaggctttagccactgcacctggccaaaattctacaatattaagaagaaaatgtagcataatatttttctggccttggagtaat

SEQ ID NO: 85981 - DNA, 120 bp, synthetic construct
  source 1..120: mol_type = other DNA
catattaaaattacaaatttctttaatcaaaaagcaacattaaaaaaacaaaggctggacgcggtggctcatgcctgtaatcccagcattttgggaggctgaggcggatggatcacctga

SEQ ID NO: 85982 - DNA, 120 bp, synthetic construct
  source 1..120: mol_type = other DNA
ctcgcatttattcagtaaagattaattgacaaagacttgagtcaacaccactacggggtaactgacattgtggacttcctgagtagaaagcagttaagcacctgcggtacatcaaagatt

SEQ ID NO: 85983 - DNA, 120 bp, synthetic construct
  source 1..120: mol_type = other DNA
atgcaataacatgacaatattagaaaaattatgcatgaaaaaaatcctgtgattctggggttttttgttttgttttgctgtttgagacagggtcttgctgtgttgccaagggtagactac

SEQ ID NO: 85984 - DNA, 120 bp, synthetic construct
  source 1..120: mol_type = other DNA
gtatcgctgcactccagtgtgggagtcagagtgagactccgtctttaaaaaaaaaaaagaatcataagatttttcacttgagggcagtaattcaagaccagcccaggcaacagttgtctt

SEQ ID NO: 85985 - DNA, 120 bp, synthetic construct
  source 1..120: mol_type = other DNA
tggacaacaagaacaaaactccatctcaaaaaaaaaaaaaaaaaaaaaaaaagcttctgcacagctaaagaaacaataaagtgaagagacaaagaatatttgcacatcccatctgccaag

SEQ ID NO: 85986 - DNA, 120 bp, synthetic construct
  source 1..120: mol_type = other DNA
gaggctgggaaggctagtggaaggctggggagaaggtggggatgattaatgggtacaaacaaaaataggaagaataaataagacctactatttgacagcacaacagggtgactatagtca

SEQ ID NO: 85987 - DNA, 120 bp, synthetic construct
  source 1..120: mol_type = other DNA
aaaccgaattttctgggtaggaaggcaaggagaaggagcacctattaccatcagcacacccagcatcatgtcatagttgttgatcagaaacacaagctgctccttccttgaggagaactc

SEQ ID NO: 85988 - DNA, 120 bp, synthetic construct
  source 1..120: mol_type = other DNA
aatgttacggaaccggagaacaatgtggatacagagaaaaacagcaatggcatcgtagcagtcagctagataagaatccaggtgtttctgtgtgattggggaacaaacagaggattaaaa

SEQ ID NO: 85989 - DNA, 120 bp, synthetic construct
  source 1..120: mol_type = other DNA
gttttcacgtgctattgcctgattgtgggtcagcagtaggggtagtctcagggaccctacgcactgaggatttcatgggggagtaacactgtgacaagtctaagtaacaagttttttttt

SEQ ID NO: 85990 - DNA, 120 bp, synthetic construct
  source 1..120: mol_type = other DNA
aaatggatactgggagaggaggagtaaagaagaaaaacagaagggatggaccccaacactgacttcccatggatatggctggaaaatcagtaaacctgagtaataagagctaggcagacc

SEQ ID NO: 85991 - DNA, 120 bp, synthetic construct
  source 1..120: mol_type = other DNA
tccccagtactaggatatctttctttgctgtatcttccacacccattagatcatctttctcagcgacttcctcatactaaggaaagagaaaagagaactgataaccgtctcttcccacaa

SEQ ID NO: 85992 - DNA, 120 bp, synthetic construct
  source 1..120: mol_type = other DNA
gcccctgtcatctctaccaccttgcattgtaccatatagtcaggacacatgtacaaagttttctattcctggacctccccactatacacctgatcttacatcattcttaatcttaatctt

SEQ ID NO: 85993 - DNA, 120 bp, synthetic construct
  source 1..120: mol_type = other DNA
agggacactgtaacagaatcagtgaaggactaaagggtcagataccaggctgatacaacaaaagcaagagactgttgtttttccttttggggtagaatagatagaagggcagattagtac

SEQ ID NO: 85994 - DNA, 120 bp, synthetic construct
  source 1..120: mol_type = other DNA
atcgagaccatcctggctaacacagtgaaaccccgtctctactaaaaaatacaaaaaattagccgggcgcggtggcgggcgcctgtagtcccagctacttgggaggttgaggcaggagaa

SEQ ID NO: 85995 - DNA, 120 bp, synthetic construct
  source 1..120: mol_type = other DNA
cccaaagggtcttcctcagcgcgaaatcgttcccagatatttgagttaagttgtttgactccagctgtcccctttcagctctaaccacttcacccaactgcaaatggaaatatggaagtc

SEQ ID NO: 85996 - DNA, 120 bp, synthetic construct
  source 1..120: mol_type = other DNA
aagtagggtaaggaatagggaatgtaaatgagaattgggttgtgaagacataagcaaaaatgaagcaaggctggggagacttgagtctcatccagatcaccttgactgctggattaagaa

SEQ ID NO: 85997 - DNA, 120 bp, synthetic construct
  source 1..120: mol_type = other DNA
tttcatctatatctcttcccacacccattttgaagtaaatcttttcacttgtaaacatataattaaatttgaggcttagtgcagtggctcactcggaggctgaagtgggcggatcccctg

SEQ ID NO: 85998 - DNA, 120 bp, synthetic construct
  source 1..120: mol_type = other DNA
gcatataggcatgagccacggtgaagccaacccttgatctctttcttgcagataggaactgccatttgttttagtttcctggagcctactgtaacaagttcatataaactaagcagaaaa

SEQ ID NO: 85999 - DNA, 120 bp, synthetic construct
  source 1..120: mol_type = other DNA
ttctgtgttcatgattcagtcatacccctgaacaaagttacttttttctttttttgagacggggtctcactgtcgcccaggttagagtgtggttgcgtgatcttggcttgctgcaacctc

SEQ ID NO: 86000 - DNA, 120 bp, synthetic construct
  source 1..120: mol_type = other DNA
atctccctgcctacctcgactcagcattcctcctactcgctcttctttttccccaaccttttgtttctgctgtgcatgacctgtgactcttctctttttacctgcagccttcgtgtccga

SEQ ID NO: 86001 - DNA, 120 bp, synthetic construct
  source 1..120: mol_type = other DNA
ttcgctcttacggatcccctcggagtacgccgcaccatgcagctcaggctcttccggcgcctccttctcgccgctttgctgctggtgatcgtctggaccctcttcgggccttcggggttg

SEQ ID NO: 86002 - DNA, 120 bp, synthetic construct
  source 1..120: mol_type = other DNA
ttagaggatgtctttgtgggggtaagtgcccgacgaggaggcctcgccccaacacagtgtgtcaagctggctggtgccacccactacccgctagaccggtgctgctatgggaaattcctg

SEQ ID NO: 86003 - DNA, 120 bp, synthetic construct
  source 1..120: mol_type = other DNA
acactgcccccacctccttgttccagggaacactcatttccctacaggtgatcttggggagagactgttcccaggcaaccctggagtctggctcagcgcacaaatctgtccagggcagat

SEQ ID NO: 86004 - DNA, 120 bp, synthetic construct
  source 1..120: mol_type = other DNA
aagacccccagcatgagacatcaggagagctttctctacctccaaccccaaaccacaccttccccagcagcaggggcctcactctctgcagcaggggaacctcacctccaacaggggcaa

SEQ ID NO: 86005 - DNA, 120 bp, synthetic construct
  source 1..120: mol_type = other DNA
tccaggcatcaagtctggctggggagaaaaagattaatagtaataaccactgccatcaccctgaacactccacaggcatcctctcagttaagctgcacacaactcatactatttttattt

SEQ ID NO: 86006 - DNA, 120 bp, synthetic construct
  source 1..120: mol_type = other DNA
taatttttagtagagccagggtttcgccatgttgaccacgctggtcttgaactcctggcctcaaatgacctgcccaccttggcctcccagagtgctgggattacaggtgaggttggagtt

SEQ ID NO: 86007 - DNA, 120 bp, synthetic construct
  source 1..120: mol_type = other DNA
atatggagtaaaaagggcagaaccaaatcactcattcacaaagatacaattacaaaggccagacacggtggctcacgcctataatcccagcactttgggaggacaggcgggtggatcaca

SEQ ID NO: 86008 - DNA, 120 bp, synthetic construct
  source 1..120: mol_type = other DNA
gttgtaatgaaccgagatcgcgccactgcactccagcctgggtgatagatcaagactccgtctcgaaaaatagtaataaaataaataaatgcatcacctggccaatcattctcaaaaacc

SEQ ID NO: 86009 - DNA, 120 bp, synthetic construct
  source 1..120: mol_type = other DNA
ggctttaaaccaaggcttggtaaactactgcccatgggccaaacctggcccatcatctagttctgtatagcccacaagccaagaatggtttttacatttttaagtggttgaaaaaaaatc

SEQ ID NO: 86010 - DNA, 120 bp, synthetic construct
  source 1..120: mol_type = other DNA
cttggcctccaaagtgctgggattacaggcgtgagccaccgcacctggccatattacgtttaattttataacctaaaaatgtgtgggccaggcgcagtggctcacgcctgtaatcccaac

SEQ ID NO: 86011 - DNA, 120 bp, synthetic construct
  source 1..120: mol_type = other DNA
actatctgactctttacagaaaaagtttgtggacccttgaaatggacactcatatttccattttcggggtcaggaaactgtggcacacagaggttatgaaatatgcctatacttgcaagg

SEQ ID NO: 86012 - DNA, 120 bp, synthetic construct
  source 1..120: mol_type = other DNA
tgtcatagatgtggagccagcggttctgagcaacagcaagcagtgcctcagaatggagaaacctgggggagaggaagagtggttcaattgggaaatgaggtcacaggctatcattcaatc

SEQ ID NO: 86013 - DNA, 120 bp, synthetic construct
  source 1..120: mol_type = other DNA
tcttcagcaagcagcagctcagaacgagcagctttgatacttgtttcctcttcctcagcttcagccacctcaagtcggcttcgagttttggctttagaatgtggtagctgtaacattgtt

SEQ ID NO: 86014 - DNA, 120 bp, synthetic construct
  source 1..120: mol_type = other DNA
agcggtgcggtttctttttctggattagtttccccatcttgcctaaaaatgtcctagtctagtctttttagcagaactccactccctaaacatgtcagaactacacttcccatcaagggt

SEQ ID NO: 86015 - DNA, 120 bp, synthetic construct
  source 1..120: mol_type = other DNA
gaggctggactatatcacagctgaaatgtgagtttttattccaccaccgtgtgctgcaccctgtgatgcaagtgaaccattggagtagaggtgttgaaccattgcagaacagctctccat

SEQ ID NO: 86016 - DNA, 120 bp, synthetic construct
  source 1..120: mol_type = other DNA
tatacacatttgcagcaagggaccagtggtagagaggttactggagagaaactgttctgaggaaacttttttcaccaatacctcactttttgctctgttcatggggacagaaaacattgt

SEQ ID NO: 86017 - DNA, 120 bp, synthetic construct
  source 1..120: mol_type = other DNA
aaagagcaatcaatcagccatgatttcccatccttctaccctcagccactgaacccaaccacaaaatgttacttgtgtccaaggctttaaaatgaacaggaaaacccaatatggtggctt

SEQ ID NO: 86018 - DNA, 120 bp, synthetic construct
  source 1..120: mol_type = other DNA
agcccaaaaccctgcagtggcaggagattgggaggatcagagaaaagtggaagtcccaagaaaccaccccccagccagtgaatctctcactctgtccactgcgagatgaccaatgttggc

SEQ ID NO: 86019 - DNA, 120 bp, synthetic construct
  source 1..120: mol_type = other DNA
aacccttataacagatcaatgtagatgctatttctagtttcccatttacagatcactgaggcgacttggcacagaaacagatctggctctgtcccacactcagctatttgtgccttacag

SEQ ID NO: 86020 - DNA, 120 bp, synthetic construct
  source 1..120: mol_type = other DNA
ttaaactgtgtgacagtagctcggacagatgggcagaggtgagaatgtcctggccggtctctgtgaccccacaggcctcccaggcactgagaggggatcaaattgagaaaaagttcctgc

SEQ ID NO: 86021 - DNA, 120 bp, synthetic construct
  source 1..120: mol_type = other DNA
acacagagagatgatcgctaaccctttctcccactctgcacctagatttctgaggacaatcccagacccaggagatgttccagactcatttttctgatattcagagagggcaagagtctt

SEQ ID NO: 86022 - DNA, 120 bp, synthetic construct
  source 1..120: mol_type = other DNA
cccaaatccaaattctggcccctcctgaggcccgaaatcctgctcctggccaccaccattaatccctaatgaaaacagatgaccactctctacccaccctaggatctttcctccaggtcc

SEQ ID NO: 86023 - DNA, 120 bp, synthetic construct
  source 1..120: mol_type = other DNA
tctgcaggaaggttgggggagggggcaacagaagggtggaataggggggcccttggtgctgttggggaaggaggaggtcacgagtacggggacgcgcagggtgctcaggctctgacctgc

SEQ ID NO: 86024 - DNA, 120 bp, synthetic construct
  source 1..120: mol_type = other DNA
gtcactggaagggaccagaggtgattggaatattcattgagcttggaaaggggttggaatgagagaaccgtttggaagcactggaatacagctttattcctacacgattagacccgttac

SEQ ID NO: 86025 - DNA, 120 bp, synthetic construct
  source 1..120: mol_type = other DNA
ctgtctcagaaaaaaagaaagattatttgcagccgggcgcggtggctcacgcgggtaatcccaatactttgggaggccgaggcgggcggatcaccaggttaggagatcgagaccatcctg

SEQ ID NO: 86026 - DNA, 120 bp, synthetic construct
  source 1..120: mol_type = other DNA
tatataagtgaaagaaaaaaaaaaaagcattccagccactcagtggagagagattggagggattaggagcagatgatagggtattattttagggagctactacagaagcttgggccagag

SEQ ID NO: 86027 - DNA, 120 bp, synthetic construct
  source 1..120: mol_type = other DNA
taggattacaggcgtgaaccaacgcacctggccaagactgtaatttctttttcttttttttttgttgttgagacgaagttttccttttgtcacccaggctggagtgcaatggtgtgatct

SEQ ID NO: 86028 - DNA, 120 bp, synthetic construct
  source 1..120: mol_type = other DNA
tgtgtttagatttgggtctgatcccaaagatattaaatatatgcaaatattccaaagtctgaaaaaatccaacatccaaaaacacttctgacccaagcatttcagataagggaccagaat

SEQ ID NO: 86029 - DNA, 120 bp, synthetic construct
  source 1..120: mol_type = other DNA
ctgggatggtgaattcgacaggcatagcgtgccccatgctgctcagtggtgactgggggcggctgcaagtgcccagagaggctgacagagccatcggaatggtggcgcagggccgagagc

SEQ ID NO: 86030 - DNA, 120 bp, synthetic construct
  source 1..120: mol_type = other DNA
agcagagcatcttgtcccagtctcactcgaggggcaggggtgtgggtgaggacagtcagtaccactgaggaagacagggagatgaggggttgggaggggcatgagggagagaaagaagga

SEQ ID NO: 86031 - DNA, 120 bp, synthetic construct
  source 1..120: mol_type = other DNA
ttgatgaatgatcaccaagcccgccagacactaaaagcaaacccttggagttactcagactcatttattcattcagcaactattgagcactgaagatgttcaaggtatcctggtagaaga

SEQ ID NO: 86032 - DNA, 120 bp, synthetic construct
  source 1..120: mol_type = other DNA
agaagaatcacttgaacctgggaggtagaggttgccgtaagctgaaatcatgccactacactccagcctgggcaacagagtgagactccgtctcaaaactaaataaataaataaaataaa

SEQ ID NO: 86033 - DNA, 120 bp, synthetic construct
  source 1..120: mol_type = other DNA
gttgcagtgagccaagatcaccccattgcactccagcatgggtgacaagagtgaaactccgtctcaaaaaataaatatgtacataataaaaacaggctttttagaataacacgccctcca

SEQ ID NO: 86034 - DNA, 120 bp, synthetic construct
  source 1..120: mol_type = other DNA
gagatcatgccattgccctccagactgggcaacaagagcaaaacttgatctcaaaaaaaaaaatccatagaattaataaacaaaacctggctgggcagggtggctcagacttgtaatccc

SEQ ID NO: 86035 - DNA, 120 bp, synthetic construct
  source 1..120: mol_type = other DNA
tattttaaaagaatggtgagaattaaacactatacacacaaagtatattaagaaagtataggcctggcgtggtggctcacgcctgtaatcccagcaatttgggaggctgaggtgggtgga

SEQ ID NO: 86036 - DNA, 120 bp, synthetic construct
  source 1..120: mol_type = other DNA
ctaattttacatcagtacaacagctttcattttcttaaatccctgatcaagcagaaatgcttgaaaagaaagagcacagcaggccgggcgtggtggctcatgcctgtaatcccagcactt

SEQ ID NO: 86037 - DNA, 120 bp, synthetic construct
  source 1..120: mol_type = other DNA
gccaccccagagattctgatttaatcggccaagctaagcatgggattgaatcaggtttcagtatattttagaaacctccaacagtgtggactgagaactgctgagtcctaactcattctt

SEQ ID NO: 86038 - DNA, 120 bp, synthetic construct
  source 1..120: mol_type = other DNA
cccctaccccctgccaagctgcagttttttttttgttttttttttttaactgggtgagggctagaaggagcggtagagattgattcattctagccaaaccacctctcttaacaaaaaaag

SEQ ID NO: 86039 - DNA, 120 bp, synthetic construct
  source 1..120: mol_type = other DNA
gacttcatggcgctgcgacctcctcagccatgaagcctcctcttcctcctttcactttcactttcctccaaagggcggcatgaggggcggtggaaatccccgctctggttaggtgaaggt

SEQ ID NO: 86040 - DNA, 120 bp, synthetic construct
  source 1..120: mol_type = other DNA
tggtgaaactgtggttccccttccagaatatatacaagtccacagagataaaggaagacagtaagtgtggtgggagatcacccgggggccacagcgcccttgcatcgtgctccttattcc

SEQ ID NO: 86041 - DNA, 120 bp, synthetic construct
  source 1..120: mol_type = other DNA
tcagggtacggacatcacttatgctgagggtagcctcaggccctccccccactggaaccctggagctaccccctagttcttcatcttcatcatcctcacaggtcaacaccagatcttcct

SEQ ID NO: 86042 - DNA, 120 bp, synthetic construct
  source 1..120: mol_type = other DNA
ataacatctcataacgacacagcccgttacaactcaaaaatatgttcacgctcattatctgtgtaactccccacaacagtgaggtaggtattcctctcaaccccatttgacagatgagga

SEQ ID NO: 86043 - DNA, 120 bp, synthetic construct
  source 1..120: mol_type = other DNA
actttgcctttaaagaaacatcgccacattccaccttaaaagatcaggtcccctcctccgctgggagctcaggacttggttcggccgaagcatttattcccctttaaagctataagcctg

SEQ ID NO: 86044 - DNA, 120 bp, synthetic construct
  source 1..120: mol_type = other DNA
aagaaacaggaggatttagaggataaaatgggtgggaaaaaggaagagacaggatgtggcacgtggaatattcagacagagcagctgaaacagccaatgaaagagaacaaattgtcagag

SEQ ID NO: 86045 - DNA, 120 bp, synthetic construct
  source 1..120: mol_type = other DNA
tccaggttcttttcattggagatctgtagtgaggacatggggctcttgtctccatctttacctggaaaagaagaaaaggggagagggtagcctgagaatgagggggaaaaaatactgctg

SEQ ID NO: 86046 - DNA, 120 bp, synthetic construct
  source 1..120: mol_type = other DNA
ggactagaagagtaaaaaccctagaaaggactagagagatgccccatccgcctcatacctgacatataagggtcactgagaggcatcccaccaaccccctacctggcctatagtcatctg

SEQ ID NO: 86047 - DNA, 120 bp, synthetic construct
  source 1..120: mol_type = other DNA
ccaaaaacagagagtgggcacgttgctgccggttatagaggaatgggaccacctcagggtggtctgctgtctgcatcttacaaagttcaaggaactagaaggttcaggggaagaaggaag

SEQ ID NO: 86048 - DNA, 120 bp, synthetic construct
  source 1..120: mol_type = other DNA
gtgaaagaggttccctcccaacagtccgttctcttttctcctccttgaattatctccatatttcaccctccgatgagtctcctcaaactggggctttaggttgaagatattttacccaag

SEQ ID NO: 86049 - DNA, 120 bp, synthetic construct
  source 1..120: mol_type = other DNA
cgaacagggtggattaggaattgggctttccaaagctgtgcagagtttcagggaagggcagaagtctcttaaaagggaagtaaaaccttttctttcagttgggctattggcaagctatct

SEQ ID NO: 86050 - DNA, 120 bp, synthetic construct
  source 1..120: mol_type = other DNA
ctcttttttcccctcccccctcaaaagtatagttctcaaccatgaaatctcctgggggtaatcttacctgtttaaaataaagggaaatgtaccctgtttctttcaccaaggcaccatgaa

SEQ ID NO: 86051 - DNA, 120 bp, synthetic construct
  source 1..120: mol_type = other DNA
caaaaaaaaaaaaaaaaaggttttttatagcgacagggtcttactgtgttgcccagatggatcttgagctccttgcctcaagcaatcttcccacctcagcgtctcaaagtgctgggatta

SEQ ID NO: 86052 - DNA, 120 bp, synthetic construct
  source 1..120: mol_type = other DNA
gcacacaacaccatgcccagctaattttttgtattttttgtattttttttttttagtggatatgggtttttggcatgttggccaggctggtctcaaactcctgacctcgtgatccaccca

SEQ ID NO: 86053 - DNA, 120 bp, synthetic construct
  source 1..120: mol_type = other DNA
tctactaaaaatacaaaaattagctgggcgtggtggctcgcgcctttagtcccagctacttgggaagctgaggcagaagaatcgcttgaacccaggaggcggagatttcagtgagccaag

SEQ ID NO: 86054 - DNA, 120 bp, synthetic construct
  source 1..120: mol_type = other DNA
taatttttgtatttttagtagacatggggtttcaccatatttgccagactggtcttgaactcctgactttaggtgatccccctgccttggcctcccaaatttctgggattacaggcatga

SEQ ID NO: 86055 - DNA, 120 bp, synthetic construct
  source 1..120: mol_type = other DNA
gcacctgccagtcctgaccttaattcccacacctaagagaaaagagaaaggaccctatgagccttcagatcaattatttaaacatccagtgtgatgtgaaaggtctggactaaatgatcc

SEQ ID NO: 86056 - DNA, 120 bp, synthetic construct
  source 1..120: mol_type = other DNA
ttgccatcgatggtccaggtctcagaggctaccagtggaggatgtggttgaggaggttgtaggagcaaggactgaagaccttttcttttctttcttttttttttttttttttgactgatt

SEQ ID NO: 86057 - DNA, 120 bp, synthetic construct
  source 1..120: mol_type = other DNA
ctgcctcagcctcccaagtcgctggaattacaggtacgtgccaccacgcctggctaattttttgtacctttagtagagacggggtttcacagtgtaggccaggctggtctcgaactcctg

SEQ ID NO: 86058 - DNA, 120 bp, synthetic construct
  source 1..120: mol_type = other DNA
tcacttgaacccgggaggcagagtttgcagtgagccaagatcatgccactgcactccagattgggcgatacagtgagactccgtctcaaaaaaaaaaaaaaaatacaaaaaattagccgg

SEQ ID NO: 86059 - DNA, 120 bp, synthetic construct
  source 1..120: mol_type = other DNA
gagatcgcaccactgcactccagtctggcaacagagtgagttgttgccaaaaaaaaaaagaaaaaagaacaagatcaggccaggcgcggtggcttatgcctgtaatcccagaactttgag

SEQ ID NO: 86060 - DNA, 120 bp, synthetic construct
  source 1..120: mol_type = other DNA
ttcaagaccagcctggtcaacatggtgaaaccctgcctctactaaaaatacaaaaattggcagggcatggtcatgggcacctgtaattccagctattctggaggcaggagaattgcttga

SEQ ID NO: 86061 - DNA, 120 bp, synthetic construct
  source 1..120: mol_type = other DNA
gtttcgccatgttgttcaggctggtcttgaactcctgagctcaggcaatccacccgcctaggcctcccaaagtgcaattatcttttcttttaacagctgtttttttctttttcttttttt

SEQ ID NO: 86062 - DNA, 120 bp, synthetic construct
  source 1..120: mol_type = other DNA
aaaaaagacaggactttctacttgctagcctctctattgctggctttgatgatgtaagatgccatattggagaaacccacatggcaagaaactaggtgtggtctccaaacactaaccaac

SEQ ID NO: 86063 - DNA, 120 bp, synthetic construct
  source 1..120: mol_type = other DNA
ttggcatctaatttttttccttgttgatttaaataactgcaaagagtataacaaatcggcttggtgcaatggctcacacctgtaatcccagtactttgggaggccgaggcaggtggataa

SEQ ID NO: 86064 - DNA, 120 bp, synthetic construct
  source 1..120: mol_type = other DNA
gctccatctcaaaaaaacaaacaaaacaaaaacaacaaaaaaaaacaaaaaactgtctggctgggtgcagtggctcacgcctgtaatcctagcactttgggaggctgaggtgagtggatc

SEQ ID NO: 86065 - DNA, 120 bp, synthetic construct
  source 1..120: mol_type = other DNA
tgcacccagcccgctctgtcttaaatatgagtgcccagttaaggaacaccagatatttgaggaagacttcagacatgagcaaaaacccaaaattaaaagtaaaaacgacacagcattgtg

SEQ ID NO: 86066 - DNA, 120 bp, synthetic construct
  source 1..120: mol_type = other DNA
ttttttttttatgtatttattccagacctttctgtcacacagcacttgtataatcagactgaaaatggggatgagggtgtaaattgtattgaaaaagagatcatggccgggcgcagtggc

SEQ ID NO: 86067 - DNA, 120 bp, synthetic construct
  source 1..120: mol_type = other DNA
tggccaacatggtgaaaccctgtctctactaaaaacacgaaaattagtcgggtgtggtcatgggtgcctgtaatcccagctatgcaggaggctgaggcaggagaatcgcttgagcctggg

SEQ ID NO: 86068 - DNA, 120 bp, synthetic construct
  source 1..120: mol_type = other DNA
gaggctaaggcaggagaattgcttgaacttcggagattttgcagtgagccaagattgggccacttgcactccagcctgggtgacaaagcaagacttcctctcaaaaaaaagaaatccatg

SEQ ID NO: 86069 - DNA, 120 bp, synthetic construct
  source 1..120: mol_type = other DNA
caatctctgcatctcaggttcaaatgattctctgcctcagcctcccaagtagctgggatttactggcatttgccaccatgcctggctagtttttgaatttttttagtagagacagtgttt

SEQ ID NO: 86070 - DNA, 120 bp, synthetic construct
  source 1..120: mol_type = other DNA
tctcgaactcctgacctcatgatccttctgacttggcctcccaaagtgctgagattacaggcttgagccaccacgcccagcctctttttttttttttttttttaaatttaatttaatgga

SEQ ID NO: 86071 - DNA, 120 bp, synthetic construct
  source 1..120: mol_type = other DNA
gatttctgtatttttagtagagacagggttttgccatgtttttttgtttgttttgagacaggatctttctctgttgcccaggctagagtgcagtggcatgaacatggatggttcactgca

SEQ ID NO: 86072 - DNA, 120 bp, synthetic construct
  source 1..120: mol_type = other DNA
tgcacagcaacatattcaagcttatgtacatggcatctgaggtcggggcatggaagaatactgaggcactgtgtgtatgttatttgtgcgtgagaatgaaattccttgaccctgaaaaca

SEQ ID NO: 86073 - DNA, 120 bp, synthetic construct
  source 1..120: mol_type = other DNA
atctgtgcaggaccccactgaaaatcagactgtcccactcgcctcgcagtcactcccagagctctgggatctctggcccaagactctctgactgactccttcccagatcttctcagctta

SEQ ID NO: 86074 - DNA, 120 bp, synthetic construct
  source 1..120: mol_type = other DNA
tctagataaacctagctgaccccatagatcctaaatcctttctcctctcccctttccattccttaaaacacagctcccacactagctctccatgactcatcccgacccttttcattacac

SEQ ID NO: 86075 - DNA, 120 bp, synthetic construct
  source 1..120: mol_type = other DNA
aatgcttttgctgataaggtagctaaagaagcagctagcattccaaattctgtccctcacggccaatttttctcattctcatgggtcactcccacctactctcctgctgaaacttctacc

SEQ ID NO: 86076 - DNA, 120 bp, synthetic construct
  source 1..120: mol_type = other DNA
atctcctggtgctatccccagaccgccactcttaactccctcttaaagtaaataaataatatttgctggcagggcacactccaatactttcaccctgatgaagtcctattctttactttt

SEQ ID NO: 86077 - DNA, 120 bp, synthetic construct
  source 1..120: mol_type = other DNA
cgccctagctggatccctaggagtctgggtacaagacacctctttcagcactccttctcatctttttactttgcatttccggttttgctccgcacaaggtctcttcttcctctgtggatc

SEQ ID NO: 86078 - DNA, 120 bp, synthetic construct
  source 1..120: mol_type = other DNA
agctaggattacaggcacccgccatcatgtccggctaatttttgtttttttttttttttggagagatggggtttcaccatgtcagctaggctggtcttgaactcctgaccttaggtgatc

SEQ ID NO: 86079 - DNA, 120 bp, synthetic construct
  source 1..120: mol_type = other DNA
ctgcagcaatttgattttgggctttaaattgatctggtattccccatgggactcttaattgtgtctaaatagacgtgagagtcgaaagacccataaagggcttctcttgctttatgatac

SEQ ID NO: 86080 - DNA, 120 bp, synthetic construct
  source 1..120: mol_type = other DNA
attgggggtcaagaatcctggttgacattgggatctttatcgaaatccccccggattcagtggtcctaatttactaatgcccagtgtgaggagagtcaggagggacagaggtacttttca

SEQ ID NO: 86081 - DNA, 120 bp, synthetic construct
  source 1..120: mol_type = other DNA
ctgcccgccttggcctcccaaagtgctgggattacaagcgtgagccaccgcgcccggcctattaatgttaaacttagttttaataacactttgtagacatatttatccaatttttaatgt

SEQ ID NO: 86082 - DNA, 120 bp, synthetic construct
  source 1..120: mol_type = other DNA
acaattaacattttaaaacttgcttaaaccttcaaaacaaattttttttttcttttttgagatggagtcccactctgtcacccaggctggagtgcaatggtgcgatcttggctcactgca

SEQ ID NO: 86083 - DNA, 120 bp, synthetic construct
  source 1..120: mol_type = other DNA
aatagggcggggttcacctcctcaagagagagaaccagagaccacccccagaggggaatgtaatcccagacaagcccccaaattgttatatataaagtttcggtgccgcaaaaggaatat

SEQ ID NO: 86084 - DNA, 120 bp, synthetic construct
  source 1..120: mol_type = other DNA
gctagctaggctgaggtggacaagctctgccagctgctgtcatcttcagaagatagacgcagcagtaaggaatatttgttttgcttttttataaaatgtttaaaagcactgtggctaaga

SEQ ID NO: 86085 - DNA, 120 bp, synthetic construct
  source 1..120: mol_type = other DNA
gttgacacagcacatgtttcagagagcacagggttgagggtaaggttatagattaacagcatcccaaggcagaagaatttttcttagtatagaacaaaatggtgtctcctatgtctactt

SEQ ID NO: 86086 - DNA, 120 bp, synthetic construct
  source 1..120: mol_type = other DNA
tgggtcaccaaatgcctctcttccctccctattgccactgacttagatcctggagatgtaaggttttaaaaacagcagcctattatcttttatttttggtaatccttgtaacctggttcc

SEQ ID NO: 86087 - DNA, 120 bp, synthetic construct
  source 1..120: mol_type = other DNA
gggaacccttgtcttttgaagtggcaattagagctaggaagccaaagataagatatgaaaagaataaaagagaagcctaccacttctcatcttggagtttcaacaagacgaaggcaggga

SEQ ID NO: 86088 - DNA, 120 bp, synthetic construct
  source 1..120: mol_type = other DNA
gatggatgtacacttaaataataaggaggaagcaaaggattgggaataacagtccaaaccaccacagggccctacctacccccaagaagtaatatcctcagattgatctgggaaatccaa

SEQ ID NO: 86089 - DNA, 120 bp, synthetic construct
  source 1..120: mol_type = other DNA
tgtacttgtagtttattcaaaggataaagtggtaaaatgccctcatagtgaaaaagtgaaaggtctgtgcatggcagtaaaaaagtgccaatgtgaccttggtctggccggtagctggtc

SEQ ID NO: 86090 - DNA, 120 bp, synthetic construct
  source 1..120: mol_type = other DNA
gcctgggcgacagagtgagactccgtctcaaaaaaaaaaacaaaacaaaaacaaaaacaaaacaaaacaaaaaaactggaaaatctagtcctgcccaagctcctctctctgtctttgagg

SEQ ID NO: 86091 - DNA, 120 bp, synthetic construct
  source 1..120: mol_type = other DNA
gtgccactgcactccagcctgggcaacagagcaagactccgtctcaaaaacataaaaaaaaacaaagaaaagaaaactaaaaacaaacaagcaaagaaaaaaaaatgcctttcaaaaaga

SEQ ID NO: 86092 - DNA, 120 bp, synthetic construct
  source 1..120: mol_type = other DNA
tgtttttgaggttcctcaccgttgtagcatataatgtatcactaccacattcctttttttttttctttccttgagacagggtcttaccattgcccaggctggagtgtagtggtgtgatca

SEQ ID NO: 86093 - DNA, 120 bp, synthetic construct
  source 1..120: mol_type = other DNA
cttacttgctgagtcccccatgagctggggtactgcactggggccagcgactagttagacaggaggcagcagcttctcaagaaattccttcacagctgccatctcctgaggacaggagct

SEQ ID NO: 86094 - DNA, 120 bp, synthetic construct
  source 1..120: mol_type = other DNA
actgcaacctcaacctcccaggctcaagtgatcctcccatctcaacctccctagtagctggcattcctttttatggctgaataatactccattgcctgtacagatcacaatttatttatc

SEQ ID NO: 86095 - DNA, 120 bp, synthetic construct
  source 1..120: mol_type = other DNA
cagacactttaaagggcattagggtcatcctagagatgtggccttgaactgttagaaactatgttagtgttcatgaaagtctttatcaagtcggacgcagtagctcatgcctataatccc

SEQ ID NO: 86096 - DNA, 120 bp, synthetic construct
  source 1..120: mol_type = other DNA
atagaaaatgcaaattaatactgacattttgggcttcaaaaaaaagcaaattaaaataacgacaagggctgggttcagtggctcacgcctgtaatcccagcgctttgggaggctgaggag

SEQ ID NO: 86097 - DNA, 120 bp, synthetic construct
  source 1..120: mol_type = other DNA
aaataattaaaattacgtctatgtttcacattttaaaaatttaaatttagttccttggccaggcacggtggctcacgcctgtaatcccaccactttgccgaggcgggcggatcaggaggt

SEQ ID NO: 86098 - DNA, 120 bp, synthetic construct
  source 1..120: mol_type = other DNA
agccgagatcgcgccactgcacttcagcctgggtgacagagcgaaactccgtctcaagaaaaagacaaaccaaaccaaaccaaaccaatatattgtattcttgaaaaatgttaagagatt

SEQ ID NO: 86099 - DNA, 120 bp, synthetic construct
  source 1..120: mol_type = other DNA
actttgggaggccgaggcaggtggatcatgaggtcaggagattgagaccaaaaaaaaaaaatttttttgagacagagtactctgtcacccaggctggactgcagtggtgtgatcttggct

SEQ ID NO: 86100 - DNA, 120 bp, synthetic construct
  source 1..120: mol_type = other DNA
cctgcataattaagtgataaacgtgtttccctgagttctgttagcaatcctagcaaattatgaagccaaggagggggttgtaggaaccctgatttatagcaggtttgtcagaagcacaga

SEQ ID NO: 86101 - DNA, 120 bp, synthetic construct
  source 1..120: mol_type = other DNA
gcaacatagtgagacaccccccaactccacccccataaaaaaaaaaagaaaaaaagatgtaatcccagcactttgggaggctgaggcaggcggatcacttgaggtcaagagttggagacc

SEQ ID NO: 86102 - DNA, 120 bp, synthetic construct
  source 1..120: mol_type = other DNA
tgagttattctctgaagttcctttatctgcttcaagtccagacataccacaaagaataattgttttctcttcccctccctgtaagatcaggaatggaatcacacctgagcaggtcctttc

SEQ ID NO: 86103 - DNA, 120 bp, synthetic construct
  source 1..120: mol_type = other DNA
gagaagggagaaaattgttctaagctttcaatgtgaaggcctggcacttttaaagaataacagcttctgtggccagacttttagtatcagtatggactttccctggagaagtccagccag

SEQ ID NO: 86104 - DNA, 120 bp, synthetic construct
  source 1..120: mol_type = other DNA
agggagggtcagaatcttgtagccttcacctgcatgactcctaaaccgtaatttctttctttctgttttgttttcttttttttcttgagacagagtttcgctcttgttgtccaggctgga

SEQ ID NO: 86105 - DNA, 120 bp, synthetic construct
  source 1..120: mol_type = other DNA
gccatcgcaaatcagcctgggcaacaagagggaaacacacaactctgtctcaaaaaaaaaaaaaggtttctttgaagaattgttgccagaaagtggtcatgatccaaaccccaagagaga

SEQ ID NO: 86106 - DNA, 120 bp, synthetic construct
  source 1..120: mol_type = other DNA
gcgtagctgggactacaggcacgcaccaccacatcaggctcagaagatcacttttaattagcaaacggctcactagcaagatttgaaaaacttcaaaaagctaagtataactctcaaatc

SEQ ID NO: 86107 - DNA, 120 bp, synthetic construct
  source 1..120: mol_type = other DNA
tggatcacgagatcaagagttcgagaccagcctgaccaacttggcaaaaccccatcacaaaaaacaaacaaacaaaaaaactctcggcaaaacagagcaaggctccatctcaaaaaaaaa

SEQ ID NO: 86108 - DNA, 120 bp, synthetic construct
  source 1..120: mol_type = other DNA
ccagcctgttatagactttaaaataaatttgtttatgtatttgcttataccctgcacaccctaagtgcagtgtagcctcaacatgtccaagcagagcccttgaccttctccacaaaactc

SEQ ID NO: 86109 - DNA, 120 bp, synthetic construct
  source 1..120: mol_type = other DNA
actataaactctctaacaatagggagttaggagctatcagacccctcttaactatgatttacaacccagatcactacaactccgagtagacgaaggacaggccttccaaacattctgttt

SEQ ID NO: 86110 - DNA, 120 bp, synthetic construct
  source 1..120: mol_type = other DNA
gccatcactaggacccacacatacagctcaagcttaagggtcaaagtggaccagccggtagcccaatcatgtgcgatccataaaagaaatacctctctgctagcagaattgatcctacaa

SEQ ID NO: 86111 - DNA, 120 bp, synthetic construct
  source 1..120: mol_type = other DNA
tggccagagcactgtccattgccatacctagtctcaagagaggctgggagttgagatcttttttggtggccatgtgtcttgcaaaaaaaaaaatctagggtttattaacacgaaaagatt

SEQ ID NO: 86112 - DNA, 120 bp, synthetic construct
  source 1..120: mol_type = other DNA
gctccagatcgttggcacacagtaagtgtttctttttttaaaattattattattatttttatcgagaaggagtctcgctgtgttagcccaggctggagttcagtggtgcgatcttggctc

SEQ ID NO: 86113 - DNA, 120 bp, synthetic construct
  source 1..120: mol_type = other DNA
caaagtcctgggactacgggcatgagctactgtgcctggtctagactcccccttttttttttttttaatgagatggagtttcactcttgttgcccaggctggagtccaatggcgcaatct

SEQ ID NO: 86114 - DNA, 120 bp, synthetic construct
  source 1..120: mol_type = other DNA
atggcaaaaccctgtctctacaaaaaatacaaaatttagctgggcatggggtgcaggcttgcagtcccagctatttgcggggggaggggagctgaagcaggagaatagcttgaacttgca

SEQ ID NO: 86115 - DNA, 120 bp, synthetic construct
  source 1..120: mol_type = other DNA
cctataacaaataatcaaagccttaagtttcaggttacagttttcagagttagtagtagccaattactgccaggcatagtggctcaaacctgtaatcccagcactttgggaggccaaggt

SEQ ID NO: 86116 - DNA, 120 bp, synthetic construct
  source 1..120: mol_type = other DNA
ccagcctgggggacagtgcaagactccgtctccttggccaggcacagtggctcatgcctgtcatcccagcactttgggaggctgaggcgggtggatcaggaggtcaggagatcgagacca

SEQ ID NO: 86117 - DNA, 120 bp, synthetic construct
  source 1..120: mol_type = other DNA
gacctcaagtggtccttctgccttggccttccaaagtgctgggattataggcatgatccaccatgcctggcaatttttttttaagagcacaaatccacgtttatttattgacttttcttt

SEQ ID NO: 86118 - DNA, 120 bp, synthetic construct
  source 1..120: mol_type = other DNA
ggcctcccaaagtgctaggattacaggtatgagccaacgcgcccggccaccaaatagtgtaatttttacagttacactttgtaactagtgttgctgaagacggaaatgcaattgattttg

SEQ ID NO: 86119 - DNA, 120 bp, synthetic construct
  source 1..120: mol_type = other DNA
gttgctcttgtcaccgagactgttagaggcaacgtgagttaacagaaatagcttggattttgaagctaatggaatctagatccattcctaaccagcagtgtgaccttattgtgtaatctt

SEQ ID NO: 86120 - DNA, 120 bp, synthetic construct
  source 1..120: mol_type = other DNA
cataagtggcaccggaagtggaattaatccgcctacctctcctgcgcctgcgaaacagaaaagacaaggcgcctgtcgggcggggtgtggcttcgggtggcggagaacgctgcgattggc

SEQ ID NO: 86121 - DNA, 120 bp, synthetic construct
  source 1..120: mol_type = other DNA
ggtctgcctgaatcctttgtttactagtatttcacgttcaggtttccctgaagttaggattcagccttaagagagattctttctctcgtgacaaccagagagcagagtagtattatgtga

SEQ ID NO: 86122 - DNA, 120 bp, synthetic construct
  source 1..120: mol_type = other DNA
ctgattttttgtatttttaatagagacagggttttgccatgttgcccaggctggtctggaactaactcctgggctcaagcaattcgcctgcctcggcctccgagagtgctgggattacag

SEQ ID NO: 86123 - DNA, 120 bp, synthetic construct
  source 1..120: mol_type = other DNA
gaggcaccactcccagccttaaatagcgatgttgacgatgcagttcagtataggtgcaggatcgaggtctgagctggacatataaatttggaaactgtcagcatatcaatgatatttaaa

SEQ ID NO: 86124 - DNA, 120 bp, synthetic construct
  source 1..120: mol_type = other DNA
cacattttctgaaccggcataaattccaaggaggtaggtctgtagcagatccactacggtagtgtagagaggaggaagggcacaggttatttttaaaaattagtgtttgactttggaata

SEQ ID NO: 86125 - DNA, 120 bp, synthetic construct
  source 1..120: mol_type = other DNA
catctggttcgctaaggtggatgtctgcctagcttagccctcaagcttctagaatagcccctttcaactaggttccatgagaattaatttcttttttttttttttgagaccggagtctcg

SEQ ID NO: 86126 - DNA, 120 bp, synthetic construct
  source 1..120: mol_type = other DNA
caagcagtcttcaacactcacatatcttccactctctcccttgtttatgattctcagctccagccaaaagggccagttggtttcttagccatgctatgtacatatttgaatttttgcctt

SEQ ID NO: 86127 - DNA, 120 bp, synthetic construct
  source 1..120: mol_type = other DNA
gtgtgaggcaccgcacccagcctattttgaataggtaataacatttcatttggttcaaaattccaaaggcacaaaggttgttgtatagtgaagtttgcttcctatttctgtcctccagcc

SEQ ID NO: 86128 - DNA, 120 bp, synthetic construct
  source 1..120: mol_type = other DNA
ctctgggtgagttagtgagtgagtggtgagtgaatgtgaaggcctagggccttactgtacactgctgtagactttagaaacatggtacagttaggctacatcaaatttataaaaaatagt

SEQ ID NO: 86129 - DNA, 120 bp, synthetic construct
  source 1..120: mol_type = other DNA
tcccgccattttcctgcctcagccttccgcgtagctgggactacaggcgccctccaccacacttggctaattttgtttttttgtatttttaatagagacagggtttcaccatgttagcca

SEQ ID NO: 86130 - DNA, 120 bp, synthetic construct
  source 1..120: mol_type = other DNA
agatcttcaggggcagtaacacacatggagatgtgacttcctgtgataacaatgctttcttctggattgcctttttttttttttttgagacggagtctcgcactgtcgcccaggctagag

SEQ ID NO: 86131 - DNA, 120 bp, synthetic construct
  source 1..120: mol_type = other DNA
ccatctcaaaaaaaaaacaaaatggaggccaaggcaggcagatcaccagaggtcaggagtttgaggccagcctaatcaacatggtgaaaccccgtctttactaaaaatacaaaattagtt

SEQ ID NO: 86132 - DNA, 120 bp, synthetic construct
  source 1..120: mol_type = other DNA
aaatccatttggtctctaaggggaaggagatgtagcatcaggtgtggatcccataaaggctagaagggaggagggatagagagcctagacttcactgacctttgtcctttctgtgttcat

SEQ ID NO: 86133 - DNA, 120 bp, synthetic construct
  source 1..120: mol_type = other DNA
tcaccctagatatcatcttccttgtgctcctctttgtgcttggacatacccatagcactccctgtcttagtaccatgattccttattttctcatctttctttgtttaccagactttgagg

SEQ ID NO: 86134 - DNA, 120 bp, synthetic construct
  source 1..120: mol_type = other DNA
ccacgagatggaggtagagggagaaaggagcaagagagaattgaaggatgaagtgcaagttatcaggctgggttaccacatccggttttggcctgtgggctgtcggtagatctgccttaa

SEQ ID NO: 86135 - DNA, 120 bp, synthetic construct
  source 1..120: mol_type = other DNA
cctattcctaaacatctgtccccacctcaatcatctaggagtcccacgtgccttaccggaacagcaaactgacctacctgctgcagaactctctgggtggtagtgctaagatgtgagtga

SEQ ID NO: 86136 - DNA, 120 bp, synthetic construct
  source 1..120: mol_type = other DNA
catctaactagggaaatagtccttgaaatgggattactggatcaaagacttagaggtttttcagactattccaaatagtgtgaattcagactccaaacctcatgagggtcagccagtggc

SEQ ID NO: 86137 - DNA, 120 bp, synthetic construct
  source 1..120: mol_type = other DNA
gtgttgtcaacctgacccatccatttacaagctccttattgactttttcacctagtgattttatccagcagtgaccatacctggatctttatttcattaaggggtttctaaatggggatt

SEQ ID NO: 86138 - DNA, 120 bp, synthetic construct
  source 1..120: mol_type = other DNA
tccccagacttcaactgatccattttctaaggagtcctagttcctaaatgggtgttattactattttatctcggtttaagtgttttacagtgggagaggttggaggtctctagtacaggg

SEQ ID NO: 86139 - DNA, 120 bp, synthetic construct
  source 1..120: mol_type = other DNA
ggaagaacgttcctttggtgggtgtcggcaaatggggaccggaccccagagtccagaggcggggctagcgcgcgctcccaaactgttggctctttcctcccgtcccgccctttccctgcc

SEQ ID NO: 86140 - DNA, 120 bp, synthetic construct
  source 1..120: mol_type = other DNA
gccgtcctggggagtagagaccgggactgggacacgcccccctcccggggcactcagagaagttgtctaacccgggggcagggagccccgaatttgagggtgacctgacataacctggca

SEQ ID NO: 86141 - DNA, 120 bp, synthetic construct
  source 1..120: mol_type = other DNA
agagcaaaactccatctcaggaaaaaaaaaaaaaaaagaaaaagaaaatggggaaggtttctcagcattcataaccttctcctccccatttcttttctggctaggcccccccaggatgca

SEQ ID NO: 86142 - DNA, 120 bp, synthetic construct
  source 1..120: mol_type = other DNA
gtataacctttgcaggcagaagatggtttaaatgcatccttttctaaccatatgacctcggacaagtcccttaacctctaggagcctcagttccctgacttgtaaaataaggataatgca

SEQ ID NO: 86143 - DNA, 120 bp, synthetic construct
  source 1..120: mol_type = other DNA
agtgtaactccacaccacagtatttcactctatatgccccaacctcccacctcaggactcccctggctcttaaaatgcctctgtggtcttgaaaactttgtttttccagggtggatgtgg

SEQ ID NO: 86144 - DNA, 120 bp, synthetic construct
  source 1..120: mol_type = other DNA
ccgatggagcaaatggtggggtgtgggaaggagtcaaggattatctctcagtcctttgccccctcttctaggcctcagtgtctccaccatcccccagccctaaccagagttaccagggca

SEQ ID NO: 86145 - DNA, 120 bp, synthetic construct
  source 1..120: mol_type = other DNA
agtggggagtggggaagaggccctcttctctaccctccttcatgattcctgacccctcccatccttcccatttcctttgatgttattttgttacagctttttaaatattttttaaaatta

SEQ ID NO: 86146 - DNA, 120 bp, synthetic construct
  source 1..120: mol_type = other DNA
tgaaaggtcagagggggagagttgtggggagcaaagaatttcccccaggaaagaggttcccagtcagctcctacagttaggttaaccccccaactcctatgactcacatggatgtaatct

SEQ ID NO: 86147 - DNA, 120 bp, synthetic construct
  source 1..120: mol_type = other DNA
ttgcccacctcctgatgaaggaggagccatgggagacttgaccaatcgactaccgcatctgcagacgtgcgcggaaatggcacgcccgtttccgtgtgaacccgaaactgccacttgctg

SEQ ID NO: 86148 - DNA, 120 bp, synthetic construct
  source 1..120: mol_type = other DNA
ctgtctttgagtttggagtttgtctctgagacagatttcggaggggtctttcagtatttgtgtggagatctttcttaggattgagtttccttttatgcttctggtttggggggtttctat

SEQ ID NO: 86149 - DNA, 120 bp, synthetic construct
  source 1..120: mol_type = other DNA
cctcctctctcctcctctctgcttctctctgctcctctctcctcctctctcctcctcctcctcctccacctcctcctccttctccccctctttctccccctctttctctcttctttctcc

SEQ ID NO: 86150 - DNA, 120 bp, synthetic construct
  source 1..120: mol_type = other DNA
gttccttatatgagtcccccttctgtccttcccctatatcagtcccctctctggtgttcattgcctctctcttatctcttttctatgtggtcgctcccttatatctctatcacttcttta

SEQ ID NO: 86151 - DNA, 120 bp, synthetic construct
  source 1..120: mol_type = other DNA
atagacagaaaagggctgaatttgcaaaactctgctactcagtgcattctgttggaatgaagctcaaagaccagttctcctgcagtatactcatggttatcccataaaggtgacagagtt

SEQ ID NO: 86152 - DNA, 120 bp, synthetic construct
  source 1..120: mol_type = other DNA
tctctgtttttctcctgccaattttgcggcacctctaccttattttcctgaagtagatggagagctccttcatctttctctgcccccaaacgtgtaccttctctgtcatataattcccat

SEQ ID NO: 86153 - DNA, 120 bp, synthetic construct
  source 1..120: mol_type = other DNA
agagtgattgagatcaaggtttagagagacactgagagggcttctgcaagggagtggttggacatcaggaaggaatataagggaggggaactgggagtatgtggagttatctaaaggagt

SEQ ID NO: 86154 - DNA, 120 bp, synthetic construct
  source 1..120: mol_type = other DNA
tggaggtagggatggaggtggacagggggagctgggtgtgaagcttagggaaaggtgatggctgaggggaagaagggaactgagagatgctgggtcgggtgatggaaggagatgaaaggt

SEQ ID NO: 86155 - DNA, 120 bp, synthetic construct
  source 1..120: mol_type = other DNA
ggtcctcgctcggcttcgctccctttctcctctccagcagtgaagtttgactattttcctggtgcttgtaaaaatagtctccttagatctttagcttccagtccgtgtgttcctgcccct

SEQ ID NO: 86156 - DNA, 120 bp, synthetic construct
  source 1..120: mol_type = other DNA
gtatacagagaatgtgtgtgatgtctgtcacatctgtgtgtatatgtatatgtgtgtatgtcatgttcatgtctggggaagatgtgtgtgtttgtgtgcatgtgtgtacacctgcgtttc

SEQ ID NO: 86157 - DNA, 120 bp, synthetic construct
  source 1..120: mol_type = other DNA
catgctcgtgtctcctgtgtgtcggtgccatgtgcacacgggggcccagttcctcgtgcacacatgtgcagccatccttgtgcaagtgtgtcctgtcttatcttgcctctgcctgtttcc

SEQ ID NO: 86158 - DNA, 120 bp, synthetic construct
  source 1..120: mol_type = other DNA
tcacagtgaggcctgtcatagcagggactgtcattagaggttcatatccccagcacagagctctgtctcccatttctctgctctgtgtccaaccctgttcttcgcccttctctggcaacc

SEQ ID NO: 86159 - DNA, 120 bp, synthetic construct
  source 1..120: mol_type = other DNA
tgttactagggaagagatatcctgaaccattggatgcattgcttagtgtgtaccagaaggataattaacacatttgctcctggtttttctttactctggtggcaatctcggatgcctgtg

SEQ ID NO: 86160 - DNA, 120 bp, synthetic construct
  source 1..120: mol_type = other DNA
aaattcccttgcagccgagcctcagcttcctttttcagcgcttgccatccctctaggctcttggcagactgagctgcatccgcattcacctcccctcctcctcctttccctatccttact

SEQ ID NO: 86161 - DNA, 120 bp, synthetic construct
  source 1..120: mol_type = other DNA
ccaactggggccctaggagtctgagaaagagggcaggagggggagagagggagtgagagtgagaaaaagagtgtgtgtctgtgtgtgtctccccacctctttggtttcccccttcttggc

SEQ ID NO: 86162 - DNA, 120 bp, synthetic construct
  source 1..120: mol_type = other DNA
ctgaatgaatggatgatggctagggctcaaggacctcatcagtgagggaagagacagtatagagcatggcagagaaggggaggctgggacaggtgtgcagggtgacagaatgggaagcaa

SEQ ID NO: 86163 - DNA, 120 bp, synthetic construct
  source 1..120: mol_type = other DNA
ccactttgttctctccttttttttttttcttttctgccatggtccatttctgggttgagatatttctagatgtccccagtcctcgcaatcccttaggtgtgagatggtgggagtttcttt

SEQ ID NO: 86164 - DNA, 120 bp, synthetic construct
  source 1..120: mol_type = other DNA
ccctctgtagccctttccctcaactccacactcctttctaggtaacaacttcatcaggaacaaaatgctttgcctgtcggtctgcggccgaaagagacaaatggattgagaatctgcagc

SEQ ID NO: 86165 - DNA, 120 bp, synthetic construct
  source 1..120: mol_type = other DNA
agacgaggtttcaccatgttggccaggctagtctcaaactcctgacctcaggttgtctgcctgcctcagcctcccaaagtgctaggattacaggcatgagccaccacatctggccaagct

SEQ ID NO: 86166 - DNA, 120 bp, synthetic construct
  source 1..120: mol_type = other DNA
gtttccaaataagatcacattcacaggttcagggtagacatgagttttggtgggatactattcaacccagtacaccgtctcaccttatgattgctgtctgtatcccactttcttactgtc

SEQ ID NO: 86167 - DNA, 120 bp, synthetic construct
  source 1..120: mol_type = other DNA
acctcatattccgcgagaacacgcttgccactaaagccatagaagagtatatgagactgattggtcagaaatacctcaaggatgccattggtatggcccacactcaggccctcttcttcc

SEQ ID NO: 86168 - DNA, 120 bp, synthetic construct
  source 1..120: mol_type = other DNA
agagatgtctgggcaggaagattagctttagaaactggaaggcctcaaggagtctgaggtcattggtaggccttgggatgccattaaaggtgtcagaaatattgtgatttagaagattaa

SEQ ID NO: 86169 - DNA, 120 bp, synthetic construct
  source 1..120: mol_type = other DNA
atttccctggaatccagaagagttggggggtccgagctccctgtacctcaagtgaccctccatctctctcccatctctgtctctccctggtgtctgtttttcttctcctcctctccttgt

SEQ ID NO: 86170 - DNA, 120 bp, synthetic construct
  source 1..120: mol_type = other DNA
ggtcagcagatcccctctttgccctatccccagatggctccagaggttcctggagcctgagaaactaccctttgaagattttttttctccccttgtttctcgaggtgtcaccactactat

SEQ ID NO: 86171 - DNA, 120 bp, synthetic construct
  source 1..120: mol_type = other DNA
atttgctgctcattattttgatgatggccctgctttttcctctgcccgtgtcttcctccatgacaccatacccatcccaccattcccgcctctcctttcatttgtccacatctctctcct

SEQ ID NO: 86172 - DNA, 120 bp, synthetic construct
  source 1..120: mol_type = other DNA
tccatcacggcggctggcatgcgcctcagccagatgggtgtcaccacagacggtgtccctgcccagcaactgcgaatccccctctccttccagaaccctctcttccacatggctgctgat

SEQ ID NO: 86173 - DNA, 120 bp, synthetic construct
  source 1..120: mol_type = other DNA
tgaatcagaacaacaggagaaattctctggcattcaactcacatctctggcattcagaggtgataaaggctacagcagggcaataggactgggactgtcgtctcctttggctgtgctgtt

SEQ ID NO: 86174 - DNA, 120 bp, synthetic construct
  source 1..120: mol_type = other DNA
ctcagatgggcttgaccagcaaatttaatgagaattaaaccctaatattagccccaaggcagccaccgtaggaagttaattcacatctctcctctgcatgtagaagggttggtgatatat

SEQ ID NO: 86175 - DNA, 120 bp, synthetic construct
  source 1..120: mol_type = other DNA
caattgccttttcttcctatgtctccagcatgtgttctggggcctggcttagggctgaagagtcaccctatttttaatttctgagcacagttactcaaggtgtgtttgtgagtgtaggtt

SEQ ID NO: 86176 - DNA, 120 bp, synthetic construct
  source 1..120: mol_type = other DNA
tctcttctgatagagtagcttcggaagcccttggaaaatgtacctgttcctgtccaaccatcactgcatttgcatttaccctaggccagagctccccactagttattctcaacttaacct

SEQ ID NO: 86177 - DNA, 120 bp, synthetic construct
  source 1..120: mol_type = other DNA
gtggaaattacaatgtcatttatcttctccgtgtcccatccccatccatcccactgtctttcgtgcactcactacaccagccacctagccccatcaccatctgtctctcatagtctgctg

SEQ ID NO: 86178 - DNA, 120 bp, synthetic construct
  source 1..120: mol_type = other DNA
aagagagcatttgctgctgcttcccagaactgtccaacaataccttagcaacaccaagagttgggccctagatgggcccagcacattcacaggtcacacccacttccctgcaaaacccac

SEQ ID NO: 86179 - DNA, 120 bp, synthetic construct
  source 1..120: mol_type = other DNA
cctacctaaaaagccagtaaatgagaacctgtcagctatagccatcatttctgagatgcgattttctttgggattgagctgcagtgggcagtggctccttacactgtaattttaattctc

SEQ ID NO: 86180 - DNA, 120 bp, synthetic construct
  source 1..120: mol_type = other DNA
aggactgaaaagaagatgggagtggaaaagaataaagccagtttctgcttcccagggatgcagagattggggcatgctgtgtctgcagaagctcctagtcatttccgccataattgtgag

SEQ ID NO: 86181 - DNA, 120 bp, synthetic construct
  source 1..120: mol_type = other DNA
actgctaggggactggcatccaggcccccttgaagcgtctcaataagtccgcgctctcctttttggtgtcttgcaggagaggcagcttccccccttgggtccaacaaacccgcgtgtgac

SEQ ID NO: 86182 - DNA, 120 bp, synthetic construct
  source 1..120: mol_type = other DNA
tggaattgaggttagggtgaggggtcagggtttaggagggtgtgtatgttgggaggacaggctagttgatctgtcctactctgacacacagtcccctctgccccttccttctctcttctt

SEQ ID NO: 86183 - DNA, 120 bp, synthetic construct
  source 1..120: mol_type = other DNA
ctttttttctggagtgtgtggtgaaacagaaaaaaacatgtttaataaacggagattgttcttttatcgctgtgccgactttcttaggcagggctctccagacctgtacggtggtaagat

SEQ ID NO: 86184 - DNA, 120 bp, synthetic construct
  source 1..120: mol_type = other DNA
gcccgttgcgaggacaccctgggcctgtgccctcctactagcaccgccctcctcgtctgcagtagccaatcaacacgaggcttgtaggctgccgttcctcgattggctacggctctagct

SEQ ID NO: 86185 - DNA, 120 bp, synthetic construct
  source 1..120: mol_type = other DNA
ctcatttattcagggcgtctccgcctgccactggatgctcttcctgctcatctccttgtggccagtggccttcaaatgtggcaggtagtagatcagtgctcagaaattcttagagaatta

SEQ ID NO: 86186 - DNA, 120 bp, synthetic construct
  source 1..120: mol_type = other DNA
tgctgaggctatacactagcttctagaacaagataaccactgctgctgatggatacttttccctcactgccatggcacaccagtcatggatcttgtaatcatgccaagagaatagataca

SEQ ID NO: 86187 - DNA, 120 bp, synthetic construct
  source 1..120: mol_type = other DNA
ggacttgcagttacttaaaattttttaataaactgtgccctgaaacctaaactgacagtggactggattgagtaatttgtgtgggagagaatgtgagaatggagctgcagagccttgggt

SEQ ID NO: 86188 - DNA, 120 bp, synthetic construct
  source 1..120: mol_type = other DNA
ctgtgttctctgtgtttggttggttgttctacaaacattcagtgcaaagcactatgctagaccctgattaatacactgcccttaaagggttcacaggtattaccaaagatagacaagcca

SEQ ID NO: 86189 - DNA, 120 bp, synthetic construct
  source 1..120: mol_type = other DNA
aagataaaatttcccagggaaagaactctaagcctcatgaccaccctctggtcagagcaccttgatcatatagtccatcaagatggcaacaaagtgggcatggaatcctcaaaagcaatt

SEQ ID NO: 86190 - DNA, 120 bp, synthetic construct
  source 1..120: mol_type = other DNA
atgattgccattctaactggtgtgagatggtatctcattgtggttttgatttgcatttctctgatggccagtgatggtgagcattttttcatgtgttttttggctgcataaatgtcttct

SEQ ID NO: 86191 - DNA, 120 bp, synthetic construct
  source 1..120: mol_type = other DNA
gaggcacatagtacttagtaaggattacatgttgtcattatcattacccatctcatacatgctacagttcttcagggccctttatgccctcttccaaatttacacactccggggtgattt

SEQ ID NO: 86192 - DNA, 120 bp, synthetic construct
  source 1..120: mol_type = other DNA
tgaccagagtaatctttctaaagcaaaaattaatgtttcaccactctccagcttaaacctttcattggcttcctcttgctctttcatgaggtccaagtgatctggtcccagttactggtc

SEQ ID NO: 86193 - DNA, 120 bp, synthetic construct
  source 1..120: mol_type = other DNA
acgtgagccactatgcctgggcagtgcctattctcataagcttacactccagtgctgtaaatgaaataaactaggtaaggaggagagtaacagaaaaggagggcatactgtatacattaa

SEQ ID NO: 86194 - DNA, 120 bp, synthetic construct
  source 1..120: mol_type = other DNA
ggtgggggttgcagtgagccacgcaccactgcactccagcctgggtgacagagtgtctcaaaaaaaaaaaaaaaaaaagttttgtagaaatcattataagctatccaagatgtatttatc

SEQ ID NO: 86195 - DNA, 120 bp, synthetic construct
  source 1..120: mol_type = other DNA
attcaaatctcaacttgaattgtatctcccagaattcccctgtattgtggtagggatctagggggtggtaattgaatcatggtggccagtctttcccgtgctattctcatgatagtgaat

SEQ ID NO: 86196 - DNA, 120 bp, synthetic construct
  source 1..120: mol_type = other DNA
gaaattcaagcctgctgcagaaatttgcataagtagcaaggagcctaatgttaatcccaagactgtggggaaactatctccaggccatgtcagacaccttcacagcagcccctcccatca

SEQ ID NO: 86197 - DNA, 120 bp, synthetic construct
  source 1..120: mol_type = other DNA
tttgaaatacgaggacatgagatttggagggaccaagggtagaatggtatggtttggccgtgtccccattcaaatctcaatttgaattatatttcccagaatttccacatgttgtgggag

SEQ ID NO: 86198 - DNA, 120 bp, synthetic construct
  source 1..120: mol_type = other DNA
gtagtaaaagtttcacaataagcacctttttaccttgtaattttagattaaattcatcaaggccaggggcagcagctcactcctgtaatcctaggattttgggaggccaaggcaggcaga

SEQ ID NO: 86199 - DNA, 120 bp, synthetic construct
  source 1..120: mol_type = other DNA
gtttaaccattacatgtgtttgaaggcatgttcagaaaattttctacctcagccctgagctcgagaaaatctcaacacctctttgccaccactatgtcaatgaactgctgtatggtagga

SEQ ID NO: 86200 - DNA, 120 bp, synthetic construct
  source 1..120: mol_type = other DNA
ttctgactgttgctttcttgtgaattgggaatattgcaatgactactcagtctgtaatgtcaatgtatatattctatttttttttgagacggagtctcgctctgtcgcctaggctggagt

SEQ ID NO: 86201 - DNA, 120 bp, synthetic construct
  source 1..120: mol_type = other DNA
tgggcaacatggcagaaacccatctctataaaaaatacaaaaattagccatgcatgctgatgcacaactatagtcccagctacttgggaggctgaagtgaaaggattacctgagcccagg

SEQ ID NO: 86202 - DNA, 120 bp, synthetic construct
  source 1..120: mol_type = other DNA
tagctgggattataggcatgcaccaccatgcccggccaatttttatatttttagtagagatggggtttctgcatgttggtcaggctggtttcgaactcccgacctcaggtgatccgacct

SEQ ID NO: 86203 - DNA, 120 bp, synthetic construct
  source 1..120: mol_type = other DNA
agcctaggatttcaaagccagactgggcaacatagtgagactccatcactaaaaaaaaaggcggggggtgggcttgtcttttgacggcattggctatttatagataataaaaaattcatg

SEQ ID NO: 86204 - DNA, 120 bp, synthetic construct
  source 1..120: mol_type = other DNA
ctgagtagctgggactacaggcatgtgccaccacacctagctaatacttgtatttttagtagagacagcgtttcaccatgttagccaggatggtctcaatctcttgacctcatgatccac

SEQ ID NO: 86205 - DNA, 120 bp, synthetic construct
  source 1..120: mol_type = other DNA
gaaaaatcaatattaactcattgtttttaaaaatatattttctgggccaggcatggtggctcacgtctgtaatcccagcattttgggaggccgaggtgggcagatcatgaggtcaggaaa

SEQ ID NO: 86206 - DNA, 120 bp, synthetic construct
  source 1..120: mol_type = other DNA
tgctctctaataccattccacattaaaacaagatgtggctcattgggaaactgttgatttcaggtctagtgcaggcacttttcaaggtgagcctgggactccttttcatgttaacacgca

SEQ ID NO: 86207 - DNA, 120 bp, synthetic construct
  source 1..120: mol_type = other DNA
ttgaggctgcagtgagccgagatcgccccattgcattccagcctgggtgacagagccagaacctgtctcaacaagaaaaaaaaaaagcatttattttgctctttcagtaaaaatttattt

SEQ ID NO: 86208 - DNA, 120 bp, synthetic construct
  source 1..120: mol_type = other DNA
atatggtgactgtatgacttcatcctttctaatatctcgaatcctagttcagacatccctcagaaattctaatccattcctaaaaacacgctggatagtgaattttcgatagtgggagtc

SEQ ID NO: 86209 - DNA, 120 bp, synthetic construct
  source 1..120: mol_type = other DNA
tggttcaagcaattctcctgtctcagcctccccagttgggagtagttgggattacaggtgcgcgccacctcggccagctgatttttgtgtctttagtagagacggggtttcactgtgttg

SEQ ID NO: 86210 - DNA, 120 bp, synthetic construct
  source 1..120: mol_type = other DNA
tataaggactccggttctattgcattagggtctgtctcatccttatgtcctcatttaacctgagtcacctttttaaaggttgtacctctaaaatcagtcacattgagggtgagggcttca

SEQ ID NO: 86211 - DNA, 120 bp, synthetic construct
  source 1..120: mol_type = other DNA
tcctgcctcagcctcctgagtagctgggattacaggcacgtgccaccatgcgtggctaatagcaattatttttaaaaataaattttattgtgtatatttcagatttactacatgatgttg

SEQ ID NO: 86212 - DNA, 120 bp, synthetic construct
  source 1..120: mol_type = other DNA
atgaaatcaccaccttgtaaaatatctgcactcccatgttcactccagcattattcacattaataattagtttgtggccaggcacagtggctcacacctgtaatctcaacactttgggag

SEQ ID NO: 86213 - DNA, 120 bp, synthetic construct
  source 1..120: mol_type = other DNA
ttaaatacattcagaatgctacacaaccatcaccactatctagttccagaaatttttcattactcaacagaaaccctgtactcatgaagcagtcgcccctcatttcccccatgcatccag

SEQ ID NO: 86214 - DNA, 120 bp, synthetic construct
  source 1..120: mol_type = other DNA
tagttgggattacaggcatgagccactgtgcccggctgagagttctttatataggctggatactagacccttatcagatgtttaatatgcaaatattttctccccttctattgccacttt

SEQ ID NO: 86215 - DNA, 120 bp, synthetic construct
  source 1..120: mol_type = other DNA
agcttcttggatgtgtagattcatgtcttttatcaaattttggggcattaattcttcaaatattcttttttttattgttattattatactttacgttttagggtacatatgcacaatgtg

SEQ ID NO: 86216 - DNA, 120 bp, synthetic construct
  source 1..120: mol_type = other DNA
tgtttttttcttgtaaatttgtttgagttcattgtagattctggatattagccctttgtcagatgagtaggttgcgaaaattttctcctattttgtaggttgcctgttcactctgatggt

SEQ ID NO: 86217 - DNA, 120 bp, synthetic construct; identical to SEQ ID NO: 10834
  source 1..120: mol_type = other DNA

SEQ ID NO: 86218 - DNA, 120 bp, synthetic construct; identical to SEQ ID NO: 10835
  source 1..120: mol_type = other DNA

SEQ ID NO: 86219 - DNA, 120 bp, synthetic construct
  source 1..120: mol_type = other DNA
actccagcctgggtaacagagtgaaaccgtgtttcagaaaatatacacacacacacacacacacacacacatatacacacacacacacatatatatacacacacacacatatacacacac

SEQ ID NO: 86220 - DNA, 120 bp, synthetic construct; identical to SEQ ID NO: 33581
  source 1..120: mol_type = other DNA

SEQ ID NO: 86221 - DNA, 120 bp, synthetic construct
  source 1..120: mol_type = other DNA
aacatggcataactcggtctctaccaaaaataaaaaaattagctgagtgtggggcgcacacctgtggtcctagctactcaggaggctgagatgggaggatcactggagctggggaagtcg

SEQ ID NO: 86222 - DNA, 120 bp, synthetic construct; identical to SEQ ID NO: 33582
  source 1..120: mol_type = other DNA

SEQ ID NO: 86223 - DNA, 120 bp, synthetic construct
  source 1..120: mol_type = other DNA
gtgccccctgaggatgcgggaggagcgggcatcaccaagtgtgtgcaggtgtgcgtgttggggcgagggaaggcaagggcgcgtgtctgtgcgcgcgtgtggaaagctagaggatggagc

SEQ ID NO: 86224 - DNA, 120 bp, synthetic construct
  source 1..120: mol_type = other DNA
aaaagaaaatgccctaacttcctgctaataataacctagttagcatcctttcagtcgttccttctccacttctgtcctccttcccgaaggatgttcccttgcaggattccccagacttcc

SEQ ID NO: 86225 - DNA, 120 bp, synthetic construct
  source 1..120: mol_type = other DNA
tggcagtcccaggctgggatttttcttttaataaaacatccgtaggttgctgtgctgacgacaaatgaccttgaaggaggtgacacagtggagcagggggatttttttttttttggtata

SEQ ID NO: 86226 - DNA, 120 bp, synthetic construct
  source 1..120: mol_type = other DNA
gcccacttgggtctgtttatctttgagagagattgaaaatatgtttttgtaaactctggatatgctgggacacttattttatgagagaaaaatcctatcataaaataagctgtcagcttg

SEQ ID NO: 86227 - DNA, 120 bp, synthetic construct
  source 1..120: mol_type = other DNA
gaaaagatggaatgagcagtggaaattcgcactttttgctcccttcataatgaagctacgaggagctttagatagatatgcactatggtattttcccaaggaactgatggaaagcccacc

SEQ ID NO: 86228 - DNA, 120 bp, synthetic construct
  source 1..120: mol_type = other DNA
tcacatggcctgaatcttggtcctggaagccaagattggaatccatcctttctagcctttttttttttttttttgcctccctatccacttactccttctggtttatcttgaagcctgtta

SEQ ID NO: 86229 - DNA, 120 bp, synthetic construct
  source 1..120: mol_type = other DNA
atttgtcatcatagcccatcgtgtttctctttgcaatccaactcagatttcgatgtgtttcatactccgttagcttcttgttctgatcccagtactcatttcaaccttcgtcatccttcc

SEQ ID NO: 86230 - DNA, 120 bp, synthetic construct
  source 1..120: mol_type = other DNA
aggtccagtgggaggggacacccggagaaggcaattagagagagggaagttacagtcactagagcaaatgaacaaaggagagtaagagaataaattaaggattaattgagtctgagtgat

SEQ ID NO: 86231 - DNA, 120 bp, synthetic construct
  source 1..120: mol_type = other DNA
aggtacttaccacccaccaaccgatgatgagtatctgccaatttactggaagaaaacctgaaatctagctgtggagccaagatagatgcagaagaaagcgagtggaacaggagaaagtgt

SEQ ID NO: 86232 - DNA, 120 bp, synthetic construct
  source 1..120: mol_type = other DNA
tctcgtcttctctcctcttctctcctcggggctcatgagtgagttacttttgagagatgctattttgatagtggcaggaccagcaacaaacctgtaccatctcagcattcaggaacaatg

SEQ ID NO: 86233 - DNA, 120 bp, synthetic construct
  source 1..120: mol_type = other DNA
cagagggtccaaaaggtgaagagatgatggatgtggtcatgatattgggctccaaaactcacggagtaaatggccaatggtgaagtaaatggtggtaaaagcagagattctatttcatta

SEQ ID NO: 86234 - DNA, 120 bp, synthetic construct
  source 1..120: mol_type = other DNA
gcttacacgtcctggcttgtaggttcgacgaaacgtcaggagaacatttcttcttcagacaaatgaaaagctgagatgaaacgtttttgattgatggctgtcagagaagcgtaaaaactt

SEQ ID NO: 86235 - DNA, 120 bp, synthetic construct
  source 1..120: mol_type = other DNA
aggaaactgagttgcaaagaggtgaaatgacttgttcaagggcaattaatgagtaagtgatgttgctggcgagcccagggttttcagatgccaaagcccttctttctccttcctccctcc

SEQ ID NO: 86236 - DNA, 120 bp, synthetic construct
  source 1..120: mol_type = other DNA
accttggtaaatgatccctcattcacctctcttcagttaaacccttgagagtgccattcccttccttgatgagaccctgatgcgaaggcgggaagcacggtgacacgtttgggagagaga

SEQ ID NO: 86237 - DNA, 120 bp, synthetic construct
  source 1..120: mol_type = other DNA
tgtgaggactggagcattgcatctgtgaggactgaagcacacttgcaaggactggagcatcgcacctgtgaggactagagactatacctctgaggattggaacactgcacctgtgaggac

SEQ ID NO: 86238 - DNA, 120 bp, synthetic construct
  source 1..120: mol_type = other DNA
tgagaaaccacaaaaatggaccagatgatctgggaggagcatgtagaggagtcagcaacagaggctcagacgaaggtgactgaggaaacttcttttttttttggacggaatcttgctatg

SEQ ID NO: 86239 - DNA, 120 bp, synthetic construct
  source 1..120: mol_type = other DNA
taagcaaatagtcagtctagggatatattggagggattttctgaaagctcaggtcaggggaaaatgttgaaatatcttaggaaacagaatgattctgctggtagtgactgccctcagctc

SEQ ID NO: 86240 - DNA, 120 bp, synthetic construct
  source 1..120: mol_type = other DNA
agggaacagagatcatttccgcatttccctctaaatgggcaaactaaagcccacagttttgttaagagggtgctgtgtataactcagatgccttactgggatacagaaatggactttaaa

SEQ ID NO: 86241 - DNA, 120 bp, synthetic construct
  source 1..120: mol_type = other DNA
ccattatcatgattatgttcttagcctttccgaattcctgttatacgcaaagcattctacttaactccatgggtataatgggatatataatccttgcccacaagaaactattaccaacac

SEQ ID NO: 86242 - DNA, 120 bp, synthetic construct
  source 1..120: mol_type = other DNA
ctatctatctatctatctatctatctatctatctatctatctaatcatctctctagacagagtctcattctgttgcccaggctggagtgcagtggcacagtcatagcttgctgcagcctt

SEQ ID NO: 86243 - DNA, 120 bp, synthetic construct
  source 1..120: mol_type = other DNA
ccacaagatgagctgctggaatttttaatgaaatagcatcaaatctgtagacccgtttgagaagaattaacatcttttcgatattaagactcccaatctatgaacatggtatatctttct

SEQ ID NO: 86244 - DNA, 120 bp, synthetic construct
  source 1..120: mol_type = other DNA
tgctggctctctaatctcacacttcccagcctccagaatggtgagaagtaaattcctgttgtttataagccaccaggtctgtgggactttgttgtagcagtttgaactatgatatttatt

SEQ ID NO: 86245 - DNA, 120 bp, synthetic construct
  source 1..120: mol_type = other DNA
ggccagtatttcttcaaacattgcttctgcctcattctctctctcccttctttttgggattccgatgatagatattttgctcctttttctcatgtctcttttacattcttttctgtattt

SEQ ID NO: 86246 - DNA, 120 bp, synthetic construct
  source 1..120: mol_type = other DNA
ttgctataaagcgtgtatatagttttatgctattttatcacccatagattcatgtaatgaccactgcaatcaagatacagaactgttccatcctcaaagagctcttgtgtgctatccttt

SEQ ID NO: 86247 - DNA, 120 bp, synthetic construct
  source 1..120: mol_type = other DNA
gggtgggggcacagatccaaccatatcagtaatataaattgaatgatacaataggtgacctttgagattggcatttttcattcagcgaaatgctcttttcatgctatggacataccacat

SEQ ID NO: 86248 - DNA, 120 bp, synthetic construct
  source 1..120: mol_type = other DNA
ctgggattacaggcgtgagccaccgcgcccggcatctgtgtcttttaaaagtcgaatgtcttttcatgtcgtttgcctatcttctaaatggactttataaaaaatgctgaatttcgaaaa

SEQ ID NO: 86249 - DNA, 120 bp, synthetic construct
  source 1..120: mol_type = other DNA
ttaaacctgcagacatgtcaatttcacatcatttctctttgatggtagtgaacctccattgcattgtactatacacagtttgtggtataattaatcatgccctacacttaaatcactagc

SEQ ID NO: 86250 - DNA, 120 bp, synthetic construct
  source 1..120: mol_type = other DNA
gactccattttctggcttttggtgtataaaatgaacttccctttactgtttttagatctccccgtactgtggcctttaactgacatttttcttccaacctgctcctaggtgagccagttg

SEQ ID NO: 86251 - DNA, 120 bp, synthetic construct
  source 1..120: mol_type = other DNA
gtactgaattattaggagtgaggaatttccttcaatattctggaaaagtccatttttaaaaaatggtgtcaggcaagagtttaggcttcttaaattatgctttattttcaaagctactcc

SEQ ID NO: 86252 - DNA, 120 bp, synthetic construct
  source 1..120: mol_type = other DNA
tgggctgctccaggtgctggcacaggtgccagctccatgtgaggctgtggctggatcagacctactgcaagtggcttctgctgtgggcaccagtatctggacaaggagaatgcaatggtg

SEQ ID NO: 86253 - DNA, 120 bp, synthetic construct
  source 1..120: mol_type = other DNA
cgagtccagggtttttatgggctcagaggggaggaagtgcgtgctgatgggtccacggtcggccatggcaggcctggaaaaaacactataaactcttactctgtgttggggattccactg

SEQ ID NO: 86254 - DNA, 120 bp, synthetic construct
  source 1..120: mol_type = other DNA
agtgcaccaaccagcaagggggaagtgaatgccaaaaggagctgtgggaggttttctagaatgtcagttataaagctacttgttgcacacataaaatggatttggaaactcgtatttaat

SEQ ID NO: 86255 - DNA, 120 bp, synthetic construct
  source 1..120: mol_type = other DNA
ctggccatgtgtggctgttgaatacttgaaatttggcccctctgagttgagatgtgctgcaggggtaagatgcataccagatttcaaagacctatcatggcaaaaagaatataaaatatc

SEQ ID NO: 86256 - DNA, 120 bp, synthetic construct; identical to SEQ ID NO: 9494
  source 1..120: mol_type = other DNA

SEQ ID NO: 86257 - DNA, 120 bp, synthetic construct
  source 1..120: mol_type = other DNA
ggaatcgcgctgattgctagcacagcagtctgagatcaaactgcaaggcggcaacgaggctgggggaggggcgcccgccattgcccaggcttgcttaggtaaacaaagcagccgggaagc

SEQ ID NO: 86258 - DNA, 120 bp, synthetic construct
  source 1..120: mol_type = other DNA
tttgaaaaaatttagaagaatgtataactagaataaccaatacagagaagtgcttaaaggagctgatggagctgaaaaccaaggctcgagaactacgtgaagaatgcagaagcctcagga

SEQ ID NO: 86259 - DNA, 120 bp, synthetic construct
  source 1..120: mol_type = other DNA
gagtcaagacccatcagtgtgctgtattcaggaaacccatctcacatgcagagacacacataggctcaaaataaaaggatggaggaagatctactaagccaatggaaaacaaaaaaaggc

SEQ ID NO: 86260 - DNA, 120 bp, synthetic construct; identical to SEQ ID NO: 67870
  source 1..120: mol_type = other DNA

SEQ ID NO: 86261 - DNA, 120 bp, synthetic construct; identical to SEQ ID NO: 70450
  source 1..120: mol_type = other DNA

SEQ ID NO: 86262 - DNA, 120 bp, synthetic construct
  source 1..120: mol_type = other DNA
ggcaacaaaagacaaaattgacaaatgggatctaattaaactaaagagcttctgcacagcaaaagaaactaccatcagagtgaacaggcaacctacaacatgggagaaaattttcgcaac

SEQ ID NO: 86263 - DNA, 120 bp, synthetic construct; identical to SEQ ID NO: 9495
  source 1..120: mol_type = other DNA

SEQ ID NO: 86264 - DNA, 120 bp, synthetic construct; identical to SEQ ID NO: 9496
  source 1..120: mol_type = other DNA

SEQ ID NO: 86265 - DNA, 120 bp, synthetic construct
  source 1..120: mol_type = other DNA
gagccatcagcagttacccttttcaacattcatttatttgaagactagggagtaggaggagaaaaccctctaagtgttctctggcagtttggtgcatgctttgaagtgagagagaaaatt

SEQ ID NO: 86266 - DNA, 120 bp, synthetic construct
  source 1..120: mol_type = other DNA
gcttatcccaaagcaaatccatctgtgtcaagctggcttctccactttcatccatgcatctttcattttcctgacttctaatgctcccgctaatgttataaagcagttaacaaggcaatc

SEQ ID NO: 86267 - DNA, 120 bp, synthetic construct
  source 1..120: mol_type = other DNA
cagctactgggatggaaccgtgacttatcaaaaggagtcaagtctttggagtcaaaaatatctgagtttcagttattggttctactattggaaaagttactcttgtcttttggagtccct

SEQ ID NO: 86268 - DNA, 120 bp, synthetic construct
  source 1..120: mol_type = other DNA
gtttgcctgagctgtcataacaaagtaccacagactcattggcttaaacaacagacatttatttcctcataattctggaagctggaaattcaagatcaaggtgttggcagggctggtttc

SEQ ID NO: 86269 - DNA, 120 bp, synthetic construct
  source 1..120: mol_type = other DNA
gtatgtatatgtctgcagctctcggattatagtgttatggcttgttgtgccagagagttcttctcttttcaggctgcatagaatattttcatggccactgaccttgagaaagcaattctc

SEQ ID NO: 86270 - DNA, 120 bp, synthetic construct
  source 1..120: mol_type = other DNA
tagatggtattcaacacaattagttctctgtgcatgctgggttaagtcattggtatttgtgccacccatttggcatttgctggcaccagctgagaactatgtcctgtacctttgaattta

SEQ ID NO: 86271 - DNA, 120 bp, synthetic construct
  source 1..120: mol_type = other DNA
tcagttgtttccagtacttacaaagccaaaataaccctttcttgcctgagtttccactgtaacaggagaagccttttctattcccgaataacaaaccaaacccacatgggtcccatagat

SEQ ID NO: 86272 - DNA, 120 bp, synthetic construct
  source 1..120: mol_type = other DNA
gaataagggcctgtattagtccgttctcatgctgctatgaagaaatacccgagactgaataatttataagaaaagagatttaattgactcacagttccacatggctggggaagcctcagg

SEQ ID NO: 86273 - DNA, 120 bp, synthetic construct
  source 1..120: mol_type = other DNA
aaattcacgagactcttttactgggccaagggtttcaagaggaaggctctgttttgagaagaaggttggcatgaaagttaaaggttcagtagctactatgtcacatgtacagttgacttg

SEQ ID NO: 86274 - DNA, 120 bp, synthetic construct
  source 1..120: mol_type = other DNA
gaaagcacagcttttgataccagggttcttggctgagaagatgggaatatgcagagaagagcagagagtcaacaggggatgggttaaaaatggagagatgttttgatagccatatgttca

SEQ ID NO: 86275 - DNA, 120 bp, synthetic construct
  source 1..120: mol_type = other DNA
agcgctggggttataggcgtgagccaccgtgtctggccaaagatagtcttattattatttcaaaatctaattcaacttgcttccttcacagcatttcttggataaatcccacatagcaga

SEQ ID NO: 86276 - DNA, 120 bp, synthetic construct
  source 1..120: mol_type = other DNA
aggccagagagattaatcgattcttttgcttagtgaagttaacagtgatgcttttcctgtaattgagataatctgtgtgcggcctgtgtttcctggggttcttctcacgctgctgtgaat

SEQ ID NO: 86277 - DNA, 120 bp, synthetic construct
  source 1..120: mol_type = other DNA
ctcgctctgtcgcccaggctggagtacagtggtgcgatctcggcccactgcaaactccgcctcactgcaagctccacctcctgggttcacgccattctcctgccttagccttccgagtag

SEQ ID NO: 86278 - DNA, 120 bp, synthetic construct
  source 1..120: mol_type = other DNA
ttatatgcaaaggagacctctcagaaagcaaggtggcatgtagtgggcatgtgataagctactcactgcatggctcaacatggctcaggcaacaactcaggcaagaggattctgcagaaa

SEQ ID NO: 86279 - DNA, 120 bp, synthetic construct
  source 1..120: mol_type = other DNA
aataaaggctgctcagattttaccacttggacaagagatgaaagttccagaagagtacaaactgagctgctctggcatgttcggaacctgttttctatgacatagttggtagagagcaac

SEQ ID NO: 86280 - DNA, 120 bp, synthetic construct
  source 1..120: mol_type = other DNA
aaatactccattgcaccgtttctggggatttatgtttttaaaccaagtataataatattccatgtacatccactaccagtgatattagctattcccagtccgtgtcacccccagggatgg

SEQ ID NO: 86281 - DNA, 120 bp, synthetic construct
  source 1..120: mol_type = other DNA
acaaatactgcatgatctcacttacatgtggaatctaaaaaagtcaaactcatagaagcagagaatggtgttttccaggaacgtggtggaaagggaaatgaagaggtgtggtcacaagga

SEQ ID NO: 86282 - DNA, 120 bp, synthetic construct
  source 1..120: mol_type = other DNA
ccactgtacccagcctctcaatagcctctttgacagctctttgccattggttgcaagatgaatccaaggggagggcataatgtacaaggaaaaatgataaattaaaaatcctacactgta

SEQ ID NO: 86283 - DNA, 120 bp, synthetic construct
  source 1..120: mol_type = other DNA
cacccggctatttctgtatttttagcagagatggggtttcaccatgttgtccaggctggtctctaattcctgaccccaagtcatccacctgcctcagcctcccaaacttctgggatcaca

SEQ ID NO: 86284 - DNA, 120 bp, synthetic construct
  source 1..120: mol_type = other DNA
caaggcagaatcagttaaatgccacatgggtggcagacagttttataaacaccacccaaacctttatttgtacaaaagcaaaagcaagcaacctcatcgttaggagaggagttactgccc

SEQ ID NO: 86285 - DNA, 120 bp, synthetic construct
  source 1..120: mol_type = other DNA
atgaggcttacacttactgctcatttagtaaagtagtaaagtcacagtgggagcccgggaatcaggaaataaacactcagatgttttccttctagttttgatcagctgccctgagagaat

SEQ ID NO: 86286 - DNA, 120 bp, synthetic construct
  source 1..120: mol_type = other DNA
ctttggtttctgcccattttccaggctacattgtccagtgtccctgtttttttgagacagaatttcactcttgttgcccaggctggagtgcaatgccatgatctcggctcactgcaacat

SEQ ID NO: 86287 - DNA, 120 bp, synthetic construct
  source 1..120: mol_type = other DNA
accaacaccatcgcttaaatgtgctgtgccttttacaattatgtggctttgcaggtgctgttcccttgcctttttttctttgcccggcaaattctactggtttgtcagtcacttctcctt

SEQ ID NO: 86288 - DNA, 120 bp, synthetic construct
  source 1..120: mol_type = other DNA
aatgaattgcattgcatgttagaagatcgtaagtactctgggggaaaatgagagtagaacaggataagggggtgatggagggaatgagtggtgattttaaatgtagttatcaggctgggc

SEQ ID NO: 86289 - DNA, 120 bp, synthetic construct
  source 1..120: mol_type = other DNA
gatcatcccaaggtttctggcagacagatgatgtttcaccagctaagatggagcggtcctggaaagagtgaagatcaagagtttcattctggaaatgtgggggttttcgctgtctgtcag

SEQ ID NO: 86290 - DNA, 120 bp, synthetic construct
  source 1..120: mol_type = other DNA
gcactccagcctgggagacagagtgagactccatctcaaaaaaaaaaaaaaaaaggaaacattgtaggttctcacttctctgcagctttagttttaccaagttgcttttacatttacctt

SEQ ID NO: 86291 - DNA, 120 bp, synthetic construct
  source 1..120: mol_type = other DNA
tgcagaagctcacaaccaaaacagagaacagggctgagctgcgctgagcagagctctgggattctcttaaatctatcagtcgaaattatttctcctgaggcacataggaagtagagaggg

SEQ ID NO: 86292 - DNA, 120 bp, synthetic construct
  source 1..120: mol_type = other DNA
tttgtgtgtgacattagctgtctgttttggaaaatctaagagcaatatctgattatctatgctttccatccctaaaaccaccaacacatagaggctactgaatctcccgaagggcctcgg

SEQ ID NO: 86293 - DNA, 120 bp, synthetic construct
  source 1..120: mol_type = other DNA
gtgtatggttttttgtcctttcgatagtttgctgagaatgatggtttccagtttcatccacgtccctaagttcccaagggatgctgatgcctctggtttggagtctgcactttgagaact

SEQ ID NO: 86294 - DNA, 120 bp, synthetic construct
  source 1..120: mol_type = other DNA
agctgaggtcgtgccgctgcactctagcctgggtgacagaatgagactccgtctctttaaaaaaaaaaaaaaaaaaaaaaggcacatttgaagttctgagtgtgaagtgtgcttcaggat

SEQ ID NO: 86295 - DNA, 120 bp, synthetic construct
  source 1..120: mol_type = other DNA
tctccccttccaggcaaatttctaggattaaacgacttgatgcttttttgctctgatccaggcccacctttccagcccacatatagtaataattatggttttatgtttttagggctccac

SEQ ID NO: 86296 - DNA, 120 bp, synthetic construct
  source 1..120: mol_type = other DNA
aaaatcatgtcatactagtttttgcaatccacagctccttgcacaattcctggcccagggagtgggtacatcatcaatgtgtgaggaacagactgccatgaaatagtgtaaaaaatccac

SEQ ID NO: 86297 - DNA, 120 bp, synthetic construct
  source 1..120: mol_type = other DNA
ccctgtcagaagcttggaaatacttcgattttaaagctgctactcttccatttacctcactccaggaaatccttttagaaatcatactcttgagggaagaagacctaggggatagagcat

SEQ ID NO: 86298 - DNA, 120 bp, synthetic construct
  source 1..120: mol_type = other DNA
gcaaggctaattcctggaaacccttaagaaccccagatcagcttgattccaacacaaaggagtaatcaaggcggttgcaaaggaaacaatggcaagtgttttgtgaagcatttttttaag

SEQ ID NO: 86299 - DNA, 120 bp, synthetic construct
  source 1..120: mol_type = other DNA
gccttccaggatgttctcgtctcatgcaggaggcagacataataggaggtactcttatattagtcagggttctccagagaatcagaagcaattgaaacagaagcaattatatctatttgc

SEQ ID NO: 86300 - DNA, 120 bp, synthetic construct
  source 1..120: mol_type = other DNA
tcattttttttctctttgattgtctgcctcaattgggtatttctggattcctgaaatgaggcttcatgccctggactgagatactggccatcattaggaggagttagagtccatgattga

SEQ ID NO: 86301 - DNA, 120 bp, synthetic construct
  source 1..120: mol_type = other DNA
tgcagtaacctgccacaactccatactagattctgtgcttggtactggggaaacacaagtacaatttttcatggttactaccttcaagggtaggctcagtagctattcagaaatagtcta

SEQ ID NO: 86302 - DNA, 120 bp, synthetic construct
  source 1..120: mol_type = other DNA
gttccttgggtccatctctcctacgatggccagtttgtttggaggatcacatcggatgaatggaaggaagtggtagctggtctcatggccatggcactcttcagcctatcaaatataaat

SEQ ID NO: 86303 - DNA, 120 bp, synthetic construct
  source 1..120: mol_type = other DNA
atgcctgggaagtatttaataggggcccagaattttctaagtgatcaataaatggtgacgataaaatgtgcagagtcaagatgggtatgatcttggtttccgtccagctcttccactaag

SEQ ID NO: 86304 - DNA, 120 bp, synthetic construct
  source 1..120: mol_type = other DNA
tccccaaattattagaagacattgctggaccattgtcattagccattgaggagctgtagagaaagagggagatgtaatagaggcagagatccgaattctagtagctgtagattggtgttt

SEQ ID NO: 86305 - DNA, 120 bp, synthetic construct
  source 1..120: mol_type = other DNA
accagcctggccaacatggtgaaaccccgtttctactaaaaatagaacaatcagccaggcgtggtggcctacgcctgtaatcccagctacttgggaggctgaggcacaagaatcgcttga

SEQ ID NO: 86306 - DNA, 120 bp, synthetic construct
  source 1..120: mol_type = other DNA
ttatttgcttctatcctatttttatttaaaaatactgatgagagctgagtgctgtggctcatacctgtaatcccagcactttgggaggccaaggctggaggattacttgagcctaggagt

SEQ ID NO: 86307 - DNA, 120 bp, synthetic construct
  source 1..120: mol_type = other DNA
aattagggaaaagaattgttgcttatagactcttagtgtaggaaggacatgtagaggtcatctattctaacatctcaccgagtgcgggggtcccttctgtagtagtttcacagttgacca

SEQ ID NO: 86308 - DNA, 120 bp, synthetic construct
  source 1..120: mol_type = other DNA
actggctgcagagttaacacgtgcattttgcagatagaaatgcttggtggttgccagaaagagggtaacaatgagttttgaataaagagccgagaagtatctgtaagatacgaaactggt

SEQ ID NO: 86309 - DNA, 120 bp, synthetic construct
  source 1..120: mol_type = other DNA
agagacctttgttacttaataaatgaaaatatccgtttttaaagtgccactatctctaatgtacaaaactgaggccgggcacagtggctcacgcctataatcccaacactttgggaggcc

SEQ ID NO: 86310 - DNA, 120 bp, synthetic construct
  source 1..120: mol_type = other DNA
actcttaacgagcatgctgccttcaagcatctgcttaacaaagcacatcttgcaccgcccttaatccatttaaccctgagtggacacagcacatgtttcagagagcacagggttgggggt

SEQ ID NO: 86311 - DNA, 120 bp, synthetic construct
  source 1..120: mol_type = other DNA
ctgcaatcccggcacctcgggaggccgaggctggcggatcacttgcggttaggggctggagaccggcctggccaacacagcgaaaccctgtctccaccaaaaccagtcaggcgtggcggc

SEQ ID NO: 86312 - DNA, 120 bp, synthetic construct
  source 1..120: mol_type = other DNA
attttgacttgttaagtttgaaatacattttagacattcaagggcaaatggagaacaggtagttggacatctgactactttctgccacccccactacaaccttcccagcccaaggcactg

SEQ ID NO: 86313 - DNA, 120 bp, synthetic construct
  source 1..120: mol_type = other DNA
ccaggagcttggctggggttagggaggacatgaaatggggagattgtggtcaaagagtatgaagtttcagttagatagtatgaataagttgtgaataagttctggagatctattgtacag

SEQ ID NO: 86314 - DNA, 120 bp, synthetic construct
  source 1..120: mol_type = other DNA
ttttttagatacagggtcttatagaaatctaaaatagcccagctgttccctggcagatgggaaaggaattctgagaaagtctcatctctgagacagtcacacagggctgtctaagactga

SEQ ID NO: 86315 - DNA, 120 bp, synthetic construct
  source 1..120: mol_type = other DNA
atcctcccacctcagcctcccaaaatgctaggattataagcatgagccaccgtgtctggcccaagtattcataatcttgcatactttcttcacacactgaatagggttggtctgtgtaac

SEQ ID NO: 86316 - DNA, 120 bp, synthetic construct
  source 1..120: mol_type = other DNA
aaacctgaaattgcatgggatgatgtgagagtgaacagggaaatgtcacatgattctcactggtcccacttaatgcagtgttcaggtagagttgggttttttaccaaggatggttttttg

SEQ ID NO: 86317 - DNA, 120 bp, synthetic construct
  source 1..120: mol_type = other DNA
gagaagagagcaacttgtataagaagtgggagtcggccaggcatggtggctcacacccgctgacgcgggtggatcatgaggtcagaagttcaagaccagcctgaccaacatggtgaaacc

SEQ ID NO: 86318 - DNA, 120 bp, synthetic construct
  source 1..120: mol_type = other DNA
tgccagggattgttgtaagcaatctattaacttccttaattcccaaaacactctgtgatgatttttatcatccctgttttacagatggggaaattgagtcatagatcaagtaagtggcag

SEQ ID NO: 86319 - DNA, 120 bp, synthetic construct
  source 1..120: mol_type = other DNA
accgcgcccggcccccctcgttggttttaactgtgtgtattttacaatgagttttcacttgtagcttattgaaggtctgtcattgtgatagatttgtcttttgtacagcttttgctttca

SEQ ID NO: 86320 - DNA, 120 bp, synthetic construct
  source 1..120: mol_type = other DNA
ggatctttctagaccaggctgtgtatgggaaggggaatattggcaagagggagaaggttttcctgttcaagcatactacaatgggaaagcaaagttatgtttcttagtacatcaacagtt

SEQ ID NO: 86321 - DNA, 120 bp, synthetic construct
  source 1..120: mol_type = other DNA
ttggtagcaaatgatgtttctcgaaggggagtcccctagaagaatgggttatctttgaaagcagtgcttctgtttatctgtacagataagatgtgcgacgtggcatccatttgaataagt

SEQ ID NO: 86322 - DNA, 120 bp, synthetic construct
  source 1..120: mol_type = other DNA
agaaccatggcctaggagacaagagactgtgattatttttattctccagctcaatctagttttgtcatttaaagtctcggggcttattttcttatatgtggaaaaataagtgggaaattt

SEQ ID NO: 86323 - DNA, 120 bp, synthetic construct
  source 1..120: mol_type = other DNA
aaggcagtgggaggattgggtggctaagggatgcagagttccttttttggggggataaaaatgtccttaaattgattgtggcaatcaactgtgtactttaaatgggtgaattgtatggtt

SEQ ID NO: 86324 - DNA, 120 bp, synthetic construct
  source 1..120: mol_type = other DNA
ggccatgcaaatttattattaagtgaatcatcacaaattaagttgtgactagttcaccgctctgtgaacttgaattctctcttgcagaacacacaacactgatgccccaattgggggtgt

SEQ ID NO: 86325 - DNA, 120 bp, synthetic construct
  source 1..120: mol_type = other DNA
ttccttttcagacaacttgttttgatccagtcctctgagatcttcctaatgaggcgtcccccaaattgcctatcatctcatgtttatggggtagtctgggacctttagtgacttaaattt

SEQ ID NO: 86326 - DNA, 120 bp, synthetic construct
  source 1..120: mol_type = other DNA
ggctttgaattaagaaaatggcctcatgctccatttatctaaggtaaatttgaagaacacttctggggcttgggtccctgggaaggaagcaatatggtaggataaaggagaatacccagt

SEQ ID NO: 86327 - DNA, 120 bp, synthetic construct
  source 1..120: mol_type = other DNA
ctatgtaaaacataaattgagtcattccttgaaaactctctgagaattcccattgcatttaggctgaaacccaaactttctgacatgagctgatggtagccacagtgtcagggtcccgcc

SEQ ID NO: 86328 - DNA, 120 bp, synthetic construct
  source 1..120: mol_type = other DNA
gtttatgctaaattcacctggtaattagggtgaccattggtgttaactcattcctatctttatgtcagaaggtagttttgcaacttggagcctggtacctgccgaagttagactgccgtc

SEQ ID NO: 86329 - DNA, 120 bp, synthetic construct
  source 1..120: mol_type = other DNA
atatatccattctcctgtctgtggacaactgggttgttcctggtttgtgatatgaggaacatgcttctttgaacattcctattgtatctcctggcgccatatgcaagagtttttctgatg

SEQ ID NO: 86330 - DNA, 120 bp, synthetic construct
  source 1..120: mol_type = other DNA
cttacttcgttgattccagttgttttaaccccacatttttaatttagtgtttggcttctattggctctaagtcaactatctaatgaacacggcactgctgggaaggggcactgccgaatt

SEQ ID NO: 86331 - DNA, 120 bp, synthetic construct
  source 1..120: mol_type = other DNA
ttgggttaataattaagcagataagtgagaactttgttagtcttgctaattttgataaaattccctatttctattactgtaagaggaaaagggtgtgcacctgttctggtaataccaaca

SEQ ID NO: 86332 - DNA, 120 bp, synthetic construct
  source 1..120: mol_type = other DNA
taataaaacagcttttaacctctctttttaaaaggagattggttttcactgaaatacgtgcacgtgcaggaacagaaaaccaaacaccgcatgttctcactcataagtgggagttgaaca

SEQ ID NO: 86333 - DNA, 120 bp, synthetic construct
  source 1..120: mol_type = other DNA
tgaaaggtgtcgcttattttctatgcctatctatatccttgaaattttgggaagttaaaagacagttttagtttgaggctagcctgagcaacatgctgagaccccgtctctacaaaaaac

SEQ ID NO: 86334 - DNA, 120 bp, synthetic construct
  source 1..120: mol_type = other DNA
ctgcttctgtaacagctgcttcttgagatgtaggaattaagaggcatgtaaggaaagctagcatctggtttcatgttggatttggcttggccctcaatctatcaatatcattgatgggat

SEQ ID NO: 86335 - DNA, 120 bp, synthetic construct
  source 1..120: mol_type = other DNA
gaactgtccagagacaaaattatgcttctcccgaagggcattattacttacttgaaacagaaaccgagtatgtgcctgttccagtaatggatatgtcagggtggaataatcaccctaaca

SEQ ID NO: 86336 - DNA, 120 bp, synthetic construct
  source 1..120: mol_type = other DNA
gaacatgcggtgtttggttttctgttcctgtgttcgtttgctgaggatgatggtttccagcttcatccatgtctctgcaaaagacatgatttcattcctttttatggctgcatagtattc

SEQ ID NO: 86337 - DNA, 120 bp, synthetic construct
  source 1..120: mol_type = other DNA
ccatcaaaaagtgggcaaaggatatgaacagacaccagcagccattttctaagggctttggtaacagtcactgtgctggttgctgaatcagatttgtgttttaaaaagatgagtcagagt

SEQ ID NO: 86338 - DNA, 120 bp, synthetic construct
  source 1..120: mol_type = other DNA
acagtagatttaaagggtggatgaccttgggaagcagctttgtcataaattgataagtgcaatttaagagggagatgagtaggaataaaaactgcaacttgcaagaggggctctgggctg

SEQ ID NO: 86339 - DNA, 120 bp, synthetic construct
  source 1..120: mol_type = other DNA
ccccattacagaaaagaaaataaacactttctcattgttcatactttctactcttgtactaagcttcagatgccactgggcgccagttgctttccaagcctcaaggatccttagggatgt

SEQ ID NO: 86340 - DNA, 120 bp, synthetic construct
  source 1..120: mol_type = other DNA
ataaagtgatctcattgttcaacctcgtcaccatttaaccagctgtttccttacatatggtggcaccctttctgagagcctgtaagtattttttatagccctaatcatgtgctgtccctc

SEQ ID NO: 86341 - DNA, 120 bp, synthetic construct
  source 1..120: mol_type = other DNA
ttaaatggaaatacaccccagttaaaatggcgcttatcaaaaagacaaaataatagatgctggcaaggaggcagagaaaggggaatgcttgcgcactgttggtggcagtgtaaagtagta

SEQ ID NO: 86342 - DNA, 120 bp, synthetic construct
  source 1..120: mol_type = other DNA
atttggaatgtgcccaatgcaaagacatgataaatgtttgagataatgtacatcccaactaccctgatttcatcattatacattgtatgctattatcaagatagcacatgtgcctccaca

SEQ ID NO: 86343 - DNA, 120 bp, synthetic construct
  source 1..120: mol_type = other DNA
atgattgccgaatgaatgaatgaatggagaaagagtggatctagttccatgggcctaagactgaggcccatagtctctaatgtgtttatgcaaaatgctgcatggtagctgctaatagaa

SEQ ID NO: 86344 - DNA, 120 bp, synthetic construct
  source 1..120: mol_type = other DNA
ggagcaatgctttgggaaagtttcaacttatagggaaataaaacatacaaatctgaaccatcttttaaggcctatattaatcaccatctccacaaaatcagcttcatttagtggaaacac

SEQ ID NO: 86345 - DNA, 120 bp, synthetic construct
  source 1..120: mol_type = other DNA
aattgagttgtccattttactaatgtcttctgacagcctttcattgatctttatagttcttttctgggaaggtgagattttacagactcaaggtgattggtttaaacttggaatttcttt

SEQ ID NO: 86346 - DNA, 120 bp, synthetic construct
  source 1..120: mol_type = other DNA
gctgatgatacagtgatgaaaaaagacctgacaactaacctaaagaaggtcacatctgggtagaaatgaacaaaacaataaagcaaaatattgaagccagtaaaacagctaaccaggttt

SEQ ID NO: 86347 - DNA, 120 bp, synthetic construct
  source 1..120: mol_type = other DNA
tacttagcctgttaagtagagaaacaatttccataggatagggttttgtgggctggaaagataaactgcaaggctcatcgtctaaatgcctgctgttcatagagttagaacgttctgcag

SEQ ID NO: 86348 - DNA, 120 bp, synthetic construct
  source 1..120: mol_type = other DNA
ggaaatacaccccatgtttgtgttagctcctcagcttctggagtgtgttagttttaccagaaagatttgatcaacaattgagaggtctagacttcagatgtcaaaccttttgagcctgct

SEQ ID NO: 86349 - DNA, 120 bp, synthetic construct
  source 1..120: mol_type = other DNA
gccagagggcacttggtgagcttcaaatgaaaggtcacggcaacctcttacctttttgatagacatagggtttctttagttatgtttataaatacaatccagttcaggccagacctcaaa

SEQ ID NO: 86350 - DNA, 120 bp, synthetic construct
  source 1..120: mol_type = other DNA
cctgttatcccagcactttgggaggccaaagtagaaggacgggttgagaccaagggttccagaccagcttgggtatcatagtgataacttcatctctacaaagaaactaaaaacattagc

SEQ ID NO: 86351 - DNA, 120 bp, synthetic construct
  source 1..120: mol_type = other DNA
attgagtcatgtaatgagtatttaagaaaacaaaacagttctctggaatgcctgaattccatgttggcaattgggtacaataaagcatttgcaattctagtgacaaattgtactgcagtg

SEQ ID NO: 86352 - DNA, 120 bp, synthetic construct
  source 1..120: mol_type = other DNA
tttttttttttaaatttagagatgaggtcttgctgtgtcacccaggctggactgcagtggctgtttacagatatgcttatagcagccttgaactcccaggctcaagtgatcctcttgtcc

SEQ ID NO: 86353 - DNA, 120 bp, synthetic construct
  source 1..120: mol_type = other DNA
taaatgtgtgtgccggcataaagaacagagctgatggctgtcagttatacgccgctttcagatgtcgaatgctctacattgtctgtagacttaatttgatggtcaaatgtagttttgcct

SEQ ID NO: 86354 - DNA, 120 bp, synthetic construct
  source 1..120: mol_type = other DNA
cttgcttggcgctctagaaataattatactatttgtatctaaataggtttctgttgtatggataattcatgtattataggcatgataacctgtttacagaaaattctaagcatgtggatc

SEQ ID NO: 86355 - DNA, 120 bp, synthetic construct
  source 1..120: mol_type = other DNA
tattatcctgcagatatagaagatctttcatgaagacattgaggaggaagatatgacctatactcagctattgtgttgtggggctggaggaagacatggctggtgcaaaacacagaacgt

SEQ ID NO: 86356 - DNA, 120 bp, synthetic construct
  source 1..120: mol_type = other DNA
acacacccagtgagtaatggtatggctttgcttcccaaacaggttaaagattatgaagctctgtgctatcataaggaggttttcaatgggaatatctgcttttacccaccggtctttctg

SEQ ID NO: 86357 - DNA, 120 bp, synthetic construct
  source 1..120: mol_type = other DNA
tgtaggttgtttctggcaaaaccggagttttattgatggacttcctttatgtactcactctgcgttagcatgttggagacataggatttgctggcatcatctggttatgaatgtgactgt

SEQ ID NO: 86358 - DNA, 120 bp, synthetic construct
  source 1..120: mol_type = other DNA
tgtgtgattcttaattgcttggtaggcattataaaaggggacaagagcattaaaagagagtttgactttcatgataaaagattaagagtgttggccgggcgcggtggctcacgcctgtaa

SEQ ID NO: 86359 - DNA, 120 bp, synthetic construct
  source 1..120: mol_type = other DNA
tagcagagtatggtgactccattttaatttgtgctgaatatttaggagtaaactcataataggcctattctggactctgctgttagaaatactccaacaatgacacaggatcaggaatca

SEQ ID NO: 86360 - DNA, 120 bp, synthetic construct
  source 1..120: mol_type = other DNA
atcatccttaatgcctgtgtcataccttgtatatcattttgaatggcttttggagcttaaagtatctctgatttcaagcagagtgccctgctaaccaagacagtcccagccaggacaata

SEQ ID NO: 86361 - DNA, 120 bp, synthetic construct
  source 1..120: mol_type = other DNA
tcaggtgttaaatttttgcttgggatcacagtgaaaatactgatattttgatacagttggtaaccttccatttgtgttttattgctgtgtgtctggtaaagacgttctctaagtttgtgt

SEQ ID NO: 86362 - DNA, 120 bp, synthetic construct
  source 1..120: mol_type = other DNA
aaaaaccatgctgctatgaacaatcttgtatgtatccttctaatgtacatgtacaagaatttctttagggtttatacctagaagagaaattactgagctgtagagtatgggcatgctcat

SEQ ID NO: 86363 - DNA, 120 bp, synthetic construct
  source 1..120: mol_type = other DNA
ttgagcccagagttcaaagctgcagtgagctatgattacaacattgtactctagcctgggtgacacagcgagaccctgtttcaaaaaaagaataaagtgtcaaagttttgctttcaacct

SEQ ID NO: 86364 - DNA, 120 bp, synthetic construct
  source 1..120: mol_type = other DNA
gcgttatttcatgtaatgccccagcatctctgagatggaattcttcttgttttatagctgatatgtgatctgggctacataccgtctctctgtatccagaatgtacattcttaccaccca

SEQ ID NO: 86365 - DNA, 120 bp, synthetic construct
  source 1..120: mol_type = other DNA
cctcttcatttccagtacacaacttggctttatagcccttggacactttcccaacttttgatctttcagtgcaacccttctttttctgcttagtctttctggttggctcagattgaaaaa

SEQ ID NO: 86366 - DNA, 120 bp, synthetic construct
  source 1..120: mol_type = other DNA
gatgagagatgtttttgatgctgtgacagagatgtttttgatgctggggacagctgagactctcatacatacaattggctctggtatgcctcaactagaaataaagcagtacataggaca

SEQ ID NO: 86367 - DNA, 120 bp, synthetic construct
  source 1..120: mol_type = other DNA
cccagctccctggggcttctttttaatcatataccctgcctcaccttcccttcctggaaattgtcaccatcttactcttatttcttactctcctgctttcctttatttttgccacaggaa

SEQ ID NO: 86368 - DNA, 120 bp, synthetic construct
  source 1..120: mol_type = other DNA
tggcacgattaaataaaggctatgggtttgcaaattacagatagtcctttggatttaccagttaggaggtcatcagtgaccttttgatagtagcttaggaaagacacgggcatggaacca

SEQ ID NO: 86369 - DNA, 120 bp, synthetic construct
  source 1..120: mol_type = other DNA
ttaggaggaacgtggctcctgccctttctcccaattatgagatgagaagatgctgactcaggtttctctgctctacatggtgcaagtttttaagtttcctcaaattacggaatacaattg

SEQ ID NO: 86370 - DNA, 120 bp, synthetic construct
  source 1..120: mol_type = other DNA
gggcatgagccaccacacccggctacatagaggccctttataccaaaacttcctgagcagcactattttacaggcagtgttaacataattgtaacatatttagatcttggcatatttttc

SEQ ID NO: 86371 - DNA, 120 bp, synthetic construct
  source 1..120: mol_type = other DNA
tgtgttcctttcccagacataattactccctgtggcaaagctccctgttagtacagacagtgcatttagcactattttaacacaggcgtgatggttatgtttgcctcttttataacatgc

SEQ ID NO: 86372 - DNA, 120 bp, synthetic construct
  source 1..120: mol_type = other DNA
ttggcacccctaccttccaaattcagattagccttgtagtaaaagtatagtggcaagaatgtcacatagactttttttttttttttgaggtggggtctcactctgtcgctcaggctggag

SEQ ID NO: 86373 - DNA, 120 bp, synthetic construct
  source 1..120: mol_type = other DNA
caggccttgagcagctagtttgaaaaactgaaatagatctggcctcattgaatgctgttttaggtgaaggaaggtaattttgctctggcaggttggcgaattagtatgttacagctgtaa

SEQ ID NO: 86374 - DNA, 120 bp, synthetic construct
  source 1..120: mol_type = other DNA
tccaggactttttcatcttgcaaaactgaaattctgtacccatttaatactaattttcccttcctcccccgtcctcctcccagcccttgacaaccacctttctactttgtttctgtgatt

SEQ ID NO: 86375 - DNA, 120 bp, synthetic construct
  source 1..120: mol_type = other DNA
ctgcctcagcctcccaagtagctgagattataggcacctaccaccacgcccagctaatttatttattttttatttttattttttttagtatagacagggtttcaccttgttggccaggct

SEQ ID NO: 86376 - DNA, 120 bp, synthetic construct
  source 1..120: mol_type = other DNA
gcatccactgattctagtatccattggttctggaaccagtcctctgaagatgccgagggatgactatataagatttgcaaatattttcccccattctgtaagctgcgtttttactctgtt

SEQ ID NO: 86377 - DNA, 120 bp, synthetic construct
  source 1..120: mol_type = other DNA
gtgcgtgttccgattgaggctggataaaagaacggcacaatcaaaccgtgcagtgcagtctgtgaacaaattgtctccagctcgaaatgatgaaaagaatattttaacaacttttgactt

SEQ ID NO: 86378 - DNA, 120 bp, synthetic construct
  source 1..120: mol_type = other DNA
cctcggcctcccgaagtgccgggattacaggcatgagccacagcgcctagccaacaaaaccattttagatagcatataataaatttattagtaattccaaattctgtgatctcacttaat

SEQ ID NO: 86379 - DNA, 120 bp, synthetic construct
  source 1..120: mol_type = other DNA
gtgactccttctaacttgtcacaatggtgatgttcagtgattaaaatgtggaatcctgagggagttcattgcatgtcacaaatcagtacttctactcccctcagcactaagcattgaata

SEQ ID NO: 86380 - DNA, 120 bp, synthetic construct
  source 1..120: mol_type = other DNA
aagtaggggagagcgagtgagcagggctgtcagaagtgttcttgtgggagagaaagatgacaaagcatctttgcttctccttgaggctgccaagaaaagccaggagtttgaagaggtttt

SEQ ID NO: 86381 - DNA, 120 bp, synthetic construct
  source 1..120: mol_type = other DNA
gattacaggtgtgagccaccacgcctgagccaccacaccaggcctccttcaatcttttctatacattcattaggaagtgttctctatttgcctttagcacatatgtatgcatatattgaa

SEQ ID NO: 86382 - DNA, 120 bp, synthetic construct
  source 1..120: mol_type = other DNA
tagtgatttattgttgttcatttttaacctgattattttatatgtcagctctgacatatatcaaattgtcctacacttatggatctcatttgatctttgcaagtctgggccagtatcaca

SEQ ID NO: 86383 - DNA, 120 bp, synthetic construct
  source 1..120: mol_type = other DNA
agcaaattactgaaagatgcacttacgtgggtgtgataataggagcatatcatagttgatgagatccgaagtgatgtcatcctgtaggaatgagggtggaagggattgcatagggtgctt

SEQ ID NO: 86384 - DNA, 120 bp, synthetic construct
  source 1..120: mol_type = other DNA
gtttttcactctgagaaatgttgaaaaatgtgaagaaatagattttcagcctggggaattatttattcctggcaatttggcatgaacttgactgctcttagagagactatagtaagtggt

SEQ ID NO: 86385 - DNA, 120 bp, synthetic construct
  source 1..120: mol_type = other DNA
cagcaccctcataggcacacccaggagcaacaatactttgcatccttcagtcctatcaagttgacactcaatactaaccatcacacattcattggtgaaaaatcagcaatataaaacagc

SEQ ID NO: 86386 - DNA, 120 bp, synthetic construct
  source 1..120: mol_type = other DNA
gggattataggcgtgagccactgcacctggccccattccattctttaatgaatgaagtaaaagtagatacgaatcagaaaataagtaggaaaactgcagattctggggggattacttttg

SEQ ID NO: 86387 - DNA, 120 bp, synthetic construct
  source 1..120: mol_type = other DNA
gtgagtccagactgaaatagctttgtgagtcttgctgtgaaatctcatttgtgtttttctggccattccagggaaattgcaggcagacatgggtaggatgcttttcttctaaaaacttga

SEQ ID NO: 86388 - DNA, 120 bp, synthetic construct
  source 1..120: mol_type = other DNA
catgtcttttacaaattatacctgtactttcctttaaacaacattttttttttcagtcagggtctcgctctgttgcctaggctggagtgcagtggcactatctcagctcactgcaacctc

SEQ ID NO: 86389 - DNA, 120 bp, synthetic construct
  source 1..120: mol_type = other DNA
aatatctgatgttggctaagtagaggaaatgagtattttcatacattgtaggtaagagtatatattggatcattattttgggaagaaagttttacaatatgtctcaaaagtcaaactaaa

SEQ ID NO: 86390 - DNA, 120 bp, synthetic construct
  source 1..120: mol_type = other DNA
acaggcgtgagccaccacgcctggcccatgtctttgttatatcagtagttatccctctacttttgattcccatatcctctgtccctttattgttgagtagtgttctatttttgaatatac

SEQ ID NO: 86391 - DNA, 120 bp, synthetic construct
  source 1..120: mol_type = other DNA
ccaaggcactgcataagtaacgttagcctctatttgcacagcaaaatcaaggacatggttttctagaacacaggctgcaccctctcccccaagcctagcaaatgggctacgctggttggt

SEQ ID NO: 86392 - DNA, 120 bp, synthetic construct
  source 1..120: mol_type = other DNA
taggacccccaggagggaggtgagtcatcacctgagggcttgggtccagagcatctacctgtttgattccattttccctgcagccaggtcctgaataccctgaaactcggccgaacatga

SEQ ID NO: 86393 - DNA, 120 bp, synthetic construct
  source 1..120: mol_type = other DNA
aaaaataattcaggggttgccaatgcgatagtattaagaggtagggcctttaagaggtaattaggtgatgagagctcctgccttatgaatgggatgaaggcctttaaaaaaaagtcttca

SEQ ID NO: 86394 - DNA, 120 bp, synthetic construct
  source 1..120: mol_type = other DNA
ggcacgtttgctctgttgcagccagcaccggcacaccatatgcatgcattttgtaattgttttcgtctgaatgaattaagatatatgttgcatagctgatcattttgaagttatcgctgg

SEQ ID NO: 86395 - DNA, 120 bp, synthetic construct
  source 1..120: mol_type = other DNA
atgtactgtaattgaactatgattcagccatatgaaaaatattttagaaagagtttatgcatatagaagtgctaatgatatataaagtttaaaaaagacatgcattatatgaacaagatg

SEQ ID NO: 86396 - DNA, 120 bp, synthetic construct
  source 1..120: mol_type = other DNA
taacatggctgaattctaattcagttatagtacatttctcttccgataattttgggactatttcatattagagaatcttgtctccttgtcttagatgctattttaccccatgtatccatt

SEQ ID NO: 86397 - DNA, 120 bp, synthetic construct
  source 1..120: mol_type = other DNA
tggcactgactcaggaagcttgtcatagactgtgccagtatttagatttgactatatgtgtacaagttatcaatgtgctctgcagtgatggtacagaggctaagatgtgtaggcatttgt

SEQ ID NO: 86398 - DNA, 120 bp, synthetic construct
  source 1..120: mol_type = other DNA
acgttgtggacatgtgttctggatattagcaaatccagttgcccaccaacatttttaacggcttcatggtgttctgtaatattcatccctctattaatgaacatttaagttgttcccagt

SEQ ID NO: 86399 - DNA, 120 bp, synthetic construct
  source 1..120: mol_type = other DNA
atgcaccaccacacccagctaatttttgaattttttgtataaatgcgatctccctctgttgcttagatttgtctcaaactcctgagctcaagtgatcgtcctactttggcctcacaaagt

SEQ ID NO: 86400 - DNA, 120 bp, synthetic construct
  source 1..120: mol_type = other DNA
cacccacctaggccttccaaagtgctgggattacaggcatgagccattgtgtctggccctaatcaacttattatcttattgaatgtagctgcatttttcattagtatattgtcttagtcc

SEQ ID NO: 86401 - DNA, 120 bp, synthetic construct
  source 1..120: mol_type = other DNA
caggaatcccagggtaaagcaaccttgaaatttgtttttttcccagaatcatttgaaaaacattccaggaggaaaatatgtagcattggcaggatctgagtgagatacagtagtcccgtc

SEQ ID NO: 86402 - DNA, 120 bp, synthetic construct
  source 1..120: mol_type = other DNA
ttttcaggttcatagatgaaagtttaggttcaatattacatctgcatctctatgaattcagtcttttcaacctatgtctgtgtttcaatagttatattgaattcagtattcacccttgaa

SEQ ID NO: 86403 - DNA, 120 bp, synthetic construct
  source 1..120: mol_type = other DNA
tgatggggacctcgactggtaggacactgagtatcatgggtagagaagtagcctctgacatggagtatttattatattgtaacatcattgcattattataatgtaacctttccctgctcg

SEQ ID NO: 86404 - DNA, 120 bp, synthetic construct
  source 1..120: mol_type = other DNA
tgtaccttgatatgcaggggtggctgttctattaacatttctaagctatttaaaagtcagttggatgcttttcggttgcacattcatttttcatctttgcccttccattcaggaaacatc

SEQ ID NO: 86405 - DNA, 120 bp, synthetic construct
  source 1..120: mol_type = other DNA
gggagtcagagagaccttagcctggatattgggtggtacatcagttgggatgcttttggctgtaagtaagagatgcttatttccatttccaaatgcctcatcccaaaagcaatttatcat

SEQ ID NO: 86406 - DNA, 120 bp, synthetic construct
  source 1..120: mol_type = other DNA
ctttcctaacatagttgtctaatgagatagctactgaaatccagcatcagaacaagagattaccataaatttgaagaagtgtgaaaccaggtaccacagcctggcccctgcttaggctta

SEQ ID NO: 86407 - DNA, 120 bp, synthetic construct
  source 1..120: mol_type = other DNA
tgggagaaaacccctcagaattagaaaatattcttgctgtttcgaaggagtccagtatgtcaaagtctacctgcctctttcattaataaatactgggaagctgaggtgggcagatcactt

SEQ ID NO: 86408 - DNA, 120 bp, synthetic construct
  source 1..120: mol_type = other DNA
agagtgcttgtattctatttagtaagaagggacatggttttacctctttatcaagggctcactgaggtagtatattctgggtggtggtcaacacagatttcttttccatgtcagagggtc

SEQ ID NO: 86409 - DNA, 120 bp, synthetic construct
  source 1..120: mol_type = other DNA
agtagtaccggcattttctaaccccaaatttatgtttcttcttcatattactgttttaaatattctgtattggctgggcgcggtggcttatgcctgtaatctcagcactttgggaggctg

SEQ ID NO: 86410 - DNA, 120 bp, synthetic construct
  source 1..120: mol_type = other DNA
ggccataaaaactctgggcaaaggatgtgtgacttctcttctgtcaactagaaattatatggccacaccacaggtttgtccgaccagtctatcgggcagtttacatatcagaaatttgaa

SEQ ID NO: 86411 - DNA, 120 bp, synthetic construct
  source 1..120: mol_type = other DNA
tgtgggaggccgaggcaggaggattgcttgagaccaatagatcaagaccagcctgtgcaacatagtgagattccatctttataaaaacattttaaaaaaaagttaggtgtggtgatacac

SEQ ID NO: 86412 - DNA, 120 bp, synthetic construct
  source 1..120: mol_type = other DNA
acaacatgtgagaattatgggagctacaattcaagatgaaagttgggtggagacacagccagaccctatcaccacctatttctaggtttaccaatcagctaagttaagccatctcctggg

SEQ ID NO: 86413 - DNA, 120 bp, synthetic construct
  source 1..120: mol_type = other DNA
gaagtgattggtggtgaaatctgtggtacttaaaagcgctgacagtgtaggaggccagatttcaatttctagaggtgtcattttagaatggagtagggaagacatatgtgtcacatagtg

SEQ ID NO: 86414 - DNA, 120 bp, synthetic construct
  source 1..120: mol_type = other DNA
tgttcaaaactgtttcatcataacatctatgagaaaaaaatgaaatggattcttggccagggctagtgtctgggtggagtttgcatgttcacctcatgtctgcatgggttttctctgggt

SEQ ID NO: 86415 - DNA, 120 bp, synthetic construct
  source 1..120: mol_type = other DNA
aatcagcctgtggtaaaactggtttccttgtaggtcctttcccttaaggtcgcagtttccaagaacctatgcacaacactaaagatttgctgtacatgtgataaacaacatagcatgctg

SEQ ID NO: 86416 - DNA, 120 bp, synthetic construct
  source 1..120: mol_type = other DNA
atagtttttcaccttttgggtttcattatgtttgcaccaatgagacttgtcctttaatattacttgaatgaaggacgtcggttaaaggtctgtgcccaaaggctggtttcctgctgcccc

SEQ ID NO: 86417 - DNA, 120 bp, synthetic construct
  source 1..120: mol_type = other DNA
tatttgcttagaagagaatgctgcattaagcttcacctttatatgccactattataggtctagatttgttatcaaatcacttcctggaaaacagacaaagcaatacctaacaatcacttg

SEQ ID NO: 86418 - DNA, 120 bp, synthetic construct
  source 1..120: mol_type = other DNA
acactactgcacccatcttttagctcttgtttgctagatgtatatggggctatgatggagagcccagcattagcagtagagggtagacatggcttattaaaataaatgtcaagccttgct

SEQ ID NO: 86419 - DNA, 120 bp, synthetic construct
  source 1..120: mol_type = other DNA
ctgaaggttaagttgatcactcatttccaatggtttattcaatcatgccaacgtaaggaagcctccataaaaacccaaaaggacaaggttcagacagtttctgtatggctgaacatgggg

SEQ ID NO: 86420 - DNA, 120 bp, synthetic construct
  source 1..120: mol_type = other DNA
tgctttttccttcttgcagtttctccttgcacaagctcagctacatcagttgaacaaaactttgtgttattttggggagaggagacatttatgatgtggatgatcattttaggtggatag

SEQ ID NO: 86421 - DNA, 120 bp, synthetic construct
  source 1..120: mol_type = other DNA
ccttttctcctacagacacaaattcttagataacaaggtcatggaatcataagaagtggctggaaccttggaaaggaaccctcgaatcttcctctatcatcccccactactcctttatca

SEQ ID NO: 86422 - DNA, 120 bp, synthetic construct
  source 1..120: mol_type = other DNA
gagagcagccctgaaagtgaaatctggagctagtgttcagctgatggagtcacatggggatttatataacttctgatcttggcattaccaatcagcttctttgtcttggttagttttatg

SEQ ID NO: 86423 - DNA, 120 bp, synthetic construct
  source 1..120: mol_type = other DNA
cttacaaattgggaagtgttattactaatgacaaatcaatggctttcattatcccagatctaagtaggaaaggaaagggtgcacctgccctgtttcagacacttgctagttcctgcattg

SEQ ID NO: 86424 - DNA, 120 bp, synthetic construct
  source 1..120: mol_type = other DNA
ccatgctgaactgtgagtcaattaaacctcttacctttataaattacccagtctcagatatttctttatagtggtgtgagaaaagactaatacaagtagtatcctttgttagtagtatcc

SEQ ID NO: 86425 - DNA, 120 bp, synthetic construct
  source 1..120: mol_type = other DNA
cccctcccccaacagcttcgagttgtccagcctttccagatcaaaccaaagtataccttacatgtattgattgaggtccttctgtaacttctgtccctctaaaatgtataaaatcaagct

SEQ ID NO: 86426 - DNA, 120 bp, synthetic construct
  source 1..120: mol_type = other DNA
gtatatatttgctattattattccttttgaaaatgcttctgaacttatgcaggtggagtgcccaggcttttgaagcagggttgtttgtctggggtaatacccgaggcttgttgcctcaca

SEQ ID NO: 86427 - DNA, 120 bp, synthetic construct
  source 1..120: mol_type = other DNA
ttccctagagcaaaaaagtatttgaattccaggtattttcagaagttttggcattctgcagatgtgaggttgccgtcgtctaaggcagctagtagccctcttttgccagaagagttataa

SEQ ID NO: 86428 - DNA, 120 bp, synthetic construct
  source 1..120: mol_type = other DNA
gctcttctgtccagatcagttggtcatactgtaccaggctacggggttatactgattgtacatcagcatatctatggtgtcatccatgtatgaagcatccttaggttaaacatgttgaaa

SEQ ID NO: 86429 - DNA, 120 bp, synthetic construct
  source 1..120: mol_type = other DNA
tgggaaactagtcctacctcaataaatagttgaaaaggtggatagtagatagaaaggcataattttcttcttgactattttaaggatttgaagtcttcagagaaacaaagaaaaagagga

SEQ ID NO: 86430 - DNA, 120 bp, synthetic construct
  source 1..120: mol_type = other DNA
ttataactggccccactgtttcttggcagtgtttccttcagtgttggcttcgtatgcaggcaggttttccccaggtgtttccaaaataactctccaactgctattttcccctgctgtcac

SEQ ID NO: 86431 - DNA, 120 bp, synthetic construct
  source 1..120: mol_type = other DNA
atacatatatatttatcataacattataacacaatgtggcaagaaggtcaccagccgctccagtcacacattatgccagctgtgagataggcagagagagctcctccttcctcagtttca

SEQ ID NO: 86432 - DNA, 120 bp, synthetic construct
  source 1..120: mol_type = other DNA
ggaatcccgtctctatcactagagagggagctcttttcctttctctttctttctctttcttttgcctattaaacctcctctcctaaactcctcctgtatgtctgtgtcctgaattttctt

SEQ ID NO: 86433 - DNA, 120 bp, synthetic construct
  source 1..120: mol_type = other DNA
aatctgaagtcactttatgcctgcttgttttgatctgttttttctttttatttttttgagacagagtctcgttctgttgcccaggctggagtgtggtggcacaatctcggctcattgtaa

SEQ ID NO: 86434 - DNA, 120 bp, synthetic construct
  source 1..120: mol_type = other DNA
ataggattacatgacttaataactactagcatataaattcactcatgaaatagagaacctaaaacatttgattgtcaattttagtggaagatgcatacaaagtttcgtctcagttaccac

SEQ ID NO: 86435 - DNA, 120 bp, synthetic construct
  source 1..120: mol_type = other DNA
taaaactgaaaagtaacactgtaattgacaatagggagagggtgaggaaagatccagagtttctgtccatgctggtacctcaactacaaaacaggaggcttaagggttttcgcagaatct

SEQ ID NO: 86436 - DNA, 120 bp, synthetic construct
  source 1..120: mol_type = other DNA
cattgaatgaatgtacatttttttttttttttttttgagatggagttttgctcttgtttcccaggctagagtgcaatggcgtgatctcagctcaccacaacctctgcctcccaggttcaa

SEQ ID NO: 86437 - DNA, 120 bp, synthetic construct
  source 1..120: mol_type = other DNA
ttatattccagggatgatgatacacacaggtgcagcaagaataagacatgaggctcattcttgcagagtacagtctaagaaagagagagtcaaaagcaagcaatgtgatgagggttgtga

SEQ ID NO: 86438 - DNA, 120 bp, synthetic construct
  source 1..120: mol_type = other DNA
cctccacctgtgctttgatcccaggtggagatacacctatcccatctcttgcccaaatcactaacttcttatttgatcttttcaggattatttccatcagcatgtaaacatgtgatcata

SEQ ID NO: 86439 - DNA, 120 bp, synthetic construct
  source 1..120: mol_type = other DNA
aattccagatttgcatatccaactgccaacttgatatctcacttggaagaacatcatcacaaacctaactcatctgaagttggcttcacattctcctcccctatcactaactgcctttcc

SEQ ID NO: 86440 - DNA, 120 bp, synthetic construct
  source 1..120: mol_type = other DNA
agatttcagagaggaaaaacattgcaatcccagtgactagtaaaaggaaagctagagagctgggatgcaaaccctgggtgtgtctattgcaaaagcaaatctctttccacttaatccata

SEQ ID NO: 86441 - DNA, 120 bp, synthetic construct
  source 1..120: mol_type = other DNA
ggttcatccgttcattttcaggctggagaaaagccttcagctgaaatatctaccaattgcaagaaaagtgaggtaatttacggaaagtctacaaaaatagggagtcatggtgcctggtac

SEQ ID NO: 86442 - DNA, 120 bp, synthetic construct
  source 1..120: mol_type = other DNA
tacatttaatgtttcatagacacataatatctcacagtttgtagaacagacaatgctctctggtgtaattaccaggctgatcctaaggggccagcctgtctggcacttgctttcatctct

SEQ ID NO: 86443 - DNA, 120 bp, synthetic construct
  source 1..120: mol_type = other DNA
cagttcttctgtgattggcactcgattgattgcaggattgtatctgcatccacaaattatttgtgtgatgttctagttgtgctgcttgctataccagtgtgtgtgtgtgtgtgtgtgtgt

SEQ ID NO: 86444 - DNA, 120 bp, synthetic construct
  source 1..120: mol_type = other DNA
ttctctgctgctcctcttaattattccgtttcctggattttagggtaacatggaaacttgtgaaagcggtaattgaagaggaagacactctgctggcttctgagccaataactttgtttt

SEQ ID NO: 86445 - DNA, 120 bp, synthetic construct
  source 1..120: mol_type = other DNA
ctttcttcatgcagtgtgcgtgcttctgttccagaagacagtgagcaaggaaacagttgagtaaactaagcagttatagagtgtgatgcatgttatgaaggaactggagagataatggtg

SEQ ID NO: 86446 - DNA, 120 bp, synthetic construct
  source 1..120: mol_type = other DNA
ctaaaagtccaggtcactaaagattgctgatggcttgtgaggacagccctgagtgagactgaatcagttggttgacaacagactgtgacagaatgctaaggcgttaatttagagtttatt

SEQ ID NO: 86447 - DNA, 120 bp, synthetic construct
  source 1..120: mol_type = other DNA
ggctacagataggcttatacagtaaacatgtgaaaggtacagttgacttctctgcttgaatttgcacatggggggaattcgttctcttcttttgcccttttcacagaaccgtaaaatgtg

SEQ ID NO: 86448 - DNA, 120 bp, synthetic construct
  source 1..120: mol_type = other DNA
agcactttgggagaccaaggtgggcagatcgcttaagtccaggagttctagaccagcctgggcaacatggtgagaccctgtctctacaaaaataaaataaaataaataaaacacgttaat

SEQ ID NO: 86449 - DNA, 120 bp, synthetic construct
  source 1..120: mol_type = other DNA
ctgtctccacatcgtcatttgatcaatttctcattcctccttaaagtctttgctcaaaagtcaccccctcaatgaggccctggcaattctgttcaaaacctcaacttcccccaggctagt

SEQ ID NO: 86450 - DNA, 120 bp, synthetic construct
  source 1..120: mol_type = other DNA
atggaaaaattctcaggacataacttagaggaccagttacacaaagcctaaacctggaaaaaaatctcggaagactggaggagtaagagtttagggaaaatacttggcatgatgtgagag

SEQ ID NO: 86451 - DNA, 120 bp, synthetic construct
  source 1..120: mol_type = other DNA
ggaaaggcagaagcccctctaaataccacccccttgctgggatcaaattggattagaggtcatctatgtatctatttaatagatattttttgattgagtgcttcctgtgagccagcattc

SEQ ID NO: 86452 - DNA, 120 bp, synthetic construct
  source 1..120: mol_type = other DNA
actattgagaaagatctcatgttgagctttgtttttgaactgcaatgtccaaagtgggcaattcaatgaaagggtagtgctgatttagtggtattaacttattacaaattttgggcattg

SEQ ID NO: 86453 - DNA, 120 bp, synthetic construct
  source 1..120: mol_type = other DNA
atcactgcaacctctgcctcccgggttcaagagattctcctgcctcagcctcccaagtagctgggactacatgtgcacactaccacacccggctaatttttgtatttttagtagagatgg

SEQ ID NO: 86454 - DNA, 120 bp, synthetic construct
  source 1..120: mol_type = other DNA
aggttaaccctctggatcccatcagtatttggcagtgttggtctttattcttggaatagaaactagattgtgtgtgtgtgtgtgtgtgtgtacatgtatgtgtgagcatgtgtgcatgta

SEQ ID NO: 86455 - DNA, 120 bp, synthetic construct
  source 1..120: mol_type = other DNA
tatttgactgttaaagattgtcttcaaactcctataggtttcctatatcatatatcaaaaagatactcatatctggctgggcgcagtggcccacgcctgtaatcctggcgctttgggagg

SEQ ID NO: 86456 - DNA, 120 bp, synthetic construct
  source 1..120: mol_type = other DNA
aagagtgtagttacttacccaagagtgtagtttgcatgttagagttagttccatagggtaggtgagacaaaatagtaaaagcctctggggatttgataaggcattgaacacaccagcaca

SEQ ID NO: 86457 - DNA, 120 bp, synthetic construct
  source 1..120: mol_type = other DNA
caaattagagtggcacctttccaatttatatagcatattctttttttttttttttgtgagacagagtttcgctcttgttgcccaggctggagcgcaatggcacgatctcagctcactgca

SEQ ID NO: 86458 - DNA, 120 bp, synthetic construct
  source 1..120: mol_type = other DNA
ttcctgcagcactcccactgcctgtattgagtcattctaattttcgtctttccccatgtacagtttcttcagtaaccttgcttaatgaattgattggaaacctgttttggctttcagagg

SEQ ID NO: 86459 - DNA, 120 bp, synthetic construct
  source 1..120: mol_type = other DNA
tgaaagggatataacaatgttttccatctccattttgctgatttttaattgagtctctcctgggtacaaagaactagggataagattattagcaagaacacagaaagtccttgccccatg

SEQ ID NO: 86460 - DNA, 120 bp, synthetic construct
  source 1..120: mol_type = other DNA
actaagtggcaagttattcctacgtatggtgtcagtaaatgtataggaggaagtgcaagagaggtgacatgatttctattgtctctgaaagtcagtgacaaatccttgctggaaagcctg

SEQ ID NO: 86461 - DNA, 120 bp, synthetic construct
  source 1..120: mol_type = other DNA
aaataagagacactatgaaagagcaacatacattcttaactcagaaacaagatgagtagagaacagagatttggaaaagggagctgaataacaggccagaattccaaattaaagaaaaac

SEQ ID NO: 86462 - DNA, 120 bp, synthetic construct
  source 1..120: mol_type = other DNA
atggttttaggggagagtgtcttatggaatggctctgtcctctgacaaggttaagtaagtatgactaccaaaaatgggagagtgggtatagtttataaaaattcaacttcctgattgctt

SEQ ID NO: 86463 - DNA, 120 bp, synthetic construct
  source 1..120: mol_type = other DNA
atcacctgatgacacatttctagcatgtgtccccatcattaagtgatgcatgtctgtatatatatatcatccatgggtgatgcacacacacacatacacgcacacacacacacacacaca

SEQ ID NO: 86464 - DNA, 120 bp, synthetic construct
  source 1..120: mol_type = other DNA
tatagcattaaatgcatatattcgtattttattttatttttttttgagatggagtctcgctctgttgcccaggttggagcgtggtagcacgaactcggctaactgaaacgtccacctcct

SEQ ID NO: 86465 - DNA, 120 bp, synthetic construct
  source 1..120: mol_type = other DNA
ccagtgaaggttattccaggaatccaagaatagctcaatacgataaatcaattaatataattcttcatattaggaaagataaggagaaaaatcctttgaacttactcatagggaaaaggc

SEQ ID NO: 86466 - DNA, 120 bp, synthetic construct
  source 1..120: mol_type = other DNA
ttgtggatttttttgttattgttgttttgtttttttgagtcaggatctggctgttttgcccaggctagagtgaagttgcatgatcttggctcactgtagtatctgcctcctgggctcaag

SEQ ID NO: 86467 - DNA, 120 bp, synthetic construct
  source 1..120: mol_type = other DNA
ctcttcaaggactgaggatgtttaaacaatgatcataagaaaagcgggctaaataaaactgcctttacacttttctgaaggattgctatagtatttggcttgacagtttcactggggact

SEQ ID NO: 86468 - DNA, 120 bp, synthetic construct
  source 1..120: mol_type = other DNA
tggaacatgatagagcaatactttatattcggtgacttctcattattcaccagcataaataatgcattaagatattaatgatgcataatagttgtgatattccagatgaactgatcttct

SEQ ID NO: 86469 - DNA, 120 bp, synthetic construct
  source 1..120: mol_type = other DNA
gggatttcaggcatgagccaccacgcctggcctctttttagtatttttaacatgcatttatgctggtatccagttaaggtagagtggtgacacaaagggcaaagatgacataattgaaat

SEQ ID NO: 86470 - DNA, 120 bp, synthetic construct
  source 1..120: mol_type = other DNA
aattcagatggtcagagctgaattaagtgaatgtttgtgaaaaactgaaaactacacttggagtatatactgcagagggcccgctgccaccgttagaaccctggtaacagagtatatact

SEQ ID NO: 86471 - DNA, 120 bp, synthetic construct
  source 1..120: mol_type = other DNA
gaggggtaaagtcaggtttcaaatgccatgtaaccagcacaactttatttgaaagatgaagggagcttctgaaagctttctaacagtggattgcattatttcacctgttgccacttgcca

SEQ ID NO: 86472 - DNA, 120 bp, synthetic construct
  source 1..120: mol_type = other DNA
atacactgcaccatatttgttgtcttttatccctcatcctccttccactcttcccctgaagttcccaaagtcatatcattcttatgcctttgcatcctcatagcttagctcccacatatc

SEQ ID NO: 86473 - DNA, 120 bp, synthetic construct
  source 1..120: mol_type = other DNA
ttctaggagttttctggaggagtccttagggttttcaaggtaaacgatcatgtcatccgcaaacagtgaaagtctgacttcctctttactgatttggatgccctttatttcttcctcttg

SEQ ID NO: 86474 - DNA, 120 bp, synthetic construct
  source 1..120: mol_type = other DNA
ctgctgggtttgggtttggtttgtttttgtttctctagttccttgaggtgtgtccttagagtgtcagtttgtactctttcaatatttttgatatagacatttagggctatgaacttccct

SEQ ID NO: 86475 - DNA, 120 bp, synthetic construct
  source 1..120: mol_type = other DNA
aagactgtatctttccttcatatatgatgcttagttttgctggatacaaaattctaggctgtttgaggaggctgaagatacggccccagtcgcttctggcttgtagggtttcttctgaga

SEQ ID NO: 86476 - DNA, 120 bp, synthetic construct
  source 1..120: mol_type = other DNA
cctgaattcgttgtcaggtaaatcagggatttcttcttggtttggagccattggtggtgaactaatgtgatttttgtggagtggtgaagagccttgttttgtcatattaccaggtttggt

SEQ ID NO: 86477 - DNA, 120 bp, synthetic construct
  source 1..120: mol_type = other DNA
tctgtttccaggcggagggtgtgatgggtttgaacacttaccccagggtacctgccttccagctgcaaaataaaagggcttggttcctcccctgcctatggagtctggacactagatttg

SEQ ID NO: 86478 - DNA, 120 bp, synthetic construct
  source 1..120: mol_type = other DNA
tcagcataactttctgatactttggcataaaactattttagttgcacatgttttttccagtaggtaatacagaacttaaaattatatttcaatgcaaatggtggtcactttggaaaacag

SEQ ID NO: 86479 - DNA, 120 bp, synthetic construct
  source 1..120: mol_type = other DNA
tatttcacggaaaagagaactcagatggcttccaaatattttaaaagatgttgaagattattagttataaggaatgcacaaattaaagctgcattcaaattcttgtgcatgaaattggca

SEQ ID NO: 86480 - DNA, 120 bp, synthetic construct
  source 1..120: mol_type = other DNA
taaagagatcagaggttgccagggataaggggcagggagggatgaataggtgagcacagggtatatttagtacagtgaaactattttgtaagatactgcagtggtggttatgtcattata

SEQ ID NO: 86481 - DNA, 120 bp, synthetic construct
  source 1..120: mol_type = other DNA
cttgtgtgatttacattttcaaggttacacgttaaaattctgcagaagaaattgctttcctagatgttgttgtaacccaaagtttgtgttgggggaaggtagttaagctgatgaatagga

SEQ ID NO: 86482 - DNA, 120 bp, synthetic construct
  source 1..120: mol_type = other DNA
cagtttactaatgtttacctatttattataaaggatagtacaaagcatacagatgaacactcagatggaagagatgcctagggcaggaaatgtgggaagaggcacagagctcccatgtcc

SEQ ID NO: 86483 - DNA, 120 bp, synthetic construct
  source 1..120: mol_type = other DNA
tcaaaatatataaattattcagtatatagataatgcttctggagtgtatggtggtttcattgattgtttcttataacccccaaccccctggcccacaggtattggggattgcaggaaggg

SEQ ID NO: 86484 - DNA, 120 bp, synthetic construct
  source 1..120: mol_type = other DNA
caacttaaaaagacattgaaatgttggctatctgcatttctcttaatcaccgaaaatacaacaattcagaatgtataattaactctatgtaggatttataggtaatatgaagttctggag

SEQ ID NO: 86485 - DNA, 120 bp, synthetic construct
  source 1..120: mol_type = other DNA
gaggacattgttgagatgaggaaggcagaagtcatagagaaaggcagacttattaagagtcctgttttgattgtgtttgttaggttggtggtatctgagtgaagatgtcaagtaagcagc

SEQ ID NO: 86486 - DNA, 120 bp, synthetic construct
  source 1..120: mol_type = other DNA
ctccactataacaaactgcaggaacagataagctgtccactcttcagtgtgtttaacacgagtaataacttctatgaaagttaaaatcatcgtctgccatttttgtaataccctacccac

SEQ ID NO: 86487 - DNA, 120 bp, synthetic construct
  source 1..120: mol_type = other DNA
ggcataggaagattaagatgcagttcctgaactcaggagggcggagtttcatgcatggactctagtaatccaaggatggcctgcaagactccattctttgatgttatatccaaaattatt

SEQ ID NO: 86488 - DNA, 120 bp, synthetic construct
  source 1..120: mol_type = other DNA
ggttttggcctaaatgagaaactgagagtaaatctccgcttaaatccttaaaatgctattgccttttcttttccctcttctttattctcatggtagaattaagagttatcattgaccaga

SEQ ID NO: 86489 - DNA, 120 bp, synthetic construct
  source 1..120: mol_type = other DNA
tccatgggtctaatataggggagtgctgtaacatgggaagactgacttagtattattgagagaatcaaataagatgatacacggaccaccaggaaacatctgagagggctcttccttatt

SEQ ID NO: 86490 - DNA, 120 bp, synthetic construct
  source 1..120: mol_type = other DNA
acctttcattctccaagcagaaggaagttgttgtattataagtagttatagaaattatgaacacatggctttaagtatatgctgactttgcagtgcccagtcaagtgccaggtaatcttt

SEQ ID NO: 86491 - DNA, 120 bp, synthetic construct
  source 1..120: mol_type = other DNA
gactttctgctagagagaaaaagctagagatgaaactgaccctatttgtctatccagagttaaagtgcgtgtgataaaaccagtagcctcacctgttaaggcccattgatctaaagaaaa

SEQ ID NO: 86492 - DNA, 120 bp, synthetic construct
  source 1..120: mol_type = other DNA
catgtactttttagggcttttgatatttactgtcatattgcccttcagaatagtttacaatcttctgagctgtgtttctacgcatccatttgcccattcttacatctgcactgggcatca

SEQ ID NO: 86493 - DNA, 120 bp, synthetic construct
  source 1..120: mol_type = other DNA
atccaactggatagtcctagttatcagataattcagtaattccaaccaccacagccttgttttcctttttttgtgtaaattttctgtcgggtgtaagagatttgtgtctcagggaaatct

SEQ ID NO: 86494 - DNA, 120 bp, synthetic construct
  source 1..120: mol_type = other DNA
tcaaaggctacttattgatgttgttatgcgtcctcaagctattatgccatcttccatttctgggtgtggggagcatggaatcaagttttcaaaagaaaggtggtgaaggttttctcttgg

SEQ ID NO: 86495 - DNA, 120 bp, synthetic construct
  source 1..120: mol_type = other DNA
catctcaacctcccaagtatctgaaactacaggcatgcgccaccaagctgggctaatttttgtattttttgtagagatggggtttcaccatgttgcttgggctggtcttgaactcctggg

SEQ ID NO: 86496 - DNA, 120 bp, synthetic construct
  source 1..120: mol_type = other DNA
accagtcaacattgttctctaggctgtactttatattattgacatttaaataattatttgaccttttgtgtgataaacatctttctcctgatatcagctttgacttttttcgtgtgggtt

SEQ ID NO: 86497 - DNA, 120 bp, synthetic construct
  source 1..120: mol_type = other DNA
gtgatttactccagatcacatagctgctgagtagcagaaccaggattctaatccagttccttctaactacagcatgacaaattgtgcttagcatgaactaagcactttgctcagttgtga

SEQ ID NO: 86498 - DNA, 120 bp, synthetic construct; identical to SEQ ID NO: 9505
  source 1..120: mol_type = other DNA

SEQ ID NO: 86499 - DNA, 120 bp, synthetic construct
  source 1..120: mol_type = other DNA
agatacggagcactgataggtgcatttacaaaccttgagctagacacagggtgctgattggtgtgtatgcaatcctccagctagacataaaagttctccaattccccactagactcagga

SEQ ID NO: 86500 - DNA, 120 bp, synthetic construct
  source 1..120: mol_type = other DNA
acctgtcttaggtaaacagctgatttacctgtgaacatgtaattgactattatcctacttgatccttttcttttgcaacttgtggattaccataccctacctctttcccctccagcccac

SEQ ID NO: 86501 - DNA, 120 bp, synthetic construct
  source 1..120: mol_type = other DNA
ttgagtatgatatgacatgcaatgacctgagaaaaaatcctttttttttttttttgatactggatctcactctgtgacccaggctggtgtgcagtggcaagatcttggctcagggcaacc

SEQ ID NO: 86502 - DNA, 120 bp, synthetic construct
  source 1..120: mol_type = other DNA
gtcccgcacttgcagtaataatctggagctttttatagcgtactcccttggagatatttccagggcgaagatgacatttttaacaatgaaaaactacctgctttctggtaaccttacctt

SEQ ID NO: 86503 - DNA, 120 bp, synthetic construct
  source 1..120: mol_type = other DNA
ttttccttgattatctgggtgagctctaaatgtaatcacaagtgtgcttataagggggaagcagagtgagatttgactgcagaagaggagaaggagatgtaatggctgaagtaaaggttg

SEQ ID NO: 86504 - DNA, 120 bp, synthetic construct
  source 1..120: mol_type = other DNA
caaagtgctgggattacaggcgtgagccaccatgcccggccaacatgaatttcaaaggcaaaaatgctttcacatatctcaattaggcagccttgaaaataaaacttaagaagaagctct

SEQ ID NO: 86505 - DNA, 120 bp, synthetic construct
  source 1..120: mol_type = other DNA
agtacatgtgtgttttctttctcctctttgtcctttgtcgaatttctaagccatcccttaactccaagcttctacctgtatgtgaacgaattgggtgtatatttcctacaaggctgcact

SEQ ID NO: 86506 - DNA, 120 bp, synthetic construct
  source 1..120: mol_type = other DNA
atgggggcagggggatcaggttagagagatgacatctaggaaattagagaagacaatcaggtgtgacgattaggaacattaccaagtaaaataaaaacaactaattttagaaattacatt

SEQ ID NO: 86507 - DNA, 120 bp, synthetic construct
  source 1..120: mol_type = other DNA
ggtcacagaaggactggtaggcattttctaaatttagatcatttccatgactattggaaagaaccctacctccccacctccacaaaaggctgatgattgtgcttcaaagtaaatggaagt

SEQ ID NO: 86508 - DNA, 120 bp, synthetic construct
  source 1..120: mol_type = other DNA
gcatttgccatgttgttttttcatatgcctgctgtattttttgtacctgtattcctccattcttgctttcttttgtgcagaatagtgtgccattttgaaacctctgttgatttctttact

SEQ ID NO: 86509 - DNA, 120 bp, synthetic construct
  source 1..120: mol_type = other DNA
gcatttttctgaccgcttctttctctcctattcttctgagactcccattacacgtatattgatgtacttgacgttattccactggtttctgaggctctgtgcatttttttgtcaatgatt

SEQ ID NO: 86510 - DNA, 120 bp, synthetic construct
  source 1..120: mol_type = other DNA
ttcaggtcattttcaagtctaccaagatttacttcctgctggttcctaggtgtctttcttgtgcatgtgcaacttcagtcaaaaatatactgagttagagctggtagaggatcaccaggt

SEQ ID NO: 86511 - DNA, 120 bp, synthetic construct
  source 1..120: mol_type = other DNA
aaatattgtatctcctatggaagtggtgactcacctgcagtcagcaaaggaaagccctctgtatttaaatatatctacagcacatccatccagacaggatcacagtattattgccttcca

SEQ ID NO: 86512 - DNA, 120 bp, synthetic construct
  source 1..120: mol_type = other DNA
gccaaggatgttggtagaggatcactaggttcgatgtcattgagtgataacagaccagtacacagaaatagtgggctttggagcagagaaagagtttaataattgaatggcaaccaaatg

SEQ ID NO: 86513 - DNA, 120 bp, synthetic construct
  source 1..120: mol_type = other DNA
cggaatctgttggttgccctcatctatgtgtttgtgtgaattatttttccttcttcaaggagggcatgagacaaggaactatggctgttgtggcaaaggtcatattccagacaattaagt

SEQ ID NO: 86514 - DNA, 120 bp, synthetic construct
  source 1..120: mol_type = other DNA
gcagaagtctcttttctgctttgtctttgagtggtttgcttgcaaagttccaggtaattgtatgcacatcaacaatggctccctctcaagatatatgtgagctgatgtgatgtaagccaa

SEQ ID NO: 86515 - DNA, 120 bp, synthetic construct
  source 1..120: mol_type = other DNA
agttggtaaattaaaacaacaaccaccactttatctttcggaggacatagaatttgatatctccatcatttggggagaagtcgacactcaacagttacagtgccttcctgaaggccacac

SEQ ID NO: 86516 - DNA, 120 bp, synthetic construct
  source 1..120: mol_type = other DNA
gttgcgtggcagaacacgttgattaatcttcagcaggaatatggtgtatctagattctgtggcagtcatgccaatgaagtagaaatatctttgctggcagacagtgatctccaggatata

SEQ ID NO: 86517 - DNA, 120 bp, synthetic construct
  source 1..120: mol_type = other DNA
ttaggcagatacaactctggaagccaagtagttgatggatactttggttggaaacctaattgatttttacatagcctctccagagccagcaaagccagatgctgctttgtggttattctt

SEQ ID NO: 86518 - DNA, 120 bp, synthetic construct
  source 1..120: mol_type = other DNA
gcaaaacagacaacactacaaatctctgatgtgtattaagttttcctgaaaggtaaacactatttttttttttaactgtctcagcttttctattacatttgtgtgtgtagggggagctgg

SEQ ID NO: 86519 - DNA, 120 bp, synthetic construct
  source 1..120: mol_type = other DNA
ccagtatttttgcttaggtggtctgtgtatagaatccatgctcttaactattaggatatgctgattctaaagcaattaataaatgttggtctgaaatcagtctaatggcacgctggaaac

SEQ ID NO: 86520 - DNA, 120 bp, synthetic construct
  source 1..120: mol_type = other DNA
atgaagatcctccattgaacatttgcttgtacctggttggactgcatactggatcctgcttgtctaagcgaaagcatacatgattaataacttacggttctaactcaccaatcagttctt

SEQ ID NO: 86521 - DNA, 120 bp, synthetic construct
  source 1..120: mol_type = other DNA
aaaaataaagcaatacagatatacacagaacaggaccaagttagaggcaaaatatagcatccaacttgaataaaacaaagtaatcgctactttgtggataaggagaaacctgtgtttggg

SEQ ID NO: 86522 - DNA, 120 bp, synthetic construct
  source 1..120: mol_type = other DNA
ttaaacatgaggagtaatgacagtgtttcttgatgactggggaacttgcagtagaaagttgacaaatactgtttctatgaaagaaactggagcctcctaaggtaagctgggtctggatgc

SEQ ID NO: 86523 - DNA, 120 bp, synthetic construct
  source 1..120: mol_type = other DNA
ctcctgagtagctgggactacaggctcctgccaccaccacacctggctattttttttttttttttctatttttagtagagacggggtttcaccatgttggccaggatggtcttgacctcc

SEQ ID NO: 86524 - DNA, 120 bp, synthetic construct
  source 1..120: mol_type = other DNA
gttatgcttaagttatgaaagagtaaaacaattctcaatttagtttcatttctacctgaaataacccctcctgatttttaaacatccctgagtcatatcaactttgatatgcaaatcagc

SEQ ID NO: 86525 - DNA, 120 bp, synthetic construct
  source 1..120: mol_type = other DNA
ttagggaaaaatgaaagtttctctcatactgctgagtatttttgattatacccagaaatgatattcattcctagcttgccacaggtgatgccagttaatgagcacagccccagccacagc

SEQ ID NO: 86526 - DNA, 120 bp, synthetic construct
  source 1..120: mol_type = other DNA
agaaaactcccaatgtcatttgtgacaaagtaaatcatgaacattacgataacagaagaagatgtgtaagatgaaatgggagaaaatattacctaatgtatgaagttttggttccctaaa

SEQ ID NO: 86527 - DNA, 120 bp, synthetic construct
  source 1..120: mol_type = other DNA
tctcacacaactttatttgtaatgccaaagttaatttaaggatttcatctcctatgagcacagatatcaagtgagaggtgacgtagtatagtagaaagggctttggttttggagtccagg

SEQ ID NO: 86528 - DNA, 120 bp, synthetic construct
  source 1..120: mol_type = other DNA
tatcatgttggcatgaagaaggaattgtgtacgtggaacttgttgttcctttacattttcttggcactttttagaatcatttccaaaactattagaagtaatattaaaactattaataga

SEQ ID NO: 86529 - DNA, 120 bp, synthetic construct
  source 1..120: mol_type = other DNA
agtgagcccagatcgtgccactgcactccagcctgggcaacagagcgagtatccatctcaaaaaaaaaaaaaaaaaaatgcagtgggaagcaactggctaaatttactggtaaataaatt

SEQ ID NO: 86530 - DNA, 120 bp, synthetic construct
  source 1..120: mol_type = other DNA
tggttccggtgtgccattatgtgggctaccctatcatggatgtgctgagctcgagtaagatgttattgacaagatcaaatggaagtcagaacaatctagttgaaaaatgactgaaaagtc

SEQ ID NO: 86531 - DNA, 120 bp, synthetic construct
  source 1..120: mol_type = other DNA
aaatggcagggctaatgactcactggaaaaaaatgaggtttaacacttgatgttcatccattttcaaatatgctctgtatgagtctccattaagtctctgtataagtcttctgtatttta

SEQ ID NO: 86532 - DNA, 120 bp, synthetic construct
  source 1..120: mol_type = other DNA
aactggctccgaccatggggatggcaatagggaaggatactttgaagaactaggttcttttattgggagaaggaagagaactgcatgtgaaaatgaaggtcagataatttctaacattgt

SEQ ID NO: 86533 - DNA, 120 bp, synthetic construct
  source 1..120: mol_type = other DNA
ctgagcaacaattatccatctgtcacttaggtgaatgtggaaatttgtctgtggttgaaagatgcatctttcagttttactgcctttctgtttctagaaagacaactttctactcagaag

SEQ ID NO: 86534 - DNA, 120 bp, synthetic construct
  source 1..120: mol_type = other DNA
tgtttttgaaaggaaaagtcagaaaataaccttttgggttcggtaatcctccatcctcatttgcctgacacagtccaggttaatacctgtggtcacagcataatcactattagttccccc

SEQ ID NO: 86535 - DNA, 120 bp, synthetic construct
  source 1..120: mol_type = other DNA
gaacacacagaatgggcctaatattgccgcgcactgatttccatagccctggaaaatgtgagccatatgtgagacaagaagaacatattgaaagccttgcagtatctgacaaaagagaaa

SEQ ID NO: 86536 - DNA, 120 bp, synthetic construct
  source 1..120: mol_type = other DNA
tatgtagtttccccataagaggttttttgttttttttttttttttgagacagagtttacttctcattgctcaggctggagtgctatggcatggtcttggctcactgcaacctctgcctcc

SEQ ID NO: 86537 - DNA, 120 bp, synthetic construct
  source 1..120: mol_type = other DNA
gtagctttatagtaagtcttttttatttatttatttattttttgagacagagtctcgctctgtcactgggctggagtgcagtggcaccatcttggttcactgcaaccaacctctgcctcc

SEQ ID NO: 86538 - DNA, 120 bp, synthetic construct
  source 1..120: mol_type = other DNA
agcctccatggaagagacttactgtattatttacttagcacccatccatccacttgaatttgttaacattaaggtttatgcaacagccactttaacgtattctgtacttagagaaaggag

SEQ ID NO: 86539 - DNA, 120 bp, synthetic construct
  source 1..120: mol_type = other DNA
cccacattaatgtcatgtctgtctgttctaatttagtgctttgtatttttcattttaaaagtacctggtctgctcctgtgaacatttaggtagatacctcagtttgaggtcctgtgagtc

SEQ ID NO: 86540 - DNA, 120 bp, synthetic construct
  source 1..120: mol_type = other DNA
gcctgacaacgtaggcagaatttgaggatacaagatcttgaaggaaaaagagaaataaggcttacactctgaagaggctttccccttgaggtatttctctgttggtggtgacgtttttat

SEQ ID NO: 86541 - DNA, 120 bp, synthetic construct
  source 1..120: mol_type = other DNA
aagaactcagaagattagtttaacagcagctgggacatagttgaagaaaggattcatgaactgaaaaatagattagttgaaaatatccagactggcctatgtggagaaaagaacattaag

SEQ ID NO: 86542 - DNA, 120 bp, synthetic construct
  source 1..120: mol_type = other DNA
taaaggaaggaagaaaggagggaaaagaagtaacatatgggctgaatctgttcttaaattagattatggtgatggttcatagctgtgtaactataccaaaaagcattgaaattgtgtacc

SEQ ID NO: 86543 - DNA, 120 bp, synthetic construct
  source 1..120: mol_type = other DNA
atcaggagatctcaatcaacaatcaatgtataagaccatccttctcacagtattacaataatcaggcaaataaatgaatgaggatatagaaatctgaacagtatgattaattaacatatg

SEQ ID NO: 86544 - DNA, 120 bp, synthetic construct
  source 1..120: mol_type = other DNA
caggcccagatggcctcactggttaattccaccaaacatataaggaaacaataataccaatcttaaactctttcataatacttcccaactgattttatgaggccaacataaccctgatcc

SEQ ID NO: 86545 - DNA, 120 bp, synthetic construct
  source 1..120: mol_type = other DNA
acaataagaccgttgggtattaggacaaagacagaaaaatagagcaggatagagttcataagtagatctgtacatttgtgtcttgatgcattagtaagtgacaatgcagtgctaatgggg

SEQ ID NO: 86546 - DNA, 120 bp, synthetic construct
  source 1..120: mol_type = other DNA
tccacatatatttttaaaattccacatacttgattcaagtttttggaaaaaatgttcctttgtcttatatgttttatgggtttgtaattgcgtaaattctaaaattggttaagtttactg

SEQ ID NO: 86547 - DNA, 120 bp, synthetic construct
  source 1..120: mol_type = other DNA
tgtttgtaaaatgcaaaggaggaagtaagtttagaacagatttttctgaaaactaagtaaattacaaaagaaggcaaaatgctctgttacaagtaacctattggatttcattagggcttc

SEQ ID NO: 86548 - DNA, 120 bp, synthetic construct
  source 1..120: mol_type = other DNA
gagagtagtagttcttaaatcagaaggcctattacgtttgagaattagagaaatgttcatgtttgcttttaaataaattggattatcattattttatgtacctggtgcatttccagccta

SEQ ID NO: 86549 - DNA, 120 bp, synthetic construct
  source 1..120: mol_type = other DNA
ctgaagcagtgaaggtgaatgaccatgtagaaaaacgcagttacaggattctggaggctaattcttagagcccacattgtcacaagttgtgcaaaaagttacattgcttcttttggtctc

SEQ ID NO: 86550 - DNA, 120 bp, synthetic construct
  source 1..120: mol_type = other DNA
gatattttctgagctaaaaaccttgaggcttagtttgccaagtgactggctttataatcttatgtagcctctttattggccgtaatctctttgtctgtaggactagaatctgctttactc

SEQ ID NO: 86551 - DNA, 120 bp, synthetic construct
  source 1..120: mol_type = other DNA
aaaactctgacctgagcttctcttgctgcagacaaatgcgtgtccactagctggtcagtggcaattccttactcttcctgggagttcttggtggcctctgagacaatcccaagctggatc

SEQ ID NO: 86552 - DNA, 120 bp, synthetic construct
  source 1..120: mol_type = other DNA
gtataaatcttctgataacattattctggatagtttcatcaaaggtccatcaatcactttctctttctttctcctttctccctcccctctccatccccttttccctaattcccttcctgc

SEQ ID NO: 86553 - DNA, 120 bp, synthetic construct
  source 1..120: mol_type = other DNA
ttctctatcgagacaagctgggaaatgaagaaagccctagatacctcttctatttcatgttttaggcatttatgcagctctttgctttataaacctgtcacagagataaagtgtgagaac

SEQ ID NO: 86554 - DNA, 120 bp, synthetic construct
  source 1..120: mol_type = other DNA
gttttctcaacataatgaagtttacctgatatttcctcacaaaggagaggttaccggttggagacttatggagaatcctagcatcttgatacgtggagaggaaaagatggcgaaaaggct

SEQ ID NO: 86555 - DNA, 120 bp, synthetic construct
  source 1..120: mol_type = other DNA
ttgctaaacttattgtaagcacaaaaacgacattctccacacccaaagaggctgctttcttcaatatttatctttatgtgtttcttttttctactttccatcatatcaatttttaaaggg

SEQ ID NO: 86556 - DNA, 120 bp, synthetic construct
  source 1..120: mol_type = other DNA
ttcagggaaaaattgtaatatttacaaatatatatattggaaaacttttccttgctgtttttcttacaactagtgtctctatggtatcttttctccataggacttagacatcaacctgac

SEQ ID NO: 86557 - DNA, 120 bp, synthetic construct
  source 1..120: mol_type = other DNA
gataacggagtctttataaataagagatatttttaaggaagtctttgagatcgtgtctatttaatgtttcctctcttttccttatgcccctacagaaattcatgatgaaggtaagacatc

SEQ ID NO: 86558 - DNA, 120 bp, synthetic construct
  source 1..120: mol_type = other DNA
tgaagaaaaggaagcgcgttcttgtcagtctgttgaattttgtggttaaatccatcatgtttaataaaactgaaccaggtgcattgtgggacaccctaacctggacctgttcactaccag

SEQ ID NO: 86559 - DNA, 120 bp, synthetic construct
  source 1..120: mol_type = other DNA
atgtcttgacaatgttaaactggcctttgcaggcacctttatcttcaactgaggccaggattctcatggattgttacagtccttcggtgaccctgttgtgtgattcactacttattttat

SEQ ID NO: 86560 - DNA, 120 bp, synthetic construct
  source 1..120: mol_type = other DNA
ctcacacgatccacctgtcttggtctcccaaagttctgggattacaagcgtgagccactgcgtctggccccccaaaaaaagtggtttttcagcagtttttcttattttaataccttttaa

SEQ ID NO: 86561 - DNA, 120 bp, synthetic construct
  source 1..120: mol_type = other DNA
taatagaaaaaaactactggaggctttcctattaaaaaggctttataaggcagggaagactagagagagggaatgttgtattccgagatggggcagcatgaaagcagtatggcatattca

SEQ ID NO: 86562 - DNA, 120 bp, synthetic construct
  source 1..120: mol_type = other DNA
gctaatcccataatagaggttacattaactttactccaatgtatacattatttcaacagcactttgcttgtctgcaagagctcttaatacattctttcctactaacgttcctttgagagc

SEQ ID NO: 86563 - DNA, 120 bp, synthetic construct
  source 1..120: mol_type = other DNA
caggagttaggggtgccaatctccttcacagtaggaagtcacatataacttttgattccctcaaaagataactattaatatccccctgttgaccagaagccttaccaataccagtcaaca

SEQ ID NO: 86564 - DNA, 120 bp, synthetic construct
  source 1..120: mol_type = other DNA
ctacgttaccaaatttatatcattttgttttttgagatagggtcttgctgtcacccaggctgaggtgcagtggtatgatcatggctaactatagccttgaactccgggactcaagtgatt

SEQ ID NO: 86565 - DNA, 120 bp, synthetic construct
  source 1..120: mol_type = other DNA
gtataggaaatacatggacgtgattttaatgatgatttaataatatcatttcttttaatgtgttacatcacatgaataggtcagataagaaaacttgtgatcatgttagcaagtgctgga

SEQ ID NO: 86566 - DNA, 120 bp, synthetic construct
  source 1..120: mol_type = other DNA
agcacaatttatatttaaagtctataaacataggggattatcgtgggctacctgtcttgaggtcagactgacatttctgctgtggctaaaaacaagtttagggaccctgggagcctcttg

SEQ ID NO: 86567 - DNA, 120 bp, synthetic construct
  source 1..120: mol_type = other DNA
agaagcatccagattttcaggaaaacagtgagaacagtagggatagatggatgccaaattacaggtcagaataagactctgctggtacaactataaaccttaacgatggctggtcactgt

SEQ ID NO: 86568 - DNA, 120 bp, synthetic construct
  source 1..120: mol_type = other DNA
taacatacttgatgccaacattcaaataaaaagataaaaaatgaaagtctccttaatttctctgcccacagggcattattctacatacctgtccaagcagacatgcattttcagatttgt

SEQ ID NO: 86569 - DNA, 120 bp, synthetic construct
  source 1..120: mol_type = other DNA
attatttgttgtctgcctgccttcatcagaattaaactcacaaggcagataattttttcttccttcttttttgatgtatcccagctactaaagcaatggttagccaatagtgggtacact

SEQ ID NO: 86570 - DNA, 120 bp, synthetic construct
  source 1..120: mol_type = other DNA
gtgtgagtggtgaatttagccttagatgagtataaataaacatcgctttaaagcaattcttagtggaagaaaaagacatcaaccttccctaagtgtcacacccagtttctaggagaagaa

SEQ ID NO: 86571 - DNA, 120 bp, synthetic construct
  source 1..120: mol_type = other DNA
ctgtcttagtctgttttcatgctgatgataaagacacacccaaaactgggcaatttacaaaagaaagaggtttgttggacttacagtcatggtggaaggtgaaagacacgtctcatgtgg

SEQ ID NO: 86572 - DNA, 120 bp, synthetic construct
  source 1..120: mol_type = other DNA
agtgtctgatgttgcgtagctatagggagacctggagcatttttctacttttgtcccttaaccaatgtaggtagaaatagtcaccatgcgaatttctaggacaatacaggtgtgcagatt

SEQ ID NO: 86573 - DNA, 120 bp, synthetic construct
  source 1..120: mol_type = other DNA
actacaggcatgagccacaccttgcccagcctgtgctacatagccaattatttatgttctctttcctggtaatcttttatatggagctataagagagcagccaaccaggttgttaaaatt

SEQ ID NO: 86574 - DNA, 120 bp, synthetic construct
  source 1..120: mol_type = other DNA
aaattatttagtaagttactgtcactatttacttgggagatttgtgcctgttaagaatggttaaagaagttaggcatggtagcttatgcctgtaatcccagcactttgggaggccaaggc

SEQ ID NO: 86575 - DNA, 120 bp, synthetic construct
  source 1..120: mol_type = other DNA
aaactaatagtgcatggggtacactaatacaactattacaatgctaaattgatgaaagctggttgagagggttggttttcaccctgtcctctgagaacatgccttgtggacagaagagga

SEQ ID NO: 86576 - DNA, 120 bp, synthetic construct
  source 1..120: mol_type = other DNA
gtgtctaagtgttctcattattcaattcccacctatgagtgagaacattcggtgtttcgttttctatcgttgcgatagtttgctgagaatgatggttttaaatttctaataaaaaatata

SEQ ID NO: 86577 - DNA, 120 bp, synthetic construct
  source 1..120: mol_type = other DNA
tttttttttttttttttttttttttgagacagagtcttgctctgtcgcctaggctggagtacaggggcacgatctcggctcgctgcaagctccacctcccgggttcacgccattctcctg

SEQ ID NO: 86578 - DNA, 120 bp, synthetic construct
  source 1..120: mol_type = other DNA
tgcctttttaactccgtcacctattttattactgctgtaaactccttattacctaaaatcaaggtcgttggtttggcgccagcctttgtctgtggacctatcagtcattccacctcttag

SEQ ID NO: 86579 - DNA, 120 bp, synthetic construct
  source 1..120: mol_type = other DNA
tctcccatagtgctgtgattacaggcgtgagccaccatgcccggccgtatttattttttaatttaattggtacataatttattttattggtacaaaatatcacatgtagcccataaatat

SEQ ID NO: 86580 - DNA, 120 bp, synthetic construct
  source 1..120: mol_type = other DNA
aatcttagctgggattacagctaagactgtaagaatgacagattgaagtaaagaagaaattgtacaaaagcaggcagctagttgaggttgaggagaggaataagagcaaattattgccaa

SEQ ID NO: 86581 - DNA, 120 bp, synthetic construct
  source 1..120: mol_type = other DNA
gaccccataagacgcctaaggacttcataaaatgaagactccataaacttggtccaatagatttcacttacttcatcatcaaaaagctgtcagagtgtgatatgtagaaaacctaattat

SEQ ID NO: 86582 - DNA, 120 bp, synthetic construct
  source 1..120: mol_type = other DNA
tacataggttcacatttgattctaaatgtgtttgtatgtttaacagaggattttatgtgtctgaggtcatgcttttagtgggaatatccctaactgtgggactcgggcacccaggactca

SEQ ID NO: 86583 - DNA, 120 bp, synthetic construct
  source 1..120: mol_type = other DNA
ctgctctaccttacaaattaatcaatgaatgtagtaagatgaatatgtaaataagagattgcagtgagagaaggtactgtgtggatggtttgttatgtatctttaaatcttttagtggac

SEQ ID NO: 86584 - DNA, 120 bp, synthetic construct
  source 1..120: mol_type = other DNA
gagtacagtctatgagacgtccagtaggaaattgggatgtctgagtctttaacttaacaaaacttgggatgggtgcaaattctaagtgtaagggggatatttaaaggaatggggtctatc

SEQ ID NO: 86585 - DNA, 120 bp, synthetic construct
  source 1..120: mol_type = other DNA
gaccagcctatcaggactcttggtaggtagtgatggtggtaagaacgcgtttgtttgtgtccctttttatagcatatttacatgggtgaaattagattaaaatggatgtcagattatgac

SEQ ID NO: 86586 - DNA, 120 bp, synthetic construct
  source 1..120: mol_type = other DNA
tagagctattcagttaagaacaactgaattggagatgatgcctatcagagttaaactaaatatttatctttttctcatgcttcctgcccattttgcttttatggattgaatcctgacgtg

SEQ ID NO: 86587 - DNA, 120 bp, synthetic construct
  source 1..120: mol_type = other DNA
tgggtgctggggctatagtagtatacacaaagttacaaagtttattttctcaagaagtttacattctagtgggcatatgcggcaataaatacgtttatttctaaatgtatacacttaccc

SEQ ID NO: 86588 - DNA, 120 bp, synthetic construct
  source 1..120: mol_type = other DNA
tctagagccgcactctcaaggcaaggactgggtaaaatgactgcttcaaaaacgtgggcttctaacacaagattaaaaacattcataggaatttgagctgttggatcttggcaaaaatga

SEQ ID NO: 86589 - DNA, 120 bp, synthetic construct
  source 1..120: mol_type = other DNA
aactcaccgtctctattagtctgttctcacactgctataaagaaatacctgaaactgggtaatttataaagacaagagtcttaactggctcacacttctgcaggctctataggctgggga

SEQ ID NO: 86590 - DNA, 120 bp, synthetic construct
  source 1..120: mol_type = other DNA
cacacgtgttggtctgcatattcatctcttccattcagttttcagccagggctgtgccattcatttcttgcataccttttgcatagtgaggtatatatgggaatctgcatacaaatgcta

SEQ ID NO: 86591 - DNA, 120 bp, synthetic construct
  source 1..120: mol_type = other DNA
tagagttcttaaacttgacaccaaaagtatgtctataaaagaaaaaattaggctggacgcagtggctcacacctgtaatcccatcactttgagagactgagacaggtggatcacttgagg

SEQ ID NO: 86592 - DNA, 120 bp, synthetic construct
  source 1..120: mol_type = other DNA
ggatggcctcaatctcctgacctcgtgatccacccgcctcggcctcccaaagtgctgggattacaggcatgagccactgcacctggtctataatttggtatcttgttgtcatgaagagtc

SEQ ID NO: 86593 - DNA, 120 bp, synthetic construct
  source 1..120: mol_type = other DNA
ttggtgtagagcaactttatttgtaataatcgaaacatggaatcagctgtggtatgtccatagcgtgggatactactcagcagtgaaatggaatggtctattgaaacgcacaaccacctg

SEQ ID NO: 86594 - DNA, 120 bp, synthetic construct
  source 1..120: mol_type = other DNA
tacagaagtggagtgtgtgagacgtgcagtttcgggggaacaatgggtataggtaaccaagtgaacaaatgtgagttattgattagagctgatgggaagggggtagggtgtttacggtaa

SEQ ID NO: 86595 - DNA, 120 bp, synthetic construct
  source 1..120: mol_type = other DNA
attgttgacattatttcacaccaacctccccactcccactgagaaaaactaataaaggtagacactctcctttcccccgaaagtagagagtgaacaaagcagtgaagatgtagtattggg

SEQ ID NO: 86596 - DNA, 120 bp, synthetic construct; identical to SEQ ID NO: 9508
  source 1..120: mol_type = other DNA

SEQ ID NO: 86597 - DNA, 120 bp, synthetic construct; identical to SEQ ID NO: 9509
  source 1..120: mol_type = other DNA

SEQ ID NO: 86598 - DNA, 120 bp, synthetic construct; identical to SEQ ID NO: 9510
  source 1..120: mol_type = other DNA

SEQ ID NO: 86599 - DNA, 120 bp, synthetic construct
  source 1..120: mol_type = other DNA
aataagaaacctggagtaggacaaatattaagaagaccaaattctgatgtggcctcgagattctcaccccagctatacacatcctgtatataattcctccctttttgtgtgatgggactg

SEQ ID NO: 86600 - DNA, 120 bp, synthetic construct
  source 1..120: mol_type = other DNA
cttgagacagcaattcaaatatatcaaccttaatttaattccatcagagatgttttccttcttacagcccataacttggttatgtataccagtctactatgctcaaaactttgccttgac

SEQ ID NO: 86601 - DNA, 120 bp, synthetic construct
  source 1..120: mol_type = other DNA
tgtagctctccatccttctcttttaaagagaataatccaagtttatttgagatagcctggtgttattttgtatattctggagaaaaaatgccctaaaaactacctccttttttccctgta

SEQ ID NO: 86602 - DNA, 120 bp, synthetic construct
  source 1..120: mol_type = other DNA
gaaactgcaaaactgtcttccaaagtggctgtatcattttgtattctcaccagcaatgaatgggaatcctctccagcatttaatgttgcagtattccaggttttggccattgtaacatat

SEQ ID NO: 86603 - DNA, 120 bp, synthetic construct
  source 1..120: mol_type = other DNA
gacttactgattctttgttagagatcaatgtgctatatttgtgtgggtctatttctaggctctctattctgttccactgacctgtttgtctgttctttcaccaataccacactgtgttga

SEQ ID NO: 86604 - DNA, 120 bp, synthetic construct
  source 1..120: mol_type = other DNA
tagcatgttgatatgatggattatactatggttcagtgatatcttaattaccttatgtatacaaaaggagaaaatattcatttttgctatcatacttgtattcaaacagcacattccttt

SEQ ID NO: 86605 - DNA, 120 bp, synthetic construct
  source 1..120: mol_type = other DNA
cctggattttatccagctagctttctctgagattaaaatgaccaataatatgggtagaatattctagatctaaggtcaaccaatcaaggcagtaggtcaaatccagcccactgccttttt

SEQ ID NO: 86606 - DNA, 120 bp, synthetic construct
  source 1..120: mol_type = other DNA
atatggaaggattgaatataaattatgaccacaatcatggtcatgatcatcaccatcaccatctgcatcctcagagctgacatttgttgtgcaaggacttttccaagtggtctacgtggg

SEQ ID NO: 86607 - DNA, 120 bp, synthetic construct
  source 1..120: mol_type = other DNA
gagctgcatgagctcttttgtattttcatatccgtcgaccttcctgaattctggcatccttcctgccatttgcattaaaatcccttgtgatgattacctcaaaaggtgctgttgctatca

SEQ ID NO: 86608 - DNA, 120 bp, synthetic construct
  source 1..120: mol_type = other DNA
gaacttaatttctgtataccttattaccttatgtaattgttcctctaacgtaattaatgctaatagtttgatgttcattatttgacaactttctccatgctcatacagatatatgttcac

SEQ ID NO: 86609 - DNA, 120 bp, synthetic construct
  source 1..120: mol_type = other DNA
agttgttaactatggtcatgctatagtgctatcaaatactagaacctatctctccaatctacttgtaatttttaaatgacattctgtcattcttagcaacatggttgagcctagaggacg

SEQ ID NO: 86610 - DNA, 120 bp, synthetic construct
  source 1..120: mol_type = other DNA
ggaaggctgttggccaaatctagaatgtagaaagtcctccaggacatatggtacagactgattatcaccaaataaatggcaagaagggaagacaagagaggaatggggactattctagaa

SEQ ID NO: 86611 - DNA, 120 bp, synthetic construct
  source 1..120: mol_type = other DNA
acctaaacttatcacagagtactttcatggacctaagttagatgagtaaggtgaaatctattcactgggagggagggatgggaagaaacacacacacacacagagagagagagagagaga

SEQ ID NO: 86612 - DNA, 120 bp, synthetic construct
  source 1..120: mol_type = other DNA
ttccttttagttcctgtaaatgaatacaatatgatgataaaggtgtcattttgaactattttaagtagaattaaaatttttaaaaataattcgaagctttagtcctttgcctaaaagcag

SEQ ID NO: 86613 - DNA, 120 bp, synthetic construct
  source 1..120: mol_type = other DNA
cttttggtaactaccaaacttaaaagaaaatttttattggaaatgcatatcataatgagatggaaaaagaagagacagacttctaaggcaaacaaaggaaaactcatagcttttatatat

SEQ ID NO: 86614 - DNA, 120 bp, synthetic construct
  source 1..120: mol_type = other DNA
ttgggatactcggtcttctcttttctccagtgagatcctatactatatatttgttgtagttgatgtggcccattcattatatattttatactgcatactcttacacatgaaactattgtc

SEQ ID NO: 86615 - DNA, 120 bp, synthetic construct
  source 1..120: mol_type = other DNA
tccaaatatttcattgtttttcaaataatggaaacaaatattaaacataattgtgaccgggcacagggtggctcacgcctgtaatcccatcactttgggaggctgaggcgggcagatcac

SEQ ID NO: 86616 - DNA, 120 bp, synthetic construct
  source 1..120: mol_type = other DNA
tttagttttcttgcgtgctttgatcttaagcttgtgtcttatcaatgatatatatggcctgtcctcactttgcatggtacggtgttaagggaaagtcatgcacgatagaactgtgccatc

SEQ ID NO: 86617 - DNA, 120 bp, synthetic construct
  source 1..120: mol_type = other DNA
ccattccgactacgccatgtcacaacaggaaaatacttgagtctcatggaagacaaaaaccttctactcatggacaaagagaaagctgatgtaaaatcaacagcatttaccttccggtct

SEQ ID NO: 86618 - DNA, 120 bp, synthetic construct
  source 1..120: mol_type = other DNA
aaactcgccccatgatccagtcacgtctttccctcgagacgtggagattacaaattgagatgagatttgggtggggacacagagccaaaccatatcaattgcatatttctgttcataatt

SEQ ID NO: 86619 - DNA, 120 bp, synthetic construct
  source 1..120: mol_type = other DNA
ttctgattttgaaagcagtacatgttggtctttgaaagtttagaaaatacaaaaaaaagtaggagtaagaactacctaattatgcagaatatcaacgttttgatgaatttccttcctaat

SEQ ID NO: 86620 - DNA, 120 bp, synthetic construct
  source 1..120: mol_type = other DNA
caaaataaggtgtggggagaccagaagtaattctgaaaagacagtatcctgaatgaacattcccaatgcctttctctttcaactcctgttctgggttataccgaatggtagcagatgcct

SEQ ID NO: 86621 - DNA, 120 bp, synthetic construct
  source 1..120: mol_type = other DNA
aagttggtgagagaaagaggaacacgctaccttcttcatcatgcgtaatccagcctaataaaaagaagtaaagtgttactaaagagtcagagacataaacacagatgcaggcatgcagac

SEQ ID NO: 86622 - DNA, 120 bp, synthetic construct
  source 1..120: mol_type = other DNA
ttaaaaagtcaagaaacaacagatgctggtgaggctgtggagaaacaggaacgcttttacattgttgttgggaatataaattagctcaaccattgtggacgacagtgtggtgattcctca

SEQ ID NO: 86623 - DNA, 120 bp, synthetic construct
  source 1..120: mol_type = other DNA
tttaaataaaagaattgctgccattctgtgattccttgtaagtcagccaacagagctgagcattctctctagttgatctcactgagtatcaggacccccattttacagatggggaaaacc

SEQ ID NO: 86624 - DNA, 120 bp, synthetic construct
  source 1..120: mol_type = other DNA
agttaaagataaaaaccattgcactgacattctgggacataagttctgtgcacatttttgatttgtttatttaggatggattcctacaaatggaaatagtgacttaaaagctgtgaatat

SEQ ID NO: 86625 - DNA, 120 bp, synthetic construct
  source 1..120: mol_type = other DNA
attgctgactacttcttttttggaagttgtactatttggtctaaaaatgtgaagatttcaagtgtttggtactggaggctctcagagggcagaacagtatctgttttgttcaccatggat

SEQ ID NO: 86626 - DNA, 120 bp, synthetic construct
  source 1..120: mol_type = other DNA
gggaagggaagggatggacattttttatgcccacttccaaattcttcgaaattctgctcatgtcctaacttgagctttctgtaatcatggttagtgtctttccaattagggctgtctctg

SEQ ID NO: 86627 - DNA, 120 bp, synthetic construct
  source 1..120: mol_type = other DNA
tcatggtctctgttctttaaaatacatattggattcacttaaaggtatatttgatactttttccccacctcagtgttactggtaggttgaaaattcttgccctctctttacatacttctg

SEQ ID NO: 86628 - DNA, 120 bp, synthetic construct
  source 1..120: mol_type = other DNA
cataaggcaggtcttgccaatcatatgtgtatccaatccccaaccctccagataaaattttttagcttaaaatgccactgaaacatttctctgtaggcgatttcctctggtttttcctcc

SEQ ID NO: 86629 - DNA, 120 bp, synthetic construct
  source 1..120: mol_type = other DNA
tctcaaggggcattgatacactgataaaatagtgccaattatggttttacagaagatagagaaattcagttatagttgtatgctggtcttttttaacgactgtaagaacgagaatgaacc

SEQ ID NO: 86630 - DNA, 120 bp, synthetic construct
  source 1..120: mol_type = other DNA
cctggcctgtcagtaccagtcgtttctcttaccacgtaacatttttagactttcttttcacagtgaccaactattctgggctgcagtgcggcaccataaaggagcaaataaaaaaattct

SEQ ID NO: 86631 - DNA, 120 bp, synthetic construct
  source 1..120: mol_type = other DNA
tgtggggtcaggctggaggaatcagacatatgattcctgctgtcaaaaaggtgaatgatagtcaagtggaaagaagacaattgaggaacagttttaacaaagtgccaacatttccctgat

SEQ ID NO: 86632 - DNA, 120 bp, synthetic construct
  source 1..120: mol_type = other DNA
gttgggttgaaacttcagttttctctcttttacatgaggagttgcttatatttttactcaaatctttcagcttccatctgttgccattatactggactttcctccagcatacatagtcag

SEQ ID NO: 86633 - DNA, 120 bp, synthetic construct
  source 1..120: mol_type = other DNA
acagtgagctgagactgtgccactgcattccagcctgggtgacagagaaagactccatctcaaaaaaaaaaaaatcatcatcacgatatttcacaattaaatcttctaatccagagacgg

SEQ ID NO: 86634 - DNA, 120 bp, synthetic construct
  source 1..120: mol_type = other DNA
aaaaaacatttggctggtgtcagaggatggattgctacttcctaggagaggaagcttggcatagtagtcctttaagagtgaatacctctgtagtctgagttggaaattgcagtagtagaa

SEQ ID NO: 86635 - DNA, 120 bp, synthetic construct
  source 1..120: mol_type = other DNA
gcgtgcatttaaatatgaagtgaagaaatatacagtgccgtcttctggattctagtttagtaccgttcactttgtcctccatgctgtgacaaagtccgttactgacatccccttgcttac

SEQ ID NO: 86636 - DNA, 120 bp, synthetic construct
  source 1..120: mol_type = other DNA
cagttatagaatgcctcatgttctggatgtgtctgactttttttccccattgcctatgctcttggtaattcccatgaacttgcagctaggtataaggctgtgctgtccaaatcagtaact

SEQ ID NO: 86637 - DNA, 120 bp, synthetic construct
  source 1..120: mol_type = other DNA
taaacaccattcttagctcatgggctatacggaaacaggtgatgtgctgtagtttgccaatccttggtctagactagtctgccatgaaaggtagctgttctttgaaactttatcacagct

SEQ ID NO: 86638 - DNA, 120 bp, synthetic construct
  source 1..120: mol_type = other DNA
tcatttagatgatttataagcattgttcagtgcttattattgaccagtctatgttcagaactactgtatgactggtgtgccagtgcaacgttagctttgctgctttgtaccaagtttgct

SEQ ID NO: 86639 - DNA, 120 bp, synthetic construct
  source 1..120: mol_type = other DNA
gatacttcattttcatttctttattggatatgcaaatagacaatttaaaagtatgctatgatggtaataaatctcatactgtttggtaagtcagcagaaacgttaggaagtgttaatgag

SEQ ID NO: 86640 - DNA, 120 bp, synthetic construct
  source 1..120: mol_type = other DNA
atgtaaccaaaaaatgtgcacagcatttggccacacatcctaagtgtttagtccatttttctgcctcgtctcaactccaagcctcatcagatgcagtaaagcttaaatcgaatggggtat

SEQ ID NO: 86641 - DNA, 120 bp, synthetic construct
  source 1..120: mol_type = other DNA
cataaacatttagtgttatacatttctgtttttagtggtacctcacaccttttgattttcctttcttctttctttcttttctttccgtctgtctctctctcctccctcctttccttccct

SEQ ID NO: 86642 - DNA, 120 bp, synthetic construct
  source 1..120: mol_type = other DNA
atgaacatagcccctctagtttccccccaccccacctttggtattagcatcctatgacctttaacctctttgtatctttacatttaaagtgcatttcttttaagcaataagtagttgggt

SEQ ID NO: 86643 - DNA, 120 bp, synthetic construct
  source 1..120: mol_type = other DNA
gtgtgtgtgtggatctgtattttcttcaggtattgttttcttctgcatgaaggactttctttaacatttcttatcatgcaagtctgctggagatagactcttttggcttttgtacaactg

SEQ ID NO: 86644 - DNA, 120 bp, synthetic construct
  source 1..120: mol_type = other DNA
gtttttttgggttgtttcagagggaagggaaatcctgccctgtcactttgtcttggccaaatgtaactcacatctagttgacatgtgcaatgcttatttccagatgagattccttgttcc

SEQ ID NO: 86645 - DNA, 120 bp, synthetic construct
  source 1..120: mol_type = other DNA
atgagcctgtaatctcagctgttctggaggctaaggctcgagaatcacttaaaccctgaactcaggaggcagaggttgcagtgagccaagatcataccactgcactccagcctgggtgac

SEQ ID NO: 86646 - DNA, 120 bp, synthetic construct
  source 1..120: mol_type = other DNA
caacatatatcatatattttatatacactatatatgttttcatttttcttctggatatattaataaatatattcttgaagtagatgagagaggggaggaacctgtatttgttaggtaata

SEQ ID NO: 86647 - DNA, 120 bp, synthetic construct
  source 1..120: mol_type = other DNA
acagagagcaggaatggaagtgtaatatttctatgcattaacaacttgtcatggctatagaatattacaatatcaactacagtagagatgttgtcccattcttttattgtatgcattgtt

SEQ ID NO: 86648 - DNA, 120 bp, synthetic construct
  source 1..120: mol_type = other DNA
acagaacagactacgagccctgaagaatcggcaaaatctcttccaggaagaggtccgtttctatcaacactcatttctcttctgttattctcttgtaaaaacagcttcttggttgggaaa

SEQ ID NO: 86649 - DNA, 120 bp, synthetic construct
  source 1..120: mol_type = other DNA
actacctatcaggtattctgctcactatctgggtgatgaaatcatttatacttcaaaccccagtgacacgcaatatacccacataacaaacctgcacatgtaacccccaaagcctaaaat

SEQ ID NO: 86650 - DNA, 120 bp, synthetic construct
  source 1..120: mol_type = other DNA
agcagaatgacagttttggatgtctgattgtgattttttttttttttaacgttccagggaatgatcaacctcgtgcttgagtgcatagaccgtttgcacgtctacagcagtgcagcacac

SEQ ID NO: 86651 - DNA, 120 bp, synthetic construct
  source 1..120: mol_type = other DNA
ctagtaagttagcctgcagttagggtaaagagggacagtttagtagtcaaagaaatagctgtagagattggctgtagtgccaattctctgagccccagttctcaaaggacaatgtgaagg

SEQ ID NO: 86652 - DNA, 120 bp, synthetic construct
  source 1..120: mol_type = other DNA
aggttgcagtgagccaagattgcgccactgcactccagcctaggtgacagaatgagactccatctcaaaacaaaaacaaaaataaagttattcttgatgtttctcccaactcttaagtat

SEQ ID NO: 86653 - DNA, 120 bp, synthetic construct
  source 1..120: mol_type = other DNA
actggtaggattgcttgaggctggaagtttgaggccagcctgggcaaccacctctaaattttaaaaaagaagaatttcatgtatgaatgtttgagggtagaaagtgttacgtgcagaaag

SEQ ID NO: 86654 - DNA, 120 bp, synthetic construct
  source 1..120: mol_type = other DNA
gttctggcaagagtagggaaattttaccaacattggtcttgactgatcagggatccactgttgaaactgggtcaactccttggactgcctatctgtcatatagggaatgaatgttataga

SEQ ID NO: 86655 - DNA, 120 bp, synthetic construct
  source 1..120: mol_type = other DNA
cctcatcggaaaatggcaggaacaaagtttgctttatcactatccccagactgcaaattttatattctattattctacccatttttgaacacagtatcgcacatctgcatctttaccatc

SEQ ID NO: 86656 - DNA, 120 bp, synthetic construct
  source 1..120: mol_type = other DNA
aaagtctcagatctgcagcaataattggagtcctgtaagacatgtgtatctacctttccttctttatttggctgtcaaaacctttggttcaaatattaactccaaatttgttaagcctcc

SEQ ID NO: 86657 - DNA, 120 bp, synthetic construct
  source 1..120: mol_type = other DNA
tagattttagtccaattagcccctcatttttctgtgctgcgtagggcctgttcacttagtgtttccaggctttgaatgtaaattccaagagggatgttgtttcatttcctctgtacctcc

SEQ ID NO: 86658 - DNA, 120 bp, synthetic construct
  source 1..120: mol_type = other DNA
gaataacacgtgtgtacatatctgcacatctttgcagcaagacatcacctattccctcctctccttgaagatttgctcatcttgctccaaattccaggttcatggactaagatagtcaaa

SEQ ID NO: 86659 - DNA, 120 bp, synthetic construct
  source 1..120: mol_type = other DNA
tgtaaaatgtattggtacccatgacatgcgcctacatacacacacatgcacacacacacacacacacacacgcatgcatgcacgatgttcaggaggtactctattttactgagttaattt

SEQ ID NO: 86660 - DNA, 120 bp, synthetic construct
  source 1..120: mol_type = other DNA
cttaagggatgatcattttatctgattcattgttgaccaaatcattgttatgcagcatatgaagtagtgtagaaattacttatttattgaatatgtgcgaaaaagcttttggtctttgac

SEQ ID NO: 86661 - DNA, 120 bp, synthetic construct
  source 1..120: mol_type = other DNA
tgacacggttctgtcagagaacatggtttataccatgtctgtttgcagtaaatttaatgaacttttctttgtggcttactttataattttcttaaatgccccatggcttattaaaagagt

SEQ ID NO: 86662 - DNA, 120 bp, synthetic construct
  source 1..120: mol_type = other DNA
gtagcctcaaacttcactacttcaaacgcttgcatcagctaccagattttctctgcttttttttttttttttttgaaacggagtctcacactgtctctcagactggagtgcggtggcacg

SEQ ID NO: 86663 - DNA, 120 bp, synthetic construct
  source 1..120: mol_type = other DNA
caagtgagggaactcccaggagactgtttttccattaccctttactattacctcccaatgtgaaattcactttccgaaattacattccttctaatgagcagtggtttgcttcagtctcaa

SEQ ID NO: 86664 - DNA, 120 bp, synthetic construct
  source 1..120: mol_type = other DNA
ataggcagtcaacccgatacacacatctctaataagatgttagttttatttcagtattgtggagacttatcaatgactgtgaagacttatcagtgattttggacttaccagtattaaatc

SEQ ID NO: 86665 - DNA, 120 bp, synthetic construct
  source 1..120: mol_type = other DNA
attgagaaatctggcctgcaccagagtgcaccagattttataggcaggcttgaggaagcagtgtctgatttgcatagggcccaaagattggttggactcggtatgacatttgcataggaa

SEQ ID NO: 86666 - DNA, 120 bp, synthetic construct
  source 1..120: mol_type = other DNA
ggcaaagaacatttaaatgactgactcaaaatcttagaaaaattattgttactgccaaggttaaaactcagctccctagcatcagacttgcaatatgaccatgatactttgtagctcttg

SEQ ID NO: 86667 - DNA, 120 bp, synthetic construct
  source 1..120: mol_type = other DNA
tttgcacgcataggctgtagaaatatgtacaccgctgtttactttggtgaccaaggagttcaaattagaggaaagaaaaagagtaaaacactgggttctctaggacagggaattgcttgt

SEQ ID NO: 86668 - DNA, 120 bp, synthetic construct
  source 1..120: mol_type = other DNA
acactgtcatgaatcatagctcctgtcatttctgttgccaatagtgaggaaaaaaagctgatgaatatggaaaggggaaagacgtgtgagtagaaacacaaacggcaaagctggagtaga

SEQ ID NO: 86669 - DNA, 120 bp, synthetic construct
  source 1..120: mol_type = other DNA
agcctttctaggagaaagactcaggccctacctcaatctcttgcctggaacaaagatgcagtaactggtaggctgcagccatctgccagcataagagaagacacctcacaggaaggaggg

SEQ ID NO: 86670 - DNA, 120 bp, synthetic construct
  source 1..120: mol_type = other DNA
cctcagatacttgtcagtttttgtggtgaaagcaccagtgacaccagtcactatgtatactaagagtatctgatcagttcatacgcatgaccactctgaattcatttggggaatgaaaga

SEQ ID NO: 86671 - DNA, 120 bp, synthetic construct
  source 1..120: mol_type = other DNA
aacgagtctttgagtggtctccagatatcaaagcttcatgctcatgtacagaacaacttgtggtacctgtaaataggatggtttaaggcttccaaagtccttataattctttcttgcaga

SEQ ID NO: 86672 - DNA, 120 bp, synthetic construct
  source 1..120: mol_type = other DNA
gtctcctttgggaactgagcttaagtttcattgtcagggacagaactgaagttttggcttttaggcactgttactgacagatggctatttattaccattgtctggtctgattgcatcttg

SEQ ID NO: 86673 - DNA, 120 bp, synthetic construct
  source 1..120: mol_type = other DNA
cacagtacgcacctagcaccttttatttttggatttagcagttgttggtagctacaagattaatttgatttattaaaagcaaggttttcccatgttcacactgctaagatatgatatgga

SEQ ID NO: 86674 - DNA, 120 bp, synthetic construct
  source 1..120: mol_type = other DNA
atgtaacgatgaagctgatgctatgctcagtttacatttctgcccaaaatgatagctctcaataaatatttgctgctttgaggtacacatcttttggaagaacttgctccaggggatcca

SEQ ID NO: 86675 - DNA, 120 bp, synthetic construct
  source 1..120: mol_type = other DNA
aatcatggttccttaaactgaaggcagcaaaccatcaggggcctaattaaggctgcatagtacattataattacagtgctcattttgtgtgttttatttcagctaatttactccagcaaa

SEQ ID NO: 86676 - DNA, 120 bp, synthetic construct
  source 1..120: mol_type = other DNA
cttgctatttgttttgggtagacccaattctccttggtaggaagagcaaactaagcttccagttagctcaagctagacgtttctatagttcctactttctcattttccctcatggttgtg

SEQ ID NO: 86677 - DNA, 120 bp, synthetic construct
  source 1..120: mol_type = other DNA
ccactacccttcccagcctctggtaactatccttctacttcctgtgtccatgaactcaaatgttttgatttttagatctcgcaaataagtgagaacatgtgatgattgtctttctgtacc

SEQ ID NO: 86678 - DNA, 120 bp, synthetic construct
  source 1..120: mol_type = other DNA
cacgttgctttgatccaagctctgttctaaatgtcttacatgtattgctattcataacaatttctcctctcccaggcaccattattacatccatttcatagaggtggacactggagcaca

SEQ ID NO: 86679 - DNA, 120 bp, synthetic construct
  source 1..120: mol_type = other DNA
atgattttgactgtgttttatttttgcaaaacagttgtaaccatagatgagaaacagtaccatggggggtggggcatggtggtttctaagtctgtggttttcctgggctttctgcagtga

SEQ ID NO: 86680 - DNA, 120 bp, synthetic construct
  source 1..120: mol_type = other DNA
gagaaccaacagtccatttatattcattcacttattcatttggcaaacacgagatgaccttccctgggtcagagtgagctgggtgacaaggaggcaaaattaaatcaatatctgctctca

SEQ ID NO: 86681 - DNA, 120 bp, synthetic construct
  source 1..120: mol_type = other DNA
taggagatgatatttgaaatcaacttggaatagtcaacctaagttcttgtaactcctcactactaaggtaaatcatgcatgttaaatggccagtaccctgagaccaaccctagtttattg

SEQ ID NO: 86682 - DNA, 120 bp, synthetic construct
  source 1..120: mol_type = other DNA
taaccataagcttcacgactatagctatttcttggtcttattgaatgtatttagaatttagtggtcaaatgattgtaactattgatattataatcttcattaagcactgtttctctgcat

SEQ ID NO: 86683 - DNA, 120 bp, synthetic construct
  source 1..120: mol_type = other DNA
tgttgtagcaaaatatcacaaactgggtgatttataaacaacagaaatgtatttctcacagttctagattctgggaagtccaagatcaaggctcctgcagatatggcatcctgagggcct

SEQ ID NO: 86684 - DNA, 120 bp, synthetic construct
  source 1..120: mol_type = other DNA
acatatgaaaaatagtctacccacatctccaatcaccagagagaaatgcaaatcagaactacaatgagataccatctcataccagtcacacttggctattgttaaaaagtcaggctgggc

SEQ ID NO: 86685 - DNA, 120 bp, synthetic construct
  source 1..120: mol_type = other DNA
gttgggctttgctcactacctggttgatgggatcaattgtactgcaaacctcagcattatgcaatatatccatgtaacaaacctgcccatgtatcccttgaatcgaaaataaaagttgaa

SEQ ID NO: 86686 - DNA, 120 bp, synthetic construct
  source 1..120: mol_type = other DNA
ctaagaaatcttgtgtactataaacctcaaggagaatgtcatgatctccatggattgggatgcactgttgcaggattacactttcagtgccaagaagcttcataaactggccctaaccca

SEQ ID NO: 86687 - DNA, 120 bp, synthetic construct
  source 1..120: mol_type = other DNA
tattttttgagatgcagtcgagctctgtcgcccaggctggagtgcagtggcgcgatctcagcccactgcaacctccgcctctagggttcaagcattctcctgtctcagcctctcaagtag

SEQ ID NO: 86688 - DNA, 120 bp, synthetic construct
  source 1..120: mol_type = other DNA
tcctaccaggaagagacttgttattgcagacacgtcttgtgaaccatgtcagcaggtaaattcagacagacaatgtcacctgacaggtaccataataaaagaattaatgttcttgccctg

SEQ ID NO: 86689 - DNA, 120 bp, synthetic construct
  source 1..120: mol_type = other DNA
actgtttgtgtctgtgctttcctaggaaccatgatgattcacattttatagacgaaaaaactggaactggaagtggaacttagatctaaatccagagactgagcttataaccaccgcgcc

SEQ ID NO: 86690 - DNA, 120 bp, synthetic construct
  source 1..120: mol_type = other DNA
ctagcctggagaaactgataacttcctcctgttttaaacagaaatgtggggtttgttgtgtatttctatgatgtgttttgttttttgagacagagtcttgctctgtcacccaggctggag

SEQ ID NO: 86691 - DNA, 120 bp, synthetic construct
  source 1..120: mol_type = other DNA
aacaaagcttattaatcaccttggttccttcataaacaacatgacctacctcagccccatgccccatgtgacacaaagcttagcttaggaaaatttctccatgtccggaattcccaataa

SEQ ID NO: 86692 - DNA, 120 bp, synthetic construct
  source 1..120: mol_type = other DNA
atggatttgatggccttcatctctggtcaggtacgtactatccattttctttcaccgtgttccagaagatcttttgctgggcatttctgaaagctattggtgctgcttccattaggtact

SEQ ID NO: 86693 - DNA, 120 bp, synthetic construct
  source 1..120: mol_type = other DNA
gagtgccaatagctcagttgtctagacgagaggaagctgtattttgattttttgtgaatttttaatttttttttttcgagacagagtcttgctctgttgcccaggctggagtgcagtggt

SEQ ID NO: 86694 - DNA, 120 bp, synthetic construct
  source 1..120: mol_type = other DNA
tgaatctgtggacatgtaccagaaaggacgataggcagtggaatttcaggagaaaagcatcttgaaattttattcattttttttaaatggcaagaaaatacgtatcatatcaggcctaca

SEQ ID NO: 86695 - DNA, 120 bp, synthetic construct
  source 1..120: mol_type = other DNA
ttgctcaagttgaaggttttgtttatgtttatgagcatgtgtgtttgggagaaccttaccttcttttctttcattgtgcagtgagaagcagatgctctcgggacgaattagcaaaggagt

SEQ ID NO: 86696 - DNA, 120 bp, synthetic construct
  source 1..120: mol_type = other DNA
tgccccaagcatctcgttccgaattaatggacaacctgttcaaggaatgtttgagaatttcaacatcgatggcctcttctttccagtcgttagtttctctgcaggaataaagttagtatg

SEQ ID NO: 86697 - DNA, 120 bp, synthetic construct
  source 1..120: mol_type = other DNA
tgcttttctttatttttttggactggacctgatacacaaattagaaaaagaattatggacaggtgcagtagtttgcacctgtaatcccagcactttgggaggccgaggtggaaggattgc

SEQ ID NO: 86698 - DNA, 120 bp, synthetic construct
  source 1..120: mol_type = other DNA
ggtcttttctttatctttcggtactttgggactttaagtgaccagttattacggacatgcacttcattcccgtaagaatgtggtgcatgtgcttttggttacttctccagcaggtgatgt

SEQ ID NO: 86699 - DNA, 120 bp, synthetic construct
  source 1..120: mol_type = other DNA
ctcccaaagtgttgggattataggcattagccactgtgcctggcctctattctatgttttaagtagttttcccaacccaataaactgattccctaatgtacgaacagattacaacctgag

SEQ ID NO: 86700 - DNA, 120 bp, synthetic construct
  source 1..120: mol_type = other DNA
ctctagagtcaaagtgcctggcatcaagtactcttcccttaggggagctgctcaccttctttactgggatgcttagagtatgtttgtcatagttaatagataccatattacttggcaaat

SEQ ID NO: 86701 - DNA, 120 bp, synthetic construct
  source 1..120: mol_type = other DNA
tgtgggcactgaattgcctttactctggctaatgaatgctggcccagttggtgtaagagcttggggatgatttctcattttaaattatacattccttggtagtagccccatatccattaa

SEQ ID NO: 86702 - DNA, 120 bp, synthetic construct
  source 1..120: mol_type = other DNA
attagtttttgtgcagttttgccttactacgttattgtagttaatggggctgacaggcattattggcaggttcactgaaggatggtctagctgcctagacaatggaaagttatcagtgtc

SEQ ID NO: 86703 - DNA, 120 bp, synthetic construct
  source 1..120: mol_type = other DNA
caacaaacacttgggtacctagttttgtgctacgttcatcaattttttttatttttttgctatagagtttcgctcttgttacccagcctggagtgcagtggtgtgatcttggctcactgc

SEQ ID NO: 86704 - DNA, 120 bp, synthetic construct
  source 1..120: mol_type = other DNA
gggttttcaaatattaaaggataatacagtaccgtggggccttcttgcccgcaactgactcaagttatcctttgctgggtctgaggccagttgaggcaacactgggcttgatgtacctct

SEQ ID NO: 86705 - DNA, 120 bp, synthetic construct
  source 1..120: mol_type = other DNA
gaagatgattttattctgtagggggctaaagagcattgaaaaatgcttagcaggaaggtgacagacttatgtctgctttcaaaagaagctctgctgtgaatgtggaaaagcagagagcct

SEQ ID NO: 86706 - DNA, 120 bp, synthetic construct
  source 1..120: mol_type = other DNA
agtgcctaggacataccaggcatgtttaaggtgtttgggacacatcaaagaacaaaagagaccaaaatctttgcatttttgatcttctaattcacggagacagacaatagcccaataact

SEQ ID NO: 86707 - DNA, 120 bp, synthetic construct
  source 1..120: mol_type = other DNA
atgaggattttgtgacctgataggatacaggtccacagaatgtgggctgtggaccgggactgtgtcagtcacaaattgttactggtttgtgactaaataagatattaagagcaagtgttt

SEQ ID NO: 86708 - DNA, 120 bp, synthetic construct
  source 1..120: mol_type = other DNA
ctaggactacaggagcttgccactgcatccagcctgagcacatattttgagaaaagctactgtagagtattttatatcacccagtaaaggcaaatttgctttttagtgattgctgccagt

SEQ ID NO: 86709 - DNA, 120 bp, synthetic construct
  source 1..120: mol_type = other DNA
tgacaaggtttgcttgtaataaagaatgcataacgagccctgtgtcctgagtacgtggattcagcatctctgatcttcctttgcgctcttgacatgaggcttgtatatttagcttagtaa

SEQ ID NO: 86710 - DNA, 120 bp, synthetic construct
  source 1..120: mol_type = other DNA
ttcttatgtaaattgttgacagtgacaacttactttagacttccatcgtcatctgtgtatcgtacggtactgcgaaattgtgacactctcagaacagcacagcttggcagatcatgcctg

SEQ ID NO: 86711 - DNA, 120 bp, synthetic construct
  source 1..120: mol_type = other DNA
tcctcctcttcttttttctctttggtttcttgctggcaacaatcttcccaacttacttacttatttatttgtttgtttgaaggagtctcgctctgttgcctaggctggagtgcagttacg

SEQ ID NO: 86712 - DNA, 120 bp, synthetic construct
  source 1..120: mol_type = other DNA
tgcattcattcatattttgcttaaaactgttcaatggcttcccatggaacttggagtctgatatcttcacaagtgtgtgcatggcccagacaatctgacacccctcctgtttgtcatcat

SEQ ID NO: 86713 - DNA, 120 bp, synthetic construct
  source 1..120: mol_type = other DNA
ctcttgttgtgttaagtgcccctcagaacacaactcagatatctgggagtcatcctggacacatcccttcccttcacccatggctttctattgatatgttaatctatcgacttctttatt

SEQ ID NO: 86714 - DNA, 120 bp, synthetic construct
  source 1..120: mol_type = other DNA
caccaacagtgcataagagttcccttttctctgcatcctcgccaacatctgtttttttgtttgtttgtttgcatttttaagaatagccattctgactggtgtaggatgacatcccacctg

SEQ ID NO: 86715 - DNA, 120 bp, synthetic construct
  source 1..120: mol_type = other DNA
taacaatactgattcttcagatttttgatcatgggctgtttttgtgtttgtttgcatcatctataatttctttcatcattgttttatagtttctcttgtacagatcttgtacacctcctt

SEQ ID NO: 86716 - DNA, 120 bp, synthetic construct
  source 1..120: mol_type = other DNA
ccaactttattaaaaatacaaaaattagctgggtgtgatggtgcacaccagtaatcccagctactcaaggaggctgaggcaggagaattgctttaacctgggagacagagtttgccataa

SEQ ID NO: 86717 - DNA, 120 bp, synthetic construct
  source 1..120: mol_type = other DNA
ttgtactcttgcttgcagtcacactgacctttgtgttgcttgcctgtccacacattccattccaccacaagatcttccacacgtcctcttcttggaatgctcttttctttttttattata

SEQ ID NO: 86718 - DNA, 120 bp, synthetic construct
  source 1..120: mol_type = other DNA
atctcagtcagtaactgggtttttacataccaaatgcctacctacagggtgcctcacatttgcttcctaacagtctgtttacttttctgcagctatatagtttaagtactaaaatgctac

SEQ ID NO: 86719 - DNA, 120 bp, synthetic construct
  source 1..120: mol_type = other DNA
gccgagattatgccactgtcctcctgcctgggtggcagagcaagattctgtctcaaaaaaaaaaaaggcaaaaattggcaaaatactttaccaaagaagatacacagatggctaataaag

SEQ ID NO: 86720 - DNA, 120 bp, synthetic construct
  source 1..120: mol_type = other DNA
tatagagagagattccttaaagaattggcagggtgctggcaaaattcccttttgctcagaaggtcagtctcttttttctgttgagacctttcactgattagttgaggcccagtcacatta

SEQ ID NO: 86721 - DNA, 120 bp, synthetic construct
  source 1..120: mol_type = other DNA
gctaatttttgtagttttagtagagacggggtttcaccatgttgttcaggctggtctcaaacgcgtgacctgataatgatttcttggacagatgcggtggctcactcctgtaatcccagc

SEQ ID NO: 86722 - DNA, 120 bp, synthetic construct
  source 1..120: mol_type = other DNA
aggcatgaaccaccatgcctgaccctttggccggtttttaatacagttgtttgtttttttcctgttgagttgtttaagttctgtgtggattctggatattagtccttcattgggggcata

SEQ ID NO: 86723 - DNA, 120 bp, synthetic construct
  source 1..120: mol_type = other DNA
atttatgaagcatatagtgcaccccaaacttaccccagtatttctttttacccttaacctatagtacacggtcagatcttaatactccagtcaacccttctctgcccctcccacacagac

SEQ ID NO: 86724 - DNA, 120 bp, synthetic construct
  source 1..120: mol_type = other DNA
gttaaattttagtatgtatcatagtatgtatggataggaaaaagtatagggtttggtactatctgtggggttcaggcatccactgggagtcctggaacatatcagccatggataagggag

SEQ ID NO: 86725 - DNA, 120 bp, synthetic construct
  source 1..120: mol_type = other DNA
acgtatatgtatatacatataaccatcaacctatccacacattattaaaatattatagagataagtattatgggttttagataattcccacattcttactagaactgatcagaccttaga

SEQ ID NO: 86726 - DNA, 120 bp, synthetic construct
  source 1..120: mol_type = other DNA
cctgggcgacagagcgagactccgtctcaaaaaaaaaaaaaaattgtgctttcaaggttgtatctcattgctactgctgctgtcttgggttattctggacatagagaagaaatgatcaca

SEQ ID NO: 86727 - DNA, 120 bp, synthetic construct
  source 1..120: mol_type = other DNA
tgtgcaggacttgtaagtagcaggcctgtagatgtattaaataatagcatcgagatataatcaaagtagccaccccataatctctatcagtcacctcaggcctcatgttaccccagaaaa

SEQ ID NO: 86728 - DNA, 120 bp, synthetic construct
  source 1..120: mol_type = other DNA
gtgacagctcaattatgcctttgttcagtttcttgaaagccaaaaattggaatctacctaacttccaaaagaattcattatcctctcattttcattatcctcatcctttccaaaccactc

SEQ ID NO: 86729 - DNA, 120 bp, synthetic construct
  source 1..120: mol_type = other DNA
ataccctagagacagttcgcaccgacgagcaggcaaactatcattcatagcaatgttatttggaatagctaaagaataagggggtagttataggaggtggaagaaatattcttcaataag

SEQ ID NO: 86730 - DNA, 120 bp, synthetic construct
  source 1..120: mol_type = other DNA
taagaaaagaaggccactatatggagaattgagaaaacaagcatcatgctataactactcatgtatacaccaagtaaaacagcttcaaaaatcaatgaagaaaaatactagtagattttc

SEQ ID NO: 86731 - DNA, 120 bp, synthetic construct
  source 1..120: mol_type = other DNA
aagagcaatattaatgaatttggtgggggcgggatgaaatataaacaccaatgatgccaagagcctgttttaaaaacctactaagcaggggaaaaagactctgaaaagattgacaaagga

SEQ ID NO: 86732 - DNA, 120 bp, synthetic construct
  source 1..120: mol_type = other DNA
ggaatgagacaatataagtcactactacttgatgtattcaataaggccagtgcagtgagacaagaaaaaaatcatgaggcttggaaaggaaaaacaccaaattgtcatcaatagcaggta

SEQ ID NO: 86733 - DNA, 120 bp, synthetic construct
  source 1..120: mol_type = other DNA
gccactgcactccagcctgggcgacagagcgagactccatctcaaaaaaaaaagacttgcagaacaatatcaagaactcctaaaaattaataaaaagatgcccaaatagaaaaatgagca

SEQ ID NO: 86734 - DNA, 120 bp, synthetic construct
  source 1..120: mol_type = other DNA
ggaagaacactataaaaatcatgtctaggaatagtcaacttcaaattcagagtaataattctctctggggataaggaggggattggaattgaggtgtaacagaaggagagcttcaagtgt

SEQ ID NO: 86735 - DNA, 120 bp, synthetic construct
  source 1..120: mol_type = other DNA
gagcatgtttatgtaaatagtgggaagaaaccagggggacgagttttaaaggagagaggtggtgattgagagcaaggtttcttatttccatccttgtcctggtgtcttgaattctacatt

SEQ ID NO: 86736 - DNA, 120 bp, synthetic construct
  source 1..120: mol_type = other DNA
tgcatgctgggcttcacacgtagttgatgggttgataggtgcagcaaaccaccatggcacacgtttacctatgtaacctgcacatcctgcacatttaccccagaacttaataaaaataaa

SEQ ID NO: 86737 - DNA, 120 bp, synthetic construct
  source 1..120: mol_type = other DNA
aaaaaaaaagcatactaggatcatctgagaggtttctaaaactactgctaggttttctgctcttcccaacacagccttagccctaatgctgtgaagctactacatgtgacaggaaacaag

SEQ ID NO: 86738 - DNA, 120 bp, synthetic construct
  source 1..120: mol_type = other DNA
ttttataggatttgggtagataaaggaaaattacagtcaaaggggatttgttctctggtgggcaggagtgggggtcacaaggtgttcagtgggggagctttttgagccaggatgagccag

SEQ ID NO: 86739 - DNA, 120 bp, synthetic construct
  source 1..120: mol_type = other DNA
tttgtcaccatatctgtactgttcatgggtttggatctgtgaaattatgagaccctgccatttggctgagtacaatataggaagcaagatagaagctcactttggctctgcgatctatct

SEQ ID NO: 86740 - DNA, 120 bp, synthetic construct
  source 1..120: mol_type = other DNA
acattacactgagcccttgtttcaaagactcatctggaatacctgcttaggaaaaatgtgggtcagatgggaatgaagcacaaaactgagctgcaacttaacatgaaaattccccagtgg

SEQ ID NO: 86741 - DNA, 120 bp, synthetic construct
  source 1..120: mol_type = other DNA
tgattcttagctcctttgtcagaatgtactacaaacagaaaattcgtttcataaattattgctgttaccattaattcatactggtgaaacattcatgatgtcaatagtgttatccattat

SEQ ID NO: 86742 - DNA, 120 bp, synthetic construct
  source 1..120: mol_type = other DNA
gctgaggcaggaggactgcttgaggccaggggttgaagagcggcctgggcaacaaagtgagaccttgcctcaaaaaagaacaaaaataaaacccaaaaccataaatatataatatgtaaa

SEQ ID NO: 86743 - DNA, 120 bp, synthetic construct
  source 1..120: mol_type = other DNA
ctaggtgctggggggtcactgtgaataaaatggacaaactccctgctttcaaggagcttgccttgtaatgatgccagtcatagcccagattagtagtctatttttaagagaatttgtagt

SEQ ID NO: 86744 - DNA, 120 bp, synthetic construct
  source 1..120: mol_type = other DNA
ttcttccaacgattacaacttatacctgttttattacgataataccttctctctccagcctagaatgtagaagcagtctctgctaagagatccttgaactctagggaaataaaatgcaat

SEQ ID NO: 86745 - DNA, 120 bp, synthetic construct
  source 1..120: mol_type = other DNA
ggtatttctctctctgagactgtattttaggagaaacttttgaaatgtaagaagactgggataaagtgataataaaatgggttcaccatcccttattcacaacccctggggccacataaa

SEQ ID NO: 86746 - DNA, 120 bp, synthetic construct
  source 1..120: mol_type = other DNA
ggtgggaacatccacagcctcccaattcctgcttatcttaaagtattgagaattgattatgcttcttgaaatgtggagacttgagcaaatactgcagcaggtctcaggaagtgaatggaa

SEQ ID NO: 86747 - DNA, 120 bp, synthetic construct
  source 1..120: mol_type = other DNA
ctttaaagccaaataaatgaataaaagggggagtactggatagagtcctctagtctaggtgtggaatttcagccaagtggattttcttccctgaaaaacacctgagggattagacccatc

SEQ ID NO: 86748 - DNA, 120 bp, synthetic construct
  source 1..120: mol_type = other DNA
tctttaatccgttgctcctgcagtctgagttagtttaatacccattttcaaaaaattggcaaaaaacaaattacggttgtgtgcttcgtcacagggcctataatttttgatggaaagttt

SEQ ID NO: 86749 - DNA, 120 bp, synthetic construct
  source 1..120: mol_type = other DNA
aatctattgctcagtggcattccttaaataataatagtaataatttactgtttgtttatccattctcctatagatggatgatgtgggttgtttccaattttaggtgattatgaataaggc

SEQ ID NO: 86750 - DNA, 120 bp, synthetic construct
  source 1..120: mol_type = other DNA
tgggaagaattgatattttagccatatttagtcgaccaattcatgaacatggtacatttgtccatttattttcatcctctttagtttctcttagcattgctttgcagttttcagactaga

SEQ ID NO: 86751 - DNA, 120 bp, synthetic construct
  source 1..120: mol_type = other DNA
aatctagcttcctaagtaggaaattttctcttctgttttctgaaagaatttgtgttaattctacattgtttctttttcaaatatttgatagaatttatcattgaaaccacgagcctagag

SEQ ID NO: 86752 - DNA, 120 bp, synthetic construct
  source 1..120: mol_type = other DNA
ttccttccgctcccccactctgcttaatatcaaacattttgaaagttacttactctacatttagaaggaactctgacaacattgctttcctgatactcactgaaaattgcaaagagagaa

SEQ ID NO: 86753 - DNA, 120 bp, synthetic construct
  source 1..120: mol_type = other DNA
tgctgggattacaggcatgagccactgcacctggccactctattttattttaacacatagatatggaacacctactgtgcctagttctgggaattcaaagatgaataagagtttttgtct

SEQ ID NO: 86754 - DNA, 120 bp, synthetic construct
  source 1..120: mol_type = other DNA
accaccaaagtaggtacagctaagtcaatcgggttcatgcatttcaggcagagagaatagtatatgtaaaggcttagagacacaaggaggattgcaaatgggaatttcagagagctttgt

SEQ ID NO: 86755 - DNA, 120 bp, synthetic construct
  source 1..120: mol_type = other DNA
tagggcaggctggactggattagaagccttgaagagagcagtaaagatgtgttgggtatagaattctcagctgacaattattttttcttttagtactcagatatatcatcccgctgcctt

SEQ ID NO: 86756 - DNA, 120 bp, synthetic construct
  source 1..120: mol_type = other DNA
aaaggctggccaaaatccagggagtgtttatttgattaaaatgtccaaatgttgctaagaacagcaactagtgatgttttaacttgctcctgccccatcaccctctctctaattctatgg

SEQ ID NO: 86757 - DNA, 120 bp, synthetic construct
  source 1..120: mol_type = other DNA
atgccttcaacactcaaccaggcaatttataatttcacattagccttctcttactgcatgtgcagagcctcaaggtctttcagaggtgtaagctttctcaggtttttcctgaatacatgc

SEQ ID NO: 86758 - DNA, 120 bp, synthetic construct
  source 1..120: mol_type = other DNA
tttctggcgaactcagcagagcaggtatagatgttgagagtgaaggtagtgaaattggacagtaattggggttaagagagcaagtaggggaaaagctaataagggcaagaaagtatggaa

SEQ ID NO: 86759 - DNA, 120 bp, synthetic construct
  source 1..120: mol_type = other DNA
ttgagagattttatagcataaagcaaaatcagtctgattatcactaagaggagattcaaaacattcatttataatagtctatactgctgttgctgacatttaaaaaaaagtcaagggcat

SEQ ID NO: 86760 - DNA, 120 bp, synthetic construct
  source 1..120: mol_type = other DNA
aatgttgaactgttgcttctttaaaacgtagttgcaaactaccctaaactaacttaataaatatatactatggggcagggcacagtggctcacacctgtaatcccagcactttgggaggc

SEQ ID NO: 86761 - DNA, 120 bp, synthetic construct
  source 1..120: mol_type = other DNA
gataactacctgatcattttttcttccctgaaaataatctccaaatttttgtgtaatttatagctcatatttatctcttagattcatttagggaagattacaggcatgttttaaggaaac

SEQ ID NO: 86762 - DNA, 120 bp, synthetic construct
  source 1..120: mol_type = other DNA
atagttctaatttgatcataccaagtcattgattgaactgttattaaatttttattatgcataaagtctttcccaaatcttaaggagaaacaaataggaacttccttcttctcttttctt

SEQ ID NO: 86763 - DNA, 120 bp, synthetic construct
  source 1..120: mol_type = other DNA
acttttctccactgtttacaactttcccttatttctgtttctcttctcttccttgcttcgtcttccctcttctctctcacccgtacatgtctactcatttcttatgcagagcagttcgga

SEQ ID NO: 86764 - DNA, 120 bp, synthetic construct
  source 1..120: mol_type = other DNA
gtggaaaaatatttcacaggaaagcttttgtcctcgtagtctcaaaacccttccctacaacccatgaatgcagtgaaattcaccaagtaagacattgcttttccatggttatcaaaaaga

SEQ ID NO: 86765 - DNA, 120 bp, synthetic construct
  source 1..120: mol_type = other DNA
gaagagatttgacgtttggatatttcttggagtgaaatgtcctgtgtaggaaagcatttctaggcttgaaattagggcagttgacccacttagttttgaaacatcacatttcctgaatcc

SEQ ID NO: 86766 - DNA, 120 bp, synthetic construct
  source 1..120: mol_type = other DNA
atgacagatgcccagcttgattccctagctcataattatttgtatttgtgggagtagagaaaaacaaaccgtattctgggaaacattcattgtcgcagaaaaatgatatattctaaaggc

SEQ ID NO: 86767 - DNA, 120 bp, synthetic construct
  source 1..120: mol_type = other DNA
caatggatcaggtactttgctggatgctgaggtgacaaagatgaatgaaacactgtcctatctttgtatagattacagattacctgccaggggaggttgacacttgtacagtttctgttt

SEQ ID NO: 86768 - DNA, 120 bp, synthetic construct
  source 1..120: mol_type = other DNA
ttttaaaaagttaagaattgagtttcttagtcacattggccaccatttaaagggctcaattccctcaggtggttagggatgcccctgctggacagtgcaggtagcgaatatttctctcat

SEQ ID NO: 86769 - DNA, 120 bp, synthetic construct
  source 1..120: mol_type = other DNA
cctcggcctcccaaagtgctgggaatataggcgtgagccactgcaccaggcctatttctaatagtctatataaatttgtcactgatcttcaaaatgttagccagtttgttgcttgtatga

SEQ ID NO: 86770 - DNA, 120 bp, synthetic construct
  source 1..120: mol_type = other DNA
ggttgaggttgctgggcttttattagaggttttgggaggacctgcgttttggtcttcaaggcaggttataagctttatgtagcaataatcattaagtagtaactttgtaggggtcagtca

SEQ ID NO: 86771 - DNA, 120 bp, synthetic construct
  source 1..120: mol_type = other DNA
gatcacgccacctcactccagcctggtgacagaggagtgagactccgtctgaaaaaaaatgaaaataaaaagatgctgttaggtctcttctaaggggctgcagacctcttcctcaaatag

SEQ ID NO: 86772 - DNA, 120 bp, synthetic construct
  source 1..120: mol_type = other DNA
gttcatagctggcaaaaaaacaaacaaaaaccgagaaatctcagttctacagcccaaggaaccaaattccatcaataaccagggagcttggaagatgactccaaccctcagatgagaatg

SEQ ID NO: 86773 - DNA, 120 bp, synthetic construct
  source 1..120: mol_type = other DNA
gaggcctgagatctctcttctttccccccacccccggcgtacctatataaatttccatccatcttaccacataattattttcattactagccaatgtaacaataagaaggaattatgaag

SEQ ID NO: 86774 - DNA, 120 bp, synthetic construct
  source 1..120: mol_type = other DNA
tgccatagaacatgatgaggtagtgtgtcagtatgttggagaaaagaggcctgtgacaaatggggatctgtagtgaaaatatgagatggtcacttcttcacaccctatatgataacgaac

SEQ ID NO: 86775 - DNA, 120 bp, synthetic construct
  source 1..120: mol_type = other DNA
aaatgaggagattaattaacctggattatctgggaagccaatgtcatcacaaggatccttataagaaggaagtaggagtgtgtgtttctgtgtgtgtgtgtgtgtgtgtgtgtgtgtgtg

SEQ ID NO: 86776 - DNA, 120 bp, synthetic construct
  source 1..120: mol_type = other DNA
gtatgtgtaggggaactccccaagcaaaatgaacggctttgaatgaatggcttctctgtatttctttatcttctccaactccctagtgtttgattgcctcatatcctacatagtcctttg

SEQ ID NO: 86777 - DNA, 120 bp, synthetic construct
  source 1..120: mol_type = other DNA
agtagctgggattacaggcatgcgccaccatgcccggctaattttgtatttttagtacagacagggtttcaccatttggtgaggctggtctcgaactcctgacctcaggtgatccacctg

SEQ ID NO: 86778 - DNA, 120 bp, synthetic construct
  source 1..120: mol_type = other DNA
atgaagaaatgccttaaggggtaatgaaatgaatttcccataaagtagaattcaaattcttctaatgagggatgatttccgggttccttggggctccacacacatggctttggtggacat

SEQ ID NO: 86779 - DNA, 120 bp, synthetic construct
  source 1..120: mol_type = other DNA
aaaagaagccaggatatagaactactagtttgttcctacagtatgctttgtaccctcagttgaaatattgcagcagttagattatttgatggaaatgggtggcttattcagaagtctggt

SEQ ID NO: 86780 - DNA, 120 bp, synthetic construct
  source 1..120: mol_type = other DNA
tgaggtttgtagtacaattgatactttcacccaaatactgaatatggcacccaataattttgcaacccttgtccccccaccacagttgtccccagtttctgtttttgccatccatcttta

SEQ ID NO: 86781 - DNA, 120 bp, synthetic construct
  source 1..120: mol_type = other DNA
attatatggcacatagtaggccacaagcagctagctgttaccttttcttctgatcaaaaaatgtgaatttacatcttcatataatattggtcatttttatctgctttttggccatttggt

SEQ ID NO: 86782 - DNA, 120 bp, synthetic construct
  source 1..120: mol_type = other DNA
gtgctccagaaagtcaggggttatttttgattttgttcacagctatattcccagtgtgtagaacagttcctggcacatggtaggtgttcattaaatatttgctgaatggagacacctgat

SEQ ID NO: 86783 - DNA, 120 bp, synthetic construct
  source 1..120: mol_type = other DNA
aacatcaggaaacattaactactaatatggagccatgtgtgctgggaatttcatttattggcgacctcttcattacgcaggatactttgtcatgtactgaacaaagggaggtgacggagg

SEQ ID NO: 86784 - DNA, 120 bp, synthetic construct
  source 1..120: mol_type = other DNA
gctgcacgtatttactcctgtgtatgtatcacagttaattattctcaggaatagattatttctctttttacctttttgtaccatttaaaattcagttcactgagcattcgtgctaagcat

SEQ ID NO: 86785 - DNA, 120 bp, synthetic construct
  source 1..120: mol_type = other DNA
tggaggatttctgttactgaattcaccacctgccaacattgagtgttaggactcaaacagtatgttgtttgggccattttatgtccacaccactcttacaaatttctttatgggaaagaa

SEQ ID NO: 86786 - DNA, 120 bp, synthetic construct
  source 1..120: mol_type = other DNA
tcatttactcttccttgaacacagctggatatgttcttttttcctggttggtggcactgttatacagctattcatatgactatatgttgctgcatacaaactgggtaaaatcattatgaa

SEQ ID NO: 86787 - DNA, 120 bp, synthetic construct
  source 1..120: mol_type = other DNA
actattagtagatggaaaacttttaaatttttgcctccaattcttttttttcttgagctatgtatgaggaaatctatagctcagactgtgtctggtgttagtatgtatcaagctctttag

SEQ ID NO: 86788 - DNA, 120 bp, synthetic construct; identical to SEQ ID NO: 9517
  source 1..120: mol_type = other DNA

SEQ ID NO: 86789 - DNA, 120 bp, synthetic construct; identical to SEQ ID NO: 9518
  source 1..120: mol_type = other DNA

SEQ ID NO: 86790 - DNA, 120 bp, synthetic construct
  source 1..120: mol_type = other DNA
gtgatcccatatttgagtttgatgttcacatgttctgaactatttcaaaatgagtttaggccaggtgcagtggcttaaacctgtaatcccagtactttgggagttagaggtggatggatc

SEQ ID NO: 86791 - DNA, 120 bp, synthetic construct
  source 1..120: mol_type = other DNA
agtttgtagtgttagtcctttgtgcctacaatattttcattcacccaaacggttttaaaccaagaagtgaattcttaagtcattcacagacttagacacagttaggattgcaaatccaag

SEQ ID NO: 86792 - DNA, 120 bp, synthetic construct
  source 1..120: mol_type = other DNA
atcctctctgatctgctgtgacaggtctccgaaagagtcctttataacgttgcttttcttctatacttgcaccatcattttttgggaaactcactttcctgccctcgggttgtaacatat

SEQ ID NO: 86793 - DNA, 120 bp, synthetic construct
  source 1..120: mol_type = other DNA
tgcaggtcagttcttacttggttccaacttgttgacctgtcttcattaggtgtgaaatgtagagacttataagacctgattcagaacgtccactgcagtcaatggagttttgctcagaat

SEQ ID NO: 86794 - DNA, 120 bp, synthetic construct
  source 1..120: mol_type = other DNA
ggaagaagctactgttttaccagatgaacagatatcaaaggaacacaagaaacacgcgaatggaaggaaacatgactcctccaaaggaacacaataattctctagtaacagatccccctc

SEQ ID NO: 86795 - DNA, 120 bp, synthetic construct
  source 1..120: mol_type = other DNA
aattcaccacctctggacctgccttagaagaaatgcgtaaggcagtgctaaagctggaagcaaaaggatggtaattactatcatgaaaacatgtaaaagtataaaacccattcgtagaag

SEQ ID NO: 86796 - DNA, 120 bp, synthetic construct
  source 1..120: mol_type = other DNA
gcccactagagattcacttcacctttaaggacagacatagcctgaaagtgaagggatggaaaaagattttcaatgcaaatggaaactgagagtgagcagaagtagccacacttagataaa

SEQ ID NO: 86797 - DNA, 120 bp, synthetic construct
  source 1..120: mol_type = other DNA
ttggaacaataacgaaacagagactaaacaatacaaaagatcaatgatacgaagagttggttttttgaaaagacaaaatcagtaaacctttagctagacaaagaaagagatgactcaaat

SEQ ID NO: 86798 - DNA, 120 bp, synthetic construct
  source 1..120: mol_type = other DNA
tgggtgacagagtgagactccatctcaaaaaaaaaaaaaaaaaaaaaatcagttatctaggaatacatttaacaaaggaggtgtaagatctctacactgcaatctataaaacattggtga

SEQ ID NO: 86799 - DNA, 120 bp, synthetic construct
  source 1..120: mol_type = other DNA
ccacaatattaccttattccagttaaaatggctattatcaaaaagacaaaagataataagcattggcaaggatgttgaggaagagggaaacccatacactgttggtgggaatgtaaatga

SEQ ID NO: 86800 - DNA, 120 bp, synthetic construct
  source 1..120: mol_type = other DNA
aagcccttcagagtaaacagagtatgttccccaagcagtgttcacatagtaatgaaatactctaattcttgaaggagcacatcaatcgatatgcaagaaaggaaaatctctgggctcctt

SEQ ID NO: 86801 - DNA, 120 bp, synthetic construct
  source 1..120: mol_type = other DNA
attagagccatggaagtcagaatgaaaaatgataaatgtgaaaacattctagagaagaaatgaatacgcgaaggcccgtggtgggtgatgacatgatgtgatttctgcccagtgctctga

SEQ ID NO: 86802 - DNA, 120 bp, synthetic construct
  source 1..120: mol_type = other DNA
acaccccactgtcaacattagacatatcaacgagacagaaagttaacaaggatatctaggaattgaactcagctctgcaccaagcggacctaatagacatctacagaactctccacccca

SEQ ID NO: 86803 - DNA, 120 bp, synthetic construct
  source 1..120: mol_type = other DNA
acacatacaccctcccaagactaaaccaggaagaagttgaatccctgaatagaccaataacaggctctgacattgaggcaataattaatagcctaccaaccaaaaaaagtccaggaccag

SEQ ID NO: 86804 - DNA, 120 bp, synthetic construct
  source 1..120: mol_type = other DNA
atgtgaaggacctcttcaaggagaactacaaaccactgctcaatgaaataaaagaggacacaaacaaatggaagaacattccatgctcatgggtaggaagaatcaatatcatgaaaatgg

SEQ ID NO: 86805 - DNA, 120 bp, synthetic construct
  source 1..120: mol_type = other DNA
ggagaagatgtggagaaataggaacactttcacactgttggtgggactgtaaactagttcaaccattgtggaagacagtgtggcgattcctcaaggatctagaactagaaataccatttg

SEQ ID NO: 86806 - DNA, 120 bp, synthetic construct
  source 1..120: mol_type = other DNA
ctggcttggtgaccttggacatctttcttaaattatttgagctcagtttctgcatctataaaatggggttcacagtatccgttttatggagttaatataactaaacatcttgagcagtgc

SEQ ID NO: 86807 - DNA, 120 bp, synthetic construct; identical to SEQ ID NO: 9519
  source 1..120: mol_type = other DNA

SEQ ID NO: 86808 - DNA, 120 bp, synthetic construct; identical to SEQ ID NO: 9520
  source 1..120: mol_type = other DNA

SEQ ID NO: 86809 - DNA, 120 bp, synthetic construct
  source 1..120: mol_type = other DNA
ttgactttgcttgactcatagggttatcttactttccctgtctctgtcctgtgcagaattctagtcattactttgtgaaccccaagggatgttctacatttattctttttctgcctcccc

SEQ ID NO: 86810 - DNA, 120 bp, synthetic construct
  source 1..120: mol_type = other DNA
tgatagccaattaaattgcagagatttcatttaagcagccttcttatcaataaggagctaagtttctaagttttgggccaagatttccctcccaaaatgccactgaaatgttgaatcaca

SEQ ID NO: 86811 - DNA, 120 bp, synthetic construct
  source 1..120: mol_type = other DNA
ggaaggaattcttgtttatgaaggaaaacgttgtgtctctactgagcatggaattttaacattataatttaacattttggcatgctatcatcgaaaaccaacataacaccttgtctcagt

SEQ ID NO: 86812 - DNA, 120 bp, synthetic construct
  source 1..120: mol_type = other DNA
gatgctcaaccggtaagtataatgcaaacatttcaaagtctgaataaagtcccaaatccaaacaattctggtcccaagcatttcagattagggatgttcaacctgcagtgtctattccca

SEQ ID NO: 86813 - DNA, 120 bp, synthetic construct
  source 1..120: mol_type = other DNA
cccaaggaaggcctgctccaaatgaaactgccagagccagttaaattgcaggtaatcagaacaagagacttgagtgaatttcagaattgctaagcattaaggtattagaacatgcctttg

SEQ ID NO: 86814 - DNA, 120 bp, synthetic construct
  source 1..120: mol_type = other DNA
tactgttagaaagatgagggagaagacccctcagagattttgacttttaagctgagttcagatttaagagttgtgctcagcagttacaagaaaaaggaacaaggcagggtgttctaggag

SEQ ID NO: 86815 - DNA, 120 bp, synthetic construct
  source 1..120: mol_type = other DNA
agggaggctgggagggtaagtgtattagttcgttctcacactgctaataaagacatacctgagactgagtaatttataaagggaaaaggtttaatggactcacagttccacatggctggg

SEQ ID NO: 86816 - DNA, 120 bp, synthetic construct
  source 1..120: mol_type = other DNA
gaaggccaagatatgccagagtctgaagttcttcaaataggagcaaatttcaaccacaaatgggtcttcatcatcttccactcataggaatttttgattcctaggactcgatgctagagg

SEQ ID NO: 86817 - DNA, 120 bp, synthetic construct
  source 1..120: mol_type = other DNA
ttcttccaaagtatcagtagaggttatggaaggagaagtagcaagacactcttacctttctagcaaggttcacatcagtacaggtctaatgaggaaccagaactttttaccactgcccaa

SEQ ID NO: 86818 - DNA, 120 bp, synthetic construct
  source 1..120: mol_type = other DNA
agagacgatcacctcagagttctatgtactttgaaaatactcttaaggaacgaaggggaaatcaagacattctcaaatgacaggaagttgtaagaatttgactacagcagacctacccta

SEQ ID NO: 86819 - DNA, 120 bp, synthetic construct
  source 1..120: mol_type = other DNA
gaagccaaaactgatagaactgaaaggagaaatagacaaatccaaaattatcttgcagaattcaagactcctctctcagttgatagaacagctgaacagaaaaatcagctatgacacgga

SEQ ID NO: 86820 - DNA, 120 bp, synthetic construct
  source 1..120: mol_type = other DNA
tccatttatgtaacattcttgcaatgacaaaaccatagagatggaaaacaaatttgtggttgccacgacttaaggatgaggggcagacagagggatgtgggtgtgctcatgaaaaggtaa

SEQ ID NO: 86821 - DNA, 120 bp, synthetic construct
  source 1..120: mol_type = other DNA
cttttcatctctatggagggtcctggaaccaatactccatggatactaaaggatgattgtattccaaactctgaaaaagaaatcctagatctgaaacacttccggccccaagcatttcag

SEQ ID NO: 86822 - DNA, 120 bp, synthetic construct
  source 1..120: mol_type = other DNA
tgagccactccgcccggccctgctgtgccattcttgaattcacctttcttttcttcctccttcttcctctttcttgtttttcaaactttcagatcaatatgcttctcaattttaaggatg

SEQ ID NO: 86823 - DNA, 120 bp, synthetic construct
  source 1..120: mol_type = other DNA
ctgttaagggaagtctcccctccttttattctaagaactttaaaaatggaattgattaggtattctggacgtgtgtgtgtttttattcctttatgcagtggtgtggataaggtctgatga

SEQ ID NO: 86824 - DNA, 120 bp, synthetic construct
  source 1..120: mol_type = other DNA
atttaacaattagagggcgtctgctatccctggtagaaaaggtgacatatctgaagaagaagcaagcagaaaaaccagttgagagtgactccaaaaagtcctgtaagcagtatgagagtg

SEQ ID NO: 86825 - DNA, 120 bp, synthetic construct
  source 1..120: mol_type = other DNA
ctgattagtttttatatttttagtagagactgagttttaccatgatggccaggctggtgttgaactcctggtctcaagcaatccatccacctcagattcccaagtgctgggattatagga

SEQ ID NO: 86826 - DNA, 120 bp, synthetic construct
  source 1..120: mol_type = other DNA
ctgatttgtcttctcttatttttcttttaaaaaatatccataatgactttgcagccactctgcagcagctgatttctgagaccatggtccgatgggctcaggagtctgtcattgaagacc

SEQ ID NO: 86827 - DNA, 120 bp, synthetic construct
  source 1..120: mol_type = other DNA
aaaaataaaaaaacacattgaaatccaaggtgggtagttggaaatatgaacaggaaatgataaggaagcttgtctttatctattgggccttggaaaaagaaggggtagggggaacaaatt

SEQ ID NO: 86828 - DNA, 120 bp, synthetic construct
  source 1..120: mol_type = other DNA
ctttgacagaactcaaatacaatcctgagggaagaaaacaagtgtataatgatacagactgtttcatatcatttctatacattttaactcagaaaacaatattgcatattgctcatggac

SEQ ID NO: 86829 - DNA, 120 bp, synthetic construct
  source 1..120: mol_type = other DNA
cgagacattttaggtatcacctaacaccgtttcttgaaactggatgtccgttttaatgagttagattacttgtacctggacttcatgtatactcagtttctcttggagaatatgaatcct

SEQ ID NO: 86830 - DNA, 120 bp, synthetic construct
  source 1..120: mol_type = other DNA
gaagtgctgggattacaggcgtgagccaccgcgcccagcccagattgtagattcttaatgagaatttcttaaatcctcttaggatgactgtttttaaagaagactttttgaaaaaaacac

SEQ ID NO: 86831 - DNA, 120 bp, synthetic construct
  source 1..120: mol_type = other DNA
actttattacagaagaactccagagagtatctggggtaaactatgataatatttggtctcaaggaagatgtgtttggtggggtcaaacatgcaggccttccagtccaggaaatcatctca

SEQ ID NO: 86832 - DNA, 120 bp, synthetic construct
  source 1..120: mol_type = other DNA
aattgaaaccacagtgagctatcacctcacacctgttagaatgcctattattgaaaagacaaaacataataagtgttggcgagggtgtggggaaaagggaacccttatacatgttggtgg

SEQ ID NO: 86833 - DNA, 120 bp, synthetic construct
  source 1..120: mol_type = other DNA
gagtttatagttacagcacgatccaggttatatttcatcttcatttgaattaatagcctccccagctatgagaggttcaacaccactggatgtggctgcagcttcggtgatggataataa

SEQ ID NO: 86834 - DNA, 120 bp, synthetic construct
  source 1..120: mol_type = other DNA
ttctatctcactcccagtaaaaatcaaagatgttgcaatagctcctacatcatctgttcctacataccagcctgatttcatctcctacagctttcccgcactctctcttctttgcttcag

SEQ ID NO: 86835 - DNA, 120 bp, synthetic construct
  source 1..120: mol_type = other DNA
acactgtgatatacccatatacggtgaaatgtcatcccacaataaaaaagaatgaattgctgacatatgctacagtgtgaatgaatcccaaaatcatatgctgagcgaaagaagccaggc

SEQ ID NO: 86836 - DNA, 120 bp, synthetic construct
  source 1..120: mol_type = other DNA
aaaagtaactgctcaaaataaggtgtttgctaaatgctgtgtgtctgatttgaaccaaggatgtttgactgtgatcttaggtttttctctacgtattttctcacacctgcttccccatta

SEQ ID NO: 86837 - DNA, 120 bp, synthetic construct
  source 1..120: mol_type = other DNA
tggtgtctaagggctatccagacattgggtggaacccagttgaaggagagagatatcttgactttcttagatttgctgtcttctgtaatggtaggacttgatttcttgaggtcttttgag

SEQ ID NO: 86838 - DNA, 120 bp, synthetic construct
  source 1..120: mol_type = other DNA
atttagcagagggaaatttaggttgtagaagatgcatcttatgaattttcctaggggagctagggcaaggtgggttgttgtaaatgatacgaagtgaacctttggggttagactggagtt

SEQ ID NO: 86839 - DNA, 120 bp, synthetic construct
  source 1..120: mol_type = other DNA
gtgcaataacatttataaagtacttgctctgggcaagcactgtactggatgccttacatgtgaccttgtatgccatctttgtcaccctttctctacatgtgtgccacttacagaaatagt

SEQ ID NO: 86840 - DNA, 120 bp, synthetic construct
  source 1..120: mol_type = other DNA
gttacagtgcatccagaaaacaactgctcctaccaaaagtcattttcttttgtgtatttagctctatgtgtttgccatcgttttaggggaaagtgagagggaaggtatagggggtggata

SEQ ID NO: 86841 - DNA, 120 bp, synthetic construct
  source 1..120: mol_type = other DNA
ttttgtgtggtttaggtttttcatacccagaggttaaaacttccttgatgtactcttttgttgtgaacaaagaggagtcacaggatagagaaatgttagaatgttagaaaactggagtct

SEQ ID NO: 86842 - DNA, 120 bp, synthetic construct
  source 1..120: mol_type = other DNA
tgatgtcacaaagttgttctaatgtttttttttcccctgtatagttgattcatgccgggaagggagaagccatcagaattaggtccattttgagatccctcattcccctgggagatttgg

SEQ ID NO: 86843 - DNA, 120 bp, synthetic construct
  source 1..120: mol_type = other DNA
agcaatcctcctgcctcagcctcccaagtagcagggactacaggcatgtgtcaccacgttgggctaattttttgcattttttgtagagacagggtttcaccatgttagccaggatggtct

SEQ ID NO: 86844 - DNA, 120 bp, synthetic construct
  source 1..120: mol_type = other DNA
ggtggcaaaactaccataataattgaacgcccattatagctttaggcaaagctagaaattaaaaatcttccccgcctttggcttccccatttgagacagtttcttctccttgtgcatctg

SEQ ID NO: 86845 - DNA, 120 bp, synthetic construct
  source 1..120: mol_type = other DNA
gccgtgccactgcactccagcttgggcagcagagcaagactctgtctcaaaaaaaaatttttttttttactgctttccttttgtggagaatgtagacagaaacctgtaggtttttatgtc

SEQ ID NO: 86846 - DNA, 120 bp, synthetic construct
  source 1..120: mol_type = other DNA
ttgaataagagtcatgatagcagcctcacagttgggttgtgggaattgtgtaagatcgtgtcagtaacattcctagtgcagtacccgacaacagcacaacacatcagaactattattctt

SEQ ID NO: 86847 - DNA, 120 bp, synthetic construct
  source 1..120: mol_type = other DNA
agaagtctagaaagcagccatttgtaatctatcctgtatatgacacagccattgacaccaaaattcacttctctcttttagatgggaatgtggtggaacctgacatgtctgcggggtttt

SEQ ID NO: 86848 - DNA, 120 bp, synthetic construct
  source 1..120: mol_type = other DNA
agccgacagtagccccttcatgaaatatatgagagcagaatcacaaaaatgaaatgaaaatttcttttttctttgttttgtgtattcacctgacgttgtggacctggatagtatgggcga

SEQ ID NO: 86849 - DNA, 120 bp, synthetic construct
  source 1..120: mol_type = other DNA
agaatactattctggatgttgggagtggggagtaattgtgttgggagtccttggccactttaggtgagatgaatagatctccccttttgactgtgtttgatgatttaactcatcttctag

SEQ ID NO: 86850 - DNA, 120 bp, synthetic construct
  source 1..120: mol_type = other DNA
ttagctttgttccaacagacaactgagaccttctatgatgcagcacttactcagaagattagtatttgatgttccattattaaatgaacacgcaaagatgcctcttaaagtaagtatagg

SEQ ID NO: 86851 - DNA, 120 bp, synthetic construct
  source 1..120: mol_type = other DNA
tagatgaccactctgcaatgccatctagtagcattattttttccccaatggctacccagtactagtgctgaagaagtatgagatataaagagtctatatggagctgttacagtaagcatc

SEQ ID NO: 86852 - DNA, 120 bp, synthetic construct
  source 1..120: mol_type = other DNA
gcaagccatagagaggcagagagggagcaaaaagaatcacagatgtatagttcctttattgtgcttctgggtcatcctgacatcagtcccttcattttacacacagattccaagatatta

SEQ ID NO: 86853 - DNA, 120 bp, synthetic construct
  source 1..120: mol_type = other DNA
tcattgcttttataattgttttcccacatagctgctgacaaatcattatgaaagatgctggaaatattactgcctgcctggagggtggggaaactttggtgctgcctcagaagaagaact

SEQ ID NO: 86854 - DNA, 120 bp, synthetic construct
  source 1..120: mol_type = other DNA
ttcctataaatttttagcatgcatactttctatagaatttcttttccagctcagaattttatttttcaaagctttataatgcaacatggatcagttaaaatttctcactctctagaatgt

SEQ ID NO: 86855 - DNA, 120 bp, synthetic construct
  source 1..120: mol_type = other DNA
attaataacgacaatcaacctctatataacatcttttacttaggatgtacccagcatgcactgcaaagctgtttctgcgagtagcaagggaatcccttcacccatcactacatctcagca

SEQ ID NO: 86856 - DNA, 120 bp, synthetic construct
  source 1..120: mol_type = other DNA
tgtggtgatatcagtgatttctagacgattacgattttttatatattgcttcttaagtatgtgtatgtcttatagttcaattactgttaactgctggaaaacaacagcaaaccatcttat

SEQ ID NO: 86857 - DNA, 120 bp, synthetic construct
  source 1..120: mol_type = other DNA
aacaatcaccaagagcttcaggaggaaatgatgactccgggttcagaattcaccttttaaggaaactttggttttatatgtaggtttttttggtttattttttgagtcctgctctgctgc

SEQ ID NO: 86858 - DNA, 120 bp, synthetic construct
  source 1..120: mol_type = other DNA
ctgagtgggtggagttggtgatggagaggaatattacaggaaggttttccagtctaattactcagattctgtaggcagacaagaaattatatagggaaatggtgatatgtacagatgggc

SEQ ID NO: 86859 - DNA, 120 bp, synthetic construct
  source 1..120: mol_type = other DNA
ccaaaggtcccgtttaaaaaaaaaaccttcttatattttgtcttttcctctcaattcttaatttctgtcagcctttctgtgtttattctcttctctccttaacatttttcttttcctttt

SEQ ID NO: 86860 - DNA, 120 bp, synthetic construct
  source 1..120: mol_type = other DNA
ggaacagaaaaccaaacaccgcatgttctcactcataagtggaagctgaacaatgaaaacacatggacagaggaaggggaacatcacacaccggggcctgtcagggagtggggggctagg

SEQ ID NO: 86861 - DNA, 120 bp, synthetic construct
  source 1..120: mol_type = other DNA
cctaaaagtcataaaatagtgttagataaggtcaagttaaatctactacaacatggtatggtaagggtgggactagtggtatgaataaggcactacacagtatagagaaagggatgtttt

SEQ ID NO: 86862 - DNA, 120 bp, synthetic construct
  source 1..120: mol_type = other DNA
ttttataaaaggaatacaaatggatgagtgaagatcatgtgtagatgtgattctgagcctgaattcctcagctttttttcactggggcttagcactccctcagggacacacaagtggccc

SEQ ID NO: 86863 - DNA, 120 bp, synthetic construct
  source 1..120: mol_type = other DNA
tggaaaaaaatctctgctgtcaaggagcttacattctaatgggggaaataaacaacatacttgaaactgggcaaatttcaaaagaaagaggttcaatggactcacagttccacgtggctg

SEQ ID NO: 86864 - DNA, 120 bp, synthetic construct
  source 1..120: mol_type = other DNA
ggtggatcacaaggtcaggagtttgagaccatcctgcccaatatggtgaaaccccgtctctactaaaaatatgaaaattagctggtgacagagatgcgtgcctgtaatcccagctactcg

SEQ ID NO: 86865 - DNA, 120 bp, synthetic construct
  source 1..120: mol_type = other DNA
cgtctttgattaactcttgcttgcgtgaggaagagtaaatttcattgcagccaatttggatttgtaagaaactcaaaaatgtaatgatcctctgcataagataatgtttcagaattttgg

SEQ ID NO: 86866 - DNA, 120 bp, synthetic construct
  source 1..120: mol_type = other DNA
taaattgtttggtttgccatttgttattgctcccatatgaacgtattaaaatgacacagtaaacttgaaaatcaaatgtagaaagaatccgggaggtaatcttatcaaaacccaaaaggt

SEQ ID NO: 86867 - DNA, 120 bp, synthetic construct
  source 1..120: mol_type = other DNA
tctgagctcaattccatgagtgtatggatgaagtcgtcttcagcacaacagcttattataactttttaaaatcagaacggtttaattgtgcctgtaacagattgaagttggaaatgctgt

SEQ ID NO: 86868 - DNA, 120 bp, synthetic construct
  source 1..120: mol_type = other DNA
ttgagattagggagtggtgatgactcttaacgagcatgctgccttcaagcatctgtttaacaaagcacatcttgcaccgtccttaatccatttaaccctgagtggacacaatacatgttt

SEQ ID NO: 86869 - DNA, 120 bp, synthetic construct
  source 1..120: mol_type = other DNA
caggcggctgggaggtggaggttgtagcgagccgagatcacgccactgcactccagcctgggcaccattgagcactgagtgaacgagactccgtctgcaatcctggcacctccagaggcc

SEQ ID NO: 86870 - DNA, 120 bp, synthetic construct
  source 1..120: mol_type = other DNA
gcatatacttactggttcagcatcccaaatcccaaatccaaaagcttaaatgctccaataagtgtttcctttgagcatcatgtagatactcaaaaagtttctgattttggaacatttgga

SEQ ID NO: 86871 - DNA, 120 bp, synthetic construct
  source 1..120: mol_type = other DNA
tgcacagttttgttttcacccattctcttctcttttatcatccctgcatctgtgcagagaagatgaatctgctttagggaaatcaggagaaaaatgcctcctttgcttgccttagtcatc

SEQ ID NO: 86872 - DNA, 120 bp, synthetic construct
  source 1..120: mol_type = other DNA
atatctttgattaggacaaaagtcaaatttggtttctactaaacttagtaacatattctataccctctgctgttcacaagtgtttgttattattgtcttctgacaactgtttgtgcttga

SEQ ID NO: 86873 - DNA, 120 bp, synthetic construct
  source 1..120: mol_type = other DNA
ccttataacttttctaaatccagctaagtatgatttagcatttgtttctactctccacattcagaattgctttgaacgcagaagagaatacagctgcttccctctcattggcgagtgcag

SEQ ID NO: 86874 - DNA, 120 bp, synthetic construct
  source 1..120: mol_type = other DNA
tttcccattttcatttttgctcttccagaggatttaaggacctggaactggacacgccttctattgagaaacgatttgcctatagtttcctccaacaactcattcgctatgtggatgaag

SEQ ID NO: 86875 - DNA, 120 bp, synthetic construct
  source 1..120: mol_type = other DNA
gtcattcaacacctttcctctgggaccattcatcttggatcccttagctgctgtttgtcttaggatgtaaatctagtttctgccatagcatcagattaaagtttgtagaaattagagctc

SEQ ID NO: 86876 - DNA, 120 bp, synthetic construct
  source 1..120: mol_type = other DNA
atggcttggccagggcaaattaggtacaagaactctgttagaggagcagatagagctgtgattgtcaatatcgtgtttattttaatttccatctttcattgttatcgcaagtgaaactgc

SEQ ID NO: 86877 - DNA, 120 bp, synthetic construct
  source 1..120: mol_type = other DNA
aattgctgtcctcctcctcatcccagatcctgacttcctgcagttttttagtttgtgtcttaaattgagaagctttaactttcggtcacacgaagaggcaatctttattattagaggcca

SEQ ID NO: 86878 - DNA, 120 bp, synthetic construct
  source 1..120: mol_type = other DNA
aaataggaaagtctgagttaattcataaataggcacattataagaacatttagtacagaatattgtgggaccttagtcctgctcattttatggaagatcagagaggataaattgtttata

SEQ ID NO: 86879 - DNA, 120 bp, synthetic construct
  source 1..120: mol_type = other DNA
taatagttctggaggccaggaaagggctataatgggaaacaaacccagaaatgtttcttgtttttgtgtaactcataggctcctggaaagagagactttaatccaaagtcccacgcatac

SEQ ID NO: 86880 - DNA, 120 bp, synthetic construct
  source 1..120: mol_type = other DNA
agaaatggtgactaggtaaacagctataaaaataagcactgttgtatgacttaggtgtatatgcagttgcaaagaaaacctgaggaccttgaagtggggctgtacggagagtatctgccc

SEQ ID NO: 86881 - DNA, 120 bp, synthetic construct
  source 1..120: mol_type = other DNA
cgtaacactggggaatgcagctggagtggaattgtcagttcatctctttcacttattgtctattttaccaagtagcaagtggccagtcatgtgatatgggattgcaacagtataaaacat

SEQ ID NO: 86882 - DNA, 120 bp, synthetic construct
  source 1..120: mol_type = other DNA
gaataaatcagaggtacatcgctattttgtgctagcctcagttgatgtccctttggggctctagactaaccctagaccacccctctctctaatgacactgcaccagaatatctttaatta

SEQ ID NO: 86883 - DNA, 120 bp, synthetic construct
  source 1..120: mol_type = other DNA
ccaatgtttccatgagatgtttagatacttcctggcacaagaaattattatatactgagcatttgctgtatcgaaggtcagtactgtcgtgtctggagtatactttgcagtagctaaata

SEQ ID NO: 86884 - DNA, 120 bp, synthetic construct
  source 1..120: mol_type = other DNA
gcctcgttcagatatttctgaatgccacctatgtacggcaagctgtctgaggcctgaagataaacacacacacacacaataacacagttcctaactttaataaatttagaactacagcca

SEQ ID NO: 86885 - DNA, 120 bp, synthetic construct
  source 1..120: mol_type = other DNA
cattaggggcattggtgagctgcaaaggagtgttttagtacaagacaatgagtaaatgctgaagaagtagatgccttataaattctggagaatgttggaaatgaggggaagcagagaaag

SEQ ID NO: 86886 - DNA, 120 bp, synthetic construct
  source 1..120: mol_type = other DNA
tgatcacagctgttaatgcagagttttgcaagagaacatagtcagtgaggacttagctgttctcgttattgggaaaaatcaagctgagtgtgggtggtactatacacatggatcttcaag

SEQ ID NO: 86887 - DNA, 120 bp, synthetic construct
  source 1..120: mol_type = other DNA
gtttgttaaagagatgcactcaaagactctttctttaatacctttactccacattctgctcagagaattgattctttctgcgtgacatcatgttgcttttttccggctcatatatcagct

SEQ ID NO: 86888 - DNA, 120 bp, synthetic construct
  source 1..120: mol_type = other DNA
ggctttagaatctttagtggctggtggaatttgtgtttcacactttcctgcatccgattttataaactgccgaagaaaatgtgaaccctttgctctctaggttttgagacagtgttggag

SEQ ID NO: 86889 - DNA, 120 bp, synthetic construct
  source 1..120: mol_type = other DNA
tggatggatcacttgagcccaggaatctgaggtagcagtgagctatgatcacaccactgtactctcatctaggaaacagagcaaaaccctgtctctaatacaagcaaataaaaagaacaa

SEQ ID NO: 86890 - DNA, 120 bp, synthetic construct
  source 1..120: mol_type = other DNA
cacctcggtctgccaaagtgctgggattacaagtgtgagccaccgtgcctggccaaatcttttaagtcttaagcatttaagcttcacatattatgggtattggtatagtatttaaatgtc

SEQ ID NO: 86891 - DNA, 120 bp, synthetic construct
  source 1..120: mol_type = other DNA
ttcttgcattttggcaggaaatacattgattatcaatgggattacaagcgtgagccaccacgcccggccaaatctctaagtcttaagcatttaagcttcacatattccctgtactgtctt

SEQ ID NO: 86892 - DNA, 120 bp, synthetic construct
  source 1..120: mol_type = other DNA
taaataggacgtaggcaggttgacaagtgatatccttatcatttgccattttcaaggaccagtgttgactaaagaaacagtgctttgattcccagagttacccctgacttttgctgccta

SEQ ID NO: 86893 - DNA, 120 bp, synthetic construct
  source 1..120: mol_type = other DNA
ataatactccgtcctgctactattataatagtctctggtgccgtgtacttttcctccatgtcactgatggtatgcctaccagattaatatctctcttctctcgcataaactctcagctct

SEQ ID NO: 86894 - DNA, 120 bp, synthetic construct
  source 1..120: mol_type = other DNA
gtgagtatgcctgacttataccagtagataaatcttaatgttacgtttggaagagttttaaaagtagatactaaataaagtaatacaatggagcctatcaactcttatttctacctaatc

SEQ ID NO: 86895 - DNA, 120 bp, synthetic construct
  source 1..120: mol_type = other DNA
gtgtcctcggtttgactgaaactcctcaccaaattagggaaccaataattttactctgttcaatatcacagactttagaaataacaaagtcattgacactctgcaatttctctctattcc

SEQ ID NO: 86896 - DNA, 120 bp, synthetic construct
  source 1..120: mol_type = other DNA
tgaagactctactttttctgccttcttagagtccctttcccattttttacatagaggtgtttctatttaaagttgtgctgtgtctaaaaggggtctaccaagatgtaaaaatgtgtggag

SEQ ID NO: 86897 - DNA, 120 bp, synthetic construct
  source 1..120: mol_type = other DNA
tctttctacaccattcagtggtgccgcctttcacctaattactcaggcagaaaaccttagagttatccttgactgctttcccgctcacctcacattcaatccataagtaaatccttcaaa

SEQ ID NO: 86898 - DNA, 120 bp, synthetic construct
  source 1..120: mol_type = other DNA
agttccaggagaagccccagagctggcatctgccaatggacaggaaaataaaaaatcctaccattctgctcattttgtcttcattattaccaggaattctgagacttgaagcacaagatg

SEQ ID NO: 86899 - DNA, 120 bp, synthetic construct
  source 1..120: mol_type = other DNA
agaaaagaagaacattgagaaattctcagggcaatttatacagcattttgtttcctctttaggcaatgatgcaacatcaattgtcaactgtcttcatattttgggtcagactttggatgc

SEQ ID NO: 86900 - DNA, 120 bp, synthetic construct
  source 1..120: mol_type = other DNA
attgcctcaggaaacattctagttttgttggatttcggattaactatactcactcagaagctgtgttttgttagttaaattggagaccgttagtgataagcatacagcattagcacagac

SEQ ID NO: 86901 - DNA, 120 bp, synthetic construct
  source 1..120: mol_type = other DNA
aagacgactgagacaaagtctgtgtctaaataattggccttttagagtggctcaaatatcctctgtttagaggtttctgacagtttttagggaagctttaatcttctgttttgggctggc

SEQ ID NO: 86902 - DNA, 120 bp, synthetic construct
  source 1..120: mol_type = other DNA
caagtgagattctctttttccttagtggaagatgtccaggtgtcttgttatagaattctgactagcttatatgctttgggaaccagcaagagtatttacgtggagaggtaagaatgttta

SEQ ID NO: 86903 - DNA, 120 bp, synthetic construct
  source 1..120: mol_type = other DNA
ttgatatgtgactttatttttgacatgttggctgttttctgtttttcactaatatatataatgccagatctatgttcatagattccattgtatttttatgcttatttcccttagctgtat

SEQ ID NO: 86904 - DNA, 120 bp, synthetic construct
  source 1..120: mol_type = other DNA
ctttataatcctattgtttgtatcctaaatatttgttaaatgccagatactaggatacagaaataaacaagatacttctctactctcataggttttatatctggtagaggaaaccaaacc

SEQ ID NO: 86905 - DNA, 120 bp, synthetic construct
  source 1..120: mol_type = other DNA
taatatctggtttttcaaaccctctaattccttcttattgctgtagcttttgtttttgtcattgttgtttttgcctatatatttatctggacaaaattcgaggtcacttttttaggttct

SEQ ID NO: 86906 - DNA, 120 bp, synthetic construct
  source 1..120: mol_type = other DNA
ggtttctcttctgggtgactgactggataatgtccccaccaagttagggcatgctcaagataggctggagagaaaaagagaagtttaaatttagatccatcgtgttttagttgtgcttga

SEQ ID NO: 86907 - DNA, 120 bp, synthetic construct
  source 1..120: mol_type = other DNA
tgaaacacaggagaaggagccagttgcaggcatgccacgtcttgctaaattttgaagtccaaaatgaaatagttgcctgtggaaatccgccatatcatctcagtactttctttgaatatc

SEQ ID NO: 86908 - DNA, 120 bp, synthetic construct
  source 1..120: mol_type = other DNA
atacatctacatgccagaatattatgtcatattttgttttttgtttgtttgtttatgagatggagtttcactcttgttgcccaggcaagagtgcaatggtgagatcttggctcactgcaa

SEQ ID NO: 86909 - DNA, 120 bp, synthetic construct
  source 1..120: mol_type = other DNA
gaattcaactcagtaaacatttttttaatggcagctatgcaattagaacttggactagaaaaatggctgaggcatgagctgtacccttaaggaagtcatgtgctggagaaggaggcttta

SEQ ID NO: 86910 - DNA, 120 bp, synthetic construct
  source 1..120: mol_type = other DNA
tttgtaggcacctgcttacttgcctcctaggtttcatgtaacagttgaggagagagaataggttcccctgaggagtttgagggaatataaaccttcttctgagttttgcaatttatcctt

SEQ ID NO: 86911 - DNA, 120 bp, synthetic construct
  source 1..120: mol_type = other DNA
tgaaataatggctgcttaacatgcaactttgtatcttcacaaagatacaaatttatttatcctgtgtaactcatgtttgggggatgcaatagatcatccaaggtattctgaaggaaaatt

SEQ ID NO: 86912 - DNA, 120 bp, synthetic construct
  source 1..120: mol_type = other DNA
gttacgtcatagttctatgtgtcctcggaaagtctatgttaatctcaggaatcagtatatgcctttcaccagctaaccaggcgtttgaatattcattctactccttggtaaacatgtgat

SEQ ID NO: 86913 - DNA, 120 bp, synthetic construct
  source 1..120: mol_type = other DNA
acacacacacactcacacacacacacacgcaccccccactcaccaaaagtcagtataatgtatgtttaacatgtcaacactatgtgtccatcaagtgtgaatatttgtgtgcttatgtgt

SEQ ID NO: 86914 - DNA, 120 bp, synthetic construct
  source 1..120: mol_type = other DNA
tcctgacctcgtgatctgacggcctcggcctcccaaagtacctggattgcactccagcctaggcaacaagaatgaaaatccatctcaaaaaaatatatatagatagatagataggtagat

SEQ ID NO: 86915 - DNA, 120 bp, synthetic construct
  source 1..120: mol_type = other DNA
attgttacaatcatatttgtatgtttgtgggtgtgtgagagacagagatagagaggaggcagaagcagaggttgattgattgattgattaaagaaagggctcaagtggctgggtgcggtg

SEQ ID NO: 86916 - DNA, 120 bp, synthetic construct
  source 1..120: mol_type = other DNA
agactaagaaaactccaaaccaatacaatttagactaagaaaactccaaaccaatacaatttagactatattggggatgtcgctttgctgaaactaaattaccggtattggatagaagta

SEQ ID NO: 86917 - DNA, 120 bp, synthetic construct
  source 1..120: mol_type = other DNA
ccttgagtaacatggcagtattcagttgtaaactggttatccagatcgtcctgaatatttatgaaactccaatgagtatattacttctatttctactagacggggactgaggctctagga

SEQ ID NO: 86918 - DNA, 120 bp, synthetic construct
  source 1..120: mol_type = other DNA
gcccaagactcaaacataaagactgctctttttttgaggctgtttttatttgtaagttatgttaatcacctccgggacacattcaagaaccaaacaggaaagacacaaaccaatctctgg

SEQ ID NO: 86919 - DNA, 120 bp, synthetic construct
  source 1..120: mol_type = other DNA
tcttgacagaaagataccgaggatgaagtacgagatataatccgcagcaatattcatttacaaggcaaggtaagccaaattttattcttaagccacatttactacctatacattagttaa

SEQ ID NO: 86920 - DNA, 120 bp, synthetic construct
  source 1..120: mol_type = other DNA
tatagaaatatctgagactgggtaatttaggaagaaaagaggtttaattgattcacggttctgcaggctgtacagaaagtataacacgggcatctgcttttggggaggttccaggaagct

SEQ ID NO: 86921 - DNA, 120 bp, synthetic construct
  source 1..120: mol_type = other DNA
agaataagataaaggtgagacatgcctttaccatattcacaatgcacaagtattcattcagagcaaatttcatgtgaagtttgatgtgtactcagttgtttactaacaattcttttagag

SEQ ID NO: 86922 - DNA, 120 bp, synthetic construct
  source 1..120: mol_type = other DNA
acaaatcatttatccctatacaaagctctatctgtctgtgtttgcctgtagatgaaaattatttctgacattttaactaggcactctcagtctgggagttgtgaagttttagatgtcatc

SEQ ID NO: 86923 - DNA, 120 bp, synthetic construct
  source 1..120: mol_type = other DNA
aaatctttctacaattagactgtgaatggggaggagaagagcatgggtagccttacccattttgttttccagtttcccactcatccttaagccctagttacaacgtcttgtgttaaggga

SEQ ID NO: 86924 - DNA, 120 bp, synthetic construct
  source 1..120: mol_type = other DNA
tgtaaccttttccttttttctgcagttggaggatcctgctattagatggcaaatggctctttacaaagacttaccaaacaggactgatgatacctcagatccagagaagacggtagaaag

SEQ ID NO: 86925 - DNA, 120 bp, synthetic construct
  source 1..120: mol_type = other DNA
acagggctcttatgacagatcatactgttgatgacttggttattttatactaaatataaaataataataagatgccctatgccatctcaggaactttgccacctaaatgtatgtgtgtgt

SEQ ID NO: 86926 - DNA, 120 bp, synthetic construct
  source 1..120: mol_type = other DNA
ccttatccccagcagacctggaggactgagtgctgtaagagaggaaacagacacttaaacagataaatatgggatgatacggagctgttaggatataaaatgtgctgaagaaagtataga

SEQ ID NO: 86927 - DNA, 120 bp, synthetic construct
  source 1..120: mol_type = other DNA
gtggataattgtcaccacgtgtttattgatcatagagggggaagagcatcacagaaataagtgcttttccgttaaacaagttgcctcgtgaaaatttctaaaccaccgcagtccaaacat

SEQ ID NO: 86928 - DNA, 120 bp, synthetic construct
  source 1..120: mol_type = other DNA
ggtagtttggggtgtaaatatttatttgtgtcattctacctcaggtggaacatcctcagagatctaaaaaggctgtatggcataaactactgtccaagcagaggaaaagggctgttgtag

SEQ ID NO: 86929 - DNA, 120 bp, synthetic construct
  source 1..120: mol_type = other DNA
ccatttcagtcaccttggagttctctgagaaactatgctctttcccactctgaagtttatacaaattgcatcacctctatgtctcagaaacaggactcagctcagctacatctcttttgt

SEQ ID NO: 86930 - DNA, 120 bp, synthetic construct
  source 1..120: mol_type = other DNA
atcacacactggggcctgtcggggggtgggggcaatgggagggagagtattaagacaaatacctaatgcatatggggcttaaaacctagaagatgggttgataggtgcagcaaaccacca

SEQ ID NO: 86931 - DNA, 120 bp, synthetic construct
  source 1..120: mol_type = other DNA
catctgcactggtcttttttcacaggcggccatttatgataagtagtgcagggtttaatctttgagtatgtactcccataaagttcacttaataccttttgttttggaatcctcagggcc

SEQ ID NO: 86932 - DNA, 120 bp, synthetic construct
  source 1..120: mol_type = other DNA
acacaggagactgaacacatggtaaatgtggagcatgagaagtagaattttcaccagactgtgctgataaagagcttgtgagttcagcacagaacagcagtcagtatcatcttttctaag

SEQ ID NO: 86933 - DNA, 120 bp, synthetic construct
  source 1..120: mol_type = other DNA
tatactttgagttatgaaaatgcttataagaatggcatttggtatttttaaatgatataagttatccctgctcatattaatttttggtcaaattattaaatatctctgttttgagctgca

SEQ ID NO: 86934 - DNA, 120 bp, synthetic construct
  source 1..120: mol_type = other DNA
ctgagatctatttcaagggcattgcccatttttcttgtcttctgcagccttagtcatatgaattcaccaaagccacaaagggcaaacctctctgaagttacataagaaatgcactggtag

SEQ ID NO: 86935 - DNA, 120 bp, synthetic construct
  source 1..120: mol_type = other DNA
tgtgtgtaaaccaaaagacagtttattttgtgaaaattgaaggcccttctgtaaggtaagatgggacagctatttaggatccccgggatctttgctttctgatttcaggatatttctgaa

SEQ ID NO: 86936 - DNA, 120 bp, synthetic construct
  source 1..120: mol_type = other DNA
gattacaattcgatataagattttggtggggatacagagccaaaccatgtcaagaaactcttaggagtattgggaacaggtcccatggcatagtagtgaggtctgcttaaggaagtcttt

SEQ ID NO: 86937 - DNA, 120 bp, synthetic construct
  source 1..120: mol_type = other DNA
tttgccatttgtttgcttgtttttaaagagagagccatctaagcacacatatattctggtgagaaggagccaacagaataggaaagggaatcatttgtgaagtgaggtctggagtccatg

SEQ ID NO: 86938 - DNA, 120 bp, synthetic construct
  source 1..120: mol_type = other DNA
ctgcactccaggctgggcgatggagtgagagtccgtttcaaaaaaaaaaaaaaaagataaaaggataaaagatacaaagggaagaagggaaggctgccaggataatgggaggttggaaat

SEQ ID NO: 86939 - DNA, 120 bp, synthetic construct
  source 1..120: mol_type = other DNA
taatcaaacacggtattccagttacgacctcacctgcgtagtgtgtatgggaactgtaccctcacttgcactgccttaggatcttatacatttgccatcaatggcaagaatgcattaaat

SEQ ID NO: 86940 - DNA, 120 bp, synthetic construct
  source 1..120: mol_type = other DNA
tctgacaagaaacaacctagagaatttacgtgttatcctatgggcttctcattaacctataccctgtctccccacacaaagaaaccatcattctaaaccttgtgctcaagatgcccttgc

SEQ ID NO: 86941 - DNA, 120 bp, synthetic construct
  source 1..120: mol_type = other DNA
tgctcgattccttagaatgtctctttaccagctgtcatccctcttggactatttgaagctgcttcaccccaacggtggttttaccaatttgaataaggtaacagtatggaggaagatatc

SEQ ID NO: 86942 - DNA, 120 bp, synthetic construct
  source 1..120: mol_type = other DNA
tgaagaacatatcttttgttccagtaaatccttctgtttctctacagtatattcaaaagctgctagaaatctgataccttttttgtttgtgtgatcttagcatattctcaagctaattag

SEQ ID NO: 86943 - DNA, 120 bp, synthetic construct
  source 1..120: mol_type = other DNA
ccttccctcccatccccagttcatctccatgcccagagtactgtgtctcaccgaattaaaaatatgtttatgatttgtagcttatatttcattatctgccttcatacaccccatggaaac

SEQ ID NO: 86944 - DNA, 120 bp, synthetic construct
  source 1..120: mol_type = other DNA
actgacatttatgtttcttgcttcatggcttattgcagcttattgtgtcaaggaactgcatgtcagagctggatggacaaacctgagtcctaacatttgctgaagttaagaccaaggatc

SEQ ID NO: 86945 - DNA, 120 bp, synthetic construct
  source 1..120: mol_type = other DNA
tcagagcagtgaccttccaggatgcatttgttatgaacctctctgcagcattgaagtcaatgtgtcaaaaatataaaaacaatctaatttgaggaacccatgactattgctggctgagaa

SEQ ID NO: 86946 - DNA, 120 bp, synthetic construct
  source 1..120: mol_type = other DNA
ggaaaatcaatcataaacattctgtgaagatgatacctataaagactttagttttgtttgtttgtttaaaaaaaaaaaaagctttttaggtggccaggtgcagaggcttacgcttgtaat

SEQ ID NO: 86947 - DNA, 120 bp, synthetic construct
  source 1..120: mol_type = other DNA
ggatgaaaatatgaagggctctcctaacattaagtaaagaactgatttcctaagtagcataaaagttaatgcctcaagaatgtgttgatagttgtatgatggggctggatggcagagaag

SEQ ID NO: 86948 - DNA, 120 bp, synthetic construct
  source 1..120: mol_type = other DNA
agaagagaaacgaagtaggtaaaaagaaaagtgctattatagggaaattttccatgaagaatgcagtaaagctcaaaaaacatggaaaacaaggaaagaggaatgatttgccagctcttt

SEQ ID NO: 86949 - DNA, 120 bp, synthetic construct
  source 1..120: mol_type = other DNA
ggaaaccagcatattctctcagatggatctgagacacaaataaaatattgtcatacctgctaacatactcaaaccaatacccagctcgtatcccacagtatgcaccattaagtatggaag

SEQ ID NO: 86950 - DNA, 120 bp, synthetic construct
  source 1..120: mol_type = other DNA
catctcctgtcacttactggtcacagagtgttaatttcatcatacttcctgttgatattaaccagttcttccaggcaacccctggggaagccagagctgccttgaatacagcctgttgag

SEQ ID NO: 86951 - DNA, 120 bp, synthetic construct
  source 1..120: mol_type = other DNA
agcagacactcagatggacttcctgtgtttgaatcccagcttgaacttctagctgtgtgagcggaagcctcaatttttctatctataaagtgtggctaattatagtatctacttcacagg

SEQ ID NO: 86952 - DNA, 120 bp, synthetic construct
  source 1..120: mol_type = other DNA
gaggcggaggttgcagtgagccaagattacaccattgcactccaggctgggcagcagagtgagactccatctcaaaaaacaaaaaaagaaaaaagaaaagaaaatgtcttctgtacatac

SEQ ID NO: 86953 - DNA, 120 bp, synthetic construct
  source 1..120: mol_type = other DNA
ctctcttttgtcaggctatgccaggagagaaagaactgcatagtacttgctttctgtattccaggcagtatccagtgctttttaaggcttaaacaaataagtgggtaaatgaccgctgtt

SEQ ID NO: 86954 - DNA, 120 bp, synthetic construct
  source 1..120: mol_type = other DNA
caaagaaagcccgctctcttcatggatcttctaggaaacttcatgtttgtttgtttatttatttatttagaggcaatgtcttgctctgttgctcaggctggagtgcactggcgcaatcct

SEQ ID NO: 86955 - DNA, 120 bp, synthetic construct
  source 1..120: mol_type = other DNA
aggttctgccccagaggtcaatgtagctgaggcaggtccttcagaaacaatgtaaattcctttcctgtaaccaggctgccctggtttaaaatatcttttcatctccattacaaagataaa

SEQ ID NO: 86956 - DNA, 120 bp, synthetic construct
  source 1..120: mol_type = other DNA
tgtccagggagtttatttttaagcaaggtagtctgagatcctgtctatttcttggtccttgtaaggttcatacatcatgtgttgatttcagttaggttaccgggaccttacaggctacac

SEQ ID NO: 86957 - DNA, 120 bp, synthetic construct
  source 1..120: mol_type = other DNA
ttaaacctcttccatcttccagtgtctattttctgtattttggatggaaagtttatggcagcaaagctgtcattctggctacctctgctgcagctcttcctgctcttaggtcatatatgt

SEQ ID NO: 86958 - DNA, 120 bp, synthetic construct
  source 1..120: mol_type = other DNA
tggtctgtagaaatctgttgtgcttactgataccctcaacataaatggttgggatttgtgttcaggaaaaagaaatggaaaagcaaaagcttctataccagcaagcccgactccacgatc

SEQ ID NO: 86959 - DNA, 120 bp, synthetic construct
  source 1..120: mol_type = other DNA
attgagaatagtctgcctaataaaccagatgtcaaacatattaaaataaaagtgatacaatgaaaatgatgaaagttcttcatatataatactgttgagggaagagggagagaaattttc

SEQ ID NO: 86960 - DNA, 120 bp, synthetic construct
  source 1..120: mol_type = other DNA
actctctcaccatgcgtttaccaaactgtggctctctggttatggaacctggcaggggtaaccagctcgttctgttcccagaataagtgattatatagctttgaaaaaagaaaaaataaa

SEQ ID NO: 86961 - DNA, 120 bp, synthetic construct
  source 1..120: mol_type = other DNA
ggtaatggaaactgaatttccgtctatagcattagcatatggcagtcacaactctcagattgtaatgctgttcggggttttttgttttgttttgttttgttttttgagatgtcacccagg

SEQ ID NO: 86962 - DNA, 120 bp, synthetic construct
  source 1..120: mol_type = other DNA
tactataatcccagagctttgggaggaagagataggaggatcccttgaggccagcaattcaagaccagcctgggtaacagggcaagactccatctctacaaaaagattaaaaaaaaaaaa

SEQ ID NO: 86963 - DNA, 120 bp, synthetic construct
  source 1..120: mol_type = other DNA
ttattttaaagttgatgaaatgcttacatgactcatttcaaagttcatagttggacaccggtcacaccctaaaaccaaccttccacgccggtcattaactccttgtgtgccagccccatt

SEQ ID NO: 86964 - DNA, 120 bp, synthetic construct
  source 1..120: mol_type = other DNA
caacatttcttattgtattttaaagtttattattaatacccattctgacattgctaccactatgtggctcccgtgtttattttattttctgcttgacatttggatgtacaagtgcagtca

SEQ ID NO: 86965 - DNA, 120 bp, synthetic construct
  source 1..120: mol_type = other DNA
gtactaccctcccttcctcagtcatcactcatgagcgtggtaattattaaaaatgaactgtcttttgtttatttgctcctttatttgttgttagctttgtgtacagacttgatagtgaca

SEQ ID NO: 86966 - DNA, 120 bp, synthetic construct
  source 1..120: mol_type = other DNA
tgtcacttgcttcaacacttgaggctcagagagcatgggcttagcactgagaaaataatctgttgtacctgaatcttctacatccttgcccactgtttttattaagctaagtctcttcct

SEQ ID NO: 86967 - DNA, 120 bp, synthetic construct
  source 1..120: mol_type = other DNA
tgagatgccatgaggaactgtgtgtttctttgaggtttgtatctacagctttcagatgaattatttatactgttttttttctgctgccattattgtcatgcaagtttgacctctgtctcc

SEQ ID NO: 86968 - DNA, 120 bp, synthetic construct
  source 1..120: mol_type = other DNA
cagacttgtaaacaaataaattcagaacaatgctttatgcatataaaggaatttaggtggaagtacttagcggctgggatgttgcggggctgggggagacgtgtagtctgaattaggaat

SEQ ID NO: 86969 - DNA, 120 bp, synthetic construct
  source 1..120: mol_type = other DNA
ccgtgggacaaacctgatttatttcacatagtggtcattttcgttgtcttggcatcggaaataggaatgcattgtatacaacgctgtcagactgttaactaaattttaacaaatgcactc

SEQ ID NO: 86970 - DNA, 120 bp, synthetic construct
  source 1..120: mol_type = other DNA
tctgtagcatttttcagttttggcaagatgcagaatcgatcttaaggtcccctcaagatccacaatcagcataatttcctctatggcagcggggtgctttagagtcaactgtatagatta

SEQ ID NO: 86971 - DNA, 120 bp, synthetic construct
  source 1..120: mol_type = other DNA
cccctcccctcttcccattgttctgcgatgtacggtgtgtccttatataagtgaaattacttgtacgtgtttcggtatacagtcaagaaaatactgtgtgtgtcgacaataaataaaacc

SEQ ID NO: 86972 - DNA, 120 bp, synthetic construct
  source 1..120: mol_type = other DNA
ttagattttggagcagctgctcgtaatgtggaagtgttttttttccccccacggacactttctgtcttgaaaatcagcttcatttgtgtggtgctgttctgtgtttgtttctttccttgt

SEQ ID NO: 86973 - DNA, 120 bp, synthetic construct
  source 1..120: mol_type = other DNA
ctactctgtgagggacacaactcaggtttgtgagtccccggaacttctgatgatactaaggcataaataatgttttcaagccagtaataacaagagcctgttagttccaattatgcatcg

SEQ ID NO: 86974 - DNA, 120 bp, synthetic construct
  source 1..120: mol_type = other DNA
gtttgcccagagctctagaactaggaatgaagaaactgatattagcaatatctgagacaaaaattgaatattgatcatcaatggagcacccagatacacttttggggtgatcacttttta

SEQ ID NO: 86975 - DNA, 120 bp, synthetic construct
  source 1..120: mol_type = other DNA
agcttaatgtggtgggggaaggtgcattttgaagtcagtacaccaagaagtgttgctgaaaacacatttgtcattttaaaaattgtctgaaaacccaaatgtagttcacagctcaactaa

SEQ ID NO: 86976 - DNA, 120 bp, synthetic construct
  source 1..120: mol_type = other DNA
ggaatgaaattgcttcaccatttggcaggttgagatatgattaactccttagaggcatgggctgtgatgttagctctattgtacctccagggcctggtatatgtattaagcacttagtaa

SEQ ID NO: 86977 - DNA, 120 bp, synthetic construct
  source 1..120: mol_type = other DNA
gtcagttttggtctactcacagtcccatttccttacctctcctggcttccattattgccttagtattctcatgcatgcctagaatgataccagtacaacaacattcatgtgtcatgtcct

SEQ ID NO: 86978 - DNA, 120 bp, synthetic construct
  source 1..120: mol_type = other DNA
gtaagaccatgaggtagttgttgagaaaagagaaagtttgatctgtccttggcacaggtccttctggtagttagcaagggttttccatgttgcaggtacatacgtcatgagaaaaagaaa

SEQ ID NO: 86979 - DNA, 120 bp, synthetic construct
  source 1..120: mol_type = other DNA
agaactcccatctggatgttgttcattctggaaggagtccaatctaggctttttttactctcccccctgaaggttcttctctctctctctctctctctttccctttcccctcctgattaa

SEQ ID NO: 86980 - DNA, 120 bp, synthetic construct
  source 1..120: mol_type = other DNA
ggcctcaagagatgctgagacaggaaaaagttctatttcaacatcttggatctggccatctcttccaatcacttgtttctagcataagatctgaaatgtttttatgtggcctgcaattta

SEQ ID NO: 86981 - DNA, 120 bp, synthetic construct
  source 1..120: mol_type = other DNA
agtaagaggtaatcacctctcatctaaagcatattctcagattcttttgaatacaaaatagtgactattgattgatttgactaaatagccaaagcacccagaccttattttttttcctct

SEQ ID NO: 86982 - DNA, 120 bp, synthetic construct
  source 1..120: mol_type = other DNA
gggagacaattttgttacagggtcttaaacaagcagatgttctcagtagggcgatgcttacccctaaccagtgtatttaattttgtgacagagaaaaagtagctattatatggataagca

SEQ ID NO: 86983 - DNA, 120 bp, synthetic construct
  source 1..120: mol_type = other DNA
ggctgggatcatccttgacatgcagtcttgaacagttagaaactatatttattagtgtttgttcaagtctttatagaccaaagttgaggccaagttgagaagagggctcagaggtacctg

SEQ ID NO: 86984 - DNA, 120 bp, synthetic construct
  source 1..120: mol_type = other DNA
tattccactgttgtggttctttcatattattgctatatatgttcattgtcggtacaaatactttttttttttctgagacccagtcttgctctgtcacccgggctggagtgcagtggcgtg

SEQ ID NO: 86985 - DNA, 120 bp, synthetic construct
  source 1..120: mol_type = other DNA
agctctccagtctataaagaatattttatttgttagtgtgtttgtccataatcagtgggggtttcggacatttgggtaacagtcagctgtgtaagctgctgctttgaaaagaccacagag

SEQ ID NO: 86986 - DNA, 120 bp, synthetic construct
  source 1..120: mol_type = other DNA
ctgtggacctctgaccagcgacctttcttctcctgcctgtctttatgatatatagcacgttctgttcaatgaataaaagcattctgtgatcctgtagttcaggaatctgccattttctaa

SEQ ID NO: 86987 - DNA, 120 bp, synthetic construct
  source 1..120: mol_type = other DNA
ttaaaactaaaggatttgacgtcgtctgatacttttaaagaatatgaccccgatggcaagggagtcatttccaagagggacttccacaaagcgatggagagccataagcactacacgcag

SEQ ID NO: 86988 - DNA, 120 bp, synthetic construct
  source 1..120: mol_type = other DNA
gaggatctgaccgacttaaaggagctgacagaggaaagtgaccttctttcggacatctttggcctggatctgaagagagaaggaggacagtacaaactgattcctcataatccaaatgct

SEQ ID NO: 86989 - DNA, 120 bp, synthetic construct
  source 1..120: mol_type = other DNA
tgaaaaacacgtggcgcttttatcgtggtataagcaagagggtatcttatataggttatggtttgacacatggtcacatggctccctcaattcattcaaaggtgatgggtaatcctggtt

SEQ ID NO: 86990 - DNA, 120 bp, synthetic construct
  source 1..120: mol_type = other DNA
tacgcacatttgaaaagttgggggaagaaagaaaggaagcttttaggtgcctgtagtgccactattctcccatagcattgaaattttctcctctattctgttattttctttggtctgttt

SEQ ID NO: 86991 - DNA, 120 bp, synthetic construct
  source 1..120: mol_type = other DNA
ggaaggaatctgctatgcataaagattcttcaagcctataaaatgtcctctatatttcaacttcacagaattacccatctccaggggactgtgatcaacagaaaatcctacccctgattc

SEQ ID NO: 86992 - DNA, 120 bp, synthetic construct
  source 1..120: mol_type = other DNA
ccactttccattgataataagaaggtctattcaaaattgttctttaagagagggattacagttctttatatactgtcctgtacattttacagaggtgttcccctaattagtaaagcacac

SEQ ID NO: 86993 - DNA, 120 bp, synthetic construct
  source 1..120: mol_type = other DNA
ttctattataggtggtttaaaggttgaatgggcgctgcagcaccccagtgggttcctgaagaatgtgtttaactacagttgtgtaaaccaagtagttgagattttgcttccagctttcac

SEQ ID NO: 86994 - DNA, 120 bp, synthetic construct
  source 1..120: mol_type = other DNA
agttaaggtcttttgttattcccacttcgcatgcagatgagcagagtgatgctacagaaaagattaagtcatttgtccatatcccacactaggaaatggagggaggcaggcttcatatcc

SEQ ID NO: 86995 - DNA, 120 bp, synthetic construct
  source 1..120: mol_type = other DNA
tatctaggaaggcaagatagatttgttcctgagaagtgagaaatgcctcaactgaagggcatttgatttagcagagggcttccccacagtattcccagcctaatttagctgaatatctta

SEQ ID NO: 86996 - DNA, 120 bp, synthetic construct
  source 1..120: mol_type = other DNA
ctacattgactagtctgccctgggaaggggctatggccatgagctgtcttaaagtagctttctttcatatactgataattattcacatagagaatttcgcctataacttggccctacaga

SEQ ID NO: 86997 - DNA, 120 bp, synthetic construct
  source 1..120: mol_type = other DNA
gcttcttcctgcttgaatatagctgattcattttcattccatttttaccttcctagaagtacacaggaaatatttctttccaaaagctgttttgtaaagatagtgaccacaagatatgcc

SEQ ID NO: 86998 - DNA, 120 bp, synthetic construct
  source 1..120: mol_type = other DNA
tactaatttctaagcaagtcagtccctttaggcaaactctctatgtattagtgaagacgctagagttgtgctttgctgctatgctcgaagtttctgtgaggataagtggtgggaaagaga

SEQ ID NO: 86999 - DNA, 120 bp, synthetic construct
  source 1..120: mol_type = other DNA
cgggcgcggtggctcacgcctgtatgtatatacaggtatgtatgtgtgtgtgtgtatatatatatatgtatatgtatatatatatatatatacacatatatatatacacacatatatgga

SEQ ID NO: 87000 - DNA, 120 bp, synthetic construct
  source 1..120: mol_type = other DNA
cttttttgctaccagtgatctctcctcctgcttgtctttaattgcttttcctgttccctccattttctttttttgtttttgagacagagtctcactctgttgcccaggctggagtgcaat

SEQ ID NO: 87001 - DNA, 120 bp, synthetic construct
  source 1..120: mol_type = other DNA
gtatgactccctctcttgaatgagagagaaatcttgttcctcagataggtattatgtaagatgctgtgaatttgtttagaccttaagcagtgtgatcacagaaggtgagccacacactag

SEQ ID NO: 87002 - DNA, 120 bp, synthetic construct
  source 1..120: mol_type = other DNA
accagttgagttgaatgcacctgaatttaaatgtcacacacacacacacacacacacacatatagtgtgagtgtacagatatatacatacatccatttagcaaatttgatcaactgaatc

SEQ ID NO: 87003 - DNA, 120 bp, synthetic construct
  source 1..120: mol_type = other DNA
gatttatatatttatttatcaaacacataaggcttggtatgtgcacctttaaataagtggccagctccattcctgggggtggaatagctgcaagcagtctggaaggctgcaggtgtcttc

SEQ ID NO: 87004 - DNA, 120 bp, synthetic construct
  source 1..120: mol_type = other DNA
tctgcaaagatcacaaatatttactttagtatttatccattcaacatatatgtatttagacattcagtgtgtgagctggggagttcacagacaagtgagagaggcatataaccacctaca

SEQ ID NO: 87005 - DNA, 120 bp, synthetic construct
  source 1..120: mol_type = other DNA
taacataagacgaaggtgatgatgttttgttttccaagatcctctaagaacacatcatgaaactctaggatacagtgtcagagttggctctcagctcctcccttggcatctgggatagaa

SEQ ID NO: 87006 - DNA, 120 bp, synthetic construct
  source 1..120: mol_type = other DNA
ttatcccttccctcatccagccatgggcccagaactctgggtgtcttaggagcattctctaagagttcaaaatcaggtcttccaagtatctttcagaaccataaactattaatacactat

SEQ ID NO: 87007 - DNA, 120 bp, synthetic construct
  source 1..120: mol_type = other DNA
gaccgccttggcctcccaaagtactgggattacaagcgtgagccaccacgcccagtcttgcatttcttaatgcctccttagattagctccatctgaatgtcccatggcaaattttcatct

SEQ ID NO: 87008 - DNA, 120 bp, synthetic construct
  source 1..120: mol_type = other DNA
ccttatggagcagagactgtagtcccataagtaagagcagccaccatatttttattctgcattagtcctggccctcccccaaaagtgtattcattttccagcctatgtgaataatcaaca

SEQ ID NO: 87009 - DNA, 120 bp, synthetic construct
  source 1..120: mol_type = other DNA
cctgggcgacagagctagactctgtctcaaaaaaaaaaaaaaaaaaaaaaaaagtatagtgtacgaagatgaagtaaatggagtaattataacagagtgaaatcagagttactttttaat

SEQ ID NO: 87010 - DNA, 120 bp, synthetic construct
  source 1..120: mol_type = other DNA
taacacagcccctggcccatatcaagcactcaggaacttagttattattttgttcctagtatagtatttgctccacttgctattatggagaaccaaaataggttacagaatcctgaccca

SEQ ID NO: 87011 - DNA, 120 bp, synthetic construct
  source 1..120: mol_type = other DNA
cgatctcggctcactgcaacctccgcctccctaggttcaagtgattctcctgcctcagcctcccgcatagctgggattataggcgcgtgccaccatgcccggctaatttttgtattttta

SEQ ID NO: 87012 - DNA, 120 bp, synthetic construct
  source 1..120: mol_type = other DNA
acagtcataacaaaaacgaaatgcattttattaggaatgtaatttatagaaaatagccctcataaaatgaagaaagggccgggcacggtggctcacgcctgtaatcccagcactttgaga

SEQ ID NO: 87013 - DNA, 120 bp, synthetic construct
  source 1..120: mol_type = other DNA
tgctgcacagcctaataattagaattgctgagtaatgtacttagaactcgaaggagtaatgtcatcacttaagcctgttgttcacatatcccaggacaacgggtaaaactatttcccaga

SEQ ID NO: 87014 - DNA, 120 bp, synthetic construct
  source 1..120: mol_type = other DNA
ataacaaagggccattttccttaatctaccaagtccttatcacatcaataagaaataagccaatagaagaacaagtaagtcacatgaccagacaattcacggtaaaattaattcagtggg

SEQ ID NO: 87015 - DNA, 120 bp, synthetic construct
  source 1..120: mol_type = other DNA
aagacagttttttccccaccatgttatagaagataatctgccttcagttattcccacaattagtataactacatgcagtgactgttccctggcagggaggagagaacagaacatacaggt

SEQ ID NO: 87016 - DNA, 120 bp, synthetic construct
  source 1..120: mol_type = other DNA
tcagtagtctcctaccaactttctgctgcaggttggcactgctatcattcccattttacagatgaggaaactgagctaccaagagtttgagtaacttgtcataagtcacacagttaggaa

SEQ ID NO: 87017 - DNA, 120 bp, synthetic construct
  source 1..120: mol_type = other DNA
cttacagcaactgtaagaaaactggattcaatgcaataagactgacccgttactagtgacgactctccatcagagtcactaacatgcaacactttaccccctcctcccacgcctattcat

SEQ ID NO: 87018 - DNA, 120 bp, synthetic construct
  source 1..120: mol_type = other DNA
cacgctcatatcccagtaattgtccctaaaaactcccacatgggaatggaggccacattacctagattgacattccaattgtagcgtccaaacacttacttttaatttgcttcttaccag

SEQ ID NO: 87019 - DNA, 120 bp, synthetic construct
  source 1..120: mol_type = other DNA
aactatgatcaacctcagaatgaatctgtttaggagacggatgagggagggaagccacagactataacatcttggaaatcaacaacttcctcttctaaatttttgtaggaccaggcacct

SEQ ID NO: 87020 - DNA, 120 bp, synthetic construct
  source 1..120: mol_type = other DNA
gcctgatgtacgagtcagaataccaacatgctactcattaaaagttaatgcaacaagttggcacattctcttccctagacaaacacctctatgggaagccaaattttaacccaagaccca

SEQ ID NO: 87021 - DNA, 120 bp, synthetic construct
  source 1..120: mol_type = other DNA
tgaaaaactacagcagtagcttcaggatatttttttaagtgatggatggtctgtaagattttacttccagagattgactcagtaggtagtaccaggaacccagaatgttgccacgtccag

SEQ ID NO: 87022 - DNA, 120 bp, synthetic construct
  source 1..120: mol_type = other DNA
aggcttttgtccccatcattctggtcagcagcaactaactaggttttgaattgatgggtgacacatccattaagtcagggtatctggaacagtctaagaaaatctcagaggaaggattat

SEQ ID NO: 87023 - DNA, 120 bp, synthetic construct
  source 1..120: mol_type = other DNA
acctcattagcacagatggttcagagccaagatactagatacaagatgctagaaaattttccattttctccaaagtgagagagaaagtgctaggcggagtatgcagtatacacttttgtt

SEQ ID NO: 87024 - DNA, 120 bp, synthetic construct
  source 1..120: mol_type = other DNA
catttcaaaacacacactcaaacccaacaacaacaacaacaacaaaaacttctaagccctgtggttgttgagatttttaaaaatgacatacaggccaggcgcaggggctcacgcctgtaa

SEQ ID NO: 87025 - DNA, 120 bp, synthetic construct
  source 1..120: mol_type = other DNA
gcatctctggaaaaaaaaggcagcaatcctagttatttacttatagataaaaccctcatctccttgggagagagcacctggggaaaggggtggctgtgggttcagcttcagtagacttaa

SEQ ID NO: 87026 - DNA, 120 bp, synthetic construct
  source 1..120: mol_type = other DNA
aggtgagaagacaagattagagaaaaaagagtgaaaagaaatgaacaaagcctccaggaaatatgggactatgtgaaaagaccaaatatacgtttgattggtgtacctgaaagtgacggg

SEQ ID NO: 87027 - DNA, 120 bp, synthetic construct
  source 1..120: mol_type = other DNA
atatttaccaagcaaatggaaaacaaaacaaaacaaaaaagcagggattgcaattctagtctctgatagaacagactttaaaccaacgaagatcaaaagagacaagggcattacataatg

SEQ ID NO: 87028 - DNA, 120 bp, synthetic construct
  source 1..120: mol_type = other DNA
accgatcccacagatatacaaactaccatcagagaatactgtagacacctttacacaaataaactagaaaatctagaagaaatggataaactcctggacacatacaccctcccaagacta

SEQ ID NO: 87029 - DNA, 120 bp, synthetic construct
  source 1..120: mol_type = other DNA
ctctctcaccactcctattcaacatggtgttggaagtcctggccagggcaatcaggcaaaacaaagaaataaagggtattcaattaggaagaaaggaagtcgaattgtctgcagatgaca

SEQ ID NO: 87030 - DNA, 120 bp, synthetic construct
  source 1..120: mol_type = other DNA
agaaactatcatcagagtgaacaggcaacctacagaatgggagaaaattttttgctgtctatccatctgatatacagctaatatccagaatctacaaagaacttaaacaacttcataaga

SEQ ID NO: 87031 - DNA, 120 bp, synthetic construct
  source 1..120: mol_type = other DNA
tttcaccaaccttatgagaatggtgctcttattttatgcatgaagtaactgagccacaataagtctaaggaacttggccaaagtgcacagctaaacagggctggaatccatctataccca

SEQ ID NO: 87032 - DNA, 120 bp, synthetic construct
  source 1..120: mol_type = other DNA
gcactccagcctgggtgacagagcaagactgtctcaaaaaaaaaaaaaaaaaaaaaaatgacttgactgggcatggtggctcacgcctgtaatcccagcactttgggaggccgaggcagg

SEQ ID NO: 87033 - DNA, 120 bp, synthetic construct
  source 1..120: mol_type = other DNA
aaattgtggtggacgccacatgcatgcaaacagcgataggacaccatcctttccctccagaagtggagagactattcattcgaaaccaaagattcaatgacaagtaaatagatgattaca

SEQ ID NO: 87034 - DNA, 120 bp, synthetic construct
  source 1..120: mol_type = other DNA
tagttcctaaaatacagggtctcataaacatgcttcagatggcataaaacagcttacaactggcagggaaggatgagcaccagagtcacatgggacaattattgaatacattgcttctcc

SEQ ID NO: 87035 - DNA, 120 bp, synthetic construct
  source 1..120: mol_type = other DNA
aattacttgtgagtgtgcccgtttcagaatcttccacctctccagtagacgccactggtccctgcccatctcagaatagagaggaagtttttgtttattgtttaaaaaataattgctgca

SEQ ID NO: 87036 - DNA, 120 bp, synthetic construct
  source 1..120: mol_type = other DNA
cagaacaaaatgtgtgcattaaacagtgaggcacggaattactttcagatattagttgtggtatcttgatgtaaagttcctgttatgttgaatgagtatggaaaagattgcctttgttaa

SEQ ID NO: 87037 - DNA, 120 bp, synthetic construct
  source 1..120: mol_type = other DNA
gaattgccagcgttgtgtgttttctgggagcatcgaagctctgtttcggaagagctgtttcctccccccaccttttgtatttactttgagactaaagactgaagaataatctaaattcat

SEQ ID NO: 87038 - DNA, 120 bp, synthetic construct
  source 1..120: mol_type = other DNA
ctttcagccacctgtgatcagttttgttgattaaggacttcttgtcaggccattttttaatatcaaagctgaagcaatatccattcagggatttcatcagttgcatcacaaaacacggat

SEQ ID NO: 87039 - DNA, 120 bp, synthetic construct; identical to SEQ ID NO: 9378
  source 1..120: mol_type = other DNA

SEQ ID NO: 87040 - DNA, 120 bp, synthetic construct; identical to SEQ ID NO: 9379
  source 1..120: mol_type = other DNA

SEQ ID NO: 87041 - DNA, 120 bp, synthetic construct; identical to SEQ ID NO: 9380
  source 1..120: mol_type = other DNA

SEQ ID NO: 87042 - DNA, 120 bp, synthetic construct; identical to SEQ ID NO: 6627
  source 1..120: mol_type = other DNA

SEQ ID NO: 87043 - DNA, 120 bp, synthetic construct
  source 1..120: mol_type = other DNA
agttttgcaagatggacattcgagtttctgatagaatccaggtggccttctcaggggaactttgctgttcaggcttaatttgaaactttacttccttcccctccattttcctacactacc

SEQ ID NO: 87044 - DNA, 120 bp, synthetic construct
  source 1..120: mol_type = other DNA
ggcccgtgctgggcattaggtcatttgtgtctggcacaggcttgatctatagtctaatgctgtgtttaacttgtctttatatctaatcaggcaaagacattcttcactgacaatattcca

SEQ ID NO: 87045 - DNA, 120 bp, synthetic construct
  source 1..120: mol_type = other DNA
atgaagtttcattcatatgccatccatttttcttaattctgagaatcttacatgaactagacagacagattctctggctaatggtgccctcactatagtgagcagaggagaccagcatac

SEQ ID NO: 87046 - DNA, 120 bp, synthetic construct
  source 1..120: mol_type = other DNA
atttgaagtgggacctttatgatatgatggagccaggcagagatgttggagaagttcctgaaagaaggaagggcatgtgccaaattctgaggctgaggagaaaaaagaaagaaagaaaaa

SEQ ID NO: 87047 - DNA, 120 bp, synthetic construct; identical to SEQ ID NO: 11652
  source 1..120: mol_type = other DNA

SEQ ID NO: 87048 - DNA, 120 bp, synthetic construct; identical to SEQ ID NO: 11653
  source 1..120: mol_type = other DNA

SEQ ID NO: 87049 - DNA, 120 bp, synthetic construct; identical to SEQ ID NO: 11654
  source 1..120: mol_type = other DNA

SEQ ID NO: 87050 - DNA, 120 bp, synthetic construct; identical to SEQ ID NO: 11655
  source 1..120: mol_type = other DNA

SEQ ID NO: 87051 - DNA, 120 bp, synthetic construct
  source 1..120: mol_type = other DNA
tttttctctttcttcatctgccttacttagtgcaaggtgctataacaaaatagcatagactgggtgacttcaacaacaggattttttctcacttttctgctggttcctggtcagggctct

SEQ ID NO: 87052 - DNA, 120 bp, synthetic construct; identical to SEQ ID NO: 11656
  source 1..120: mol_type = other DNA

SEQ ID NO: 87053 - DNA, 120 bp, synthetic construct; identical to SEQ ID NO: 11653
  source 1..120: mol_type = other DNA

SEQ ID NO: 87054 - DNA, 120 bp, synthetic construct; identical to SEQ ID NO: 11654
  source 1..120: mol_type = other DNA

SEQ ID NO: 87055 - DNA, 120 bp, synthetic construct; identical to SEQ ID NO: 11657
  source 1..120: mol_type = other DNA

SEQ ID NO: 87056 - DNA, 120 bp, synthetic construct
  source 1..120: mol_type = other DNA
caccactcccagcctctaaacaagtgaatcttaattgctcctcctcagactaaggaatatctaggatccctcctgttttcaaacaacttccccatttatccaaaaaccaaggcagtgttc

SEQ ID NO: 87057 - DNA, 120 bp, synthetic construct
  source 1..120: mol_type = other DNA
agaagaaaaagagagagagagaaaaaaagattgattaaaaatgcatattaccgacaaattagagggtgatggcagatgggaggcagcagaagtacattgcagctcccactcggatgcaca

SEQ ID NO: 87058 - DNA, 120 bp, synthetic construct
  source 1..120: mol_type = other DNA
agaaagacctgcccaaggagactctgagctcagacacgactagtcctgcccccacctgatggtccttccttactcaccctggtagctgaagacaaagggcatatattcttgggagttcta

SEQ ID NO: 87059 - DNA, 120 bp, synthetic construct; identical to SEQ ID NO: 12674
  source 1..120: mol_type = other DNA

SEQ ID NO: 87060 - DNA, 120 bp, synthetic construct; identical to SEQ ID NO: 12675
  source 1..120: mol_type = other DNA

SEQ ID NO: 87061 - DNA, 120 bp, synthetic construct; identical to SEQ ID NO: 12676
  source 1..120: mol_type = other DNA

SEQ ID NO: 87062 - DNA, 120 bp, synthetic construct
  source 1..120: mol_type = other DNA
gcatcccttagttttaagtcatggcgggtgcgaacgggtctctgctgcaggcggctccgtgacagctcctgcttcacatgggtagaggagagacggcaaacgtcggggctcccaggactt

SEQ ID NO: 87063 - DNA, 120 bp, synthetic construct
  source 1..120: mol_type = other DNA
gtgttacatgataagatgtgagttcctgggagaagtaggttctttattttattttttttttgagactgagtcttgctctgttgcctaggctggagtgcagtggcacaatctctgctcgct

SEQ ID NO: 87064 - DNA, 120 bp, synthetic construct
  source 1..120: mol_type = other DNA
tgaaaaaaaattgcacattctcaactcctcgggatggagcagtaaagcccctcagtaaatctttttttttttttttttttgagaccgagtttcgctcttgtcacccaggctggagcgcag

SEQ ID NO: 87065 - DNA, 120 bp, synthetic construct
  source 1..120: mol_type = other DNA
cactgttttaggggaatttagctttcatcgtagtgatggggaagctactggaaatgccccgaatacaaccttgagggaccaatcaagcgtggaaatggggagcaaagggattaggctttt

SEQ ID NO: 87066 - DNA, 120 bp, synthetic construct
  source 1..120: mol_type = other DNA
tggccaatgtggcaaaaccctgtttctactaaagatacaaaaattagctgggcatggtgtcgggcacctgtaatcccagctacttgggaggctgagggaggagaatcgcttaaactcagg

SEQ ID NO: 87067 - DNA, 120 bp, synthetic construct
  source 1..120: mol_type = other DNA
ctgttggttaatgtggagaagggaaggtggtgagagccagcccaaacccctgccgagtgagactgattctggcagctttagggagcagggatgagcccctcacaggctgggtggtagtta

SEQ ID NO: 87068 - DNA, 120 bp, synthetic construct
  source 1..120: mol_type = other DNA
tgtaaacagatggtcactgcaccttcctcttatgggatgttctggggatcatatgaggcagttctcgcagagtgctgagatcgtacctggcagctggtgtggggctacggtgttgttttg

SEQ ID NO: 87069 - DNA, 120 bp, synthetic construct
  source 1..120: mol_type = other DNA
tctccactttgtggaccttcctcctgccatcctgtggtgggaggtttccattagtcttgggtctctgtgtcatgattctgggaagtagagaaagaggaggaagagatcggtctgactctg

SEQ ID NO: 87070 - DNA, 120 bp, synthetic construct
  source 1..120: mol_type = other DNA
aagtacgtagctatcttctgtttagctctcatctgatgtcttggttatctttttgttgtttgtttagaatgttgcatgagctctgtctcactcatgctgaacacccagcaccgagagcag

SEQ ID NO: 87071 - DNA, 120 bp, synthetic construct; identical to SEQ ID NO: 15825
  source 1..120: mol_type = other DNA

SEQ ID NO: 87072 - DNA, 120 bp, synthetic construct; identical to SEQ ID NO: 15826
  source 1..120: mol_type = other DNA

SEQ ID NO: 87073 - DNA, 120 bp, synthetic construct; identical to SEQ ID NO: 15827
  source 1..120: mol_type = other DNA

SEQ ID NO: 87074 - DNA, 120 bp, synthetic construct
  source 1..120: mol_type = other DNA
ccagcctcagcctcccaaagtgctggaattataggtatgagtcaccgtgcccggccaaggctaatgttttgtatttttattagagatggggtttcaccatgttggtcaggctggtcttga

SEQ ID NO: 87075 - DNA, 120 bp, synthetic construct
  source 1..120: mol_type = other DNA
atggcatgtccgaacgaggtggtgtcctatgagatcgtcctgtccatcaccaggctcatcaagaagtataggaaggagctccaggtggtggcgtgggacattctgctgaacatcatcgaa

SEQ ID NO: 87076 - DNA, 120 bp, synthetic construct
  source 1..120: mol_type = other DNA
cgagcttccttcttggcccagctgcatgggcacagccaagattccttggggggtggggtacgggcaggaacagcagctgccatcacagccactgtggccccttgagaggatctggggggt

SEQ ID NO: 87077 - DNA, 120 bp, synthetic construct
  source 1..120: mol_type = other DNA
tcttcttttgacaggagtcctccctcctgaacctgatctcctatagagcgcagtccatccacccggccaaggacggctggattcagaacctgcaggcgctgatggagagattcttcaggt

SEQ ID NO: 87078 - DNA, 120 bp, synthetic construct
  source 1..120: mol_type = other DNA
cccaccttccttgagagacatttgtgtgcctgccagtcatacccctttcccaggaggcgcagcttaggctctgaggctgtcccttcccaccgaactcctccctgcagcctcgcagtcctg

SEQ ID NO: 87079 - DNA, 120 bp, synthetic construct
  source 1..120: mol_type = other DNA
agacctggggctggggctttggcctgccgtcctccctgcccagccaacagctttgctctttgattttcagatgcattttggtttctgcacagtcactcgggtataaagggcatctttgct

SEQ ID NO: 87080 - DNA, 120 bp, synthetic construct
  source 1..120: mol_type = other DNA
gttgtgttggagtctgttccccagcgggacccacaccctccctggatttgctgagggtgcggtggtctcagcaggcagcagaaccttcctcctgctcttgtggagggatggatgcaagag

SEQ ID NO: 87081 - DNA, 120 bp, synthetic construct
  source 1..120: mol_type = other DNA
tgtgccattttccatccactcgagcagcatgtaagggttctgatttatcttttttttttttttttttttttttgatacagtctcactctgtcgcccaggctggagtggagtgcagtggcg

SEQ ID NO: 87082 - DNA, 120 bp, synthetic construct
  source 1..120: mol_type = other DNA
taagcccagatcacgccattgcactccagcctaggcaacaagaatgaaacaacgtctcaaaaacaaaacaaagcaaaaacaggcatcacctccttggtgtctcatccacatgagcaccat

SEQ ID NO: 87083 - DNA, 120 bp, synthetic construct
  source 1..120: mol_type = other DNA
cagtgacctgagatcgtgccatagcactccagcctgggcgacagagaaagactccgtctcaaaaaaaaaaaaaaaaaaaaatcataaggaagcgaaaatacatttcctgttccttaagtg

SEQ ID NO: 87084 - DNA, 120 bp, synthetic construct
  source 1..120: mol_type = other DNA
tccacccacttcagcctcccaaagtgctgggattacaggcgtgagccaccacacctggcctcagtcatttctttcaatgattttttaatcatttaaaggtgttaatcatttctttaaaag

SEQ ID NO: 87085 - DNA, 120 bp, synthetic construct
  source 1..120: mol_type = other DNA
agtcctggtgtccttccctctgcctgcagtccacacatctgtggcttgtcgctctaagccgcacggtgacatgggttggggcagagaaaaggacgcacggcgacttccggggcagtgcat

SEQ ID NO: 87086 - DNA, 120 bp, synthetic construct
  source 1..120: mol_type = other DNA
gtctgagggatgtcccagggttgggaagagccaagtctgttccgttcctgctgcggggacttggcctcagctgcttctcttgcttctgcagggagccagagagaggctctgagaagaaga

SEQ ID NO: 87087 - DNA, 120 bp, synthetic construct
  source 1..120: mol_type = other DNA
catcagctttcaggcccaaagacactggagcggctccgaggcgccccagaaggcttctccagaactgacttgcacctggccgtggttccagtgctgacagcattaatctcttaccataac

SEQ ID NO: 87088 - DNA, 120 bp, synthetic construct
  source 1..120: mol_type = other DNA
tgtgaagggcccagaaccaggggatgagagcccagcatgtctgggttctgttggcctgtgggatcgtgtcggaatgcaactgaccggagcagtctgctgtgcagagtctgctcgggtagc

SEQ ID NO: 87089 - DNA, 120 bp, synthetic construct
  source 1..120: mol_type = other DNA
ctactcaggaggctaaggcaggaggcaggagaatctcatgaacccaggaggtggagcttctagtgagctgagatcacgccaccgcactccagcctgggcaacagagcgagacaccgtctc

SEQ ID NO: 87090 - DNA, 120 bp, synthetic construct
  source 1..120: mol_type = other DNA
cccttctcatctcaggtttaatcagtacatcgtgtgtctggcccatcacgtcatagccatgtggttcatcaggtgccgcctgcccttccggaaggattttgtccctttcatcactaaggt

SEQ ID NO: 87091 - DNA, 120 bp, synthetic construct
  source 1..120: mol_type = other DNA
ctctgtgttcttgtttgcatttcatttgaacggctttctcctcctgtcccccaccttcctgcccgagctattttggctttccctagatgggaatacggcattttccagcgtgacctcaac

SEQ ID NO: 87092 - DNA, 120 bp, synthetic construct
  source 1..120: mol_type = other DNA
gggcagcagcctccccaggctgtccccaagggccgcagtgtgggttgggggagacaccactcctggttttggccttttcgtattctctagaatggacgtttttcttcgggctttcttctc

SEQ ID NO: 87093 - DNA, 120 bp, synthetic construct
  source 1..120: mol_type = other DNA
cagtgccagcttggggtctgcagatgagaactccgtggcccaggctgacgatagcctgaaaaacctccacctggagctcacggaaacctgtctggacatgatggctcgatacgtcttctc

SEQ ID NO: 87094 - DNA, 120 bp, synthetic construct
  source 1..120: mol_type = other DNA
ctgtggcactagcttgccaggctcggggggagcattcagcttgaggctggtggttttgcatcaggtaagtggtggtcaccagtcctctgccctcttcttcagggggccatggtcttcgag

SEQ ID NO: 87095 - DNA, 120 bp, synthetic construct
  source 1..120: mol_type = other DNA
tctgcgtgttaatctcctcttgggaggaaaccggtcatggcttagggtccgctctggtcccttgctagccgtaattagctttctgaaacccagtctccagagacagtcccgttctgagtt

SEQ ID NO: 87096 - DNA, 120 bp, synthetic construct
  source 1..120: mol_type = other DNA
actctgggcccccaccccactcggcaccgtgcttctcgccaggccctctggctcttccctgtggctgcagatggcacttagcggcctaggacgtctattcacgggaggagggaggcactg

SEQ ID NO: 87097 - DNA, 120 bp, synthetic construct
  source 1..120: mol_type = other DNA
tcaagtcccaggttgaccaggggccctgcagaccgacctctgcctgttgcccccaagccctggtggggagtgctgtgacctgcatggtgctcccctgccaggtctccacgtgcagacgag

SEQ ID NO: 87098 - DNA, 120 bp, synthetic construct
  source 1..120: mol_type = other DNA
ttaggggaggcagggctctgcgtgggtgtgcctgcaccctgggaactggctctgaacttgggggagatgttcttccacatccctcgtgcacagacggtctgcactttgcagccatccacc

SEQ ID NO: 87099 - DNA, 120 bp, synthetic construct
  source 1..120: mol_type = other DNA
gctgtggctgccctggccaggccctcacctgggtgcccaccatcccctccctgtgcagtttcgtgttcctgcagctctaccattcccccttctttggcgacgagtcaaacaagccaatcc

SEQ ID NO: 87100 - DNA, 120 bp, synthetic construct
  source 1..120: mol_type = other DNA
tccctgattttgccggccaggcacacacggggctgagggaagagagggagtcaaggatgacacccgatgtctggcctgggtggctgctggaatggatggtcttgtctgcctcagggatca

SEQ ID NO: 87101 - DNA, 120 bp, synthetic construct
  source 1..120: mol_type = other DNA
gttgtgtcctctgtgccctgaagcctgtggcgcctgctgctgagtgtctgtcaggagtaactggcaagtgcagactgggtgtgctgggtgggcacagtgtagttggtgcttcctgtctgt

SEQ ID NO: 87102 - DNA, 120 bp, synthetic construct
  source 1..120: mol_type = other DNA
accaagtctccccagacatggagggccttgtggacaccagcgtggccaagatcgtgtctgaccgcaacctgcccttcgtggcccgccagatggccctgcacgcaaatgtgagtgggggtg

SEQ ID NO: 87103 - DNA, 120 bp, synthetic construct
  source 1..120: mol_type = other DNA
caggcccctcagccctagtgaaaatagtgacatacaaaaatatacacattttaacaccatataaattactgacacgagacacacagtgagacggtgcagggagtacggtaggaactggag

SEQ ID NO: 87104 - DNA, 120 bp, synthetic construct
  source 1..120: mol_type = other DNA
gcacatccggggataccttggagcccctggaggagcgagagggcagcggctccatcccttcaaagcggactttgtggcggaactgggggcggcacaggggctcagtcagtccggctgcac

SEQ ID NO: 87105 - DNA, 120 bp, synthetic construct
  source 1..120: mol_type = other DNA
ccagcgcccttccctgtgccaagtacgggcctcggccacggcgaagtgcacggcgaacagcagcaggcacacctgtggggggcgcggtcaggagggcgggagggacgctgccggggcggg

SEQ ID NO: 87106 - DNA, 120 bp, synthetic construct
  source 1..120: mol_type = other DNA
tctggttcggcgccaccccagggaaccctcccagcagccatcaattagacaacgttaccatctctcatatacagagaaggaaacggcggtgttaagagggcaaaggtcacacagctaggg

SEQ ID NO: 87107 - DNA, 120 bp, synthetic construct
  source 1..120: mol_type = other DNA
aggagggagaccgggcaaaggctgcagagcattgaacccctaagggccttctgaggtgaggaaagggggacaggagtgtcctgcgtgcatgggtgggaggtgggagacaagagacggagg

SEQ ID NO: 87108 - DNA, 120 bp, synthetic construct
  source 1..120: mol_type = other DNA
gtaggctgtgaattcatcccggcctccaggaggcagttgcagccaagcccatgttaacctgggcgggcagtttcttgagcctcttgggtcacagggtccccccgacaaaaagccggaaga

SEQ ID NO: 87109 - DNA, 120 bp, synthetic construct
  source 1..120: mol_type = other DNA
tcacttgagctcaggagttggagacagtgagaccctgtctttacaaaaaattaaaaaatgacctagcctcaacttggtcaggcgtggtggctcacgcctgtaatctcagcattttgggag

SEQ ID NO: 87110 - DNA, 120 bp, synthetic construct
  source 1..120: mol_type = other DNA
ttagttcttggttgcttaacaatgagaagcactcaaaggaataacacacaaatcaaactagatgtggatgcaaaagcagcagtcacgcaccacttagtgccagggatgtgttctgagaaa

SEQ ID NO: 87111 - DNA, 120 bp, synthetic construct
  source 1..120: mol_type = other DNA
ggccaaaaatggggtatttaaaaacccgcccataatttctcactgctctgagaccaagataaaaacgtggccccggccagcctcacacaggagcctttctgctcctacaaagccccatga

SEQ ID NO: 87112 - DNA, 120 bp, synthetic construct; identical to SEQ ID NO: 15828
  source 1..120: mol_type = other DNA

SEQ ID NO: 87113 - DNA, 120 bp, synthetic construct
  source 1..120: mol_type = other DNA
attcttccttaactgcttagaaaaattctatcgtgaaggctctgagcctgagcttttctttgtgggattttttttttttttttttggagatggagtcttgctccgttgcccaggatggag

SEQ ID NO: 87114 - DNA, 120 bp, synthetic construct; identical to SEQ ID NO: 15829
  source 1..120: mol_type = other DNA

SEQ ID NO: 87115 - DNA, 120 bp, synthetic construct; identical to SEQ ID NO: 15830
  source 1..120: mol_type = other DNA

SEQ ID NO: 87116 - DNA, 120 bp, synthetic construct; identical to SEQ ID NO: 15831
  source 1..120: mol_type = other DNA

SEQ ID NO: 87117 - DNA, 120 bp, synthetic construct; identical to SEQ ID NO: 15832
  source 1..120: mol_type = other DNA

SEQ ID NO: 87118 - DNA, 120 bp, synthetic construct
  source 1..120: mol_type = other DNA
cgatctcctcgcccgccagcgtcaggggctcctcgttgagcacgcgggagcgcatgaggatgcgcatgagggcagaggtcaggttgtaggcctgggacgccaccatccgagatggtgact

SEQ ID NO: 87119 - DNA, 120 bp, synthetic construct
  source 1..120: mol_type = other DNA
tggctcccacccccagccctgcagctggagagcccacttgactggacccccacagcctcctcactaagcattttctgtggctctgcatgacccagggcctccacctggggaccacgtgat

SEQ ID NO: 87120 - DNA, 120 bp, synthetic construct
  source 1..120: mol_type = other DNA
atctgggctcggtgctgccgctcgtgcttgggctctgccgccacgtccagggcccgctcgtactggggcaggcagggggcacagcaagctgtcagcagcgcaggaggccggcaggaggcc

SEQ ID NO: 87121 - DNA, 120 bp, synthetic construct
  source 1..120: mol_type = other DNA
tgacgtcacagagtcgggggatcccgctgctccccccacgcaggcctgcactcacccgtgcattcgaagtgcaccttggtggtgagggcgtgcacagcgcccagtgggaagaggcggcaa

SEQ ID NO: 87122 - DNA, 120 bp, synthetic construct
  source 1..120: mol_type = other DNA
ccctctgggaagacccccaatcaggccagctgaggaaagcagggactggggaacagacgcccactctggggcaccagcaggccccgcctgacagcagcaggagcagccaccacgggctca

SEQ ID NO: 87123 - DNA, 120 bp, synthetic construct
  source 1..120: mol_type = other DNA
accaggtcccgtgtgtctgaccacacgcggtatgagccaccctcaatgatgggcaccaggcgctcgggggccaccgtcacattggcctggatgctctgtgtcagtggcgtgtccccaaat

SEQ ID NO: 87124 - DNA, 120 bp, synthetic construct
  source 1..120: mol_type = other DNA
cccgcacgctcaccacgtggtctccgacgcgggggaagctgtgggagaaacggggcccggggagcacctcggggttggccccgccgacctgcaggcggaaggtgacagctgagccggcag

SEQ ID NO: 87125 - DNA, 120 bp, synthetic construct
  source 1..120: mol_type = other DNA
gctgtaccgtgtggttggtggggaagtagcggccaccgcccaccacctgcagcccctctatgagctgcaggacatagacgaagatgctgtcctgggcggagcccacctcgttctcagccg

SEQ ID NO: 87126 - DNA, 120 bp, synthetic construct
  source 1..120: mol_type = other DNA
gaggagccatccccgaaggtccagtcgaagaggtagtgggccgggttcccggtgacgtaggccgtgagccgcgcgtcaggctgcgtggggatgcaggcggcgggttcaacgcgcagcacc

SEQ ID NO: 87127 - DNA, 120 bp, synthetic construct; identical to SEQ ID NO: 15837
  source 1..120: mol_type = other DNA

SEQ ID NO: 87128 - DNA, 120 bp, synthetic construct; identical to SEQ ID NO: 15838
  source 1..120: mol_type = other DNA

SEQ ID NO: 87129 - DNA, 120 bp, synthetic construct; identical to SEQ ID NO: 15839
  source 1..120: mol_type = other DNA

SEQ ID NO: 87130 - DNA, 120 bp, synthetic construct; identical to SEQ ID NO: 15840
  source 1..120: mol_type = other DNA

SEQ ID NO: 87131 - DNA, 120 bp, synthetic construct; identical to SEQ ID NO: 15841
  source 1..120: mol_type = other DNA

SEQ ID NO: 87132 - DNA, 120 bp, synthetic construct; identical to SEQ ID NO: 15842
  source 1..120: mol_type = other DNA

SEQ ID NO: 87133 - DNA, 120 bp, synthetic construct; identical to SEQ ID NO: 15843
  source 1..120: mol_type = other DNA

SEQ ID NO: 87134 - DNA, 120 bp, synthetic construct; identical to SEQ ID NO: 15844
  source 1..120: mol_type = other DNA

SEQ ID NO: 87135 - DNA, 120 bp, synthetic construct; identical to SEQ ID NO: 15845
  source 1..120: mol_type = other DNA

SEQ ID NO: 87136 - DNA, 120 bp, synthetic construct
  source 1..120: mol_type = other DNA
gcctgggcgacagagcaagacccggtctcgaaagaaaacaaagagaaagcaaggaaagaaagatggccgggcacggtggctcactcctgtaatgccagaactttgggaggccaaggtggg

SEQ ID NO: 87137 - DNA, 120 bp, synthetic construct
  source 1..120: mol_type = other DNA
tccaaaaacaaaaaaagaaaaaccaggcaattagaagaagcacaattggtcacagccgtaggaaaaacatcccatgtcagtagtcagtgaagaaaaagcaacagaaaccacagggcggca

SEQ ID NO: 87138 - DNA, 120 bp, synthetic construct; identical to SEQ ID NO: 15846
  source 1..120: mol_type = other DNA

SEQ ID NO: 87139 - DNA, 120 bp, synthetic construct; identical to SEQ ID NO: 15847
  source 1..120: mol_type = other DNA

SEQ ID NO: 87140 - DNA, 120 bp, synthetic construct; identical to SEQ ID NO: 15848
  source 1..120: mol_type = other DNA

SEQ ID NO: 87141 - DNA, 120 bp, synthetic construct
  source 1..120: mol_type = other DNA
tgggcagatggctgctggctccgcctaccacttccatggggagggccagggaggccggccacaaccctggccccacgaggggtgggggtggcagcctctgatacaggacgaggctgccag

SEQ ID NO: 87142 - DNA, 120 bp, synthetic construct
  source 1..120: mol_type = other DNA
cctgtactcccacagctgtgacgttccctgggcatgggcttgccccagcgctggcctcattcctgcctcaaccagaaggaagagctggcttccgcctctgcctgggcacaaagccctttc

SEQ ID NO: 87143 - DNA, 120 bp, synthetic construct
  source 1..120: mol_type = other DNA
atcagggcgggcactgagcggaactcaggcagtgccactcgccagcttacgtcaaaagaacaaaaggagtgaggacggtactcgcggctctgccaacacttcccagccccgcacgtctca

SEQ ID NO: 87144 - DNA, 120 bp, synthetic construct; identical to SEQ ID NO: 660
  source 1..120: mol_type = other DNA

SEQ ID NO: 87145 - DNA, 120 bp, synthetic construct
  source 1..120: mol_type = other DNA
catcacagctaactgcagtctcaacctcatagactcagggaatcctcccccctcagcctcccaactagctgggactacaggcgccaccactaatatctatttattggtctcgctatgttg

SEQ ID NO: 87146 - DNA, 120 bp, synthetic construct
  source 1..120: mol_type = other DNA
ctgggcagctccctgtgggagctttgaaacctggcttcaatgtcacctgcactgggggtccttccaggccagccccctccccatcatccatctctgtccttggagaatcatctgcgtgtt

SEQ ID NO: 87147 - DNA, 120 bp, synthetic construct
  source 1..120: mol_type = other DNA
gacaggcggtggctcaagcctgtaatcccagcactttgggaggctgaggcgggaggatcacgaggtcaggagatccagaccatcctggctaacacggtgaaaccccgtctctactaaaaa

SEQ ID NO: 87148 - DNA, 120 bp, synthetic construct
  source 1..120: mol_type = other DNA
ccagctactggagaggctgaggcaggagaatcacttgaacccgggaggcggaggttgccgtgaggtgagatcgcgccactgcactccagcctgggcaacaagagcgaaactccgtctcaa

SEQ ID NO: 87149 - DNA, 120 bp, synthetic construct
  source 1..120: mol_type = other DNA
ttgcactccagccttggcaacaagagtgaactctgtctcaaaaaaaaaaaaaaaaaaaaaaaacacatgggtcaggagggagaagggtcggggcagggagggcagggcaggctctggggt

SEQ ID NO: 87150 - DNA, 120 bp, synthetic construct
  source 1..120: mol_type = other DNA
cagtgaccggcctggcagacagaggagccctcagctacagcatcacaaacaacgggtggggtaggtctgatgcaattctgtgggtgctgttgccaggcaggaggaggccatctccacaga

SEQ ID NO: 87151 - DNA, 120 bp, synthetic construct
  source 1..120: mol_type = other DNA
caaatccttttccagacacctcctggaactcttccctgccgccccctacagccatccccacctctccgggtaccccgcagccccaggccgcatcccaattcctctccaattagcgactgt

SEQ ID NO: 87152 - DNA, 120 bp, synthetic construct
  source 1..120: mol_type = other DNA
gacagtttaagaaatttgccagcagggcacagtggctcactccggtaatcccagaactttgagagggggaggaaggtggatcccttgagtccaggagttggagaccagcctggccaacat

SEQ ID NO: 87153 - DNA, 120 bp, synthetic construct
  source 1..120: mol_type = other DNA
atagaaaagacatatgtttaaagaagcaaattagttacctggaaatgaaattctaaactatttgaaaaaccatgggggccgggcgtggtggctcatgcctgtaatcccagcactttggga

SEQ ID NO: 87154 - DNA, 120 bp, synthetic construct
  source 1..120: mol_type = other DNA
agattgagccatcctggccagtatggtgaaaccccgtgtctactaaaaatacaaaaattggctgggcatggtggcacacagttgtggtctcagctattcgggaagctgaggcaggagaat

SEQ ID NO: 87155 - DNA, 120 bp, synthetic construct
  source 1..120: mol_type = other DNA
tcatgcctgtaatcccagaactttgggaggccaaggaaggaggatcactgaggccagcctggacaacacagagagaccccatttctttttttttgtttgttgttttttctttttttgaga

SEQ ID NO: 87156 - DNA, 120 bp, synthetic construct
  source 1..120: mol_type = other DNA
tgagtagcacagttaataagctgtattgtacacaaaacagggcgtgttaactattttggcattacagatgttaggcaaggtcagaggaaaagcttagataagaacgtggcctttggccgg

SEQ ID NO: 87157 - DNA, 120 bp, synthetic construct
  source 1..120: mol_type = other DNA
tctttctaaagatatcaattatagattttttttttaagacagtttcactcttgttgaccaggctggagtgcaatgatgcgatctcggctcactgcagcctctgcctcccaggttcaagca

SEQ ID NO: 87158 - DNA, 120 bp, synthetic construct; identical to SEQ ID NO: 23840
  source 1..120: mol_type = other DNA

SEQ ID NO: 87159 - DNA, 120 bp, synthetic construct; identical to SEQ ID NO: 23841
  source 1..120: mol_type = other DNA

SEQ ID NO: 87160 - DNA, 120 bp, synthetic construct; identical to SEQ ID NO: 23842
  source 1..120: mol_type = other DNA

SEQ ID NO: 87161 - DNA, 120 bp, synthetic construct; identical to SEQ ID NO: 23843
  source 1..120: mol_type = other DNA

SEQ ID NO: 87162 - DNA, 120 bp, synthetic construct; identical to SEQ ID NO: 23844
  source 1..120: mol_type = other DNA

SEQ ID NO: 87163 - DNA, 120 bp, synthetic construct; identical to SEQ ID NO: 23845
  source 1..120: mol_type = other DNA

SEQ ID NO: 87164 - DNA, 120 bp, synthetic construct; identical to SEQ ID NO: 23846
  source 1..120: mol_type = other DNA

SEQ ID NO: 87165 - DNA, 120 bp, synthetic construct; identical to SEQ ID NO: 33536
  source 1..120: mol_type = other DNA

SEQ ID NO: 87166 - DNA, 120 bp, synthetic construct
  source 1..120: mol_type = other DNA
ttgaggctgtagtgagcagtgatcttgctactgcactccagcctgggcgacagagcaagaccctcctcctgcaacaacaacaacaaaaaaaagtgcacatatttaaaaattttaagatac

SEQ ID NO: 87167 - DNA, 120 bp, synthetic construct
  source 1..120: mol_type = other DNA
attttctcctagccataattttttttttttttttttttttttttttgagacagagtcttattctctgtcgcctaggctggagtgcaatggcacaatgtcagctcactgcatcctccgctt

SEQ ID NO: 87168 - DNA, 120 bp, synthetic construct
  source 1..120: mol_type = other DNA
tcaagcgatgctcctgccttggtctcccaaagtgctgggattataggcatgagccactgtgcctggactctttaaactttctttaaagtgtcttctgtcattctgaaattttacattttt

SEQ ID NO: 87169 - DNA, 120 bp, synthetic construct
  source 1..120: mol_type = other DNA
caaagtcttggtattacaggcgtgagcaaccacagccagctaatttttgtatttttaatagagactgggtttcgtcattttggccaggctggtcttgaactcctgacctcaggtgatctg

SEQ ID NO: 87170 - DNA, 120 bp, synthetic construct
  source 1..120: mol_type = other DNA
ggattaccggtgggagccactgcgcctggccccagaaaatcttaaggaaatgttctattaaatgtttatatttttttactaagatagaactattgatatattgaacaaatagctgtatca

SEQ ID NO: 87171 - DNA, 120 bp, synthetic construct; identical to SEQ ID NO: 80239
  source 1..120: mol_type = other DNA

SEQ ID NO: 87172 - DNA, 120 bp, synthetic construct
  source 1..120: mol_type = other DNA
cgtaagtcttcacattgctttttctccttcatacgtggaggtgactttactgagctataaaatgtaatgctaaattttagtatgagaagaatcagagttttctagtttgtcccttccatt

SEQ ID NO: 87173 - DNA, 120 bp, synthetic construct; identical to SEQ ID NO: 29196
  source 1..120: mol_type = other DNA

SEQ ID NO: 87174 - DNA, 120 bp, synthetic construct
  source 1..120: mol_type = other DNA
caacctttagtcttaagaaaatatctggctgggcgcggtggctcacgcctgtaatccctgcactttgggaggctgaggcaggtggatcatgaggtcaggagatcaagaccgtcctggcta

SEQ ID NO: 87175 - DNA, 120 bp, synthetic construct; identical to SEQ ID NO: 29197
  source 1..120: mol_type = other DNA

SEQ ID NO: 87176 - DNA, 120 bp, synthetic construct
  source 1..120: mol_type = other DNA
accagcctggccaacatggtgaaacctcaactctactaaaaatacaaaattagctgagtgtggtggcacgtgcctataatcccagctactcaggaggctgaggcaggagacttgcttgaa

SEQ ID NO: 87177 - DNA, 120 bp, synthetic construct
  source 1..120: mol_type = other DNA
agctgagtgcagtgaagtgcactgcactccagcctgggcaacagagcaagactctgtccccccacccaaaaaaaaaaggatctgaaagatgaaatacttgaaaacaaattcagttttcag

SEQ ID NO: 87178 - DNA, 120 bp, synthetic construct
  source 1..120: mol_type = other DNA
actttaaactgctagggctactgagatctatgacaccagatgtacccacaactatgacagtattcgtaagactaggttctcagccatcattattctaggaaaaggaccacaattacgaga

SEQ ID NO: 87179 - DNA, 120 bp, synthetic construct
  source 1..120: mol_type = other DNA
caaaatgttgatagcgcggtgatgggtacatggaaggttcattacacttttttgtctacattttatgttaaaatatttctattataaaagggtgagtaaataaaaatatttatcataaaa

SEQ ID NO: 87180 - DNA, 120 bp, synthetic construct
  source 1..120: mol_type = other DNA
caatcaggaccggcctggcagtgtcatggctgcccacaggtctgcaggcactcggtacgccgctaacgcggcgaggtagctcggtgcgtctcgcggtaccagtgcgaatcatcgggctat

SEQ ID NO: 87181 - DNA, 120 bp, synthetic construct
  source 1..120: mol_type = other DNA
cttcccgattttaagaagaaaataaaaccaaccttacattcaacaacccagctaagaaatctaatttaaaaatcaactgttggccgggcacagtggctcatgcctgtaatcccagcactt

SEQ ID NO: 87182 - DNA, 120 bp, synthetic construct
  source 1..120: mol_type = other DNA
cctgacattttaagaaaatccctttagcagtgaactttagcagtgaactgtcctttagcagtgaactgaattggtcatctaaccttctttattctttctcccagccttttcccctcaaat

SEQ ID NO: 87183 - DNA, 120 bp, synthetic construct
  source 1..120: mol_type = other DNA
tattatctggcatgtactttgatttctcctttttgcttttttttttctttttttaaagacagggtctctctctgttgcccaggctggagtgcagttgtgccatcttcgctcactgcaacc

SEQ ID NO: 87184 - DNA, 120 bp, synthetic construct; identical to SEQ ID NO: 29198
  source 1..120: mol_type = other DNA

SEQ ID NO: 87185 - DNA, 120 bp, synthetic construct
  source 1..120: mol_type = other DNA
ccattatttacgacccggcttccttctatggccattccgagtttgaactggcaatcgccttgatgtttggggggttccccagatccttcttcaccgcctaccaccggaagatccccaagg

SEQ ID NO: 87186 - DNA, 120 bp, synthetic construct
  source 1..120: mol_type = other DNA
ggtcccagcgtggcgcgaataagtgtcagggcggttggctctgaggggtgggtcccggggctcgcctcgcgcccccgactgcgtgctcaggccccgcccctccccgtccacgcatgctga

SEQ ID NO: 87187 - DNA, 120 bp, synthetic construct; identical to SEQ ID NO: 18401
  source 1..120: mol_type = other DNA

SEQ ID NO: 87188 - DNA, 120 bp, synthetic construct; identical to SEQ ID NO: 18402
  source 1..120: mol_type = other DNA

SEQ ID NO: 87189 - DNA, 120 bp, synthetic construct; identical to SEQ ID NO: 18403
  source 1..120: mol_type = other DNA

SEQ ID NO: 87190 - DNA, 120 bp, synthetic construct
  source 1..120: mol_type = other DNA
caggacgcagaggttgccgtgagccaagattgggccatggcactccagcctgggcgccagagtgagactccatttcaacaaccacaacaacgacgacaacaacaacaacaacaacaaaag

SEQ ID NO: 87191 - DNA, 120 bp, synthetic construct
  source 1..120: mol_type = other DNA
tggaaacctcagagcaggacaaggtgaaggcagagaaggccaggactgagcctcctgtctcctggtgcccagggttggggctacttcaatataatctggaggtcacaagcatcagatacc

SEQ ID NO: 87192 - DNA, 120 bp, synthetic construct
  source 1..120: mol_type = other DNA
tagtgactcagaggacgttagggacccctggggaaacacctttataaggggttaccatggcaaccatggaccagagggaagaactgaggcccacaggtgtgggtagaagttggtgatcct

SEQ ID NO: 87193 - DNA, 120 bp, synthetic construct
  source 1..120: mol_type = other DNA
gcacacttctcacctgcagctctgttctttcttccttgagatcagaggctggttattgtactgggacatactctacctccttttggcttctaatgtcctttctatgagtttgctactgag

SEQ ID NO: 87194 - DNA, 120 bp, synthetic construct
  source 1..120: mol_type = other DNA
gcagacatttttattccccttaccagactgtaagctctttgaggctggatttctttctttctttttttttgagaccgagtcttgctctgtcacccaggctggagtgcagtggcgcgatct

SEQ ID NO: 87195 - DNA, 120 bp, synthetic construct
  source 1..120: mol_type = other DNA
ctctaccaaaaatacaaaaattagctgagcctggtcgtgcatgcctggaatcccaactattcgggagactgaggcaggagaatcgcttgaacccaggaggcggagattgcagcgagccaa

SEQ ID NO: 87196 - DNA, 120 bp, synthetic construct
  source 1..120: mol_type = other DNA
ctgaccacaggtctaccccatccccacctggggagaaggcatccactcacagatttctgctgcgttttcaccctgttggaaggtgttggaatagactctgagaagcagagggaggtctgg

SEQ ID NO: 87197 - DNA, 120 bp, synthetic construct
  source 1..120: mol_type = other DNA
tgacgggcttgtgctaatggataatttagaagctcctcccacacatgctgggatcatgccccctgacttgtcatctttcccttcccaccatcaccagcgttgtgagggttgtgcacagaa

SEQ ID NO: 87198 - DNA, 120 bp, synthetic construct
  source 1..120: mol_type = other DNA
tgccacttgtcttgtgtaggagctatgactatcatcccatttcacagatcaggagactgaggctcagagagactgattacatgagctacctcagccagggcagcagatcttcacaacctt

SEQ ID NO: 87199 - DNA, 120 bp, synthetic construct; identical to SEQ ID NO: 87191
  source 1..120: mol_type = other DNA

SEQ ID NO: 87200 - DNA, 120 bp, synthetic construct
  source 1..120: mol_type = other DNA
ggtagaagtcaatgatcattttctctagtctagatcttcccagagccttgagcaatggagaccacatccatcattcattgctagtaaaaaatcatctttgaattagacttgggattcccc

SEQ ID NO: 87201 - DNA, 120 bp, synthetic construct
  source 1..120: mol_type = other DNA
aactcagctccttgggatactgtttctgcagaccaaccacggttagaggaatccagttgctctgccaaacagacctggctggaagggatggaacacacgctcacctgcgtcccaaaggga

SEQ ID NO: 87202 - DNA, 120 bp, synthetic construct
  source 1..120: mol_type = other DNA
tctcttttcttttctttttctttttctttttttttttttttgagatggagtcttgctgttgtcgcctaggctggagtgcaatgatgcgatcctggctcactgcaactgcagcctcccggg

SEQ ID NO: 87203 - DNA, 120 bp, synthetic construct
  source 1..120: mol_type = other DNA
gaatggtgacaggattctgggttcttgggcgaggggtctcggcttcaacttgacaggtgtcgggcgggtggggctagggtcctgagcgaagtgacaggtgcagttccctcttgtgaggct

SEQ ID NO: 87204 - DNA, 120 bp, synthetic construct
  source 1..120: mol_type = other DNA
cgtctggggcatgttctgggaaaagacatggctttagtttctgattaaattctgatgtatccaattcttgcaaatttcccttgggaaaatgcagtaatggctactctaaagaattccatg

SEQ ID NO: 87205 - DNA, 120 bp, synthetic construct
  source 1..120: mol_type = other DNA
agattgcttgaggccaggagtttgagaggagcctgggcaacaaaacaagaccctgtctctaaaacaaattttaaaaaattagccagtggctgtggcacacctgtaggctcatctactcag

SEQ ID NO: 87206 - DNA, 120 bp, synthetic construct
  source 1..120: mol_type = other DNA
tcctattttcccaaacagctttagctattacatttactttccttcacagaagtgttttgctgctttgaagtatatttgacttaccatgcaagcaaatatttttcactgtgtggtatcctt

SEQ ID NO: 87207 - DNA, 120 bp, synthetic construct
  source 1..120: mol_type = other DNA
tcattttttctttgcgtaagtatagatgtatatgtttaataaaaggagcaaataattactagagttttatatgtactggggcaatagtataagaattttacatagccgggcatggtggtg

SEQ ID NO: 87208 - DNA, 120 bp, synthetic construct
  source 1..120: mol_type = other DNA
actcttactggatatttgggttttttccaactttttgatgctataaaataatgtaataaacatttgtattcgtaagaataatgcctggcacaaagtgagtccttgataacttgttaaata

SEQ ID NO: 87209 - DNA, 120 bp, synthetic construct
  source 1..120: mol_type = other DNA
tctctaccttccctgggaactggcccagtttgaatcttatttcctaatggagctcataatggggactaggatgtgtgaaattatttatggctaggtactggaggaaggtaagaaaggaat

SEQ ID NO: 87210 - DNA, 120 bp, synthetic construct
  source 1..120: mol_type = other DNA
ttggctaaggtgatgttcatattgtgacttaaggtgaatcagctgttagaattttggtttactttctgcatcttgattggtagtatggtagaatggaaaatgccttggacctcaaggcag

SEQ ID NO: 87211 - DNA, 120 bp, synthetic construct
  source 1..120: mol_type = other DNA
ctcggcctcccaaagtgctggcattacaggcgtgagccactgtgcctggcctttattagtgtattttaaagctttatccttgggtacatacaagtttagaatttttatgccttttaggta

SEQ ID NO: 87212 - DNA, 120 bp, synthetic construct
  source 1..120: mol_type = other DNA
gcctccattgtaacaccctcccatgctcccaccaccattatgaagaagtaaagtccaaactttctcagtatttgtagttcttcatggtctgtgctttaaccttccttccagtcttatttt

SEQ ID NO: 87213 - DNA, 120 bp, synthetic construct
  source 1..120: mol_type = other DNA
gccattctcctgcctcagcctcccaaagagctgggactacaggtgcctgccaccacgcccggctaatttttctgtatttttagtagagacggggtttcactgtgttagccaggatggtct

SEQ ID NO: 87214 - DNA, 120 bp, synthetic construct
  source 1..120: mol_type = other DNA
ggcggaggttgcagtgagccgaagtcgtgccactgcactccagcctgggcaaaaaaaaaaagaaaaagcagctaaaatctatgtatttaacaaaaatctctaatacagtaccattttatt

SEQ ID NO: 87215 - DNA, 120 bp, synthetic construct
  source 1..120: mol_type = other DNA
atgcctagtttgttgagctatataccacactttctttatccactaatcggctgatgggcacttcagttgattccatacttttgcagttgtgaattgtgctgcaataaacaagtgcaggtt

SEQ ID NO: 87216 - DNA, 120 bp, synthetic construct
  source 1..120: mol_type = other DNA
cacatctgttaaataaaagcattgtttcatgttggtgtacgtctatacagggctatgtataaccgactcctgtttctcctccctgcaaccacagaaccatcacacacacacacacacaca

SEQ ID NO: 87217 - DNA, 120 bp, synthetic construct
  source 1..120: mol_type = other DNA
gggcagctgaataaaagcacttctggcagcatgctcggcccctcgtgagcgctggtctttctgaatgtaaacatttctcctgctcgctgagagccccttggcggagacactgccactggt

SEQ ID NO: 87218 - DNA, 120 bp, synthetic construct
  source 1..120: mol_type = other DNA
tccttgatggccgtgtccaggtcctcgtcactgtccagggagctgctcttgtcttcggagctctccttctcgtccaggtgcctcacctcgtctgtcttaccctggccctgcgtcatgcga

SEQ ID NO: 87219 - DNA, 120 bp, synthetic construct
  source 1..120: mol_type = other DNA
cgtcgttgctgctggagtctgacgcctcgggcgcctgcgccgcacttgtgacttgctttccccttctcagggcgccagcgctcctcttgaccccgcttttattctgtggtgcttctgaag

SEQ ID NO: 87220 - DNA, 120 bp, synthetic construct
  source 1..120: mol_type = other DNA
tttcctcctccctcatggggtcaaagtcagcaacaagaccacaggcaggcaatgcgggctgctccttgtgcacggtgggcttggcagctggcttggcgtctgccctgtggcccctctgtg

SEQ ID NO: 87221 - DNA, 120 bp, synthetic construct
  source 1..120: mol_type = other DNA
ggcgggcccgggtctctggggctggcccatttacttagttttgtttttgttgcatttgcttttggtgacactccctttttgatattccacatataaatgaggcaataattttctttctat

SEQ ID NO: 87222 - DNA, 120 bp, synthetic construct
  source 1..120: mol_type = other DNA
tcacttagcataatggcctccatgtccacctgtgttgtggcaagtgacaggatcacctttctttttatggctgaataatattccattgtttatatatactacattttgtttatccacttc

SEQ ID NO: 87223 - DNA, 120 bp, synthetic construct
  source 1..120: mol_type = other DNA
cacagaatggactgggaagtgttccctcctcttctgttttgatggggcagtttgtgaagaatagatattaattcttctttaaatatttggtagaattcatcagtgatgccatctgggcct

SEQ ID NO: 87224 - DNA, 120 bp, synthetic construct
  source 1..120: mol_type = other DNA
agctttcctggagaagctaactaattaatttaatttaaccttatagatactatgaatcttataattgtttgttactgttttaactgccagctttcatgatagcatgcattttgggggata

SEQ ID NO: 87225 - DNA, 120 bp, synthetic construct
  source 1..120: mol_type = other DNA
tatacccagtggtgggattgctgtatcatatggtagttttatttttatttttttgaggaacctctaaactattcttttatagtggctctactaatttacattgccacaagcagttgtgct

SEQ ID NO: 87226 - DNA, 120 bp, synthetic construct
  source 1..120: mol_type = other DNA
tccctaagccacccacttctcttcagaggcaactaataaaagtttctagttttgcattattctacaccttgcttttttcatttagcaatatatcttgaagagcacatctccctctgtatt

SEQ ID NO: 87227 - DNA, 120 bp, synthetic construct
  source 1..120: mol_type = other DNA
gtttgtttttgagtttgacaaatttattggtattttattaaagacattcatctcagttgtttctctctcccagcttgaccttaggttaatatttcatttgggtcaagaaaagaatatcag

SEQ ID NO: 87228 - DNA, 120 bp, synthetic construct
  source 1..120: mol_type = other DNA
attcgcttcaagttctggtggaaatgcttacaggaactagctaataaacaaaaaacaagagaagcacattcaaaatactgatttactttggtagcaaatggtttttctttgaagattaat

SEQ ID NO: 87229 - DNA, 120 bp, synthetic construct
  source 1..120: mol_type = other DNA
aaaacccatgctttcctttattgaaggagtttggtccagctgatgttggtgtatcccttgcaatattcttcatcctcatctttgcttctggaggcctttcctctgattcactatcttcat

SEQ ID NO: 87230 - DNA, 120 bp, synthetic construct
  source 1..120: mol_type = other DNA
aaaaactatttttaaagacaggttgattcagaattacagtgtacttgaaaatcatcaggtacctattattagttttcacccacattgaatctgtgtttcagaaactgtctaccaaacttt

SEQ ID NO: 87231 - DNA, 120 bp, synthetic construct
  source 1..120: mol_type = other DNA
gtggaatgcagcaaaacagttccaataggagatttcatagtgataaacaccaacatgaaggaaacagtaggaccccagataagtaacctaactttacatctctcagaactaggtagaaaa

SEQ ID NO: 87232 - DNA, 120 bp, synthetic construct
  source 1..120: mol_type = other DNA
gcccacagctagcattatactcagtggggaaacctaaaatcttttcctttaagatcaggatcaagacaaggatcatttgtcacttgcattcaacatagtactggaaatctagccagagat

SEQ ID NO: 87233 - DNA, 120 bp, synthetic construct
  source 1..120: mol_type = other DNA
gtcagacacagaaagacaaatactgcatgatctcatttatatgtaaaatctttaaaaagtcaaatacatacaaacagtaaaaaggtggttagcaggggtggggagcctggggagaatgtg

SEQ ID NO: 87234 - DNA, 120 bp, synthetic construct
  source 1..120: mol_type = other DNA
gatctgagttgtaggaattaatctccttactcaatggttttcaaccttgtttccaagagtagtagatatcagttttgtagctatttttcagaaaagctaattagtagccctttgagtatg

SEQ ID NO: 87235 - DNA, 120 bp, synthetic construct
  source 1..120: mol_type = other DNA
gtgaaattttctagcgtcttagcctgttattccttctgttcctacgtatcacctaggtaaggaggaaatctaggagcaaaagataaaggcagttcttccccctatttctctgtaatacct

SEQ ID NO: 87236 - DNA, 120 bp, synthetic construct
  source 1..120: mol_type = other DNA
catctattacactaaatctttttttaatttttaagttttgtgggtacatatcaagtgtacacatttatgggacatatgaaatgccctgatgcaagcatgcagttctgttactctaaatct

SEQ ID NO: 87237 - DNA, 120 bp, synthetic construct
  source 1..120: mol_type = other DNA
ccctctttttctattgattggaatagtttcagaaggaatggtaccagctcctctttgtacctctggtagaattcggctgtgaattcatctgctcctggacttcttttggttggtaggata

SEQ ID NO: 87238 - DNA, 120 bp, synthetic construct
  source 1..120: mol_type = other DNA
tccttgttaacgttctgactcattgaactgtctaatgttgacagtggggtgttaaagtctcccattattattgtgtgagagtctaagtctctttgtaggtctctaaggacttgctttatg

SEQ ID NO: 87239 - DNA, 120 bp, synthetic construct
  source 1..120: mol_type = other DNA
atttgaatgttggcctgccttgctaggttggggaagttctcctgtataatatcctgcagagtgttttccaacttggttccattctccctgtcactttcaggtacaccaatcagatgtaga

SEQ ID NO: 87240 - DNA, 120 bp, synthetic construct
  source 1..120: mol_type = other DNA
tgtcagacagggacatttaagtctgcagaggtttctgctgccttttgttcggctatgccctgcccccagaggtggaatctacagaggcaggcaggcctccttgacctgcggtgggctcca

SEQ ID NO: 87241 - DNA, 120 bp, synthetic construct
  source 1..120: mol_type = other DNA
taaaaactaaccagaaatgaagcatagacctaaacttctagaagatgacataggagaaagtcttaatgagcttgggttaggcaaagatttcatagatacctaccactgaaaacataaccc

SEQ ID NO: 87242 - DNA, 120 bp, synthetic construct
  source 1..120: mol_type = other DNA
tcatataatcaccaccattaagatatagaactttttgatcactccagaaagttctttcattcccctttgcagtcatttcccaacacctcccctctgttccgcaggcaactacagatctac

SEQ ID NO: 87243 - DNA, 120 bp, synthetic construct
  source 1..120: mol_type = other DNA
ggtggtatatattgtggggaaaaatgtgttctaaagataatgaaaaagtactctagtgataatgatagccatcaatcattaagaactgactgtatactatatactacgccaaaggcttta

SEQ ID NO: 87244 - DNA, 120 bp, synthetic construct
  source 1..120: mol_type = other DNA
agaacttggaccaaatagtgaactgccattctctcatggagccgttatgaaagtgtatttatgctgtatttctttaagaggtagcagtttgtgtcctggaaaaattttcattgtgtctct

SEQ ID NO: 87245 - DNA, 120 bp, synthetic construct
  source 1..120: mol_type = other DNA
cttgtcatggctcccccattcctttctgtatcataggaactttaataaccttttggttcccctgctgattagctgaagcttttatttccccagtgtttgattggtccagcccattttttt

SEQ ID NO: 87246 - DNA, 120 bp, synthetic construct
  source 1..120: mol_type = other DNA
tgaggatgaatgggttccaggtttcccactgtcaatgaagagttacaaatatagaaagggaaacactaaaatgaagcatatggttttatattggaattggatgaatggatgtgaactcat

SEQ ID NO: 87247 - DNA, 120 bp, synthetic construct
  source 1..120: mol_type = other DNA
ttagtttggaacgagaaaacacttgcaatggatggtgtatgtgacctatactataaagtaatgatttgtactcccaatggtggcttagaggactttttccattacagttcgagtaggagc

SEQ ID NO: 87248 - DNA, 120 bp, synthetic construct
  source 1..120: mol_type = other DNA
catatctggtagcttattttaatatgatcctaaatacaatgttgctttagagtttttttggtacaatattatttaggcccctgaaaaactggaaacaactgatattcacagctgaagtta

SEQ ID NO: 87249 - DNA, 120 bp, synthetic construct
  source 1..120: mol_type = other DNA
atcagattggtagtaatcttgggctttgccctgcaggcagtggaaactccttgaatgattttaaactagggagtaacagttggatttggcctcaaaagaccactcaggactttgtaaaag

SEQ ID NO: 87250 - DNA, 120 bp, synthetic construct
  source 1..120: mol_type = other DNA
tgattaattgatatcaatctattaattccaacaagtgaatgtctctggaaagattatcaaggcaaagtgttaaattggcaaactaaagtcatccaaaccttcatttttctgctcacagtg

SEQ ID NO: 87251 - DNA, 120 bp, synthetic construct
  source 1..120: mol_type = other DNA
ttttgtttgtttatgcaaacagtgttaacttgttatcagttgaaataatgggttataagatagtatttgcaagcctcatagtaacctcaaaccaaaaaacatacaatgtagacatgaaaa

SEQ ID NO: 87252 - DNA, 120 bp, synthetic construct
  source 1..120: mol_type = other DNA
ctgatcacaatagaataaaactagaaattaataacaaggtattttggaaactgtacagatacatggaaattaaacaatatgctcctgaatggccatgggtcaatgaagaaattaagaggg

SEQ ID NO: 87253 - DNA, 120 bp, synthetic construct
  source 1..120: mol_type = other DNA
gggtagttctgcttttagctctttgcggaattgtcagactgctttctacaatgtttgaactaatttacactcccaaccaagagtgtataagtgttctcttttcttttgcaacctcaccag

SEQ ID NO: 87254 - DNA, 120 bp, synthetic construct
  source 1..120: mol_type = other DNA
atcttgagttgatttttgtatatggtgtaaggaatgggtccagcttcaatcttctgcatatggctagccacttatcctagcaccagttaatgaaatgggagtcttttccccattgcttgc

SEQ ID NO: 87255 - DNA, 120 bp, synthetic construct
  source 1..120: mol_type = other DNA
ttcaagcttctgcacattcagtatgatgttggctgtgggttagttataggtgaaaaaaagaggaaaaactcaaataaacaatctaacattgtatcttaaagaagtacaaaaataagagca

SEQ ID NO: 87256 - DNA, 120 bp, synthetic construct
  source 1..120: mol_type = other DNA
ttgaaagcctttcctctaagatctagaacatgatgaggatgtccattgtcatcactgttattcagcatagtactggaagtcctagatagagtagtcagacaaaagatataaagggaatcc

SEQ ID NO: 87257 - DNA, 120 bp, synthetic construct
  source 1..120: mol_type = other DNA
ccaggacatcagtctgggcaaaaatttcttgagcaatacctcacaaacacagtcaaccaaagcaaaaatggataaacgagatcatatcaagttaaaaagcttctacacagcaaaggatac

SEQ ID NO: 87258 - DNA, 120 bp, synthetic construct
  source 1..120: mol_type = other DNA
agccaggtacagaaagacaaacatcacatactctcatttatttgtgagatctaaaaatcaaatctgaactcatggacctagagagtagaaggatggttaccagaggctgggaagggtggt

SEQ ID NO: 87259 - DNA, 120 bp, synthetic construct
  source 1..120: mol_type = other DNA
ttttggttccatgttctttatgtttgacatgtttaggaatcatgtctatagcttttatacttgaaggacagctttgtcatgtattctattcttgagtcatattttgtttccctcaggaca

SEQ ID NO: 87260 - DNA, 120 bp, synthetic construct
  source 1..120: mol_type = other DNA
ggatcactaaacaaatatattgagaatagcaaatggattttaaccctcctgctaacccagatcaattgctagtggcttcccggcccattgtgttaagaaggactctagattagcatcagg

SEQ ID NO: 87261 - DNA, 120 bp, synthetic construct
  source 1..120: mol_type = other DNA
tgagtgaatatcccttcactctgcacttaatctgtgacttgtttatgttccccaaagagctatggtatgggagcaggcatttttattatatctgcttttagtcaggaggtaagggagaaa

SEQ ID NO: 87262 - DNA, 120 bp, synthetic construct
  source 1..120: mol_type = other DNA
agctacactatttgttttcttaggtatctgttatatgcatttattttctcacagccatctagttgtatatatattctaataactttaaagattttatggtgaacaattattttatagatg

SEQ ID NO: 87263 - DNA, 120 bp, synthetic construct
  source 1..120: mol_type = other DNA
atggggaagagtggcctattctaagggaacagcttaactaagtttttattactattggatgttgtaataactatgtatttttttgtatataagctataactcatactatttcagtgggtg

SEQ ID NO: 87264 - DNA, 120 bp, synthetic construct
  source 1..120: mol_type = other DNA
ctccatgtacttatcatgtaacttcaacagataatttacagttaatctgtagccccattgcctgctcagttcccccagctgtattattttgaagcacatctttgcataccatttcatcct

SEQ ID NO: 87265 - DNA, 120 bp, synthetic construct
  source 1..120: mol_type = other DNA
tcctcttgcagactaaaatacgcttagatttagtttgaaagttggctatttccatgccttctctttgtatttgtttatgagactgtagtttacagttctttttgggagcagagtagaaga

SEQ ID NO: 87266 - DNA, 120 bp, synthetic construct
  source 1..120: mol_type = other DNA
gcactccagcccgggcgccagagtgagactatgtctccaaaaacgaacaaacaaaccaaaaaagccctgcttagaaaactctagtgctctagtgttttagtttagtgataagtgatacca

SEQ ID NO: 87267 - DNA, 120 bp, synthetic construct
  source 1..120: mol_type = other DNA
gtgaattcaatctttatgttattggttggcttccagtcaacagtaggctgttagttaaattttgggtactcaaaagtaatcgataggtctgtagtctcagctacttgggaggctgaggtg

SEQ ID NO: 87268 - DNA, 120 bp, synthetic construct
  source 1..120: mol_type = other DNA
gatattccatccatctacctgttttgtttcgcattttgctacaaatgtctttccaatgagaacagaataactgagagctttgcatggtaagacgaaatatgtggagaaaaggatgctgtg

SEQ ID NO: 87269 - DNA, 120 bp, synthetic construct
  source 1..120: mol_type = other DNA
atttaattggatttcttcctatcactccttttaaaatgcaattttacttctctgaggttggaatcactttggcgttaaaagtcacagtagaaggcatgccaatagttttctcttgggcat

SEQ ID NO: 87270 - DNA, 120 bp, synthetic construct
  source 1..120: mol_type = other DNA
ttctttaatgaaatctgtgcctctgtgtgctgagagatgtaatgacatgtaaaggataattgtcagtgacttttttctttcaaggttgaaaatctttctaaacgatacgaagaaatttat

SEQ ID NO: 87271 - DNA, 120 bp, synthetic construct
  source 1..120: mol_type = other DNA
tttcagtatgtgaatgacttcacttattgttatttagttttgaaacacagagaacaccacgaaaaagtaaccttgatgaagaggtgaatgtaattcctccacacactccagttaggtatg

SEQ ID NO: 87272 - DNA, 120 bp, synthetic construct
  source 1..120: mol_type = other DNA
cctcaccatcaaagatattctccatagagcccccagaatttctcctagaaatgtaaatcagttacattcaccttgctgttaaacccactgactgcttcccattgcaattggtatacagtg

SEQ ID NO: 87273 - DNA, 120 bp, synthetic construct
  source 1..120: mol_type = other DNA
gggtttttggatcttctgaccaaagggcttcaagttggggttcccatgacacctcttaggttcgattaatttgctagagtagttcacaaaactcaaggaaacacttctgtttactggttt

SEQ ID NO: 87274 - DNA, 120 bp, synthetic construct
  source 1..120: mol_type = other DNA
cattccactgaggaatatgcctaggccttactaccacagacatagtgtataaaaatctctgggcttgtctgttgtagcagtttacttgagagtttttaaagatctgaaccaacgatagtg

SEQ ID NO: 87275 - DNA, 120 bp, synthetic construct
  source 1..120: mol_type = other DNA
caacatggcaaaaccccgtctctactaaaaatacaaaaattagcccagctgggcacctgtaatcccagataatcaggaggctgaggcaggagaatcacttgaacccgggaagtggaggtt

SEQ ID NO: 87276 - DNA, 120 bp, synthetic construct
  source 1..120: mol_type = other DNA
ctcccttcattgcttaacacattttcctatttttatcccctctaggactgttatgaacactatccaacaattaatgatgattttaaattcagcaagtgatcaaccttcagaaaatctgat

SEQ ID NO: 87277 - DNA, 120 bp, synthetic construct
  source 1..120: mol_type = other DNA
gcttgcttgctccttcactccttacttaaactcagatgaggattgggacccactgaaatgctcatccactaaaattggacatagggtcaggagacttattaaaatttggcttatttcagc

SEQ ID NO: 87278 - DNA, 120 bp, synthetic construct
  source 1..120: mol_type = other DNA
gccaccttccctccatgtaaaatcttagaagctatgaacattttaatggacattttggcaacaattcttttatgacaggaaatgcttgtttgttatatgtttctaagtttgtgtgctgtt

SEQ ID NO: 87279 - DNA, 120 bp, synthetic construct
  source 1..120: mol_type = other DNA
gtggttggatcacctgaaatcaggagttcgagaccaggctggtcaacatggcaaaaccccatctctactaaagagacaaaaattagtgaggcgtggtgcgcttgcctataatcccagcta

SEQ ID NO: 87280 - DNA, 120 bp, synthetic construct
  source 1..120: mol_type = other DNA
ggtaagagtatgggccatggagtgacagccctgggtttatatttggttctaccattgttgatcttggacatgtcatttaacttctctgagattcaggttctatatttgctctgctttgtt

SEQ ID NO: 87281 - DNA, 120 bp, synthetic construct
  source 1..120: mol_type = other DNA
acacaggatcaggattaacaataccactgtcttctgcctccaaattctgtcccaagtcttcagggacaataaaatgcatagagctgtcaactcctatgatgatgatgctatcttctggaa

SEQ ID NO: 87282 - DNA, 120 bp, synthetic construct
  source 1..120: mol_type = other DNA
cttgggaggccaaagcaggaggatctcttgagcccaggagtgtgaaggccagcctgggcaaaacagtgagactccatctcaaaaaaaaaaaaaatttcataattgtgattttctaaaata

SEQ ID NO: 87283 - DNA, 120 bp, synthetic construct
  source 1..120: mol_type = other DNA
cactaggcttctcttctgagtatactggtatactgaatccaaaaaaggtactttttgaaatccctccgaagacctttgagattgtagagtgccaaaggagtattcaagagtggcctctac

SEQ ID NO: 87284 - DNA, 120 bp, synthetic construct
  source 1..120: mol_type = other DNA
aacgatgtgaacatcgaatcatggaatcccttgcatggctctcagtaagtagctaaataattgaagaaattcattcatgtgcatatggctaacaaattattgttagtgagaggtgtttct

SEQ ID NO: 87285 - DNA, 120 bp, synthetic construct
  source 1..120: mol_type = other DNA
tgtcttcttttgagaagtgtctgttcatatctttcacccactttttgatggggttgattttttcttgtaaatttgtttgagttctttgtagattctggatattagccctttgtcagatgg

SEQ ID NO: 87286 - DNA, 120 bp, synthetic construct
  source 1..120: mol_type = other DNA
ggttcaatcaatataggggcacaaattatattgtctaggattctctttatagcattataactattgataaggcttttgttttaataaaagtggcaacttgaggttatgctcttcaaatca

SEQ ID NO: 87287 - DNA, 120 bp, synthetic construct
  source 1..120: mol_type = other DNA
ccttgagtggtagtggataactttgtgaagataagttatgccacacaaacaggatactgtgtatttttcctgtgagaataattgacattatagagaagggatatggcatagatacatttg

SEQ ID NO: 87288 - DNA, 120 bp, synthetic construct
  source 1..120: mol_type = other DNA
tttctgcaaaaaagaccactatactacctgtttggaatacaaaaagtaactgactgaaattactggacaggaagaacagatgctagttgagaaagagaagaggggagctgggagcctgag

SEQ ID NO: 87289 - DNA, 120 bp, synthetic construct
  source 1..120: mol_type = other DNA
actttgtcattgtgtgaacatcatagagtgtgcttacacaaacctaggtggtatagcctgctacacatcagggtaggaatagcctgttgcttctagactacagacctgtatggtattttt

SEQ ID NO: 87290 - DNA, 120 bp, synthetic construct
  source 1..120: mol_type = other DNA
caacctaaacagcatattgcaacaaagtaaatgtagaagcggataggaaaattcagctctttgctgttatgccagatagtgaagacattcagaagatcataaaacagtgctattgttcta

SEQ ID NO: 87291 - DNA, 120 bp, synthetic construct
  source 1..120: mol_type = other DNA
tgtctttcactcacacaaccatgtttgtttttgcctgtccctgagtcttgaaatgctttcctctgcctttttcttgaccagattttaaggtccattttgcctttcctgatcatcctagtc

SEQ ID NO: 87292 - DNA, 120 bp, synthetic construct
  source 1..120: mol_type = other DNA
atttaaaggatggacagaaaagagaagcctgtgcctacaaaagagattgaaatagaacagccaggaagataagaagaaaatcaggagaagtggtatcatagagagaccgaccaggtgcaa

SEQ ID NO: 87293 - DNA, 120 bp, synthetic construct
  source 1..120: mol_type = other DNA
atgttaagctttggagttttcacctgcagagagaagataggagattcatagtgaaagtagaggttttaagaaacaggatatttggcagggtgcagtgtctcacacctgtaatcccagcac

SEQ ID NO: 87294 - DNA, 120 bp, synthetic construct
  source 1..120: mol_type = other DNA
ccctctctttatccctcgtaatattgtttgctctgaaaactacttgtgcctgatactagtgaagccattccagctttcttcccattaatatcaacatggcatattttccccattctttat

SEQ ID NO: 87295 - DNA, 120 bp, synthetic construct
  source 1..120: mol_type = other DNA
tgcctcagcctcctgagtagctgggattacaggcacacgccaccatgcctagctaatttttatatttttagtagagaaagggtttcaccatgttgatcaggctggtctcgaactcctgac

SEQ ID NO: 87296 - DNA, 120 bp, synthetic construct
  source 1..120: mol_type = other DNA
tgtccctgttactaagtctagtacctatgtctttttaggtctgtttctcttgactgatagttctctctctctctctcttttttttaagagtcgtatgtttctgcttttttgactgcttgg

SEQ ID NO: 87297 - DNA, 120 bp, synthetic construct
  source 1..120: mol_type = other DNA
gtacacttacagaatatttagggtatcatttccgcttccttgtgttaaatgcatcaggtcttctgactgatgcattatactgtttcagaggggtgcttactatatggagaacatagaagt

SEQ ID NO: 87298 - DNA, 120 bp, synthetic construct
  source 1..120: mol_type = other DNA
ggcttgagttttcccctcacagtgtaaacaaagccaccaggaagttcaaactgggcagagcctaccacagctccctaaatccgctgtagccagactgcctttctagattcctcctctctg

SEQ ID NO: 87299 - DNA, 120 bp, synthetic construct
  source 1..120: mol_type = other DNA
cataaatgacctgacggaactgaaaaaacacaacacgaggactttgtgaagcatacacaagtaccaatagctgaatcgatcaagcagaaaaaaaggatatcagagattgaagatcagctt

SEQ ID NO: 87300 - DNA, 120 bp, synthetic construct
  source 1..120: mol_type = other DNA
aaaacaaccaatggggaaaggattccctatttaataaatgatattgggaaaactgactagccatatgcagaaaactgaaactggaccccttccttacaccttatacaaaaattaactcaa

SEQ ID NO: 87301 - DNA, 120 bp, synthetic construct
  source 1..120: mol_type = other DNA
cattctcagcaaactaaccaggaagagaaaaccaaacaacacatgttttcacttataagttaaaactgaacagtgagaacacatggacacatggaggggaacatcacacaccggggcctg

SEQ ID NO: 87302 - DNA, 120 bp, synthetic construct
  source 1..120: mol_type = other DNA
aaaacatagctaaagctttaacctttctcactctgacccaatatattcctaatatagctttgcccttgacttccacagctaaatactagtttctcaagtgatttaggagacttgacttca

SEQ ID NO: 87303 - DNA, 120 bp, synthetic construct
  source 1..120: mol_type = other DNA
tttactctttctctgtttttagtaaaagattccaggtatgcctaaagtcatcttctatacgaatgcaaaaatgtaacgacaaagaagggaaaataaaagaaggcaatatcttaggaataa

SEQ ID NO: 87304 - DNA, 120 bp, synthetic construct
  source 1..120: mol_type = other DNA
gtttcacagatggagaaactttcctgtgtccacaaaactggttggtgacagagccagaattttaactcaggctatctggttccagagactatacttttagcctctatgttgccttttagt

SEQ ID NO: 87305 - DNA, 120 bp, synthetic construct
  source 1..120: mol_type = other DNA
actggaattgtgaggaagggctctagaattctggatatgcaagaaacaaagaagagaaataggagaaatcgatcctaattagtgtggcttctgaatttctgcagcaaaataaaaggctgt

SEQ ID NO: 87306 - DNA, 120 bp, synthetic construct
  source 1..120: mol_type = other DNA
gaacccacatattttaacggggtcttctgaaaataaacgtttgcacatttcagttccaatgaagaacaaatggcctggggaagggatggagagtggtaaagaaatcccttgtagaaaacc

SEQ ID NO: 87307 - DNA, 120 bp, synthetic construct
  source 1..120: mol_type = other DNA
tataatgagataatggaactcagtgtatcggaagagcagactgaacacacacttctacctcctttctccccgcaaaccctacagaagtgacaaaaaagacacatatcacaggggagtgaa

SEQ ID NO: 87308 - DNA, 120 bp, synthetic construct
  source 1..120: mol_type = other DNA
tgtacacttacagacacggggctagggtttcctgatggtgccaaagagagaagcagaacagaaattgaagtaaaccgagacttctgtaacagacctaaagaaaaagaaataggaaaggca

SEQ ID NO: 87309 - DNA, 120 bp, synthetic construct
  source 1..120: mol_type = other DNA
tcacaccagagcagagagaaaaatgcaaaaaatcctacgatgcaacaagcccagaaaatgtttgttccacatgagaaatcagatagtttcataaagaatgccttcaacaacaaaatggtt

SEQ ID NO: 87310 - DNA, 120 bp, synthetic construct
  source 1..120: mol_type = other DNA
aaataactctgtgtgtgtgtgtgtatgtatgtatgtatgtgtgtgttatgtaattgaaattgtgtcttgaggatcaatacctagaagtaagaatgctgggtcaaagggttaatgtgtgtg

SEQ ID NO: 87311 - DNA, 120 bp, synthetic construct
  source 1..120: mol_type = other DNA
tgaccatcaggccctttctgttctaagttgtgaatgttccagaagccattttgataggacgataatggaacctagcacatttaccccatggctattaactgtaacgctgctgtaagtata

SEQ ID NO: 87312 - DNA, 120 bp, synthetic construct
  source 1..120: mol_type = other DNA
acaactaagaacatttgtgacatccagagttggactggcatttaggcacgaaaaaagtttaggtgctggaaggtagtgatgcttcttcttggaaatagtaatttaatatattgacaaagg

SEQ ID NO: 87313 - DNA, 120 bp, synthetic construct
  source 1..120: mol_type = other DNA
tcttgccttaagttgagatctttaagctgaggagagttctgagaaatctcaaagttatacaattctccacccctttcccccagatcagtagattggtagttgcttctcaactcagtatgt

SEQ ID NO: 87314 - DNA, 120 bp, synthetic construct
  source 1..120: mol_type = other DNA
accttatgatccacccgcctcagccacccaaagtgctaggattacaggtgtgaaccaccgtgcccggcctgaatttttttaaaaaaggaatatgttggataataaaaaagttttagtgta

SEQ ID NO: 87315 - DNA, 120 bp, synthetic construct
  source 1..120: mol_type = other DNA
agcatctgctttctacaaattgcctacacagaccaaactcccaaaatgttatcaatgtgttactgctcaagatcttccaacaatgttaatatgtcatcatttctacagaagactacgttt

SEQ ID NO: 87316 - DNA, 120 bp, synthetic construct
  source 1..120: mol_type = other DNA
gatgaaaattacaatccttgagagatatgttttccatgtggcttctggaaaattttcaaagcaggcttctgaggcattgttaccctgagagtgggtagactgaacaaaaacggcgggtgc

SEQ ID NO: 87317 - DNA, 120 bp, synthetic construct
  source 1..120: mol_type = other DNA
cagtgcagagtttcagagacttaaacattcccaatttgtcccattttacttcttgcttcttttaaatgaagttttccttttttgttttcctgcagtggatcccagattgtgggtaagcag

SEQ ID NO: 87318 - DNA, 120 bp, synthetic construct
  source 1..120: mol_type = other DNA
ccttaaattgattgaaataaggtttagagaataaaaatcctactacttggcaaaattttaggttcatagtcttatcttccttcttcctcccagctcttcccttaaccccttaatatgaca

SEQ ID NO: 87319 - DNA, 120 bp, synthetic construct
  source 1..120: mol_type = other DNA
ttttatatcacatttggtatagaaaagatgtatgtgtgtgttcttattagaaggctggtagaagctgagtgagcattaatgaaaaaaggagtggttaataagcttgtattctcattggaa

SEQ ID NO: 87320 - DNA, 120 bp, synthetic construct
  source 1..120: mol_type = other DNA
ggttctttgtagatgattctcacatgtttgctgatgaatgaatcataaacttgaattttgttgccagttgtttctactgaggaagagccatagcagagggactgtttgaacaggaagaag

SEQ ID NO: 87321 - DNA, 120 bp, synthetic construct
  source 1..120: mol_type = other DNA
tgcaggattttttctttttcgtactccagtggcacctgaaacaccagtgagacagaactgttaactcccctggaacaggggctgaagccagggagccaagtggtctagctcagtggatcc

SEQ ID NO: 87322 - DNA, 120 bp, synthetic construct
  source 1..120: mol_type = other DNA
gaagatgaggaaaaaccagcgcaaaaaggctgacaattccaaaaaccagaatgccttttctcttccaaagaatcacaactcctcgccagcaagggaacaaaactggacagagaataataa

SEQ ID NO: 87323 - DNA, 120 bp, synthetic construct
  source 1..120: mol_type = other DNA
ggcatcaactaatgggcaaactaactggctagcatcataatgacaggatcagattcacatataacaatattaaccttaaaagtaaacgggctaagtgccacaattaaaagacacagactg

SEQ ID NO: 87324 - DNA, 120 bp, synthetic construct
  source 1..120: mol_type = other DNA
gagaagcaagagcaaactaattcaaaagctagcagaagataagaaataaccaaggtcagagaagaactgaaggagagagaaacacgaaaaacccttcaaaaaatcaatgaatccaggagc

SEQ ID NO: 87325 - DNA, 120 bp, synthetic construct
  source 1..120: mol_type = other DNA
acaaggatgccctctctcaccactcctattcaacatagtattggaagttctgttcagggcagttagaaaagaggaagaaataaagcgtattcaagtaggaagagaggaaattaaattgtc

SEQ ID NO: 87326 - DNA, 120 bp, synthetic construct
  source 1..120: mol_type = other DNA
aaccctagaagaaaacctaggcaataccattcaggacataggcatgggcaaagacttcctgaccaaaacaccaaaagcaatggtaacaaaagccaaaattgacaaatgggatctaattaa

SEQ ID NO: 87327 - DNA, 120 bp, synthetic construct
  source 1..120: mol_type = other DNA
aagtgggaactgaacaatgagaacacatggacacagggaggggaacatcacacatcggggcctgtcggggttgggggttagaggagggatagcattaagagaaatacttaacatagatga

SEQ ID NO: 87328 - DNA, 120 bp, synthetic construct
  source 1..120: mol_type = other DNA
catctgattctgattctttgaatactttcactgcttaagctgctgggttgggtttttgtttttgtttttgtttttgtgtttttgagacggagtcttgctctgtcatccaggctggagtgc

SEQ ID NO: 87329 - DNA, 120 bp, synthetic construct
  source 1..120: mol_type = other DNA
ttaatactttatgttactttttaccggaatgtgagtcatctacccaagttcaaagagttgaaccaacttttatagagttggatgggagtagaagaggaaagatttaaagggtgatgaatg

SEQ ID NO: 87330 - DNA, 120 bp, synthetic construct
  source 1..120: mol_type = other DNA
gtcttgaaggctagagccattcctggtaataatgtcccattaatatagtcatgctgcctttctcatccaaaaacacagaaaactatttgagtgactattttctccattctctcaaggatg

SEQ ID NO: 87331 - DNA, 120 bp, synthetic construct; identical to SEQ ID NO: 13706
  source 1..120: mol_type = other DNA

SEQ ID NO: 87332 - DNA, 120 bp, synthetic construct; identical to SEQ ID NO: 13707
  source 1..120: mol_type = other DNA

SEQ ID NO: 87333 - DNA, 120 bp, synthetic construct; identical to SEQ ID NO: 13708
  source 1..120: mol_type = other DNA

SEQ ID NO: 87334 - DNA, 120 bp, synthetic construct; identical to SEQ ID NO: 13709
  source 1..120: mol_type = other DNA

SEQ ID NO: 87335 - DNA, 120 bp, synthetic construct
  source 1..120: mol_type = other DNA
cctgtagatactgtgggttatatcacctagcagtttcatttctaagaaaaaaatcccctcctaatttgcattctccacaccttcacccaaaccagattattattagacttttaacaggtc

SEQ ID NO: 87336 - DNA, 120 bp, synthetic construct
  source 1..120: mol_type = other DNA
cagaaggattgatttctggagcccaggagtttggggctgcagtaggccatgccactgtacttcagcctgggtgacagcccaactctaacaattaaaataaaataatatatttaaaaatag

SEQ ID NO: 87337 - DNA, 120 bp, synthetic construct
  source 1..120: mol_type = other DNA
tcctgcttatgttgtcttcatctctgggtcaactgatacttatttttttttccagtagcaaaatatttattgagtgtaactgtgtaccaggtgcttttctaggtgctgggaatatagcag

SEQ ID NO: 87338 - DNA, 120 bp, synthetic construct
  source 1..120: mol_type = other DNA
ttggaatgggatactgctctttctttttatgtgctcttagataagaactctttctactgtgtcttataaactctgtcataccataagtttctcaaagtgattttaaccactgtacatttt

SEQ ID NO: 87339 - DNA, 120 bp, synthetic construct
  source 1..120: mol_type = other DNA
tcttgaactcctggactcaagttattctcctgccttagcctcccaaagtgctgggattataggcatgagccactgtgcctggcctcaatatttatttaaaggttacaagaatatatgttc

SEQ ID NO: 87340 - DNA, 120 bp, synthetic construct
  source 1..120: mol_type = other DNA
gcatgaatgtactacagtttctttggccagacacatgttgaagaatatcaggacaggttctagtttttggctatcacaaataaagctgctatgaacatttatgtttagtatcagtatggg

SEQ ID NO: 87341 - DNA, 120 bp, synthetic construct
  source 1..120: mol_type = other DNA
tgaggtttttttagggggtgctgagttgggcaccatggatgttcagttgtttcagcaccatttattttaaaggctatcctttttctattgatttgcttttgtatctttgtcaaaaaggga

SEQ ID NO: 87342 - DNA, 120 bp, synthetic construct
  source 1..120: mol_type = other DNA
gaccagcaaggtaaaatggaaaagatcttcagaaaggccaaggtctgccaaaattcttctattttctattctagtttcctcttgcgaggcaaaacagtcttagaatttagcttagggtgg

SEQ ID NO: 87343 - DNA, 120 bp, synthetic construct
  source 1..120: mol_type = other DNA
agagggagagaacctaagatggaaactgcagatttttataaattcatctcagaagtgacatgccatcacttctgccctatgtcattggcccacagactaaccctggtacagtttaggaac

SEQ ID NO: 87344 - DNA, 120 bp, synthetic construct
  source 1..120: mol_type = other DNA
tagactgtaaactatagcataaaagttcaaaacaaaggctctgaaatcaaacagtttggaactgtgtcctggatccaccacttattcatgtgactggacaatttactccttgtctacctt

SEQ ID NO: 87345 - DNA, 120 bp, synthetic construct
  source 1..120: mol_type = other DNA
ccttcttaccgtatcatcactttagcccaaatgctgggaaaaagagaaacaaaagtcttctgtcagctattgaatgtgttatgatttagagaatttctgagattcacagtagagtctgta

SEQ ID NO: 87346 - DNA, 120 bp, synthetic construct
  source 1..120: mol_type = other DNA
catagcctgatgggcacatgatccaaagtttaattttttggttgaaatttagtatttggcttcatatatataaagattggggtaaggcgatctgccttgcctttcttctactgtgtcaaa

SEQ ID NO: 87347 - DNA, 120 bp, synthetic construct
  source 1..120: mol_type = other DNA
ataagcctactcctactgtcttagatctagttctgtttcagaattggaagctttaaggattatgaaattctgggaacttggagtaggtccacctagaagtagaagcagcaaaacccaaaa

SEQ ID NO: 87348 - DNA, 120 bp, synthetic construct
  source 1..120: mol_type = other DNA
aattccacaaaaactctttaacaaggtttttttcctggctattagaaaggaggaagaccctcactgaattgaagatagtaatgatgggtgaggactttgacttctgttaacacctcattc

SEQ ID NO: 87349 - DNA, 120 bp, synthetic construct
  source 1..120: mol_type = other DNA
aagacttattttgaagattaaatgaggtaatacattcaaataaaaccttttaaactgaaagtactttcattcttgtgtaaggaaaccatgaaagtaaaagacacatcattctattttgcc

SEQ ID NO: 87350 - DNA, 120 bp, synthetic construct
  source 1..120: mol_type = other DNA
ttgtgccactgcactcctgcctgggccgcagagcaagactgtctgaaaaaacaaaaagaaaaaatcaaaggaaacacacttaccggtttattacaaaggatattgcaaaggatacagatg

SEQ ID NO: 87351 - DNA, 120 bp, synthetic construct
  source 1..120: mol_type = other DNA
ggatctccctgtttattcttcatgagagaaccctgttctttcataggatttttctgaatttgtcatcacatacttatttccttgtttgtgtgcctcttctcaccagaccctgagcaccgt

SEQ ID NO: 87352 - DNA, 120 bp, synthetic construct
  source 1..120: mol_type = other DNA
gaatagaaagatgaccaggatggctggagtaagaagagtgttagagcatgaggtctgagaggtatcaaggggccagaactcatgtagtgttttgtaaaccaagataaggcatttgaattt

SEQ ID NO: 87353 - DNA, 120 bp, synthetic construct
  source 1..120: mol_type = other DNA
ggccaggatttgaacccatgtactgtggctccagagtttgtgctcctacctactgcactatagttttcccgtgatcatgacatactcatcatcataaaccaatatctatatatctgtgtg

SEQ ID NO: 87354 - DNA, 120 bp, synthetic construct
  source 1..120: mol_type = other DNA
gaatgttcaagtggctacttgaagtcacttcatgtgatgtatcatgtaatcctgcaaaatgagtgctgtattcctgtttttcaagtaatgaaactgaggttcagagagcaaaacgtttca

SEQ ID NO: 87355 - DNA, 120 bp, synthetic construct
  source 1..120: mol_type = other DNA
ggtttatgtcttttaaaataagtcagtttattgccgttttagtggggttttatgagagagagttaatgtctgcattcatttggcatctttaaccaatgttgtttatcttctgcagattcc

SEQ ID NO: 87356 - DNA, 120 bp, synthetic construct
  source 1..120: mol_type = other DNA
tgaagtcaggtagtgtgatgtctccagctttgttctttttgcttaggattgtcttggatatttgcgctcttttttgattccatatgaattttatgaattttggttccatgtgaattagtt

SEQ ID NO: 87357 - DNA, 120 bp, synthetic construct
  source 1..120: mol_type = other DNA
ttgcattctggggatgaagccagcttgatcatggtagataagctttttggtgtgtgctggatttggtttgccagtattttattgtggatttttgcattgctgttcatcagagatattggc

SEQ ID NO: 87358 - DNA, 120 bp, synthetic construct
  source 1..120: mol_type = other DNA
tcataataattccctattatctttttaatctttgtgattttgtcccatttttcatacctaatactgcctatctatctcttttctttatcttgatcaatctgactggagatttgttagtta

SEQ ID NO: 87359 - DNA, 120 bp, synthetic construct
  source 1..120: mol_type = other DNA
tctcaatcaatgtagtagtttattttgccaaagttaaggacgtgcccaggagagagatctgtgcctttctccagtgatgattttgagggctccaatatttaaatgggaaagtcagtctgg

SEQ ID NO: 87360 - DNA, 120 bp, synthetic construct
  source 1..120: mol_type = other DNA
gaagtaagatggcctgggtccttcccctcatagagcttacattctggaggaggaacacaggcaatgaacaagtaaaccaagatgtaagatgattttagagtataataagtgctacaaagg

SEQ ID NO: 87361 - DNA, 120 bp, synthetic construct
  source 1..120: mol_type = other DNA
atccaaagtggatactagaccagacactggtccttctaaaatcattgtgataatgggtcgcttttcttagtgtactggttaatatactacgtgttgtagaaacatccatagtaaggtaca

SEQ ID NO: 87362 - DNA, 120 bp, synthetic construct
  source 1..120: mol_type = other DNA
agtttcctcatctataaaatggaaatgataatgttgcgagatctttcttgactattcagagtcgtttttctggccggaaacctctgtgaccggtggcgcccttgatcaatttttgctcag

SEQ ID NO: 87363 - DNA, 120 bp, synthetic construct
  source 1..120: mol_type = other DNA
tccatcctctgctctgctctggctgagactcgggcttctgtgggcctcagcgggaagaaagtgtgcaccgattggtacatgggcggccactagtgggcccagaaaaggtaccacaagtcc

SEQ ID NO: 87364 - DNA, 120 bp, synthetic construct
  source 1..120: mol_type = other DNA
gctttacaggcatattgtcagatattatccttaggttagagcagtggttttcaaagtgtcgttcccaaccagcagaatccacatcacctggaaattgtagaaatgagaattctggggctc

SEQ ID NO: 87365 - DNA, 120 bp, synthetic construct
  source 1..120: mol_type = other DNA
acctattttttaaaaaaactcatgcctacataatgaagcctccataaaaactcaaaaggacctggttctgggagcttctggatatttgcccaactggaggttcctggagaatagcatgcc

SEQ ID NO: 87366 - DNA, 120 bp, synthetic construct
  source 1..120: mol_type = other DNA
ctcaggtgatccgtctacctaaggcctcccaaagtgttgggattacaggcatgagccaccgcacccagccttgttaagtgatttctaaagaaaatattagattcaaatgagaaactagat

SEQ ID NO: 87367 - DNA, 120 bp, synthetic construct
  source 1..120: mol_type = other DNA
accataatcaattttagaatttgtatcacaccagaaagaaactccataccctcaagcagtcaccccctattcccctaccccctcagcccaaggcaatactaatctattttctctctatgg

SEQ ID NO: 87368 - DNA, 120 bp, synthetic construct
  source 1..120: mol_type = other DNA
agtagctgggactataggcacacaccaccacgccgagctaatttttgtatttttttgtacagatagggttttgccgtgttgctcaggctggtcttgaatggttgagctcaagtaagccac

SEQ ID NO: 87369 - DNA, 120 bp, synthetic construct
  source 1..120: mol_type = other DNA
agcttagttatataaccagcatccagatcaagaaacaaaacattgtcagcaacacataagactctcttacatgctcttccagtcaccatagcctccttaccaccaccaccaagtgtgttc

SEQ ID NO: 87370 - DNA, 120 bp, synthetic construct
  source 1..120: mol_type = other DNA
tgttcagtataaacacattttgtgtttccggtttaccttccctttagagaaatagtagtagtaaaatatacttggtatgacacatttcatattgttctgtggaaagtgagttgaggggta

SEQ ID NO: 87371 - DNA, 120 bp, synthetic construct; identical to SEQ ID NO: 13710
  source 1..120: mol_type = other DNA

SEQ ID NO: 87372 - DNA, 120 bp, synthetic construct
  source 1..120: mol_type = other DNA
caggcttgcttaggtaaacaaagcagccgggaagctcgaactgggtggagcccaccacaggtcaaggaggcctgcctgcctttgtaggctccacctctgggggcagggcacagacaaaca

SEQ ID NO: 87373 - DNA, 120 bp, synthetic construct
  source 1..120: mol_type = other DNA
atgtggagaatggaaccaagttggaaaacactctgcaggatattatccaggagaacttccccaatctagcaaggcaggccaacgttcagattcaggaaatacagagaacgccacaaagat

SEQ ID NO: 87374 - DNA, 120 bp, synthetic construct
  source 1..120: mol_type = other DNA
gaaggccattacataatggtaaagggatcaattcaacaagaggagctaactatcctaaatgtttatgcacccaatacaggagcacccagattcataaagcaagtcctgagtgacctacaa

SEQ ID NO: 87375 - DNA, 120 bp, synthetic construct
  source 1..120: mol_type = other DNA
tcaccaccgatcccacagaaatacaaactaccatcagagaatactacaaacacctctacgcaaataaactagaaaatctagaggaaatggatacattcctcgacacatacactctcccaa

SEQ ID NO: 87376 - DNA, 120 bp, synthetic construct
  source 1..120: mol_type = other DNA
cattcttatacaccaacaacagacaaacagagagccaaatcatgagtgaactcccattcacaattgcttcaaagagaataaaatacctaggaatccaacttacaagagatgtgaaggacc

SEQ ID NO: 87377 - DNA, 120 bp, synthetic construct
  source 1..120: mol_type = other DNA
ctacaatgaactcaaacaaatttacaagaaaaaaacaaccctatcaaaaagtgggcgaaggacatgaacagacacttctcaaaagaagacatttatgcagccaaaaaacacatgaagaaa

SEQ ID NO: 87378 - DNA, 120 bp, synthetic construct; identical to SEQ ID NO: 13711
  source 1..120: mol_type = other DNA

SEQ ID NO: 87379 - DNA, 120 bp, synthetic construct
  source 1..120: mol_type = other DNA
ttctgtgttggtattcttcagcaaaaacgtcacattctgaacatcctaactaataaatcattgaccaggcattaggagagcatcttaacactctacccagtacatttaggtactctggtt

SEQ ID NO: 87380 - DNA, 120 bp, synthetic construct
  source 1..120: mol_type = other DNA
gctcacaacatttctatcaccaaatgtgtgagatttttttctcacccaaatctattcttcaactctctggtgttctacaattcaattcaattctgacactaattacccagagtcagcatc

SEQ ID NO: 87381 - DNA, 120 bp, synthetic construct
  source 1..120: mol_type = other DNA
acactgattaggaattgtttgcatgagatcctgcctcagtgaaagtggcagagcttcattctaggagatccaagggaaagctttgctttgaaacatttattctaggctgcaaatccacaa

SEQ ID NO: 87382 - DNA, 120 bp, synthetic construct
  source 1..120: mol_type = other DNA
agaggtcacagtcttattgtaatctaattctggaaatgacagcccattacttttggcatattattttggttagaagcaagacaacagtagatctagcccacacacgaggggaggaggatc

SEQ ID NO: 87383 - DNA, 120 bp, synthetic construct
  source 1..120: mol_type = other DNA
ggcatttaatgatttaaagtaaagaattctgtaatttgtagacttctgagaagttccagaaaataaatcagatggtatgtaacagcgaccgtgtgctcaaaagaagtgctgaaggaagca

SEQ ID NO: 87384 - DNA, 120 bp, synthetic construct
  source 1..120: mol_type = other DNA
tgcagtaaacatctcccaggagagtccaaatttcagcagaaactggcagaaatgagtaagtacttttttcaccttgtgtaaatgaaataaacaattgtttacactgcaagaagtcttttc

SEQ ID NO: 87385 - DNA, 120 bp, synthetic construct
  source 1..120: mol_type = other DNA
ctgaaagctgtaaaaacatgtatattttcttagagaagtgttcagttgctatagttagtacatttcccagtgacacacttagctatgatggcgagcttcctctgccaggccaaagttcag

SEQ ID NO: 87386 - DNA, 120 bp, synthetic construct
  source 1..120: mol_type = other DNA
aatttgtacatacatacgtatttttgtggtacaggcttggaaaaaaatttactcacagggatatatgatttttaaagatttggagaccactgtttttttggggggtggggagggaatttt

SEQ ID NO: 87387 - DNA, 120 bp, synthetic construct
  source 1..120: mol_type = other DNA
taatttaacatgaacacccttagaaaatgtgtcctatctatcttccaaatgcaatttgattgactgcccattcaccaaaattatcctgaactcttctgcaaaaatggatattattagaaa

SEQ ID NO: 87388 - DNA, 120 bp, synthetic construct
  source 1..120: mol_type = other DNA
gcgcttctcccctcccctacacctaaaggtgtatttaaactatcttgtgtgattaacttatttagagatgctgtaacttaaaataggggatatttaaggtagcttcagctagcttttagg

SEQ ID NO: 87389 - DNA, 120 bp, synthetic construct
  source 1..120: mol_type = other DNA
atctttcgtcattgataccctttcttccagttgatctcatcggttactgaggcttgtgtatttgtcacgtagttctcctgccttggttttcagctccatcaggtcctttaaggacttctg

SEQ ID NO: 87390 - DNA, 120 bp, synthetic construct
  source 1..120: mol_type = other DNA
gcaggcaggcctccttgagctgtggtgggctccacccagttcgagcttccaggcggctttgtttacctgctcaagcctggacaatggtgggcacccctcccccagcctcactgccacctt

SEQ ID NO: 87391 - DNA, 120 bp, synthetic construct
  source 1..120: mol_type = other DNA
aacagtgttatctctaagattatatacatgtcttcccatatttttattctagttttttcgtgactgaattttaccttcacacctaattgtgtaatcgattgtggtatatgcagttaagca

SEQ ID NO: 87392 - DNA, 120 bp, synthetic construct
  source 1..120: mol_type = other DNA
gatcttgccattgcactccagcctggacaacaagagcaaaactccatctaaaaaaaaaaaaaaatctactctctttgcaaattttaaatatacttacagtacaattaactacagtcacga

SEQ ID NO: 87393 - DNA, 120 bp, synthetic construct
  source 1..120: mol_type = other DNA
aaacatcctgaggaagaatgggacttccatttggggtgggcctatgacagggtaataagacagtagtgaatatcaagctacaaaaagccgcctttcaaattcttctcagtcctaactttt

SEQ ID NO: 87394 - DNA, 120 bp, synthetic construct
  source 1..120: mol_type = other DNA
ggagctgtgggaggaagataagaggtatgaacatgattagcaaaagggcctagcttggactcagaataatccagccttatcccaaccataaaataaaagcagaatggtagctggattgta

SEQ ID NO: 87395 - DNA, 120 bp, synthetic construct
  source 1..120: mol_type = other DNA
cagcagcctaagggtgggaaaatagaccaataggcagagagagtcagtgcctatcagaaacccaagagtcttctctgtctccacatgcccagtttctattggtctccttaaacctgtctt

SEQ ID NO: 87396 - DNA, 120 bp, synthetic construct
  source 1..120: mol_type = other DNA
aataaataaaaagtcacttacaacccaaagtgtgactatcaatggggtaatcagtggtgtcaaataggaggttaactggggacatctaactgtttctgcctggactaatctgcaagagtg

SEQ ID NO: 87397 - DNA, 120 bp, synthetic construct
  source 1..120: mol_type = other DNA
ctacctgtctcaaccctcatcaggtacttgtgaaaaaatctcactctgattattctcacacacgcagaaagtgtttggttcttctatggctatctggagcctaggttaaaaaattatgcc

SEQ ID NO: 87398 - DNA, 120 bp, synthetic construct
  source 1..120: mol_type = other DNA
caaagttcctgaaaaactattcaagcttactgacatcttcactattgtgagcttgcttctactctgtgaatggatgccacagcaggtgcaggtctattctacttttattccagccccact

SEQ ID NO: 87399 - DNA, 120 bp, synthetic construct
  source 1..120: mol_type = other DNA
ggtagaatcttggcttcagtctgaacaccctttacaaacatgtaggcattaattcagaggactgctctgaagctcaagagatggatgatttaggagactattaggcttaattctcctgac

SEQ ID NO: 87400 - DNA, 120 bp, synthetic construct
  source 1..120: mol_type = other DNA
ccctatgctcaggaatgtgaaagtgatcttccccaaaatgccctgagtagctctgcttctgatatgtaaaccagtggttcctaaatatcttattcagatataaagagttctcagtgccta

SEQ ID NO: 87401 - DNA, 120 bp, synthetic construct
  source 1..120: mol_type = other DNA
ggaggaagctatttcttggagcaggaacacttgatggggtatagtattatgggctacaatgtgcaggcaaaggaaggaggaagaaagacaacataacattgtcttgagtaatcattatgc

SEQ ID NO: 87402 - DNA, 120 bp, synthetic construct
  source 1..120: mol_type = other DNA
atcagtgtgatgatgggctgtctcctagcaacgacttctgccccacctccagtgtaactgcctagtctttcataatcaaatattcactttcctttccattccatttactacagaatttat

SEQ ID NO: 87403 - DNA, 120 bp, synthetic construct
  source 1..120: mol_type = other DNA
cctgccttttatgctggtcctgtcctccctgctccagtgagcaggttggtttaagataagcagggtttcattagtttgtgagaatgaaaaatgaaccttcattccactattcccttaact

SEQ ID NO: 87404 - DNA, 120 bp, synthetic construct
  source 1..120: mol_type = other DNA
cttttctgaattcaaataatgccacaatggcagacaaatacacacccatgagcatatccaaaaggaaggattgaaggaaagaggaggaagaaatggagaaaggaaggaaggaagagggga

SEQ ID NO: 87405 - DNA, 120 bp, synthetic construct
  source 1..120: mol_type = other DNA
gtattttagaagtagagaaaatgggagacaaatagctgggcttctgttgcagtagggaagaaagtgacaatgccatttctattatcagacttggaccatgacggtgatgtcagtcgtgaa

SEQ ID NO: 87406 - DNA, 120 bp, synthetic construct
  source 1..120: mol_type = other DNA
aggacctgactgggcagtaagagtggtgattaatagatagggacaaattgaagcagaatcgaactgttgattagaggtagggaaatgattttaatctgtgaccttggtgaatgggcaagt

SEQ ID NO: 87407 - DNA, 120 bp, synthetic construct
  source 1..120: mol_type = other DNA
tgggaggcagatgttgcagtgagcctggatcatgccattgcactccagcctgggcaaccatagcaatgctctatctcagaaaaaaaaaaaaaaagttcttgctaacctgaaaaaataaat

SEQ ID NO: 87408 - DNA, 120 bp, synthetic construct
  source 1..120: mol_type = other DNA
catgacacatgcttgttgactaatcaaactatagcagaggcagaggaaggaacctcatgacctataaatactaagatatcacatagtcattttagaaccaaaggttcctcagtttaggtc

SEQ ID NO: 87409 - DNA, 120 bp, synthetic construct
  source 1..120: mol_type = other DNA
tatgtattcacattgttcgacgcccacttatgagtgagcacatgtgatatttggttttcttttcctgtgttagtttgctgagatgggaggttgacaaagggacacggaagccaactaaag

SEQ ID NO: 87410 - DNA, 120 bp, synthetic construct
  source 1..120: mol_type = other DNA
cctcgtctctccaaaaaaatccgaaaattatcccgatgtggtggcgctcacctgtagtccagctactccggaggccgagacaggagaatcacttgaactgattctcctatctcagccccc

SEQ ID NO: 87411 - DNA, 120 bp, synthetic construct; identical to SEQ ID NO: 13748
  source 1..120: mol_type = other DNA

SEQ ID NO: 87412 - DNA, 120 bp, synthetic construct; identical to SEQ ID NO: 13749
  source 1..120: mol_type = other DNA

SEQ ID NO: 87413 - DNA, 120 bp, synthetic construct; identical to SEQ ID NO: 13750
  source 1..120: mol_type = other DNA

SEQ ID NO: 87414 - DNA, 120 bp, synthetic construct; identical to SEQ ID NO: 13751
  source 1..120: mol_type = other DNA

SEQ ID NO: 87415 - DNA, 120 bp, synthetic construct; identical to SEQ ID NO: 13752
  source 1..120: mol_type = other DNA

SEQ ID NO: 87416 - DNA, 120 bp, synthetic construct; identical to SEQ ID NO: 87410
  source 1..120: mol_type = other DNA

SEQ ID NO: 87417 - DNA, 120 bp, synthetic construct; identical to SEQ ID NO: 13743
  source 1..120: mol_type = other DNA

SEQ ID NO: 87418 - DNA, 120 bp, synthetic construct; identical to SEQ ID NO: 13744
  source 1..120: mol_type = other DNA

SEQ ID NO: 87419 - DNA, 120 bp, synthetic construct; identical to SEQ ID NO: 13745
  source 1..120: mol_type = other DNA

SEQ ID NO: 87420 - DNA, 120 bp, synthetic construct; identical to SEQ ID NO: 13746
  source 1..120: mol_type = other DNA

SEQ ID NO: 87421 - DNA, 120 bp, synthetic construct; identical to SEQ ID NO: 13747
  source 1..120: mol_type = other DNA

SEQ ID NO: 87422 - DNA, 120 bp, synthetic construct; identical to SEQ ID NO: 495
  source 1..120: mol_type = other DNA

SEQ ID NO: 87423 - DNA, 120 bp, synthetic construct; identical to SEQ ID NO: 496
  source 1..120: mol_type = other DNA

SEQ ID NO: 87424 - DNA, 120 bp, synthetic construct; identical to SEQ ID NO: 13748
  source 1..120: mol_type = other DNA

SEQ ID NO: 87425 - DNA, 120 bp, synthetic construct; identical to SEQ ID NO: 13749
  source 1..120: mol_type = other DNA

SEQ ID NO: 87426 - DNA, 120 bp, synthetic construct; identical to SEQ ID NO: 13750
  source 1..120: mol_type = other DNA

SEQ ID NO: 87427 - DNA, 120 bp, synthetic construct; identical to SEQ ID NO: 13751
  source 1..120: mol_type = other DNA

SEQ ID NO: 87428 - DNA, 120 bp, synthetic construct; identical to SEQ ID NO: 13752
  source 1..120: mol_type = other DNA

SEQ ID NO: 87429 - DNA, 120 bp, synthetic construct; identical to SEQ ID NO: 87410
  source 1..120: mol_type = other DNA

SEQ ID NO: 87430 - DNA, 120 bp, synthetic construct; identical to SEQ ID NO: 13743
  source 1..120: mol_type = other DNA

SEQ ID NO: 87431 - DNA, 120 bp, synthetic construct; identical to SEQ ID NO: 13744
  source 1..120: mol_type = other DNA

SEQ ID NO: 87432 - DNA, 120 bp, synthetic construct; identical to SEQ ID NO: 13745
  source 1..120: mol_type = other DNA

SEQ ID NO: 87433 - DNA, 120 bp, synthetic construct; identical to SEQ ID NO: 13746
  source 1..120: mol_type = other DNA

SEQ ID NO: 87434 - DNA, 120 bp, synthetic construct; identical to SEQ ID NO: 13747
  source 1..120: mol_type = other DNA

SEQ ID NO: 87435 - DNA, 120 bp, synthetic construct; identical to SEQ ID NO: 495
  source 1..120: mol_type = other DNA

SEQ ID NO: 87436 - DNA, 120 bp, synthetic construct; identical to SEQ ID NO: 496
  source 1..120: mol_type = other DNA

SEQ ID NO: 87437 - DNA, 120 bp, synthetic construct; identical to SEQ ID NO: 13748
  source 1..120: mol_type = other DNA

SEQ ID NO: 87438 - DNA, 120 bp, synthetic construct; identical to SEQ ID NO: 13749
  source 1..120: mol_type = other DNA

SEQ ID NO: 87439 - DNA, 120 bp, synthetic construct; identical to SEQ ID NO: 13750
  source 1..120: mol_type = other DNA

SEQ ID NO: 87440 - DNA, 120 bp, synthetic construct; identical to SEQ ID NO: 13751
  source 1..120: mol_type = other DNA

SEQ ID NO: 87441 - DNA, 120 bp, synthetic construct; identical to SEQ ID NO: 13752
  source 1..120: mol_type = other DNA

SEQ ID NO: 87442 - DNA, 120 bp, synthetic construct; identical to SEQ ID NO: 87410
  source 1..120: mol_type = other DNA

SEQ ID NO: 87443 - DNA, 120 bp, synthetic construct
  source 1..120: mol_type = other DNA
gcatcgggtttagggctctgggtgactcagcggttttacaagtcattcaaaccccccagggcacctacgtgcaaggggtcccagtgttcctcaccgacattgcgtattgaccactatctg

SEQ ID NO: 87444 - DNA, 120 bp, synthetic construct
  source 1..120: mol_type = other DNA
actgtcactctgtcttttagtctccttcacctttctcactacagagaattagtaggattggggactccagaatgggaaagggatcttcggttgccctctcttctgactttagcgatttgt

SEQ ID NO: 87445 - DNA, 120 bp, synthetic construct
  source 1..120: mol_type = other DNA
taagaccatggccatggccactggctcttgagctgtcgctctaaaccaggccctgtgccctgggcctctgcctcctgagacatctaattatatccttgctgccctgtcttctgaggtagg

SEQ ID NO: 87446 - DNA, 120 bp, synthetic construct
  source 1..120: mol_type = other DNA
gaactcctgacctcagatgatccacccatcttggcctcccaaggtgctgggattacaggtgtgagccaccacgcccggcctttttttttctttttgagacagagtctcaatctgttgccc

SEQ ID NO: 87447 - DNA, 120 bp, synthetic construct
  source 1..120: mol_type = other DNA
ggggtttcaccatgttggccaggctggtctcgaactcctgacctcaagtgatgcgcccaccttggcctcccaaagtgctgggattacaggaatgagccacctcgcccagcctgccttcat

SEQ ID NO: 87448 - DNA, 120 bp, synthetic construct
  source 1..120: mol_type = other DNA
tggagaggctgtcacttcactccctcactgatctcatccccatcctaaaagccactctcttacatcagcctgggttattttttctataacacctatcactgacattaacattacatatta

SEQ ID NO: 87449 - DNA, 120 bp, synthetic construct
  source 1..120: mol_type = other DNA
agtgcaatctggtggtagcaacctccacctcccaggctcaagccattctcctgcctcagcctcccaagtagctgggataacaggcatacgccaccatgcccgggtaattttgtattttta

SEQ ID NO: 87450 - DNA, 120 bp, synthetic construct
  source 1..120: mol_type = other DNA
aaaaataaatgggatgattacttgaggtcaggagttcgagagcagcctggccaacatggcgaaaccttgtctctactaaaaatataaaaattagccaggtgtggtggtgcacgcttgtaa

SEQ ID NO: 87451 - DNA, 120 bp, synthetic construct
  source 1..120: mol_type = other DNA
ggagggacgaggcaaaggacctggagcacaaggaggaggggttttattttttatttttaaaagtttttcaggtaacaagactgaattattatggggtgttttagggggaaggaggccctc

SEQ ID NO: 87452 - DNA, 120 bp, synthetic construct
  source 1..120: mol_type = other DNA
atccagactaggggagggagtgtggcagggaatgttgctggggtgggggggtcttctgacccctcacttacatccccctcccaccccagaatgtgccccccgatctggccatctgttgct

SEQ ID NO: 87453 - DNA, 120 bp, synthetic construct
  source 1..120: mol_type = other DNA
ctagaagacgggttcattctcctgagtgatttccagccaaggtgaaggcagcagagaggacagagtgggctttggggaatataaaatgctccatccataggcatctcagagatatagtcc

SEQ ID NO: 87454 - DNA, 120 bp, synthetic construct
  source 1..120: mol_type = other DNA
tcccaatttcccatttcctgacccctgacatccaattttctgatttctgacctcccattgcccgacttgatcatttcctgatctgtgatctctgatgactctgtctcccatctgccggtt

SEQ ID NO: 87455 - DNA, 120 bp, synthetic construct
  source 1..120: mol_type = other DNA
aattcaaacctcagatccccaaaccaagactccaatcttcagccctccaacctcagacttccaaacttcaatttcaaatcccaaaaaccaaaatccaccaaagcaaactcccaattcaga

SEQ ID NO: 87456 - DNA, 120 bp, synthetic construct
  source 1..120: mol_type = other DNA
cccaaattaggtgcccagcttcagaccccaagtctcatatccccacttcaggcctcaaccttggcctgaaaataccctgaaactcagacctccaactgcaaaaccccaaactcagccctc

SEQ ID NO: 87457 - DNA, 120 bp, synthetic construct
  source 1..120: mol_type = other DNA
gcaggtggatcacttgaggtcaggagttccagaccaggctggctaacgtggtgaaaccctgtctctactaaagatacaaaaatttgcctggtgtggtggtgggcacctgtaatccttgct

SEQ ID NO: 87458 - DNA, 120 bp, synthetic construct
  source 1..120: mol_type = other DNA
ttgcttgagccctggagttcaagatcagcttgggcaacatagcaagacctggtttctgtaaaaaaaagaaaaagaagaaaagactgtaatgtccatgggagaactggggggtcctctgac

SEQ ID NO: 87459 - DNA, 120 bp, synthetic construct
  source 1..120: mol_type = other DNA
aacctgggaagtggaggttgggagtgagccaatatcgtgccattgcactccagcctggctgacaagagtgaaactccgtctcagaaaaacaaaaacaaaacaaaacaaaaacaaaaacag

SEQ ID NO: 87460 - DNA, 120 bp, synthetic construct
  source 1..120: mol_type = other DNA
agacacacaaagagtgaggttaagaggggacatttaataggcgaaagaaggagctctctactgcagagaagggtcccagaaaaatgggttgaaatgcagggggttccatggtgaaatgca

SEQ ID NO: 87461 - DNA, 120 bp, synthetic construct
  source 1..120: mol_type = other DNA
atagagagatagagagggagaggcagggacagaggtgagagagatagagagacaaagacagacaaaaccaaaaacagggacagagagagacagagaggagagagagaatcaaagacacag

SEQ ID NO: 87462 - DNA, 120 bp, synthetic construct
  source 1..120: mol_type = other DNA
acaataatatacacatgacccctaacctctaaactcctgacctctgtacacttgacccctaatctgaccttgacaaccatgatcacattcctgatcatcacccaactttcacacccctga

SEQ ID NO: 87463 - DNA, 120 bp, synthetic construct
  source 1..120: mol_type = other DNA
agaatcagtgtggggtatgggaggtgccgaggcagaaatagatctttgggcattagggaggggaggccagctgtgaacaaaacagaaaaaaatctctgtccttatggagttgacatggcg

SEQ ID NO: 87464 - DNA, 120 bp, synthetic construct
  source 1..120: mol_type = other DNA
cccaagtgtagtgctgaagtgctgtctagctttcctaagtgcaagaaagctatgatgtgccttactgagaaaatatgtgttagataagcttaattaaggcatgagttatagtactgttgg

SEQ ID NO: 87465 - DNA, 120 bp, synthetic construct
  source 1..120: mol_type = other DNA
gagattgtgaatcttctctatgaactcctaggtaggggtcccagtcctgactcccctgagaacaccccagatccccagtcctattggatctgacacctcttcccccctcagcttctctaa

SEQ ID NO: 87466 - DNA, 120 bp, synthetic construct
  source 1..120: mol_type = other DNA
caccagcgcctggcatttttttttttttttttttgatacagagtctcgctctgtcacccagactggagtgggagtgcagtggcatgatctcagctcactgcaacctctgcttcccgggtt

SEQ ID NO: 87467 - DNA, 120 bp, synthetic construct
  source 1..120: mol_type = other DNA
attacttttgctccagcctaatacattttccacttggcccctaaagacacaagtttgcaacccctgctgatttaaaatttcatcttgattcctgtgtctctcactggtcgtttcagtctg

SEQ ID NO: 87468 - DNA, 120 bp, synthetic construct
  source 1..120: mol_type = other DNA
cttcctccatgtctttctccctgtctctctcccatctctctctctctgtctttggatgtctgtctctctctggcttcccaccacttggctctcctctctgcctctccgtcatccccctct

SEQ ID NO: 87469 - DNA, 120 bp, synthetic construct
  source 1..120: mol_type = other DNA
ctctgcccttcatttcagagctacgggagcatccaagggagcactttccattagggtttccaggatgcaatctccacaggagcctccaatatctgtcccttttctcttgttatcattggt

SEQ ID NO: 87470 - DNA, 120 bp, synthetic construct
  source 1..120: mol_type = other DNA
agctctccgaatgtccattcagtggtgtttatgtttatttcataattgtaacagatgctcagtgacttctcaaatgaccttcttattggtctccccaaccttccaatgaccccgaatgct

SEQ ID NO: 87471 - DNA, 120 bp, synthetic construct
  source 1..120: mol_type = other DNA
gcttgaacccgggaggtggaggttgcagtgagctgaggtcacgccattgtactccagcctaagcaacaagagtgaaactccatgtcaaaacaaaacaaaacaaaaaacaaaaattagcat

SEQ ID NO: 87472 - DNA, 120 bp, synthetic construct
  source 1..120: mol_type = other DNA
tgggtgacagagcaaaaccctgaaaaaaaaaaaaaaaaaaagaaagggagagagagagagaaagaaagaaaaaggctgggtgtggtggctcatgcctgtaatctcagcactttgggaggc

SEQ ID NO: 87473 - DNA, 120 bp, synthetic construct
  source 1..120: mol_type = other DNA
acattaatgatctcactgagtccttattaggtatcgctatgatcctcatacggagaaggaaggagactcctccattcttttcattcagcaaacatttcctgagcctctcttctgggtctg

SEQ ID NO: 87474 - DNA, 120 bp, synthetic construct
  source 1..120: mol_type = other DNA
ggggtccttggactgagggtggcagaactagggttggaggtcaggggtcatagtctgggcatgtggggagtgggaaggaaaggggagcacatggagttgaccctgggttttctccaggtt

SEQ ID NO: 87475 - DNA, 120 bp, synthetic construct
  source 1..120: mol_type = other DNA
atggcggatgagaaggcggaggacaacctgaagaagacaaaactccccaagacgtgagtgtgggcagccaggtcccgtctggggatggactgggggctggggatgctgtgctaagggctg

SEQ ID NO: 87476 - DNA, 120 bp, synthetic construct
  source 1..120: mol_type = other DNA
ggcaacaagagtgaaactccgtatcaaaaaaaaaacaaagagagagaaaaacctcaaagttagtggtgagaggtctgagagagttccggggttagagataggggtcccaaagtcaagaca

SEQ ID NO: 87477 - DNA, 120 bp, synthetic construct
  source 1..120: mol_type = other DNA
caaagtgctgggattacaggcgtgagccactgcacctggcccaaatgggctatatctatcacatcgagcagactgaccaggaggtcagaaaggactgacccctccccgaaactctgagcc

SEQ ID NO: 87478 - DNA, 120 bp, synthetic construct
  source 1..120: mol_type = other DNA
ctactctggccctgcctctgtctgtgcctcactctgtccccacttcatgcatctactgtaccactcatccacccatctatccatccattcaaccaatgattcatccatccatccatccat

SEQ ID NO: 87479 - DNA, 120 bp, synthetic construct
  source 1..120: mol_type = other DNA
agaaaaattcctgtgatcatggatgcaaatgtgaggaaagatggagacactgtggggtgacccctcttccataccacctgccctgaacctgacacttcgaatgtctgtcttcatatatct

SEQ ID NO: 87480 - DNA, 120 bp, synthetic construct
  source 1..120: mol_type = other DNA
taaaaaaaaaaattagcaaggtgtgtagtatgcacatatagccctagctactcaggaggttgagactggaggattgcttgattccaagaggtcaagactgcagtgaattagccagatgtg

SEQ ID NO: 87481 - DNA, 120 bp, synthetic construct
  source 1..120: mol_type = other DNA
ggaagtgagaatgaatacctggaaatacacacagccatgtggacgaatctcagacataatgtcgagtagaagaagccggagacaagagagcacaggctgtgggattccattcacagaaag

SEQ ID NO: 87482 - DNA, 120 bp, synthetic construct
  source 1..120: mol_type = other DNA
gtcaacgtgaggaggggcatgaaagagaacaactttcattgtttaccgagtctctaggagacttttgagagtccattgtttttggtttttgttttttgagactgggtctcactctgtcac

SEQ ID NO: 87483 - DNA, 120 bp, synthetic construct
  source 1..120: mol_type = other DNA
aaaaaaaagaagtctgagaacaaagaatcttgtacgcacagtttttggggcaaattttcaggagactgagacacaagaatcatttgaaccctgtaggcagaggttgcggtgagccgagat

SEQ ID NO: 87484 - DNA, 120 bp, synthetic construct
  source 1..120: mol_type = other DNA
caaccacagtaacctgagaaacccccattgtaccccaaagtagacccatatatgctaagtggagtaagaataccgagagattctatcatgtctccaatgaaccccattattttcctggga

SEQ ID NO: 87485 - DNA, 120 bp, synthetic construct
  source 1..120: mol_type = other DNA
gtcttgaactcctgacctcaggtgatccgtacgatggcagaggttttcaatgggattgaaaacccattgtgtctcttggtggatgtttggaaatgatggagtctttgtggtcattacagt

SEQ ID NO: 87486 - DNA, 120 bp, synthetic construct
  source 1..120: mol_type = other DNA
aactcctggggatccccaaagccatgatataagccaatatagactagggaccccaacatttgggctcactcatataaacacaataccctcaatgtaatacctactctaatatattactgg

SEQ ID NO: 87487 - DNA, 120 bp, synthetic construct
  source 1..120: mol_type = other DNA
tggcctcgagattagatcatgggccgactgggtgccacttgggcaaaagtcatttcaccactctatgccttctctcctatggaggtgctatggttttccatcagtagaatgggggtaaaa

SEQ ID NO: 87488 - DNA, 120 bp, synthetic construct
  source 1..120: mol_type = other DNA
tcacacaatattcccaagggactcctaaatctagaattgcacaaattgacacagaaacagacataaccagggggtgggggactcagatccaacaacttcctgttaaactcccagaggacc

SEQ ID NO: 87489 - DNA, 120 bp, synthetic construct
  source 1..120: mol_type = other DNA
ggcttaatgacctttacagccaatggcaaagagagcaacacctttttccaggtgagtccaggccacagcaatttagcgagagcatcatgtcccagcatcccaggacagctcttatagatg

SEQ ID NO: 87490 - DNA, 120 bp, synthetic construct
  source 1..120: mol_type = other DNA
gtctcagcttcctaagtagctgggactataggcatgcaccaccttgactagctgattttttgtgtgtattgtttgtagagatgggttttcctcatattgtccaggctggtctctcgcttc

SEQ ID NO: 87491 - DNA, 120 bp, synthetic construct
  source 1..120: mol_type = other DNA
atgggatgacaggtataagccactgcgcctggcttgtttcatctttttatatctacttcccttccacacccactggataattttgaaggaaattgcagacatcagatagtttcctctgtt

SEQ ID NO: 87492 - DNA, 120 bp, synthetic construct
  source 1..120: mol_type = other DNA
tcgaccagggtcatatattttaggtggttgctctgtaccttgagtttcatttcatatgtagatttccccctccattccttcttctttcccaaccccccagaaatgtatttgttgaaggaa

SEQ ID NO: 87493 - DNA, 120 bp, synthetic construct
  source 1..120: mol_type = other DNA
tcccaggatcaagcgattctctcatcttagcctcctgagtagctgcaactacagatatggaccgccatgcctcgctaattttttatgttttgtagagatggggtctcactacgttgccca

SEQ ID NO: 87494 - DNA, 120 bp, synthetic construct
  source 1..120: mol_type = other DNA
ccctcctcaacacaaccccgggattccagactacaccccaggaatctccagacctacctcaggggactcgggctcagctcagacatccccagattatgtcccagggggattcagactcaa

SEQ ID NO: 87495 - DNA, 120 bp, synthetic construct
  source 1..120: mol_type = other DNA
acacccgtttattaatttattcattcaacaaatatttatgggtacagtggctcatgtttgtaatctaagcacttcaggaggctgaggaggagggagggttgcttgaggccaggggtttga

SEQ ID NO: 87496 - DNA, 120 bp, synthetic construct
  source 1..120: mol_type = other DNA
gaattgatagatggaatggtaggggtttgaaggaaagacgaatgaataaatgggtggatagtgatgaaggaaatggaggaagagatggtggcttgactgatgcaggaggctcattcatct

SEQ ID NO: 87497 - DNA, 120 bp, synthetic construct
  source 1..120: mol_type = other DNA
tgcatcaatcctcctctatttatgcatccaaccacccattcattccctcctctatacatccatccacctttctttttattattattattttttcgagacggagtctcactgtcgcccagg

SEQ ID NO: 87498 - DNA, 120 bp, synthetic construct
  source 1..120: mol_type = other DNA
acctacccacaaatccatttagccatccacacccatccatctacccgttccctatccttctctccatcccttgtatcatgtacccttttattcgtagacccatctaactattcatttata

SEQ ID NO: 87499 - DNA, 120 bp, synthetic construct
  source 1..120: mol_type = other DNA
tccacatattcatttacttcctcatgcatctatcaacccatccatcacctactcacctacctatacatcatttatccttctctcatccatccacccatcatctcttcctccatcatttcc

SEQ ID NO: 87500 - DNA, 120 bp, synthetic construct
  source 1..120: mol_type = other DNA
gcaggccacagtgaagaaccgagactttgtcctgtaggtgatgggcatctttggcgatgaggatgtgaaacagatcttgaagatgattgagcctgaggtcttcactgaggaagaagagga

SEQ ID NO: 87501 - DNA, 120 bp, synthetic construct
  source 1..120: mol_type = other DNA
ggaagcaagagaagtttcaaggaagtcctgatggtctcacctccatctctcctcccacacggctgtccttccacagatgtgccacctgctggagtatttctgtgaccaagagctgcagca

SEQ ID NO: 87502 - DNA, 120 bp, synthetic construct
  source 1..120: mol_type = other DNA
tggctggctgggtggaaggacagatggatgacctccatagtttctgatgagaagtctgctgatagtcttactgagattcccttgcacatgatgaattatttttccttggctgacttttaa

SEQ ID NO: 87503 - DNA, 120 bp, synthetic construct
  source 1..120: mol_type = other DNA
ataaatgtttgatagaatgaataaatgaacaaatacatgaacatacaaagaaataaatgaggccaggggtggtggctcatgcctgcaatcccggcattttgggaggctgaggtgggtgga

SEQ ID NO: 87504 - DNA, 120 bp, synthetic construct
  source 1..120: mol_type = other DNA
cttgaggtcaggatttggagaccagcccggccaacatggtgaaacccccttctccactaaaaatacaaaaattagctgggtgtggcggtgcatgcctgtaatcccagctacttggagact

SEQ ID NO: 87505 - DNA, 120 bp, synthetic construct
  source 1..120: mol_type = other DNA
aaatccacagtatttttatagaacaagtgggattgtgacatgtgccttcaaaggtgcatggcgaagtgcttctggtcggctctggtatcttgcagttgtacagtttattattcctattga

SEQ ID NO: 87506 - DNA, 120 bp, synthetic construct
  source 1..120: mol_type = other DNA
ctttgcatatccccttgggtaatgaataccctcaggatacaataacattcccttccccaacttctggcccatcctctgggtgatctcagtctctcgatggctagctcacctcctgggtaa

SEQ ID NO: 87507 - DNA, 120 bp, synthetic construct
  source 1..120: mol_type = other DNA
tccttatgagggaaacagggacccttcctcccacagtggctgtaggaattttttttttttattttttgagatggagtcttgctctgttgccaagcctggagtgcgcaatgtctgctcact

SEQ ID NO: 87508 - DNA, 120 bp, synthetic construct
  source 1..120: mol_type = other DNA
ttcaacaaacactccctctcaactgtggttctggccctgtaatgagtaatgctggggacacaatagtgaccccaatagtgacagcccagagtggtcagagcttggatgagggaagtacag

SEQ ID NO: 87509 - DNA, 120 bp, synthetic construct
  source 1..120: mol_type = other DNA
attcaacaaatatgtagtgttagcttaccatatgcaaagcagtagcaatatgacagtcaaaaatccctgtctggccaggcaaagtggcttacatctataatcccagcactttgggaggcc

SEQ ID NO: 87510 - DNA, 120 bp, synthetic construct
  source 1..120: mol_type = other DNA
ccgctacaggaaaggggtctggatccaggcccaaagagaaggttcttggatctcatgtaagaaagaattcagggcaactccatagagtaaagtgaaagcaagtttattaggaaagtaaag

SEQ ID NO: 87511 - DNA, 120 bp, synthetic construct
  source 1..120: mol_type = other DNA
aacggtgaggagggggtggcagtggcagagcgggaagtatggagtcactggtcacacacctccctcgagatgactgctcgcaccctgagccacagatggggtccaggcaggaatcccttc

SEQ ID NO: 87512 - DNA, 120 bp, synthetic construct
  source 1..120: mol_type = other DNA
agggcaggcacagccgctttgaacgcctcatgcaggcactcggtgacacggagtgagctcccatatgtgggtggtcctggactagcaatgttggggacacaacagtgaccaagacagccc

SEQ ID NO: 87513 - DNA, 120 bp, synthetic construct
  source 1..120: mol_type = other DNA
gtcacggtagagcagcagcagctgcttttgtttttcttgggattgtggacatatcataatccccaataccatcatcaagatagaaaatgaaaacgaagaaacactgaattccgatgaagg

SEQ ID NO: 87514 - DNA, 120 bp, synthetic construct
  source 1..120: mol_type = other DNA
gtgggagaatcacttgagggacagacattgaggctgcagtgaaccatgattacatctctgcattccagcctgggcgacagagcgagaccttatctcagaaaaaaaaaagaaaaataaatt

SEQ ID NO: 87515 - DNA, 120 bp, synthetic construct
  source 1..120: mol_type = other DNA
ggattctacatcttgtgcattgtcccgcaggtacatccgcccgtcgatgctgcagcacctgttgcgccgcctggtgttcgacgtgcccatcctcaacgagttcgccaagatgccactcaa

SEQ ID NO: 87516 - DNA, 120 bp, synthetic construct
  source 1..120: mol_type = other DNA
gatagtggaggccctcttcccaattaccatatatttgcatggggtgcagcctttgtttctacttggtatgttaatttacataagcacagattgctgcatccatatgcccatttactcact

SEQ ID NO: 87517 - DNA, 120 bp, synthetic construct
  source 1..120: mol_type = other DNA
ctccaacatctgctgaccctgtgcccccaacagtgtgatcatcccggagaagctggactccttcattaacaagtttgcggagtacacacacgagaagtgggccttcgacaaggttggcct

SEQ ID NO: 87518 - DNA, 120 bp, synthetic construct
  source 1..120: mol_type = other DNA
atcaaggagtccctgaaggccatgattgcctgggaatggacgatagagaaggccagggagggtgaggaggagaagacggaaaagaaaaaaacgcggaagatatcacaaagtgcccaggtg

SEQ ID NO: 87519 - DNA, 120 bp, synthetic construct
  source 1..120: mol_type = other DNA
tggtcccctacgacacgctcacggccaaggagaaggcacgagatcgagagaaggcccaggagctactgaaattcctgcagatgaatggctacgcggttacaaggcacgcgggttggggct

SEQ ID NO: 87520 - DNA, 120 bp, synthetic construct
  source 1..120: mol_type = other DNA
atctccatgcagaggccttaaggacatggaactggactcgtcttccattgaaaagcggtttgcctttggcttcctgcagcagctgctgcgctggatggacatttctcaggagttcattgc

SEQ ID NO: 87521 - DNA, 120 bp, synthetic construct
  source 1..120: mol_type = other DNA
cagatcatgcagggctttgcaagctgtgatgaggactttgaccttacctggaatgagatggagttgggggttgggggctgagccgaggagggacgtgatccataattctggtgttcacag

SEQ ID NO: 87522 - DNA, 120 bp, synthetic construct
  source 1..120: mol_type = other DNA
acccgcctcggcttcccaaagtgctgggattacaggcgtgagccactgcgcccggcccagtattattattttaatagtatcagttatgactgtcaccattattattgtttgaaatttatt

SEQ ID NO: 87523 - DNA, 120 bp, synthetic construct
  source 1..120: mol_type = other DNA
ctttgatcaaccagtacttcaccaaccactgcctctatttcttgtccactccggctaaagtgctgggcagcggtggccacgcctctaacaaggagaaggaaatgatcaccaggtgggccg

SEQ ID NO: 87524 - DNA, 120 bp, synthetic construct
  source 1..120: mol_type = other DNA
accctgaagaaatagctcccaggttctgccttaatttgaacaacctttgttgttttcttcccctggacctggagacatggaccaggtatccggggggtagggcagtgactgagatgccct

SEQ ID NO: 87525 - DNA, 120 bp, synthetic construct
  source 1..120: mol_type = other DNA
gaccgcttgagctcaggagttcaagaccagcttgggcaacatagcgagaccctgtctctactaaaaaaaaaaagaaaaatttaaagattagccaggcatggaggcacatgcctgtaatcc

SEQ ID NO: 87526 - DNA, 120 bp, synthetic construct
  source 1..120: mol_type = other DNA
ctgtgtgcctacccttcactgtatggttgaaagtatttagttttttttgttgaacttttgggtgtaagttgcacacaccagggtaacctcatcccttaatgttcatcagctggctttcct

SEQ ID NO: 87527 - DNA, 120 bp, synthetic construct
  source 1..120: mol_type = other DNA
aaagatagcctaaaattgcagcaatattgcagttctgtttgcatttttctggaggaagtacccctcactttcattatagagggccatgagtcctctccacggaagaaacaacatctagcc

SEQ ID NO: 87528 - DNA, 120 bp, synthetic construct
  source 1..120: mol_type = other DNA
atagtgagactccatctctacaaaaaaaaattttttttaattagcctggtgtggtgtggtgtagtggcgctggtgcctgtaaatccacctactcctaaggctgagatggggggatcgctt

SEQ ID NO: 87529 - DNA, 120 bp, synthetic construct
  source 1..120: mol_type = other DNA
catagcaaaaccccatccatggaatttggagctatggaatttattttagtgatggtgacatttgagggcatcatcaagcttggagacatagggtgaggggtatttgagcataagaggatt

SEQ ID NO: 87530 - DNA, 120 bp, synthetic construct
  source 1..120: mol_type = other DNA
ccctgcacagctgtcacctctgaccacctcaactccctgctggggaatatcctgagaatcatcgtcaacaacctgggcattgacgaggcctcctggatgaagcggctggctggtgggtcg

SEQ ID NO: 87531 - DNA, 120 bp, synthetic construct
  source 1..120: mol_type = other DNA
aagaagcccattcacaaccttggggtcatagccagaaatcacatagtgaggtaagactctgggtatgggccaggtcagaggttaaagattggggtcaggggtcatgctagttaagggtga

SEQ ID NO: 87532 - DNA, 120 bp, synthetic construct
  source 1..120: mol_type = other DNA
atctccgcctcctgactggctagaaacttcttccaatgctctggccccaccaaccttctgactcttcctcctggtttcttctggctttgagcacattggtccaacgacagccagcccact

SEQ ID NO: 87533 - DNA, 120 bp, synthetic construct
  source 1..120: mol_type = other DNA
acagaagtgagccaccacacttagctgctttttttttttttttaacacaacaatacaccatgaaagacatataggccgggtgtggtggctcatgcctgtaatcccagcactttgggaggc

SEQ ID NO: 87534 - DNA, 120 bp, synthetic construct
  source 1..120: mol_type = other DNA
tatgtgaacctacttagattctgaccctgtctcaaaaaaaaaagaaattttatgctgggtgcagtggctcgtgactgtaatcccagcactttgggtggccaaagagagtggatcactcaa

SEQ ID NO: 87535 - DNA, 120 bp, synthetic construct
  source 1..120: mol_type = other DNA
tgtatttcgatgaaaaggttagacaaagttttttaaaaaaggaatagtcaggccagggaaggtggctcacacctgtaatcccagcactttgagaggtcagggaaagaggatctcttgagc

SEQ ID NO: 87536 - DNA, 120 bp, synthetic construct
  source 1..120: mol_type = other DNA
ggtctgcaacactgcttcccccaccagaacttcaagcgcgaggagcagaactttgtggtccagaatgagatcaacaacatgtccttcctgactgctgacaacaaaagcaaaatggctaag

SEQ ID NO: 87537 - DNA, 120 bp, synthetic construct
  source 1..120: mol_type = other DNA
cttttttttttctggacttttgttcccaaaaaaaaaaaaaaaaagaaaaaaagagcaactctcagcttttaccaaagcatcgtgggctgaggtcaagggtaatgggggtgggagaggcac

SEQ ID NO: 87538 - DNA, 120 bp, synthetic construct
  source 1..120: mol_type = other DNA
ccatctctaaaaataaatttgtttaaaaaacaagaaactgggaatttgggttgtggacttgggtctggagggtctccggtcatggctgtgggcctgaagtgtagagtcagcaagtctggg

SEQ ID NO: 87539 - DNA, 120 bp, synthetic construct
  source 1..120: mol_type = other DNA
ggtctcaactgtcctggagaccaaaatacccgggctgtagaacctcttaagcttgctgggatatcaaggaggcctcccgggaccccacttaccccttgtgtgggacaacaaggacaatct

SEQ ID NO: 87540 - DNA, 120 bp, synthetic construct
  source 1..120: mol_type = other DNA
cacaatattagtgaaggtttgagcatttaccaaagaccaggcattgaagaaagacctcaaaggtcaggagtttgagaccagcctggccaatgtggcgaaaccatgtttctactaaaaata

SEQ ID NO: 87541 - DNA, 120 bp, synthetic construct
  source 1..120: mol_type = other DNA
gctctgtgggacctggcctaggatggaaacttaggtctggaggcggagtcaggaccctgactctgttggtggagacaaggttttccttctgccgtgtgagtcttaacctgaatatggact

SEQ ID NO: 87542 - DNA, 120 bp, synthetic construct
  source 1..120: mol_type = other DNA
gacagacggatctttaaatatcactttgctggtcaggcacggtggctcacgcctgtagtcccagcaatctgggaggctgaggcaggcaatcacttgagcccaggagttcaagaccagcct

SEQ ID NO: 87543 - DNA, 120 bp, synthetic construct
  source 1..120: mol_type = other DNA
tctcaaagtgctgggactacaggcgtgagccactgcacctggcctacttttttattttttgagaagatcttgctcttcttgcccaggctggaatgcagtgtcatatcatagctcattgca

SEQ ID NO: 87544 - DNA, 120 bp, synthetic construct
  source 1..120: mol_type = other DNA
ctgtgtgatcccagccgagaagggtctttgtatcttagttcccccaccgataaaatagggctattaacatacccacccaattggatgactgtgagggtcagtttgttaatatatacaagg

SEQ ID NO: 87545 - DNA, 120 bp, synthetic construct
  source 1..120: mol_type = other DNA
tacaggcaagcaccatcacacccggctaattttttgtacttttagtagagacggggtttcaccatgttggctaggttggtttcagactcctgatctcaagtgatctgcctgcctcagcct

SEQ ID NO: 87546 - DNA, 120 bp, synthetic construct
  source 1..120: mol_type = other DNA
gagctagtaaacatgcaattcaccgatccattcattcattgagacagttagcaagcatttacttcatagttttcttcactgtttctgtgccagagtcccttctggcatctggtgaagact

SEQ ID NO: 87547 - DNA, 120 bp, synthetic construct
  source 1..120: mol_type = other DNA
tgtgagccaccttgcccagccacatctgtgatttttattggtgacaaagccacaggttctgctaatatcgctgtgatttatggcttcatccatataggaaggaaatgcttcatttctgtt

SEQ ID NO: 87548 - DNA, 120 bp, synthetic construct
  source 1..120: mol_type = other DNA
ctgcagaaaatgctggattatcttaaggacaagaaggaagttggcttcttccagagtatccaggcactgatgcaaacatgcaggtaggttcgagtggacctcttcttgttaagctgtgtt

SEQ ID NO: 87549 - DNA, 120 bp, synthetic construct
  source 1..120: mol_type = other DNA
agtcattctgtcttgtgttctcacccatcactacatggaccccaccctccacgtgccccaaatgtcacgccctggttgctgttctcttattaatgtccctaatccgggttaatcgcgtct

SEQ ID NO: 87550 - DNA, 120 bp, synthetic construct
  source 1..120: mol_type = other DNA
atgatttgcttctttcagatgcccattctgattggcccttgtttacacgcctcccctgtgctactcctggattggctgctttcaaggcatctgggccaattggctggctttcaatcccca

SEQ ID NO: 87551 - DNA, 120 bp, synthetic construct
  source 1..120: mol_type = other DNA
aaaaaaaaacctcgctggaatttctggaatctagccactttgtttccccctcatctcctctggccagtccaattccccaaaagcaacctgccaaaaaccaatttggccaaaaatcaattt

SEQ ID NO: 87552 - DNA, 120 bp, synthetic construct
  source 1..120: mol_type = other DNA
ctcctgccttggcctcctaaaatgctgggattacaggtgtgagccaccatacccagccgggactaagattttcattctttaattttaactaagatggaatcagtctttgggtttaaaata

SEQ ID NO: 87553 - DNA, 120 bp, synthetic construct
  source 1..120: mol_type = other DNA
ttcaagacaagtctgggcaacataaggagaccctgtctctaccaaaaaaaaaaaaaatcatatactacagtataataaacctccaatcatatactacagtataataaacctccaatcata

SEQ ID NO: 87554 - DNA, 120 bp, synthetic construct
  source 1..120: mol_type = other DNA
gcaggagaattgcttgaacctgggaggcagagtttgcagtgaactgagatcatgccactgcactccagcctgggtgacagagcaagactgtatctcaaaaaaaaaaggatttcctaccat

SEQ ID NO: 87555 - DNA, 120 bp, synthetic construct
  source 1..120: mol_type = other DNA
acgctccaccacatttgacacatagcaggccctcaataatatttatattttatttttttatatttatttattttttgagacggagtttcactcttgttgcccaagctggagtgcagtggc

SEQ ID NO: 87556 - DNA, 120 bp, synthetic construct
  source 1..120: mol_type = other DNA
tggataaatgacttttcatctccccagatttccagaactacctacggacacagacagggaacacgaccactattaacatcatcatttgcactgtggactacctcctgcggctgcaggtga

SEQ ID NO: 87557 - DNA, 120 bp, synthetic construct
  source 1..120: mol_type = other DNA
ctggtaactatattcaaggctgccatatactgttccgcaggtcgtgcactgcacaaaggcacgatctctgagagcattcacatcctacacataatggtgtatttattacaatagtttagt

SEQ ID NO: 87558 - DNA, 120 bp, synthetic construct
  source 1..120: mol_type = other DNA
ggaccttaggcgcagaatgcagagctttggaactgtggaaatacattaggattggaatcaacaactgatagaactagcatgggagcaaaagatccttacatcccatttatctggtatcat

SEQ ID NO: 87559 - DNA, 120 bp, synthetic construct; identical to SEQ ID NO: 19737
  source 1..120: mol_type = other DNA

SEQ ID NO: 87560 - DNA, 120 bp, synthetic construct; identical to SEQ ID NO: 19738
  source 1..120: mol_type = other DNA

SEQ ID NO: 87561 - DNA, 120 bp, synthetic construct
  source 1..120: mol_type = other DNA
gtaaaatgaggataaaacagtccttgggttatatgtattctgttttatttcattttagagacaaggtctttctctgttgcccaggctggagtgcagtggcgtgatcatagctcactgcag

SEQ ID NO: 87562 - DNA, 120 bp, synthetic construct
  source 1..120: mol_type = other DNA
ccaagagttcgagatcagcctgggcaacctagtgaaaccctgtatctataaaaataaaaataaaacaactattaactattgtgaggatgggcagtgcgggcagtacctggaatatggtga

SEQ ID NO: 87563 - DNA, 120 bp, synthetic construct
  source 1..120: mol_type = other DNA
cagtctggaactgtgcctgggtctgtctttatctttcctgacatgtttgaagaacgcaggcaaactgttttgtaaaatgtcgttcagtgtgggtttgtctgagttttcatcattatcaga

SEQ ID NO: 87564 - DNA, 120 bp, synthetic construct
  source 1..120: mol_type = other DNA
atttttagtagagacgggggtttcaccatgttggtcaggctggtctcgaactcccgacctcaagtgatggtcaggctggtttcaaattcccaacctcaagtgatccgcccgcctcagcct

SEQ ID NO: 87565 - DNA, 120 bp, synthetic construct
  source 1..120: mol_type = other DNA
gggattaccagcataagctaccatgcccagcaggactgcttttttttttttgagatggaggagtctcactctgtcaccaggctggagtgcagtgatgtgatctcggctcactgcaaactc

SEQ ID NO: 87566 - DNA, 120 bp, synthetic construct
  source 1..120: mol_type = other DNA
atatcaaaaaaaaaaaaaaaaaaatcaaaatatagccaggtgctgtggctcacaccagtaattccagcactttaggaggccaaggcaggaggattgcttgaggccaggagttcaagacca

SEQ ID NO: 87567 - DNA, 120 bp, synthetic construct
  source 1..120: mol_type = other DNA
gttagaggttgcagtgagctgagattgcgccactgcactcctgcctgggcgacagaacaagactcagtctcaaaagaaaaaaaaaataagtagcattgttctataatttcccaagttctt

SEQ ID NO: 87568 - DNA, 120 bp, synthetic construct
  source 1..120: mol_type = other DNA
ccactccagcctgagcaacagagtgagaccctgcctcaaaaaaaaaaaaaaaaaaatgcatgtgtgtgtgcgcacgtgtgtgtgtatgtgtgtgtggccttaaaagacgttccttttatt

SEQ ID NO: 87569 - DNA, 120 bp, synthetic construct
  source 1..120: mol_type = other DNA
agcaaaaccctatctctataaaaactttaaaaaataaccaggtgtagtagtgcatatctgtagtcccagttactggggaggctgaggcaggaggatctcttgaaccttggaggttaatgc

SEQ ID NO: 87570 - DNA, 120 bp, synthetic construct
  source 1..120: mol_type = other DNA
tggtcctgaaggtacagcagtgaacaaaacagagagcccactgtgggggctgatagtccagtgggaaggggcagatgcaaataacgaaatacacgaagtaattgcaggttataatctgtg

SEQ ID NO: 87571 - DNA, 120 bp, synthetic construct
  source 1..120: mol_type = other DNA
aggatcacttgagcccaggaggtcgaggctatggcaagccatgatcactccattacactccagcctaggtagtagagacagactttgtctcaaaaaattaataataaagtaaaacaacta

SEQ ID NO: 87572 - DNA, 120 bp, synthetic construct
  source 1..120: mol_type = other DNA
tcacaagagcaaagtctaggagtgaatggaggtgatagtgtcccaggcgcctgtggagaggtgggcttctttttttttttttttttttttttgagacagggtctcgctcttattgcccag

SEQ ID NO: 87573 - DNA, 120 bp, synthetic construct
  source 1..120: mol_type = other DNA
aacctcttgcaaaaatgcatgggcaatcagcacaagaatgttcaagaaaagtgttgtctgaaagaaatctgtgggtgaacttggtgatttatgcttgtaatcccaacactttgggaggcg

SEQ ID NO: 87574 - DNA, 120 bp, synthetic construct
  source 1..120: mol_type = other DNA
ggagtttgagaccagccttggcaacatagggagaccttatctctacaaaaaaaaattaaaattaaaattagccaggtgtagcggtgtgtgcctgtagtcccagctgctctggatgctggg

SEQ ID NO: 87575 - DNA, 120 bp, synthetic construct
  source 1..120: mol_type = other DNA
cacaaggatgcacaccccttgggcatgaagcagggtcagtgtgtcctgactgtggctgctcacacgccatgctttccccttacacccacaccctgggagctctggcaggcccttatagcc

SEQ ID NO: 87576 - DNA, 120 bp, synthetic construct
  source 1..120: mol_type = other DNA
cacagagccctgtcctcatgttctgggagccagtacacaaacccttggctccccttcccacattcatgcctgcctcacgcacactgcataactgcaggcccctctcacactcatactcct

SEQ ID NO: 87577 - DNA, 120 bp, synthetic construct
  source 1..120: mol_type = other DNA
agcatctattaactcatttaaccctcacaccaaccctataatgtaggtcctattatgcccattttacagaggggaaaacggaggtccagagagttaattcaaaatcacccagctactcag

SEQ ID NO: 87578 - DNA, 120 bp, synthetic construct
  source 1..120: mol_type = other DNA
atgtgaaccctggggacgaaggttacagtgagacagcgtcacttcattccagcctaggagacagagctagatcttgtctttttttttttttttcttgagacagactttcactctgttgcc

SEQ ID NO: 87579 - DNA, 120 bp, synthetic construct
  source 1..120: mol_type = other DNA
ggcctgctctggggctcgctgttcggcggcggcctggtggagggcgccaagaaggtgacggtgaccgagctcctggcaggcatgcccgaccccaccagcgacgaggtgcacggcgagcag

SEQ ID NO: 87580 - DNA, 120 bp, synthetic construct
  source 1..120: mol_type = other DNA
aaaaaaaaaaaaaaaaaaggaaaagaaagaccaagactaaaaaaagtcccgagacagggtcagggccactaggaaaagaccctcggagatactcgttgtgggaatgaagtacaccgtgga

SEQ ID NO: 87581 - DNA, 120 bp, synthetic construct
  source 1..120: mol_type = other DNA
aagaaaaaaaaatatggagagatagaaaaatgaaaactcccatctaactgccaggccttcgcatgtgctttcccgctgcctggaacacaggcccccatgcctactctgagtctttctcat

SEQ ID NO: 87582 - DNA, 120 bp, synthetic construct
  source 1..120: mol_type = other DNA
ccctcacttggttccttgtcccttccctgctcactatccttattccaacctccatacctctgttcatcggggccacccacccacacttccacctccatcctctgtccagagctacattca

SEQ ID NO: 87583 - DNA, 120 bp, synthetic construct
  source 1..120: mol_type = other DNA
aggagtttggggcaagccagggcaacatagggagatccctgtctctacaaaagaattttttttttttttgagacggagtctcgctctgttgcccaggttggagtgcagtggcacaatctc

SEQ ID NO: 87584 - DNA, 120 bp, synthetic construct
  source 1..120: mol_type = other DNA
ttgagaccagcctgaccaacatggtgagaccccgtctctactgaaaatacaaaaactaactgagtgtggtggtgcatacctgtaatcccagctacttaggaggctgagtcatgagaattt

SEQ ID NO: 87585 - DNA, 120 bp, synthetic construct
  source 1..120: mol_type = other DNA
gctcttggcaacacccactgattctgttaagcatctttggtttcacataagctaaacagaagtttgcagggaggaagaaatgggccactcacagaatggaaggaatgggttaagaaccag

SEQ ID NO: 87586 - DNA, 120 bp, synthetic construct
  source 1..120: mol_type = other DNA
gaacatggtgtactacttcctggaggaaagcacaggctacatggaacccgccctgcggtgtctgagcctcctgcatacactggtggcctttctctgcatcattggctataattgtctcaa

SEQ ID NO: 87587 - DNA, 120 bp, synthetic construct
  source 1..120: mol_type = other DNA
tttctacccttatcactgggaaagcacttctgatgtggggtcacacacagaccccagcaagatgtcatggcttctgctgagactatggtccagccaaggtgcctgacgcccacctttggc

SEQ ID NO: 87588 - DNA, 120 bp, synthetic construct
  source 1..120: mol_type = other DNA
gaaaccccatctctactaaaaatacaaaaattagtctctactaaaaatacaaaaagtaggcatggtggtgggtgcctgtggtcctagctactccggaggctgaggcatgagaatcactta

SEQ ID NO: 87589 - DNA, 120 bp, synthetic construct
  source 1..120: mol_type = other DNA
caatttgtcacttggaaaactggtgaataaagggccagaatcatgaaattaaatgaaatcaaccagtatgaggaagcaggcagttgcactggagttggtgctgagttaggctgctgtttt

SEQ ID NO: 87590 - DNA, 120 bp, synthetic construct
  source 1..120: mol_type = other DNA
caagaggtttttttgcctttctgagtagcacctcagtttccccatggggagatgggcatagtaagcttgcttccctttcttgaatgggcacatggaaagagcagagcatcaaggccaagc

SEQ ID NO: 87591 - DNA, 120 bp, synthetic construct
  source 1..120: mol_type = other DNA
caatatgtcttaagcacacacactctggaaccagattgcctgcttttcttttgtttttttctttgagacggagtctcgctctgttacccagtctggagtgcagtggcacaatctcagctc

SEQ ID NO: 87592 - DNA, 120 bp, synthetic construct
  source 1..120: mol_type = other DNA
tctcaaaaaaaaaaatgcacctcccatttctcactcagagtttggagtgtccccagaacccccttgcaggccacgacacacacccacactccagctgtgtctacacagcctgatgctctc

SEQ ID NO: 87593 - DNA, 120 bp, synthetic construct
  source 1..120: mol_type = other DNA
gcctataatcccagcactttgggaggcggaggcagaggtttgcttgagctcaaacgtttaagaccagcttgggcaacttttgtagagacggtgaaaccctgtctctacaaacaatacaaa

SEQ ID NO: 87594 - DNA, 120 bp, synthetic construct
  source 1..120: mol_type = other DNA
tggtatatggtgatgtccctcttgggacactacaacaacttcttctttgctgcccatctcctggacatcgccatgggggtcaagacgctgcgcaccatcctgtcctctgtcacccacaat

SEQ ID NO: 87595 - DNA, 120 bp, synthetic construct
  source 1..120: mol_type = other DNA
aaaatgaaaatagtacctacagtttggcaagctgatgcatgccaggcacattttttttttttttttttgagatggagtctcactgtgttgccaggctagagtgcagtggcgcaatctcag

SEQ ID NO: 87596 - DNA, 120 bp, synthetic construct
  source 1..120: mol_type = other DNA
agtgctgggattacagatgtgagcaactgcacccggccttatttgagcttttcaaactattattattggaaaggtactcagggagcgtgcccctgccacttatgagccgtgtgattttgg

SEQ ID NO: 87597 - DNA, 120 bp, synthetic construct
  source 1..120: mol_type = other DNA
ttctcattatagtcacttatcttagtttttactctaggatgactgtgttctctcacatcctggggacacggaaagaacaagtgtatgccgggcgctgtggctcacgcttttaatcccagc

SEQ ID NO: 87598 - DNA, 120 bp, synthetic construct
  source 1..120: mol_type = other DNA
acaggagctctattttccagcctcacccaaccattttcagttcctcacagcagcaggatgtactctttcctcactgatggcgaggcagcatgtggccttctctgctgggaacactctccc

SEQ ID NO: 87599 - DNA, 120 bp, synthetic construct
  source 1..120: mol_type = other DNA
ttaccatgtcttcagccctgcctatcccggggccttggctggtactcagtgaatgtcgaatgaatgagtgaccagtgtgctcccctccctcagtgttacctgtttcacatgtacgtgggt

SEQ ID NO: 87600 - DNA, 120 bp, synthetic construct
  source 1..120: mol_type = other DNA
acctcagcctcccaaagtactgggattacaggcgtgagccaccgcacccggccaataaaggcctaatactatcttcttaggaagcgagattaggggtgagattagggaaatgggggatgg

SEQ ID NO: 87601 - DNA, 120 bp, synthetic construct
  source 1..120: mol_type = other DNA
tacttgaggtcaggagttcaagaccagcctggccagcatggtgaaattcagtctctactaaaaatgcaaagattagcagggcgtggttgtgcatgcctgtaatcccagctacttggaaag

SEQ ID NO: 87602 - DNA, 120 bp, synthetic construct; identical to SEQ ID NO: 33850
  source 1..120: mol_type = other DNA

SEQ ID NO: 87603 - DNA, 120 bp, synthetic construct
  source 1..120: mol_type = other DNA
ctgtgttgcccaggcagggtttctctggcttttaatgaacaattgcttcttttttttccttttatttatttattatactttaagttttagggtacatgtgcacgttgtgcaggttagtta

SEQ ID NO: 87604 - DNA, 120 bp, synthetic construct; identical to SEQ ID NO: 1923
  source 1..120: mol_type = other DNA

SEQ ID NO: 87605 - DNA, 120 bp, synthetic construct; identical to SEQ ID NO: 33851
  source 1..120: mol_type = other DNA

SEQ ID NO: 87606 - DNA, 120 bp, synthetic construct; identical to SEQ ID NO: 1915
  source 1..120: mol_type = other DNA

SEQ ID NO: 87607 - DNA, 120 bp, synthetic construct; identical to SEQ ID NO: 1916
  source 1..120: mol_type = other DNA

SEQ ID NO: 87608 - DNA, 120 bp, synthetic construct; identical to SEQ ID NO: 1917
  source 1..120: mol_type = other DNA

SEQ ID NO: 87609 - DNA, 120 bp, synthetic construct; identical to SEQ ID NO: 33852
  source 1..120: mol_type = other DNA

SEQ ID NO: 87610 - DNA, 120 bp, synthetic construct; identical to SEQ ID NO: 1918
  source 1..120: mol_type = other DNA

SEQ ID NO: 87611 - DNA, 120 bp, synthetic construct; identical to SEQ ID NO: 1919
  source 1..120: mol_type = other DNA

SEQ ID NO: 87612 - DNA, 120 bp, synthetic construct
  source 1..120: mol_type = other DNA
caaggcattatatttttaataacacaggtaacaatactgcctctttagtaagagagttcttatatgaaggttatttgaaacgtagttcaggccccagcacccgactgatagactgtcaga

SEQ ID NO: 87613 - DNA, 120 bp, synthetic construct
  source 1..120: mol_type = other DNA
ccacctatgagtgagaatatgcggtgtttggttttttgttcttgcgatagtttactgagaatgatgatttccagtttcatccatgtccctgcaaaggacatgaactcatcattttttagg

SEQ ID NO: 87614 - DNA, 120 bp, synthetic construct
  source 1..120: mol_type = other DNA
atcgtgtattgtaactctctgagctggtatgtagagacatcgttctttttttttttctttctttctttgttctcttttgagacggagtcttgctctgtcgcccaggctggagtgcagtgg

SEQ ID NO: 87615 - DNA, 120 bp, synthetic construct
  source 1..120: mol_type = other DNA
ctcgctgcagccttgacctcctgggctcaagcgctcctcccacctcagcctcctgagtagctgtgagtataggtacatgccaccatgcccagctaattttttgatggtttttttgtttgt

SEQ ID NO: 87616 - DNA, 120 bp, synthetic construct; identical to SEQ ID NO: 33853
  source 1..120: mol_type = other DNA

SEQ ID NO: 87617 - DNA, 120 bp, synthetic construct; identical to SEQ ID NO: 79941
  source 1..120: mol_type = other DNA

SEQ ID NO: 87618 - DNA, 120 bp, synthetic construct; identical to SEQ ID NO: 33858
  source 1..120: mol_type = other DNA

SEQ ID NO: 87619 - DNA, 120 bp, synthetic construct; identical to SEQ ID NO: 33854
  source 1..120: mol_type = other DNA

SEQ ID NO: 87620 - DNA, 120 bp, synthetic construct
  source 1..120: mol_type = other DNA
gtgaagacggagtctctctctgtgggccaggttggagtgcagtagtgcgatctcggctcactgcaacccacacctcccaggttctagggattctcatgcctcagcctcccgtgtagctgg

SEQ ID NO: 87621 - DNA, 120 bp, synthetic construct
  source 1..120: mol_type = other DNA
attgtaagtcttactatgtttttgagacggagtctcgctctgaagaccaggctggagtgcagtggtgccatctcggctcacaggaaattctgtctccagggttcaagtgattctcctgcc

SEQ ID NO: 87622 - DNA, 120 bp, synthetic construct; identical to SEQ ID NO: 79946
  source 1..120: mol_type = other DNA

SEQ ID NO: 87623 - DNA, 120 bp, synthetic construct
  source 1..120: mol_type = other DNA
cacctttagagacatgaattgataagatttgaagttgaaagaccatgactctagtacttcctgagtaatcaactgaagtatgctttacacatgtgttttccaaattgctgactgttaatt

SEQ ID NO: 87624 - DNA, 120 bp, synthetic construct; identical to SEQ ID NO: 33851
  source 1..120: mol_type = other DNA

SEQ ID NO: 87625 - DNA, 120 bp, synthetic construct; identical to SEQ ID NO: 1915
  source 1..120: mol_type = other DNA

SEQ ID NO: 87626 - DNA, 120 bp, synthetic construct; identical to SEQ ID NO: 1924
  source 1..120: mol_type = other DNA

SEQ ID NO: 87627 - DNA, 120 bp, synthetic construct; identical to SEQ ID NO: 1917
  source 1..120: mol_type = other DNA

SEQ ID NO: 87628 - DNA, 120 bp, synthetic construct; identical to SEQ ID NO: 33855
  source 1..120: mol_type = other DNA

SEQ ID NO: 87629 - DNA, 120 bp, synthetic construct; identical to SEQ ID NO: 79934
  source 1..120: mol_type = other DNA

SEQ ID NO: 87630 - DNA, 120 bp, synthetic construct; identical to SEQ ID NO: 33856
  source 1..120: mol_type = other DNA

SEQ ID NO: 87631 - DNA, 120 bp, synthetic construct; identical to SEQ ID NO: 1914
  source 1..120: mol_type = other DNA

SEQ ID NO: 87632 - DNA, 120 bp, synthetic construct
  source 1..120: mol_type = other DNA
gtctttgcctatcgtgaataatgccgcaataaacatacgttgtgcatgtgtcttttatagcagcatgattttatagtccctttggggtatataccccagtaatgggatggcttgggtcaa

SEQ ID NO: 87633 - DNA, 120 bp, synthetic construct; identical to SEQ ID NO: 29837
  source 1..120: mol_type = other DNA

SEQ ID NO: 87634 - DNA, 120 bp, synthetic construct
  source 1..120: mol_type = other DNA
cacggtgaaacccgcaccccaccccccaccccgcccaatctcttctaaaaatacaaaaatcagctgggcatggtggtgcactcctgtaatcccagctactcgggaggctgagagatgaga

SEQ ID NO: 87635 - DNA, 120 bp, synthetic construct; identical to SEQ ID NO: 29816
  source 1..120: mol_type = other DNA

SEQ ID NO: 87636 - DNA, 120 bp, synthetic construct; identical to SEQ ID NO: 29817
  source 1..120: mol_type = other DNA

SEQ ID NO: 87637 - DNA, 120 bp, synthetic construct; identical to SEQ ID NO: 29818
  source 1..120: mol_type = other DNA

SEQ ID NO: 87638 - DNA, 120 bp, synthetic construct
  source 1..120: mol_type = other DNA
ggaaaatcgcttgaacccgtgaggcagaggttgcagtgagccaagatcgcgccagcctggcgacagagtgagactccgtctcaaaaaaaaaaaaaaaaatagtaaagaaaagaaacaatc

SEQ ID NO: 87639 - DNA, 120 bp, synthetic construct
  source 1..120: mol_type = other DNA
ggttcaagccattctccttcctcagcctcctgagtagctgggattacaagcacgtgccaccacacccggctaattttttgtatttttagtagagctggggtttcactatgttggccaggc

SEQ ID NO: 87640 - DNA, 120 bp, synthetic construct; identical to SEQ ID NO: 29819
  source 1..120: mol_type = other DNA

SEQ ID NO: 87641 - DNA, 120 bp, synthetic construct; identical to SEQ ID NO: 29820
  source 1..120: mol_type = other DNA

SEQ ID NO: 87642 - DNA, 120 bp, synthetic construct; identical to SEQ ID NO: 29838
  source 1..120: mol_type = other DNA

SEQ ID NO: 87643 - DNA, 120 bp, synthetic construct; identical to SEQ ID NO: 29821
  source 1..120: mol_type = other DNA

SEQ ID NO: 87644 - DNA, 120 bp, synthetic construct
  source 1..120: mol_type = other DNA
ggggggcagggtctcactctttcgcccaggctggagtgcagtggtgcgatcatagctcactgtggccttgacctcccaggctcaaggttctcagattctcaggccccaccctggggaagg

SEQ ID NO: 87645 - DNA, 120 bp, synthetic construct
  source 1..120: mol_type = other DNA
ggattcagatgttcacctcaactcacaagaaaaacttctggccgggcgcagtggttcacacctgtaatcccagcactttgggtggccaaggtgggcggatcatctgaggtcagaagtttg

SEQ ID NO: 87646 - DNA, 120 bp, synthetic construct; identical to SEQ ID NO: 29822
  source 1..120: mol_type = other DNA

SEQ ID NO: 87647 - DNA, 120 bp, synthetic construct
  source 1..120: mol_type = other DNA
cggaggatcatatgaggccaggagtttaaggttgcagtgaaccatgatcataccactgcactccagcctaggcgacggagtgagaccctgtctctaaactaataataatttttgaaagtg

SEQ ID NO: 87648 - DNA, 120 bp, synthetic construct; identical to SEQ ID NO: 29823
  source 1..120: mol_type = other DNA

SEQ ID NO: 87649 - DNA, 120 bp, synthetic construct
  source 1..120: mol_type = other DNA
ctgggttcaagcgattcattctcctgcctcagcctcccaagtagctaggattacaggtgcccaccaccacgcctggttaatttttgtgtttttagtagagatggggtttcaccattttgg

SEQ ID NO: 87650 - DNA, 120 bp, synthetic construct
  source 1..120: mol_type = other DNA
gccccaggtgacactcttttttttttgtttgtttttgagatggagtcgtgctctgttgcccagcctggagtccaatgccgtggtctcggctcactgcaatctccgcctcctgggtttaag

SEQ ID NO: 87651 - DNA, 120 bp, synthetic construct; identical to SEQ ID NO: 29824
  source 1..120: mol_type = other DNA

SEQ ID NO: 87652 - DNA, 120 bp, synthetic construct
  source 1..120: mol_type = other DNA
agcaatacatatgatacaaaacttgatatatagactagagtttcttagccgaactggaggggctggcttaggtaatccatggattccctgaaactggggacaccattggaaatatgtgtg

SEQ ID NO: 87653 - DNA, 120 bp, synthetic construct
  source 1..120: mol_type = other DNA
acctgtaatcccagctactcaggaggctgaaacaggagaatcacttgagactgggaggaagaggttgcagtgagctgagagcacgctactgcactccaaaaaaagaaaaaaaagaaaaga

SEQ ID NO: 87654 - DNA, 120 bp, synthetic construct
  source 1..120: mol_type = other DNA
tgagaaagcttggtttcgggccaggtgcagtggctcacgcctgagatgctagcacgttgggaggctgaggcaagaggattgcttgaactcaggactttgaggctgcagtgagctatgact

SEQ ID NO: 87655 - DNA, 120 bp, synthetic construct; identical to SEQ ID NO: 29825
  source 1..120: mol_type = other DNA

SEQ ID NO: 87656 - DNA, 120 bp, synthetic construct
  source 1..120: mol_type = other DNA
aaacccgggaggcagaggttgcagtgagccaagatcaggccactgcattccagcctggcccacagagcaagactctgtctcaaaataaattaataaataaataaaaataaaaatccaata

SEQ ID NO: 87657 - DNA, 120 bp, synthetic construct
  source 1..120: mol_type = other DNA
gttcaagcgattctcctgcctcagcctccaagcagctgggattacagacatgaaccaccacgcctggctaatttttgtgtttttagtagaaacggggttttgccatgttggccaggttgg

SEQ ID NO: 87658 - DNA, 120 bp, synthetic construct
  source 1..120: mol_type = other DNA
ccccctctccacaatcttcctcttccaagatgtgacctctccctctctgtgttcctttctctccatcagtatctcctggctatggtcatagcgtatttcagccgggccggcttcccctcc

SEQ ID NO: 87659 - DNA, 120 bp, synthetic construct
  source 1..120: mol_type = other DNA
ctttccaaagcacgacaacctcactgcccacctgaacaacttccttagctgatgcctttctctatcgaggccagggtccacagtgtcaattctaccctctctacaatctctacaagcaca

SEQ ID NO: 87660 - DNA, 120 bp, synthetic construct
  source 1..120: mol_type = other DNA
tttcttacatttttaatagagacgagggtcttgctatgttgcccaggcccgtctcaaactcctggcctcaagtgatcctcctgctttggcctcccagtgtgctgggattccaggcgtaag

SEQ ID NO: 87661 - DNA, 120 bp, synthetic construct
  source 1..120: mol_type = other DNA
caaagggcgtttgtttttccagatccaggcttatgacccagagcactgggtgtgggcgcgagatcgcgctcacctttcctagagctccagggaccggggaggcctgaggtcatcggcctg

SEQ ID NO: 87662 - DNA, 120 bp, synthetic construct; identical to SEQ ID NO: 1674
  source 1..120: mol_type = other DNA

SEQ ID NO: 87663 - DNA, 120 bp, synthetic construct; identical to SEQ ID NO: 1675
  source 1..120: mol_type = other DNA

SEQ ID NO: 87664 - DNA, 120 bp, synthetic construct
  source 1..120: mol_type = other DNA
taaaggtggccgggcgtggtggctcacgcccatgatcccagcaggagtttgagaccagcctggccaacatggtgaaaccctgtctctactaaaaatacaaaaattaggcaggcgtggtgg

SEQ ID NO: 87665 - DNA, 120 bp, synthetic construct
  source 1..120: mol_type = other DNA
tttctttctcttttttttttttgagacggagtcttgctctgtcacccaggctggagtacagtgaccaccatgcttggctaatttttgtatttgtattagagacggggtttcgccatgttg

SEQ ID NO: 87666 - DNA, 120 bp, synthetic construct
  source 1..120: mol_type = other DNA
ggtcttgaactcctgacctcgtgatccacccgtcttggcctcccaaagtgctgggattacaggtgtgagccatcaagcccggaccttttttttattttttgagacgacgtttcactcttg

SEQ ID NO: 87667 - DNA, 120 bp, synthetic construct
  source 1..120: mol_type = other DNA
ttttaaacaaccagatcccacaagcgctcactcaatatcacgagaacagcaagggggaagtcggcccccatgagccaatcacctcccaccaggtccctcccacaacactgggaattacaa

SEQ ID NO: 87668 - DNA, 120 bp, synthetic construct; identical to SEQ ID NO: 29826
  source 1..120: mol_type = other DNA

SEQ ID NO: 87669 - DNA, 120 bp, synthetic construct; identical to SEQ ID NO: 29827
  source 1..120: mol_type = other DNA

SEQ ID NO: 87670 - DNA, 120 bp, synthetic construct
  source 1..120: mol_type = other DNA
tctgtaatcccaacactttgggaggctgaggtggatggatgacctgaggtcagaagttcaagaccagcctgcccaacatggcaaaaccctgtctgtactaaaaatacaaagaaaaaaaaa

SEQ ID NO: 87671 - DNA, 120 bp, synthetic construct; identical to SEQ ID NO: 1649
  source 1..120: mol_type = other DNA

SEQ ID NO: 87672 - DNA, 120 bp, synthetic construct; identical to SEQ ID NO: 1650
  source 1..120: mol_type = other DNA

SEQ ID NO: 87673 - DNA, 120 bp, synthetic construct; identical to SEQ ID NO: 29828
  source 1..120: mol_type = other DNA

SEQ ID NO: 87674 - DNA, 120 bp, synthetic construct
  source 1..120: mol_type = other DNA
aaagggagtctccctttccccgggggagtttagagaagactctactcctccacaggcccgcccacagttacccggaggcataaccgtctccctgtgatgctgtgcttcagtggtcacgct

SEQ ID NO: 87675 - DNA, 120 bp, synthetic construct
  source 1..120: mol_type = other DNA
gtgggtgggcacctctttaactgctgaggaacagaaagtgatatgggtaggctgggtgcggtgactcacgcctgtaatcctagcactttggcactttgagaggctgaggcaggcggatca

SEQ ID NO: 87676 - DNA, 120 bp, synthetic construct; identical to SEQ ID NO: 2632
  source 1..120: mol_type = other DNA

SEQ ID NO: 87677 - DNA, 120 bp, synthetic construct; identical to SEQ ID NO: 2633
  source 1..120: mol_type = other DNA

SEQ ID NO: 87678 - DNA, 120 bp, synthetic construct; identical to SEQ ID NO: 29829
  source 1..120: mol_type = other DNA

SEQ ID NO: 87679 - DNA, 120 bp, synthetic construct
  source 1..120: mol_type = other DNA
aaagtactgggattacaggcatgagccaccgtgcccagccctctttgcctttccctactattcctggaagagccaaggtatacaggatgccccactggccctgccccagaacctagctgg

SEQ ID NO: 87680 - DNA, 120 bp, synthetic construct
  source 1..120: mol_type = other DNA
aaacacccgctacttagcagaccaggaaagggagtgtacagtgagatcaggatgagggtggtgaggtggtgatcagggggacccatgcttctgctcagggggttggcagaagccagcaag

SEQ ID NO: 87681 - DNA, 120 bp, synthetic construct
  source 1..120: mol_type = other DNA
ctagaggtgtgcaccgtcacacccagcttcaagtctcttattataaagttctggccacgcacagtggctcgcaactgtaatctcagcactttcggaggccaaggcggtcagatcacctga

SEQ ID NO: 87682 - DNA, 120 bp, synthetic construct; identical to SEQ ID NO: 29830
  source 1..120: mol_type = other DNA

SEQ ID NO: 87683 - DNA, 120 bp, synthetic construct; identical to SEQ ID NO: 29831
  source 1..120: mol_type = other DNA

SEQ ID NO: 87684 - DNA, 120 bp, synthetic construct
  source 1..120: mol_type = other DNA
tatttttagtagagaagaggtttcgccatgttggccaggctggtttcaaactcctgatctccaacaatctgcctgcctccacctcccaaagagctgggataacaggcatgagtcaccgca

SEQ ID NO: 87685 - DNA, 120 bp, synthetic construct; identical to SEQ ID NO: 79619
  source 1..120: mol_type = other DNA

SEQ ID NO: 87686 - DNA, 120 bp, synthetic construct; identical to SEQ ID NO: 79620
  source 1..120: mol_type = other DNA

SEQ ID NO: 87687 - DNA, 120 bp, synthetic construct; identical to SEQ ID NO: 79621
  source 1..120: mol_type = other DNA

SEQ ID NO: 87688 - DNA, 120 bp, synthetic construct; identical to SEQ ID NO: 29796
  source 1..120: mol_type = other DNA

SEQ ID NO: 87689 - DNA, 120 bp, synthetic construct; identical to SEQ ID NO: 29797
  source 1..120: mol_type = other DNA

SEQ ID NO: 87690 - DNA, 120 bp, synthetic construct; identical to SEQ ID NO: 29798
  source 1..120: mol_type = other DNA

SEQ ID NO: 87691 - DNA, 120 bp, synthetic construct; identical to SEQ ID NO: 29799
  source 1..120: mol_type = other DNA

SEQ ID NO: 87692 - DNA, 120 bp, synthetic construct; identical to SEQ ID NO: 29800
  source 1..120: mol_type = other DNA

SEQ ID NO: 87693 - DNA, 120 bp, synthetic construct; identical to SEQ ID NO: 29801
  source 1..120: mol_type = other DNA

SEQ ID NO: 87694 - DNA, 120 bp, synthetic construct; identical to SEQ ID NO: 29802
  source 1..120: mol_type = other DNA

SEQ ID NO: 87695 - DNA, 120 bp, synthetic construct; identical to SEQ ID NO: 29803
  source 1..120: mol_type = other DNA

SEQ ID NO: 87696 - DNA, 120 bp, synthetic construct; identical to SEQ ID NO: 29832
  source 1..120: mol_type = other DNA

SEQ ID NO: 87697 - DNA, 120 bp, synthetic construct; identical to SEQ ID NO: 29804
  source 1..120: mol_type = other DNA

SEQ ID NO: 87698 - DNA, 120 bp, synthetic construct; identical to SEQ ID NO: 79632
  source 1..120: mol_type = other DNA

SEQ ID NO: 87699 - DNA, 120 bp, synthetic construct; identical to SEQ ID NO: 79633
  source 1..120: mol_type = other DNA

SEQ ID NO: 87700 - DNA, 120 bp, synthetic construct; identical to SEQ ID NO: 79634
  source 1..120: mol_type = other DNA

SEQ ID NO: 87701 - DNA, 120 bp, synthetic construct; identical to SEQ ID NO: 29805
  source 1..120: mol_type = other DNA

SEQ ID NO: 87702 - DNA, 120 bp, synthetic construct; identical to SEQ ID NO: 79636
  source 1..120: mol_type = other DNA

SEQ ID NO: 87703 - DNA, 120 bp, synthetic construct; identical to SEQ ID NO: 29806
  source 1..120: mol_type = other DNA

SEQ ID NO: 87704 - DNA, 120 bp, synthetic construct; identical to SEQ ID NO: 79638
  source 1..120: mol_type = other DNA

SEQ ID NO: 87705 - DNA, 120 bp, synthetic construct; identical to SEQ ID NO: 79639
  source 1..120: mol_type = other DNA

SEQ ID NO: 87706 - DNA, 120 bp, synthetic construct; identical to SEQ ID NO: 29807
  source 1..120: mol_type = other DNA

SEQ ID NO: 87707 - DNA, 120 bp, synthetic construct; identical to SEQ ID NO: 29833
  source 1..120: mol_type = other DNA

SEQ ID NO: 87708 - DNA, 120 bp, synthetic construct
  source 1..120: mol_type = other DNA
acagggctgaaccctcaaaatcatgtctgggcagagcatggtggttcacacctgtaatcctagcaccttggggaggccaaggcgggaggatctgtcaaagccaggagttcaagaccagcc

SEQ ID NO: 87709 - DNA, 120 bp, synthetic construct; identical to SEQ ID NO: 79643
  source 1..120: mol_type = other DNA

SEQ ID NO: 87710 - DNA, 120 bp, synthetic construct; identical to SEQ ID NO: 29809
  source 1..120: mol_type = other DNA

SEQ ID NO: 87711 - DNA, 120 bp, synthetic construct; identical to SEQ ID NO: 29810
  source 1..120: mol_type = other DNA

SEQ ID NO: 87712 - DNA, 120 bp, synthetic construct; identical to SEQ ID NO: 29811
  source 1..120: mol_type = other DNA

SEQ ID NO: 87713 - DNA, 120 bp, synthetic construct
  source 1..120: mol_type = other DNA
ccctggccccaggacgggacggggaggaaggcctccctggactcacactgcctgcccacttcatccagcctggtagtgatcagctgcctcccacctgctctgagctacctgggggcgggg

SEQ ID NO: 87714 - DNA, 120 bp, synthetic construct
  source 1..120: mol_type = other DNA
actccagcctgggcaacagagcaagactctgtctcagaaataaataaaataaaataaagagcccccccacctccagggagccccctgtgaataccccagcttgcatcccatcaacccaaa

SEQ ID NO: 87715 - DNA, 120 bp, synthetic construct; identical to SEQ ID NO: 29834
  source 1..120: mol_type = other DNA

SEQ ID NO: 87716 - DNA, 120 bp, synthetic construct; identical to SEQ ID NO: 29835
  source 1..120: mol_type = other DNA

SEQ ID NO: 87717 - DNA, 120 bp, synthetic construct; identical to SEQ ID NO: 29836
  source 1..120: mol_type = other DNA

SEQ ID NO: 87718 - DNA, 120 bp, synthetic construct
  source 1..120: mol_type = other DNA
gagcgggtgggggacactgcaacctccacctcccggtttcaagcaattcttctgtctcagcctcccaagtagctgggattgcagacacgcgccaccacgcccagctaatttttgtatttt

SEQ ID NO: 87719 - DNA, 120 bp, synthetic construct; identical to SEQ ID NO: 2629
  source 1..120: mol_type = other DNA

SEQ ID NO: 87720 - DNA, 120 bp, synthetic construct
  source 1..120: mol_type = other DNA
gttaatactactgtgctgtccacttaaaaatagtgaagatgggccaggggcggtggctcacgcctggaatcccagcactttgggaggccgaggtgcgtggatcgcctgaggtcgggagtt

SEQ ID NO: 87721 - DNA, 120 bp, synthetic construct; identical to SEQ ID NO: 2630
  source 1..120: mol_type = other DNA

SEQ ID NO: 87722 - DNA, 120 bp, synthetic construct
  source 1..120: mol_type = other DNA
tcaatgcctgtcatcccagcactttgggaggccaaggcaaaggatcgcttgaagcctggagttcaagaccagcctaggctacatagcgagaccctgcctttacgaaaaataaaaaagtta

SEQ ID NO: 87723 - DNA, 120 bp, synthetic construct
  source 1..120: mol_type = other DNA
agtttatagactaatagggaaggatcttacaagtcaccattcaaaaagcttttttttttttttgagacagtctcactctgctgcccagactggagtgcagtggcacgatctcggctcact

SEQ ID NO: 87724 - DNA, 120 bp, synthetic construct
  source 1..120: mol_type = other DNA
gatcacctgagttcaggagttcgagaccaccgtgggcaatatggtaaaaccccatctctactaaaatacaaaaaattagctgggcttggtggtggtgcgcctgtagtaccagatacttag

SEQ ID NO: 87725 - DNA, 120 bp, synthetic construct
  source 1..120: mol_type = other DNA
aacttttgtttattgttggaatttagtcttgccatttttcacacataatttttatgtattaaagcaggccttatagtagtagtgatctgagctttgaaagctggctttgaattccctgca

SEQ ID NO: 87726 - DNA, 120 bp, synthetic construct
  source 1..120: mol_type = other DNA
ttgtccaaatccctcggccaaccatgtttgtttaactttttggttgggctatatgtatctttcgaactgtaggttagtgtgcccacaaaaatttctcttgcaaacgtacactgccattcc

SEQ ID NO: 87727 - DNA, 120 bp, synthetic construct
  source 1..120: mol_type = other DNA
tagtggatgatggtgccaataacctggatggggaaagtaagctccctcctggaatgcttcattcacaacctccattttcagcaacatcccatctactggtgcttcctggtcgagatacaa

SEQ ID NO: 87728 - DNA, 120 bp, synthetic construct
  source 1..120: mol_type = other DNA
cctggttcgggagcccccggcagccaagaggaggaggaggagccgggactggtcgagggtgacccgggggacggcgccattgaggacccggtgagggaaggagggcgagcgagcaggccg

SEQ ID NO: 87729 - DNA, 120 bp, synthetic construct
  source 1..120: mol_type = other DNA
agcaagctgcaaggggtttcccctttaatctagaaatgtggagtctcagcccacttaattttgctcactcttaaaagcatttcaaccaaagccattcattagggatttgatttggaggca

SEQ ID NO: 87730 - DNA, 120 bp, synthetic construct; identical to SEQ ID NO: 14226
  source 1..120: mol_type = other DNA

SEQ ID NO: 87731 - DNA, 120 bp, synthetic construct; identical to SEQ ID NO: 14227
  source 1..120: mol_type = other DNA

SEQ ID NO: 87732 - DNA, 120 bp, synthetic construct; identical to SEQ ID NO: 14228
  source 1..120: mol_type = other DNA

SEQ ID NO: 87733 - DNA, 120 bp, synthetic construct
  source 1..120: mol_type = other DNA
ctattctctcttagatcgcagatggctattaattctgccttgtggtagaagtactggtgttgtggaagggaggttgccacttgtgaattaaggagtaggaattacattacaactagcagg

SEQ ID NO: 87734 - DNA, 120 bp, synthetic construct; identical to SEQ ID NO: 16423
  source 1..120: mol_type = other DNA

SEQ ID NO: 87735 - DNA, 120 bp, synthetic construct; identical to SEQ ID NO: 16424
  source 1..120: mol_type = other DNA

SEQ ID NO: 87736 - DNA, 120 bp, synthetic construct
  source 1..120: mol_type = other DNA
ttgcttgaatccgggaggcaaaggttgcagtgagccgagatcatgccattgtactccagcctgggggacaggagtgagacttcgtctcaaaaaaaaaaaaaaatatatatatatatatat

SEQ ID NO: 87737 - DNA, 120 bp, synthetic construct; identical to SEQ ID NO: 16406
  source 1..120: mol_type = other DNA

SEQ ID NO: 87738 - DNA, 120 bp, synthetic construct; identical to SEQ ID NO: 16407
  source 1..120: mol_type = other DNA

SEQ ID NO: 87739 - DNA, 120 bp, synthetic construct; identical to SEQ ID NO: 16408
  source 1..120: mol_type = other DNA

SEQ ID NO: 87740 - DNA, 120 bp, synthetic construct; identical to SEQ ID NO: 16409
  source 1..120: mol_type = other DNA

SEQ ID NO: 87741 - DNA, 120 bp, synthetic construct; identical to SEQ ID NO: 16410
  source 1..120: mol_type = other DNA

SEQ ID NO: 87742 - DNA, 120 bp, synthetic construct
  source 1..120: mol_type = other DNA
gctgtagaacaaagtcctgcactgagccgatggcccagaaattttctttttatttatttatttattttttttttgagacagagtcttactctgtcgctcaggctggagtgtagtggcgcg

SEQ ID NO: 87743 - DNA, 120 bp, synthetic construct; identical to SEQ ID NO: 16411
  source 1..120: mol_type = other DNA

SEQ ID NO: 87744 - DNA, 120 bp, synthetic construct
  source 1..120: mol_type = other DNA
cccagctaatttttgtatttttagtagagacagggtttcaccatgttggccagcttggtctcgaactcctgacctcaggtgatcctgctgcatcgacctcccaaagtactgggattacag

SEQ ID NO: 87745 - DNA, 120 bp, synthetic construct
  source 1..120: mol_type = other DNA
tcccatggatattccatttcaattagacaacccagcctggccggaatccccctgcgttccttcttttcctttgtgtatttttgagacagggtgttgctccgtcacccaggctggagtgta

SEQ ID NO: 87746 - DNA, 120 bp, synthetic construct
  source 1..120: mol_type = other DNA
gtagacaaatcacttgaggccaggagttctagaccagcctggccaacatggtgaaaccccatctctactaaagaaaaaaaaaaattagctgagcatggttgtacatgcttgtaatcccag

SEQ ID NO: 87747 - DNA, 120 bp, synthetic construct; identical to SEQ ID NO: 16412
  source 1..120: mol_type = other DNA

SEQ ID NO: 87748 - DNA, 120 bp, synthetic construct; identical to SEQ ID NO: 16413
  source 1..120: mol_type = other DNA

SEQ ID NO: 87749 - DNA, 120 bp, synthetic construct; identical to SEQ ID NO: 16414
  source 1..120: mol_type = other DNA

SEQ ID NO: 87750 - DNA, 120 bp, synthetic construct; identical to SEQ ID NO: 16415
  source 1..120: mol_type = other DNA

SEQ ID NO: 87751 - DNA, 120 bp, synthetic construct; identical to SEQ ID NO: 16416
  source 1..120: mol_type = other DNA

SEQ ID NO: 87752 - DNA, 120 bp, synthetic construct; identical to SEQ ID NO: 16417
  source 1..120: mol_type = other DNA

SEQ ID NO: 87753 - DNA, 120 bp, synthetic construct; identical to SEQ ID NO: 16418
  source 1..120: mol_type = other DNA

SEQ ID NO: 87754 - DNA, 120 bp, synthetic construct; identical to SEQ ID NO: 16425
  source 1..120: mol_type = other DNA

SEQ ID NO: 87755 - DNA, 120 bp, synthetic construct
  source 1..120: mol_type = other DNA
ttctcctgataatgagcgagttcacgagatctgatggttttatgtgtttggtagttcctcctgcattaattttccttcatgctgccttatgaagaaggtaccttgcttcccctttgcctt

SEQ ID NO: 87756 - DNA, 120 bp, synthetic construct
  source 1..120: mol_type = other DNA
gcacagtgatttagaccttccaaaaacacttttaattatattatctcatttgatcctcaaaacagtcgtgggaaataggcaccccagtcattattatccccattttgcagatgaagaaac

SEQ ID NO: 87757 - DNA, 120 bp, synthetic construct; identical to SEQ ID NO: 238
  source 1..120: mol_type = other DNA

SEQ ID NO: 87758 - DNA, 120 bp, synthetic construct; identical to SEQ ID NO: 8107
  source 1..120: mol_type = other DNA

SEQ ID NO: 87759 - DNA, 120 bp, synthetic construct; identical to SEQ ID NO: 8108
  source 1..120: mol_type = other DNA

SEQ ID NO: 87760 - DNA, 120 bp, synthetic construct; identical to SEQ ID NO: 8109
  source 1..120: mol_type = other DNA

SEQ ID NO: 87761 - DNA, 120 bp, synthetic construct; identical to SEQ ID NO: 8110
  source 1..120: mol_type = other DNA

SEQ ID NO: 87762 - DNA, 120 bp, synthetic construct; identical to SEQ ID NO: 8736
  source 1..120: mol_type = other DNA

SEQ ID NO: 87763 - DNA, 120 bp, synthetic construct; identical to SEQ ID NO: 8552
  source 1..120: mol_type = other DNA

SEQ ID NO: 87764 - DNA, 120 bp, synthetic construct; identical to SEQ ID NO: 8551
  source 1..120: mol_type = other DNA

SEQ ID NO: 87765 - DNA, 120 bp, synthetic construct; identical to SEQ ID NO: 8737
  source 1..120: mol_type = other DNA

SEQ ID NO: 87766 - DNA, 120 bp, synthetic construct; identical to SEQ ID NO: 8738
  source 1..120: mol_type = other DNA

SEQ ID NO: 87767 - DNA, 120 bp, synthetic construct
  source 1..120: mol_type = other DNA
tccaaggaagatatttccaccataacttgtcctagttcaggcttggcattcgggactaagaacacagcactctctcttgccgcaaacccactaacagacataatagacaccacaacatgt

SEQ ID NO: 87768 - DNA, 120 bp, synthetic construct; identical to SEQ ID NO: 8739
  source 1..120: mol_type = other DNA

SEQ ID NO: 87769 - DNA, 120 bp, synthetic construct
  source 1..120: mol_type = other DNA
gtagcaatttgatgttgttatatactgctaattatttccatacatattgtgacatatttaagacaaaagactaacacccttaatatttaaagagctttttcaaaccagtaagaaaataat

SEQ ID NO: 87770 - DNA, 120 bp, synthetic construct; identical to SEQ ID NO: 8740
  source 1..120: mol_type = other DNA

SEQ ID NO: 87771 - DNA, 120 bp, synthetic construct
  source 1..120: mol_type = other DNA
ccacaacgcctggctaattttttgtagttttagtagagacggggtttctctatgttgggcaggctggtctcgtactcctgacctcaggtgatccacccacctcagcctcccaaagtgctg

SEQ ID NO: 87772 - DNA, 120 bp, synthetic construct; identical to SEQ ID NO: 8741
  source 1..120: mol_type = other DNA

SEQ ID NO: 87773 - DNA, 120 bp, synthetic construct
  source 1..120: mol_type = other DNA
caaccctgacccagctctaggtacttgggccagtcactttgcttctttggttttctctctttaaaacaaggatggattagatgggtggttccccacacaagatcccaaaatctccaggag

SEQ ID NO: 87774 - DNA, 120 bp, synthetic construct
  source 1..120: mol_type = other DNA
ggttccagtgactgttctttaccactgactggctaggtgatctggatgaacattccttaacttttctgtaaacaagaatcctaacatctattttaaggactaaaggaaacaagtaaagta

SEQ ID NO: 87775 - DNA, 120 bp, synthetic construct
  source 1..120: mol_type = other DNA
agtagggaagggtatctaaaagtcattctgagagataattaaaaataaataatgtttgctgtcacttatctcttttaccttctttaatatcccttggcatcctctccttcaacattcaac

SEQ ID NO: 87776 - DNA, 120 bp, synthetic construct
  source 1..120: mol_type = other DNA
ttagatccattcctccagcccaaatgggggtggtaagtatacgttgttagaccagtgtaactaacttcaacaactttttgttttgttctgttttgcaaatccacccaagaatgcattaac

SEQ ID NO: 87777 - DNA, 120 bp, synthetic construct; identical to SEQ ID NO: 8742
  source 1..120: mol_type = other DNA

SEQ ID NO: 87778 - DNA, 120 bp, synthetic construct; identical to SEQ ID NO: 8743
  source 1..120: mol_type = other DNA

SEQ ID NO: 87779 - DNA, 120 bp, synthetic construct
  source 1..120: mol_type = other DNA
ctgccttttgataaaaaacagtgtgttttttctaaatcttgttgtgtttgactagagtctgattaaggtaccttttgggaaattaaggttctatagaaattactgggctcaatctagtga

SEQ ID NO: 87780 - DNA, 120 bp, synthetic construct
  source 1..120: mol_type = other DNA
taggctcacctataagcatcaataaacagtaggactgttgtcaggttaacccaggactatgctcactgaaattctacaaacaaaggggttttgcttactttcttcacaatatcccctcgc

SEQ ID NO: 87781 - DNA, 120 bp, synthetic construct
  source 1..120: mol_type = other DNA
gtggctcatgcctgtaatcccagaactttgggaggccaaggcaggcggatcacgagatcaggagttcaagaccagcctggccaatgtggcaaaaccccgtctctacggaaaaaaatgcaa

SEQ ID NO: 87782 - DNA, 120 bp, synthetic construct
  source 1..120: mol_type = other DNA
caggaacaaaatgaggaaccggggagagtacagagaagtgttaactcacactggtaggatgccccttctcactcaaaacagctgagttcatatcccaggcatggccgctgtatcaaaata

SEQ ID NO: 87783 - DNA, 120 bp, synthetic construct
  source 1..120: mol_type = other DNA
tttttaaagcatgaacgcttcctcaagtaaatacatatttatacattatataaatgtctggctattaaaccatgtatgcatatgttaactctaagtaaagcttattatatgttttttagc

SEQ ID NO: 87784 - DNA, 120 bp, synthetic construct; identical to SEQ ID NO: 8744
  source 1..120: mol_type = other DNA

SEQ ID NO: 87785 - DNA, 120 bp, synthetic construct
  source 1..120: mol_type = other DNA
ccatcatcattttatccaagtacccataattcaattgattagaaataaatccctccaagaacacatctgcagttaagttagtgaaaactgaactactgaacagagaagcatggcctgctg

SEQ ID NO: 87786 - DNA, 120 bp, synthetic construct
  source 1..120: mol_type = other DNA
tgaaccaggaccagagcacaagtcttttacctactgacccaacattcctttcactcactacatctgtaaatacgcagttagaaaaacctgatatccaccataatctgcaaacttccataa

SEQ ID NO: 87787 - DNA, 120 bp, synthetic construct; identical to SEQ ID NO: 8458
  source 1..120: mol_type = other DNA

SEQ ID NO: 87788 - DNA, 120 bp, synthetic construct; identical to SEQ ID NO: 8745
  source 1..120: mol_type = other DNA

SEQ ID NO: 87789 - DNA, 120 bp, synthetic construct
  source 1..120: mol_type = other DNA
caagtgcctcaaaaggtcctaaacccttgactcatagccaggatatttctttttttttattattatactttaagttttagggtacatgtgcacaacgtgcaggtttgttacatatgtata

SEQ ID NO: 87790 - DNA, 120 bp, synthetic construct
  source 1..120: mol_type = other DNA
acacggtgaaaccctgtctctactaaaaatacaaaaaaaattagccggatatggtggcgggcacctatagtcccagctactcgggaggctgaggcaggagaatggcgtgaacccaggagg

SEQ ID NO: 87791 - DNA, 120 bp, synthetic construct; identical to SEQ ID NO: 8457
  source 1..120: mol_type = other DNA

SEQ ID NO: 87792 - DNA, 120 bp, synthetic construct
  source 1..120: mol_type = other DNA
ttttttttttttttttttttttcctttcaatcaagacaaatttcaaggaggaagacagatgtttctccacttcgtttttatttaaatgtaccacttgggatttgaagcttccgcacttct

SEQ ID NO: 87793 - DNA, 120 bp, synthetic construct; identical to SEQ ID NO: 8455
  source 1..120: mol_type = other DNA

SEQ ID NO: 87794 - DNA, 120 bp, synthetic construct; identical to SEQ ID NO: 8746
  source 1..120: mol_type = other DNA

SEQ ID NO: 87795 - DNA, 120 bp, synthetic construct; identical to SEQ ID NO: 8032
  source 1..120: mol_type = other DNA

SEQ ID NO: 87796 - DNA, 120 bp, synthetic construct
  source 1..120: mol_type = other DNA
gtagtgtatccttcatctcaaatatttaacattttttgaaatttactctcttagcaattttgaaatgtacaataccctattattaactatattcaccactctatgcaatatatctcaaac

SEQ ID NO: 87797 - DNA, 120 bp, synthetic construct; identical to SEQ ID NO: 112
  source 1..120: mol_type = other DNA

SEQ ID NO: 87798 - DNA, 120 bp, synthetic construct
  source 1..120: mol_type = other DNA
ccagctagtggcgcaatgccccataaagaggccacttattctctctggcctctactattggtaaatgggtataataatatccacgctgccaatcctgagaaatttcaggtaatgggaagc

SEQ ID NO: 87799 - DNA, 120 bp, synthetic construct; identical to SEQ ID NO: 8747
  source 1..120: mol_type = other DNA

SEQ ID NO: 87800 - DNA, 120 bp, synthetic construct
  source 1..120: mol_type = other DNA
gtcttgaactcctgacctcgtgattcgcccaactcagcctcctgaagtgctgggattaccagcatgagccaccatgcctggtctaccccatatacattaactagccactcactgaaaagt

SEQ ID NO: 87801 - DNA, 120 bp, synthetic construct; identical to SEQ ID NO: 8453
  source 1..120: mol_type = other DNA

SEQ ID NO: 87802 - DNA, 120 bp, synthetic construct
  source 1..120: mol_type = other DNA
tgaaatacataaattttttttaaattttgcttttaagttttgggatacatgtgcagaatgtgcaggtttgtttcataggtatacatgtgccatggtggtttgctgcacctatcaacccgt

SEQ ID NO: 87803 - DNA, 120 bp, synthetic construct
  source 1..120: mol_type = other DNA
acccccacgctggccctgtaaaaggaatttggcttcaactttcttttcttaatccactaagcaatcgcatgaataaaaagataatcacatgccctgcatgcctgatagaatttttataaa

SEQ ID NO: 87804 - DNA, 120 bp, synthetic construct
  source 1..120: mol_type = other DNA
accacagagtgggtagcttcaaagtatgcatacaactctgctcaaatccttaaataattcctgactatgcatgagcaagataagattcagaaacccaagagaaagtaagagctggacggc

SEQ ID NO: 87805 - DNA, 120 bp, synthetic construct
  source 1..120: mol_type = other DNA
aagaaagagaaagtaatttaacagttgatatttttccctgtctatttctttgatctgacaatgcccctgtgcctccctgaatgcactcacaagaaggtgaaggaaagggggaaatgctga

SEQ ID NO: 87806 - DNA, 120 bp, synthetic construct
  source 1..120: mol_type = other DNA
gtctctatctcctgacctcatgatctgcccgcctcggcctcccaaagtgctgggattacaggcgtgagccaccacgcccagctgaggacataggtttttttatgccagatagacttaagt

SEQ ID NO: 87807 - DNA, 120 bp, synthetic construct; identical to SEQ ID NO: 8748
  source 1..120: mol_type = other DNA

SEQ ID NO: 87808 - DNA, 120 bp, synthetic construct; identical to SEQ ID NO: 8128
  source 1..120: mol_type = other DNA

SEQ ID NO: 87809 - DNA, 120 bp, synthetic construct
  source 1..120: mol_type = other DNA
aggatctaagcagtgcaccaaaagtcctctgattttactcttttgtcccacagtacttgttcctttgtctgagtgtccatagttattatctgtgcccctacactgggatattacaaactg

SEQ ID NO: 87810 - DNA, 120 bp, synthetic construct; identical to SEQ ID NO: 8447
  source 1..120: mol_type = other DNA

SEQ ID NO: 87811 - DNA, 120 bp, synthetic construct; identical to SEQ ID NO: 8129
  source 1..120: mol_type = other DNA

SEQ ID NO: 87812 - DNA, 120 bp, synthetic construct; identical to SEQ ID NO: 8749
  source 1..120: mol_type = other DNA

SEQ ID NO: 87813 - DNA, 120 bp, synthetic construct; identical to SEQ ID NO: 8130
  source 1..120: mol_type = other DNA

SEQ ID NO: 87814 - DNA, 120 bp, synthetic construct; identical to SEQ ID NO: 8131
  source 1..120: mol_type = other DNA

SEQ ID NO: 87815 - DNA, 120 bp, synthetic construct; identical to SEQ ID NO: 8132
  source 1..120: mol_type = other DNA

SEQ ID NO: 87816 - DNA, 120 bp, synthetic construct
  source 1..120: mol_type = other DNA
tgtctggtagaataacaggccaaatcaacctaatagtcaccctgaggtatagaattatccttcataccccaggaagctaagcagcattatggacatgggaagaaaggggagtaatagcta

SEQ ID NO: 87817 - DNA, 120 bp, synthetic construct
  source 1..120: mol_type = other DNA
tccaagtttccttgattgagacaacttttacattatactcatacaatcacagaatttcagcagtgatctcagaaaccaaatggtctgaacccctatagcactgagaaggacaccaaagct

SEQ ID NO: 87818 - DNA, 120 bp, synthetic construct; identical to SEQ ID NO: 235
  source 1..120: mol_type = other DNA

SEQ ID NO: 87819 - DNA, 120 bp, synthetic construct
  source 1..120: mol_type = other DNA
aaccttcagattcaagaaatttaatttctatccaattaagtaatcatttctaaaatatttctaaaagatgatcaccagcctctgcttgaatacaagcatgtagcatggtgccggataaat

SEQ ID NO: 87820 - DNA, 120 bp, synthetic construct; identical to SEQ ID NO: 8441
  source 1..120: mol_type = other DNA

SEQ ID NO: 87821 - DNA, 120 bp, synthetic construct
  source 1..120: mol_type = other DNA
attgttgctccctatcaagtatggaaaaataagttttaacctaagatatatttaagaaatcagtaaaaccagagattgacaaagtacagtttgcaagtctaatttggaccactgcctgtt

SEQ ID NO: 87822 - DNA, 120 bp, synthetic construct; identical to SEQ ID NO: 206
  source 1..120: mol_type = other DNA

SEQ ID NO: 87823 - DNA, 120 bp, synthetic construct; identical to SEQ ID NO: 8529
  source 1..120: mol_type = other DNA

SEQ ID NO: 87824 - DNA, 120 bp, synthetic construct; identical to SEQ ID NO: 8528
  source 1..120: mol_type = other DNA

SEQ ID NO: 87825 - DNA, 120 bp, synthetic construct; identical to SEQ ID NO: 205
  source 1..120: mol_type = other DNA

SEQ ID NO: 87826 - DNA, 120 bp, synthetic construct; identical to SEQ ID NO: 8750
  source 1..120: mol_type = other DNA

SEQ ID NO: 87827 - DNA, 120 bp, synthetic construct
  source 1..120: mol_type = other DNA
taatcacagggcatggtaatactaagagacgccctaatggatctcctgtattccatgaatactctttcttacctccgttctggagtagtagactgatttcatcttgatagcctgggtctt

SEQ ID NO: 87828 - DNA, 120 bp, synthetic construct
  source 1..120: mol_type = other DNA
ctaattgaaccatctagtagctggttccctccaaagtttccctcgggatagctggcactctcgcaaaaaccccactcttggtaccaatttactgtattagtccattttcacgctgctgat

SEQ ID NO: 87829 - DNA, 120 bp, synthetic construct
  source 1..120: mol_type = other DNA
tttttttttttgagatggagtattgctttgtcatccaggctggagtgcagggcgcaatctcggttcactgcaagttccacctcccgggttcacgccattcttctgcctcagcctcctgag

SEQ ID NO: 87830 - DNA, 120 bp, synthetic construct; identical to SEQ ID NO: 8135
  source 1..120: mol_type = other DNA

SEQ ID NO: 87831 - DNA, 120 bp, synthetic construct; identical to SEQ ID NO: 8136
  source 1..120: mol_type = other DNA

SEQ ID NO: 87832 - DNA, 120 bp, synthetic construct; identical to SEQ ID NO: 8137
  source 1..120: mol_type = other DNA

SEQ ID NO: 87833 - DNA, 120 bp, synthetic construct
  source 1..120: mol_type = other DNA
attgtgccacgcatagtctctcatatatcatctatcagctcatcaaaaagtgctcactgattaacagaggatcccctcctcagtttcagaattctctagctttaagttaggggagggtta

SEQ ID NO: 87834 - DNA, 120 bp, synthetic construct; identical to SEQ ID NO: 8751
  source 1..120: mol_type = other DNA

SEQ ID NO: 87835 - DNA, 120 bp, synthetic construct
  source 1..120: mol_type = other DNA
tcaaatagtacttgttacatatcaatatgtgtgtgtgtgtgtgtgtgtgtgtgtgtggtatatatatatatatcgcattgtgcagatgtttaaaagtagttacatagactagttcttgct

SEQ ID NO: 87836 - DNA, 120 bp, synthetic construct; identical to SEQ ID NO: 8139
  source 1..120: mol_type = other DNA

SEQ ID NO: 87837 - DNA, 120 bp, synthetic construct
  source 1..120: mol_type = other DNA
gcatttcagtgaaatagggtgcctttgacaaatcattaagaatgagttctacattaaaaaggggaagagagggtgatagctgaggaggcagcataggcaagaacatccagcatgaaagaa

SEQ ID NO: 87838 - DNA, 120 bp, synthetic construct; identical to SEQ ID NO: 8752
  source 1..120: mol_type = other DNA

SEQ ID NO: 87839 - DNA, 120 bp, synthetic construct; identical to SEQ ID NO: 8141
  source 1..120: mol_type = other DNA

SEQ ID NO: 87840 - DNA, 120 bp, synthetic construct; identical to SEQ ID NO: 8753
  source 1..120: mol_type = other DNA

SEQ ID NO: 87841 - DNA, 120 bp, synthetic construct; identical to SEQ ID NO: 234
  source 1..120: mol_type = other DNA

SEQ ID NO: 87842 - DNA, 120 bp, synthetic construct
  source 1..120: mol_type = other DNA
ttttaggttttatgccctggacttcatatttttctgatttctgttttgagattaaattctcatgtaaatagaaaaatacttattatttctcatcaggccaagtttgttatcagcttgagt

SEQ ID NO: 87843 - DNA, 120 bp, synthetic construct
  source 1..120: mol_type = other DNA
aggaggactggttaatcccatttgaaagcatccctctctgcagcccgcaccatcttccagtgacactgtaaggatactgctttgagatgtatcaaaggctttaagtcaatgtattttcta

SEQ ID NO: 87844 - DNA, 120 bp, synthetic construct; identical to SEQ ID NO: 8142
  source 1..120: mol_type = other DNA

SEQ ID NO: 87845 - DNA, 120 bp, synthetic construct
  source 1..120: mol_type = other DNA
ctagagttaaactcacagttattgatttctaacacaggcacagaatgacctgttttctccaaggggctcaatcatgtttttaagaatcctctctgtaccatataagatcctgcagacaaa

SEQ ID NO: 87846 - DNA, 120 bp, synthetic construct
  source 1..120: mol_type = other DNA
tgtttctaaattaacactaactaagcttatgctgtttctaaattaacacaactaatctaaatcttaatgctgcctctcatactaataaagtatttgggcatatttccttcatggccttat

SEQ ID NO: 87847 - DNA, 120 bp, synthetic construct; identical to SEQ ID NO: 8754
  source 1..120: mol_type = other DNA

SEQ ID NO: 87848 - DNA, 120 bp, synthetic construct
  source 1..120: mol_type = other DNA
tgtgacctccaaacccatgggtttcccatctctgttcttacccaggaagtcctgatcatgtcatggccacataggtgtagtagaaaaaaaccccactgatacaactgtcattgtgaaagt

SEQ ID NO: 87849 - DNA, 120 bp, synthetic construct
  source 1..120: mol_type = other DNA
ataatccagcttagacacagggtgcggtagctgtcatgtttctctatgtgtgctgagtgtcatgtctgcaccttacagggatagctgagtcttcatcctcctcagctcctatctgtccag

SEQ ID NO: 87850 - DNA, 120 bp, synthetic construct; identical to SEQ ID NO: 116
  source 1..120: mol_type = other DNA

SEQ ID NO: 87851 - DNA, 120 bp, synthetic construct; identical to SEQ ID NO: 8755
  source 1..120: mol_type = other DNA

SEQ ID NO: 87852 - DNA, 120 bp, synthetic construct
  source 1..120: mol_type = other DNA
tttaggtcggcttggtggagagctgagttcaagtcctggatatccttgttaagcttctgtctcattgatctgtctaatattgacagtggggtgttaaagtctcccatgatgattgtgtgg

SEQ ID NO: 87853 - DNA, 120 bp, synthetic construct
  source 1..120: mol_type = other DNA
cccctttctgtgtccatgtgttctcattgttcaattcccacctgtgagtaagaacatgcggtatttggttttttgtccttgcaatagtttgctgagaatgatggtttccagcttcatcca

SEQ ID NO: 87854 - DNA, 120 bp, synthetic construct
  source 1..120: mol_type = other DNA
ataccgtttcttgcacttgatcgaattggctactgaagcttgtgcatgcatcacgtagttctcgtgccatggttttcagctccatcagctcatttaaggtcttctctacactgttcattc

SEQ ID NO: 87855 - DNA, 120 bp, synthetic construct; identical to SEQ ID NO: 8756
  source 1..120: mol_type = other DNA

SEQ ID NO: 87856 - DNA, 120 bp, synthetic construct
  source 1..120: mol_type = other DNA
tctgggtatttaatgagaaaagcctaatattgaagtatctctcctatgaggtgttagaactatttgcctacaatttattggggaaaaaattgctcatttgtgtacataaacctaggacag

SEQ ID NO: 87857 - DNA, 120 bp, synthetic construct
  source 1..120: mol_type = other DNA
ttttctacctggccctagtctatcccaacataaaggcaataatttgttacctcactaatggatctctcctttttcttttcaaactcttccttatgttagccatgaaatctagctggggct

SEQ ID NO: 87858 - DNA, 120 bp, synthetic construct
  source 1..120: mol_type = other DNA
ttcaggcctcctgaagaatatctctcacagtgtcctattctcatgctgaggagcctgaagtctctgtgtgaggattagacagtggattgttatgtgtgtaggagaaccagcttcatatgt

SEQ ID NO: 87859 - DNA, 120 bp, synthetic construct
  source 1..120: mol_type = other DNA
ctctattcctagtctccagccatgcctgtggcaacctgagcccgctctcagcacattggatccaggcagatgcaaaaaattcacagaactatgatttggactcaagggtttgtagatttc

SEQ ID NO: 87860 - DNA, 120 bp, synthetic construct
  source 1..120: mol_type = other DNA
ctctctctctgtgtgtgtgtgtgtgtgtgtgcgtgtgtgtgtgtgtgtgtgtgtgtccatctgtctctttcattcttttccatttggccctgttctgtcccaacatgaaggcaataattt

SEQ ID NO: 87861 - DNA, 120 bp, synthetic construct
  source 1..120: mol_type = other DNA
gggtatttgctttaaattgattggaaaaatatggcataactgtttgcacaaacttgggacaaatgatattgggataacgatctactagaatagggacattttacccacagtttctgggag

SEQ ID NO: 87862 - DNA, 120 bp, synthetic construct
  source 1..120: mol_type = other DNA
aacataaaggcagtaatttgttacctcattaatggatctgtcctttttcttttcaaactcttccttaacgttagccatgaaatctagctggggctgtgcggtttctgattccccctggct

SEQ ID NO: 87863 - DNA, 120 bp, synthetic construct; identical to SEQ ID NO: 87858
  source 1..120: mol_type = other DNA

SEQ ID NO: 87864 - DNA, 120 bp, synthetic construct
  source 1..120: mol_type = other DNA
gcaaggctctattcctagtctccagccatgcctgtggcaacctgagcccgctctcagcacattggacccaggcagatgcaaaaaattcacagaactatgatttggactcaagggtttgta

SEQ ID NO: 87865 - DNA, 120 bp, synthetic construct; identical to SEQ ID NO: 87860
  source 1..120: mol_type = other DNA

SEQ ID NO: 87866 - DNA, 120 bp, synthetic construct; identical to SEQ ID NO: 87861
  source 1..120: mol_type = other DNA

SEQ ID NO: 87867 - DNA, 120 bp, synthetic construct
  source 1..120: mol_type = other DNA
ctgttctatcccaacataaaggcaataatttgttacctcattaatggatctgtcctttttcttttcaaactcttccttaacgttagccatgaaatctagctggggctgtgtggtttctga

SEQ ID NO: 87868 - DNA, 120 bp, synthetic construct
  source 1..120: mol_type = other DNA
agcttcatatatctgtccatgtctgaacttattgcagaaattgaaaagtaccaagaagtggaagaagaccaagacccatcatgccccaggtaactttgagcaattatggatgcttaattc

SEQ ID NO: 87869 - DNA, 120 bp, synthetic construct; identical to SEQ ID NO: 87864
  source 1..120: mol_type = other DNA

SEQ ID NO: 87870 - DNA, 120 bp, synthetic construct
  source 1..120: mol_type = other DNA
tctctctctctctgtgtgtgtgtgtgtgtgtgtgtgcgtgtgtgtgtgtgtgtgtgtgtgtccatctgtctttctctttcattcttttccatttggccctgttctgtcccaacatgaagg

SEQ ID NO: 87871 - DNA, 120 bp, synthetic construct; identical to SEQ ID NO: 87861
  source 1..120: mol_type = other DNA

SEQ ID NO: 87872 - DNA, 120 bp, synthetic construct; identical to SEQ ID NO: 87862
  source 1..120: mol_type = other DNA

SEQ ID NO: 87873 - DNA, 120 bp, synthetic construct; identical to SEQ ID NO: 87868
  source 1..120: mol_type = other DNA

SEQ ID NO: 87874 - DNA, 120 bp, synthetic construct; identical to SEQ ID NO: 87864
  source 1..120: mol_type = other DNA

SEQ ID NO: 87875 - DNA, 120 bp, synthetic construct; identical to SEQ ID NO: 87870
  source 1..120: mol_type = other DNA

SEQ ID NO: 87876 - DNA, 120 bp, synthetic construct; identical to SEQ ID NO: 87861
  source 1..120: mol_type = other DNA

SEQ ID NO: 87877 - DNA, 120 bp, synthetic construct; identical to SEQ ID NO: 87862
  source 1..120: mol_type = other DNA

SEQ ID NO: 87878 - DNA, 120 bp, synthetic construct; identical to SEQ ID NO: 87868
  source 1..120: mol_type = other DNA

SEQ ID NO: 87879 - DNA, 120 bp, synthetic construct; identical to SEQ ID NO: 87859
  source 1..120: mol_type = other DNA

SEQ ID NO: 87880 - DNA, 120 bp, synthetic construct; identical to SEQ ID NO: 87870
  source 1..120: mol_type = other DNA

SEQ ID NO: 87881 - DNA, 120 bp, synthetic construct; identical to SEQ ID NO: 87861
  source 1..120: mol_type = other DNA

SEQ ID NO: 87882 - DNA, 120 bp, synthetic construct; identical to SEQ ID NO: 87862
  source 1..120: mol_type = other DNA

SEQ ID NO: 87883 - DNA, 120 bp, synthetic construct; identical to SEQ ID NO: 87858
  source 1..120: mol_type = other DNA

SEQ ID NO: 87884 - DNA, 120 bp, synthetic construct; identical to SEQ ID NO: 87864
  source 1..120: mol_type = other DNA

SEQ ID NO: 87885 - DNA, 120 bp, synthetic construct
  source 1..120: mol_type = other DNA
aaagacagatagacacacacacacacacacacacacacacacacacacacacacacagagagagagagagagaacgagctcagtgaattgtccaggtgacgcactgatgagggagtaaca

SEQ ID NO: 87886 - DNA, 120 bp, synthetic construct
  source 1..120: mol_type = other DNA
ctaaatattgcagtttttctcctagaaatcatttgagggtatttgctttaaattgattggaaaaatgtggcataactgtttgcacaaacttgggacaaatgatattgggataacgatcta

SEQ ID NO: 87887 - DNA, 120 bp, synthetic construct
  source 1..120: mol_type = other DNA
aatttgttccctcattaatggatctgtcctttttcttttcaaactcttccttaacgttagccatgaaatctagctggggctgtgcggtttctgattccccctggcttattctttactttt

SEQ ID NO: 87888 - DNA, 120 bp, synthetic construct
  source 1..120: mol_type = other DNA
gtccctgtgtgaggattagacagtggattgttatgtgtgtaggagaaccagcttcatatgtctgtccatgtctgaacttattgcagaaattgaaaagtaccaagaagtggaagaagacca

SEQ ID NO: 87889 - DNA, 120 bp, synthetic construct
  source 1..120: mol_type = other DNA
caaggctctattcctagtctccagccatgcctgtggcaacctgagcccgctctcagcacattggacccaggcagatgtaaaaaattcacagaactatgatttggactcaagggtttgtgg

SEQ ID NO: 87890 - DNA, 120 bp, synthetic construct
  source 1..120: mol_type = other DNA
tgtgtgtgtgtgtgtgtgtgtgtgtctgtctttctctttcattcttttccatttggccctgttctgtcccaacatgaaggcaataatttgttacctcattaatggatctatccttttagt

SEQ ID NO: 87891 - DNA, 120 bp, synthetic construct
  source 1..120: mol_type = other DNA
atggcataactgtttgcacaaacttgggacaaatgatattgggataacgatctactagaatagggacattttacccacagtttctgggagaaaaaccgaggaatttctatcatgaccagc

SEQ ID NO: 87892 - DNA, 120 bp, synthetic construct
  source 1..120: mol_type = other DNA
tgactcatgccagccctacagaagtgccttttacatattggagcaacagtgtgttggcttggctgttgacatggatggtgagtacctttctatgaaggtgataaggatccactgagtctt

SEQ ID NO: 87893 - DNA, 120 bp, synthetic construct
  source 1..120: mol_type = other DNA
gacatggctgttggttttcattgcagtagatgtttaggtttccatttcttcctccccttaacatttactaacttactataggttgaccatacctcaaaggctgtatggcaactgcatgga

SEQ ID NO: 87894 - DNA, 120 bp, synthetic construct
  source 1..120: mol_type = other DNA
gcaaaaaattcacagaactatgatttggactcaagggtttgtggatttcctccttcattctaatttcagtgtctaaaattcttgcatccatgaacgagctgggcatttgatgagacaggg

SEQ ID NO: 87895 - DNA, 120 bp, synthetic construct
  source 1..120: mol_type = other DNA
agtgtgtcacctggacaattcactgagctcgttctctctctctctctgtgtgtgtgtgtgtgtgtgtgtgtgtgtgtgtgtgtgtgtgtctatctgtctttctctttcattcttttccat

SEQ ID NO: 87896 - DNA, 120 bp, synthetic construct
  source 1..120: mol_type = other DNA
cagcataagaataggacactgtgagagatatatttcaggaggcctgaaggctggtcatgatagaaattcctcggtttttctcccagaaactgtgggtaaaatgtccctattctagtagat

SEQ ID NO: 87897 - DNA, 120 bp, synthetic construct; identical to SEQ ID NO: 87892
  source 1..120: mol_type = other DNA

SEQ ID NO: 87898 - DNA, 120 bp, synthetic construct; identical to SEQ ID NO: 87893
  source 1..120: mol_type = other DNA

SEQ ID NO: 87899 - DNA, 120 bp, synthetic construct; identical to SEQ ID NO: 87894
  source 1..120: mol_type = other DNA

SEQ ID NO: 87900 - DNA, 120 bp, synthetic construct
  source 1..120: mol_type = other DNA
ctttctctttcattcttttccatttggccctgttctgtcccaacatgaaggcaataatttgttacctcattaatggatctatccttttagtttcttaaccacttccctatgctacgcatg

SEQ ID NO: 87901 - DNA, 120 bp, synthetic construct; identical to SEQ ID NO: 87891
  source 1..120: mol_type = other DNA

SEQ ID NO: 87902 - DNA, 120 bp, synthetic construct; identical to SEQ ID NO: 87892
  source 1..120: mol_type = other DNA

SEQ ID NO: 87903 - DNA, 120 bp, synthetic construct; identical to SEQ ID NO: 87893
  source 1..120: mol_type = other DNA

SEQ ID NO: 87904 - DNA, 120 bp, synthetic construct; identical to SEQ ID NO: 87894
  source 1..120: mol_type = other DNA

SEQ ID NO: 87905 - DNA, 120 bp, synthetic construct; identical to SEQ ID NO: 87895
  source 1..120: mol_type = other DNA

SEQ ID NO: 87906 - DNA, 120 bp, synthetic construct; identical to SEQ ID NO: 87861
  source 1..120: mol_type = other DNA

SEQ ID NO: 87907 - DNA, 120 bp, synthetic construct
  source 1..120: mol_type = other DNA
ctacctggccctgttctatcccaacataaaggcaataatttgttacctcattaatggatctgtcctttttcttttcaaactcttccttaacgttagccatgaaatctagctggggctgtg

SEQ ID NO: 87908 - DNA, 120 bp, synthetic construct; identical to SEQ ID NO: 87888
  source 1..120: mol_type = other DNA

SEQ ID NO: 87909 - DNA, 120 bp, synthetic construct; identical to SEQ ID NO: 87889
  source 1..120: mol_type = other DNA

SEQ ID NO: 87910 - DNA, 120 bp, synthetic construct; identical to SEQ ID NO: 87900
  source 1..120: mol_type = other DNA

SEQ ID NO: 87911 - DNA, 120 bp, synthetic construct
  source 1..120: mol_type = other DNA
tttctgcaataaattcagacatggacagacacattaagctgattcccctacacacataacaatccactgtctaatcctcacacagggacctcaggctcctcagcataagaataggacact

SEQ ID NO: 87912 - DNA, 120 bp, synthetic construct
  source 1..120: mol_type = other DNA
caagggatgggtcagtgagcaaggctctctccctagtctcaggccatgcctgtggagccctaatcctactctcatgacactggacctgggcagatgtgacaaattcacacaactctgatt

SEQ ID NO: 87913 - DNA, 120 bp, synthetic construct
  source 1..120: mol_type = other DNA
gctgagctcactttctcctctctctctctctctctctctctctccctctccctgtctttctctttcattcttttctacctggccctggtctatcccaacataaaggcaataattcattac

SEQ ID NO: 87914 - DNA, 120 bp, synthetic construct
  source 1..120: mol_type = other DNA
tcatctggggcattttctttgaactgatgggaacaataaggcataactgtttgcacaaacttgggataagtgattttgggataacgatctaccagaatggggatatttcacccttggttc

SEQ ID NO: 87915 - DNA, 120 bp, synthetic construct
  source 1..120: mol_type = other DNA
tcttaaccacttccttatgctacccatgaaacctagttggggctctgttgtgtgtgatttcccctggcttattctttactttttcctccttttccaggctcagcagggagctgctggagg

SEQ ID NO: 87916 - DNA, 120 bp, synthetic construct; identical to SEQ ID NO: 87911
  source 1..120: mol_type = other DNA

SEQ ID NO: 87917 - DNA, 120 bp, synthetic construct
  source 1..120: mol_type = other DNA
cacagggaggacctataggcacatgtaggttgaatgaaactctagttccacttggcagcccagacaagggatgggtcagtgagcaaggctctctccctagtctcaggccatgcctgtgga

SEQ ID NO: 87918 - DNA, 120 bp, synthetic construct; identical to SEQ ID NO: 87913
  source 1..120: mol_type = other DNA

SEQ ID NO: 87919 - DNA, 120 bp, synthetic construct; identical to SEQ ID NO: 87914
  source 1..120: mol_type = other DNA

SEQ ID NO: 87920 - DNA, 120 bp, synthetic construct; identical to SEQ ID NO: 87915
  source 1..120: mol_type = other DNA

SEQ ID NO: 87921 - DNA, 120 bp, synthetic construct
  source 1..120: mol_type = other DNA
aggggaagaagatcaaaacccaccatgccccaggtgactttcagcaattgtggatgcttaattctgtgttaacacctggaggcaacagattcagggaaaccagagtgtgtttgatgtcat

SEQ ID NO: 87922 - DNA, 120 bp, synthetic construct
  source 1..120: mol_type = other DNA
ggagccctaatcctactctcatgacactggacctgggcagatgtgacaaattcacacaactctgattttgtctcaattttgtagatcttgtagatttcatccttcactctaatttcagcg

SEQ ID NO: 87923 - DNA, 120 bp, synthetic construct; identical to SEQ ID NO: 87913
  source 1..120: mol_type = other DNA

SEQ ID NO: 87924 - DNA, 120 bp, synthetic construct; identical to SEQ ID NO: 87914
  source 1..120: mol_type = other DNA

SEQ ID NO: 87925 - DNA, 120 bp, synthetic construct; identical to SEQ ID NO: 87915
  source 1..120: mol_type = other DNA

SEQ ID NO: 87926 - DNA, 120 bp, synthetic construct; identical to SEQ ID NO: 87921
  source 1..120: mol_type = other DNA

SEQ ID NO: 87927 - DNA, 120 bp, synthetic construct; identical to SEQ ID NO: 8757
  source 1..120: mol_type = other DNA

SEQ ID NO: 87928 - DNA, 120 bp, synthetic construct
  source 1..120: mol_type = other DNA
accactttcccaagtacttcattgtaagtaaggtgtctctaaaagggacagatctcctagacccctccttaaccaagtaaccagtcctgatatcataatggtgatggacaaactagacct

SEQ ID NO: 87929 - DNA, 120 bp, synthetic construct
  source 1..120: mol_type = other DNA
ggccaaggcgggcggatcacgaggtcaggaaatcgagaccatcctggctaacacggtaaaaccccatctctactaaaagtaaaaaaaattagccgagcgtgttggcgggcgcctgtagtc

SEQ ID NO: 87930 - DNA, 120 bp, synthetic construct; identical to SEQ ID NO: 8758
  source 1..120: mol_type = other DNA

SEQ ID NO: 87931 - DNA, 120 bp, synthetic construct; identical to SEQ ID NO: 8759
  source 1..120: mol_type = other DNA

SEQ ID NO: 87932 - DNA, 120 bp, synthetic construct; identical to SEQ ID NO: 8522
  source 1..120: mol_type = other DNA

SEQ ID NO: 87933 - DNA, 120 bp, synthetic construct
  source 1..120: mol_type = other DNA
tctgaaggcaccatgaagatgaaggccacctcttctgggccaggtcctcccgttgcaggtgaaccgagttctggcctccattggagaccaaaggagatgactttgacctggctcctagtg

SEQ ID NO: 87934 - DNA, 120 bp, synthetic construct; identical to SEQ ID NO: 22786
  source 1..120: mol_type = other DNA

SEQ ID NO: 87935 - DNA, 120 bp, synthetic construct
  source 1..120: mol_type = other DNA
ttccagaatgtcatgtggttggactcatgcactatgtggccttttctgattgactcctttcgcctggtaatagcatttatatttcctctgtgtgttttcatggcttgacagctcatttct

SEQ ID NO: 87936 - DNA, 120 bp, synthetic construct; identical to SEQ ID NO: 22787
  source 1..120: mol_type = other DNA

SEQ ID NO: 87937 - DNA, 120 bp, synthetic construct; identical to SEQ ID NO: 22788
  source 1..120: mol_type = other DNA

SEQ ID NO: 87938 - DNA, 120 bp, synthetic construct
  source 1..120: mol_type = other DNA
cggaggagcctcccatgtccagggtaaggtggggctcctcccctttctcataggctggtagggacacattttgcatggctggagggggggtacccgtataccacgcatgtttattcacgt

SEQ ID NO: 87939 - DNA, 120 bp, synthetic construct
  source 1..120: mol_type = other DNA
cacagggacttgcctcactgtgtcccaaaaacaaatcgcagccagcttttccagaaatagaaaattctgccgtctgaggttttatacttcaggttagttagtttttggaaggaagaacat

SEQ ID NO: 87940 - DNA, 120 bp, synthetic construct; identical to SEQ ID NO: 22789
  source 1..120: mol_type = other DNA

SEQ ID NO: 87941 - DNA, 120 bp, synthetic construct
  source 1..120: mol_type = other DNA
gactgtgggccacgagcaggaggaaggtggcaagtggccttatgccgggaccgcagaggccatcaaggccctgggtgccaagcactgcgtgaaggaagtggtcatatccttcctggtagc

SEQ ID NO: 87942 - DNA, 120 bp, synthetic construct
  source 1..120: mol_type = other DNA
aggtggaaactgctaccgtgagctgtaacgaaacactgttaaaaacacatttcacagccaggtgcagtggctcatgcctgtaatcccagcactttgggcagctgaggcaggcagaacacc

SEQ ID NO: 87943 - DNA, 120 bp, synthetic construct
  source 1..120: mol_type = other DNA
gtgctggcagggcgagagccgcacttgcgtgggtgaacatcagtgaggcgcactcgcgatggccgctcactaccgagttctgtcagccgaacaaggatgaggatctatcggaatcctctg

SEQ ID NO: 87944 - DNA, 120 bp, synthetic construct
  source 1..120: mol_type = other DNA
ttcctatgcttatttctgtttaaaaaacaggaaaatatgttcacatcaaacgcgcatatgtgcagccatgcccatgtcccttgctgcagctgactgagggtctggagctgtgcctaggaa

SEQ ID NO: 87945 - DNA, 120 bp, synthetic construct; identical to SEQ ID NO: 22790
  source 1..120: mol_type = other DNA

SEQ ID NO: 87946 - DNA, 120 bp, synthetic construct
  source 1..120: mol_type = other DNA
ccacacggtggcgtccttgagttccagatcctctttctgttctctgtgtctcctctctctctttgcacattcatggaggttctctgggcaccgcccccatggccctgcctgagaggtgga

SEQ ID NO: 87947 - DNA, 120 bp, synthetic construct; identical to SEQ ID NO: 22791
  source 1..120: mol_type = other DNA

SEQ ID NO: 87948 - DNA, 120 bp, synthetic construct
  source 1..120: mol_type = other DNA
taatgctgccaaggctcaggagtgccttccttccagtactcacagaaggactgaaaatggcgaccggatcgcttcccactgagtcaggctgctcataccttggtcttaagcaaaggtggt

SEQ ID NO: 87949 - DNA, 120 bp, synthetic construct; identical to SEQ ID NO: 22792
  source 1..120: mol_type = other DNA

SEQ ID NO: 87950 - DNA, 120 bp, synthetic construct
  source 1..120: mol_type = other DNA
tttttgaacagcttagagaaagcatgtattttattttatttttactttttgtcttttgagacagcgcccagtctggagtgcaatggcgcgatcttggctcactgcggcctccgcctcctg

SEQ ID NO: 87951 - DNA, 120 bp, synthetic construct
  source 1..120: mol_type = other DNA
ttaagacgagtggccatttaggaggatgtggaccctggacgctcgtggtgagttaaggatgagacggaggtaaggtaagaagcgccggactgagccgccccgaggcagccttgctctgcg

SEQ ID NO: 87952 - DNA, 120 bp, synthetic construct
  source 1..120: mol_type = other DNA
acgaggacagtcaaatgtgccaagcttgtctttggttgtaactggtaatgtcccatgtctgttattctagttccccactatcttgcaaggattggcagtaaagtcctagtgatggacaac

SEQ ID NO: 87953 - DNA, 120 bp, synthetic construct
  source 1..120: mol_type = other DNA
actcagacctgcaccagctctgcgtgggccacacggaggaggagacagctcctcccctctgcagtgcccttgggaatagtcatcatgagagaggcttgggtctccatcatggtagggcat

SEQ ID NO: 87954 - DNA, 120 bp, synthetic construct; identical to SEQ ID NO: 22793
  source 1..120: mol_type = other DNA

SEQ ID NO: 87955 - DNA, 120 bp, synthetic construct
  source 1..120: mol_type = other DNA
agagtagccatgtgagggatatcaccctctgttgccaatcagttgccgggtttcccagctgcgtttctgaacggtctgttctctgtcctgtttgcgagttgctctgtccagggttcaggg

SEQ ID NO: 87956 - DNA, 120 bp, synthetic construct; identical to SEQ ID NO: 22794
  source 1..120: mol_type = other DNA

SEQ ID NO: 87957 - DNA, 120 bp, synthetic construct; identical to SEQ ID NO: 22795
  source 1..120: mol_type = other DNA

SEQ ID NO: 87958 - DNA, 120 bp, synthetic construct; identical to SEQ ID NO: 22796
  source 1..120: mol_type = other DNA

SEQ ID NO: 87959 - DNA, 120 bp, synthetic construct; identical to SEQ ID NO: 22797
  source 1..120: mol_type = other DNA

SEQ ID NO: 87960 - DNA, 120 bp, synthetic construct
  source 1..120: mol_type = other DNA
tgtcttgaactcctggactcaagcaatcttcccaactcagcctcccaaagtgctgagataacaggcgggagccaccatgcaggcctaaagttggtttttaggagccatacgctgaggttt

SEQ ID NO: 87961 - DNA, 120 bp, synthetic construct
  source 1..120: mol_type = other DNA
tcattgtagttgtgattgtggtttctctagtgacattcagcattttctgtctgcggcttggccgtttgtaagtcttctttggagaagtgtctgttcaggtctcttgcctgtttttgaatt

SEQ ID NO: 87962 - DNA, 120 bp, synthetic construct
  source 1..120: mol_type = other DNA
taactcctgggatcgcacagcccccagcacaggaggacgtctggatttactgaacataaacttgttcagctgagagcttgcatccacttccaaaccttgatcctgaattatgacatcgtc

SEQ ID NO: 87963 - DNA, 120 bp, synthetic construct; identical to SEQ ID NO: 22798
  source 1..120: mol_type = other DNA

SEQ ID NO: 87964 - DNA, 120 bp, synthetic construct; identical to SEQ ID NO: 22799
  source 1..120: mol_type = other DNA

SEQ ID NO: 87965 - DNA, 120 bp, synthetic construct; identical to SEQ ID NO: 22800
  source 1..120: mol_type = other DNA

SEQ ID NO: 87966 - DNA, 120 bp, synthetic construct; identical to SEQ ID NO: 22801
  source 1..120: mol_type = other DNA

SEQ ID NO: 87967 - DNA, 120 bp, synthetic construct
  source 1..120: mol_type = other DNA
agctggggtggcagtctggctctgcgctcctcctcacaactcttctctctcgtcaattcaggtacttcttcaataaagaaggggattttaacaacctgacagctgcagcatttcataaga

SEQ ID NO: 87968 - DNA, 120 bp, synthetic construct
  source 1..120: mol_type = other DNA
gttgcttagcgcctgctgtgtgcagggctctgaacttggcactgagacacactgcccacccttgtgaggcctcctctccgccggggaggagaggtgcagtgatgaggtggctgcgtgcgg

SEQ ID NO: 87969 - DNA, 120 bp, synthetic construct; identical to SEQ ID NO: 22802
  source 1..120: mol_type = other DNA

SEQ ID NO: 87970 - DNA, 120 bp, synthetic construct
  source 1..120: mol_type = other DNA
cacctgcatcgactggacggatgactccaggtgcggcctcagaggcttcgggggagcggggcttgagagaggccccttggacaggtcacccccttgggccctgcagcttcgttccgcaat

SEQ ID NO: 87971 - DNA, 120 bp, synthetic construct
  source 1..120: mol_type = other DNA
ctccctcatgtgacttgaggaccaacagcacactgtggtttttgtctttatcagcaacaaatctgacacgctgcccctggccactcggtacaacgtcaagtgcgtggggctgtccccgga

SEQ ID NO: 87972 - DNA, 120 bp, synthetic construct; identical to SEQ ID NO: 22803
  source 1..120: mol_type = other DNA

SEQ ID NO: 87973 - DNA, 120 bp, synthetic construct
  source 1..120: mol_type = other DNA
tgaggcgggtggatcacctgaggtcaggagttctagaccagcctggccaacaatgatgaaactccttctctactaaaaatacaaaaattagctgggcgtggtggtaggcgcctgtaatcc

SEQ ID NO: 87974 - DNA, 120 bp, synthetic construct
  source 1..120: mol_type = other DNA
cagaggttgcagtgagctgagatcgtgccagtacactccagcctgggcaacagagcaagactctatctaaaaataaataaattaaaaaaaaagaaaaagatgccatcgaggacttacata

SEQ ID NO: 87975 - DNA, 120 bp, synthetic construct
  source 1..120: mol_type = other DNA
cctattccctgacacaaacaatgctgaaattaggccagttaataatggcctacagtggccactacgtgttcatgtgaaaggaagagtcacacaactctcacctgaaatcagaagctagaa

SEQ ID NO: 87976 - DNA, 120 bp, synthetic construct
  source 1..120: mol_type = other DNA
aagtggtattcataatagtgatactgattactattatcaccattttttaagtaacatatgaaaactgatagtgtcttctgtgccttccttttaatggtgcacccgttaattaagggagcc

SEQ ID NO: 87977 - DNA, 120 bp, synthetic construct; identical to SEQ ID NO: 22804
  source 1..120: mol_type = other DNA

SEQ ID NO: 87978 - DNA, 120 bp, synthetic construct; identical to SEQ ID NO: 22805
  source 1..120: mol_type = other DNA

SEQ ID NO: 87979 - DNA, 120 bp, synthetic construct; identical to SEQ ID NO: 22806
  source 1..120: mol_type = other DNA

SEQ ID NO: 87980 - DNA, 120 bp, synthetic construct; identical to SEQ ID NO: 22807
  source 1..120: mol_type = other DNA

SEQ ID NO: 87981 - DNA, 120 bp, synthetic construct; identical to SEQ ID NO: 22808
  source 1..120: mol_type = other DNA

SEQ ID NO: 87982 - DNA, 120 bp, synthetic construct
  source 1..120: mol_type = other DNA
actttggaagaaaaagtttaccttcagtatttgagcaggtgagcactttgtgcgagaggtgataaacttatgactgagcaggttggagaactagcggcgtgttttcagtgccggtagaaa

SEQ ID NO: 87983 - DNA, 120 bp, synthetic construct
  source 1..120: mol_type = other DNA
acttcgtgagggtttctatgggaaatcatgaggcatccaccttgtggacctgattcggctccttctgactgattttggtttcctgatcttaagaagtctttaaaaggcacccatttttat

SEQ ID NO: 87984 - DNA, 120 bp, synthetic construct; identical to SEQ ID NO: 27084
  source 1..120: mol_type = other DNA

SEQ ID NO: 87985 - DNA, 120 bp, synthetic construct
  source 1..120: mol_type = other DNA
cagcctggatgacagagtaagaccctgtctaaaacaaaaagaaaaaagcatcggaggcagcaaagagctggtttgagggactgacttgtgggattctggcttctgaaggattgtagaagt

SEQ ID NO: 87986 - DNA, 120 bp, synthetic construct; identical to SEQ ID NO: 22859
  source 1..120: mol_type = other DNA

SEQ ID NO: 87987 - DNA, 120 bp, synthetic construct; identical to SEQ ID NO: 22860
  source 1..120: mol_type = other DNA

SEQ ID NO: 87988 - DNA, 120 bp, synthetic construct; identical to SEQ ID NO: 22861
  source 1..120: mol_type = other DNA

SEQ ID NO: 87989 - DNA, 120 bp, synthetic construct
  source 1..120: mol_type = other DNA
tgaagacactttttatggcattttgattcacattttatcatttactggttttttttttgggacagggtctcactctgttgcccaggctggagtacagtggcaatcacacctcactgcagc

SEQ ID NO: 87990 - DNA, 120 bp, synthetic construct; identical to SEQ ID NO: 22862
  source 1..120: mol_type = other DNA

SEQ ID NO: 87991 - DNA, 120 bp, synthetic construct; identical to SEQ ID NO: 22863
  source 1..120: mol_type = other DNA

SEQ ID NO: 87992 - DNA, 120 bp, synthetic construct; identical to SEQ ID NO: 22864
  source 1..120: mol_type = other DNA

SEQ ID NO: 87993 - DNA, 120 bp, synthetic construct; identical to SEQ ID NO: 22865
  source 1..120: mol_type = other DNA

SEQ ID NO: 87994 - DNA, 120 bp, synthetic construct
  source 1..120: mol_type = other DNA
gggactacaggcgactgccaccacgcccggctaatttttttttttttttttaatttttagtacagacagggtttcaccacgttggcaggctggtcttgaactcctgacctcaagtgatcc

SEQ ID NO: 87995 - DNA, 120 bp, synthetic construct
  source 1..120: mol_type = other DNA
ttacactctatccccatcatcattctatcaaatttaattaatttttttttcttttgagatggagtctctgtccactccaggctggagtgcagtggcgtgatcttggctcactgcaacctc

SEQ ID NO: 87996 - DNA, 120 bp, synthetic construct; identical to SEQ ID NO: 22866
  source 1..120: mol_type = other DNA

SEQ ID NO: 87997 - DNA, 120 bp, synthetic construct; identical to SEQ ID NO: 22867
  source 1..120: mol_type = other DNA

SEQ ID NO: 87998 - DNA, 120 bp, synthetic construct
  source 1..120: mol_type = other DNA
agttcactgcaacctccgcctcccgggttcaagcgattctctgcctcagcctccctagaagctgggattgcaggcatctgccaccacgcccagctaatttttgtatctttagtagagatg

SEQ ID NO: 87999 - DNA, 120 bp, synthetic construct; identical to SEQ ID NO: 22868
  source 1..120: mol_type = other DNA

SEQ ID NO: 88000 - DNA, 120 bp, synthetic construct; identical to SEQ ID NO: 22869
  source 1..120: mol_type = other DNA

SEQ ID NO: 88001 - DNA, 120 bp, synthetic construct; identical to SEQ ID NO: 22870
  source 1..120: mol_type = other DNA

SEQ ID NO: 88002 - DNA, 120 bp, synthetic construct; identical to SEQ ID NO: 22871
  source 1..120: mol_type = other DNA

SEQ ID NO: 88003 - DNA, 120 bp, synthetic construct; identical to SEQ ID NO: 22872
  source 1..120: mol_type = other DNA

SEQ ID NO: 88004 - DNA, 120 bp, synthetic construct; identical to SEQ ID NO: 22873
  source 1..120: mol_type = other DNA

SEQ ID NO: 88005 - DNA, 120 bp, synthetic construct; identical to SEQ ID NO: 22874
  source 1..120: mol_type = other DNA

SEQ ID NO: 88006 - DNA, 120 bp, synthetic construct; identical to SEQ ID NO: 22875
  source 1..120: mol_type = other DNA

SEQ ID NO: 88007 - DNA, 120 bp, synthetic construct
  source 1..120: mol_type = other DNA
tttattttgccaaggttaaggacaatgcctgggaggaaaaaaaacacggtatcacagaaacagtctgtggtctgtgcctttctccaaagatgactttgagggcttcagtatttaaagggg

SEQ ID NO: 88008 - DNA, 120 bp, synthetic construct; identical to SEQ ID NO: 22876
  source 1..120: mol_type = other DNA

SEQ ID NO: 88009 - DNA, 120 bp, synthetic construct; identical to SEQ ID NO: 22877
  source 1..120: mol_type = other DNA

SEQ ID NO: 88010 - DNA, 120 bp, synthetic construct
  source 1..120: mol_type = other DNA
actgtactccagcctgggtgacagagtgagactctgtctcaaaacaaaaacaaaaacaaacaaacaaaaagaccatggaggctttctcctgtttgtttccagctgctgcttctccttctg

SEQ ID NO: 88011 - DNA, 120 bp, synthetic construct; identical to SEQ ID NO: 22878
  source 1..120: mol_type = other DNA

SEQ ID NO: 88012 - DNA, 120 bp, synthetic construct; identical to SEQ ID NO: 22879
  source 1..120: mol_type = other DNA

SEQ ID NO: 88013 - DNA, 120 bp, synthetic construct; identical to SEQ ID NO: 22880
  source 1..120: mol_type = other DNA

SEQ ID NO: 88014 - DNA, 120 bp, synthetic construct
  source 1..120: mol_type = other DNA
cgtgaaggcagccaccttgggccttaaaatttctaatcttgtagctaatttgttactcctacaaaggcagactggttcctaggcaagaaggggatctttctgggaaatggctattatcaa

SEQ ID NO: 88015 - DNA, 120 bp, synthetic construct
  source 1..120: mol_type = other DNA
aagacaaagagataaaaggaaagacaggtgggcctgggggaccactaacaccaagatgcggagaccggtaatggccccgaatgtctggctgcgttgttatttattggatacaaagcaaaa

SEQ ID NO: 88016 - DNA, 120 bp, synthetic construct; identical to SEQ ID NO: 22881
  source 1..120: mol_type = other DNA

SEQ ID NO: 88017 - DNA, 120 bp, synthetic construct; identical to SEQ ID NO: 22882
  source 1..120: mol_type = other DNA

SEQ ID NO: 88018 - DNA, 120 bp, synthetic construct
  source 1..120: mol_type = other DNA
tagtattccatggtatatatgtgccacattttcttaatccagtctatcattgattgacatttagacacaagtctttgctattgtgaatagtgccgcaataaacatgcgtgtgcatgtgtc

SEQ ID NO: 88019 - DNA, 120 bp, synthetic construct
  source 1..120: mol_type = other DNA
ttagacatgaagtccttgcccatgcctatgtcctgaatggtattgcctaggttttcttctagggtttttatggttttaggtctaacatttaagtctttaatccatctcgaattaattttt

SEQ ID NO: 88020 - DNA, 120 bp, synthetic construct
  source 1..120: mol_type = other DNA
ctctgtctgttattggtgtacaagaatgcttgtgatttttgcacattgattttgtatcctgagactttgctgaagttgcttatcagcttaaggagattttgggctgagacaatggggttt

SEQ ID NO: 88021 - DNA, 120 bp, synthetic construct; identical to SEQ ID NO: 22883
  source 1..120: mol_type = other DNA

SEQ ID NO: 88022 - DNA, 120 bp, synthetic construct
  source 1..120: mol_type = other DNA
gagaatcatttgaatccaggaggcggaggttgtagtgagctgagatcacaccactacactccagactgggtgacagagcgagattccatctaaaaaaaaaaaaaaaggaaaaaagaaaac

SEQ ID NO: 88023 - DNA, 120 bp, synthetic construct
  source 1..120: mol_type = other DNA
aagatcagagcagaactgaaggagatagagacacaaaaaacccttcaaaaaatcaatgaatccaggagctggttttttgaatagatcaacaaaattgatagaccgctagcaagactaata

SEQ ID NO: 88024 - DNA, 120 bp, synthetic construct
  source 1..120: mol_type = other DNA
cgggttcaagcgattcttctgcctcagcctcctgaatagctgggattataggtgtgcgccaccatgcctttagtagagacggggtttcaccatgttggccaggctggtctcgaactcctg

SEQ ID NO: 88025 - DNA, 120 bp, synthetic construct; identical to SEQ ID NO: 22884
  source 1..120: mol_type = other DNA

SEQ ID NO: 88026 - DNA, 120 bp, synthetic construct
  source 1..120: mol_type = other DNA
tcctaaggccttcctagaagctgaacagatgccagcaccatacttcctgtaaagcctgcagaaccatgtgccaattaaacctcttttcttatatattacccaatctcaggtatttcttat

SEQ ID NO: 88027 - DNA, 120 bp, synthetic construct; identical to SEQ ID NO: 22885
  source 1..120: mol_type = other DNA

SEQ ID NO: 88028 - DNA, 120 bp, synthetic construct; identical to SEQ ID NO: 22886
  source 1..120: mol_type = other DNA

SEQ ID NO: 88029 - DNA, 120 bp, synthetic construct; identical to SEQ ID NO: 22887
  source 1..120: mol_type = other DNA

SEQ ID NO: 88030 - DNA, 120 bp, synthetic construct
  source 1..120: mol_type = other DNA
atggacagttccactaacgtgcgcttggttgactgtgtgaaccccaaccatttgagacaggcctcagttaatttagaaagtttattttgccaaggttgaggacgtgtacccgtgacatgg

SEQ ID NO: 88031 - DNA, 120 bp, synthetic construct; identical to SEQ ID NO: 22888
  source 1..120: mol_type = other DNA

SEQ ID NO: 88032 - DNA, 120 bp, synthetic construct; identical to SEQ ID NO: 22889
  source 1..120: mol_type = other DNA

SEQ ID NO: 88033 - DNA, 120 bp, synthetic construct; identical to SEQ ID NO: 22890
  source 1..120: mol_type = other DNA

SEQ ID NO: 88034 - DNA, 120 bp, synthetic construct; identical to SEQ ID NO: 22891
  source 1..120: mol_type = other DNA

SEQ ID NO: 88035 - DNA, 120 bp, synthetic construct; identical to SEQ ID NO: 22892
  source 1..120: mol_type = other DNA

SEQ ID NO: 88036 - DNA, 120 bp, synthetic construct
  source 1..120: mol_type = other DNA
tctccctggctgcccaaagcgcagggagtctcatgttctgatggctctttctttctctctttctttctttttcttttcttttttttttttttaagatggagtctcactctgtcatccagg

SEQ ID NO: 88037 - DNA, 120 bp, synthetic construct; identical to SEQ ID NO: 22893
  source 1..120: mol_type = other DNA

SEQ ID NO: 88038 - DNA, 120 bp, synthetic construct; identical to SEQ ID NO: 22894
  source 1..120: mol_type = other DNA

SEQ ID NO: 88039 - DNA, 120 bp, synthetic construct
  source 1..120: mol_type = other DNA
aagacaacatataatgaaaccaattttaccataggctagttgatataaacaagagttaaattcctatgtcataggctgggtgcggtggctcacaccagtaatcccagcactttggaaggc

SEQ ID NO: 88040 - DNA, 120 bp, synthetic construct; identical to SEQ ID NO: 22895
  source 1..120: mol_type = other DNA

SEQ ID NO: 88041 - DNA, 120 bp, synthetic construct; identical to SEQ ID NO: 22896
  source 1..120: mol_type = other DNA

SEQ ID NO: 88042 - DNA, 120 bp, synthetic construct
  source 1..120: mol_type = other DNA
cctcgaattgtaatccccaggtgttgaaggagggaggcgattggatcatgaggcggtttcctccatgctgttctcatgatagctagtgagttctcatgggatctgatggttttataaggg

SEQ ID NO: 88043 - DNA, 120 bp, synthetic construct; identical to SEQ ID NO: 22897
  source 1..120: mol_type = other DNA

SEQ ID NO: 88044 - DNA, 120 bp, synthetic construct; identical to SEQ ID NO: 22898
  source 1..120: mol_type = other DNA

SEQ ID NO: 88045 - DNA, 120 bp, synthetic construct
  source 1..120: mol_type = other DNA
tgtgagatgtgccttctgtcatgattgtgaggcctccccagtgagcccattaaacctctttttcttcccagtcttgagtatgtctttatctgaagcatgaaaacggactaatatacccag

SEQ ID NO: 88046 - DNA, 120 bp, synthetic construct
  source 1..120: mol_type = other DNA
gatggttagttttgtttttttttttgagaaggagtctccctctgtcacccaggctggagagcagtggcacgatctcagctcaactgcaacctccacctctcaggttcaagcgattctcct

SEQ ID NO: 88047 - DNA, 120 bp, synthetic construct; identical to SEQ ID NO: 22899
  source 1..120: mol_type = other DNA

SEQ ID NO: 88048 - DNA, 120 bp, synthetic construct
  source 1..120: mol_type = other DNA
aatggagtctcctatgtctacttctttctacacagacacagtaacaatctgatctttcttgcttttccccacaggatttaacaacaaatcctaatgcacgtgggggccagcggcagtgac

SEQ ID NO: 88049 - DNA, 120 bp, synthetic construct; identical to SEQ ID NO: 22900
  source 1..120: mol_type = other DNA

SEQ ID NO: 88050 - DNA, 120 bp, synthetic construct
  source 1..120: mol_type = other DNA
gcttgaggtcaggagtttgagaccagcctgggcaacatggcaaaactacatctctaccaaaaatacaaaaattagctgggtgtggtggcgcgtgcctgtaatcccagcactttgggaagc

SEQ ID NO: 88051 - DNA, 120 bp, synthetic construct; identical to SEQ ID NO: 22901
  source 1..120: mol_type = other DNA

SEQ ID NO: 88052 - DNA, 120 bp, synthetic construct; identical to SEQ ID NO: 22902
  source 1..120: mol_type = other DNA

SEQ ID NO: 88053 - DNA, 120 bp, synthetic construct; identical to SEQ ID NO: 22903
  source 1..120: mol_type = other DNA

SEQ ID NO: 88054 - DNA, 120 bp, synthetic construct; identical to SEQ ID NO: 22904
  source 1..120: mol_type = other DNA

SEQ ID NO: 88055 - DNA, 120 bp, synthetic construct; identical to SEQ ID NO: 22905
  source 1..120: mol_type = other DNA

SEQ ID NO: 88056 - DNA, 120 bp, synthetic construct; identical to SEQ ID NO: 22906
  source 1..120: mol_type = other DNA

SEQ ID NO: 88057 - DNA, 120 bp, synthetic construct; identical to SEQ ID NO: 22907
  source 1..120: mol_type = other DNA

SEQ ID NO: 88058 - DNA, 120 bp, synthetic construct
  source 1..120: mol_type = other DNA
aaaagaaaattagaaaacatgcttccctcacctcccgttttatttgtttatttttatttgagacagggtctggttctgttgcccaggctggagtgcagtggtgcaatctctgctcactgt

SEQ ID NO: 88059 - DNA, 120 bp, synthetic construct; identical to SEQ ID NO: 22908
  source 1..120: mol_type = other DNA

SEQ ID NO: 88060 - DNA, 120 bp, synthetic construct; identical to SEQ ID NO: 22909
  source 1..120: mol_type = other DNA

SEQ ID NO: 88061 - DNA, 120 bp, synthetic construct; identical to SEQ ID NO: 22910
  source 1..120: mol_type = other DNA

SEQ ID NO: 88062 - DNA, 120 bp, synthetic construct; identical to SEQ ID NO: 22911
  source 1..120: mol_type = other DNA

SEQ ID NO: 88063 - DNA, 120 bp, synthetic construct; identical to SEQ ID NO: 22912
  source 1..120: mol_type = other DNA

SEQ ID NO: 88064 - DNA, 120 bp, synthetic construct; identical to SEQ ID NO: 22913
  source 1..120: mol_type = other DNA

SEQ ID NO: 88065 - DNA, 120 bp, synthetic construct; identical to SEQ ID NO: 22914
  source 1..120: mol_type = other DNA

SEQ ID NO: 88066 - DNA, 120 bp, synthetic construct; identical to SEQ ID NO: 22915
  source 1..120: mol_type = other DNA

SEQ ID NO: 88067 - DNA, 120 bp, synthetic construct; identical to SEQ ID NO: 22916
  source 1..120: mol_type = other DNA

SEQ ID NO: 88068 - DNA, 120 bp, synthetic construct; identical to SEQ ID NO: 22917
  source 1..120: mol_type = other DNA

SEQ ID NO: 88069 - DNA, 120 bp, synthetic construct; identical to SEQ ID NO: 22918
  source 1..120: mol_type = other DNA

SEQ ID NO: 88070 - DNA, 120 bp, synthetic construct; identical to SEQ ID NO: 22919
  source 1..120: mol_type = other DNA

SEQ ID NO: 88071 - DNA, 120 bp, synthetic construct; identical to SEQ ID NO: 22920
  source 1..120: mol_type = other DNA

SEQ ID NO: 88072 - DNA, 120 bp, synthetic construct; identical to SEQ ID NO: 22921
  source 1..120: mol_type = other DNA

SEQ ID NO: 88073 - DNA, 120 bp, synthetic construct; identical to SEQ ID NO: 22922
  source 1..120: mol_type = other DNA

SEQ ID NO: 88074 - DNA, 120 bp, synthetic construct; identical to SEQ ID NO: 22923
  source 1..120: mol_type = other DNA

SEQ ID NO: 88075 - DNA, 120 bp, synthetic construct; identical to SEQ ID NO: 22924
  source 1..120: mol_type = other DNA

SEQ ID NO: 88076 - DNA, 120 bp, synthetic construct; identical to SEQ ID NO: 22925
  source 1..120: mol_type = other DNA

SEQ ID NO: 88077 - DNA, 120 bp, synthetic construct; identical to SEQ ID NO: 22926
  source 1..120: mol_type = other DNA

SEQ ID NO: 88078 - DNA, 120 bp, synthetic construct; identical to SEQ ID NO: 22927
  source 1..120: mol_type = other DNA

SEQ ID NO: 88079 - DNA, 120 bp, synthetic construct; identical to SEQ ID NO: 22928
  source 1..120: mol_type = other DNA

SEQ ID NO: 88080 - DNA, 120 bp, synthetic construct
  source 1..120: mol_type = other DNA
cttcatgccttggacacttgattgtcttcttggcacatacaggtgccatgcctgcatatagtaagtgctcagaaaacatttcttgactgaattcagccaacaaaaattttggggtaggta

SEQ ID NO: 88081 - DNA, 120 bp, synthetic construct
  source 1..120: mol_type = other DNA
ttcataaggtgctttaagaataggtatgtttttaaaagttaagttcctactatttataggaactgacaatcacctaaaataccaatgattacaaacttccttctggccttctggactgca

SEQ ID NO: 88082 - DNA, 120 bp, synthetic construct
  source 1..120: mol_type = other DNA
taaatggtcaccaacagagattgtgctatttaatttgggaaaattttttaaatttacattttctcacaacttttaaggtagttattcagtttgttcctctctgtctcttctctcatgccc

SEQ ID NO: 88083 - DNA, 120 bp, synthetic construct
  source 1..120: mol_type = other DNA
tttaaagacaattcttttgtttgtttgtttttaaaagacagagtctcactctgttgcccaggctagagtgcagtgacacaatcataactcactgcaacctccacctcctgggctcaagtg

SEQ ID NO: 88084 - DNA, 120 bp, synthetic construct
  source 1..120: mol_type = other DNA
ccttttgctgaccatgttttgttattacacagttgagatttttcagctgggaatctgtgttaattttgtattaattttgattagcttaactctcagagttctaaaagtacctcctgtacc

SEQ ID NO: 88085 - DNA, 120 bp, synthetic construct
  source 1..120: mol_type = other DNA
tctgttggttctcttcagagctctagaatcaatttaccacatagttgtttcagtgtgaaattagcattacagagtggctttacggctttactgtagggcattgtgtcagcaaagagctta

SEQ ID NO: 88086 - DNA, 120 bp, synthetic construct
  source 1..120: mol_type = other DNA
tggtcaaggaaggcttgctgggggaagtgtcttttgtattcacacctaaaggaggttattcaattagaattatccaaagagggtagggatgggctaggaaaaatttaaacaggtagtgtg

SEQ ID NO: 88087 - DNA, 120 bp, synthetic construct
  source 1..120: mol_type = other DNA
cctgataacttcactcctttaggcagtgcttttcacatcacgggacacaacatatgagagatcatagaaattcaatgtggtatgaaaatctgcttgggacttcagatattgtctccagtg

SEQ ID NO: 88088 - DNA, 120 bp, synthetic construct
  source 1..120: mol_type = other DNA
cttataagtctctgttgaccatttcattgcctctttttttggaatatgcatcttttaatgtgtccttcaaggcaaaggctctatcttatctatcttgtgtcttgcattttcccagggcaa

SEQ ID NO: 88089 - DNA, 120 bp, synthetic construct
  source 1..120: mol_type = other DNA
aaccatgataatatcatatgtggcttattattgttccctgagtgttgtacaactctgttatgctgtgatgaaacctcatgcaaacaggtatgtcaaagatatgatgggctgttaactgag

SEQ ID NO: 88090 - DNA, 120 bp, synthetic construct
  source 1..120: mol_type = other DNA
cacacacacacacacacacacacacacacacacacacacacaatttattataaggaattgacttacatgattatgatggctaacaagtccaaaatctgcagtatgggtcagctggcagga

SEQ ID NO: 88091 - DNA, 120 bp, synthetic construct
  source 1..120: mol_type = other DNA
gtttgtccccttgtgtgcatcatcctaacgtggaatttctctgttgattagggccagcgtattagtttgctagggctaccataacaaaataccacaaatttggtggcttaaataacagga

SEQ ID NO: 88092 - DNA, 120 bp, synthetic construct
  source 1..120: mol_type = other DNA
gttggctggaagttttaggatgatcatctttaggactcagaaaaagagaagaaacattattaaagaattgtccctgaacaagtataggcaccctcacatttgcattgcatttactataga

SEQ ID NO: 88093 - DNA, 120 bp, synthetic construct
  source 1..120: mol_type = other DNA
gccacctaataaatcaatagtttcattcagcgggagctcctgcagagttcaaaaagaagagaatctggcacagcgtttcctttaaagttcattttcctagagtgtgaatggaagcaagag

SEQ ID NO: 88094 - DNA, 120 bp, synthetic construct
  source 1..120: mol_type = other DNA
aagtgggaaatcagctgccactgggaagtctgaatccaatgccatgatgttctttgaatccttctgagaaataatcatgtgtagccataacatacctgtataacagagcagagaacataa

SEQ ID NO: 88095 - DNA, 120 bp, synthetic construct
  source 1..120: mol_type = other DNA
gccaaggagaggtggaacttgttttcctttttccctctcagctacgaatggacatacttaaaactgtttctctgcttctgttctctaaaatgtgattgtctaacagtaaccgtgatgacg

SEQ ID NO: 88096 - DNA, 120 bp, synthetic construct
  source 1..120: mol_type = other DNA
ctcatggtgcatgtcaccagtccttagatctcatgaaatatgcatgaaatcttaaatcacttgctgtagccacccagccattgacatatttgaaagactttagtgtatcaaagtcactat

SEQ ID NO: 88097 - DNA, 120 bp, synthetic construct
  source 1..120: mol_type = other DNA
gcagacatccattttcctttcttttgggcatatacctacgagtgtaatggatgggccatatagtaactttatgtttaatattttgaggatttttcaaactgttttccaaagtggctgcat

SEQ ID NO: 88098 - DNA, 120 bp, synthetic construct
  source 1..120: mol_type = other DNA
ggcgatatcactgggaaataatagagacaaggttacaagctagggctgtgttttcttcttaaaatctttagttcagtttttttcaataacagatttgtagtaggcatcaggtgactgggg

SEQ ID NO: 88099 - DNA, 120 bp, synthetic construct
  source 1..120: mol_type = other DNA
tggaatcagaggaggggaaattagtaacttgaccccaatactgcgattttaaattgaattcttgaagcctacaagttttacacaggactttagagagctggatagtatcactttgtcaag

SEQ ID NO: 88100 - DNA, 120 bp, synthetic construct
  source 1..120: mol_type = other DNA
tgtgtgtgtgtgtgtgtgtgtgtgtgtgtttaaaaaatcaagtgatagggcttttcctcaataaaatctgaaatctcttatagttaagtgaacagaacagtgtatctaggatgctagact

SEQ ID NO: 88101 - DNA, 120 bp, synthetic construct
  source 1..120: mol_type = other DNA
ctcccacctcagcctcccgcgtagctgggattacaggcatgtgcccccatgcctggctaattttttttgtatttttagtagagatggggtttctccatgttggtcaggctggtctcgaac

SEQ ID NO: 88102 - DNA, 120 bp, synthetic construct
  source 1..120: mol_type = other DNA
tataattaaataaattatattaaaacaaaagtattaaaaactcaaaagttggctgggcgcactggctcacgtctgtaatcccagcactttgggagaccgaggcaggtggattgcctgaag

SEQ ID NO: 88103 - DNA, 120 bp, synthetic construct
  source 1..120: mol_type = other DNA
agatttttttacagcctaattgccacctgtatgttcgactttccttctgttctttatgttagatactgggatagtatgcaccaggtgggtgtgccatcactttctcagatgatgtccact

SEQ ID NO: 88104 - DNA, 120 bp, synthetic construct
  source 1..120: mol_type = other DNA
actacggtatcctgcatagtgatttcccatgccaactttactaatttccattataaattattatttattgatgcctagagggcagatgagtgtagctgctatggagtgaggagacaaaac

SEQ ID NO: 88105 - DNA, 120 bp, synthetic construct
  source 1..120: mol_type = other DNA
tgagaggattgcttgagaccaggagtttgataccagcctgggcaacatagcaagatgttatctctacacaaaataaaaaagttagctgggaatggtagtgcatgcttgtattcccagcta

SEQ ID NO: 88106 - DNA, 120 bp, synthetic construct
  source 1..120: mol_type = other DNA
tacataaagtgggtccctggttagaactctttgctcctatctttaaggaccacgaaagaaggagccctttgtccttggctaaatgtgaaaaatcccagagactcttgagtcatagtgctt

SEQ ID NO: 88107 - DNA, 120 bp, synthetic construct
  source 1..120: mol_type = other DNA
ccttggcctcccaaaatgctgggattataggtgtgagccactatgcccagctttgaatatctaagttttaattggatgctgagggaatgattaatcagagtagggctgggttaattgaaa

SEQ ID NO: 88108 - DNA, 120 bp, synthetic construct
  source 1..120: mol_type = other DNA
acattgaacccattttgttggtttatgtacacaccccttccttggctttcccatctgatccatttctcctttgatggagaaggtgagtctgctccatatttagcttcttactctgagtaa

SEQ ID NO: 88109 - DNA, 120 bp, synthetic construct
  source 1..120: mol_type = other DNA
taaatctgccacagttctaaaccaataaagatcaaggtataagggaaaaatgtagaatgtttgtgtgtttattttttccaccttgttctaagcacagcaatgagcattcgtaaaagcctt

SEQ ID NO: 88110 - DNA, 120 bp, synthetic construct
  source 1..120: mol_type = other DNA
cttactagtacatgagattactggtgcctttattttgctgtattcaacaggagagtgtcaggagacaatgtcagcagaattaggtcaaatgcagctaattacatatatgaatgtttgtaa

SEQ ID NO: 88111 - DNA, 120 bp, synthetic construct
  source 1..120: mol_type = other DNA
agtgaatgatatttcaagtaattgttatgtcatggccaagatttcagtgaaactcaaaatttctcctggttgtgttctccattgcatgctgcttctattgattaacctaagcactactga

SEQ ID NO: 88112 - DNA, 120 bp, synthetic construct
  source 1..120: mol_type = other DNA
taaattgttcttaaacttctcaagcttaaaaatatcccagcaaaagagatcgtaaaagcccttcatggcgtattaattatccatgcatgggggtgagtggaaaggtactcctgagcccga

SEQ ID NO: 88113 - DNA, 120 bp, synthetic construct
  source 1..120: mol_type = other DNA
tggccaatatggtgaaaccctgtctctactaaaagtacaaaaatcagccaggtgtggtggcgtggtggcgggcacctgtggtcccagctacttgggaggctgaggcaggagaatagcttg

SEQ ID NO: 88114 - DNA, 120 bp, synthetic construct
  source 1..120: mol_type = other DNA
gggggtcttgttttgtaggtaaatcgttggcagcccacagagaaaatagatggagaatgtttcttttcagaccttggcaggtgtcagattctcagttaatctctcctagatttgaaaaaa

SEQ ID NO: 88115 - DNA, 120 bp, synthetic construct
  source 1..120: mol_type = other DNA
tgttctcaatgttcaactcccttttacgagtgagaacacatggtgtttgattttctgttcctgtgttaatttgctgaggatgatagtttccagcttcatccacgtccctgcaaaggacat

SEQ ID NO: 88116 - DNA, 120 bp, synthetic construct
  source 1..120: mol_type = other DNA
ataaggaaggggtccagtttcagttttatgcataatggctaggcagttttcccaccaccatttactgaataggagatcttttcctcattgcttgtttttgtcagatttgtcgaagatcag

SEQ ID NO: 88117 - DNA, 120 bp, synthetic construct
  source 1..120: mol_type = other DNA
gacctcagtttccttaactgtacaactgagggaaactgtatagtatagctatagtacagtataccatctttaccgtcacttccatcttttaaattatgtgtatataagatagggcctaga

SEQ ID NO: 88118 - DNA, 120 bp, synthetic construct
  source 1..120: mol_type = other DNA
gagaacatgtggtgtttggttttctgttcttgtgttagtttgctgagaatgatggtttccagcttcatccatgttcctgcaaggacatgaactcatccttttttatggctgtatagtatt

SEQ ID NO: 88119 - DNA, 120 bp, synthetic construct
  source 1..120: mol_type = other DNA
attctggtacatagcaagtgctctctctatatatggaactctatatgtagttggtgcaaaagtaattgtggttttcaccattgaaagtaatggcaaagaccatcattaccttttcaccaa

SEQ ID NO: 88120 - DNA, 120 bp, synthetic construct
  source 1..120: mol_type = other DNA
tgagattctgttctaggtgtggtatatgtgtatttttgcaaaaactataaacaattgtggcaaaatgaaggaaatatttaaaaacaaacctcttaattcttcagtggattaagcgtgaat

SEQ ID NO: 88121 - DNA, 120 bp, synthetic construct
  source 1..120: mol_type = other DNA
gttcctcatcattgagtatgtaaattgcctccatttttttattactataaaaggtccttcagtacacacccctttaaaagctgactcttagaaggtgttcttgactctctacctaagtgt

SEQ ID NO: 88122 - DNA, 120 bp, synthetic construct
  source 1..120: mol_type = other DNA
ttgattcaacaaatatttgttgaatggatattctgtgcttggtattgtgcatggtattaggattgttgcaaaaattgagactgacagtccctactcttacggtgctaaaaattcacttcc

SEQ ID NO: 88123 - DNA, 120 bp, synthetic construct
  source 1..120: mol_type = other DNA
agttaaaatgataatggtgattttattaagtgacctcacacaatagaaaacagtgtagccttagaagttttccaagtgaccattctacttagaaacaaccctgctttgggatcagaactg

SEQ ID NO: 88124 - DNA, 120 bp, synthetic construct
  source 1..120: mol_type = other DNA
gtggtagcaaatcaggacgcttcttgtgtctctgaaaatactctgagtaatggagtacagtcagctttcttgtaccaagaatatagggactatgtttctcccagtcattctggggataat

SEQ ID NO: 88125 - DNA, 120 bp, synthetic construct
  source 1..120: mol_type = other DNA
cccaaagtgctgggattacaggcgtgagccaccgcgcccggcccctgtctctgaattttttaaaaaggcattccactcaaattaatacacattttaattgtgttttgttgtaaattacaa

SEQ ID NO: 88126 - DNA, 120 bp, synthetic construct; identical to SEQ ID NO: 29967
  source 1..120: mol_type = other DNA

SEQ ID NO: 88127 - DNA, 120 bp, synthetic construct; identical to SEQ ID NO: 69782
  source 1..120: mol_type = other DNA

SEQ ID NO: 88128 - DNA, 120 bp, synthetic construct
  source 1..120: mol_type = other DNA
gctggttttttgaaaggatcaacaaaattgatagaccgctagcaagactaataaagaaaaaaagagagaagaatcaaatagacacaataaaaaatgataaaggggatatcaccaccaatc

SEQ ID NO: 88129 - DNA, 120 bp, synthetic construct
  source 1..120: mol_type = other DNA
aagcattccctttgaaaactggcacaagacagggatgccctctctcaccgctcctattcaacatagtgttggaagttctggccagggcaatcaggcaggagaaggaaataaagggtattc

SEQ ID NO: 88130 - DNA, 120 bp, synthetic construct
  source 1..120: mol_type = other DNA
gcaacctactcatctgacaaagggctaatatccagaatctacaatgaactcaaacaaatttacaagaaaaaaacaaacaaccccatcaaaaagtgggcgaaggacatgaacagacactac

SEQ ID NO: 88131 - DNA, 120 bp, synthetic construct; identical to SEQ ID NO: 29968
  source 1..120: mol_type = other DNA

SEQ ID NO: 88132 - DNA, 120 bp, synthetic construct
  source 1..120: mol_type = other DNA
tggccactattcactgtttaacttaaaatacctcatatgtaaacttgtctcccactgttgctataacaaatcccaagtcttatttcaaagtaccaagatattgaaaatagtgctaagagt

SEQ ID NO: 88133 - DNA, 120 bp, synthetic construct
  source 1..120: mol_type = other DNA
gccctacaaatttaaagtttttggaacagcacgtgcattgaacccataagaacctactctgcttttctgcatgtattgtccagacaagagaccaaattgccgaggcatcatttaggtgaa

SEQ ID NO: 88134 - DNA, 120 bp, synthetic construct
  source 1..120: mol_type = other DNA
atttagtggtcagactgtaatgcgggaagagacaggcatgggctaaacgggtgtagagatcaaataaggggcaggttagtttgtaaacatgtccatatgtaacatttagcacaaatacag

SEQ ID NO: 88135 - DNA, 120 bp, synthetic construct
  source 1..120: mol_type = other DNA
tgctcaacaaatatgtgagggattcacttgaaactaatattagataattcccagtcaaagtgatctaatagcaaatcaattcttcagttttataggcaaagtatgactctggttttccat

SEQ ID NO: 88136 - DNA, 120 bp, synthetic construct
  source 1..120: mol_type = other DNA
acaactggaaaggcggagttttcctgggtcagataatagtaattagtggttaagtcttgctcagctctagcttccctattctggaaactaagaaaggtcaattgtatagcagagcaccat

SEQ ID NO: 88137 - DNA, 120 bp, synthetic construct
  source 1..120: mol_type = other DNA
tgccttctgtggacttggtttcctgatagtccttgccctttttcaggctgggctagggagaatgatgatgaagtacaggtagcaacctattttcataacttgaaagttttaaaaattatg

SEQ ID NO: 88138 - DNA, 120 bp, synthetic construct
  source 1..120: mol_type = other DNA
gtttgaatcccagattgcatgcttactagttatgtgaccttagtcaagccacttcacctcactgagtctttgcttttttcatctctaaaatagagatacccaccgctcataggctgtcat

SEQ ID NO: 88139 - DNA, 120 bp, synthetic construct
  source 1..120: mol_type = other DNA
atattcacagattgggttcctataaatcctccacttgaagtgaagtcagttcaagtaatgaaagctacctcctgagatagaatcagtacttggcacctatctctagtgttctttcacctc

SEQ ID NO: 88140 - DNA, 120 bp, synthetic construct
  source 1..120: mol_type = other DNA
aagtgttgacataaatatgggacagcaagagttgctcctactcaagagagcaaatataatgttctggaagagattggcagaattcacatcaaaggagtgattacttcagcctgggccact

SEQ ID NO: 88141 - DNA, 120 bp, synthetic construct
  source 1..120: mol_type = other DNA
ggaccgagctgaaggcagtgttgtcctctgcactccctgttttctgtctgctggagcactgaagcctcacatatgtattaaaaaaataatttccatttgcatttcagactagaagattga

SEQ ID NO: 88142 - DNA, 120 bp, synthetic construct
  source 1..120: mol_type = other DNA
ttatagaacagaactgaaactgactcggaaggcagcctatgtgagatacttcaatagctcagccttcttcttctcagggttctttgtggtgtttttatctgtgcttccctatgcactaat

SEQ ID NO: 88143 - DNA, 120 bp, synthetic construct
  source 1..120: mol_type = other DNA
cctctcctgttcatcatgctctcttctcagtcccattccttcattatatcacctatttggtcctgagactaagtgagtttgagatctgtgatttagacaaagtggtgaatctagctctga

SEQ ID NO: 88144 - DNA, 120 bp, synthetic construct
  source 1..120: mol_type = other DNA
tataatatgtttttgctctcttttataaataggatttcttacaaaagcaagaatataagacattggaatataacttaacgactacagaagtagtgatggagaatgtaacagccttctggg

SEQ ID NO: 88145 - DNA, 120 bp, synthetic construct
  source 1..120: mol_type = other DNA
gtctctgaagtgcaatatttgattattgagcacacctgttgaagttttagtttcttctcacttacatgggttgtgtaaaggtaggaggtataaaaccagtgtcctaggtctaaatctttc

SEQ ID NO: 88146 - DNA, 120 bp, synthetic construct
  source 1..120: mol_type = other DNA
tctctcagctgcactctcaattcccttttccttttggtgatttttctttttcctacagaacacttactttatcagttttggagaaggaagtgctatctgggtaacagtagtgctatctgt

SEQ ID NO: 88147 - DNA, 120 bp, synthetic construct
  source 1..120: mol_type = other DNA
ctcacaatcatggtggatgatgaaaggcatgtctcacatggaggcagataagagcatagaacttgtgcagggaaacttccctttattaaaccaccaggtcttgtgagacttcttcactat

SEQ ID NO: 88148 - DNA, 120 bp, synthetic construct
  source 1..120: mol_type = other DNA
cactctgtcacccaggctggagtgcagtggtgcgatcttggctcactggaacctctgctgcccgggttcaagcgattctcctgcctcagcctcctgagtagctgggattacaggtgcctg

SEQ ID NO: 88149 - DNA, 120 bp, synthetic construct
  source 1..120: mol_type = other DNA
attgttagctacccatataataaaaaactaaaagcagtagttttcaagcatgattgtttatgtatgccttaaaagaattttgaaaacctatgtacccctgacacacttttaagttaactt

SEQ ID NO: 88150 - DNA, 120 bp, synthetic construct
  source 1..120: mol_type = other DNA
aggagggtgctaccagtgtgatggagtagaattcagatttgggtagtgactttaaagctgtgtgactttagtcatttaactgctgagtcacagtctacagctttgaaagaggaggattat

SEQ ID NO: 88151 - DNA, 120 bp, synthetic construct
  source 1..120: mol_type = other DNA
caaatcatccattttatccattcttaaccagaacagacattttttcagagctggtccaggaaaatcatgacttacattttgccttagtaaccacataaacaaaaggtctccatttttgtt

SEQ ID NO: 88152 - DNA, 120 bp, synthetic construct
  source 1..120: mol_type = other DNA
aatatgagacttgggaaacaaaatgccacaaaaaatttccactcaataaatttggtgtcaggctgggtgcagtggctcacacttgtaatcctagcacttttggaggcagaggcaggtgaa

SEQ ID NO: 88153 - DNA, 120 bp, synthetic construct
  source 1..120: mol_type = other DNA
cttctataacttacccaaatatgtttgcagagatcttatgtaaagctcttcattataacactgctttcaggagccaaaaattgggtgggggagccccataaatgttgaataataggggtt

SEQ ID NO: 88154 - DNA, 120 bp, synthetic construct
  source 1..120: mol_type = other DNA
tgatcattgcctcactatggtactgagttttagcttattcttgtaataactgggactcatatgtatagaataagctattagctcacgtttttgcttgctttttatacagaatacatgtct

SEQ ID NO: 88155 - DNA, 120 bp, synthetic construct
  source 1..120: mol_type = other DNA
aactttccatattcaaagcacagaggacttgcacatatgttcagactgctgaatatttctgtctctcccctgccattcatatgttgaaatcctaattcccaaggtgatggtattgcaggg

SEQ ID NO: 88156 - DNA, 120 bp, synthetic construct
  source 1..120: mol_type = other DNA
ggattgaatagatatctcatcaaaaataaaaatataagtggcctttaaacattgaaaggtaacatttgaacaaagacttgcaggaggtgagggattagggaatgcagactctgggaagag

SEQ ID NO: 88157 - DNA, 120 bp, synthetic construct
  source 1..120: mol_type = other DNA
ggttagcctaagggcattctaagtattagaggttaaggaggtgggtgaagaaaacccaataaaataaaagtctgagaagacaaagctagtgaatgaatgtggtatcccggaacccaactg

SEQ ID NO: 88158 - DNA, 120 bp, synthetic construct
  source 1..120: mol_type = other DNA
attgaggtctgcagctacagttgcctgcaatttcgagataaatgaacccagtataaagactgttgtaacaaaagaaaagaaaatgtgaaaccatcagtgcagctatgccagcaggtgtga

SEQ ID NO: 88159 - DNA, 120 bp, synthetic construct
  source 1..120: mol_type = other DNA
tacctgttttgaattttttttccaagcggtcccttatgagttttctctatgttttatttgtttcatttctttttttttttttttttttttttttgagacggagtctcgctctgtcgccca

SEQ ID NO: 88160 - DNA, 120 bp, synthetic construct
  source 1..120: mol_type = other DNA
ttaggtcttctacatcttcacttatcttttttctacttgctttgccattaacagataaagttgaattaaaggcttctactacatacatttctccctgttattccttataggttctgtaat

SEQ ID NO: 88161 - DNA, 120 bp, synthetic construct
  source 1..120: mol_type = other DNA
acagagtgagactctgtctctaaataaataaataaataaataaataaataaataaaatcagtgctttttcttcctctgctacctcctttccttctactcagttttagtcagtagtattat

SEQ ID NO: 88162 - DNA, 120 bp, synthetic construct
  source 1..120: mol_type = other DNA
ttctcagttttcctggattatgcctggcaccattaaagaaaatatcatctttggtgtttcctatgatgaatatagatacagaagcgtcatcaaagcatgccaactagaagaggtaagaaa

SEQ ID NO: 88163 - DNA, 120 bp, synthetic construct
  source 1..120: mol_type = other DNA
ttgagagcataatgaaaagaaaagctacctgcaaaagttttggacttacctcaaagaggatatacttcattcctcaaaaggccttcttccaggaatagtatttcataacctggaggttgg

SEQ ID NO: 88164 - DNA, 120 bp, synthetic construct
  source 1..120: mol_type = other DNA
tgaatcatatacttcgggaatttgtggactagtgggaaagattgacatatcaataacaaatcgaattagtgatgtaatagaggcatttttacaggagtaaaatgaggtagcatggactct

SEQ ID NO: 88165 - DNA, 120 bp, synthetic construct
  source 1..120: mol_type = other DNA
cactattcactgtgtagtgagcatggtgggtatgaaatgacaactttattgtctttcctgtcaaagaacttgtaggctggttgggggaaagagaccatttcaatatgaagtgctgagcta

SEQ ID NO: 88166 - DNA, 120 bp, synthetic construct
  source 1..120: mol_type = other DNA
ttggtttaagattaaggactccatgcataagagaaactgggagggaagacaggtagaaatgctatggggttaggaaggaagaatgcagaggtggattacttagaattgagacatctgatc

SEQ ID NO: 88167 - DNA, 120 bp, synthetic construct
  source 1..120: mol_type = other DNA
acagaatccttgatggttaagcagctggtgccagcacaagaatccctcaatatgttctctatgaagccccgatcaccaaatgcaaacattcatgattcagtatattttcatcttgactgc

SEQ ID NO: 88168 - DNA, 120 bp, synthetic construct
  source 1..120: mol_type = other DNA
ctgacaggaggagaattctaggcaggccagtgtttgagtagtgagtaattggactgtctttacccagcaactcactgttttgtaaatgtacctgagtttggagaagtaattggcttttat

SEQ ID NO: 88169 - DNA, 120 bp, synthetic construct
  source 1..120: mol_type = other DNA
gctgtgagctgagattgcgccactgcactctagcctgggtgacagagtgagactctgtctcaaaaataaaataaaacatatatttgaaacacattgaattatgtcccttaaacaagaata

SEQ ID NO: 88170 - DNA, 120 bp, synthetic construct
  source 1..120: mol_type = other DNA
cctcagaaatctctggctgaatatttccatctgcagatgatcatgtcattaggcttctgactctatagccatagaaaaatattcatgaagacctttcaggaagggaatgttggtatttct

SEQ ID NO: 88171 - DNA, 120 bp, synthetic construct
  source 1..120: mol_type = other DNA
tattgtgagatctgaattgggagaggacagttatatccagacctttatatgctccagtaagaagactgaactttacactgggggccatgggactcactgaatggcattaaatttgagagt

SEQ ID NO: 88172 - DNA, 120 bp, synthetic construct
  source 1..120: mol_type = other DNA
ggagactaagagccaggagggaaaactttcaagagagtattgcattatggaagggaagaagagagaacattttaaatgatacgcaatgctcaataatggtatccgctttggagaggccaa

SEQ ID NO: 88173 - DNA, 120 bp, synthetic construct
  source 1..120: mol_type = other DNA
aagctactccttcatccatgctgccatttctcttggtttacggttccagtatagtactcatcacattattactatagagccatccaccttatgaaggtgaaggtgtccatctccttactt

SEQ ID NO: 88174 - DNA, 120 bp, synthetic construct
  source 1..120: mol_type = other DNA
cttcatctttttcctctccccttgggaaagaatctcttcatgcctcataatatcaaatttaaactatggaagtccaggtggtggacagtcagcaaaggggaagatgagaagcttgtgtta

SEQ ID NO: 88175 - DNA, 120 bp, synthetic construct
  source 1..120: mol_type = other DNA
tgaaggaaaaacctttttttattattttattgtttttttattttttgagacggagtcctgctctgttgtccaggctggagtgcagtggcatgatcttggctcactccaacctctgcctcc

SEQ ID NO: 88176 - DNA, 120 bp, synthetic construct
  source 1..120: mol_type = other DNA
acacaggaccattaaatgtaacactccaccctttctctctctctctctctctcttgctctctctctctctttctgtcaatatagcaacaccctatatcattgccctttgtatgtgcaaat

SEQ ID NO: 88177 - DNA, 120 bp, synthetic construct
  source 1..120: mol_type = other DNA
ggataactccaagggaactcgaaggaagttgtagtatgaacaaagagaagtagaatttgtccctgtgtgtaaggcttctctgataagcagcacaggctctcatactgctttttaaaaaaa

SEQ ID NO: 88178 - DNA, 120 bp, synthetic construct
  source 1..120: mol_type = other DNA
gccttcttggctacggttatctttttgagatctagctatgctgctggtatgtagaattctatttcattcttttttcattgttgttttgtacccataacgtgtcacattttatttatacct

SEQ ID NO: 88179 - DNA, 120 bp, synthetic construct
  source 1..120: mol_type = other DNA
tatttcccctaataaatccatgcacatttaataccattttgctatttgcaacctgcaggtcctggactaacacagttctatacattgcattaccattctctagagtgggatcttttgttg

SEQ ID NO: 88180 - DNA, 120 bp, synthetic construct
  source 1..120: mol_type = other DNA
ttttttattacttaggattagagaatttcctctggtgaggcatcatagtgtctcaagctggccataaagacaagtgagggctaggatcggtaagactgggcagaggaagatacaacagat

SEQ ID NO: 88181 - DNA, 120 bp, synthetic construct
  source 1..120: mol_type = other DNA
tttcatttgcaaatacagtacatctaacaagaacttaccacagctgctatgcaaaataccaatacaattgacccttggacaatgtgggggttaggggtgctgattccccatgcagttgaa

SEQ ID NO: 88182 - DNA, 120 bp, synthetic construct
  source 1..120: mol_type = other DNA
aaactcacattttataggccattaaatattattgaggagagcatttctaagggtaaaatcttgtctaatgcttgaaacatcttcattttcctgtcagtttagatctttttgaagtaattc

SEQ ID NO: 88183 - DNA, 120 bp, synthetic construct
  source 1..120: mol_type = other DNA
aaccaaagtgccaaaaaacctagcacagtgttaatacaggaataaaaaaatggatcagaggaaccaaacagaaaagccagaaatggatcttaggaaacatgagaatatgatatatgatag

SEQ ID NO: 88184 - DNA, 120 bp, synthetic construct
  source 1..120: mol_type = other DNA
actgcaaataaatgtgagcaagtgaattcaagcacagaagtgcttgaaggcaggtttcataaatctactttcttacagtatcctgatattgacttatcgagacagttactgtggggttga

SEQ ID NO: 88185 - DNA, 120 bp, synthetic construct
  source 1..120: mol_type = other DNA
ggaagatattattatacccattttatagatggacaagttagggccagaaaagacttcctcaaagctgttagtccagtaatggagacagggctagaaaacaggtcattttgctctttgact

SEQ ID NO: 88186 - DNA, 120 bp, synthetic construct
  source 1..120: mol_type = other DNA
aattttacaaacataattcagatttcaactcagcagtgactcaggagaaaggacacttggatgcatttctttatggcatttttcccagggtacacgcaacctggaagatctcccaagtat

SEQ ID NO: 88187 - DNA, 120 bp, synthetic construct
  source 1..120: mol_type = other DNA
gctccacccttcctttatcgtccccaaagcacattatataattattatgcctttgcagcctcattggttagctcccacttgtaagtgagaacatgcgatatttggttttccattcctgag

SEQ ID NO: 88188 - DNA, 120 bp, synthetic construct
  source 1..120: mol_type = other DNA
gattcatcttgagttaatttttgtataaggtgagcattgaggatccagtttcattcttctacgtgtggcttgccagttttcccagcaccatttattagatagggtatcctgtccccactt

SEQ ID NO: 88189 - DNA, 120 bp, synthetic construct
  source 1..120: mol_type = other DNA
ccctgtctcttttccttctttccataaatcttcattaattgcctgcactgagctaggattctatactctctaaatcaataatctattttctatagtcaactgtgttataatcgtactgtc

SEQ ID NO: 88190 - DNA, 120 bp, synthetic construct
  source 1..120: mol_type = other DNA
ttcacaggccttttgttactctagatcagaaatgttgatagcaacagttccttgagggcagcagctagcatgatgccagccaacaggaaccaccaaatggttcttaatataaattactac

SEQ ID NO: 88191 - DNA, 120 bp, synthetic construct
  source 1..120: mol_type = other DNA
agcatggaaaggaattgccttggacccatggaagcccagtgaagatacttagatcctgcaggggtgtgaataatgttcttttagtttctcttcttaggaggtttgttcattttgggagat

SEQ ID NO: 88192 - DNA, 120 bp, synthetic construct
  source 1..120: mol_type = other DNA
tgcattaacattgttgggggaggaggtcccttagtagaaacactcttggtccaagcattttaaagctgtcaaagagatgtaaatatagataatgtatgtcaaggagagagctttgtggtt

SEQ ID NO: 88193 - DNA, 120 bp, synthetic construct
  source 1..120: mol_type = other DNA
gtcatagatgtgagggagagaattaagaacagagtgtggggaagaaactgtgtacattttgatgggatccattatgtagctcttgcatactgtcttcaaaaataagttacactataaagg

SEQ ID NO: 88194 - DNA, 120 bp, synthetic construct
  source 1..120: mol_type = other DNA
gtgctacttctgcaccacttttgagaatagtgttatttcagtgaatcgatgtggtgaccatattgtaatgcatgtagtgaactgtttaaggcaaatcatctacactagatgaccaggaaa

SEQ ID NO: 88195 - DNA, 120 bp, synthetic construct
  source 1..120: mol_type = other DNA
atggctgggttattcctagaagtacctttcttagaatttagttaaatttaatatccaagatactatcttttcaaccctgagattgtgaaaagtaacttctatcaatataaactttactac

SEQ ID NO: 88196 - DNA, 120 bp, synthetic construct
  source 1..120: mol_type = other DNA
ctttagctcaaaactcatgggatgtgattctttcgaccaatttagtgcagaaagaagaaattcaatcctaactgagaccttacaccgtttctcattagaaggagatgctcctgtctcctg

SEQ ID NO: 88197 - DNA, 120 bp, synthetic construct
  source 1..120: mol_type = other DNA
ggtcctctactaagccagtgataactgtgactataagttagaaagcatttgctttattaccatcttgaaccctctgtgggaagaggtgcagtataaataactgtataaataaatagtagc

SEQ ID NO: 88198 - DNA, 120 bp, synthetic construct
  source 1..120: mol_type = other DNA
tattacaggcgtgtgccaccacgtccagcctgagccactgcgcccagcccatctatatagtttaatatcaatctaaatgaatttctcagtcctgagcctaaaaatttagttgtaaagaat

SEQ ID NO: 88199 - DNA, 120 bp, synthetic construct
  source 1..120: mol_type = other DNA
tgatatggagagcataccagcagtgactacatggaacacataccttcgatatattactgtccacaagagcttaatttttgtgctaatttggtgcttagtaatttttctggcagaggtaag

SEQ ID NO: 88200 - DNA, 120 bp, synthetic construct
  source 1..120: mol_type = other DNA
ctgagcctccccccaacctgccgctgcagtgggctcctgcgtggcccaagcctcctgacgagcaccgccccctgctccacggcacccagtcccatagaccgcccaagggctgaggagtgt

SEQ ID NO: 88201 - DNA, 120 bp, synthetic construct
  source 1..120: mol_type = other DNA
caattccggacacaatttgactgcagaaaatggatgtccaaccctgtggtttccctgggccacattggaagaagaaaggagttgtcttgggccacacataaaatacacttactatagcag

SEQ ID NO: 88202 - DNA, 120 bp, synthetic construct
  source 1..120: mol_type = other DNA
atctgtggcttggattcagcttgtgaatgattactgcagatatttattctagaggacacccctgggtatgtcctaatataaaacctaaatctaaactcaagtcccatgctaccttcagag

SEQ ID NO: 88203 - DNA, 120 bp, synthetic construct
  source 1..120: mol_type = other DNA
tgttaatgatttgaacctctgccttgaaagatcacattacttgattgtcttcaacttatctgaatgtggtagtgatttctgtaaatttataggacctttgtctcatgcagctccatggag

SEQ ID NO: 88204 - DNA, 120 bp, synthetic construct
  source 1..120: mol_type = other DNA
atttggtctattcagtttgttagcacttaccattttggaaagagagtgactctacttttgtatttggtaacattttccctactacagggcagtatcttttgtaagttcttagatattagc

SEQ ID NO: 88205 - DNA, 120 bp, synthetic construct
  source 1..120: mol_type = other DNA
ttggcaatgccagcattattaacactcctctagttagaacaaagaggaaatgtaataacaaaacataataatagccaaataaagagtgacttagaatgtacacccttatctaggatcctg

SEQ ID NO: 88206 - DNA, 120 bp, synthetic construct
  source 1..120: mol_type = other DNA
ttattcataaactgtgactttttacactgctgaaacttttttttttaagacaatctcactctgtcgtccagtctggagtgcagcagtggtgtgatcttggctcactgcaacctctacctt

SEQ ID NO: 88207 - DNA, 120 bp, synthetic construct
  source 1..120: mol_type = other DNA
gcaggaggatcacttgagcccaggagttcagggctgtagtgttgtatcattgtgagtagccaccgcactccagcctggacaatatagtgagatcctatatctaaaataaaataaaataaa

SEQ ID NO: 88208 - DNA, 120 bp, synthetic construct
  source 1..120: mol_type = other DNA
gaatgtgatgttggtgggactgtagcagaacaagaaggcccttatgggtcagtcatacctctcttttcaaatatttggtctagctctcttctgggcatcttgttgccaatatatagtatt

SEQ ID NO: 88209 - DNA, 120 bp, synthetic construct
  source 1..120: mol_type = other DNA
tgggcaagtgactcttctgagccttggcctcctcacctgttaagtgaagaaaagaatatttcagaagatctttgtgagaatgaaacaaggcaatttacttgcctgctacatagccaatgg

SEQ ID NO: 88210 - DNA, 120 bp, synthetic construct
  source 1..120: mol_type = other DNA
gaattcctcaagggcaaggagcatggcttattcacctcagtaatttcagtgcctagcattgtgcctggtacaaagtggacacttgtatataaccttttttaattgaagcaacaagttgtc

SEQ ID NO: 88211 - DNA, 120 bp, synthetic construct
  source 1..120: mol_type = other DNA
atttagatgtaatagctgtctacttgggagtgatttgagaggcacaaaggaccatctttcccaaaatcactggccacaaagtgtgacattttggcattggcatcactatttgatggaagc

SEQ ID NO: 88212 - DNA, 120 bp, synthetic construct
  source 1..120: mol_type = other DNA
tgtgatggctctcaaattttttcttttatgccagtttgaatcatttctgctcaatttttttttttaattgggatggagtctcactctgttgcccaggctggagtgcagtgatgcaatctt

SEQ ID NO: 88213 - DNA, 120 bp, synthetic construct
  source 1..120: mol_type = other DNA
ttggttattttctacagattcccactattttaccttgagcagacacttatcttgaagggtctcagatttgtcacttgtagaatggggaatataaacctgataatggtccctttcagttct

SEQ ID NO: 88214 - DNA, 120 bp, synthetic construct
  source 1..120: mol_type = other DNA
tggggactgttgtggggtggggggaggggggagggatagcactgggagatatacctaatgctagatgacgagttagtgggtgcagtgcaccagcatggcacatgtatacatatgtaacta

SEQ ID NO: 88215 - DNA, 120 bp, synthetic construct
  source 1..120: mol_type = other DNA
ccatttcgtgtgcccccaaactctacttgagctgttagggaatcacattttgcagtgacagccttagtgtgggtgcattttcaggcaatactttttcagtatatttctgctttgtagatt

SEQ ID NO: 88216 - DNA, 120 bp, synthetic construct
  source 1..120: mol_type = other DNA
ctcttcatactcatattggtgaagggtcctagcttcaaaattaatagattcctaaagaggggaaatgaaacatccgcatttacacacacacacacacacacacacacagagttcctcttg

SEQ ID NO: 88217 - DNA, 120 bp, synthetic construct
  source 1..120: mol_type = other DNA
gatagtgggttcaccacctttgttgttctctcagctagggcagtgggaaatgactctatgaaaggaatatacatgggcaggcaaatgtactaatcctcatcagtactgtaattttaagca

SEQ ID NO: 88218 - DNA, 120 bp, synthetic construct
  source 1..120: mol_type = other DNA
tgcatagagggtaatcttttctctttccaaatggcagaactgttagttttctgactgtccggtgaaattctaagtccacttacttcccaatagcatgcaattagcaaaggtcctccttgc

SEQ ID NO: 88219 - DNA, 120 bp, synthetic construct
  source 1..120: mol_type = other DNA
cacccatgcttaactgagtggtgccaaattgtcctcaagtctgttgtactgatatatatccccatcaagagagtacaagaattctcatagctatgtatcttcaacaacacttggtgtctg

SEQ ID NO: 88220 - DNA, 120 bp, synthetic construct
  source 1..120: mol_type = other DNA
tctttccttgttctctgagacagtgttcatgttcccaaaccacacacatttattcagctataaaatttgtatgatcaactcctgtcagaacaaacatcattataaaaaatatctccagga

SEQ ID NO: 88221 - DNA, 120 bp, synthetic construct
  source 1..120: mol_type = other DNA
ttcacctcagcatatgttgagagtaggaaatagataggactatgccctcaaattttacgtttatatgatgttaatcctaaaggtccttgtgacttctgaagtaaaaactcagtgttgtca

SEQ ID NO: 88222 - DNA, 120 bp, synthetic construct
  source 1..120: mol_type = other DNA
aactcaggatcaacatcttgccagagccaatttccttgtctcccttaacagctccagcagtatttatgccatggacaaattattcttcttgtgatactttctctcttgcttccatgacac

SEQ ID NO: 88223 - DNA, 120 bp, synthetic construct
  source 1..120: mol_type = other DNA
ctattggaacaccccatgttaggggatttccagttatttcaattgatatctcaatgttttaaagattgtttatttctattactaattcactctttattttaacataaattgtggctatct

SEQ ID NO: 88224 - DNA, 120 bp, synthetic construct
  source 1..120: mol_type = other DNA
gttttgggttccagtaaagatcaagtgactgattgtaccatgaccaacaagaagcctgatgtgtggagaaaaggggaacctggcttttctgcattactcctaatgcctaattttcttgta

SEQ ID NO: 88225 - DNA, 120 bp, synthetic construct
  source 1..120: mol_type = other DNA
tgcctgtaatcccagcactttgagagcctggggcaggtggatcacttgagaataggagttgaagaccaagctggtcaacatggcaaaaccctgtatctactaaaaattcaaaaattagcc

SEQ ID NO: 88226 - DNA, 120 bp, synthetic construct
  source 1..120: mol_type = other DNA
agtaagtttgagtcttcctttgcccattgacacacttagtaccatgtttaccaaagttcttagttattgaaatgggcaccagcatattttgaaacgttggtgttaacttgggatatgcct

SEQ ID NO: 88227 - DNA, 120 bp, synthetic construct
  source 1..120: mol_type = other DNA
tactggcttctgaacaaccaaaaggatgaaaggaaatagaacaaatatttttgtgagggagaggagtctggcttcttgacttactctagaaaaagcctgtaagcctcctcttccctcctt

SEQ ID NO: 88228 - DNA, 120 bp, synthetic construct
  source 1..120: mol_type = other DNA
ggcgctgaggggtaaaattgcagcctggactacttgctaatgtagacctacagcactgtcattcttactgcacagacactgctttctgcataggaggtagaataatgaattcatttatta

SEQ ID NO: 88229 - DNA, 120 bp, synthetic construct
  source 1..120: mol_type = other DNA
ctcctttgttctaaaattccccaaatctacttgaggatagaaccaggatttggttgcaaggcagaacttttcttagaggacctggtatctaaaccctcttgttacccccatttatggacc

SEQ ID NO: 88230 - DNA, 120 bp, synthetic construct
  source 1..120: mol_type = other DNA
gaattttaactacatctctggcagtttcatctcaatagtagttgtaattttatctcccagaccttattatagactagcagctctctatgaaaattagtgacagtgtgagtgtattttaat

SEQ ID NO: 88231 - DNA, 120 bp, synthetic construct
  source 1..120: mol_type = other DNA
aggattgagccacaggatcaaagatggtatcttttaaaaatagaagttgagtgaattcggtcttcaaattctttctttttattcatttatatttatttactcattagtatattcattcct

SEQ ID NO: 88232 - DNA, 120 bp, synthetic construct
  source 1..120: mol_type = other DNA
ctcgaaagttatgattattgagaattcacacgtgaagaaagatgacatctggccctcagggggccaaatgactgtcaaagatctcacagcaaaatacacagaaggtggaaatgccatatt

SEQ ID NO: 88233 - DNA, 120 bp, synthetic construct
  source 1..120: mol_type = other DNA
ctttatctctctgtggttaattgcaaacacagatacaaaaatatagagagagatacagttagtaaagatgttaggtcaccgttactaacactgacatagaaacagttttgctcatgagtt

SEQ ID NO: 88234 - DNA, 120 bp, synthetic construct
  source 1..120: mol_type = other DNA
caaaggagcttggctttatagacccaaaaaaagggccaaaggaagcagaaacaaagaacaataagagaattggtcatttcaaagttacttttcttgaaaggtggggacaaggagacagaa

SEQ ID NO: 88235 - DNA, 120 bp, synthetic construct
  source 1..120: mol_type = other DNA
acacagatacattgaagcatgagtagagcaggattttattgggcaaaaaggaaaaaaagaaaactcagcaaatcgagatggagtcttgctcacagattgaatcccaggccaccacaaagg

SEQ ID NO: 88236 - DNA, 120 bp, synthetic construct
  source 1..120: mol_type = other DNA
gagaaatacaggtgaataacatcctttgttattcatatcaagcccctatcaaccataccccagtttctatttatgaagtggcttttgggaagtccctaaagacaggagtggggaaaggct

SEQ ID NO: 88237 - DNA, 120 bp, synthetic construct
  source 1..120: mol_type = other DNA
caaagaattaaaaattctgagggtgtgaacggggtctgagtttcagcacaacttcccgaccatgctgatgcattcttgcccaagcatgaaagccctcccttgtttaagaaggccattagg

SEQ ID NO: 88238 - DNA, 120 bp, synthetic construct
  source 1..120: mol_type = other DNA
tgcctctctttatgtacttaagaatcagtttgccaatgtatgcaaaataactggctgggattttgattgtgattggcttgaatctatagatggagttgggaaggactgacatcttgacaa

SEQ ID NO: 88239 - DNA, 120 bp, synthetic construct
  source 1..120: mol_type = other DNA
gttagggagtatttcctctacttttacatttgagaagagattgcagagaattagtaaaattcctactttaaatattttgtggaattcaccagtgaacccatctggacctggtgctttctg

SEQ ID NO: 88240 - DNA, 120 bp, synthetic construct
  source 1..120: mol_type = other DNA
tcaattatgtccagttgattgatggtgctgttgaattcaactatgtccttactgattttccacctgctagatctgtccattctttgcagagggacactgaagtctccaactctagtagtg

SEQ ID NO: 88241 - DNA, 120 bp, synthetic construct
  source 1..120: mol_type = other DNA
ttcattctctaatacactttctttctttatgtagatccaagtttctgacctgtataattttccttttctctcttcagcttctttgaacatttcttaccagccagacctactgacaacaat

SEQ ID NO: 88242 - DNA, 120 bp, synthetic construct
  source 1..120: mol_type = other DNA
atctgttcttgcatgttgcctactttttccatgaaaacctttagctttttttttttttctttttgaggtggagtctcactgttgcccaggctggagtgcagtggtgtgatcttggctcac

SEQ ID NO: 88243 - DNA, 120 bp, synthetic construct
  source 1..120: mol_type = other DNA
gccactgcagtctagtctgggtgacagagcaagactccgtctcaaaaaaaaaagaatgctctggcatatttgaaaatggttacttttccctttttttctctgatcttcactgtgagaacc

SEQ ID NO: 88244 - DNA, 120 bp, synthetic construct
  source 1..120: mol_type = other DNA
tggatatcccaaaacactgccagctcagctttaggctgcccttcttgggggggaaaaaagcagttgaaatttaggacttaagtgggcatctcgtttaatttttaatggatttctatgttg

SEQ ID NO: 88245 - DNA, 120 bp, synthetic construct
  source 1..120: mol_type = other DNA
ttacaagagtcttccatctgttgcagtattaaaatggcgagtaagacaccctgaaaggaaatgttctattcatggtacaatgcaattacagctagcaccaaattcaacactgtttaactt

SEQ ID NO: 88246 - DNA, 120 bp, synthetic construct
  source 1..120: mol_type = other DNA
tccattcttccatctggctatcccttagtcaattcaaataaatatttatggggcactttgggtaagccaggtgctaagaattcaatgcaaaacaagatagactcccctgtccttgttgaa

SEQ ID NO: 88247 - DNA, 120 bp, synthetic construct
  source 1..120: mol_type = other DNA
gagtggtaaggccttcgcccaacctgccttctctgggaatatactgctgcctgaacatatcattgtttattgccaggcttgaacttcaccaaattaatttattagggtcaacatctaaat

SEQ ID NO: 88248 - DNA, 120 bp, synthetic construct
  source 1..120: mol_type = other DNA
cttcagtggcctgacctccaagttagcaatcgccaggttgagaaatgctttgcgagacataacagatgctcctgaaataacaaacacttggaatcatgaggtagtggaattgaaaataga

SEQ ID NO: 88249 - DNA, 120 bp, synthetic construct
  source 1..120: mol_type = other DNA
cactgggaatcctttagtttatctactatgtagtagagaggttttgttttattgcatgtttgacgtaggaacgtatatatgcaagacatggaggaaaaccaagtgggccagagttttgaa

SEQ ID NO: 88250 - DNA, 120 bp, synthetic construct
  source 1..120: mol_type = other DNA
gtgacaaactattctgaggaaatgattaggcctattcttgcaacgagtctttatgatctgaaaagaatctatgtccacacataactcccacctcaaagatggggcatcttttgctctggg

SEQ ID NO: 88251 - DNA, 120 bp, synthetic construct
  source 1..120: mol_type = other DNA
gtacattgttttgtgctgaatcactaaatgcttgatttctgtaacaagagattgtggttccatcagtatctggattttagtctgtgtaatcttaggcaagttatttgatttctctgtgcc

SEQ ID NO: 88252 - DNA, 120 bp, synthetic construct
  source 1..120: mol_type = other DNA
atatttttgactgaggaatattttattcatctaattatagctactttgttctaactaatagatattcttgaaaacaaagcaacacttttttggagacagagtcttgcactgtcacctaga

SEQ ID NO: 88253 - DNA, 120 bp, synthetic construct
  source 1..120: mol_type = other DNA
acctacctactgtgtgagtgtgtgcatatatacacgcacacacacacacacaaatatatatatttcccttctgagacaaagccaaacagcactgtatgcttaaagaaaaacagtcacact

SEQ ID NO: 88254 - DNA, 120 bp, synthetic construct
  source 1..120: mol_type = other DNA
acgatcaaaattttaatgggttgttagtattatttctttaaagattgtgatactgataaatatttggccacattttaatagaattatacatgggatgtgtgtgtgtgtgtgtgtgtgtgt

SEQ ID NO: 88255 - DNA, 120 bp, synthetic construct
  source 1..120: mol_type = other DNA
cgaatggatgggtagagatgcaagagtgaaagggaagaaatcaattaggaggctcttgccctgctccagataggactgataattaattttatttgggaagatcagggagaaagataagtc

SEQ ID NO: 88256 - DNA, 120 bp, synthetic construct
  source 1..120: mol_type = other DNA
tatagaatgagcctgtcccaggacatggttcatgataagtctgccataaatgggagctatgtgtcccacccttttggaggagataactgttctgtagcaggtaatatattgtttgatact

SEQ ID NO: 88257 - DNA, 120 bp, synthetic construct
  source 1..120: mol_type = other DNA
tataggcagaattaagtagacggtgatctggtaagtagatgtttcagggtaacagctgtgcaatgctccatgcagggaattagattgtcattttattccttaccaggaacatacattcag

SEQ ID NO: 88258 - DNA, 120 bp, synthetic construct
  source 1..120: mol_type = other DNA
tatggctaagatcattctacacactttgtgtgcatgtatttctgtgcacaacttcaaaatggagtaccctaaaatacctggcgcgacaagtacttttgactgagcctacttctctcctca

SEQ ID NO: 88259 - DNA, 120 bp, synthetic construct
  source 1..120: mol_type = other DNA
gaaaagaaaaaaggagtgacaggtctctataagtctaaaactttaaggcttgagaataatttgctttgctttgcctccaggctcactggggtggtgtcttacctctggacacactggggt

SEQ ID NO: 88260 - DNA, 120 bp, synthetic construct
  source 1..120: mol_type = other DNA
aatatccccactgtctgaatgcatagcacctagtttctgttgagatggctagtccatagtaatttacttatcaaatttggccacaccctttgtattctctcctgagcaggctttctcatc

SEQ ID NO: 88261 - DNA, 120 bp, synthetic construct
  source 1..120: mol_type = other DNA
ttttataagggcagtaatccaaatcatgggtttagggtagagccctcatgacctaaatcacctcccaaaggccccacctcctaataccagcatctttgaagttaggatttcaacatatga

SEQ ID NO: 88262 - DNA, 120 bp, synthetic construct
  source 1..120: mol_type = other DNA
tcacagtggaccctgccaggagctttgaaatgcctgtgagtgttaaacacttacccattgagtgcccaaccttaacatgcccctaataaaatgtacttagattaaccgttttcattatca

SEQ ID NO: 88263 - DNA, 120 bp, synthetic construct
  source 1..120: mol_type = other DNA
agtgtagaatcttatccttgctgatctggactgtatctcatgaagccatgacttgtacctagttactagctggaaggcttagaacaaaagctggtccagagagcctcctttttccttatt

SEQ ID NO: 88264 - DNA, 120 bp, synthetic construct
  source 1..120: mol_type = other DNA
tccctggggagtatctgaaatatattcacttttcttcatttccacctgacaccactattaacacttgcacaaatttctgaggttcctggctcatttccctcattgacccccaatagttca

SEQ ID NO: 88265 - DNA, 120 bp, synthetic construct
  source 1..120: mol_type = other DNA
ctgccacttatggattattcagtaaaaccacaattcacttttatgattttttttcatgtttctctgtcacaagagcaaactcttgctccataataacattccagaatacagcaatagcaa

SEQ ID NO: 88266 - DNA, 120 bp, synthetic construct
  source 1..120: mol_type = other DNA
cccatagtgcttatctctttgaacagtaattttccacttactatttttctccccttttggaccataatttcctttaaggcagagcctcctgttactcatctttgaatctggggtctgtca

SEQ ID NO: 88267 - DNA, 120 bp, synthetic construct
  source 1..120: mol_type = other DNA
aatgagacttaaaataatgtgcctgatatcatcagcaaatgagctgaggagggcagattcaaagctgattgtgtttgactctagagctgcagtcttaagccagaccttttcttgctggtt

SEQ ID NO: 88268 - DNA, 120 bp, synthetic construct
  source 1..120: mol_type = other DNA
aattattaacttataggtggtcatcaataccctgaaaatgactgggatctcagaggagagtctggagagttggaaatgacaaagactaatattcaagggggcaggaagagggagagttgt

SEQ ID NO: 88269 - DNA, 120 bp, synthetic construct
  source 1..120: mol_type = other DNA
tcaggtggagcccatcttacctcctcatactaaattctagacttctcaagggcaggagacaatcatctgtatatctctttggccttcatacactcaggagtacttgccaaaaataaacat

SEQ ID NO: 88270 - DNA, 120 bp, synthetic construct
  source 1..120: mol_type = other DNA
tagaatgtcaactgcttgagtgtttttaactctgtggtatctgaactatcttctctaactgcaggttgggctcagatctgtgatagaacagtttcctgggaagcttgactttgtccttgt

SEQ ID NO: 88271 - DNA, 120 bp, synthetic construct
  source 1..120: mol_type = other DNA
ctaaaacaagcatttgctgattgcacagtaattctctgtgaacacaggatagaagcaatgctggaatgccaacaatttttggtgagtctttataactttacttaagatctcattgccctt

SEQ ID NO: 88272 - DNA, 120 bp, synthetic construct
  source 1..120: mol_type = other DNA
ctaagtaaagtcctctattgtctgatcttggatttgctcaacctgaacaagccaaggaggtgtattaaactcaggcacatcctgaccaatttggaattcttaagcttcagatcactgtgg

SEQ ID NO: 88273 - DNA, 120 bp, synthetic construct
  source 1..120: mol_type = other DNA
ctggcaatagtcaaattgtgtgaaaggtacttcaaatccttgaagatttaccacttgtgttttgcaagccagattttcctgaaaacccttgccatgtgctagtaattggaaaggcagctc

SEQ ID NO: 88274 - DNA, 120 bp, synthetic construct
  source 1..120: mol_type = other DNA
ttgactttttatggcactagtatttctatgaaatattatgttaaaactgggacaggggagaacctagggtgatattaaccaggggccatgaatcaccttttggtctggagggaagccttg

SEQ ID NO: 88275 - DNA, 120 bp, synthetic construct; identical to SEQ ID NO: 23323
  source 1..120: mol_type = other DNA

SEQ ID NO: 88276 - DNA, 120 bp, synthetic construct; identical to SEQ ID NO: 23324
  source 1..120: mol_type = other DNA

SEQ ID NO: 88277 - DNA, 120 bp, synthetic construct; identical to SEQ ID NO: 23325
  source 1..120: mol_type = other DNA

SEQ ID NO: 88278 - DNA, 120 bp, synthetic construct; identical to SEQ ID NO: 23326
  source 1..120: mol_type = other DNA

SEQ ID NO: 88279 - DNA, 120 bp, synthetic construct; identical to SEQ ID NO: 23327
  source 1..120: mol_type = other DNA

SEQ ID NO: 88280 - DNA, 120 bp, synthetic construct
  source 1..120: mol_type = other DNA
gtcaggtcagatcagggtttaggcccatcagtcctgaaagactccagagagccatgggccccagctactgcctgggggcccacactgttgtcaggtctctgctggtctctcccccgggat

SEQ ID NO: 88281 - DNA, 120 bp, synthetic construct
  source 1..120: mol_type = other DNA
ctctgcatttggtcccagcaggtgaggctctgggctacacgccaggccatgctgggccaggtgcacgaggttcccgagggctggctcatcttcgtggccgagcaggaggagctctacgtc

SEQ ID NO: 88282 - DNA, 120 bp, synthetic construct
  source 1..120: mol_type = other DNA
tgtgacatccgtgggagcctccatggcagaacactgcacactgacacagccctgactcctggagccctcccaccttccaacacacccaccttccttctagagccctcccaccttccctct

SEQ ID NO: 88283 - DNA, 120 bp, synthetic construct
  source 1..120: mol_type = other DNA
agggacggtaaggagccttttttctgttgagactggtgggtggtcaggacatgagggggtatgtgctgtcccctgtttgaggaacaacacgtggtcctttggagtcctggagctgaacat

SEQ ID NO: 88284 - DNA, 120 bp, synthetic construct
  source 1..120: mol_type = other DNA
gatgggtagaaatattttcgttttcctaagtgttgcgtccagctgctgtcggcccctccttgagtagaggtcatgattccttaattggctcaggagtgaggcctgatgtggagcagtgtc

SEQ ID NO: 88285 - DNA, 120 bp, synthetic construct
  source 1..120: mol_type = other DNA
cccacaagcccacccgcccacagccaccgcgacttccagccggtggtgagtgcccccccaaagtgggcttggctccatctagcccctcggctctcggcagcagaagagggcccagcccct

SEQ ID NO: 88286 - DNA, 120 bp, synthetic construct
  source 1..120: mol_type = other DNA
tgatagggctcacatacaagcctggaatcaggaaccgtcctttgggcctctagtgccatgcgggctggtggcccctctgccacagcacccatgtggctttattctgtggccccttttcgt

SEQ ID NO: 88287 - DNA, 120 bp, synthetic construct
  source 1..120: mol_type = other DNA
cagcgagtttattcaccgagaataaactcctcaaagggcaacacggagtccgagcatgtgtgcccttaaaatgttgacagaaatttccagggtatctagaagaacgcttcgtcccaaatg

SEQ ID NO: 88288 - DNA, 120 bp, synthetic construct
  source 1..120: mol_type = other DNA
ttcatgtaatcctcaagaaataaaaggaagccaaagagtgtatttttttaaaagtttaaaacagaagcctgatgctgacattcacctgccccaactctcccctgacctgtgagcccagct

SEQ ID NO: 88289 - DNA, 120 bp, synthetic construct
  source 1..120: mol_type = other DNA
tggggctggttctgtaattgtgtgtgatgtgaagccaattcagacaggcaaataaaagtgaccttttacactgactcttggtttgcaagcagccttcactgtcacaggaaggacacaatt

SEQ ID NO: 88290 - DNA, 120 bp, synthetic construct
  source 1..120: mol_type = other DNA
cggccctgaatcagaagccctgcgcacactcacttaagtgtgtttaatgtatgtgggaagagtattcacatcacatcagatggtcccgcacctgtgggcaaggcactagcgctccttaga

SEQ ID NO: 88291 - DNA, 120 bp, synthetic construct
  source 1..120: mol_type = other DNA
gcgcccgagagtcactggttcacattctgaacaccgtcgcttggaagacactgcaaacccagcttgctgacaccaggaggatggacagccagctggggacaagtctcatctgcagcctca

SEQ ID NO: 88292 - DNA, 120 bp, synthetic construct
  source 1..120: mol_type = other DNA
tgctacgatgaccagaaggagcagcaccagcgttggccacatctctcctgattctcgcagctgccaggggcaggagggactggagatgtccctgggacaccagggagggacctgatcatt

SEQ ID NO: 88293 - DNA, 120 bp, synthetic construct
  source 1..120: mol_type = other DNA
gcctcttatcctcacccagtagtaagagcgtgcctgtcctgtccccctccatgctggggggtgtcagaggaggtcaagcgggagtccagactttcacctacccagcaataatgagaatgt

SEQ ID NO: 88294 - DNA, 120 bp, synthetic construct
  source 1..120: mol_type = other DNA
aaaatcttggaagtggccagagaaaaatgacactttacgggcaagcaatttgaataacagtaattgctcatcaaaaatcctgaaagctatgaggaaggggcaccacatttctcacaggct

SEQ ID NO: 88295 - DNA, 120 bp, synthetic construct
  source 1..120: mol_type = other DNA
ccagggacagcagagacagagaaggacattatataatcccactattacacaattgacaagagggtcagtccaccaaaacaaatttcaatccctaacgtgtatgcaacaaacaaaagagct

SEQ ID NO: 88296 - DNA, 120 bp, synthetic construct
  source 1..120: mol_type = other DNA
aattcatatgttgaagccctaacccacaatgtcactgcatttgaagacagggcctttcaaaaggtaattacggttaaatgaggtcacaaggatggcatcttactccaacctgactggatg

SEQ ID NO: 88297 - DNA, 120 bp, synthetic construct
  source 1..120: mol_type = other DNA
cagaaacagactcacataaatatgcccaacttttgacaaaggtgcaaaagtaattcaatggggagagctaagtcttttcaacaaatgatgctggaataaatggatacgcacaggccaaaa

SEQ ID NO: 88298 - DNA, 120 bp, synthetic construct
  source 1..120: mol_type = other DNA
gatgaatgttcagagaacagtgttgagtgaaaagagccaatccctaaacgatacacaatgcatagccgtgtttatacaacactcctgaaatgacaaactcatacaagcggagaagagggt

SEQ ID NO: 88299 - DNA, 120 bp, synthetic construct; identical to SEQ ID NO: 23331
  source 1..120: mol_type = other DNA

SEQ ID NO: 88300 - DNA, 120 bp, synthetic construct; identical to SEQ ID NO: 23332
  source 1..120: mol_type = other DNA

SEQ ID NO: 88301 - DNA, 120 bp, synthetic construct; identical to SEQ ID NO: 23333
  source 1..120: mol_type = other DNA

SEQ ID NO: 88302 - DNA, 120 bp, synthetic construct
  source 1..120: mol_type = other DNA
gaacccaagtctaaacacgaaatgcatttatgctcatatgcactgtacacacacagccagaaggtgattttatataatacctgacaaacatttgcaagccaaaggggttgcctgctactg

SEQ ID NO: 88303 - DNA, 120 bp, synthetic construct
  source 1..120: mol_type = other DNA
tggaggtgagtggcagcgggcagggtgggcccaggaggtgagaggcagccaggcagggcaggccctggaggtgagtggcagcaggttaggacgggccctggaggtgagtggcagcgggca

SEQ ID NO: 88304 - DNA, 120 bp, synthetic construct
  source 1..120: mol_type = other DNA
cttccaaggacactcagaaacactgtgagttgaattaaaggcagacgagtgtggggcgtgatgggggcacaggtgattgaaaatacatgatacagatgaatgctccccagatcagcaggg

SEQ ID NO: 88305 - DNA, 120 bp, synthetic construct
  source 1..120: mol_type = other DNA
agtacagggccgggcacatccaggcaggatgctgcaggggtgaggccactgacacagagggcccaatgcaagggtcaggagggtgctctcagctcaaacaggctcgtgaccagcataagg

SEQ ID NO: 88306 - DNA, 120 bp, synthetic construct; identical to SEQ ID NO: 23337
  source 1..120: mol_type = other DNA

SEQ ID NO: 88307 - DNA, 120 bp, synthetic construct; identical to SEQ ID NO: 23338
  source 1..120: mol_type = other DNA

SEQ ID NO: 88308 - DNA, 120 bp, synthetic construct
  source 1..120: mol_type = other DNA
gaatcgttattaacaagcctgttcatctaagcttctctatttttatctctttcttgggacagagtcttgctctgtcgcccaggctggagtgcagtggcacgatcttagctcattgcaacc

SEQ ID NO: 88309 - DNA, 120 bp, synthetic construct
  source 1..120: mol_type = other DNA
ttccatgcctgtggcctcaacacacatccaccttccatgggaacgtggagctgggcacggggctgggggtgctacctcctacaggacaaggtcagaggacactgccccagactactacag

SEQ ID NO: 88310 - DNA, 120 bp, synthetic construct
  source 1..120: mol_type = other DNA
agcccctggccggggcacaggttctgcccacagcccagagtcaaaatggtagacagccagcagagaggctctccccagaccccacggctctctggaaaagggcggccaggggtcctagaa

SEQ ID NO: 88311 - DNA, 120 bp, synthetic construct
  source 1..120: mol_type = other DNA
cacggactcggccggggaaagcgctctcagctgacactcaaagcagaaaccctggagggaaatttggccaaattcaaaatgactccagagaaacaccgtatgtaacacacaaccagtcca

SEQ ID NO: 88312 - DNA, 120 bp, synthetic construct
  source 1..120: mol_type = other DNA
acatttttgctctagagacttttcttattttgttattttaagggaaacgccacacataatgctcacccctataaataaccttggcggtggacagtggccctccactaagagcagagatgc

SEQ ID NO: 88313 - DNA, 120 bp, synthetic construct
  source 1..120: mol_type = other DNA
atgaaaattccttcaataatctctttaggtaaatagccactaagtctctgtggaaggcaggtgcccagcagggttggacgtgggcttcctcaccaggagggccgatgagcacggcctggc

SEQ ID NO: 88314 - DNA, 120 bp, synthetic construct
  source 1..120: mol_type = other DNA
catcctgctcaggccacgtgcagctccggaggggacgaaggtgacgctgtgcctggaaggaggggtggagtcagggcaccttggaagatggtctgcaggcctccctaccccgcaaaacga

SEQ ID NO: 88315 - DNA, 120 bp, synthetic construct
  source 1..120: mol_type = other DNA
aaagcctgtccacttatcagaatcatgtctccaggtgccacgtggccctggttttccattaaggcctcggtgtaaagttctccttcaagtaagtcaaaagtgaactgccataaacaagtg

SEQ ID NO: 88316 - DNA, 120 bp, synthetic construct
  source 1..120: mol_type = other DNA
accttccatgcctcctcagggcctgtcaacagctgggaagatcagtgcacaaaggttgggctccatcaccagggaccctgatgcccagagaggccacgggtagagctggacatacctcag

SEQ ID NO: 88317 - DNA, 120 bp, synthetic construct
  source 1..120: mol_type = other DNA
cctatcattccgtgtttaaaccagctcctactctggaaggctaaccaagaatgttcgttatgttttttagaacgcctgctagtttaaaaagaagaagaagaaagcattgcacaccctccc

SEQ ID NO: 88318 - DNA, 120 bp, synthetic construct
  source 1..120: mol_type = other DNA
aacacgtgcctgggcgcgaacgccggatccacgctttcctccagacccgggggtgggacttggcgccccaggatgacgcggagggcaggctgggggccgggactccccaccccattcgca

SEQ ID NO: 88319 - DNA, 120 bp, synthetic construct
  source 1..120: mol_type = other DNA
tcactttcccctggagttacccagggcctggctatggggagggaagccaagccgagggctgtgggggccccaaggctaaggaggagccaggaagtccactgcacagaacagaaggggacg

SEQ ID NO: 88320 - DNA, 120 bp, synthetic construct
  source 1..120: mol_type = other DNA
gcttcggagtggggaggtagggcttctgccaccaacagcacttggcagttgtaatctagaggcagctgctctgagggaagagccaggagactcgtgaagaacttacagaaacctccattg

SEQ ID NO: 88321 - DNA, 120 bp, synthetic construct
  source 1..120: mol_type = other DNA
atgaggacggatccctcatgaatggcttagcaccatcaccttggtgatgagtgagttcttgttcagttagctcactcaagagcaggttgtttaaaagagtccgggaccccccccttgccc

SEQ ID NO: 88322 - DNA, 120 bp, synthetic construct
  source 1..120: mol_type = other DNA
aggtccctcacagcctgtcacagccccacagcagtggggctaacctgggcctgtgcctgccacacttcttccctggaagggtgtcccacctggtcctctgggcatggagttgaattctga

SEQ ID NO: 88323 - DNA, 120 bp, synthetic construct
  source 1..120: mol_type = other DNA
ggatggatactcgtcattatacctgacccccttttggaattcagggaaagccgaccaactttcaacgtcaacacagaccttaagtctgataagaatcatttagaatctagtctttgaagc

SEQ ID NO: 88324 - DNA, 120 bp, synthetic construct
  source 1..120: mol_type = other DNA
ttgtatccagacacgtaagtgacgcttacaactgagtaataagaaaatagcccacttcttaaaacacacaaaagaggccgggcgcagtggctcacacctgtaatcccagcactttgggag

SEQ ID NO: 88325 - DNA, 120 bp, synthetic construct
  source 1..120: mol_type = other DNA
gttcatctgtcagacatgtttaacaactgcttctaatgggtgcaatttatggcatgtgaattgcacctcgataaaattgttttttaaaagcctgcactgctggaagtgggggaaaggcct

SEQ ID NO: 88326 - DNA, 120 bp, synthetic construct
  source 1..120: mol_type = other DNA
caagcacaagtgaacgtttccacgtggaaagggctggttctccagctggaatttccttgactacacggtcttattagatccagaatggaactgcatgaaataaacagggagatttgggca

SEQ ID NO: 88327 - DNA, 120 bp, synthetic construct
  source 1..120: mol_type = other DNA
actacacttgttgctgtcagcctctacgtaggacgtgatttttgcttgatttcctcttggactcatgactcattacagagaatgattcaaacgtttccagtaggcagatgttgttgtttg

SEQ ID NO: 88328 - DNA, 120 bp, synthetic construct
  source 1..120: mol_type = other DNA
cgaatgtgcagagaccccgggtcctacccaggcccgggtctcgggaccacgtggaggagggattagcgcgtgctataatccgcagtcaccagcagagcagacagcctctcgcccagaaca

SEQ ID NO: 88329 - DNA, 120 bp, synthetic construct
  source 1..120: mol_type = other DNA
aagagacataaaatgtaccatgttaactatttttaactgcacacttcaatggcattaaggacattcacactgttgtgcggccgtcacccccatcatctccagaactctttcgtcctgcaa

SEQ ID NO: 88330 - DNA, 120 bp, synthetic construct
  source 1..120: mol_type = other DNA
ccccaatcccccgcgcccccctcccaatcccctgcgcccccatcccactttctggccgggtctggccaccgcggggcctctgagtggaaccacgcacagggggcgtcctcttgtgcctgg

SEQ ID NO: 88331 - DNA, 120 bp, synthetic construct
  source 1..120: mol_type = other DNA
tgtggagagctgggggccgtggggggtgttgggggcgggagggggatgggggaggttgtggggggaaggggaaccggcttgggtggccatgcaggcgacgcgggttgcagggaacggagg

SEQ ID NO: 88332 - DNA, 120 bp, synthetic construct
  source 1..120: mol_type = other DNA
gctgctccccaccagcgcccgggcttgggtgtttggtgcttccaacttttcaagagaagcttgaaatctgtaattcttatgtgaaatcctgcctttcttaactaattaaagacttaaaat

SEQ ID NO: 88333 - DNA, 120 bp, synthetic construct
  source 1..120: mol_type = other DNA
gtcttccctatcagtggagacagaccttggcctcgtgacaccctggagtccccggctttgaccccgtagcccgtgccacattctcctgaggcttctcgtctgctctgggtgaaccaggtg

SEQ ID NO: 88334 - DNA, 120 bp, synthetic construct
  source 1..120: mol_type = other DNA
tgggcctgcagctctggctgctgagaaatccccagtgggcccttcaatctttgaaggattcgccccattgtcactgcagtgagaccccctgagaacccgggaaggcagtggtgccgcaga

SEQ ID NO: 88335 - DNA, 120 bp, synthetic construct
  source 1..120: mol_type = other DNA
gaaaagatgagtagatgtgcttgcatccaacctaaaaacatctttaagtcaaaaagcaccatgaagaactgccagcccctcagctgtgtggaaacatcgcaacgttgaggccgggtgagt

SEQ ID NO: 88336 - DNA, 120 bp, synthetic construct
  source 1..120: mol_type = other DNA
cactccatgtccatcaccttgggagggtcaggcaaagcgcactgggtgcccactatggcccccacaggagctaatccaccatgcagcagggaggggtcttggagacgctatgtgggaatg

SEQ ID NO: 88337 - DNA, 120 bp, synthetic construct
  source 1..120: mol_type = other DNA
gaggtctgaacaacacccagctgggggcaaatgccttcagacaagcacaaccaaagtaaaacaggaacgagcaatgaccctaaaagatgtgctagaaataattgaccaagtataaaataa

SEQ ID NO: 88338 - DNA, 120 bp, synthetic construct
  source 1..120: mol_type = other DNA
cttttaatcttaagacagttatcagtcagagagctcaggcatgaaccaaaatctatgtttgtggaaaatgatacacagacaacactcaccacacaggtgcatcacactgacacgacacca

SEQ ID NO: 88339 - DNA, 120 bp, synthetic construct; identical to SEQ ID NO: 34153
  source 1..120: mol_type = other DNA

SEQ ID NO: 88340 - DNA, 120 bp, synthetic construct; identical to SEQ ID NO: 34154
  source 1..120: mol_type = other DNA

SEQ ID NO: 88341 - DNA, 120 bp, synthetic construct; identical to SEQ ID NO: 34155
  source 1..120: mol_type = other DNA

SEQ ID NO: 88342 - DNA, 120 bp, synthetic construct
  source 1..120: mol_type = other DNA
atttctgacatataggaagcctactggttttgtatactttggggcatacggccatcttaatatcccctctccttaattagaatgctttttcagtggattctcgcgcgttttctaggtagg

SEQ ID NO: 88343 - DNA, 120 bp, synthetic construct
  source 1..120: mol_type = other DNA
ccctaggaagcctgcaaataaatagcaagaagactcctccaccctagcaagtgcattctcttattgtatcgtggtacaacttagcattcctttctttcatcctaacctttctagacagta

SEQ ID NO: 88344 - DNA, 120 bp, synthetic construct
  source 1..120: mol_type = other DNA
tcctgctcctcctcctcctgctcctcctcctcctcctcctcctcctcctccttctcctcctcctcccggtctgagggcggcggtctccgactcaagaccctggggctccgggtcttctta

SEQ ID NO: 88345 - DNA, 120 bp, synthetic construct; identical to SEQ ID NO: 34156
  source 1..120: mol_type = other DNA

SEQ ID NO: 88346 - DNA, 120 bp, synthetic construct
  source 1..120: mol_type = other DNA
gcagagagcggttgtaattttgtgcaacagacactgaccggctttttattttatctttttatatttgggggagggggggaatgattgtactggtaaagtctctcaaacctccaaagaaca

SEQ ID NO: 88347 - DNA, 120 bp, synthetic construct; identical to SEQ ID NO: 34157
  source 1..120: mol_type = other DNA

SEQ ID NO: 88348 - DNA, 120 bp, synthetic construct
  source 1..120: mol_type = other DNA
aggtgaccttgatatgtgctgcaacacagtatcagcaggagaattctacaaagggggttggagcatacttgttcctttaacctgttagaaattgcaacacaagcaatcaccaaggtcaat

SEQ ID NO: 88349 - DNA, 120 bp, synthetic construct
  source 1..120: mol_type = other DNA
cacacacaatagttgctgggtggggtgaaggaagccagggatgggagggagcattaggatctggctatttagtctgtctttcagaatgtgaaagggctgcaaaacgaccctgaggaatgg

SEQ ID NO: 88350 - DNA, 120 bp, synthetic construct
  source 1..120: mol_type = other DNA
tatgaatcacagggctgtctgaaaccatttgaaccctcctctctgcagcatacggtacaagtgaccactcaggctgtgtttcagcacctctaatgttgctaatctcattaccttacaaag

SEQ ID NO: 88351 - DNA, 120 bp, synthetic construct; identical to SEQ ID NO: 34158
  source 1..120: mol_type = other DNA

SEQ ID NO: 88352 - DNA, 120 bp, synthetic construct
  source 1..120: mol_type = other DNA
tggccccataaaagacaagcgtatgtttctattagtgcatgtatgtgtatgtaaatgcatcgattgaggaatttttgaggaaacacattaaaccattgctgagggggctggtgacggaga

SEQ ID NO: 88353 - DNA, 120 bp, synthetic construct
  source 1..120: mol_type = other DNA
acaagtgcacagaatagaaactgggtctgcttatttgcagtttccaaaatcacctcagtggcctggtctttgtgcttcaagtgctgttcctcctctccctttccctgtctaatttctttc

SEQ ID NO: 88354 - DNA, 120 bp, synthetic construct
  source 1..120: mol_type = other DNA
ataacttggaaaacagcagtcaaaacccaagtagtcataggggatttaatagagcagggcttggtgtcaaggggacctcacctctaaaacacacacacacacacacacacacacacacac

SEQ ID NO: 88355 - DNA, 120 bp, synthetic construct; identical to SEQ ID NO: 34159
  source 1..120: mol_type = other DNA

SEQ ID NO: 88356 - DNA, 120 bp, synthetic construct
  source 1..120: mol_type = other DNA
tccagattacaccctgtaaaatttgactgacattgaacttgcaggaccgttggaaagataagtgtcagcttatgtaatccacacgacagagtgtctgatgtgtattaggccctcagtaag

SEQ ID NO: 88357 - DNA, 120 bp, synthetic construct; identical to SEQ ID NO: 34160
  source 1..120: mol_type = other DNA

SEQ ID NO: 88358 - DNA, 120 bp, synthetic construct
  source 1..120: mol_type = other DNA
ttgtttgtctcttattatgacaccgtgtctctttgtaagctgcccctgatatatattgcaagaaaatagcagcagtgggaagagctgagtctggtggatgcttcccagaactggaaaaag

SEQ ID NO: 88359 - DNA, 120 bp, synthetic construct; identical to SEQ ID NO: 34161
  source 1..120: mol_type = other DNA

SEQ ID NO: 88360 - DNA, 120 bp, synthetic construct; identical to SEQ ID NO: 34162
  source 1..120: mol_type = other DNA

SEQ ID NO: 88361 - DNA, 120 bp, synthetic construct; identical to SEQ ID NO: 34163
  source 1..120: mol_type = other DNA

SEQ ID NO: 88362 - DNA, 120 bp, synthetic construct
  source 1..120: mol_type = other DNA
atccaagcattaacagccaactgattttctacaaaggagccaagaacatacatggaggataggacagtctccccaataaatggtgctggacaaactgtacgttcacaatcagaagaatga

SEQ ID NO: 88363 - DNA, 120 bp, synthetic construct
  source 1..120: mol_type = other DNA
aaataaagagcgcctgtattagtctgttctcacgctgctgataaagacatacccgagagtgggtaatttattttttaaaaagaggcttaatggactcacagttgcacgtggctagggagt

SEQ ID NO: 88364 - DNA, 120 bp, synthetic construct; identical to SEQ ID NO: 34164
  source 1..120: mol_type = other DNA

SEQ ID NO: 88365 - DNA, 120 bp, synthetic construct
  source 1..120: mol_type = other DNA
catcatggtaaccacgaagcaaaaacctataatagggacactaaaatataaataggaaggaatcaagatttactactagagaaaaatacataacagcaaaagaagacagtaagagcaaaa

SEQ ID NO: 88366 - DNA, 120 bp, synthetic construct
  source 1..120: mol_type = other DNA
gaaaaataacggctgaaatttcccaaatctggagaaagatcatagcattcaggcacaggaagctcagaggtgacaaataaaattcaacccaaagacaaattccccaaggcacaccatatt

SEQ ID NO: 88367 - DNA, 120 bp, synthetic construct; identical to SEQ ID NO: 34165
  source 1..120: mol_type = other DNA

SEQ ID NO: 88368 - DNA, 120 bp, synthetic construct
  source 1..120: mol_type = other DNA
taccaggcctagaggcaacatccatcaggttccttgagatcaggccctttgggataagctctggatgccatttgtccccagatcatcatccagcagcagtcatttacatgcaaatcatga

SEQ ID NO: 88369 - DNA, 120 bp, synthetic construct; identical to SEQ ID NO: 34166
  source 1..120: mol_type = other DNA

SEQ ID NO: 88370 - DNA, 120 bp, synthetic construct; identical to SEQ ID NO: 34167
  source 1..120: mol_type = other DNA

SEQ ID NO: 88371 - DNA, 120 bp, synthetic construct; identical to SEQ ID NO: 34168
  source 1..120: mol_type = other DNA

SEQ ID NO: 88372 - DNA, 120 bp, synthetic construct; identical to SEQ ID NO: 34169
  source 1..120: mol_type = other DNA

SEQ ID NO: 88373 - DNA, 120 bp, synthetic construct; identical to SEQ ID NO: 34170
  source 1..120: mol_type = other DNA

SEQ ID NO: 88374 - DNA, 120 bp, synthetic construct
  source 1..120: mol_type = other DNA
ggagaaacgtggctcgagcctgctgagagggccaggaagcagcagcaaaggaaagaaagattggaggactgggagtaagagatacagaaacaaatggaatgcgacatgccagaaatgtat

SEQ ID NO: 88375 - DNA, 120 bp, synthetic construct; identical to SEQ ID NO: 34171
  source 1..120: mol_type = other DNA

SEQ ID NO: 88376 - DNA, 120 bp, synthetic construct; identical to SEQ ID NO: 34206
  source 1..120: mol_type = other DNA

SEQ ID NO: 88377 - DNA, 120 bp, synthetic construct; identical to SEQ ID NO: 34205
  source 1..120: mol_type = other DNA

SEQ ID NO: 88378 - DNA, 120 bp, synthetic construct
  source 1..120: mol_type = other DNA
atttgtttaagtgtcctgtaaattctggatattagccctttgttagatgggtagattgcaatgattttctcccgttctgtaggttgcctgttcattctgatgcttgtttcttttgctgtg

SEQ ID NO: 88379 - DNA, 120 bp, synthetic construct
  source 1..120: mol_type = other DNA
ggaatgcttgcgatttttgcacattgatctttgtatcctgagactttgctgaagttgcttaccagctgaaggagattttgggctgagacgatggagttgtctatatatactgtcatgaca

SEQ ID NO: 88380 - DNA, 120 bp, synthetic construct
  source 1..120: mol_type = other DNA
ccattaaagaaaagctaaggaccagatggcttccctggtgagttctaccaagcatttaaagaaaattaaccccaaaccttctcaaacgcttcccaaagcttgaagaagagagaatgctgt

SEQ ID NO: 88381 - DNA, 120 bp, synthetic construct
  source 1..120: mol_type = other DNA
acagtagtgaagacaaatggaatcctaaaacgcccaaccaaaatgtgatgagatgaaaaaaaatggacgagaggagtaaagaacaaatgggaaaatagaaaacaaacagcaagtacatag

SEQ ID NO: 88382 - DNA, 120 bp, synthetic construct
  source 1..120: mol_type = other DNA
cttgtcagacaggtagtttgcaaatattttctcccattctgtgggtttgcctctttactttgttgatgaacaaaggattccacttgagactcctagtttcattgattttgcccccatggt

SEQ ID NO: 88383 - DNA, 120 bp, synthetic construct; identical to SEQ ID NO: 34172
  source 1..120: mol_type = other DNA

SEQ ID NO: 88384 - DNA, 120 bp, synthetic construct
  source 1..120: mol_type = other DNA
taagcgggaagcttaacagttataagcccctatatcaaaaaagtagaaaaacttcaggtaaacaacctaacaacctaacagtgcatcttaagaaactagaaaagcaagagcaaaccaatc

SEQ ID NO: 88385 - DNA, 120 bp, synthetic construct; identical to SEQ ID NO: 34203
  source 1..120: mol_type = other DNA

SEQ ID NO: 88386 - DNA, 120 bp, synthetic construct; identical to SEQ ID NO: 34173
  source 1..120: mol_type = other DNA

SEQ ID NO: 88387 - DNA, 120 bp, synthetic construct; identical to SEQ ID NO: 34174
  source 1..120: mol_type = other DNA

SEQ ID NO: 88388 - DNA, 120 bp, synthetic construct; identical to SEQ ID NO: 34175
  source 1..120: mol_type = other DNA

SEQ ID NO: 88389 - DNA, 120 bp, synthetic construct; identical to SEQ ID NO: 34176
  source 1..120: mol_type = other DNA

SEQ ID NO: 88390 - DNA, 120 bp, synthetic construct; identical to SEQ ID NO: 34177
  source 1..120: mol_type = other DNA

SEQ ID NO: 88391 - DNA, 120 bp, synthetic construct; identical to SEQ ID NO: 34178
  source 1..120: mol_type = other DNA

SEQ ID NO: 88392 - DNA, 120 bp, synthetic construct
  source 1..120: mol_type = other DNA
gagcttctgcacagcaaaaggaactatcatcagagggaacaggcaacctacagaaagggagaaaatttttgcactctatccatctgacaaagggctaatatccaggatctacaaataagt

SEQ ID NO: 88393 - DNA, 120 bp, synthetic construct
  source 1..120: mol_type = other DNA
agattttgggctgagacgatggggttttctaaatatacagtcatgtcatctgcaagcagagacaatttgacttcctcttttcctaattgaataccctttatttctttctcttgcctgatt

SEQ ID NO: 88394 - DNA, 120 bp, synthetic construct
  source 1..120: mol_type = other DNA
aaaatgataaaggggacgtcaccaccgatcccacagaaatacaaactaccaccagagaatactatagacacctctatgcaaataaactagaaaatctcgaagaaatcgataaattcctgg

SEQ ID NO: 88395 - DNA, 120 bp, synthetic construct
  source 1..120: mol_type = other DNA
tattgacaggaacgaattcacacataacaacattaaccttaaatgtaaacgggctaagtgccccacttaaaagacacagactggcaaattggataaagagtcaggacccatcggtgtgct

SEQ ID NO: 88396 - DNA, 120 bp, synthetic construct
  source 1..120: mol_type = other DNA
gtgtatgcttcacgaagttctcgtgctgtttttttcagctccatcaggtcatccatgttcttctctaaactggttatcctagttagcaattcatcgaaccctttttcaaggtccttagct

SEQ ID NO: 88397 - DNA, 120 bp, synthetic construct; identical to SEQ ID NO: 34179
  source 1..120: mol_type = other DNA

SEQ ID NO: 88398 - DNA, 120 bp, synthetic construct
  source 1..120: mol_type = other DNA
tgaagtgtgcagatttacttaatattttgcttcctctctggggaagaggcacatcccagctgcatttggtcaaccatctttattcccaatcaaaataagcaattctgtctgataaagcca

SEQ ID NO: 88399 - DNA, 120 bp, synthetic construct; identical to SEQ ID NO: 34180
  source 1..120: mol_type = other DNA

SEQ ID NO: 88400 - DNA, 120 bp, synthetic construct
  source 1..120: mol_type = other DNA
ctcaaataaacgaagaaatcctgaggggttgggggaagcaaacaaacaaagctggaggcatcactctgcctgacttcaaaatatactataaggctatagtaaccaagacaccgtgatatt

SEQ ID NO: 88401 - DNA, 120 bp, synthetic construct; identical to SEQ ID NO: 34181
  source 1..120: mol_type = other DNA

SEQ ID NO: 88402 - DNA, 120 bp, synthetic construct; identical to SEQ ID NO: 34182
  source 1..120: mol_type = other DNA

SEQ ID NO: 88403 - DNA, 120 bp, synthetic construct
  source 1..120: mol_type = other DNA
acagcatattgttattaaccatagtcaccacggtgtagaatagatcttttgaaattattcctcctgtctagctgaaagtttgtaccctttggtcaacatctcccccactcccccaaactc

SEQ ID NO: 88404 - DNA, 120 bp, synthetic construct
  source 1..120: mol_type = other DNA
ctcatagtgcagttatttgggtatcatgtctacctcttagaaaggaaatcgagttaattgtgaaagacatcgcagaaactagtttctatggtgaaaggcagggatctggctgttagttca

SEQ ID NO: 88405 - DNA, 120 bp, synthetic construct; identical to SEQ ID NO: 34183
  source 1..120: mol_type = other DNA

SEQ ID NO: 88406 - DNA, 120 bp, synthetic construct
  source 1..120: mol_type = other DNA
aggctcggccgagtttgcttagcaaacaagttccctggtgatgctaacactgctggtaggggaccacattttgagaacgacagcacaagagaggataacataaggaacctccaaatatcc

SEQ ID NO: 88407 - DNA, 120 bp, synthetic construct
  source 1..120: mol_type = other DNA
ctacaaaatatacgaaaattagctggggatggtcgtgtgcctgtagtcccaggtacttgagaggctgaggcaggaggattgcttgagcccaggaggtggaggttgcagtgagccaagatc

SEQ ID NO: 88408 - DNA, 120 bp, synthetic construct; identical to SEQ ID NO: 34196
  source 1..120: mol_type = other DNA

SEQ ID NO: 88409 - DNA, 120 bp, synthetic construct; identical to SEQ ID NO: 34184
  source 1..120: mol_type = other DNA

SEQ ID NO: 88410 - DNA, 120 bp, synthetic construct
  source 1..120: mol_type = other DNA
ctcccaaagtgctgggattacaggcgtgagccaccgcgccccgccattttttgtattttttaatagagacggggtttcacatgttggccaggctgatccacctgcctcggcctcccaagg

SEQ ID NO: 88411 - DNA, 120 bp, synthetic construct; identical to SEQ ID NO: 34185
  source 1..120: mol_type = other DNA

SEQ ID NO: 88412 - DNA, 120 bp, synthetic construct; identical to SEQ ID NO: 34186
  source 1..120: mol_type = other DNA

SEQ ID NO: 88413 - DNA, 120 bp, synthetic construct; identical to SEQ ID NO: 34187
  source 1..120: mol_type = other DNA

SEQ ID NO: 88414 - DNA, 120 bp, synthetic construct; identical to SEQ ID NO: 34188
  source 1..120: mol_type = other DNA

SEQ ID NO: 88415 - DNA, 120 bp, synthetic construct; identical to SEQ ID NO: 34189
  source 1..120: mol_type = other DNA

SEQ ID NO: 88416 - DNA, 120 bp, synthetic construct; identical to SEQ ID NO: 34190
  source 1..120: mol_type = other DNA

SEQ ID NO: 88417 - DNA, 120 bp, synthetic construct
  source 1..120: mol_type = other DNA
gatctaaccaatgctgttatgtgacatacacgagtcaagacataactcacagtgctctacacagccatgttttaaatctatgaacaggggtagtacacggctaagggaagtacacgaaaa

SEQ ID NO: 88418 - DNA, 120 bp, synthetic construct
  source 1..120: mol_type = other DNA
gcttcacaagatgcataatagtgtggtcagtacatccattcactgaaataacactgttctcagcttggcgatcaggtagcctcaaggatgtgtttttaagtttttaaaaaaggcgaggtg

SEQ ID NO: 88419 - DNA, 120 bp, synthetic construct
  source 1..120: mol_type = other DNA
tggcaatactactggtgagatgctgggaaaactttctttctccgatattgatggggaaaaggcaaatggtccatccttcttgaagaggtatttgacagtaatgagcaagataccttgtgt

SEQ ID NO: 88420 - DNA, 120 bp, synthetic construct; identical to SEQ ID NO: 34191
  source 1..120: mol_type = other DNA

SEQ ID NO: 88421 - DNA, 120 bp, synthetic construct; identical to SEQ ID NO: 29837
  source 1..120: mol_type = other DNA

SEQ ID NO: 88422 - DNA, 120 bp, synthetic construct; identical to SEQ ID NO: 87634
  source 1..120: mol_type = other DNA

SEQ ID NO: 88423 - DNA, 120 bp, synthetic construct; identical to SEQ ID NO: 29816
  source 1..120: mol_type = other DNA

SEQ ID NO: 88424 - DNA, 120 bp, synthetic construct; identical to SEQ ID NO: 29817
  source 1..120: mol_type = other DNA

SEQ ID NO: 88425 - DNA, 120 bp, synthetic construct; identical to SEQ ID NO: 29818
  source 1..120: mol_type = other DNA

SEQ ID NO: 88426 - DNA, 120 bp, synthetic construct; identical to SEQ ID NO: 87638
  source 1..120: mol_type = other DNA

SEQ ID NO: 88427 - DNA, 120 bp, synthetic construct; identical to SEQ ID NO: 87639
  source 1..120: mol_type = other DNA

SEQ ID NO: 88428 - DNA, 120 bp, synthetic construct; identical to SEQ ID NO: 29819
  source 1..120: mol_type = other DNA

SEQ ID NO: 88429 - DNA, 120 bp, synthetic construct; identical to SEQ ID NO: 29820
  source 1..120: mol_type = other DNA

SEQ ID NO: 88430 - DNA, 120 bp, synthetic construct; identical to SEQ ID NO: 29838
  source 1..120: mol_type = other DNA

SEQ ID NO: 88431 - DNA, 120 bp, synthetic construct; identical to SEQ ID NO: 29821
  source 1..120: mol_type = other DNA

SEQ ID NO: 88432 - DNA, 120 bp, synthetic construct; identical to SEQ ID NO: 87644
  source 1..120: mol_type = other DNA

SEQ ID NO: 88433 - DNA, 120 bp, synthetic construct; identical to SEQ ID NO: 87645
  source 1..120: mol_type = other DNA

SEQ ID NO: 88434 - DNA, 120 bp, synthetic construct; identical to SEQ ID NO: 29822
  source 1..120: mol_type = other DNA

SEQ ID NO: 88435 - DNA, 120 bp, synthetic construct; identical to SEQ ID NO: 87647
  source 1..120: mol_type = other DNA

SEQ ID NO: 88436 - DNA, 120 bp, synthetic construct; identical to SEQ ID NO: 29823
  source 1..120: mol_type = other DNA

SEQ ID NO: 88437 - DNA, 120 bp, synthetic construct; identical to SEQ ID NO: 87649
  source 1..120: mol_type = other DNA

SEQ ID NO: 88438 - DNA, 120 bp, synthetic construct; identical to SEQ ID NO: 87650
  source 1..120: mol_type = other DNA

SEQ ID NO: 88439 - DNA, 120 bp, synthetic construct; identical to SEQ ID NO: 29824
  source 1..120: mol_type = other DNA

SEQ ID NO: 88440 - DNA, 120 bp, synthetic construct; identical to SEQ ID NO: 87652
  source 1..120: mol_type = other DNA

SEQ ID NO: 88441 - DNA, 120 bp, synthetic construct; identical to SEQ ID NO: 87653
  source 1..120: mol_type = other DNA

SEQ ID NO: 88442 - DNA, 120 bp, synthetic construct; identical to SEQ ID NO: 87654
  source 1..120: mol_type = other DNA

SEQ ID NO: 88443 - DNA, 120 bp, synthetic construct
  source 1..120: mol_type = other DNA
gcgaggctggggaggatggagagtggtttggggttttgggtcgggctctagtgtgatcaactgcagaagcattacaccgtggcctggtttctttactcagcccctggggtagatcccagc

SEQ ID NO: 88444 - DNA, 120 bp, synthetic construct
  source 1..120: mol_type = other DNA
cctaagtgtctccatccatagtgggggataccaaggccatggtcacaccctgatgtgactgtctcatgaggaaatgatgggaattcctttatgactctgcagtggtccctccgtgtctgc

SEQ ID NO: 88445 - DNA, 120 bp, synthetic construct
  source 1..120: mol_type = other DNA
ttgttctcgaactgttgggctcacatgatcctcctgtctccacctctcaaaaagtactgggatcacaggcttgagccgccactcccggctattcttggtctttttatgatttgtcagcgt

SEQ ID NO: 88446 - DNA, 120 bp, synthetic construct
  source 1..120: mol_type = other DNA
ttgcagtaagctaaggtcgagccactgtactccagcctgggtgacagagtgagactttttctcaaaaaaaaaaaaaaaaaaaaaaaaaaaaaagccaaaaaaagaaactccaatgccagt

SEQ ID NO: 88447 - DNA, 120 bp, synthetic construct
  source 1..120: mol_type = other DNA
agctcaccgcagcctccatatcctgggctcaagcgatcctcccacctcagcttcattagctccgactacagggctgtgccaccacacctggacagtttgtttgtttgtttgtttattgag

SEQ ID NO: 88448 - DNA, 120 bp, synthetic construct; identical to SEQ ID NO: 1665
  source 1..120: mol_type = other DNA

SEQ ID NO: 88449 - DNA, 120 bp, synthetic construct
  source 1..120: mol_type = other DNA
atcataaaaactgagtttggggaggttcattatgattgacgcacttgagttactgatttgggtcgagggttcagtgaagctttggtttacatcttgtgcagctaaccacgttgagcacag

SEQ ID NO: 88450 - DNA, 120 bp, synthetic construct
  source 1..120: mol_type = other DNA
tagcttcatgcacactctgcattttattggtttgtatggaaaatgtcggccattgaattattcatagatttatttcaaatagtttggaaattgttgtacttttgaaaacatgctgttcct

SEQ ID NO: 88451 - DNA, 120 bp, synthetic construct
  source 1..120: mol_type = other DNA
ggctgggtgcagtgctcacacctacaatccctgtggttttggaggtcatggcgggaggatcacctgaggccaggagtttgaggccagcctcagcaacatagcatctacatctatttttaa

SEQ ID NO: 88452 - DNA, 120 bp, synthetic construct
  source 1..120: mol_type = other DNA
caaattgctgggattataagcatgagccactgcatctggcctgtgtgacacaattttttttttgtcttttttctttttgggggggatggagtctcgctctgtcacccaggctggagtgcg

SEQ ID NO: 88453 - DNA, 120 bp, synthetic construct; identical to SEQ ID NO: 1666
  source 1..120: mol_type = other DNA

SEQ ID NO: 88454 - DNA, 120 bp, synthetic construct; identical to SEQ ID NO: 1667
  source 1..120: mol_type = other DNA

SEQ ID NO: 88455 - DNA, 120 bp, synthetic construct; identical to SEQ ID NO: 29839
  source 1..120: mol_type = other DNA

SEQ ID NO: 88456 - DNA, 120 bp, synthetic construct
  source 1..120: mol_type = other DNA
gctgccagcggctggccacgcacactgggccttgtgccatggggctgcgtcgcgtactgtgccctgggcacgcaggggtctcctctagagcggctcagagtggcgtgagcaccacaaggg

SEQ ID NO: 88457 - DNA, 120 bp, synthetic construct
  source 1..120: mol_type = other DNA
aaacaaacaaacagtgaatgtaaatgcacatgttcatctacagaataagccactacagaagtgtggcttatgtgaagacatggaggtcggtgtcattttgataaaaaggtaccaagatta

SEQ ID NO: 88458 - DNA, 120 bp, synthetic construct
  source 1..120: mol_type = other DNA
gctcactgcagcctccaactcctcggctaaagtgatcctcccgccttagcctcctgagtagctgggaccacaggcgcacgtcatcatgcctggcctgttccttttttcttacgccaacat

SEQ ID NO: 88459 - DNA, 120 bp, synthetic construct; identical to SEQ ID NO: 79611
  source 1..120: mol_type = other DNA

SEQ ID NO: 88460 - DNA, 120 bp, synthetic construct; identical to SEQ ID NO: 29840
  source 1..120: mol_type = other DNA

SEQ ID NO: 88461 - DNA, 120 bp, synthetic construct
  source 1..120: mol_type = other DNA
gtaattattctttattccaatattataataatcctcgctctacaatcataacctaggaaaaaccaggccatacagagatgggagctgaggggacagtgaggagtgaccagaagacaagag

SEQ ID NO: 88462 - DNA, 120 bp, synthetic construct
  source 1..120: mol_type = other DNA
ccagctgtcttttatctctttgtcttgtgtctttatttctgcgctctctcgtctctgcacatggagagaaacccaccgaccctgtggggctggaccctacaggtggataagtgtatctta

SEQ ID NO: 88463 - DNA, 120 bp, synthetic construct
  source 1..120: mol_type = other DNA
agtgtggaggttatatcctcagggaattattacccttatcactttttttctttttttctctttttttctttttttttttgagatagcatctcgctctgtcgcccaggctggagtgcagtg

SEQ ID NO: 88464 - DNA, 120 bp, synthetic construct
  source 1..120: mol_type = other DNA
tccagcctggacgacagaatgagcctccgtctcaaaaaaaaaaaaaacaaaaaccaaaaaaaaaaaaaaagaaaagaaaacttcattaattaaccactttcgtatgtaatatcacaatct

SEQ ID NO: 88465 - DNA, 120 bp, synthetic construct
  source 1..120: mol_type = other DNA
ccccatctctgctaaaaaaaaaaaaagacaaaatattagctgggagtggtggcatgtgcctgtaaatcccagctactcaggaggctgaggcaggagaatcgcctcaacctgggaggtgga

SEQ ID NO: 88466 - DNA, 120 bp, synthetic construct
  source 1..120: mol_type = other DNA
agggcagaagcacacaaggaagtgtttccgggacagagggtgggcaagatggcggcgcccatggagctgttctgctggtcagggggctgggggctgccgtcagtggacctggacagcctg

SEQ ID NO: 88467 - DNA, 120 bp, synthetic construct
  source 1..120: mol_type = other DNA
tcctgtaatcacagacatgtccggaatctctctgagccctgtgttgtccatttgtaaaatagaaatggtagtgactcccccttttttttcgagactaagatactaagtatagggaatggc

SEQ ID NO: 88468 - DNA, 120 bp, synthetic construct
  source 1..120: mol_type = other DNA
tgtaacctctcagggctgtgcactcccttatttgtaaaactagagggctgggccagcatgttttccaagggttcttctagcattgacggtcaggttccaagagggaacagtgtcagaagt

SEQ ID NO: 88469 - DNA, 120 bp, synthetic construct
  source 1..120: mol_type = other DNA
agaaagttgccgtcagcgggcgttgttccagctttccatggaaattctgggagctgctcctagtttgcggcggagccttccttccttccctgcattgggcgctggaccttcacggccagg

SEQ ID NO: 88470 - DNA, 120 bp, synthetic construct
  source 1..120: mol_type = other DNA
gctgtggggcactgagtgtgccctttatgcagccctgggatagagccctattcagggccaggctggcgccacctggggatctctccccataccaggtctagaactgtgtgtcctgtcctt

SEQ ID NO: 88471 - DNA, 120 bp, synthetic construct
  source 1..120: mol_type = other DNA
tctgcatctccaggaaagacaaacagtctccagttttgggcccagctttcctagtctcttcttttccttaccctcagccctgatcttgtgtttgtacggacagtgagctcaccctaggcc

SEQ ID NO: 88472 - DNA, 120 bp, synthetic construct
  source 1..120: mol_type = other DNA
gcaaaaggggatgggtgtgcctcttccgaggttccaccctgaacaccttcctgctccctcgtggtgtagagtgatgtaagccatccgatgtaggagatgataggcctggtatggaatggg

SEQ ID NO: 88473 - DNA, 120 bp, synthetic construct
  source 1..120: mol_type = other DNA
ggaacttctagttcctcttgtaggaatcctgaattaggtggtgggaagaatgcaactacagaggttttgggagggattttttgtttttgtttttgagacagggtctccctctgtcacaca

SEQ ID NO: 88474 - DNA, 120 bp, synthetic construct
  source 1..120: mol_type = other DNA
tcaccgctccattggtcttgagccaagtgggtgatgtccaggggctggcaaggagtgaaacgggacgctgggccaactgcagggctcggtgaatcaggggtatctagagacaaaggtagt

SEQ ID NO: 88475 - DNA, 120 bp, synthetic construct
  source 1..120: mol_type = other DNA
gtgaagggtgtaatggttacctgtgccggtgcaattagcctgtatggtcctgtactcagctccatccaatgcccactgcttctgctcttgtagcggctgaaggcacctagggcaggaaag

SEQ ID NO: 88476 - DNA, 120 bp, synthetic construct
  source 1..120: mol_type = other DNA
aattccagtgccaggattccagaagcactgtgacaatgctgattgggagctctctctcttacctctctggaaggacttgaaaactccatcccctcagggtcattagatgaagagaagacc

SEQ ID NO: 88477 - DNA, 120 bp, synthetic construct
  source 1..120: mol_type = other DNA
ataactgttcttccttcctcacaggacagtgaggttttaaagtagttcagaaaccagaaagtgttgtaaaaggccatatgcttagtggacatgtgaaggaagttgtccatgccatttgcc

SEQ ID NO: 88478 - DNA, 120 bp, synthetic construct
  source 1..120: mol_type = other DNA
atttttgtattttagtagagatggggtttcaccatgttagccagactggtctcaatctcctgacctcaggtgattcgcacactttggcctcccaaagggctgggattacaggcgtgagcc

SEQ ID NO: 88479 - DNA, 120 bp, synthetic construct
  source 1..120: mol_type = other DNA
aacccaggagtcagaggttgcagagacccaagattgtgccactgcactccagcctgggagacagagtaacactctgtttcaaaaaaaaaaaatttccaaggtggatattatttcacattt

SEQ ID NO: 88480 - DNA, 120 bp, synthetic construct
  source 1..120: mol_type = other DNA
catgcctgtaaccccatcattttaagaagctgagacaagaggatcccttgaggccaggagttcaagaccagcctgggcaacatagagagactccgtctttacaaatatatatatatattt

SEQ ID NO: 88481 - DNA, 120 bp, synthetic construct
  source 1..120: mol_type = other DNA
ccatagtagctgggactacaggtacatgccaccatgcccaactaatttttgaaatttatttttagagatggggtcttcctatgttgcccaggctggtctcgaattcctgaggtcaagcaa

SEQ ID NO: 88482 - DNA, 120 bp, synthetic construct
  source 1..120: mol_type = other DNA
tactaaaaatacaaaaatttagccaggcgtggcggtgtgcgactgtagtccccgctactcgggtggctgaggcaggaggatggcgtgaacccgggaggcggagcttgcagtgagccaaga

SEQ ID NO: 88483 - DNA, 120 bp, synthetic construct
  source 1..120: mol_type = other DNA
aactgctgagattacaggcttgagccagtgtgcccagcctgaacacaattattaaagtcaaagtgagacctaacagtggaactttggttgcggctacaggaaatatggattcaaatactg

SEQ ID NO: 88484 - DNA, 120 bp, synthetic construct
  source 1..120: mol_type = other DNA
agggtcttggtggccatggtaaggagtctgaattttgttctaagatggaaattcactgtagagtttggtgctgggaagtgacaagatcacatgtgtatttttaagagatcactttgggtg

SEQ ID NO: 88485 - DNA, 120 bp, synthetic construct
  source 1..120: mol_type = other DNA
taatgatgaaaaaggctaagtgcgaacgccgggaggggagagctaaaattcaaagggcgaaatatttataatgcctaccgtcggcgaagagaaacagcagccccaaccgaaggcaaaagg

SEQ ID NO: 88486 - DNA, 120 bp, synthetic construct
  source 1..120: mol_type = other DNA
tcgcttgaacgcaggagatggaagtttgcagtgagcccagatcacaccactgcactccagcctgggtgagagagccagactgtatctcaaaaaaaaataaaataaaataaaataaagcta

SEQ ID NO: 88487 - DNA, 120 bp, synthetic construct
  source 1..120: mol_type = other DNA
ttgaaatactcattagacatccaaccagatatgctgagttggatggcgctcaagagaggtcaaggctggacttatgcattaacacatagaaagatggtacttaaagccatggacgttagt

SEQ ID NO: 88488 - DNA, 120 bp, synthetic construct
  source 1..120: mol_type = other DNA
gcagatcacgaggtcaggagatcgagaccatcctggctaacatggtgataccctgtctctgttaaaaatacagaaaattagccaggcatggtggcaggcacctgtagtcccagctactcg

SEQ ID NO: 88489 - DNA, 120 bp, synthetic construct
  source 1..120: mol_type = other DNA
caatagtctggtggcagagacacacacaatgtcactgtgatgtattaaagcagtcggcaagagatgcagctcagggcactgtggggatatccagaggcacggtaccttctgcctgtcagt

SEQ ID NO: 88490 - DNA, 120 bp, synthetic construct
  source 1..120: mol_type = other DNA
aatggtgtctgagcgatggaatgaagtgaaagaaatagccaagagctgggcactgagggaacaagctggggggccctgggcgtgggttccctggatccagggagtgtgaggatggctttc

SEQ ID NO: 88491 - DNA, 120 bp, synthetic construct; identical to SEQ ID NO: 8847
  source 1..120: mol_type = other DNA

SEQ ID NO: 88492 - DNA, 120 bp, synthetic construct; identical to SEQ ID NO: 8848
  source 1..120: mol_type = other DNA

SEQ ID NO: 88493 - DNA, 120 bp, synthetic construct; identical to SEQ ID NO: 8849
  source 1..120: mol_type = other DNA

SEQ ID NO: 88494 - DNA, 120 bp, synthetic construct
  source 1..120: mol_type = other DNA
gtggcttactgtgatgatgctgtggctgtactgcatccctcgatcccaggagcctagccgcacactctgctcccagaacttggaacccacacaggcctctgaggcaaagagcatggtgtt

SEQ ID NO: 88495 - DNA, 120 bp, synthetic construct
  source 1..120: mol_type = other DNA
aagcgacaactgtgggatccatggcaccctggaggtccaggggaatggtgctctaggaatccatagttgggtagagaaatcgctctaagtttgggagccagtcatttggatgctggattt

SEQ ID NO: 88496 - DNA, 120 bp, synthetic construct
  source 1..120: mol_type = other DNA
ggggctggcaaggagtgaaacgggacgctgggccaactgcagggctcggtgaatcaggggtatctagagacaaaggtagtgaagagagaagcacccagagttggaacacatactagccca

SEQ ID NO: 88497 - DNA, 120 bp, synthetic construct
  source 1..120: mol_type = other DNA
tctcaaaaaaaaaaaaagaaaaaagaaaagtgtctgctgggctcggtggctcacacttgtaattccagcacttcgggaggccaaggcaggtatatcatttgaggtcaggagtttaagact

SEQ ID NO: 88498 - DNA, 120 bp, synthetic construct
  source 1..120: mol_type = other DNA
tctctactaaaaatacaaaaattagctgggcgtagtggtggccgcctgtaatcccagctacctgggaagctgaagcaagagaatcgcttgaatctgggaggcagaggttggaatgagcca

SEQ ID NO: 88499 - DNA, 120 bp, synthetic construct
  source 1..120: mol_type = other DNA
atcacagccatatttctaaagggcaattggcttcctctcatctgttacagattatatgccctataaaactctggagggcatgtatgggtgacaactttaggaagagcctagaacacagat

SEQ ID NO: 88500 - DNA, 120 bp, synthetic construct
  source 1..120: mol_type = other DNA
agctaatttttttatttttagtagagatggggtttcactatgttggccaggctggtctgaaactctggacctcaggtgatctgctgccttggtatccgaaagtgctgggattacaggcat

SEQ ID NO: 88501 - DNA, 120 bp, synthetic construct
  source 1..120: mol_type = other DNA
tacatttgcctctcctgctctattgagtttagaagtccaaacatctccttccacttcccctctgcatagtgagcctcttcttttttggccaggtactgagcaattttttgtttgtttgtt

SEQ ID NO: 88502 - DNA, 120 bp, synthetic construct
  source 1..120: mol_type = other DNA
aggttgcagtgagccaagaaggcgccattacactccagcctgggcgacagggcgagactccctcaaaaaataataataataacaataataataataatggtgaaaaaggttaagtgcgaa

SEQ ID NO: 88503 - DNA, 120 bp, synthetic construct
  source 1..120: mol_type = other DNA
tgccactttagtatcttaacgaatgtttgttgaggacctactgagtgttagacccactgcaatgagcaagtttctgatcttgggaccttaacattctatgggacgacacagatatataaa

SEQ ID NO: 88504 - DNA, 120 bp, synthetic construct
  source 1..120: mol_type = other DNA
gccattgagatgggaacagtggaaaaataaccggtgctggggtgggaatcaagagttcagttgtggccatgttgaatctgaaatgcccattagacatccaagcagacatgctgagttgga

SEQ ID NO: 88505 - DNA, 120 bp, synthetic construct
  source 1..120: mol_type = other DNA
tttattgaaggcttacatactgttaagagctttacaaacattctaccttcacagtctttaatggagcaggcaattggggttacatagcttgcccaaggtcatgcagctagaggtggcaga

SEQ ID NO: 88506 - DNA, 120 bp, synthetic construct
  source 1..120: mol_type = other DNA
tttctcggctgaccgggcacgtagcaacttgggggaagggcagcgggctaggcggaagaggcaggcttcagagcagagccctgcagagagacagagataagagaatggtattgtagggtg

SEQ ID NO: 88507 - DNA, 120 bp, synthetic construct
  source 1..120: mol_type = other DNA
acaatgcctatggctgaagtactgttattatacatgttttttgtttgtttgtttgtgtttttgagatggagtgtgtctctgtcacccaggctggagtgcagtggcatgatcttggctcac

SEQ ID NO: 88508 - DNA, 120 bp, synthetic construct
  source 1..120: mol_type = other DNA
tttccaagtttttttttaagagacgaggtctcactttgttgactcgcatggtctcaaactcctgggctcaagcggtcgtgtcacctcagcctcccaagtagctgagactacaggtgtgtg

SEQ ID NO: 88509 - DNA, 120 bp, synthetic construct
  source 1..120: mol_type = other DNA
acagtggcacgatctcagctcactgcagcctccatctcctaggttcaagcaattcccctgcctcagcctcttgagtagctgggattgcaggtgcccaccaccacgaccagctaatttttg

SEQ ID NO: 88510 - DNA, 120 bp, synthetic construct; identical to SEQ ID NO: 28837
  source 1..120: mol_type = other DNA

SEQ ID NO: 88511 - DNA, 120 bp, synthetic construct
  source 1..120: mol_type = other DNA
tctttgccatgccaagctgtcaaccacagataagacaaaagaaagacattagccagggcatggtggctcatgcctatatcccaacactttgggaggccaaggtgggcggatcacctgagg

SEQ ID NO: 88512 - DNA, 120 bp, synthetic construct; identical to SEQ ID NO: 28838
  source 1..120: mol_type = other DNA

SEQ ID NO: 88513 - DNA, 120 bp, synthetic construct; identical to SEQ ID NO: 28839
  source 1..120: mol_type = other DNA

SEQ ID NO: 88514 - DNA, 120 bp, synthetic construct; identical to SEQ ID NO: 28840
  source 1..120: mol_type = other DNA

SEQ ID NO: 88515 - DNA, 120 bp, synthetic construct; identical to SEQ ID NO: 28841
  source 1..120: mol_type = other DNA

SEQ ID NO: 88516 - DNA, 120 bp, synthetic construct; identical to SEQ ID NO: 28842
  source 1..120: mol_type = other DNA

SEQ ID NO: 88517 - DNA, 120 bp, synthetic construct; identical to SEQ ID NO: 28843
  source 1..120: mol_type = other DNA

SEQ ID NO: 88518 - DNA, 120 bp, synthetic construct; identical to SEQ ID NO: 28844
  source 1..120: mol_type = other DNA

SEQ ID NO: 88519 - DNA, 120 bp, synthetic construct; identical to SEQ ID NO: 28845
  source 1..120: mol_type = other DNA

SEQ ID NO: 88520 - DNA, 120 bp, synthetic construct
  source 1..120: mol_type = other DNA
tctttctcagacctgtgaaaacatgtcacgaagacagtagcactcgggccggatacaactagattcttcttttaaaatttttttgagatggagtcttactgtcgcccaggctggagtgca

SEQ ID NO: 88521 - DNA, 120 bp, synthetic construct
  source 1..120: mol_type = other DNA
gagcaagactctgtttcaaaaaaaaaaaagaaattagctgggtctggtgacacatgccttggtgatacatgcctgtggtctcagctactctagaggctgaggtgggaggactgcttgatc

SEQ ID NO: 88522 - DNA, 120 bp, synthetic construct
  source 1..120: mol_type = other DNA
gctgcagtgagccaagatcacaccactacactccagcctgggtgacagagcaagactctgtctcaaacaaaaaaaaaaaaaaaaaattcttgcctagtcttctgggatttaaggtcaaaa

SEQ ID NO: 88523 - DNA, 120 bp, synthetic construct; identical to SEQ ID NO: 28846
  source 1..120: mol_type = other DNA

SEQ ID NO: 88524 - DNA, 120 bp, synthetic construct; identical to SEQ ID NO: 28847
  source 1..120: mol_type = other DNA

SEQ ID NO: 88525 - DNA, 120 bp, synthetic construct; identical to SEQ ID NO: 28886
  source 1..120: mol_type = other DNA

SEQ ID NO: 88526 - DNA, 120 bp, synthetic construct; identical to SEQ ID NO: 28848
  source 1..120: mol_type = other DNA

SEQ ID NO: 88527 - DNA, 120 bp, synthetic construct; identical to SEQ ID NO: 28849
  source 1..120: mol_type = other DNA

SEQ ID NO: 88528 - DNA, 120 bp, synthetic construct; identical to SEQ ID NO: 28850
  source 1..120: mol_type = other DNA

SEQ ID NO: 88529 - DNA, 120 bp, synthetic construct; identical to SEQ ID NO: 28851
  source 1..120: mol_type = other DNA

SEQ ID NO: 88530 - DNA, 120 bp, synthetic construct
  source 1..120: mol_type = other DNA
ggtgacctgcctgccttggcctcccaaagtgctgggattacaggtgtgagccaccacacccagccaatttgactattttaacctgaataaaatatttatattattaatgaaatgaacaac

SEQ ID NO: 88531 - DNA, 120 bp, synthetic construct; identical to SEQ ID NO: 28852
  source 1..120: mol_type = other DNA

SEQ ID NO: 88532 - DNA, 120 bp, synthetic construct; identical to SEQ ID NO: 28884
  source 1..120: mol_type = other DNA

SEQ ID NO: 88533 - DNA, 120 bp, synthetic construct
  source 1..120: mol_type = other DNA
gatctctaaatcacactcccaaattgttggtcaaaagggagcacgacatgaacgttcagtttccagtgtctttttagtagagacggggtttcaccacggtgggccaggctggtctcgaat

SEQ ID NO: 88534 - DNA, 120 bp, synthetic construct
  source 1..120: mol_type = other DNA
ggcaacagaatgaagctctgtctcaaaaaaaaaaaaaaaaaaagaattagctgggtgtggtgacacatgcctgtagtcctagctactcaggaggctaagatgggaggaacgtgtgagctc

SEQ ID NO: 88535 - DNA, 120 bp, synthetic construct
  source 1..120: mol_type = other DNA
attttttaaaaacaattttttgtacagaatgggtctcactgtgttgcccaggctgatctcaaactcctgggctcaaatgatcctcctgcctcagcctcctaaagtgctgagattgcagat

SEQ ID NO: 88536 - DNA, 120 bp, synthetic construct
  source 1..120: mol_type = other DNA
tcaagtgattctcctgcctcagcctcccaagtagctgggactacaggaacacaccaccacgtccagctaatttttgtatttttagtagagatggggtttcactatatgttggccaggctg

SEQ ID NO: 88537 - DNA, 120 bp, synthetic construct
  source 1..120: mol_type = other DNA
acattgaaacctgaacatttgagtacagtaagtcctcacttaacattattattattattattttgagacagtcttgctctgtcacccaggctggagtgcggtggcacgatctcacctcac

SEQ ID NO: 88538 - DNA, 120 bp, synthetic construct
  source 1..120: mol_type = other DNA
ttattattattattattattcaatgggcaattgcaaacatgcttgaaacaaatgaaaccatgaaaagggccaggtgcagtggctcacgcctgtaatcccagcacttcaggaggccgaggc

SEQ ID NO: 88539 - DNA, 120 bp, synthetic construct
  source 1..120: mol_type = other DNA
gcaatgagctggaattgtgccactgcactccagtctaggcaacaagagcagaactctgtctcaaaaaaaaactaaggaagtggggaggatggatatcatttaaaacaattacagtttatc

SEQ ID NO: 88540 - DNA, 120 bp, synthetic construct
  source 1..120: mol_type = other DNA
catatataaatatatatgtccatgctggtcttgaactccttgacctcaggtgatccgcccacctcggcctctcaaagtgctgggattgcaatatatatatatatgcatgccatgggccat

SEQ ID NO: 88541 - DNA, 120 bp, synthetic construct; identical to SEQ ID NO: 28853
  source 1..120: mol_type = other DNA

SEQ ID NO: 88542 - DNA, 120 bp, synthetic construct; identical to SEQ ID NO: 28854
  source 1..120: mol_type = other DNA

SEQ ID NO: 88543 - DNA, 120 bp, synthetic construct
  source 1..120: mol_type = other DNA
atttccagcctgggtgacagagtgagactctgtctctaaaaaaaatgcggtggctcacacctgtaatcagcactttgggaggccgaagtgggcagatcatgaggtcaggagttcaagacc

SEQ ID NO: 88544 - DNA, 120 bp, synthetic construct
  source 1..120: mol_type = other DNA
ccatcacccccagatgggactgtctagttgtaggaaaacaagcttagggctcccactgattctacctgatggcgagttgtagaattgtttcattatgtattacagtgtcataataataga

SEQ ID NO: 88545 - DNA, 120 bp, synthetic construct; identical to SEQ ID NO: 28855
  source 1..120: mol_type = other DNA

SEQ ID NO: 88546 - DNA, 120 bp, synthetic construct; identical to SEQ ID NO: 28856
  source 1..120: mol_type = other DNA

SEQ ID NO: 88547 - DNA, 120 bp, synthetic construct; identical to SEQ ID NO: 28857
  source 1..120: mol_type = other DNA

SEQ ID NO: 88548 - DNA, 120 bp, synthetic construct
  source 1..120: mol_type = other DNA
cactccagcctgggcgacagagcaaaactcggtctcaaaaaacaaaacaaaaaagaagacattcaacacgtgacagcagtcaccagctatattttcccaggatgcaactcataccaatca

SEQ ID NO: 88549 - DNA, 120 bp, synthetic construct
  source 1..120: mol_type = other DNA
ggtggatcacgaggtcaggagttagagaccaacctgagcaacatggtaaaaccccgtctctacaaaaaatacaaaaattagctaagcatggtggcacacgcctataatcccagctactca

SEQ ID NO: 88550 - DNA, 120 bp, synthetic construct
  source 1..120: mol_type = other DNA
actcatgcctgtaatcccagcactctggaaggctgaggcgggcagatcacaaggtcaggagttcgagatcagactggccaacatggtgaaaccccatcgctactaaaaatacaaaaatta

SEQ ID NO: 88551 - DNA, 120 bp, synthetic construct
  source 1..120: mol_type = other DNA
taatttttgtatttttagtagagacggggtttcatcatgttggccaagctggtctcgaattcctgacctcaagtgttctgcccacctcggccttccaaagtgctgggattacaggcctga

SEQ ID NO: 88552 - DNA, 120 bp, synthetic construct; identical to SEQ ID NO: 28858
  source 1..120: mol_type = other DNA

SEQ ID NO: 88553 - DNA, 120 bp, synthetic construct; identical to SEQ ID NO: 28859
  source 1..120: mol_type = other DNA

SEQ ID NO: 88554 - DNA, 120 bp, synthetic construct; identical to SEQ ID NO: 28860
  source 1..120: mol_type = other DNA

SEQ ID NO: 88555 - DNA, 120 bp, synthetic construct; identical to SEQ ID NO: 28861
  source 1..120: mol_type = other DNA

SEQ ID NO: 88556 - DNA, 120 bp, synthetic construct; identical to SEQ ID NO: 28862
  source 1..120: mol_type = other DNA

SEQ ID NO: 88557 - DNA, 120 bp, synthetic construct
  source 1..120: mol_type = other DNA
cgtatgcatgctttaataggctatttattgagttgtgttgttgttgttgtgtgtgtgtgtgtgtgtgtgtgtgtgtgttttacagcagattgcttgagacatattggagggattgggggt

SEQ ID NO: 88558 - DNA, 120 bp, synthetic construct
  source 1..120: mol_type = other DNA
tcagatgagagaggatgcgatgagagcagacaaggaaggaagagagagagtgtgagggggatgttcagtgtgtccacaggagaggcaagaacagaatcagaggtcaagcagctcctggaa

SEQ ID NO: 88559 - DNA, 120 bp, synthetic construct
  source 1..120: mol_type = other DNA
tagtcccagctacttgggaggccaaggtgggaagatcacttgaggctgggagtttgagaccagaccagcctgggcaacatagagaaactccatctccacaaaaaatttaaaaagtagtga

SEQ ID NO: 88560 - DNA, 120 bp, synthetic construct; identical to SEQ ID NO: 28863
  source 1..120: mol_type = other DNA

SEQ ID NO: 88561 - DNA, 120 bp, synthetic construct
  source 1..120: mol_type = other DNA
tgagtcatgatctcaccactgcactacagcctgggtgacagagcaagaccccatctcagactcactaactaactaagtaaatatgccaaagagagtgtataataaactatgtgtgtttgt

SEQ ID NO: 88562 - DNA, 120 bp, synthetic construct
  source 1..120: mol_type = other DNA
aatttaatttttttttttttttttttggtagagacaaggagttgctacgttgccagggctggtcttgaactgccgggcacaagttatcctcctgcctcagactcctaaagtgctgggatt

SEQ ID NO: 88563 - DNA, 120 bp, synthetic construct
  source 1..120: mol_type = other DNA
agcctcccaaagtgctgggattacaggcttgaaccaccgcatctggccaggagttactatttaatagacggtcgtacaacactatgaacgtacttaatgccattgaattgtacacttaaa

SEQ ID NO: 88564 - DNA, 120 bp, synthetic construct; identical to SEQ ID NO: 28864
  source 1..120: mol_type = other DNA

SEQ ID NO: 88565 - DNA, 120 bp, synthetic construct
  source 1..120: mol_type = other DNA
gctcacacctgtagtcccagcactttgggaggccaaggcaggtggatcacgaggtcaggagattgagaccaccctggctaacactgtgaaaccccgtctctactaaaaatacaaaaaatt

SEQ ID NO: 88566 - DNA, 120 bp, synthetic construct; identical to SEQ ID NO: 28880
  source 1..120: mol_type = other DNA

SEQ ID NO: 88567 - DNA, 120 bp, synthetic construct
  source 1..120: mol_type = other DNA
ctcccaagtagttgggattacaggtgcctgcaaccactcccggctaatttttgtatttttagtagagccagggtttcaccatgttgcccaggctggtctcaaactcctaacctcaggtga

SEQ ID NO: 88568 - DNA, 120 bp, synthetic construct; identical to SEQ ID NO: 28865
  source 1..120: mol_type = other DNA

SEQ ID NO: 88569 - DNA, 120 bp, synthetic construct
  source 1..120: mol_type = other DNA
tcaagtgattctcccacctcagcctcccgagtagctgggattacaggtgtccagaaccatactggctaatttttgtatttttagtagagacagggtttcaccatgttgaccaggctggtc

SEQ ID NO: 88570 - DNA, 120 bp, synthetic construct
  source 1..120: mol_type = other DNA
cagaggcctgagtaacttccaaagtggtttggtttttttttttttgttttgttttgttttgttttttgagacacagtcttgttctatctcacccaggctggagcgcagtggcgcaatctc

SEQ ID NO: 88571 - DNA, 120 bp, synthetic construct; identical to SEQ ID NO: 28866
  source 1..120: mol_type = other DNA

SEQ ID NO: 88572 - DNA, 120 bp, synthetic construct; identical to SEQ ID NO: 28867
  source 1..120: mol_type = other DNA

SEQ ID NO: 88573 - DNA, 120 bp, synthetic construct
  source 1..120: mol_type = other DNA
ggttacaatgagccaacatcacgcaactgcactccagcctgggtgacagagtaagaccttgtctcaaaaaaaaaaaaaaaaaggtagaatggagccctcttgggtaagaactttccaagc

SEQ ID NO: 88574 - DNA, 120 bp, synthetic construct; identical to SEQ ID NO: 28868
  source 1..120: mol_type = other DNA

SEQ ID NO: 88575 - DNA, 120 bp, synthetic construct; identical to SEQ ID NO: 28869
  source 1..120: mol_type = other DNA

SEQ ID NO: 88576 - DNA, 120 bp, synthetic construct; identical to SEQ ID NO: 28870
  source 1..120: mol_type = other DNA

SEQ ID NO: 88577 - DNA, 120 bp, synthetic construct
  source 1..120: mol_type = other DNA
tgtttgtttttttttaacctttcgttatttttttcaaagatagagacagggtctcactatgttgcccaggctgctctcaaactcctgggctcaagcgatccttccacttcagcctcccaa

SEQ ID NO: 88578 - DNA, 120 bp, synthetic construct
  source 1..120: mol_type = other DNA
gaggttgcagtaagccgagatcacatcactgcactccagtatgggcgaaagagtgaaactctgtctcaaaaacacaaaaacaaaaaacctctattaagaggaacagggaagggatataaa

SEQ ID NO: 88579 - DNA, 120 bp, synthetic construct; identical to SEQ ID NO: 28871
  source 1..120: mol_type = other DNA

SEQ ID NO: 88580 - DNA, 120 bp, synthetic construct; identical to SEQ ID NO: 28872
  source 1..120: mol_type = other DNA

SEQ ID NO: 88581 - DNA, 120 bp, synthetic construct
  source 1..120: mol_type = other DNA
gaaacaagttttcagacctgtacacatagatctacttcattattttttctttttttttttcttttaagacggagtctcactctctgttgcccaggctggactgcagtggcgtgaccgtgg

SEQ ID NO: 88582 - DNA, 120 bp, synthetic construct
  source 1..120: mol_type = other DNA
tgcagtgagctgagatcgtgccagtgcactccagcctgggcgaaagagtgagactcttgtctcaaaaaaaaaacaaaggagctgatattgttgtttctttctataagtgctccaggaaga

SEQ ID NO: 88583 - DNA, 120 bp, synthetic construct
  source 1..120: mol_type = other DNA
aagcaattctcctgcctcagcctcccaagtagctgggattacaggcatgcaccaccatatcccactaattttgcatttttagtagagaaaaggtttctccatgttggtcagcctggtctc

SEQ ID NO: 88584 - DNA, 120 bp, synthetic construct
  source 1..120: mol_type = other DNA
acccgggaggtggaggctgcagtgagccaagatcatgccactgcattccagcctgcgcaacagagcaagactctgtctcaaaaaaataaaaaataaaaataaaaattttagataaaaaga

SEQ ID NO: 88585 - DNA, 120 bp, synthetic construct
  source 1..120: mol_type = other DNA
ggtggcttacgcctgttatcccagcactttaggaggccaaggcagggggatcacatgaggctaggagttcaggactggtctggacaacatggtaaaaccctgtttctactaaaaatacaa

SEQ ID NO: 88586 - DNA, 120 bp, synthetic construct
  source 1..120: mol_type = other DNA
acagagtgagactccctctcaaaaaaaagaaagaagtgcctatctatgctcgtcaaaaagacgtggatgaggatgttcatgacagcattcttcattatagccccaaactggaaacaattc

SEQ ID NO: 88587 - DNA, 120 bp, synthetic construct
  source 1..120: mol_type = other DNA
aatgcagtcactgcagacttcttctaatcatatatcttatatgacttcatccgtttacagtttacaaaaaactagaggtacttggaggcagctacttgggaggctgaggcaggaagatgg

SEQ ID NO: 88588 - DNA, 120 bp, synthetic construct
  source 1..120: mol_type = other DNA
aatcccctactgaatttagcttaacaattataatacctagtacattataggtaggtgtgtaaattggtacatctagaacacaatacagaaaaagccttaaaatgatcatattcactgacc

SEQ ID NO: 88589 - DNA, 120 bp, synthetic construct
  source 1..120: mol_type = other DNA
caatataattaacatagtctcaagtagaaagcgggaactctgtttaaaaaaaaaaaaaattatagggccaggcacggtggctcatgcctgtaatcccagcactttgggaggccaagacgg

SEQ ID NO: 88590 - DNA, 120 bp, synthetic construct
  source 1..120: mol_type = other DNA
aggatttttttttctttttttttttcaacggagtctcgctcttgttacccagactggagtgtaatggcacgatcttggctcactgcaacctctgcctccggggctcaagtgattatcctg

SEQ ID NO: 88591 - DNA, 120 bp, synthetic construct
  source 1..120: mol_type = other DNA
ctagcctgggcaacacagtgaaaccccatctctactcaaatacaaaaaattagccaggcatggcagcatgtgcctataatcccagctacttgagaggctgaggcaggagaattgcttgaa

SEQ ID NO: 88592 - DNA, 120 bp, synthetic construct
  source 1..120: mol_type = other DNA
atgtatatatgcagatacaaacacactcacgtatatgcaatttaaaaaactatacagaggccaggcgcggtggttcacgcctgtaatcccagcacttcgggaggccaaggcaggcagatc

SEQ ID NO: 88593 - DNA, 120 bp, synthetic construct
  source 1..120: mol_type = other DNA
aagtagtagaaaaaaatatatatatatttttttgaaacacagtctcgctctgtcacccaggctggagtgcagtggcataatctcggcttactgcaagctccatctcccaggttcaagtga

SEQ ID NO: 88594 - DNA, 120 bp, synthetic construct
  source 1..120: mol_type = other DNA
ccagggataccggcatttccagaagaacaccaccttcacataaagacataaagctccatgtttaccatttcaggcataagccaaaagcaagtggaggaagagtaagaaatatagatctca

SEQ ID NO: 88595 - DNA, 120 bp, synthetic construct
  source 1..120: mol_type = other DNA
ggtagaggttgcagtgagccaagatagcaccattgcactccagcctgggcaacaaagcaagactccgtctcaagaaaaaaaaaaaaagacacgaaactattagccttagaatcactatct

SEQ ID NO: 88596 - DNA, 120 bp, synthetic construct
  source 1..120: mol_type = other DNA
gctctcaaacatcaatttttgtgataggtactttgtttttttttttttttttttcctgggatggtgtcttgctctctcgcccaggctgcagtgcagtggtgcaatctcagctcactgcaa

SEQ ID NO: 88597 - DNA, 120 bp, synthetic construct
  source 1..120: mol_type = other DNA
aaatcaattctaagattttattctccattctactggaagggacaatggaaacccgctataatcactagagcaataagaggcgttgaagtaaccggccatcactacctgcttctgcccaaa

SEQ ID NO: 88598 - DNA, 120 bp, synthetic construct
  source 1..120: mol_type = other DNA
ttatggtatagccatagcgcagcagaatgacaacaaataaggcagtgtgcaccgactaaaaaagacaatcacaatatgctaagtaaaaagtcagttatagggccaggcatgatggttcac

SEQ ID NO: 88599 - DNA, 120 bp, synthetic construct
  source 1..120: mol_type = other DNA
ttagattatgaaaaacacacatacaaaatgggaaggcacaaagaagacagcaaaaactgcatgagatctcacatccaaggataactgctgagaacatgaaagtgccgagtcttccagcct

SEQ ID NO: 88600 - DNA, 120 bp, synthetic construct
  source 1..120: mol_type = other DNA
gacaacatggtgaaaccccgtctctactaaaaatacaaaaattagccagctgtggtggtacacgcctgtaattgcagctactcagaaggctgaggcaggagaatcgcttgaactcaggag

SEQ ID NO: 88601 - DNA, 120 bp, synthetic construct
  source 1..120: mol_type = other DNA
tgcttttctctcaaaattttcttaaaaagctgacgatccctctgagataatcaagatctaaatggttgaggagtcatcataaaatctaaggtttggcatctaaaagacagtgagacagag

SEQ ID NO: 88602 - DNA, 120 bp, synthetic construct
  source 1..120: mol_type = other DNA
aattttcagagaggtttctctaaggggtcaagtgagtggataaaaatattgtatcacctcagtgcacaaagtgagctcagagcttccccccgaaagccaaaagtttcaacctgagttagg

SEQ ID NO: 88603 - DNA, 120 bp, synthetic construct
  source 1..120: mol_type = other DNA
tgcagtgagccgagatcgtgccattgcactatagcctgggcaacaagagcaaaactctatctcaaaaaaaaaaaaaaaaagagaatgggttctggaatcagacttcctggatcctatttt

SEQ ID NO: 88604 - DNA, 120 bp, synthetic construct
  source 1..120: mol_type = other DNA
ctactttatttttcaatagagacaaggtctcaccatgttggccaggttggtcttgaactcttggcctcaagcaattcccccacctcggcctctcaaagggctaggattataggcgtgaga

SEQ ID NO: 88605 - DNA, 120 bp, synthetic construct
  source 1..120: mol_type = other DNA
gaatcgcttaaatccaggaggcggaggttgcagtgagctgagattgcggcattgcactccagcctgggcaacgagcaaaaaaaaaaatgaaagtaacataatttcccaacataattagaa

SEQ ID NO: 88606 - DNA, 120 bp, synthetic construct
  source 1..120: mol_type = other DNA
gagaaatcactgggtatttcctacagcatttaacacatcgtaggcctttaataaacccttctgaaataaacaaacctctttactcttcattccaccttgctaagaatctcacctaagtct

SEQ ID NO: 88607 - DNA, 120 bp, synthetic construct
  source 1..120: mol_type = other DNA
gccaaggcgggcggattgcttgagctcaggcgttcgagaccagcctgggcaacgcagcgaaatccccgtctctacaaaaaaaaattaaaaataaaatactataaaaataaaaataaaagg

SEQ ID NO: 88608 - DNA, 120 bp, synthetic construct; identical to SEQ ID NO: 34192
  source 1..120: mol_type = other DNA

SEQ ID NO: 88609 - DNA, 120 bp, synthetic construct
  source 1..120: mol_type = other DNA
atccctcactcctcacgacaactagagggtactccattgtgtggacctaccatagtgtggtcaactggtcttctattgatggacactctggttgtttctattcttgctattattttattt

SEQ ID NO: 88610 - DNA, 120 bp, synthetic construct; identical to SEQ ID NO: 34193
  source 1..120: mol_type = other DNA

SEQ ID NO: 88611 - DNA, 120 bp, synthetic construct
  source 1..120: mol_type = other DNA
gttactcgaacaaatgatcccaaagcccctcctttcctagtgatggatgaacaagtccacatatttctggaggaatgaagcggtagtacctggaagaggactaagatcctgctatgaaat

SEQ ID NO: 88612 - DNA, 120 bp, synthetic construct
  source 1..120: mol_type = other DNA
tccaggcaattgttgccatgcagggatagcgactcatggtggccaaattgactgttttttcaagagaagatggaattctagatttctacataaaatcactcaactttaaacgttggctcg

SEQ ID NO: 88613 - DNA, 120 bp, synthetic construct
  source 1..120: mol_type = other DNA
accctgagcttgacaaaaagagttgtggtggctttgatggaaggattgggggaggcaagatgggagatggggaaatcagagaggaagaggtctatgcaacagtccaggtgacaaatcttt

SEQ ID NO: 88614 - DNA, 120 bp, synthetic construct; identical to SEQ ID NO: 34194
  source 1..120: mol_type = other DNA

SEQ ID NO: 88615 - DNA, 120 bp, synthetic construct
  source 1..120: mol_type = other DNA
aatactaacgggcgaggacagggctctcctagctttgctattttctatttgtgagactttggacaagtgactttatgtgtctgaacctccatttccctatggatgtactgaggacaatat

SEQ ID NO: 88616 - DNA, 120 bp, synthetic construct
  source 1..120: mol_type = other DNA
ggaggaagcatgagtggttctgtcaccagtcctgtcacagaattgcagtgcgacctggggcaaattgctccctggaccttagtgtgcccaggtgcaaaatgtcaccaatgttgtctacca

SEQ ID NO: 88617 - DNA, 120 bp, synthetic construct; identical to SEQ ID NO: 34195
  source 1..120: mol_type = other DNA

SEQ ID NO: 88618 - DNA, 120 bp, synthetic construct
  source 1..120: mol_type = other DNA
acaattgttgaagtgtggagaggattatggaagattttggggaggctgtggagggaatgtgtgggttttcatgaaagcagaaaaggtgtgtgagtccaagagaaacactactgcactgag

SEQ ID NO: 88619 - DNA, 120 bp, synthetic construct
  source 1..120: mol_type = other DNA
acgaaagtgtctccaagcattgttccctgggggttgcaaagtcaccactgattgggaatccgcggcatggaaatatggatggatctttaatcacatgctgaatttttaaaaggtaaatta

SEQ ID NO: 88620 - DNA, 120 bp, synthetic construct; identical to SEQ ID NO: 34196
  source 1..120: mol_type = other DNA

SEQ ID NO: 88621 - DNA, 120 bp, synthetic construct
  source 1..120: mol_type = other DNA
acatttactatgggagaggaaagctggtttgacattagcaaagctgtaactggaaggggacccgagagaggtttgtgtgttgctcatatattttgttgcctgttctagatactaattgca

SEQ ID NO: 88622 - DNA, 120 bp, synthetic construct; identical to SEQ ID NO: 34197
  source 1..120: mol_type = other DNA

SEQ ID NO: 88623 - DNA, 120 bp, synthetic construct
  source 1..120: mol_type = other DNA
taatattgtccagtttattctctttacatttctttcaacaaaacgaataaacagcttgtgctctgtctctgccacagcaaatgcaacatcgacaacaacgaggtgggggagggggtgaga

SEQ ID NO: 88624 - DNA, 120 bp, synthetic construct
  source 1..120: mol_type = other DNA
gccattaagtgcttccattagacaaatggaaaattatcaaagcagtaatctatgatgtcactacactaaactagaaaaagaggagcaaaagaagcagaaggaaggaaatgtgaaagatag

SEQ ID NO: 88625 - DNA, 120 bp, synthetic construct; identical to SEQ ID NO: 34198
  source 1..120: mol_type = other DNA

SEQ ID NO: 88626 - DNA, 120 bp, synthetic construct
  source 1..120: mol_type = other DNA
ggggcttgggggggatacggcaagggaagatgttggtcaaagagtacaaagttccagttagacaggagcaagaagctttagtgatctattgcacagcatttctagttaaaaataatgtat

SEQ ID NO: 88627 - DNA, 120 bp, synthetic construct; identical to SEQ ID NO: 34199
  source 1..120: mol_type = other DNA

SEQ ID NO: 88628 - DNA, 120 bp, synthetic construct
  source 1..120: mol_type = other DNA
attaggtatttgtcctaatgccctccttccccttgccccccacccccaacaggccccagtgtgtgatgttcccctccctgcgtccatgtgttctcatcgttcagctcccacctatgagtg

SEQ ID NO: 88629 - DNA, 120 bp, synthetic construct
  source 1..120: mol_type = other DNA
atctttttgatgtgctgttggattcagtttgttagtattttgttgaagatttttgcacctgtgttcatcagggacactggccggcagcttcctctttttcactgtgtctttgtctggtct

SEQ ID NO: 88630 - DNA, 120 bp, synthetic construct; identical to SEQ ID NO: 34200
  source 1..120: mol_type = other DNA

SEQ ID NO: 88631 - DNA, 120 bp, synthetic construct
  source 1..120: mol_type = other DNA
tcaggatacatgggggtcagggacccacttgaggaggcagtccttcccttatcacagcctgaacactgtgctggaagaactgctgctctcttcaaagctgtcaggcagggacgtttaagt

SEQ ID NO: 88632 - DNA, 120 bp, synthetic construct
  source 1..120: mol_type = other DNA
agggaatcccatcagactaacagcggatctctctgaagaaatcctacaagccagaagagagtggggctcaatattcaacattcttacagaaaaggattttcaacccagaatttcatatcc

SEQ ID NO: 88633 - DNA, 120 bp, synthetic construct
  source 1..120: mol_type = other DNA
actcactcaaaaccgcacaactacatggaaactgaacaacctgttcccgaatgactactggctaaataacgaaatgaaggcagaaataaagatgttctttgaaaccgatgagaacaaaga

SEQ ID NO: 88634 - DNA, 120 bp, synthetic construct
  source 1..120: mol_type = other DNA
agaccttttctgcatctgttgagataatcatgtggtttttgtcattggttctgcttatgtgacggattacgtttattgatttgtgtatgttgaagcagccttccatcccagggatggagc

SEQ ID NO: 88635 - DNA, 120 bp, synthetic construct
  source 1..120: mol_type = other DNA
ctagccaattttcccaacaccatttattaaatagggaatcttttctccattgcttgtttttgtcagggttgtcagagatcaggtggttgtagatgcgtggtgttattttggaggcctctg

SEQ ID NO: 88636 - DNA, 120 bp, synthetic construct
  source 1..120: mol_type = other DNA
catgtgttctcattgttcaactcccacttatcagtgagaacatgtggtgtttgattctccgctcttgtgttagtttgctgagaatgatggcttccagcttcatccatgtccctgcaaagg

SEQ ID NO: 88637 - DNA, 120 bp, synthetic construct
  source 1..120: mol_type = other DNA
ggagtaagagtgcagatgaggtgctgcagagatgtcccatatgaagagctagaaactgaaatttatttcaacaactgggcttggttttgaataactccttagcaccaatctaggatttcc

SEQ ID NO: 88638 - DNA, 120 bp, synthetic construct; identical to SEQ ID NO: 34201
  source 1..120: mol_type = other DNA

SEQ ID NO: 88639 - DNA, 120 bp, synthetic construct
  source 1..120: mol_type = other DNA
ccttggtttctgataagaactcggttgttaatcttactggggatcccttgtgtgtggtgagctgtttttctttgctgctttccacattctctcattgtctttgattttcaacagtttggc

SEQ ID NO: 88640 - DNA, 120 bp, synthetic construct
  source 1..120: mol_type = other DNA
tttctggggttgacaaaactactccagctctcttgcggttgctgttttcagtgtatttattttctcaaccttttacattctaactatttgtgcctttgaatccgaagtgtgtgtcttgta

SEQ ID NO: 88641 - DNA, 120 bp, synthetic construct; identical to SEQ ID NO: 34202
  source 1..120: mol_type = other DNA

SEQ ID NO: 88642 - DNA, 120 bp, synthetic construct; identical to SEQ ID NO: 34203
  source 1..120: mol_type = other DNA

SEQ ID NO: 88643 - DNA, 120 bp, synthetic construct
  source 1..120: mol_type = other DNA
tttgagattggtttgctcttgcttttctagtttcttaagatgcactgttaggttgttaggttgtttacctgaagtttttctacttttttgatataggggcttataactgttaagcttccc

SEQ ID NO: 88644 - DNA, 120 bp, synthetic construct
  source 1..120: mol_type = other DNA
ggtgaaagtgggcatccttgtcatgttccagatcttagaggaaaggctttcagtttttgcccattcagtatgatactagctgtgggtgtgtcatatatgacttttattatgctgaggttt

SEQ ID NO: 88645 - DNA, 120 bp, synthetic construct; identical to SEQ ID NO: 88382
  source 1..120: mol_type = other DNA

SEQ ID NO: 88646 - DNA, 120 bp, synthetic construct
  source 1..120: mol_type = other DNA
aacccaggaggcagaggttgcagtaagctgagattgcgccactgcactccagcctggaaacagagcgagactccgtctcagaataaaataataaataaataaataaaataaaaattaaaa

SEQ ID NO: 88647 - DNA, 120 bp, synthetic construct; identical to SEQ ID NO: 34204
  source 1..120: mol_type = other DNA

SEQ ID NO: 88648 - DNA, 120 bp, synthetic construct
  source 1..120: mol_type = other DNA
catcgtctcagcccaaaatctccttcagctggtaagcaacttcagcaaagtctcaggatacaaagatcaatgtgcaaaaatcgcaagcattcctatacaccaataatagacaagcagaga

SEQ ID NO: 88649 - DNA, 120 bp, synthetic construct
  source 1..120: mol_type = other DNA
cagagaaatgcaaatcaaaaccacaatgagataccaacttatgccagtcagaatggcgattattaaaaatgtcaagaaacgatagatgctggcaaggctgtggagaaatgggaacgcttt

SEQ ID NO: 88650 - DNA, 120 bp, synthetic construct; identical to SEQ ID NO: 34205
  source 1..120: mol_type = other DNA

SEQ ID NO: 88651 - DNA, 120 bp, synthetic construct; identical to SEQ ID NO: 34206
  source 1..120: mol_type = other DNA

SEQ ID NO: 88652 - DNA, 120 bp, synthetic construct
  source 1..120: mol_type = other DNA
aagtggaagtaggtggcctcagagtctttctttggcttttgaaacaatagtgctgtttaggaaagcatctcttacataatcctgaggctacagagttgatctctgtgagcctatcatggg

SEQ ID NO: 88653 - DNA, 120 bp, synthetic construct; identical to SEQ ID NO: 34207
  source 1..120: mol_type = other DNA

SEQ ID NO: 88654 - DNA, 120 bp, synthetic construct
  source 1..120: mol_type = other DNA
tataaacaccgcccagttttcctcagatatgaagactgtgtgcattgctgggggtaagagagatgttattccgtcctcattcctgcatgtgagatgttattccgtcctcattcctgcatg

SEQ ID NO: 88655 - DNA, 120 bp, synthetic construct
  source 1..120: mol_type = other DNA
ttaaatcccatctctgccacttgggtttcaagagtgactgccaagttgtgccctatccaccagatttccccacatcatttcttgtttcaacaagtatttgcatcctaaatacacacatac

SEQ ID NO: 88656 - DNA, 120 bp, synthetic construct; identical to SEQ ID NO: 34208
  source 1..120: mol_type = other DNA

SEQ ID NO: 88657 - DNA, 120 bp, synthetic construct; identical to SEQ ID NO: 34209
  source 1..120: mol_type = other DNA

SEQ ID NO: 88658 - DNA, 120 bp, synthetic construct
  source 1..120: mol_type = other DNA
tatgagacaaatggtcaccgacattactactaatcattaaatgcccactgatgatactattcccagtggagttacaaatgccacccaaagaatccatagctcctgtcctctcggtagata

SEQ ID NO: 88659 - DNA, 120 bp, synthetic construct
  source 1..120: mol_type = other DNA
tctagtgaaaccagggtggtattcttgcctttgattaatttgtagttgtacttttgtggggagagtggtactgtgggatcatctgttcagccttcttgctgacgtcgctcctcctattta

SEQ ID NO: 88660 - DNA, 120 bp, synthetic construct
  source 1..120: mol_type = other DNA
gccttcttccctcttttaaaatgcttttgtctttttcctcctctatatatgttctgtcttggagcttacagattctttcccctgtttggtcaactctgctgttaaacctttctaatgagg

SEQ ID NO: 88661 - DNA, 120 bp, synthetic construct
  source 1..120: mol_type = other DNA
acaggttattttaaacagatagcagtttaactttaatcacaggaaaaacgaacaaaaacaaactctacactttaactcatccctccctccacactttgactttctgatgttttaagttac

SEQ ID NO: 88662 - DNA, 120 bp, synthetic construct
  source 1..120: mol_type = other DNA
atctgttaggtccatggggtctagagtgcagtttaatgccgacattaattttctgtttggttaattttctgtttggatgatctgtccactgctgaaagtggggtattaaagtccctcact

SEQ ID NO: 88663 - DNA, 120 bp, synthetic construct
  source 1..120: mol_type = other DNA
agcctttgagaagaattggtaccagttctttacatgtttggtagaattcaccagcaaatccatcaggtcctggacttttctttgatgggagagtgtttactcctgcttcaatgtcattat

SEQ ID NO: 88664 - DNA, 120 bp, synthetic construct
  source 1..120: mol_type = other DNA
agataataaaatcttgggggcggtttcccccatactgttctcgcggtagtgaataagtctcacgagacctgttggttttataaggtgtttccccgtttgtttggctctcattttctctct

SEQ ID NO: 88665 - DNA, 120 bp, synthetic construct
  source 1..120: mol_type = other DNA
tgcctatgctttcgaggccttactgaagaaaagaatcgttgcccagttcaatttcgtgaaacgtttcccctatgttttcttctagaagtttcacagtttcaggtctgacattgcagtctt

SEQ ID NO: 88666 - DNA, 120 bp, synthetic construct
  source 1..120: mol_type = other DNA
tccccagcttctggtaaccactactctagtttctgcttctgtgaaatcaactttttaagattccacatctgagtgaggtgatgtggtgtttgtctttctgtgcctggcttatttcactta

SEQ ID NO: 88667 - DNA, 120 bp, synthetic construct; identical to SEQ ID NO: 34210
  source 1..120: mol_type = other DNA

SEQ ID NO: 88668 - DNA, 120 bp, synthetic construct; identical to SEQ ID NO: 34211
  source 1..120: mol_type = other DNA

SEQ ID NO: 88669 - DNA, 120 bp, synthetic construct; identical to SEQ ID NO: 34212
  source 1..120: mol_type = other DNA

SEQ ID NO: 88670 - DNA, 120 bp, synthetic construct
  source 1..120: mol_type = other DNA
actgagacagggcccacctcaggagaacacgggtacaggtgggagagggctgggtccagagttatctgtgaaagctgcagagatgttcttgcttttaccctctgggttgggattctgggt

SEQ ID NO: 88671 - DNA, 120 bp, synthetic construct; identical to SEQ ID NO: 34213
  source 1..120: mol_type = other DNA

SEQ ID NO: 88672 - DNA, 120 bp, synthetic construct
  source 1..120: mol_type = other DNA
agctgttccctagaagccagtgatcggataccatcctgtgtggctggggaagctggcaaacagtgcataatgaggacattgatatgggttcatctagaataaaaccaggatgacataaag

SEQ ID NO: 88673 - DNA, 120 bp, synthetic construct; identical to SEQ ID NO: 34214
  source 1..120: mol_type = other DNA

SEQ ID NO: 88674 - DNA, 120 bp, synthetic construct
  source 1..120: mol_type = other DNA
tgtcatgggacataagatagtgatacatatatatatagtctcctaaggacctagcctgggagactctagtcagctgcccacccattctgtagctctggggtatgaaaagaagcaatttta

SEQ ID NO: 88675 - DNA, 120 bp, synthetic construct; identical to SEQ ID NO: 34215
  source 1..120: mol_type = other DNA

SEQ ID NO: 88676 - DNA, 120 bp, synthetic construct
  source 1..120: mol_type = other DNA
taacaaaataccacaggctgggtgacttaaacaacagacatttattttctcacagttctgccagctgggaagtccaagatcaaggtgctggccgatttggtttctgctgaaggctctcct

SEQ ID NO: 88677 - DNA, 120 bp, synthetic construct
  source 1..120: mol_type = other DNA
cactgtcatctcccagcacaactttcattctcatataaagaaactcattttctaagtaggaaggttgttccaaactgctggaaattcccaggaagaaaggcccaggttttatggagcttc

SEQ ID NO: 88678 - DNA, 120 bp, synthetic construct
  source 1..120: mol_type = other DNA
cggttttaaaacttaaaggcccctgtcccgggaaagctctcagtcccagggaaactggaactacttcattcatgtggacactattgtcacattactgtgcactgtttttctcacatttaa

SEQ ID NO: 88679 - DNA, 120 bp, synthetic construct
  source 1..120: mol_type = other DNA
agttacatcaaatgccacaaagcaaaaacagtcaagcgtgccagcatttatttcaggcctggtgactgggacactgcggcgagcaggggcatggagcagcagaaggggcttggtcaccgt

SEQ ID NO: 88680 - DNA, 120 bp, synthetic construct
  source 1..120: mol_type = other DNA
atatgcatttgggcagggagagatgatattttttctgcattgttacactgaattgccctcctcaaggccatagcaagatacctgtggaaaaagcattgtctataggtcacagtcctaaca

SEQ ID NO: 88681 - DNA, 120 bp, synthetic construct; identical to SEQ ID NO: 34216
  source 1..120: mol_type = other DNA

SEQ ID NO: 88682 - DNA, 120 bp, synthetic construct; identical to SEQ ID NO: 34217
  source 1..120: mol_type = other DNA

SEQ ID NO: 88683 - DNA, 120 bp, synthetic construct
  source 1..120: mol_type = other DNA
acatccctgatgcgcatgcccaggggccctgtgagctagaaagtagctgagctggtgcagtacctgctggttaagaaccggaagacggtggcgatcaaaagggcagacatgctgaagtat

SEQ ID NO: 88684 - DNA, 120 bp, synthetic construct; identical to SEQ ID NO: 34218
  source 1..120: mol_type = other DNA

SEQ ID NO: 88685 - DNA, 120 bp, synthetic construct
  source 1..120: mol_type = other DNA
acaacagaatttagatcaatggaagaaatttgaagtgcaagcgtggacattatatggaaatttagtacgtgttatttcgaggtataacaattgctgtataaaagtcgaccgtaatcccag

SEQ ID NO: 88686 - DNA, 120 bp, synthetic construct
  source 1..120: mol_type = other DNA
gtgaatatcatcaaacgggagactgctactagcaggagggacgaattttcctgctgggattcgtagggtcacccccagtgctctctatggccagagcctaacattctgttagctggcata

SEQ ID NO: 88687 - DNA, 120 bp, synthetic construct
  source 1..120: mol_type = other DNA
tgcaatgatttcttttttcttttctttctttctttctttttttttttttgagacagaatctctctctgtcaccaggctggagtgtgcagcggcacgatctcagctcactgcaacctctgc

SEQ ID NO: 88688 - DNA, 120 bp, synthetic construct
  source 1..120: mol_type = other DNA
gtgtaagaatgcctcaaatattgcatacaggacacacttacactaaaaaagtatttgctgtggatctgaaattcaagcttaactgggagtccattattttatttggtaccaatatgaagg

SEQ ID NO: 88689 - DNA, 120 bp, synthetic construct
  source 1..120: mol_type = other DNA
tctaaaaaatgtggttgtttgtgttaaatgaactcatgggaggccattgttttgccctaatctctggccccagaccccagcagaacagacaaaatcagaatagtgtcccttgtactaatt

SEQ ID NO: 88690 - DNA, 120 bp, synthetic construct
  source 1..120: mol_type = other DNA
tctggtctcttttggtaaaaattccacacacacttgaaaataccatataatctaccgtcgttctgaggagtgctcactaaaatctaatcagctcacatttgttctttgttgttcagctcc

SEQ ID NO: 88691 - DNA, 120 bp, synthetic construct
  source 1..120: mol_type = other DNA
ggacccctgggttaatacgtttgaaagcatctgtaacatagcagacacgtcgagcatttcaaggcaaatctggtcttctcagaaacttctctaagaaacattgttgttgtcacaacagtt

SEQ ID NO: 88692 - DNA, 120 bp, synthetic construct; identical to SEQ ID NO: 35455
  source 1..120: mol_type = other DNA

SEQ ID NO: 88693 - DNA, 120 bp, synthetic construct
  source 1..120: mol_type = other DNA
cctactgagctgtatattctctggtaagtcttggagaacaacaacatttacgaaatcccagagtgctagggtctagggtcaaatagtattagatatgacagccatccgccattccttaaa

SEQ ID NO: 88694 - DNA, 120 bp, synthetic construct; identical to SEQ ID NO: 35456
  source 1..120: mol_type = other DNA

SEQ ID NO: 88695 - DNA, 120 bp, synthetic construct; identical to SEQ ID NO: 35480
  source 1..120: mol_type = other DNA

SEQ ID NO: 88696 - DNA, 120 bp, synthetic construct; identical to SEQ ID NO: 35479
  source 1..120: mol_type = other DNA

SEQ ID NO: 88697 - DNA, 120 bp, synthetic construct; identical to SEQ ID NO: 35457
  source 1..120: mol_type = other DNA

SEQ ID NO: 88698 - DNA, 120 bp, synthetic construct; identical to SEQ ID NO: 35458
  source 1..120: mol_type = other DNA

SEQ ID NO: 88699 - DNA, 120 bp, synthetic construct; identical to SEQ ID NO: 35459
  source 1..120: mol_type = other DNA

SEQ ID NO: 88700 - DNA, 120 bp, synthetic construct; identical to SEQ ID NO: 35460
  source 1..120: mol_type = other DNA

SEQ ID NO: 88701 - DNA, 120 bp, synthetic construct; identical to SEQ ID NO: 35476
  source 1..120: mol_type = other DNA

SEQ ID NO: 88702 - DNA, 120 bp, synthetic construct; identical to SEQ ID NO: 35461
  source 1..120: mol_type = other DNA

SEQ ID NO: 88703 - DNA, 120 bp, synthetic construct
  source 1..120: mol_type = other DNA
gttcaagaccagcctggccaagatggtgaaatcctgtctctactaaaaatacaaaaaatagccgggcacgttggcaggcacctgtaatcccagctacttgggaggctgaggcaggagaat

SEQ ID NO: 88704 - DNA, 120 bp, synthetic construct; identical to SEQ ID NO: 35462
  source 1..120: mol_type = other DNA

SEQ ID NO: 88705 - DNA, 120 bp, synthetic construct
  source 1..120: mol_type = other DNA
aacaagatcacacgtctccgaatgagaatgaccaggtcacaccgcaacaccgggaaccggccggtcccaacacccaaatcaggagtggctctgctccaccagcaactcctgtgatggtgc

SEQ ID NO: 88706 - DNA, 120 bp, synthetic construct
  source 1..120: mol_type = other DNA
attttctccgcaaaaaggctggtctccatcttgaataaggtaatgaacgacaagcctctggaggggttaagtcggtgggctctggggcctggtcgggtggaagtcccaggactgcctcct

SEQ ID NO: 88707 - DNA, 120 bp, synthetic construct; identical to SEQ ID NO: 35463
  source 1..120: mol_type = other DNA

SEQ ID NO: 88708 - DNA, 120 bp, synthetic construct
  source 1..120: mol_type = other DNA
ggaaggattttcagtcctgtgggttgtaaccagaggccacaggtggattctgccttaggctcatgagatttccgacttgctgttgaagaaaatgccttgtgaagtgacaacagtagctct

SEQ ID NO: 88709 - DNA, 120 bp, synthetic construct
  source 1..120: mol_type = other DNA
aacaccaagcaagagatggtccatgcttttctgacgttctcagaatagtggctagcttcaaacctgacaagcgctgcttgaagccggaacactagagaatgttgctgagagcagaaacgg

SEQ ID NO: 88710 - DNA, 120 bp, synthetic construct; identical to SEQ ID NO: 35464
  source 1..120: mol_type = other DNA

SEQ ID NO: 88711 - DNA, 120 bp, synthetic construct; identical to SEQ ID NO: 35465
  source 1..120: mol_type = other DNA

SEQ ID NO: 88712 - DNA, 120 bp, synthetic construct; identical to SEQ ID NO: 35466
  source 1..120: mol_type = other DNA

SEQ ID NO: 88713 - DNA, 120 bp, synthetic construct; identical to SEQ ID NO: 35467
  source 1..120: mol_type = other DNA

SEQ ID NO: 88714 - DNA, 120 bp, synthetic construct; identical to SEQ ID NO: 35468
  source 1..120: mol_type = other DNA

SEQ ID NO: 88715 - DNA, 120 bp, synthetic construct; identical to SEQ ID NO: 9835
  source 1..120: mol_type = other DNA

SEQ ID NO: 88716 - DNA, 120 bp, synthetic construct; identical to SEQ ID NO: 9836
  source 1..120: mol_type = other DNA

SEQ ID NO: 88717 - DNA, 120 bp, synthetic construct; identical to SEQ ID NO: 9837
  source 1..120: mol_type = other DNA

SEQ ID NO: 88718 - DNA, 120 bp, synthetic construct; identical to SEQ ID NO: 9838
  source 1..120: mol_type = other DNA

SEQ ID NO: 88719 - DNA, 120 bp, synthetic construct; identical to SEQ ID NO: 9839
  source 1..120: mol_type = other DNA

SEQ ID NO: 88720 - DNA, 120 bp, synthetic construct; identical to SEQ ID NO: 9840
  source 1..120: mol_type = other DNA

SEQ ID NO: 88721 - DNA, 120 bp, synthetic construct; identical to SEQ ID NO: 9841
  source 1..120: mol_type = other DNA

SEQ ID NO: 88722 - DNA, 120 bp, synthetic construct; identical to SEQ ID NO: 9842
  source 1..120: mol_type = other DNA

SEQ ID NO: 88723 - DNA, 120 bp, synthetic construct; identical to SEQ ID NO: 9843
  source 1..120: mol_type = other DNA

SEQ ID NO: 88724 - DNA, 120 bp, synthetic construct; identical to SEQ ID NO: 9844
  source 1..120: mol_type = other DNA

SEQ ID NO: 88725 - DNA, 120 bp, synthetic construct; identical to SEQ ID NO: 9845
  source 1..120: mol_type = other DNA

SEQ ID NO: 88726 - DNA, 120 bp, synthetic construct; identical to SEQ ID NO: 9846
  source 1..120: mol_type = other DNA

SEQ ID NO: 88727 - DNA, 120 bp, synthetic construct; identical to SEQ ID NO: 9847
  source 1..120: mol_type = other DNA

SEQ ID NO: 88728 - DNA, 120 bp, synthetic construct; identical to SEQ ID NO: 9848
  source 1..120: mol_type = other DNA

SEQ ID NO: 88729 - DNA, 120 bp, synthetic construct; identical to SEQ ID NO: 9849
  source 1..120: mol_type = other DNA

SEQ ID NO: 88730 - DNA, 120 bp, synthetic construct; identical to SEQ ID NO: 9850
  source 1..120: mol_type = other DNA

SEQ ID NO: 88731 - DNA, 120 bp, synthetic construct; identical to SEQ ID NO: 9851
  source 1..120: mol_type = other DNA

SEQ ID NO: 88732 - DNA, 120 bp, synthetic construct; identical to SEQ ID NO: 9852
  source 1..120: mol_type = other DNA

SEQ ID NO: 88733 - DNA, 120 bp, synthetic construct
  source 1..120: mol_type = other DNA
attaactcccaccaggcccctcccactacacatggggattataggagctacaattcaagatgatatttgggtggggaaacagccaaaccattatcagagacacattctaataagttctta

SEQ ID NO: 88734 - DNA, 120 bp, synthetic construct; identical to SEQ ID NO: 9853
  source 1..120: mol_type = other DNA

SEQ ID NO: 88735 - DNA, 120 bp, synthetic construct; identical to SEQ ID NO: 9854
  source 1..120: mol_type = other DNA

SEQ ID NO: 88736 - DNA, 120 bp, synthetic construct; identical to SEQ ID NO: 9855
  source 1..120: mol_type = other DNA

SEQ ID NO: 88737 - DNA, 120 bp, synthetic construct; identical to SEQ ID NO: 9856
  source 1..120: mol_type = other DNA

SEQ ID NO: 88738 - DNA, 120 bp, synthetic construct; identical to SEQ ID NO: 9857
  source 1..120: mol_type = other DNA

SEQ ID NO: 88739 - DNA, 120 bp, synthetic construct; identical to SEQ ID NO: 9858
  source 1..120: mol_type = other DNA

SEQ ID NO: 88740 - DNA, 120 bp, synthetic construct; identical to SEQ ID NO: 9859
  source 1..120: mol_type = other DNA

SEQ ID NO: 88741 - DNA, 120 bp, synthetic construct; identical to SEQ ID NO: 9860
  source 1..120: mol_type = other DNA

SEQ ID NO: 88742 - DNA, 120 bp, synthetic construct; identical to SEQ ID NO: 9861
  source 1..120: mol_type = other DNA

SEQ ID NO: 88743 - DNA, 120 bp, synthetic construct; identical to SEQ ID NO: 9862
  source 1..120: mol_type = other DNA

SEQ ID NO: 88744 - DNA, 120 bp, synthetic construct; identical to SEQ ID NO: 9863
  source 1..120: mol_type = other DNA

SEQ ID NO: 88745 - DNA, 120 bp, synthetic construct; identical to SEQ ID NO: 27083
  source 1..120: mol_type = other DNA

SEQ ID NO: 88746 - DNA, 120 bp, synthetic construct
  source 1..120: mol_type = other DNA
tattaatctatgtgtgcattctttgctaatgcttatgtcctccaccaaattcatactttgaagccctcagccccggggtgtctgcatttggagatgaggcctctaaggaagtaattaata

SEQ ID NO: 88747 - DNA, 120 bp, synthetic construct
  source 1..120: mol_type = other DNA
agactggtttctttcacctagcataatgaactgaagagtcatgtataactttgtgtggctcagaacttattccttttcattgaggagtagtagtatcattgtctggttgtaccatagtgc

SEQ ID NO: 88748 - DNA, 120 bp, synthetic construct
  source 1..120: mol_type = other DNA
agatacccagcatgaacaactttaaatacacagcaaatctggttccagttagacacttgcctacctgcacatcagcttctggaataacgtggagcgaatctaaggcattagaccatttca

SEQ ID NO: 88749 - DNA, 120 bp, synthetic construct
  source 1..120: mol_type = other DNA
ggtattatcactaaacattacatattcttccagtattcataccacttactcattttggtacttatagctctttgtgtctcaatcctgatttcaatcgtagagataatagcctacatctac

SEQ ID NO: 88750 - DNA, 120 bp, synthetic construct; identical to SEQ ID NO: 35517
  source 1..120: mol_type = other DNA

SEQ ID NO: 88751 - DNA, 120 bp, synthetic construct; identical to SEQ ID NO: 35518
  source 1..120: mol_type = other DNA

SEQ ID NO: 88752 - DNA, 120 bp, synthetic construct
  source 1..120: mol_type = other DNA
actgccttgttcctggagctcctgattcctgggagaggaatccacgggcccccaatgtgcagacagcaaacgcagccacggattcccagaactgtcaggagggttggccagactctgtga

SEQ ID NO: 88753 - DNA, 120 bp, synthetic construct
  source 1..120: mol_type = other DNA
tttgctgaagatcacaggaaagaagtactgccaatttccgacgacactccccagcatttctgcctttgtgaccggctccctggctcgatacttgaggagcagaaaatgaaccaacttggc

SEQ ID NO: 88754 - DNA, 120 bp, synthetic construct; identical to SEQ ID NO: 35519
  source 1..120: mol_type = other DNA

SEQ ID NO: 88755 - DNA, 120 bp, synthetic construct; identical to SEQ ID NO: 35520
  source 1..120: mol_type = other DNA

SEQ ID NO: 88756 - DNA, 120 bp, synthetic construct; identical to SEQ ID NO: 35521
  source 1..120: mol_type = other DNA

SEQ ID NO: 88757 - DNA, 120 bp, synthetic construct
  source 1..120: mol_type = other DNA
aatactagccatgtcagtttaagtaactgctagccattgcaacagaacaaccacgaatggcttgccacaacacaagtttattttatgtgcaaataagttctgatgcagtttgccaggggc

SEQ ID NO: 88758 - DNA, 120 bp, synthetic construct
  source 1..120: mol_type = other DNA
ctggtgatgatgttgccgggatttcccaactctattcctattcattgtcctgtcctccctcctcccttcccccttctctccctcaggcccctgaccccaccggcctgaagtctggattta

SEQ ID NO: 88759 - DNA, 120 bp, synthetic construct
  source 1..120: mol_type = other DNA
tctgccttcctggcttccctggctcagatgggcgattcacaccacctcttcatctcccccgactccctacagactgaattaagggccttgccactttctattgttttgttgacttggtgt

SEQ ID NO: 88760 - DNA, 120 bp, synthetic construct; identical to SEQ ID NO: 35522
  source 1..120: mol_type = other DNA

SEQ ID NO: 88761 - DNA, 120 bp, synthetic construct
  source 1..120: mol_type = other DNA
agaagccaaccccgccagtccttgatctaggacttccagacttcaaaactgtgagaaaaaaaataaatttctgttgttttagctactcactcaatggcattttgttatggcagcctgagc

SEQ ID NO: 88762 - DNA, 120 bp, synthetic construct
  source 1..120: mol_type = other DNA
taccagcaatgaaggagagtttccgttgctccacatcttcgctggcaattgttcttggtcttgtattctttgttttggttttctatggattttggacattctgataggtgtgcagtggta

SEQ ID NO: 88763 - DNA, 120 bp, synthetic construct; identical to SEQ ID NO: 35523
  source 1..120: mol_type = other DNA

SEQ ID NO: 88764 - DNA, 120 bp, synthetic construct
  source 1..120: mol_type = other DNA
ctactaatttatgtaggatatttactgctgtgtaagagagcttacttgatgtgttctttttccatcaggggaggtatgtggtcctcatctggtttttaaatccaggagggctagcctggg

SEQ ID NO: 88765 - DNA, 120 bp, synthetic construct; identical to SEQ ID NO: 35524
  source 1..120: mol_type = other DNA

SEQ ID NO: 88766 - DNA, 120 bp, synthetic construct
  source 1..120: mol_type = other DNA
ccctcaaggtcctgacttggatgccagactgagcctggaccgccatcctctgccgattgtgtttgctcccctcagaccaagtctctgactctgagtcggcccgaagtggcattgggggga

SEQ ID NO: 88767 - DNA, 120 bp, synthetic construct; identical to SEQ ID NO: 35525
  source 1..120: mol_type = other DNA

SEQ ID NO: 88768 - DNA, 120 bp, synthetic construct; identical to SEQ ID NO: 35526
  source 1..120: mol_type = other DNA

SEQ ID NO: 88769 - DNA, 120 bp, synthetic construct; identical to SEQ ID NO: 35527
  source 1..120: mol_type = other DNA

SEQ ID NO: 88770 - DNA, 120 bp, synthetic construct; identical to SEQ ID NO: 35528
  source 1..120: mol_type = other DNA

SEQ ID NO: 88771 - DNA, 120 bp, synthetic construct; identical to SEQ ID NO: 35529
  source 1..120: mol_type = other DNA

SEQ ID NO: 88772 - DNA, 120 bp, synthetic construct; identical to SEQ ID NO: 35530
  source 1..120: mol_type = other DNA

SEQ ID NO: 88773 - DNA, 120 bp, synthetic construct; identical to SEQ ID NO: 35531
  source 1..120: mol_type = other DNA

SEQ ID NO: 88774 - DNA, 120 bp, synthetic construct
  source 1..120: mol_type = other DNA
tgaagtctggatttagagctcggagtgccagcctgcctgggtctcagtggacttggttttgcatgtgctctctgtcattgacactagcaatggctctctcctggatcctccctggatcct

SEQ ID NO: 88775 - DNA, 120 bp, synthetic construct
  source 1..120: mol_type = other DNA
actacagatgccttatccccaggcccaaacaccgtcatggaggtgaggatgctcccaacaggatggtgcatgatgtttcctttattggaccccacacatccccatcagtttaacaaggaa

SEQ ID NO: 88776 - DNA, 120 bp, synthetic construct
  source 1..120: mol_type = other DNA
tttataagtatcccaataggtcaggatttggttaggggactaggatatatatacattttaactatcatttttggtaagaagattatatccaattgatcgttcttccttagttgattatga

SEQ ID NO: 88777 - DNA, 120 bp, synthetic construct
  source 1..120: mol_type = other DNA
gagagaatcttagcccccaagagatttttggggttggatgttttaaatggcctggtggtcttctggtagcgatcgatagttatcagtcccaggaatgaaatactgatatacattgtgaaa

SEQ ID NO: 88778 - DNA, 120 bp, synthetic construct
  source 1..120: mol_type = other DNA
tagcttcccctccatgccttttagctttttggtttctattcacagtcacttttccccccaacgtccttatttctgagcttcttttactgtagtaccgtcaaaacagttgagagagaaatg

SEQ ID NO: 88779 - DNA, 120 bp, synthetic construct
  source 1..120: mol_type = other DNA
atctcctcacctatttagcgctttaaaataatgctaaacaaaacctaatgttttccaatacaagatcactgattttaacctttcctgctactgctgtgtggtcttagttcatccctgacc

SEQ ID NO: 88780 - DNA, 120 bp, synthetic construct
  source 1..120: mol_type = other DNA
atgcgtgctggctagggatgttaagtctctggccctttgtttttcccttggttaataatgtcattattttaaacctgtgtttgattaactcctttgtaggtgaaacagcttccttctatt

SEQ ID NO: 88781 - DNA, 120 bp, synthetic construct
  source 1..120: mol_type = other DNA
gttttttgttcttgcgatagtttactgagaatgatgatttctaatttcatccatgtccctacaaaggacatgaactcatcattttttatggctgcatagtattccatggtgtatatgtgc

SEQ ID NO: 88782 - DNA, 120 bp, synthetic construct
  source 1..120: mol_type = other DNA
cttcaaataataattgtcaatatttaatttcttacactgtcatggattaactcactttattaataatctcaactattctctgaagtacgcgtatcatcctcattctctggatgaggggaa

SEQ ID NO: 88783 - DNA, 120 bp, synthetic construct
  source 1..120: mol_type = other DNA
gcttcaaatgggattactctgaaacctgtagtcttttggaactgggcaggaggatagagatataattatgacatttgatagctcttaggctgttttagttccagtggtctctggttctaa

SEQ ID NO: 88784 - DNA, 120 bp, synthetic construct
  source 1..120: mol_type = other DNA
attgttgaaatatcagaaaatgtgagtaaggtgaaaggataatacacagctctgatcatcttaccatcattatgacatctttgtcaacacatacacattttggcaaaatttctaatcagt

SEQ ID NO: 88785 - DNA, 120 bp, synthetic construct
  source 1..120: mol_type = other DNA
aggtgatcctccacctcagcctcccaaagtgctgggattatagatgtgagccaccatgcccagcctacattttctacttgtatgaaaaactgatgtaaacaaatcttgtaggctcttgaa

SEQ ID NO: 88786 - DNA, 120 bp, synthetic construct
  source 1..120: mol_type = other DNA
tcccaggacttgacatactgcccttattcctgagctgtcacctctgtgttagggcccatatcaaaccaattactggacatttacacatttctacctacccttcaaattccttgcaattac

SEQ ID NO: 88787 - DNA, 120 bp, synthetic construct
  source 1..120: mol_type = other DNA
ggaggggaagtctagcatgtgaattaacagtagtgaacactgtccattatacttcgaagcattttacacgctttatcccaggttttctcacaaaaaccttacaaggaagcgatgttaccc

SEQ ID NO: 88788 - DNA, 120 bp, synthetic construct
  source 1..120: mol_type = other DNA
gagagaaaaacaggcgcttagtttaacgctacagaagcaatatgctactttgtgcagagtacacatgtgaagtactccaggtcaaacattggacttctcctagtctgaggtttttgttct

SEQ ID NO: 88789 - DNA, 120 bp, synthetic construct
  source 1..120: mol_type = other DNA
agacttcaggtcagttgacacttttttttttttttttataatgttagcaagttccaaactggaaaaacaagggtgttgccagtggaggttgaggtgaattgaagggagggcgggatgcca

SEQ ID NO: 88790 - DNA, 120 bp, synthetic construct
  source 1..120: mol_type = other DNA
ttagttgaaatgctctttcctcatccttttgacatagtttttacagtgaagctgtgcctttatgttgtatcaccacattgcataattggaattttgtaattatccacttcacgtttgcct

SEQ ID NO: 88791 - DNA, 120 bp, synthetic construct
  source 1..120: mol_type = other DNA
ggggggagtcagtatttccttcaggaggttcgtaatacatattttatctaaattatttttagagggtctttccagagcctatggaactttttagaaggcttgaggggtatgggaagggga

SEQ ID NO: 88792 - DNA, 120 bp, synthetic construct
  source 1..120: mol_type = other DNA
tgaggaaccaactcatttaggagtgttgtcagatcagccaggtcttgcctaggggaatttatagtataaagtttaaataacatttccagttgaatgatcaaagttcatttttcatttgcc

SEQ ID NO: 88793 - DNA, 120 bp, synthetic construct
  source 1..120: mol_type = other DNA
ttaccccagcacctttaaattctgatgtactctagcatcaaggtttctttgttagggaattagaaaagaaccagccttgtggtgttttgttttattttgtttttgactgtaaccactaat

SEQ ID NO: 88794 - DNA, 120 bp, synthetic construct
  source 1..120: mol_type = other DNA
atatattaaactgtgtcagaaaagtaacaagatgagtctccaaagaagatgccaagcaagtgtttgattaagtcaaagtgagcccaggagatctccccaccttcattgtggatatcattg

SEQ ID NO: 88795 - DNA, 120 bp, synthetic construct
  source 1..120: mol_type = other DNA
catgcagtatattttctcaaccttaatggttttagacatatattttataaacatacttggaagtatctcagactattgagtagttcttttaagtgtcaggttgccttcctcgaaggatta

SEQ ID NO: 88796 - DNA, 120 bp, synthetic construct
  source 1..120: mol_type = other DNA
tgaggcaggagactcacttaagcccaggaggtcaaggatgcaataagccatgatcatacaactgcactcaagcctatgggacagtgcaaggccctgtctcaaaaataaataaataaataa

SEQ ID NO: 88797 - DNA, 120 bp, synthetic construct
  source 1..120: mol_type = other DNA
gttctcaggcgctatcacagttgtctaatcttgaatcctgatcagacagcccaggtgtttgaagggttggtatatagcatgtcattgttgtttttccaatctcagaatgtataactagtg

SEQ ID NO: 88798 - DNA, 120 bp, synthetic construct
  source 1..120: mol_type = other DNA
tttacagcccaggaaattgagattcaggcctgttaagtgtttggtgaagtgatgtaccctatatcacatagctaataaatctcacagattttaataaaaatctttcgaactggaagctta

SEQ ID NO: 88799 - DNA, 120 bp, synthetic construct
  source 1..120: mol_type = other DNA
tcttaattgtgtgacacttttgttctaattggcagcttttacctgctgctaggtagtcccatctgttgatgtcatttcacagggtttgggatactacattgccatttcctcaagaagtct

SEQ ID NO: 88800 - DNA, 120 bp, synthetic construct
  source 1..120: mol_type = other DNA
gggctctctacaacagttttccttttgtgtctcagtcccagcaacttaatcggtggattcctccatacgtaccttctttatgaaggaatttctttccttgcttttgtttcttgtcatcag

SEQ ID NO: 88801 - DNA, 120 bp, synthetic construct
  source 1..120: mol_type = other DNA
accttttctgagctgactttttgcattacttggattagctttaatatcctttgggcattacagtgtttcattttttatttcctggtgactcatagaaggttctatagccccattcacttt

SEQ ID NO: 88802 - DNA, 120 bp, synthetic construct
  source 1..120: mol_type = other DNA
caacatccactaaagtgatccttttaatatacgaatgattcacaggctttcagtgattttccacccactcagaataaaattcaccatccctacctagccttcaagatctgcagggtccca

SEQ ID NO: 88803 - DNA, 120 bp, synthetic construct
  source 1..120: mol_type = other DNA
ggtgtgtggaaatttagggtaccagcacacagtgaatagagtaattactcaggggtcagcagagtggcacatcatagtgattggcactgtctaaagtttcctctatttgaaaaaatgaaa

SEQ ID NO: 88804 - DNA, 120 bp, synthetic construct
  source 1..120: mol_type = other DNA
tctttgtgacttttcatcttcgagggactcattcctggctgccattgatgcaagtatataacaatatggggtttaaaaaaaaagccataggtcaccacaaaccacaaatacttttgctgc

SEQ ID NO: 88805 - DNA, 120 bp, synthetic construct
  source 1..120: mol_type = other DNA
acctcagtagtgcctgttcaaaagtaaagcaaaccatatataataacgtgatgcctgcaaattcgaacttgcgatgggatccagacttcatgatggattttattgagaatccctcagccc

SEQ ID NO: 88806 - DNA, 120 bp, synthetic construct
  source 1..120: mol_type = other DNA
ttacggcttgctgcactgttcttagttcagaatggctgggggttctgaaggctctttgttgttcttcaaatcacgtgtgggggtttaatgatgtactttgcactgtagatgtaagttttc

SEQ ID NO: 88807 - DNA, 120 bp, synthetic construct
  source 1..120: mol_type = other DNA
tggtgtgctaataaataaggtgatttttgcaagttaaccatagtccttggcatatggtgcgaatcagtatgaagattgctattgtagttgtttttcttattattttctgccaaggtcacg

SEQ ID NO: 88808 - DNA, 120 bp, synthetic construct
  source 1..120: mol_type = other DNA
ttatacaaattaacatgtatcaccgtgaaaaaggtgggaaactgctatgttacagtctgttttaaggaagcaccaagatttctcagaaaaatagccagggccttattttcttaccataag

SEQ ID NO: 88809 - DNA, 120 bp, synthetic construct
  source 1..120: mol_type = other DNA
ctctcaagtagctgggactataggcatgcaccaccatgcctggcaaatttttgtatttttagtagagatggggatttcactgtgttggccagactggtcttgaactcctgacctcgtgat

SEQ ID NO: 88810 - DNA, 120 bp, synthetic construct
  source 1..120: mol_type = other DNA
cagacccacagggttgttttgccttctctggtggcagaaatcacactttgtgagagacagggatgacttggtaatctaactaaatgtttacattttatccagattatatttcaggagcag

SEQ ID NO: 88811 - DNA, 120 bp, synthetic construct
  source 1..120: mol_type = other DNA
gaaaccaagatgagtaccttctagacactggccccatgatttgtaggattagtctaatctcaagtagaatttgcccacctcttcatccacataatttggaggattccctgggtctaagaa

SEQ ID NO: 88812 - DNA, 120 bp, synthetic construct
  source 1..120: mol_type = other DNA
ctttttccattaacttgggcattgttttgcccacttgctgcaagcagtgaaggcctactgtaaaagcatttgttggttccaggaaattttcttgtcaaggcctatgatcctgtgagtaaa

SEQ ID NO: 88813 - DNA, 120 bp, synthetic construct
  source 1..120: mol_type = other DNA
tgtcagctctttaaagaatgatgacttcaccatgagaggtttgcgatgtgatgggaatgctgatgatatctggactgcctcacaaaatccaaaatcctgtgggaaaagcatttccataga

SEQ ID NO: 88814 - DNA, 120 bp, synthetic construct
  source 1..120: mol_type = other DNA
ttgacattttaaaaatagttggtattttcatagtttctggcccatgttgtactttctctgccccgggcctggaatcaactattcctccaaggagcccttggttctatttagcagagaacg

SEQ ID NO: 88815 - DNA, 120 bp, synthetic construct
  source 1..120: mol_type = other DNA
ctttcttgtccccagctctggctatagaatagcttactttcaaaagtgaaactatacaaaaaagtatactcagagatgtgtctccctcccatatccctcttaccagatgatccagtttta

SEQ ID NO: 88816 - DNA, 120 bp, synthetic construct
  source 1..120: mol_type = other DNA
gtcagtgagatagtacaatgtattccataaaaattatgaagaacgtatatctgatagaatcattatatagcaagttagaaaaaactgacacaaaatagtgcctagagcaagaccttactt

SEQ ID NO: 88817 - DNA, 120 bp, synthetic construct
  source 1..120: mol_type = other DNA
tggtttgtatcgctactgaatatatatgcagcaagattgggaaccttttgactcatataaattatttcattgtgtatgattattctgctctttcttgagagaaggagtactgtaagaaat

SEQ ID NO: 88818 - DNA, 120 bp, synthetic construct
  source 1..120: mol_type = other DNA
gattgagtaggcttaaacaccttgaaactgcaggtgaactcaggtttggttcatgctttcagtgtcccttagtctactgtgttacgtagtattcattatatgggaaacgctttttccacc

SEQ ID NO: 88819 - DNA, 120 bp, synthetic construct
  source 1..120: mol_type = other DNA
ccttaatacattagttctcaattctgcctttatatccaaatcactgctgaactgttaaaaacagtgatttccgagacccgctttagaccaactgaatcagatctggatagctacctgatc

SEQ ID NO: 88820 - DNA, 120 bp, synthetic construct
  source 1..120: mol_type = other DNA
tctctaattgaagacattttgttaaaatgccaatttaaaacagaatttttaaccaaatgccttgacacctctttaccagtggatgctgcgggctatgttggagcctgtgggctgtgttgg

SEQ ID NO: 88821 - DNA, 120 bp, synthetic construct
  source 1..120: mol_type = other DNA
attaagacaggcaaatatctttctaacggcattcatttatttgcctttcaaatactgagattaaattaataagggccaggtgtggtggctcatgcctgtaatcccagcactttgggaggc

SEQ ID NO: 88822 - DNA, 120 bp, synthetic construct
  source 1..120: mol_type = other DNA
gtgttttatcctgatacacagcctaattgaccccttcttgtggcactgtgtttctatgacaccatgtctttccctcgaatggtactagatggacatggacaaggacacttaatcttattt

SEQ ID NO: 88823 - DNA, 120 bp, synthetic construct
  source 1..120: mol_type = other DNA
tttccagcattagtgtgagtcagtgaggaagtgaagaagcagcccactttataaactgataaagccacttggctgatgtctgcaatgccatatttttcaaagtaccgtgcgttctcttta

SEQ ID NO: 88824 - DNA, 120 bp, synthetic construct
  source 1..120: mol_type = other DNA
gattataaagacaaatcccacagagaagttttatagaaatttaaaatgtctcacatattgtgcattccttgagttttcttttcccatcaggcaggcccaagtgcaggcccctctggagga

SEQ ID NO: 88825 - DNA, 120 bp, synthetic construct
  source 1..120: mol_type = other DNA
cttgacatgctgggtgttttaatcaatggaacgttagcctctgacctatcaaatgcatcccctgggggatctgaagagaacaagcgtgcatacatgaatttagtaaagaaactgaaagta

SEQ ID NO: 88826 - DNA, 120 bp, synthetic construct
  source 1..120: mol_type = other DNA
ccacctaccttggcctcccaaagtgctgggattacaggtgtgagccactgtgcccggctaaagtatgggtttttttttgttttttgttttgttttgtttttttgagacagagactcgctg

SEQ ID NO: 88827 - DNA, 120 bp, synthetic construct
  source 1..120: mol_type = other DNA
acttgcatttaggtctgtgatctactttgacttaatttctgtgtatggtgagaggtagggtccaaatttgttcttttcaaatgacccagcaggtgtccctatcccatctgtcatgacgat

SEQ ID NO: 88828 - DNA, 120 bp, synthetic construct
  source 1..120: mol_type = other DNA
tttcatcttggcagtggcagatgtgttttgatcgtttgtcatgggtggtggtagaatgttaagcatgtttgaatagccaccgagaataggttgattatggaaagaaaacacggacaaagt

SEQ ID NO: 88829 - DNA, 120 bp, synthetic construct
  source 1..120: mol_type = other DNA
ttttgatcacgaggctctcagacctcttggaggtggataaagatgaagcactgactgaatctgatgagcatttttcgacaaagcttatgtatgaaggtaggtggtctcgaacccatgggc

SEQ ID NO: 88830 - DNA, 120 bp, synthetic construct
  source 1..120: mol_type = other DNA
ttgttacacgaatctacacatgtgacaaatgccatagaattagacccaaagaatgcctgcgaaagctgctgaaatccagtggggtctgcagcctggttcactctgtagtgaaatccagtg

SEQ ID NO: 88831 - DNA, 120 bp, synthetic construct
  source 1..120: mol_type = other DNA
tgacctctttaccaggtctactgctactggatggcaaggatcctgtcttgcttactttcatatctccagggctagtcccagtgaatgatcacttaagtgtttgaattgcattgaattaca

SEQ ID NO: 88832 - DNA, 120 bp, synthetic construct
  source 1..120: mol_type = other DNA
ccacatccattttcaaggaaaaaattcaccttgttcatgccctaattggagggaactgacaacagcagaaatgacagccaacaccgcagacatctgaactggttcagcttatgcaattac

SEQ ID NO: 88833 - DNA, 120 bp, synthetic construct
  source 1..120: mol_type = other DNA
tagctgcgcctgaagataaagccatgcactttcacggtggcaacccctatttcattgagtccaatttcaattagttctggattagaatgaattatgctggacgtgtacagaaaactgcat

SEQ ID NO: 88834 - DNA, 120 bp, synthetic construct
  source 1..120: mol_type = other DNA
gagccagaacggaagagtccagtcacagtcccataaagtgcactcctagctgggaagtggcgtgtgttcaccctggcgttgtcatgttacactgacttccaggacgtggtcatcttggct

SEQ ID NO: 88835 - DNA, 120 bp, synthetic construct
  source 1..120: mol_type = other DNA
ttttcttttgcatcttaagtcttagaaattaagatattccatcgtgaggatgagagaggtcctcagtgtgtttttggtctggttgtagggaaggactcaagtcctggaatgtcctccact

SEQ ID NO: 88836 - DNA, 120 bp, synthetic construct
  source 1..120: mol_type = other DNA
gccttccccagtgtaatgtagctttctctcttaccttctggaagagggaatgtttcatttattactgtttgattttcttgtatctggttctactcccaggatgaaattatccaactacat

SEQ ID NO: 88837 - DNA, 120 bp, synthetic construct
  source 1..120: mol_type = other DNA
tcaaagtcaccaacttgtcaccttttccagtcacagaatcccaacacattgtattaatgatgactggggggggtcttacagcctgatgtatataggatgaataaatgtagagaaaggagc

SEQ ID NO: 88838 - DNA, 120 bp, synthetic construct
  source 1..120: mol_type = other DNA
cgcgctgtgggcggtgcacgccgtcgcttcccggaagtgcgtgctgtgggcggtgccgcgcggacccccgggaagtgtctctgtgggcggccgccgggttgagctgcggcacacgtgcga

SEQ ID NO: 88839 - DNA, 120 bp, synthetic construct
  source 1..120: mol_type = other DNA
tctaaagtagcccctgctcccacacttctcatccccctcctgctagagagagaatataaggtgtgcgtgtctgtgcgcatggcagtctccagtgaacgctcgtgctcgtgagttagtaaa

SEQ ID NO: 88840 - DNA, 120 bp, synthetic construct
  source 1..120: mol_type = other DNA
acccagttcttcgttgtagtgccttagccaggccccataaagtggtgtgtcacttggctccgttctgtgggaagggaccctgtccctgtgctgtgaagggtgggtgggggaaaaggtgta

SEQ ID NO: 88841 - DNA, 120 bp, synthetic construct; identical to SEQ ID NO: 1194
  source 1..120: mol_type = other DNA

SEQ ID NO: 88842 - DNA, 120 bp, synthetic construct; identical to SEQ ID NO: 1193
  source 1..120: mol_type = other DNA

SEQ ID NO: 88843 - DNA, 120 bp, synthetic construct
  source 1..120: mol_type = other DNA
gtgtgtactttattggtgtgcgctgcagtctactcatgtgtgctgtagtctatcagtgtgcacaagcattctgtctaaagcaacaacgtgcatcccttaatttaaaaacactttactgct

SEQ ID NO: 88844 - DNA, 120 bp, synthetic construct
  source 1..120: mol_type = other DNA
ccaattttttgttttttgtttttatagtagagacggggtttcaccatgttgaccaggcaggtctcgtactcctgaccttatgatatgcccgccttggcctcccaaagcactaggattata

SEQ ID NO: 88845 - DNA, 120 bp, synthetic construct
  source 1..120: mol_type = other DNA
atgatacatctgggcaatgttaccctttgtgacaacaaacttcctatggaaggaacgcggacatagttgatattcaagaccagcaatggccctaaggccactgtggagtctcagcctgca

SEQ ID NO: 88846 - DNA, 120 bp, synthetic construct
  source 1..120: mol_type = other DNA
ttttcctgtcttctcctcctcggccggagtggcttttccccggatggtggtctctctgtcgccctcctggtcctcctcctcctcctcttcctcctcccgctgcaacaggtctgctttcca

SEQ ID NO: 88847 - DNA, 120 bp, synthetic construct
  source 1..120: mol_type = other DNA
ccttgctgcagttgcttagcgcctgctgtgtgcagggctctgaacttggcactgagacacactgcccacccttgtgaggcctcctctccgccggggaggagaggtgcagtgatgaggtgg

SEQ ID NO: 88848 - DNA, 120 bp, synthetic construct
  source 1..120: mol_type = other DNA
cgtcaattcaggtacttcttcaataaagaaggggattttaacaacctgacagctgcagcatttcataagaagtctcacctcttggtcactggctttgcttctggaatcttccatcttcat

SEQ ID NO: 88849 - DNA, 120 bp, synthetic construct; identical to SEQ ID NO: 22801
  source 1..120: mol_type = other DNA

SEQ ID NO: 88850 - DNA, 120 bp, synthetic construct; identical to SEQ ID NO: 22800
  source 1..120: mol_type = other DNA

SEQ ID NO: 88851 - DNA, 120 bp, synthetic construct; identical to SEQ ID NO: 22799
  source 1..120: mol_type = other DNA

SEQ ID NO: 88852 - DNA, 120 bp, synthetic construct
  source 1..120: mol_type = other DNA
gatgggctgggtctttgtgagccacgtggtctttcaacaccgccgctgaggcattgacagccacagaccatatgaacacaggaggccacggctgcctctagtacagccccgtcagaaaga

SEQ ID NO: 88853 - DNA, 120 bp, synthetic construct
  source 1..120: mol_type = other DNA
ttgcttgagcccagaagtttgagaccagcctgggctacgtggcaaaatgccatctctacaaaaagtagaaaaattagccaggtgtggtggcacatgtctgtggtcctagctagtcgggaa

SEQ ID NO: 88854 - DNA, 120 bp, synthetic construct
  source 1..120: mol_type = other DNA
tttgttccgctttgtgaactgtctttccaccgttttggtggcactcttagttctgatgatgtccactttgctcattttttctgttgttctttgttctctactgtcataactaagggacct

SEQ ID NO: 88855 - DNA, 120 bp, synthetic construct
  source 1..120: mol_type = other DNA
cgccctgtgctactctgcagacggccacagcatcctggcgggaggcatgtccaagttcgtgtgcatctaccacgtccgtgagcagattctcatgaagaggttcgagatctcttgcaacct

SEQ ID NO: 88856 - DNA, 120 bp, synthetic construct
  source 1..120: mol_type = other DNA
tagcctctaagcaggggtgtggctgctgggttcacctgtccacgccccatcggggcagaagcccactgtcccctaaatgtttctgggggaaagtgtccttggcattttcacaagggagta

SEQ ID NO: 88857 - DNA, 120 bp, synthetic construct
  source 1..120: mol_type = other DNA
aggagtgggtctgctgtgctcaacacggtaccctgggcctgcatatggaagcactcagggtttctggctggcgagtgtcccatcaggatggtctacctgggacccagatcttctagagca

SEQ ID NO: 88858 - DNA, 120 bp, synthetic construct
  source 1..120: mol_type = other DNA
tgtgccctcgggcccaagggccaaatctggctggccacctgctttggtcactgatgttttactgggacattttactgggcgtttttttgttggcggatccttctggctgtctctagtgat

SEQ ID NO: 88859 - DNA, 120 bp, synthetic construct
  source 1..120: mol_type = other DNA
tcctgaactgtatgtggagaaagtgctggagtttttagcttcctcctttgaagtgtctcgccacctggaattctacctcctctggactcacaaactgctcatgttgcacggacagaagct

SEQ ID NO: 88860 - DNA, 120 bp, synthetic construct
  source 1..120: mol_type = other DNA
tgatatccctcacatggctactctgaggcctgcctagtcccggctctgcaggacctttagggaaggtgaattggtagggacaaaaaaggcacaaaccacaaagaaatgacaggagaagag

SEQ ID NO: 88861 - DNA, 120 bp, synthetic construct
  source 1..120: mol_type = other DNA
ttatctttcagttctcctttcctatgtaaagtgatggtggcatcacttttctcctttattccattaactcagaaaattaactgattcagagcgtgccttcctcccctctcgctccacaac

SEQ ID NO: 88862 - DNA, 120 bp, synthetic construct
  source 1..120: mol_type = other DNA
agaacttagggattaaaaaaaagatggagttttctaacgtgaggatgaagtctacacttcagattaaaaagggttatgttgtatcctgctgtcttgtgggggctcaagacctgcctgcct

SEQ ID NO: 88863 - DNA, 120 bp, synthetic construct
  source 1..120: mol_type = other DNA
gctgagaagcctgaagagggccaggcacggaggagcaggaacgaggacagtcaaatgtgccaagcttgtctttggttgtaactggtaatgtcccatgtctgttattctagttccccacta

SEQ ID NO: 88864 - DNA, 120 bp, synthetic construct
  source 1..120: mol_type = other DNA
tggccatttaggaggatgtggaccctggacgctcgtggtgagttaaggatgagacggaggtaaggtaagaagcgccggactgagccgccccgaggcagccttgctctgcggatggcggaa

SEQ ID NO: 88865 - DNA, 120 bp, synthetic construct
  source 1..120: mol_type = other DNA
gaatcgcttgaacccaggaggcggaggccgcagtgagccaagatcgcgccattgcactccagactgggcgctgtctcaaaagacaaaaagtaaaaataaaataaaatacatgctttctct

SEQ ID NO: 88866 - DNA, 120 bp, synthetic construct; identical to SEQ ID NO: 22792
  source 1..120: mol_type = other DNA

SEQ ID NO: 88867 - DNA, 120 bp, synthetic construct; identical to SEQ ID NO: 87948
  source 1..120: mol_type = other DNA

SEQ ID NO: 88868 - DNA, 120 bp, synthetic construct
  source 1..120: mol_type = other DNA
ctgacttgggagctgttcttagggttgggtcttaggtagcgttgtagcgagccatgcttttgtttctgcttctctgctgcctcttctctcagcattcctggtacccagcagcttgtcaga

SEQ ID NO: 88869 - DNA, 120 bp, synthetic construct
  source 1..120: mol_type = other DNA
gcctgcacccagagtcgaggggtaggcagtctccatccgaagaatgcgcccctccttatcccgaaacctcagaggcctccttcctcagatgccagctgttttctcagtgcccttggccgt

SEQ ID NO: 88870 - DNA, 120 bp, synthetic construct
  source 1..120: mol_type = other DNA
gcgtggtgcatggggaagacccttcacacccaccttctgtgtggacaactgttgtggtgggaggaggagaaacacggtgtgagagtttttccttaaaacaaaggggcagcaggaaactcc

SEQ ID NO: 88871 - DNA, 120 bp, synthetic construct
  source 1..120: mol_type = other DNA
tggaattctcttggctcccagaggtgtccctaggcagtccctcaggacccctatcctttaccagaccccttctcccaagccccttagccacagtacccccaaccccgctgacttctggcc

SEQ ID NO: 88872 - DNA, 120 bp, synthetic construct
  source 1..120: mol_type = other DNA
agccatgaggctcccctgaaaactgcagggcacaagcccgtctgctccccggtccagccatggggcttccgtgcacggtgacccacaggcttttttcctgaggaaacctaaatcctttcc

SEQ ID NO: 88873 - DNA, 120 bp, synthetic construct
  source 1..120: mol_type = other DNA
atgtgcggctgccccagccctgagttgtggggtggtctgtgacccagcaatagataacacagctgcacttctcattcacaccagccccccttctacaggaggcacaatgggccaggagca

SEQ ID NO: 88874 - DNA, 120 bp, synthetic construct
  source 1..120: mol_type = other DNA
gatccaggtcccttgcctgactgtttagtctgctcagcaacacccaggcagccacactccgggcccagcggggggagggtgaggaaagagtgtgtgcgaggtgtggagggagagcagccg

SEQ ID NO: 88875 - DNA, 120 bp, synthetic construct
  source 1..120: mol_type = other DNA
tgtatgatttatgctgctgaacaacataagaaggaacctgttcccaattcacatgcattctagaggaagaaagcagcgggaaattccagggaacggggcacctttcatgccagcatcaca

SEQ ID NO: 88876 - DNA, 120 bp, synthetic construct
  source 1..120: mol_type = other DNA
aaatggcaacttcccacagccacatttcagacctgctgagactgctgagtgaggaatggcagtgaggtttcttcaattagtctcagttctcttaattttcaggaagaaagggaaattgca

SEQ ID NO: 88877 - DNA, 120 bp, synthetic construct
  source 1..120: mol_type = other DNA
tacccgtataccacgcatgtttattcacgtgtgtgtgagtgtatggaaaagtgcacaagtcacaagcattcactttggggtttccacaaagcaaatacgcaaaaccatcgctcgggcctg

SEQ ID NO: 88878 - DNA, 120 bp, synthetic construct
  source 1..120: mol_type = other DNA
tttccttccagggtacctcctcacctcctgtccaggtcaccagagcttcacctgtggacatgccccattccctgataatcctttcttcattctccatttctccaccactcccagctcccc

SEQ ID NO: 88879 - DNA, 120 bp, synthetic construct
  source 1..120: mol_type = other DNA
aggtggagggcacccatgaggcccccatcctctctcctgacactcccagtgcagtggggagacagatgacaaagctgtgatacatgtgtactcacagacctcgagatctgtgcagcgagt

SEQ ID NO: 88880 - DNA, 120 bp, synthetic construct
  source 1..120: mol_type = other DNA
gaataatattccattgtttggctctaccacagtttatccatttaccctctctcaagagcatcttaggcttgtcccagtttggggcatttatgaataaagctgctataaacaccggtgtgg

SEQ ID NO: 88881 - DNA, 120 bp, synthetic construct
  source 1..120: mol_type = other DNA
tgcatttcacatttaggtctgtgatcattctgagtgaattgctgtaggggtggaatgtgtgtgttgggattcattttgggaatgtgaacgccccgttgtttggctccatttggtggaggc

SEQ ID NO: 88882 - DNA, 120 bp, synthetic construct
  source 1..120: mol_type = other DNA
acttcatcagaaaaatgaggcaaatgccctagaaaaaagaaaaagtactgattctctgctctaaacccaagaattccaatgtaggtctatcagtctgggtagggtcaaggataaacataa

SEQ ID NO: 88883 - DNA, 120 bp, synthetic construct
  source 1..120: mol_type = other DNA
gcacaaagatagagaaagagaagagggagagacaatgaggggggcactgactagcacaagcattactgggaggtgggggcactcagatccaaggtgagctaagagagaagcagagatggt

SEQ ID NO: 88884 - DNA, 120 bp, synthetic construct
  source 1..120: mol_type = other DNA
ttagagaaaagatatgggatcttaagacatgatgtgaggatggacaagaacttgagtacaggatgttggtatagagaaggtagaaacaaggcagctcaggatgactgctcaaaactccca

SEQ ID NO: 88885 - DNA, 120 bp, synthetic construct
  source 1..120: mol_type = other DNA
gtacatacgtctgagggtctgtttaatggacttgggtcttttctcatggcacttaagaactaggagatacgtgatttagctctgatttcaggagcccacgttccttgtactatattgtgg

SEQ ID NO: 88886 - DNA, 120 bp, synthetic construct
  source 1..120: mol_type = other DNA
cacacaaaatacacataatgacaggagaaagaaatacggagatgggaaactatatactcaagactaacacccatataagtaggcttaggagctgggaactgcagcattgctccgaaagag

SEQ ID NO: 88887 - DNA, 120 bp, synthetic construct
  source 1..120: mol_type = other DNA
cacagaaatattcatcccttcccctagtctctttccacattatcttttctcccttggttgagtaacattcccttccctaaacccaatttgctggattttaatcgaggttccaccactttc

SEQ ID NO: 88888 - DNA, 120 bp, synthetic construct
  source 1..120: mol_type = other DNA
tgaacactcagctggcacccttccaatccttcctaagtttttcatccaacatcccctcccttcaggccttttgacctttcccaagaatgaaagtatgaggctcacaattttttttttttt

SEQ ID NO: 88889 - DNA, 120 bp, synthetic construct
  source 1..120: mol_type = other DNA
gagaggattaaataaaatctgaataatctctgaagtatgaaataaatcagaccagtcactgtccccaacagctgatctagaggagggttaggactccacggtcccttctcctactatagc

SEQ ID NO: 88890 - DNA, 120 bp, synthetic construct
  source 1..120: mol_type = other DNA
atctacactattgttgtttcgggttttttttttttttttgagacagagtgtcactctgtcacccaggttggagtacagtggcacagtctcagctcactgcaacctccatcttctgggttc

SEQ ID NO: 88891 - DNA, 120 bp, synthetic construct
  source 1..120: mol_type = other DNA
aagacgtggcacatttcttcaaatgaggaatacgacatttatgagggttgcaagtacctctatttatagctctgtctttgataactctgaaggttcagagtctccatggccccttaaggt

SEQ ID NO: 88892 - DNA, 120 bp, synthetic construct
  source 1..120: mol_type = other DNA
aaccatactacattccttgttagaaccaagaagcccacccctccactgtctcacccctagaaacatgaaacagaatttttacaatgcccacaagggcccaatcacacaacccccaaaaca

SEQ ID NO: 88893 - DNA, 120 bp, synthetic construct
  source 1..120: mol_type = other DNA
gcggttcaggcacaacagcaccaggagagactagcagaccatgtgaataggaaagacatttggaggatcagtttattgatggaagattatgtatcattctatccatgtgatctattggat

SEQ ID NO: 88894 - DNA, 120 bp, synthetic construct
  source 1..120: mol_type = other DNA
gttaaggtcagagaaatgtagagaagttacccagccaaagtcacacagcttccaagtattacactgggattttggcccggagttcaagctgtttccactagatttccttttaaagaacta

SEQ ID NO: 88895 - DNA, 120 bp, synthetic construct
  source 1..120: mol_type = other DNA
accatttgtgatttcaccattgcacatgacttctgaacttccagctttacaacgcttcccatcaccttccacaataactcagcttggctgtggtgcatatagcagaacatttaaagatac

SEQ ID NO: 88896 - DNA, 120 bp, synthetic construct
  source 1..120: mol_type = other DNA
cctaccaaatgcaaaaagaggtaagccattgcttaaggaaatgggagtcagagaatgagcagggagccaatgagaatggagaaagctttcatttgagaagagtaaaagaatgctgggaaa

SEQ ID NO: 88897 - DNA, 120 bp, synthetic construct
  source 1..120: mol_type = other DNA
acgctgtagcattagctctagtgtctcactgtggtagagctgcaggtctggaagaaaggcaggaatcagataagaatcaaagattttacctccaacaaaagaccctgacaactctgaagt

SEQ ID NO: 88898 - DNA, 120 bp, synthetic construct
  source 1..120: mol_type = other DNA
agtttgacagtgagcaatggattgggaaataaaggagcaaggtcctgttccttatcaagtcctactcagagaacacagaaaatcctatgggctcacagcaatgtgcttagctacttaact

SEQ ID NO: 88899 - DNA, 120 bp, synthetic construct
  source 1..120: mol_type = other DNA
tccttgggatcagagctgtgctttggaactgagaatctgtgggactttagaagttaatacagtacatatgccatatgtatataatacctccatcagggcccatggcataaccaaacacat

SEQ ID NO: 88900 - DNA, 120 bp, synthetic construct
  source 1..120: mol_type = other DNA
caaaggtgggggaccacaaatggactgctataaatactcgtggaagaaaaaatattcattcccccactgtctctgtcccttcattttccccaacttactctctaatcattttatcctggc

SEQ ID NO: 88901 - DNA, 120 bp, synthetic construct; identical to SEQ ID NO: 622
  source 1..120: mol_type = other DNA

SEQ ID NO: 88902 - DNA, 120 bp, synthetic construct
  source 1..120: mol_type = other DNA
acagagctagactctgtctcaaaaacaaacacaacaaaacaaaaaaaacggcgggggaatataagtggagttaagaagactgtgtataagaggcctaggctccgttagtcagatagtgtg

SEQ ID NO: 88903 - DNA, 120 bp, synthetic construct
  source 1..120: mol_type = other DNA
gggatcaagtgattctactgcctcagcctcccaagcagctgagattatagggaaccaccaccacggctgactaattttttttttttttgggtttttttttttgagatggagtctcactct

SEQ ID NO: 88904 - DNA, 120 bp, synthetic construct
  source 1..120: mol_type = other DNA
actcctgacctcaggtgacccacccgcctcagcctctcaaagtgctgagtttataggcatgagccatcgcgcctggcctgctttttcacttttaaatcatatttgtgatatttaaaataa

SEQ ID NO: 88905 - DNA, 120 bp, synthetic construct
  source 1..120: mol_type = other DNA
tctttcggacgctgctctcaggagagtaaacactgcttcggctgccaatcttcaagagaaaaaaagaagaaaaagcaatgttgcctcaactctctgttctgtccccaaattctccatctt

SEQ ID NO: 88906 - DNA, 120 bp, synthetic construct
  source 1..120: mol_type = other DNA
aagcaacagctttgtccagaggaaagcctgggatggagacaggaaataaagagaccaaaggaagggagagaaagagaacgagaaaagagcaagagagatacaaagacatattaaagctat

SEQ ID NO: 88907 - DNA, 120 bp, synthetic construct
  source 1..120: mol_type = other DNA
tccacagtaggaaatatgtgctcaagcaggagagctagagaaccaacaaccatgagacgacaggaagatcctaagggcaggggtttctttttttttttttttggagatagagtctcactc

SEQ ID NO: 88908 - DNA, 120 bp, synthetic construct
  source 1..120: mol_type = other DNA
aaggggaaacaaaacaaagctataggaagaaggatcaacaagaaaggaggcatatgggctatgacttgagatgctaaaagagccataaaagaaaagcaaggtatcccttttcctccctgc

SEQ ID NO: 88909 - DNA, 120 bp, synthetic construct
  source 1..120: mol_type = other DNA
tgtaatcccagcactttcggaggctgaaccaggatgactgcttgagcctcggagtttgagaccagcctgggcaatataggtagacctgacctttacaaaagctttttcttaaattagcca

SEQ ID NO: 88910 - DNA, 120 bp, synthetic construct; identical to SEQ ID NO: 623
  source 1..120: mol_type = other DNA

SEQ ID NO: 88911 - DNA, 120 bp, synthetic construct
  source 1..120: mol_type = other DNA
gtcacacatcagcaattttccgtggtctccaaaagttctcagaaacactgaccaatgactctagtgaaagccacaaactccttaagtaaatgaacttgtcttacagaaataatatcttat

SEQ ID NO: 88912 - DNA, 120 bp, synthetic construct
  source 1..120: mol_type = other DNA
taacaaagcaaaaatagaagcctgacagaaatagctatgaaataagccaggatttatttagatgcacctctgggagaagatgggctttaatgtggtgttcccagagccgcttccctgttt

SEQ ID NO: 88913 - DNA, 120 bp, synthetic construct; identical to SEQ ID NO: 15230
  source 1..120: mol_type = other DNA

SEQ ID NO: 88914 - DNA, 120 bp, synthetic construct; identical to SEQ ID NO: 15231
  source 1..120: mol_type = other DNA

SEQ ID NO: 88915 - DNA, 120 bp, synthetic construct; identical to SEQ ID NO: 15232
  source 1..120: mol_type = other DNA

SEQ ID NO: 88916 - DNA, 120 bp, synthetic construct; identical to SEQ ID NO: 15233
  source 1..120: mol_type = other DNA

SEQ ID NO: 88917 - DNA, 120 bp, synthetic construct; identical to SEQ ID NO: 15234
  source 1..120: mol_type = other DNA

SEQ ID NO: 88918 - DNA, 120 bp, synthetic construct; identical to SEQ ID NO: 15235
  source 1..120: mol_type = other DNA

SEQ ID NO: 88919 - DNA, 120 bp, synthetic construct; identical to SEQ ID NO: 15236
  source 1..120: mol_type = other DNA

SEQ ID NO: 88920 - DNA, 120 bp, synthetic construct
  source 1..120: mol_type = other DNA
atactgggaaaaccaggacatgtggtcacactaagattaggaaaagaaagagtgtcaggaatcttaggaagtgaacaaggctgttgacagagagtgcaaagaaggaataaatgagatggc

SEQ ID NO: 88921 - DNA, 120 bp, synthetic construct
  source 1..120: mol_type = other DNA
aaagcttacaccttcatcttctgtctgaagggacccttctaagctctaggctcattagcaaagcaaagataatcgatgcatgcagacctcattgaataatcagtcatctctcagttcagt

SEQ ID NO: 88922 - DNA, 120 bp, synthetic construct
  source 1..120: mol_type = other DNA
aaaaagaaaaaaggaaaaaaaaagttcaggagacagagctctgagcaggttcagggctctttcaggtaggactagtctctgcctctattgaccctgctcccaatccctatctcctctcta

SEQ ID NO: 88923 - DNA, 120 bp, synthetic construct
  source 1..120: mol_type = other DNA
taatcaggatgcacttctgtttgcactttattcattatgacttaagatttctctccccacaatctccttctactgtagagacaggctcatagcaggtggccaaggaagctgatagtcaat

SEQ ID NO: 88924 - DNA, 120 bp, synthetic construct
  source 1..120: mol_type = other DNA
agtggcccagctccccacctgctatggtgccaatttcagtgaagatctcaggcccccagttactgattgggccaaacccaccaggcagtacaagtaggtgggccagaacctccagttgtt

SEQ ID NO: 88925 - DNA, 120 bp, synthetic construct
  source 1..120: mol_type = other DNA
gatctcctagacctattaagagcctaccaagctgcaggatctgctcaggacgaaatccccgggggggaccccacaactaggagaaagacaggaacaatgtgagtggaaaagcagtggatt

SEQ ID NO: 88926 - DNA, 120 bp, synthetic construct; identical to SEQ ID NO: 16404
  source 1..120: mol_type = other DNA

SEQ ID NO: 88927 - DNA, 120 bp, synthetic construct; identical to SEQ ID NO: 16405
  source 1..120: mol_type = other DNA

SEQ ID NO: 88928 - DNA, 120 bp, synthetic construct; identical to SEQ ID NO: 87736
  source 1..120: mol_type = other DNA

SEQ ID NO: 88929 - DNA, 120 bp, synthetic construct; identical to SEQ ID NO: 16406
  source 1..120: mol_type = other DNA

SEQ ID NO: 88930 - DNA, 120 bp, synthetic construct; identical to SEQ ID NO: 16407
  source 1..120: mol_type = other DNA

SEQ ID NO: 88931 - DNA, 120 bp, synthetic construct; identical to SEQ ID NO: 16408
  source 1..120: mol_type = other DNA

SEQ ID NO: 88932 - DNA, 120 bp, synthetic construct; identical to SEQ ID NO: 16409
  source 1..120: mol_type = other DNA

SEQ ID NO: 88933 - DNA, 120 bp, synthetic construct; identical to SEQ ID NO: 16410
  source 1..120: mol_type = other DNA

SEQ ID NO: 88934 - DNA, 120 bp, synthetic construct; identical to SEQ ID NO: 87742
  source 1..120: mol_type = other DNA

SEQ ID NO: 88935 - DNA, 120 bp, synthetic construct; identical to SEQ ID NO: 16411
  source 1..120: mol_type = other DNA

SEQ ID NO: 88936 - DNA, 120 bp, synthetic construct; identical to SEQ ID NO: 87744
  source 1..120: mol_type = other DNA

SEQ ID NO: 88937 - DNA, 120 bp, synthetic construct; identical to SEQ ID NO: 87745
  source 1..120: mol_type = other DNA

SEQ ID NO: 88938 - DNA, 120 bp, synthetic construct; identical to SEQ ID NO: 87746
  source 1..120: mol_type = other DNA

SEQ ID NO: 88939 - DNA, 120 bp, synthetic construct; identical to SEQ ID NO: 16412
  source 1..120: mol_type = other DNA

SEQ ID NO: 88940 - DNA, 120 bp, synthetic construct; identical to SEQ ID NO: 16413
  source 1..120: mol_type = other DNA

SEQ ID NO: 88941 - DNA, 120 bp, synthetic construct; identical to SEQ ID NO: 16414
  source 1..120: mol_type = other DNA

SEQ ID NO: 88942 - DNA, 120 bp, synthetic construct; identical to SEQ ID NO: 16415
  source 1..120: mol_type = other DNA

SEQ ID NO: 88943 - DNA, 120 bp, synthetic construct; identical to SEQ ID NO: 16416
  source 1..120: mol_type = other DNA

SEQ ID NO: 88944 - DNA, 120 bp, synthetic construct; identical to SEQ ID NO: 16417
  source 1..120: mol_type = other DNA

SEQ ID NO: 88945 - DNA, 120 bp, synthetic construct; identical to SEQ ID NO: 16418
  source 1..120: mol_type = other DNA

SEQ ID NO: 88946 - DNA, 120 bp, synthetic construct; identical to SEQ ID NO: 16419
  source 1..120: mol_type = other DNA

SEQ ID NO: 88947 - DNA, 120 bp, synthetic construct; identical to SEQ ID NO: 16420
  source 1..120: mol_type = other DNA

SEQ ID NO: 88948 - DNA, 120 bp, synthetic construct
  source 1..120: mol_type = other DNA
gctcccaacaggatggtgcatgatgtttcctttattggaccccacacatccccatcagtttaacaaggaaggctgccaactccaacgccttgccatacaacctgctcatgtacacacctt

SEQ ID NO: 88949 - DNA, 120 bp, synthetic construct
  source 1..120: mol_type = other DNA
ttgatttaaaattctgaagtgtggacaggatatttcttctctgctttgagaaggatttggtgagactgaagaggaaccagggaaggagagcagacaggagaccctcagcctgtgagggag

SEQ ID NO: 88950 - DNA, 120 bp, synthetic construct
  source 1..120: mol_type = other DNA
gaagggtagtataataccaaatgatcatagttgctttttgttgagcacccactatgtaacagtttatggggaagggtatagtactcacccacattttgtctctgtctccttcctggacac

SEQ ID NO: 88951 - DNA, 120 bp, synthetic construct
  source 1..120: mol_type = other DNA
aaatgtgctgtaattctgaaagtgctggggctgcagagaaatgcccacaactgggcagagttagctctcaaggaacctagcgcacaccagccccaaatggtgtttgattctcactgtcgc

SEQ ID NO: 88952 - DNA, 120 bp, synthetic construct
  source 1..120: mol_type = other DNA
gagacggggtttcaccgttttagccgggatggtctcgatctcctgacctcgtgatccgcccgcctcggcctcccaaagtgctgggattacaggcgtgagccaccgcgcccggccggccag

SEQ ID NO: 88953 - DNA, 120 bp, synthetic construct
  source 1..120: mol_type = other DNA
tgaacaattccaacaggaaacaaagataaatctcaaagtcatccaacagaacagaaactcactgctaagaatgctgactgctctcttcaaagaggcaggaatgggcctcatatcacacga

SEQ ID NO: 88954 - DNA, 120 bp, synthetic construct
  source 1..120: mol_type = other DNA
aaccatcttcctactgattgctgcttggaactcggactccaggtcgggaaacattcttggcccctcctcttcttggttgctggagccctcatcggattgtctccaaagagtgtagttgat

SEQ ID NO: 88955 - DNA, 120 bp, synthetic construct
  source 1..120: mol_type = other DNA
ttctccttgtagggcctaatcccacccttttgctggcttgagaatctctcatgtcaagaactcacatccctgatatggtacagaaggagatgaggggacccacatctggccatacgtgac

SEQ ID NO: 88956 - DNA, 120 bp, synthetic construct
  source 1..120: mol_type = other DNA
cacaccttgggtccggcagatcctgggattcctccctctgctgacctgaagtcccagccctcagaccacagccctcaactctctgtcaccctgaaggtgcaatgagcacggggcacattc

SEQ ID NO: 88957 - DNA, 120 bp, synthetic construct
  source 1..120: mol_type = other DNA
agggtggaaccggattctgcccggatggggatctggatgggggggtgggggtaagcatgaagatggtgttggtgtaggggtagggattgggacggggatcctgaggctgtagatcctggt

SEQ ID NO: 88958 - DNA, 120 bp, synthetic construct; identical to SEQ ID NO: 35524
  source 1..120: mol_type = other DNA

SEQ ID NO: 88959 - DNA, 120 bp, synthetic construct
  source 1..120: mol_type = other DNA
aggccaattttaccaaatgatcagggaaaactaaccaccgccttatatcaactcttccagaacatacaaaagactgacaattgttcagttcattctcccaggctagccctcctggattta

SEQ ID NO: 88960 - DNA, 120 bp, synthetic construct
  source 1..120: mol_type = other DNA
agacatgaaatctgccagcaccttgatcttggacttcccaacctccagaatgtgagaaataaagttgcgttgtctataagccacccagtctatcactatttttgttatggaagcccaaac

SEQ ID NO: 88961 - DNA, 120 bp, synthetic construct; identical to SEQ ID NO: 88762
  source 1..120: mol_type = other DNA

SEQ ID NO: 88962 - DNA, 120 bp, synthetic construct; identical to SEQ ID NO: 88761
  source 1..120: mol_type = other DNA

SEQ ID NO: 88963 - DNA, 120 bp, synthetic construct
  source 1..120: mol_type = other DNA
gacttgaagtctctggccttgcccgggaattactggctgtccgaagagagactggagaaggtggtggtctccttgcccttgtggtcccgctatggctcattttgattgagttcctcgttc

SEQ ID NO: 88964 - DNA, 120 bp, synthetic construct
  source 1..120: mol_type = other DNA
tgaccatgaccattttccctactaacagaggcaggtaggcacagagagcagcagttgctttcacacacaggcagcatccaggaagaaaaccagatcgatagtgtaatagaaggagagctt

SEQ ID NO: 88965 - DNA, 120 bp, synthetic construct
  source 1..120: mol_type = other DNA
ctacctctcttgaacactccagtggtcctttgtaccttcaccagcgtcccagatgtgggaactgtcttcatgcctgctgggggctggtgttttatcccccggggaccttctatagaggct

SEQ ID NO: 88966 - DNA, 120 bp, synthetic construct
  source 1..120: mol_type = other DNA
gttaattgtggtgacctctgagggggcggtgggggtggtgggcgttgttaaatgtggaggagatttgtaaaggggaaaattgtgaattatctacatttctataagttttgcaataagaat

SEQ ID NO: 88967 - DNA, 120 bp, synthetic construct; identical to SEQ ID NO: 35521
  source 1..120: mol_type = other DNA

SEQ ID NO: 88968 - DNA, 120 bp, synthetic construct; identical to SEQ ID NO: 35520
  source 1..120: mol_type = other DNA

SEQ ID NO: 88969 - DNA, 120 bp, synthetic construct
  source 1..120: mol_type = other DNA
tacatgagataactcaagaaatcaaaagatagttgattcttgccttgtacctcaatctattctgtaaaattaaacaaatatgcaaaccaggatttccttgacttctttgagaatgcaagc

SEQ ID NO: 88970 - DNA, 120 bp, synthetic construct
  source 1..120: mol_type = other DNA
ctcctcaagtatcgagccagggagccggtcacaaaggcagaaatgctggggagtgtcgtcggaaattggcagtatttctttcctgtgatcttcagcaaagcttccagttccttgcagctg

SEQ ID NO: 88971 - DNA, 120 bp, synthetic construct
  source 1..120: mol_type = other DNA
ataaatttggacatctctcgttgtcctttccgggaggacctgggaatgtatggccagatgtgggtcccctcatgtttttctgtaccatatcaggtatgtgagttcttgacatgagagatt

SEQ ID NO: 88972 - DNA, 120 bp, synthetic construct
  source 1..120: mol_type = other DNA
cgaaccccttccctcccttagccgtagatgtgaacctcaggactcacgtgcctggccgccattcccggagcttccgtgacttgataccaggggcaaagcccggattctgccaggataggg

SEQ ID NO: 88973 - DNA, 120 bp, synthetic construct; identical to SEQ ID NO: 35517
  source 1..120: mol_type = other DNA

SEQ ID NO: 88974 - DNA, 120 bp, synthetic construct
  source 1..120: mol_type = other DNA
ttatcattcacgtcaggaacgagaagtagatgtaggctattatctctacgattgaaatcaggattgagacacaaagagctataagtaccaaaatgagtaagtggtatgaatactggaaga

SEQ ID NO: 88975 - DNA, 120 bp, synthetic construct; identical to SEQ ID NO: 88748
  source 1..120: mol_type = other DNA

SEQ ID NO: 88976 - DNA, 120 bp, synthetic construct; identical to SEQ ID NO: 88747
  source 1..120: mol_type = other DNA

SEQ ID NO: 88977 - DNA, 120 bp, synthetic construct; identical to SEQ ID NO: 88746
  source 1..120: mol_type = other DNA

SEQ ID NO: 88978 - DNA, 120 bp, synthetic construct
  source 1..120: mol_type = other DNA
tgagtttgccgttgatttgcccaagttgtttcctctggctgcgcgggagaaccgagcaatggggccgcgagggctggaggtccgagtaaaacggggaaccgaacgctttctcttgagctt

SEQ ID NO: 88979 - DNA, 120 bp, synthetic construct
  source 1..120: mol_type = other DNA
ttacaactatacacagtacatgtatgcaggcgtttacaaggacaggacacacgctctcacagaaaccaaccctctagcaaacaaagaaacttgaacagacattcatatgggcagacacct

SEQ ID NO: 88980 - DNA, 120 bp, synthetic construct
  source 1..120: mol_type = other DNA
gggagtaggtgtcagcaggaagccatagaattgaggggagcagagaggagaggggaaggggagattcagcctaggctgagaaataaaaatcgcattttaaagaatttcaatgggcttcat

SEQ ID NO: 88981 - DNA, 120 bp, synthetic construct
  source 1..120: mol_type = other DNA
aagccccacctctgcccccctaggacctctttacacccttacaaggactaagtcttaatttcttttatcctatagtttctggtggtaagtgccccttaaatatctgatcaattgattgat

SEQ ID NO: 88982 - DNA, 120 bp, synthetic construct
  source 1..120: mol_type = other DNA
ctgtgtaaattatccccatttcatggatgagaaactgagatttatttatttatttttttagatagggtcttgctctgctgcccaggctagggtgcagtggtgtgattatggctcactgca

SEQ ID NO: 88983 - DNA, 120 bp, synthetic construct
  source 1..120: mol_type = other DNA
ggaactgcctggccttgggtggtgaaaagtgattgtaggaggtgaactccataccaaagcatcaaaattaccttttattgaattcctacagtgtgcttttcaggttaatgttactcccat

SEQ ID NO: 88984 - DNA, 120 bp, synthetic construct
  source 1..120: mol_type = other DNA
tcctcaaatgtgaaaccagggaggaggaagaggcaatttcagaaatcaggaaaaataatgggctctctcagagtgggggagaaatccgttcacttttgtgaagggcaattttgtatttta

SEQ ID NO: 88985 - DNA, 120 bp, synthetic construct
  source 1..120: mol_type = other DNA
tgagcccatttaacaaaataggcatcgtattgaaataaatgagccttgcagccagtcaacctcctcaggattaagggtcttaaatccaggggtagaaatctccagaactctctagcaaat

SEQ ID NO: 88986 - DNA, 120 bp, synthetic construct
  source 1..120: mol_type = other DNA
aggatttgggttggtttgggagaaacagatgagatgatccagaacggcagaatggggacagaccagaggaggcctggaaaagccaggccaaagacttcttgcaaagactcccctgtaaga

SEQ ID NO: 88987 - DNA, 120 bp, synthetic construct
  source 1..120: mol_type = other DNA
ctctcagtatggtgtgggagatggatgtataaacacatattgacaattttataagataaaggttgtgagagaggtatgtgaaaaatgctgaagcctaaccgtccagtgagggggagtgga

SEQ ID NO: 88988 - DNA, 120 bp, synthetic construct
  source 1..120: mol_type = other DNA
cagaaggacatttcatcgagacagtgggactcctgggttttaatccaaaaccttgaggaattgacttgctcctctttgtctcagtcctccccaccactccccactctccctggaaatcta

SEQ ID NO: 88989 - DNA, 120 bp, synthetic construct
  source 1..120: mol_type = other DNA
cttgaaaaaacagacaatagaaatgagagatgaacaaagaataggccaaatacagatcagactgttaactgggccaaggagggtgaccagtgatgtaggtaatccttgagctctgttctc

SEQ ID NO: 88990 - DNA, 120 bp, synthetic construct
  source 1..120: mol_type = other DNA
caggctgccagctgtggagttgaaaagcaacctgctggtgtgctggtggaaactcatccatatcggagccagtcatttccactttttttttttttaatgaaaaaagtcctcataattcat

SEQ ID NO: 88991 - DNA, 120 bp, synthetic construct
  source 1..120: mol_type = other DNA
tctccagtcttctctgtgtctggataaataacattttccacaacaggtttattttctcatacttcaaggcaaagctccttgtaatagagaagcaagcccagagaggtcataggcgagact

SEQ ID NO: 88992 - DNA, 120 bp, synthetic construct
  source 1..120: mol_type = other DNA
cgagggacgtttcctcagaaggggtggagggaagggaacctgggcccaggtggaaggaggacaccaggtggagcccatgagagaagtgaagacgattcttatagggggtctaatagaatg

SEQ ID NO: 88993 - DNA, 120 bp, synthetic construct
  source 1..120: mol_type = other DNA
agcaggagatgtgtataggttggtggccagaaagcttagtgaagagcaggagatagtccccagtgaggttcagtcaaccgtgtgctgggaagtcgagaatcgctgtgatagggaaaggaa

SEQ ID NO: 88994 - DNA, 120 bp, synthetic construct
  source 1..120: mol_type = other DNA
gaaaagactggtgacagtatatgcaaaacagagcctctgacccatgataggtgcttaacaaatggtggctgttgttactactaccattattattaccaccatacatgaaagcacctggct

SEQ ID NO: 88995 - DNA, 120 bp, synthetic construct
  source 1..120: mol_type = other DNA
cataaacacacacacacacacacacacacacacacacacaccccacacagtcctgagaatgtcacacacatgcatacacacacacacacacacacacacacacacacacacacacacaca

SEQ ID NO: 88996 - DNA, 120 bp, synthetic construct
  source 1..120: mol_type = other DNA
tttcagttttccaaccggattgcaagttccccaaggccctggattatgttttgttaaaagcaaaactaacaaacgacaaaccaaagcctctttcataattatgccttggtcccctgcgtg

SEQ ID NO: 88997 - DNA, 120 bp, synthetic construct
  source 1..120: mol_type = other DNA
ccctgcttcccttccccaataagattaaaaaatgtagagcttgagggtagattagagttgaccttagaataggagtcaggtgacctggattttaatctcaactcgtcttattggactgct

SEQ ID NO: 88998 - DNA, 120 bp, synthetic construct
  source 1..120: mol_type = other DNA
gtgtgacaatttaaaatgtcttcagacatttccagatgtcacctgggaagtaaaattgccccaagtgagaaccactgagctaaccagaggaaaagctagaactggaaatgaagtcttctg

SEQ ID NO: 88999 - DNA, 120 bp, synthetic construct
  source 1..120: mol_type = other DNA
ttgctgtcatggcaaccaggggattaggaccagtttggaagcccaaagatatgggagagggcttagtaagaaggcaggtggaaggaggaaatgagagaatgaggtgatgataaaaaaaca

SEQ ID NO: 89000 - DNA, 120 bp, synthetic construct
  source 1..120: mol_type = other DNA
ttattgccaaagtactcttttgttttttaaatgagtttcataaagtcaccttactcctaccccagacatcacaacagctggctggcccctcaccccatctccttagggaaataatctttt

SEQ ID NO: 89001 - DNA, 120 bp, synthetic construct
  source 1..120: mol_type = other DNA
gaaacaagtaaactaattgagttaagatctataaaacatagagcatagtgcctgacaaatattaagaaagcaggctgggtgcggcggctcaagcctgtaatcccagcactttgggaggct

SEQ ID NO: 89002 - DNA, 120 bp, synthetic construct
  source 1..120: mol_type = other DNA
agccttgcttgcacaacctgccctagctcaggtgaagttggccctgcattctttgtctcttatttgctcatttccaacaaacctttcatttggtccaagggtaaaaagaaaaagaaaaaa

SEQ ID NO: 89003 - DNA, 120 bp, synthetic construct
  source 1..120: mol_type = other DNA
attccagttaaaaatcttaaaaatcttcatcagggtcaaaaacctgacagaaaagctttgtttgaagggaatgtgaagggggaggaggagggaactggcaaccggcaactctcaacctca

SEQ ID NO: 89004 - DNA, 120 bp, synthetic construct
  source 1..120: mol_type = other DNA
ctgaacaaaacataattaggaggagaaatttgcttctgctgttgcagttgctgcagcaaagaagttacataaggttcattcggatgacttgggaacaccttccctacttccctattcctg

SEQ ID NO: 89005 - DNA, 120 bp, synthetic construct
  source 1..120: mol_type = other DNA
gtcaaaaatagactgctgtggcccgggataagcatttttcccagggtgaatttttttagttcttcagaatagccagtggaaaggaagttgctttaggagcaagaactgtcttgctgaaat

SEQ ID NO: 89006 - DNA, 120 bp, synthetic construct
  source 1..120: mol_type = other DNA
caaagccaaaaagaaataacttttgtattatccactccactgctcttcctcagtggtgtggataactgagacataaacgttttcatcataattgatgatgggaccaccttacagggccgc

SEQ ID NO: 89007 - DNA, 120 bp, synthetic construct
  source 1..120: mol_type = other DNA
gatatatgtaagcaactgcagagaaatgccatgtaacctgaggtgttaagtactgaagggacaggaaataatactgggtgtggttatggatagtgctagtttggccaggcttccttaaag

SEQ ID NO: 89008 - DNA, 120 bp, synthetic construct
  source 1..120: mol_type = other DNA
gcctccagaacagattgcataataacttaatcggaagggcgggagagagggtccaagtgttcaggcaagtaccactctgccagctcctctccacatctgcatctgtgggccttctgctaa

SEQ ID NO: 89009 - DNA, 120 bp, synthetic construct
  source 1..120: mol_type = other DNA
gatggagtcaatccaggacggcttcctgaaagaagtacaatttcaggaactgtttggaaagtggaaagaaaacgttaagttattgtgctgcgaaaggtgtcctgttgtcaaatatcttgg

SEQ ID NO: 89010 - DNA, 120 bp, synthetic construct
  source 1..120: mol_type = other DNA
attgttaacaggtagtgtaggaagtggtagacccagaggatgagggtgggaaggcccttggatccaactgtagaatgccatacctgaaaacataacggtttatagaggagaacttgaaac

SEQ ID NO: 89011 - DNA, 120 bp, synthetic construct
  source 1..120: mol_type = other DNA
gaaacaaaggagagagatgggggtgggggacggccaaaaaatggtctagagaggaaggaagaaggaaaagtccagaaggaaaaacagccagagaaagaagagagagaggagagaagataa

SEQ ID NO: 89012 - DNA, 120 bp, synthetic construct
  source 1..120: mol_type = other DNA
ggaaacaacatggttttgaagggagacatacttggttatcatcccagctatatcacttactaggtcttgggcaaatgtccaagcatcagttgctttattagctaaccaagtgccagatac

SEQ ID NO: 89013 - DNA, 120 bp, synthetic construct
  source 1..120: mol_type = other DNA
caggaacctccctgtgttcagctacctggaagatctcggaatcctgtccttttggggtttatgaaggcttcattacataggcatgattaatgaaaccattggtcactggtgatcaactta

SEQ ID NO: 89014 - DNA, 120 bp, synthetic construct
  source 1..120: mol_type = other DNA
gagtgtgtagctgtgtgatgtgtcccatccagaatggctagagaagggttaatgcaacttaaatgaaatttagggagaatttgggttgcttctttcctctttagttgttcccaaagctgg

SEQ ID NO: 89015 - DNA, 120 bp, synthetic construct
  source 1..120: mol_type = other DNA
tgctgtaacaaaaacctgtgtgtgtgtgtgtgtgtgtgtgtgtgtgcacgtgcgcgcgcatgcacacatgcatgcatgtgcatatatgcacgtatgtataatgcacataaaatatgtata

SEQ ID NO: 89016 - DNA, 120 bp, synthetic construct
  source 1..120: mol_type = other DNA
tagaagatgtggtcagagatggaccccaggctgctgaattttgtgactttgggaccataaactcttttgagaatcttatggaagttatggatcctttctttctcaccctcacatacacat

SEQ ID NO: 89017 - DNA, 120 bp, synthetic construct
  source 1..120: mol_type = other DNA
tgttaattagacatcatcggaacagggatattacacaaatgaattaaactcaaaccaatcaacaagctggctctgtgcttcaggtcccccgaacgaaaagggaattgaaggctgtaatgg

SEQ ID NO: 89018 - DNA, 120 bp, synthetic construct
  source 1..120: mol_type = other DNA
tgcaaatgagaacaagataggacaaaattaagtattaagaatttaatgtatgatgggaactggggactggtgtccatgggggaaactagatcagggttgagaagtcaggggcagggattc

SEQ ID NO: 89019 - DNA, 120 bp, synthetic construct
  source 1..120: mol_type = other DNA
ggatcctcactttcttctttttgagacggagtttcgctgttgtcacccaggctggagtgcaatggcgcgatcttgctgcaacctctgcctcccaggttcaagcgattctcctgcctcagc

SEQ ID NO: 89020 - DNA, 120 bp, synthetic construct
  source 1..120: mol_type = other DNA
atggcgtgaatccaggaggcggagcttgcagtgagccgagatagcgccaatgcagtcaggcctgggagaaagagctagactccgtctcaaaaaaaaaaaaaaaaagaaaaaaagaaaatg

SEQ ID NO: 89021 - DNA, 120 bp, synthetic construct
  source 1..120: mol_type = other DNA
cctggctaggtagctattcaggctccctctctgcctcttttaagagatcaattacttaccatccgtcagtttcttttatcttttggaaggaaacctgtttagaacagcccccttgggact

SEQ ID NO: 89022 - DNA, 120 bp, synthetic construct
  source 1..120: mol_type = other DNA
gtagtttgtttgtgttttgatatagaagggaccttgggccttgacattacaatgcaagtagactacggtgcaaatggcgccccctggagcacagaattagaatacagaatttccatttat

SEQ ID NO: 89023 - DNA, 120 bp, synthetic construct
  source 1..120: mol_type = other DNA
tcccgtgtctcctttggttctcctatgttaaagaaatcccagaggctgctgtgggcccatgggtgtcatgcagcagcgagtccagatttggagtcctggacacctgggttctagtcccac

SEQ ID NO: 89024 - DNA, 120 bp, synthetic construct
  source 1..120: mol_type = other DNA
ctgatggacttcctgcgactcataactatttcctcaccaggaaacacccccaggcccagtgtcagctagactcggggcaggaccagcctgccagcggctcaatggctctagctaagttag

SEQ ID NO: 89025 - DNA, 120 bp, synthetic construct
  source 1..120: mol_type = other DNA
ttcagaatccagaagagtggtacgtagtaggtcttcaataaacattgattggctccagagggctaaacgaggatgaatggatgtgaacgatacagaaaggcagagttccacagactataa

SEQ ID NO: 89026 - DNA, 120 bp, synthetic construct
  source 1..120: mol_type = other DNA
cagttctttccttttcctccccactccttcatgtctcctatcaggcctgtgatgtaaatacagtctggtcatgtattgattgtctatttctaggtcttctttccaaatggcctagatgtt

SEQ ID NO: 89027 - DNA, 120 bp, synthetic construct
  source 1..120: mol_type = other DNA
tactcactttgcctaggcaagttaggagggcttcacagtggaggtggtttttgagcttgattttataacacagagcagttttcaggtgaaaatggaggggaaaaacatttcagaaaatgg

SEQ ID NO: 89028 - DNA, 120 bp, synthetic construct
  source 1..120: mol_type = other DNA
agttggaattgacaatagatttgagataaggattaagggagaggaagggatccaggctcataacagtccctctgaaggtgctgaggcttgagtgtctaaggagaaaggaaaaccagcaga

SEQ ID NO: 89029 - DNA, 120 bp, synthetic construct
  source 1..120: mol_type = other DNA
aatctttaacatgagcccaaaagtatttgcttctttggttatgctattacctcattctctgttacctgagcctcagtttccacatgcgtaatatgggataccagtccctcccttgcagag

SEQ ID NO: 89030 - DNA, 120 bp, synthetic construct
  source 1..120: mol_type = other DNA
tttctgcctggctgctccctttcaggggataaaggcctctgtgtctgggaacactgatagttcaggggagtttgagggacagcttgggaagtctgacaggactccctaaataaacgcctt

SEQ ID NO: 89031 - DNA, 120 bp, synthetic construct
  source 1..120: mol_type = other DNA
aagtattaggcattttttgtttgtttgcttgtttgtttgtttgttttgagacagtcttgctctgtcacccaggctggagtgcagtggcacgaactcggcttactgcaacctttgtctccc

SEQ ID NO: 89032 - DNA, 120 bp, synthetic construct
  source 1..120: mol_type = other DNA
atgactctcaggactcaggaaagtgctatactattacagttttattacacaggatataaatctggatgaaccaaatgaagagacacacaggaccagctgtgagagggtcccaagcatgga

SEQ ID NO: 89033 - DNA, 120 bp, synthetic construct
  source 1..120: mol_type = other DNA
cagtaagaagtttgagcgatgccactgcagctggagggaaaggtctgagctgggatagaacatcaagttagagatgatgtttaaagctgtgcaactggttgaatttaacaagggagcgaa

SEQ ID NO: 89034 - DNA, 120 bp, synthetic construct
  source 1..120: mol_type = other DNA
atcattgttggctgaggatattccaccttctgataaccgagagcctatttggcctaaataaatgagacttaaaaaggcacttgaacctcagttatcaggtccattttctggatggctagg

SEQ ID NO: 89035 - DNA, 120 bp, synthetic construct
  source 1..120: mol_type = other DNA
acatcaaagttggaagagaccgtggagatgtcatccaaattgggacacagggaggtgaagtgaaacacctacgaaggaaaagggaacgcatacttttgcacacatacaaaaatagcataa

SEQ ID NO: 89036 - DNA, 120 bp, synthetic construct
  source 1..120: mol_type = other DNA
tatcattagatttgtgtttcagaaagatcattctggcaactttgttgggaatggacttaagagaagcaggctggtgacaggggaagcaattaggaagttattgcagtagtccaggggagt

SEQ ID NO: 89037 - DNA, 120 bp, synthetic construct
  source 1..120: mol_type = other DNA
attcactataaacatccctcgaacattaaacattggaaatttccttgaccccttgcagaactgtgggatgggggaattagaatgtgcccattaaagccagaagccacttgtttaagggac

SEQ ID NO: 89038 - DNA, 120 bp, synthetic construct
  source 1..120: mol_type = other DNA
accagcatgtagccgcatcaacatcaacactagagtaactcactatatttaacttcttgtttcctcctttttgtagagacatagtgaatggatacctgctctcttctcccttccactctc

SEQ ID NO: 89039 - DNA, 120 bp, synthetic construct
  source 1..120: mol_type = other DNA
taccttgtattagtccattttgtgttgctataaaggaatactggaggctggataatttataaagaaaagagatttatacagggcgcggtggctcacgcctgtaatcccagcactttggga

SEQ ID NO: 89040 - DNA, 120 bp, synthetic construct
  source 1..120: mol_type = other DNA
tctttgtgcccagaatccctttactcccacatttcctggtttgaggcttaattttgccctttacagagacccttttcagattcaccctctcctcttttcccattgttggaattgatcatt

SEQ ID NO: 89041 - DNA, 120 bp, synthetic construct
  source 1..120: mol_type = other DNA
ggtgagggcaggaccaaaggggaggctgcttaaccatgatgggatctctttcatagaagttatataaacaaaatttcttgccaacaagttgcctgtggatatttatggaaccatcatcat

SEQ ID NO: 89042 - DNA, 120 bp, synthetic construct
  source 1..120: mol_type = other DNA
gagcctgactttcgctgtcatgattaacagctgtttgcatcttgccagctccactttctttggtccctctggccccctccactcccttctggtagaaacacgggttaagtcctttacttt

SEQ ID NO: 89043 - DNA, 120 bp, synthetic construct
  source 1..120: mol_type = other DNA
tcctttcagcccaaatgggcaaaaccagtctctgtttgtcaacaccattccctttcacctctgggcttgcctggaggccactcgccctcttccagggcgctctttccccatcctgctttg

SEQ ID NO: 89044 - DNA, 120 bp, synthetic construct
  source 1..120: mol_type = other DNA
agcattccttccttcgttcattcatcaaaccctaatgaagtgcctgttgtgtgccaggacctgaggtgcagagatgttactgcctttgggggctctcaggagtagatgggatagaggtgt

SEQ ID NO: 89045 - DNA, 120 bp, synthetic construct
  source 1..120: mol_type = other DNA
gtgtctttggacctcagtgtccttatctggaaaacgaggccattgaaaaggtagtacctaggggctttctctaaccttctttgatgacactgctacttcaaacaaatccttggtgaatta

SEQ ID NO: 89046 - DNA, 120 bp, synthetic construct
  source 1..120: mol_type = other DNA
gagagtgacaggccaactccatcatcccattcctgagctgggggtccaaacccagctcatccatcacccatcctgataatcagatttggctgcggcaagaacagaacataatactgagct

SEQ ID NO: 89047 - DNA, 120 bp, synthetic construct
  source 1..120: mol_type = other DNA
ttcttatttattcaataagcacctattgatcacttatgctgtacctggctctgaggggacttgagatgctgtgcctcttcaagagctcatgttctagttaggatttggggttagagtgat

SEQ ID NO: 89048 - DNA, 120 bp, synthetic construct
  source 1..120: mol_type = other DNA
gattttgtaggaagagtcatttccatgcaatacaaggtattgaggaatgctggagtcggggcttgaagcagggaagtgtccttccgctctcatcttattccagggtgaaacagcatgact

SEQ ID NO: 89049 - DNA, 120 bp, synthetic construct
  source 1..120: mol_type = other DNA
atcagcagaatttggggtgagtagaaaagctgagacaggctcatgtgggaggctgatgagggcacagttcagggtggctggtttttgtaggatgggaaaggaaactgaatatctccttta

SEQ ID NO: 89050 - DNA, 120 bp, synthetic construct
  source 1..120: mol_type = other DNA
attctaggagcgcctttgcaggaaatatttttaatggagattaattggaaaactctagcatgtcctgcttatgtgcagaaagtgcctcgttctcccttttggtggctgtataccaacact

SEQ ID NO: 89051 - DNA, 120 bp, synthetic construct
  source 1..120: mol_type = other DNA
tttcatctcatcagcatgggctaccactgcatgacactggtagtctttcagcacttatttgttaactaatttgtctcccttgatagaatgtgatgagcaggcaacttcccattttccagc

SEQ ID NO: 89052 - DNA, 120 bp, synthetic construct
  source 1..120: mol_type = other DNA
agtccaaagtaagaagaaaatttatggtgtgtaaatagaattctaaagcatcagagttgaaaggaatcctaaatattacctagagccctccggagcattgctgccaggtggccatccagc

SEQ ID NO: 89053 - DNA, 120 bp, synthetic construct
  source 1..120: mol_type = other DNA
cattctggctcttctcagattgtgcttagaagctctgttggtaacagtggtaactaagaatgctgaagtaagcagtgggaggttttcagagcagaacttgcacttgccttaattatggag

SEQ ID NO: 89054 - DNA, 120 bp, synthetic construct
  source 1..120: mol_type = other DNA
tcattctaattcagttctcttctcttccccttgcttgtctctctgtcctgtcctctgtttctttcataccatagtgtcctcttagcacctttcttcctcacctgaccttaaaacaatctt

SEQ ID NO: 89055 - DNA, 120 bp, synthetic construct
  source 1..120: mol_type = other DNA
tccttaagtgtcctcaaggtttgaccgaggccccaggtcagcaggaggcagggttgcagtctgaggacattagagatgggaaggcccttgggggccaagtgaatcttctcctccctttta

SEQ ID NO: 89056 - DNA, 120 bp, synthetic construct
  source 1..120: mol_type = other DNA
tctttttcactgcaaactgtgaaatgaagccagagagctttggtcggcagagacaggaggtgataatagtccttaaatgtttagaaacttgtctttggggaatgccgtttgtcatttctc

SEQ ID NO: 89057 - DNA, 120 bp, synthetic construct
  source 1..120: mol_type = other DNA
gttatggtacatgtgtccctataagaagtgtatgacgtacttgtgtgtgtgtgtgtgtgtgtgtgtgtgtgtgtgtgtgtgtgaatctaagcatttccagcccctctaggatagatttag

SEQ ID NO: 89058 - DNA, 120 bp, synthetic construct
  source 1..120: mol_type = other DNA
agctgtaccttaagcaccctcagccttatttcccttttctataaaacagagataataatagtggattattatgcagaaacagtgtctacaaggcatctgcctcggtgcctggcacatagt

SEQ ID NO: 89059 - DNA, 120 bp, synthetic construct
  source 1..120: mol_type = other DNA
ctcagtttttctctgcctgtcttcacaatgactgcttaagagctcaccacagctgtgatggtgtctgaaggcagggagggagcaagatcaaagcagatgggaatacacttaaaacatacg

SEQ ID NO: 89060 - DNA, 120 bp, synthetic construct
  source 1..120: mol_type = other DNA
atgctctgcctccttttctggatggtggtttcacaggcaggactgtggactcggatttgctcactctcactccctcagtcaacagacatatttggaacacccgtagtgtgccaggcagca

SEQ ID NO: 89061 - DNA, 120 bp, synthetic construct
  source 1..120: mol_type = other DNA
ccctctaattgtctaactgttcaggagaaataatgatcatagctgccatttagtgcatacaggcaagggactgtaccacgcatagcatacacctcatctcattttactttgacagcaatc

SEQ ID NO: 89062 - DNA, 120 bp, synthetic construct
  source 1..120: mol_type = other DNA
taaatttgaataataatgaggacaatgcttgaattaataatgttggctgctcacctgacccacccctcccccaggatctcagcacctgccaccctgatcactcaaaagggattatccttt

SEQ ID NO: 89063 - DNA, 120 bp, synthetic construct
  source 1..120: mol_type = other DNA
ttaggaaaaggtcagatttggggattgtggcctctgcagattcatgagctgtggagggaaagaagaaggaggaggccgtgacttttggggagagccgatttcagttacctggtatgacag

SEQ ID NO: 89064 - DNA, 120 bp, synthetic construct
  source 1..120: mol_type = other DNA
gtaacagtgcactattttctgtgattgctgagcacttcagctcctgaaatccattcccatgggtctcagagggaggaaggaataaagggtaaggacgtggcatcttgaaacaaaggggtt

SEQ ID NO: 89065 - DNA, 120 bp, synthetic construct
  source 1..120: mol_type = other DNA
tctctggaccttcatttactgtgtgaagcaggcatagtggttgcaggccggtctgccttagaagtgcatttgtgagttttgagccaaatgggagaagagatttgtaaaaacatattttag

SEQ ID NO: 89066 - DNA, 120 bp, synthetic construct
  source 1..120: mol_type = other DNA
ctttgctccctgctgtgtgcctttttctctcctctttctcccctattattatgagaggcatttgtctgcaaacagccttggagatttcatctgctcctgctagcctccctgcttcagctg

SEQ ID NO: 89067 - DNA, 120 bp, synthetic construct
  source 1..120: mol_type = other DNA
tagcctcacacaacccttcttccctcagctgcctcctttcctccctcagtgctcacccttcctctcaaattcacctgggggcctcctccaggaacaggggaataggactggaaggaatgg

SEQ ID NO: 89068 - DNA, 120 bp, synthetic construct
  source 1..120: mol_type = other DNA
gttgttttgttttttgtttttgcaaggagggaggtgagaacataacaagtcctcagagcatagtggaaagagagagtcctagactgctggtggttaggagacctgggcactttggccatt

SEQ ID NO: 89069 - DNA, 120 bp, synthetic construct
  source 1..120: mol_type = other DNA
aacctggaaaaggagaatatcaaggggaaccctagatggaagagtgccttgtttaaaagcttgcaggccaatgaaggagagctacatagcaggagagccgactggcttgtttcgagggca

SEQ ID NO: 89070 - DNA, 120 bp, synthetic construct
  source 1..120: mol_type = other DNA
taatgaaatatactttgtggtagggattaaatgaagtcatatacaggaggcactttggctgacacaaggtgaacgttcactgagtggcagaagttattgtcgatcccaccaccatttaca

SEQ ID NO: 89071 - DNA, 120 bp, synthetic construct
  source 1..120: mol_type = other DNA
ctctagtgagtatggttatgtcttggtttcttctctgatgaagaaactgagactcagtgattttaggaactcatccgagatcacacagcaggtaaacaaaggtgccaggatttgaaacca

SEQ ID NO: 89072 - DNA, 120 bp, synthetic construct
  source 1..120: mol_type = other DNA
ttggtcacattctaggcactggtgaccatataaatattagtgagacagggttgctgtttttccaggggatcacagttttggttggggcagggttcgataactgttataagtaaacaaaat

SEQ ID NO: 89073 - DNA, 120 bp, synthetic construct
  source 1..120: mol_type = other DNA
aaacaaacaaacaaacaaacaataaaccagtaggggcatggagtaccagaaaatattataggccaggaaagaaaagcagacaaggactgggaaagatgtgtgagctgaggacctagagga

SEQ ID NO: 89074 - DNA, 120 bp, synthetic construct
  source 1..120: mol_type = other DNA
gcagagatccttgtatacattttatagatgaggaagccatgaaagatatcaagtgacttgcccaggattacatagcaaagcggacagtacagctggaattcaaagccagatttcctggtt

SEQ ID NO: 89075 - DNA, 120 bp, synthetic construct
  source 1..120: mol_type = other DNA
aggtgttaaggtgttagtaatgggggaaagtgtaaggtcggggaggagggtatatggaaactccctgtactttctgctcaatttttctgtaaacttaaaactgctccaaaagatagtctg

SEQ ID NO: 89076 - DNA, 120 bp, synthetic construct
  source 1..120: mol_type = other DNA
cagcctgaaccaaggctcttcatagtcttttatttaatttagtcttaagtttcactgcagatgtattcatatgtgtgactatgggatgtggcccagatgctgctggggatcttacacagt

SEQ ID NO: 89077 - DNA, 120 bp, synthetic construct
  source 1..120: mol_type = other DNA
cgagagtcgctatgagacaaatgtggattattcctttttcacggagcctgtgtcttgtgaggttcacaacaaagtgggaagcaccaatgtcagcactttagtaaatgtccactgtgagta

SEQ ID NO: 89078 - DNA, 120 bp, synthetic construct
  source 1..120: mol_type = other DNA
cattatctttgaacctgggctatttctagggtcttgggatttggaggagaaagtgcttacggttatccccacatcttctcacaggaaagcccagttcagaagcactggggggacaaactc

SEQ ID NO: 89079 - DNA, 120 bp, synthetic construct
  source 1..120: mol_type = other DNA
tgctggttttgctccttcaacttccctgtcccgtttccatcctcgaatcttctgctttctgtccctctgtccctttacctgctcaaatcccacctcctcccttacttgttatgtgtccct

SEQ ID NO: 89080 - DNA, 120 bp, synthetic construct
  source 1..120: mol_type = other DNA
atgcttagttagaatcacagactatcagagctggaagaaatcttgagcattgtctagccctagcctggttctgtcattgtatagatgaagaaaataaggcctagaaagggacagggaggc

SEQ ID NO: 89081 - DNA, 120 bp, synthetic construct
  source 1..120: mol_type = other DNA
attgtaagagtctgtgcatcagagggaaagaactctctggggccttccctccagaacctggcctccatgctcaactggggaaatgccctcacttcgttaaagtgtactgagcatttgcta

SEQ ID NO: 89082 - DNA, 120 bp, synthetic construct
  source 1..120: mol_type = other DNA
ctgagctcttcctcagctctgggaagcagaggaaaccaaggaaaactgttggagccctgagtagataggtgaacattcggcagtcacagtggtattatggatggcacagtggtgaaagat

SEQ ID NO: 89083 - DNA, 120 bp, synthetic construct
  source 1..120: mol_type = other DNA
cagcaggaagcacttgttccaggctgcctctcccgtcccaggtcgcaaagacgtgaccctgaggaagctggatatcaaggtggagacagtgaaccgagagccacttacgatgcattctga

SEQ ID NO: 89084 - DNA, 120 bp, synthetic construct
  source 1..120: mol_type = other DNA
ggtttttgaaggagcagaggaggtggaatgctagatggggacatagggagagctggaggaagaggcccagaaagccatggtgagacttgatccccacccaagagggaacactgcctccat

SEQ ID NO: 89085 - DNA, 120 bp, synthetic construct
  source 1..120: mol_type = other DNA
tgcattcgtgccctgggtgcctctctccttcctcagggtactgcagaagggagcgaacagggtactgttcgctcttgtctacagaacagccctggcactgcattcaaatccagtcttcat

SEQ ID NO: 89086 - DNA, 120 bp, synthetic construct
  source 1..120: mol_type = other DNA
tcagattccttcttccactttcagtgccttgagtgtcaagctttggatgaccgaccctatgtgggcggttgtgtggggagtgggtacttgtgagcctcggacacactgttaagtgttaca

SEQ ID NO: 89087 - DNA, 120 bp, synthetic construct
  source 1..120: mol_type = other DNA
ttagcttaagtattagtttcattctactgaaatgatggagagagggcctaaggttactaggtaattgagctgatggtgcagggagaattgttgagaaaggaagcctagtttccagaagcc

SEQ ID NO: 89088 - DNA, 120 bp, synthetic construct
  source 1..120: mol_type = other DNA
cttttgccagggcaggacatagtatgcacatagggatattgttatgtgcctaggtttcaggcactccttctgtaggggaaaatgggaggagccttcctccaccctgatccttaggaacat

SEQ ID NO: 89089 - DNA, 120 bp, synthetic construct
  source 1..120: mol_type = other DNA
ctcctgaccctggcgaggccataatgaacactgaagtgcacaggccaagggatgtaattgaaaggcatttatttttgtgaagatgctgtaaaattagcatttaaatatcccattcccttc

SEQ ID NO: 89090 - DNA, 120 bp, synthetic construct
  source 1..120: mol_type = other DNA
tggatccatgatgataattaagagaagagaaaaaaagatattatttttgttaggacaaaccattgtaggtttttagcaatgtgtatctgtgtgtccctcacaccttttcctattctactt

SEQ ID NO: 89091 - DNA, 120 bp, synthetic construct; identical to SEQ ID NO: 64632
  source 1..120: mol_type = other DNA

SEQ ID NO: 89092 - DNA, 120 bp, synthetic construct; identical to SEQ ID NO: 2220
  source 1..120: mol_type = other DNA

SEQ ID NO: 89093 - DNA, 120 bp, synthetic construct; identical to SEQ ID NO: 64630
  source 1..120: mol_type = other DNA

SEQ ID NO: 89094 - DNA, 120 bp, synthetic construct; identical to SEQ ID NO: 64629
  source 1..120: mol_type = other DNA

SEQ ID NO: 89095 - DNA, 120 bp, synthetic construct; identical to SEQ ID NO: 64628
  source 1..120: mol_type = other DNA

SEQ ID NO: 89096 - DNA, 120 bp, synthetic construct; identical to SEQ ID NO: 1563
  source 1..120: mol_type = other DNA

SEQ ID NO: 89097 - DNA, 120 bp, synthetic construct
  source 1..120: mol_type = other DNA
acataggactaaatgttccatacaagcttcaatttcctaaatgtagttcctccctggccttcctatgggattaggggacccagtggacttgtgtgtctgagcaggcatttgtccagcctc

SEQ ID NO: 89098 - DNA, 120 bp, synthetic construct; identical to SEQ ID NO: 1564
  source 1..120: mol_type = other DNA

SEQ ID NO: 89099 - DNA, 120 bp, synthetic construct
  source 1..120: mol_type = other DNA
ttgaacgcctgacctcaggtgatccacctgccttggcctcccaaagtgctgggattacagacgggagccaacatgcccagccttcctgcccctcccgtcccctcccctctcctcctgtcc

SEQ ID NO: 89100 - DNA, 120 bp, synthetic construct
  source 1..120: mol_type = other DNA
acccagaatcccctcccagaccacagttaaaggggatttatttatttatataaatttttgtgacagggtcttgctctgtcaccactctgaacacctcatgttctctgattacaggcatga

SEQ ID NO: 89101 - DNA, 120 bp, synthetic construct
  source 1..120: mol_type = other DNA
aaatggcctccttgtgtcccccgtccactcttgtctgtcctcaatccagtcgccaaagggatcctcttaaaactcaggttgaccaggtgcaggggctcaaacctgtaatcctagcaattt

SEQ ID NO: 89102 - DNA, 120 bp, synthetic construct
  source 1..120: mol_type = other DNA
ctctgagccttggtttcctcatctgcaaaacacagaaagtcccacccctccttccctctcccacctggcagggtgaaaagttcactcactggttgtccgtggggagcttgaggtcatcag

SEQ ID NO: 89103 - DNA, 120 bp, synthetic construct; identical to SEQ ID NO: 1565
  source 1..120: mol_type = other DNA

SEQ ID NO: 89104 - DNA, 120 bp, synthetic construct
  source 1..120: mol_type = other DNA
ttgcccaggctagagtgaagtggtgtgatcatagctcactacagcctcgacctcctgggctgaagcgatcctcccacctcagcctcccaagtagctgggattacaggtgtgtgccaccat

SEQ ID NO: 89105 - DNA, 120 bp, synthetic construct
  source 1..120: mol_type = other DNA
cagctattcgggaggctgaggcagggagattgcttgagcctaggagtccagggctgtagtgagctgtgatcacgtcactgtactctagcctgggcaacagagcaagactctgtctccaaa

SEQ ID NO: 89106 - DNA, 120 bp, synthetic construct
  source 1..120: mol_type = other DNA
gagatcttagccctgacttttctgccaagccagcaaccagcccagactccaaagcagtcactcaatatccctgagccctgcctgcccctttctcccacacccctacagcctcggagggca

SEQ ID NO: 89107 - DNA, 120 bp, synthetic construct
  source 1..120: mol_type = other DNA
caaggtggttcccacctgtaatcctagcactttgggaggccaaggcgggcggatcacctgaggtcaggagttcgagaccagcctggccaacatggcgaaaccccatctctactaaaaata

SEQ ID NO: 89108 - DNA, 120 bp, synthetic construct
  source 1..120: mol_type = other DNA
ggtgaactgttgtataaataattacattcctagctaggcgcaatggctcaggcctgtaatcccagcactttgggagcccaggacaggacgatcatgtgaggtcaggagttcgagaccacc

SEQ ID NO: 89109 - DNA, 120 bp, synthetic construct; identical to SEQ ID NO: 1566
  source 1..120: mol_type = other DNA

SEQ ID NO: 89110 - DNA, 120 bp, synthetic construct; identical to SEQ ID NO: 1567
  source 1..120: mol_type = other DNA

SEQ ID NO: 89111 - DNA, 120 bp, synthetic construct; identical to SEQ ID NO: 64612
  source 1..120: mol_type = other DNA

SEQ ID NO: 89112 - DNA, 120 bp, synthetic construct
  source 1..120: mol_type = other DNA
agcctggacaacatggtgaaaccccatctgtaccaaaaatataaaaattagctgggcgtggtggcatgcatccacaatcccagctactggggaggctgaggcatgagaatcgcttgaacc

SEQ ID NO: 89113 - DNA, 120 bp, synthetic construct
  source 1..120: mol_type = other DNA
cgagtgctctgggaggccaaggtggaaggattgcttggggcagggagttcaagaccagcctgggccacacggtgagacccatctagacaaacatttttaaaaattagacaggtgtggtgg

SEQ ID NO: 89114 - DNA, 120 bp, synthetic construct
  source 1..120: mol_type = other DNA
aggcaggagaatcacttgaacccgggaggcagaggttgcagtgagctgaggtcgctccattgtactccacctgggtgacaagagcgaaactccatcaaaaaaaaaaagaagaaaagaaaa

SEQ ID NO: 89115 - DNA, 120 bp, synthetic construct; identical to SEQ ID NO: 1568
  source 1..120: mol_type = other DNA

SEQ ID NO: 89116 - DNA, 120 bp, synthetic construct
  source 1..120: mol_type = other DNA
tattagtcactggaattagtgacacaaaattgtgaatactttccagattgggggaattcacgcgaccagcgtggaggaaggctgtggatctccacctaatgacccactcaggaagcaatg

SEQ ID NO: 89117 - DNA, 120 bp, synthetic construct
  source 1..120: mol_type = other DNA
tcctgcctcagcctcctgagtagctgggattacaggcacgtgccaccatacccggcaaatttttgtgtttttagtagagacagggtttcaccatgttacccaggctggtctcgaactcct

SEQ ID NO: 89118 - DNA, 120 bp, synthetic construct
  source 1..120: mol_type = other DNA
ttcaaagtggaaaaaaaactgaaaaaaaaaaaagtttaagaactcattttgtcagctgggcacagtggttcatgcctgtaatcccagcactttgtgaggtcgaggcaggtggatcacctg

SEQ ID NO: 89119 - DNA, 120 bp, synthetic construct; identical to SEQ ID NO: 29456
  source 1..120: mol_type = other DNA

SEQ ID NO: 89120 - DNA, 120 bp, synthetic construct; identical to SEQ ID NO: 1569
  source 1..120: mol_type = other DNA

SEQ ID NO: 89121 - DNA, 120 bp, synthetic construct
  source 1..120: mol_type = other DNA
tgaggttcagcatgtagctgtgcttgttatgtccagtttaaacaggaattatttgataatatgtttgcattttctttttagagacagggtcttgttctgtcacccaggctggagtgtagt

SEQ ID NO: 89122 - DNA, 120 bp, synthetic construct
  source 1..120: mol_type = other DNA
gcattttaataggatactttggttttcttttcttttctttttttttttttttgagacagagtcttgctctgtcaccaaactggagtgcagtggcacgatctcggctcactgcaacccccg

SEQ ID NO: 89123 - DNA, 120 bp, synthetic construct
  source 1..120: mol_type = other DNA
tgcaacctccgcctcccgggttcaagcgattctctgcctcagccttccgattagctgggattacaggtgcgtgccgccacatccagctactttttgtattttttagtagagacagggttt

SEQ ID NO: 89124 - DNA, 120 bp, synthetic construct; identical to SEQ ID NO: 1570
  source 1..120: mol_type = other DNA

SEQ ID NO: 89125 - DNA, 120 bp, synthetic construct
  source 1..120: mol_type = other DNA
atgaggcaagcctggccaacatggtgaaaccccgttgctactgaaaatacaaacattagtcgggtgtggtggcgtgcgcctctaataccagctactcaggaggctgaggcgtgagaatca

SEQ ID NO: 89126 - DNA, 120 bp, synthetic construct; identical to SEQ ID NO: 1571
  source 1..120: mol_type = other DNA

SEQ ID NO: 89127 - DNA, 120 bp, synthetic construct; identical to SEQ ID NO: 1572
  source 1..120: mol_type = other DNA

SEQ ID NO: 89128 - DNA, 120 bp, synthetic construct
  source 1..120: mol_type = other DNA
ttgagcccaggagtttgagaccagcctgcacagcacagtgagactctgtctctaaaaaacaaaaagaaaagaaaaacagaccgggtgcggtggctcacacctgtaatcccagcactttgg

SEQ ID NO: 89129 - DNA, 120 bp, synthetic construct
  source 1..120: mol_type = other DNA
ggtaaattctaaacttcaacttctgttttaaggaaacacaaattcatccagtgttacaaattctgcagcaggtgttgaagatcttaacatcgttcaagtgactgttccaggtatggacta

SEQ ID NO: 89130 - DNA, 120 bp, synthetic construct
  source 1..120: mol_type = other DNA
ggaggatcgcttgagcccaggattttgaggctgcagtgagctgtgattatgcccctgcattccagcatggtcaacagagcaagactccatctctaaaaataaaaattaaaaaaaaatttt

SEQ ID NO: 89131 - DNA, 120 bp, synthetic construct; identical to SEQ ID NO: 1573
  source 1..120: mol_type = other DNA

SEQ ID NO: 89132 - DNA, 120 bp, synthetic construct
  source 1..120: mol_type = other DNA
gtgatctgcccacctcagcctcccaaagtgctgagattacaggcataagccaccatgcctggcccttttttaaaattattaattttatcttggacatacacaaaccaccgtaggaattta

SEQ ID NO: 89133 - DNA, 120 bp, synthetic construct
  source 1..120: mol_type = other DNA
gagtgctgagattacaggcgtgagttaccgcgcgcagccagttttatttcaaggggtagaagtatttcaggtgtattcctgcgtgggtattgacttgtttgcattgtattcagtgatttc

SEQ ID NO: 89134 - DNA, 120 bp, synthetic construct; identical to SEQ ID NO: 1574
  source 1..120: mol_type = other DNA

SEQ ID NO: 89135 - DNA, 120 bp, synthetic construct
  source 1..120: mol_type = other DNA
aattctcctgcctcagcctcccatgtggctggctacaggcgtccgccaccactcccagctaatttttgtagttttagtagagacagggtttcaccatgttagccaggttggtctcaaact

SEQ ID NO: 89136 - DNA, 120 bp, synthetic construct
  source 1..120: mol_type = other DNA
taatttttgtattttttgtagacatgaggtttcaccatgttactcaggctggtctcgaactcctggactcaagcaatttgcctgccttggcctcccaaaatgttgggattacagctgtaa

SEQ ID NO: 89137 - DNA, 120 bp, synthetic construct
  source 1..120: mol_type = other DNA
agactagcctgaacaacagggtgaaaacccgtctctattaaaaatacaaaaaccagccaggtgtggtggtgggcacctgtaatcccagctactcggaaggctgaagcaggagaatcgctt

SEQ ID NO: 89138 - DNA, 120 bp, synthetic construct
  source 1..120: mol_type = other DNA
tgatcacttctcactctcacccccttcatcttcccaggttctttcttttttctttttttcttttctttttgagacagtcttgctctgtcacccaggctggagtgcagtggtgccatcttg

SEQ ID NO: 89139 - DNA, 120 bp, synthetic construct
  source 1..120: mol_type = other DNA
tcaggtgatctgcctgcctccgcttcccaaagtgctgggattacaggcgtgagccactagacccagccaggtctttgtttcttaacacagaatattgtttttcttttggattatgattat

SEQ ID NO: 89140 - DNA, 120 bp, synthetic construct
  source 1..120: mol_type = other DNA
tgaattagaaggctccctctctctctctctttttttttttttttttttgagacaacgtctctctctgtcacccaggccggagtgcagtggtaccattacagctcactgcagcctcaacct

SEQ ID NO: 89141 - DNA, 120 bp, synthetic construct
  source 1..120: mol_type = other DNA
ctcggcctcccaaattgctgggattacaggcgtgagctaccacgcttggccgatacttgattctaaaagcatcttggtacccaccagaatcttccatgggttcagttttcacattgatgg

SEQ ID NO: 89142 - DNA, 120 bp, synthetic construct; identical to SEQ ID NO: 1575
  source 1..120: mol_type = other DNA

SEQ ID NO: 89143 - DNA, 120 bp, synthetic construct; identical to SEQ ID NO: 1576
  source 1..120: mol_type = other DNA

SEQ ID NO: 89144 - DNA, 120 bp, synthetic construct
  source 1..120: mol_type = other DNA
ttcgtatttttagtacagactgggcttcaccgtgttagccaggatggtcgcgatctcctgacctttgtgatccacctgcctcagcctcccaaagtgctgggattacaggtgtgagccatc

SEQ ID NO: 89145 - DNA, 120 bp, synthetic construct
  source 1..120: mol_type = other DNA
aagcaattctcctgcctctgcctcctgagtagctggcattacagccgcctgccaccatgcccgactaatttttgtagttttagtagagacggagtttcactatgttggccaggctggtct

SEQ ID NO: 89146 - DNA, 120 bp, synthetic construct
  source 1..120: mol_type = other DNA
aggtcgaggcaggaggatcacctgaggtcaggagttcgagaccaacctggccaacatggcaaaaccccatctctactaaacatacaaaaattagctgggcaaggtggtgggcacctgtaa

SEQ ID NO: 89147 - DNA, 120 bp, synthetic construct; identical to SEQ ID NO: 1577
  source 1..120: mol_type = other DNA

SEQ ID NO: 89148 - DNA, 120 bp, synthetic construct
  source 1..120: mol_type = other DNA
acagctgcctgccaccacgcccggctaattttttgtattttttagtagagatggccagaatggtctcgatctcctgacctcgtgatccgcctgcctcggcctcccaaagtgctgggatta

SEQ ID NO: 89149 - DNA, 120 bp, synthetic construct
  source 1..120: mol_type = other DNA
tccagcaagcccactacttggcatctacccaaaggaaaataaatcattctatcaaaaagacacctgccttgaacgtttatcacagcactattcacaatagcaaagatgtgcaaatcaagc

SEQ ID NO: 89150 - DNA, 120 bp, synthetic construct
  source 1..120: mol_type = other DNA
atttaaatatgttgaaccatccttgtatttgaggaataaattccacttggggccaggcacgcctgtaatcccagcattttgggaggccaaggcgggcagatcacttgaggttgggagttc

SEQ ID NO: 89151 - DNA, 120 bp, synthetic construct
  source 1..120: mol_type = other DNA
tcaaggaagggaaaaatctgtatactaaaacaataaaacactgctgaaaaaaattaaagaagacaggctgggcgtggtggctcacgcctataatcctataatcccagcactttgggaggc

SEQ ID NO: 89152 - DNA, 120 bp, synthetic construct
  source 1..120: mol_type = other DNA
gattacaggcgtgagtcatcgtgcccagcttttttttttttttttttttttttgagacagggttttactatattacccagtctggtcataaattcctgggctcaagtgatcctcctgtct

SEQ ID NO: 89153 - DNA, 120 bp, synthetic construct; identical to SEQ ID NO: 1578
  source 1..120: mol_type = other DNA

SEQ ID NO: 89154 - DNA, 120 bp, synthetic construct
  source 1..120: mol_type = other DNA
ggaggttgcggtgagccaagatcgcaccactgcactccagcctgggtgacacagtgagactctgtctcaaaaaaataaagaaaaaaagaaaaaaggagtaattgtataatggctattaat

SEQ ID NO: 89155 - DNA, 120 bp, synthetic construct
  source 1..120: mol_type = other DNA
cttggcctcccaaagtgctgggattacaggtgtgagccactgcgcccggccaggaatatttatttagaatgagaaaaatcactgagaaaggaaatcaaaagaaatttatcaagcaaacac

SEQ ID NO: 89156 - DNA, 120 bp, synthetic construct; identical to SEQ ID NO: 64566
  source 1..120: mol_type = other DNA

SEQ ID NO: 89157 - DNA, 120 bp, synthetic construct; identical to SEQ ID NO: 64565
  source 1..120: mol_type = other DNA

SEQ ID NO: 89158 - DNA, 120 bp, synthetic construct; identical to SEQ ID NO: 1579
  source 1..120: mol_type = other DNA

SEQ ID NO: 89159 - DNA, 120 bp, synthetic construct; identical to SEQ ID NO: 64563
  source 1..120: mol_type = other DNA

SEQ ID NO: 89160 - DNA, 120 bp, synthetic construct; identical to SEQ ID NO: 1580
  source 1..120: mol_type = other DNA

SEQ ID NO: 89161 - DNA, 120 bp, synthetic construct
  source 1..120: mol_type = other DNA
tcactatgttgcccagactggtctccaactcctgggctcaagcgatcttcctgcttctgcctcccacaccagtgctgggattacaggtgtgagccaccgcgcccagccggtattgttttt

SEQ ID NO: 89162 - DNA, 120 bp, synthetic construct
  source 1..120: mol_type = other DNA
tctcactctgtcgcccagactggagtgcatgatctctgcgcactgcacccagtggcatgatctctgcgcactgcaagctctgcctcccaggttcacgccattctcctgcctcagcctccc

SEQ ID NO: 89163 - DNA, 120 bp, synthetic construct
  source 1..120: mol_type = other DNA
ggggttcaagcagttcttctgcctcagcctcccaagtagctgggattacaggcagctcccaccatggccggctaattttttgtgtttttagtagagatggggtttcatcatgttggccag

SEQ ID NO: 89164 - DNA, 120 bp, synthetic construct
  source 1..120: mol_type = other DNA
ctgaacagtacactttattttttttaattttcttttttttttttttttgagatggggtcttgctctgtctcccaggctggagtgcagtggcacaatcacagttcactgcaacctctgcct

SEQ ID NO: 89165 - DNA, 120 bp, synthetic construct
  source 1..120: mol_type = other DNA
cctcccaaagtggtgggtgacaggcgtgagccaccgcgcccagctaaagagatttttaaaaatcaaataaaatcaaagagaggttggatggaaaaaaagaaaattaacatgtactgaact

SEQ ID NO: 89166 - DNA, 120 bp, synthetic construct
  source 1..120: mol_type = other DNA
atatcctgaccttgtgatccacccgccttggtcacccaaagtgctgggattacaggcgtgagccaccactcctggcatgcccagcgaatttttgtacttttagtagagacgaggtttccc

SEQ ID NO: 89167 - DNA, 120 bp, synthetic construct; identical to SEQ ID NO: 1581
  source 1..120: mol_type = other DNA

SEQ ID NO: 89168 - DNA, 120 bp, synthetic construct
  source 1..120: mol_type = other DNA
ggctggagcgcagtggtgcaatctcagctcactgcaaactctgcctcccgagtagttgaaattacaggtgcgtgccaccacatctggctaatttttgtatttttagtagagactgggttt

SEQ ID NO: 89169 - DNA, 120 bp, synthetic construct
  source 1..120: mol_type = other DNA
attataggaatgagacactgtgcccagacctgggacttgttttctgttttgttttgctttttttcttttgagatagggtcttgctctatcacccagactggagtgtagtggcatgatcat

SEQ ID NO: 89170 - DNA, 120 bp, synthetic construct; identical to SEQ ID NO: 1582
  source 1..120: mol_type = other DNA

SEQ ID NO: 89171 - DNA, 120 bp, synthetic construct; identical to SEQ ID NO: 1583
  source 1..120: mol_type = other DNA

SEQ ID NO: 89172 - DNA, 120 bp, synthetic construct; identical to SEQ ID NO: 1584
  source 1..120: mol_type = other DNA

SEQ ID NO: 89173 - DNA, 120 bp, synthetic construct; identical to SEQ ID NO: 1585
  source 1..120: mol_type = other DNA

SEQ ID NO: 89174 - DNA, 120 bp, synthetic construct
  source 1..120: mol_type = other DNA
tctttctttcccccccttttcccccctttttttgtttgcttcctggaaggcagcctcgactcgtgtgtccgcagcgccccaagtgggagtcgccgtttccggtgctgtcgaatccaattt

SEQ ID NO: 89175 - DNA, 120 bp, synthetic construct
  source 1..120: mol_type = other DNA
gcgcacatcacctcacccggcaaattttaaaaattatttggccaggcgcagtggctcacgcttgtaatcccagcactttgagaggccaaggtgggcagatcacaaggtcaggagttcaag

SEQ ID NO: 89176 - DNA, 120 bp, synthetic construct; identical to SEQ ID NO: 1586
  source 1..120: mol_type = other DNA

SEQ ID NO: 89177 - DNA, 120 bp, synthetic construct
  source 1..120: mol_type = other DNA
accaccatacccagctaattttttttttggagacagagtcttacactgttgcctgggctggagtgcagtggctcaatctcagctcactgcaacctccgcctcctgggttcacgcgattct

SEQ ID NO: 89178 - DNA, 120 bp, synthetic construct
  source 1..120: mol_type = other DNA
ctcggcctcccaaagtattgggattacaggtgtgagccacccgcgcccggcctccaaattgaacttctatagataaaacctacatgaggttttttttttgcaacagagtctcgctctgtt

SEQ ID NO: 89179 - DNA, 120 bp, synthetic construct; identical to SEQ ID NO: 64544
  source 1..120: mol_type = other DNA

SEQ ID NO: 89180 - DNA, 120 bp, synthetic construct
  source 1..120: mol_type = other DNA
caaagtgctgggattacaggtgtcagccaccacgcccggtcaatttttgtatttttagcagagaggaggtttcactgtgttggccaggctggtctcgaactcctgacttcatgtgatcgg

SEQ ID NO: 89181 - DNA, 120 bp, synthetic construct
  source 1..120: mol_type = other DNA
tcactgtgaccatggtctggaaggaccatgaggaattctccagtgctgtcggggtttccgatactgacacagacaatttagtaacagctttgacaccttttggtaataggacaaagttaa

SEQ ID NO: 89182 - DNA, 120 bp, synthetic construct
  source 1..120: mol_type = other DNA
tcaacagctctaagttactacttctaactcacagagcacatatcacaaaggatcccactatccattgtcggtctgagcagggaatgagactttggcagaccatgaatcctgtattaattt

SEQ ID NO: 89183 - DNA, 120 bp, synthetic construct
  source 1..120: mol_type = other DNA
tagatccacctggtggttcttcagtcattttaagcccaaaactcaaaatctcccgaaatcaaaatgtttaaacttataatctccagggtgtgactcacgggggatgaggggagcaattct

SEQ ID NO: 89184 - DNA, 120 bp, synthetic construct
  source 1..120: mol_type = other DNA
tgagaaagcttggcagcatgctgagaccaattttcccagggccagaattctcctgtgtgagctaaaatacagtggctcggtccaacaaaacagagcctggagccaggaattatggcgaac

SEQ ID NO: 89185 - DNA, 120 bp, synthetic construct
  source 1..120: mol_type = other DNA
ctttttagggccgaccacttgctcatctgaggagttggacacttgactgcgtaaagtgcaacagtaacgatgttggaaggtaactttggcagtggggcgacaatcggatctgaagttaac

SEQ ID NO: 89186 - DNA, 120 bp, synthetic construct
  source 1..120: mol_type = other DNA
gtaccgtgttttaagcttagttcagtctcaagtgtttgcagccacatctgaagaccaataaagcaactgctggtttatcctttgggagctgacagaatttcttctcccaaatacatacac

SEQ ID NO: 89187 - DNA, 120 bp, synthetic construct
  source 1..120: mol_type = other DNA
aaaaaagaaagaggaaggaagggaaggaagggaaggaagaaaggaaggaaggaagggagggagggagggagggagggagggagggaaagaaagaagaaaagaaaaaaagaaaagctgtta

SEQ ID NO: 89188 - DNA, 120 bp, synthetic construct
  source 1..120: mol_type = other DNA
ccaacatggtgaaaccccgtctctactaaaaatataaaacttagctgggcgtggtgacacacacctgtagtcccagctactccggaggctgaggcaggagaatcgcatgaacccgggaga

SEQ ID NO: 89189 - DNA, 120 bp, synthetic construct
  source 1..120: mol_type = other DNA
gttgctgttttgagcctgtcactttcatgcttaaaaattttccacgaccttcccattcccttcagaatgaagttcacattcttttgcatggcagttcagagcaccggaggttaattacta

SEQ ID NO: 89190 - DNA, 120 bp, synthetic construct
  source 1..120: mol_type = other DNA
agctttgattgtgctactgcactccagcctggacgagtgagaccctgtttctctttctctctctatctccctctctctctctctctctctctcacacacacacacacacacacacacaca

SEQ ID NO: 89191 - DNA, 120 bp, synthetic construct
  source 1..120: mol_type = other DNA
cattttagaatgttatcttgtattgatgaattcagcttatgctggtctcgcaaacaaatacgaagactgacagattcctgtgagtgcaggccttcacagtgccaggaccacaagatgtaa

SEQ ID NO: 89192 - DNA, 120 bp, synthetic construct
  source 1..120: mol_type = other DNA
tgtccgacgaaaacaacgtaaaggaactactgagtctggacagaaaatccagacataccatgcagcttctaagaggaccgagtgccttcactggaatagtgaatctccttctgtggacat

SEQ ID NO: 89193 - DNA, 120 bp, synthetic construct
  source 1..120: mol_type = other DNA
gacttgcgagcagtctgcttagtacgggccatagcgaaccaaaacacaggcttaccagcgcagcggcggggagaaaaacgagctcctagccccgccgcagccgtctttataagcacagtc

SEQ ID NO: 89194 - DNA, 120 bp, synthetic construct
  source 1..120: mol_type = other DNA
gtcagctccaggttcgctattcactactgaggaacgctggactgagagtggccagcattaacaactcttttatttgaaaacgtgggtggctctgaaaagagccttttgagttcacaggtg

SEQ ID NO: 89195 - DNA, 120 bp, synthetic construct
  source 1..120: mol_type = other DNA
gagctactccatctacgtgtacaaggtgctgaagcgggtccaccccgacaccggcatctggtgcaaggccatgggcatcatgaactccttcctcaacgacatcttcgagcgcatcgcggg

SEQ ID NO: 89196 - DNA, 120 bp, synthetic construct; identical to SEQ ID NO: 5608
  source 1..120: mol_type = other DNA

SEQ ID NO: 89197 - DNA, 120 bp, synthetic construct; identical to SEQ ID NO: 8800
  source 1..120: mol_type = other DNA

SEQ ID NO: 89198 - DNA, 120 bp, synthetic construct
  source 1..120: mol_type = other DNA
aagtcgccgaaaacgccgctgcttcacctttttatagacagaacggcgattgtccacggagcactttgattggctcaagcaaattttgtcccgatagccaataggatagctcagccagaa

SEQ ID NO: 89199 - DNA, 120 bp, synthetic construct; identical to SEQ ID NO: 8797
  source 1..120: mol_type = other DNA

SEQ ID NO: 89200 - DNA, 120 bp, synthetic construct
  source 1..120: mol_type = other DNA
cccgctctaatgccggaggagcacggagggcaagcggtacagcttcttccaagtgctgatgtgggtggctctgaaaagagccttttggatacgatggaacctccggccgaaccgccactt

SEQ ID NO: 89201 - DNA, 120 bp, synthetic construct
  source 1..120: mol_type = other DNA
gaatgcttttaacctgtcaactgtgatgaaacaaacagaaaaccgaagccctggcttcttctgaggtgcaaataaatgaccgagaaggtgttatctaagacctctacagccatttgtatc

SEQ ID NO: 89202 - DNA, 120 bp, synthetic construct; identical to SEQ ID NO: 8794
  source 1..120: mol_type = other DNA

SEQ ID NO: 89203 - DNA, 120 bp, synthetic construct; identical to SEQ ID NO: 8801
  source 1..120: mol_type = other DNA

SEQ ID NO: 89204 - DNA, 120 bp, synthetic construct
  source 1..120: mol_type = other DNA
gtgaagatattgtgtacttggagattgcagatgtcgtgtggggctaaacattcttgttcagctgcaagaacatctgaaacctgggaaggctgtgggaaacataaagaactagatgtataa

SEQ ID NO: 89205 - DNA, 120 bp, synthetic construct
  source 1..120: mol_type = other DNA
accaccatgccgggctaatttttgtatttttagtagagatggaggttttgccatgttggccaggctgatctcgaactcctggctttaggtgatccaccctcctcggcctcccaaaatgct

SEQ ID NO: 89206 - DNA, 120 bp, synthetic construct; identical to SEQ ID NO: 8802
  source 1..120: mol_type = other DNA

SEQ ID NO: 89207 - DNA, 120 bp, synthetic construct
  source 1..120: mol_type = other DNA
tctttgcgatcaccaaatctggttctgagaaataggcactggcaatttacacatgccttgctgtgtaatctcactatatttgctcaggcaaagtgggagaagcagccttaggttttcatt

SEQ ID NO: 89208 - DNA, 120 bp, synthetic construct
  source 1..120: mol_type = other DNA
agaatccggaagccccggttgggatctgaattctcccggggactgtggcgtagcggttaaaaaaaaaaaagagtgagagggacctgagcagagtggaggaggagggagaggaaaacagaa

SEQ ID NO: 89209 - DNA, 120 bp, synthetic construct; identical to SEQ ID NO: 8803
  source 1..120: mol_type = other DNA

SEQ ID NO: 89210 - DNA, 120 bp, synthetic construct; identical to SEQ ID NO: 8804
  source 1..120: mol_type = other DNA

SEQ ID NO: 89211 - DNA, 120 bp, synthetic construct; identical to SEQ ID NO: 8805
  source 1..120: mol_type = other DNA

SEQ ID NO: 89212 - DNA, 120 bp, synthetic construct; identical to SEQ ID NO: 8806
  source 1..120: mol_type = other DNA

SEQ ID NO: 89213 - DNA, 120 bp, synthetic construct; identical to SEQ ID NO: 28315
  source 1..120: mol_type = other DNA

SEQ ID NO: 89214 - DNA, 120 bp, synthetic construct
  source 1..120: mol_type = other DNA
atactatataaatagtataagcagtataaaataggctgggcaggatggctcatgcctgtaatcctagcactttgggaggccgaggcaggtgaatcaactgaggtcaggagtttgagacca

SEQ ID NO: 89215 - DNA, 120 bp, synthetic construct; identical to SEQ ID NO: 28316
  source 1..120: mol_type = other DNA

SEQ ID NO: 89216 - DNA, 120 bp, synthetic construct; identical to SEQ ID NO: 28317
  source 1..120: mol_type = other DNA

SEQ ID NO: 89217 - DNA, 120 bp, synthetic construct
  source 1..120: mol_type = other DNA
actccagcctgggtgacagagccagactctgtctccagaaaaaaaaaaaaaagaaaagaaaaaaaaaacgcgtgcacacgtatacataggtttcttttttattacgttaattttttaata

SEQ ID NO: 89218 - DNA, 120 bp, synthetic construct; identical to SEQ ID NO: 28318
  source 1..120: mol_type = other DNA

SEQ ID NO: 89219 - DNA, 120 bp, synthetic construct; identical to SEQ ID NO: 28319
  source 1..120: mol_type = other DNA

SEQ ID NO: 89220 - DNA, 120 bp, synthetic construct; identical to SEQ ID NO: 28320
  source 1..120: mol_type = other DNA

SEQ ID NO: 89221 - DNA, 120 bp, synthetic construct; identical to SEQ ID NO: 28321
  source 1..120: mol_type = other DNA

SEQ ID NO: 89222 - DNA, 120 bp, synthetic construct; identical to SEQ ID NO: 28322
  source 1..120: mol_type = other DNA

SEQ ID NO: 89223 - DNA, 120 bp, synthetic construct; identical to SEQ ID NO: 30166
  source 1..120: mol_type = other DNA

SEQ ID NO: 89224 - DNA, 120 bp, synthetic construct; identical to SEQ ID NO: 28323
  source 1..120: mol_type = other DNA

SEQ ID NO: 89225 - DNA, 120 bp, synthetic construct; identical to SEQ ID NO: 28324
  source 1..120: mol_type = other DNA

SEQ ID NO: 89226 - DNA, 120 bp, synthetic construct; identical to SEQ ID NO: 30165
  source 1..120: mol_type = other DNA

SEQ ID NO: 89227 - DNA, 120 bp, synthetic construct
  source 1..120: mol_type = other DNA
accaaatatacaaaaaagcaagtaaaacagactgataagaaataaatcagttattaaaaacaaactcatagataatccagatattggagttaacagatagggcatcataacatctatgat

SEQ ID NO: 89228 - DNA, 120 bp, synthetic construct
  source 1..120: mol_type = other DNA
catgctgctaataaagacatacccaagactgggtaatttataaaagaaagaggtttagtgaactcacagttccacatggctggggagaactcacaatcatgatagaaggcaaaggaaaag

SEQ ID NO: 89229 - DNA, 120 bp, synthetic construct
  source 1..120: mol_type = other DNA
ccttatgatggctttcaactattaaaagaaaaaaggaaagtagtaaaataaataaatgcagagagtcaccaacttacaatgatttcacttaagattttcaactgtacaatggtgggaaag

SEQ ID NO: 89230 - DNA, 120 bp, synthetic construct; identical to SEQ ID NO: 28325
  source 1..120: mol_type = other DNA

SEQ ID NO: 89231 - DNA, 120 bp, synthetic construct; identical to SEQ ID NO: 28326
  source 1..120: mol_type = other DNA

SEQ ID NO: 89232 - DNA, 120 bp, synthetic construct; identical to SEQ ID NO: 28327
  source 1..120: mol_type = other DNA

SEQ ID NO: 89233 - DNA, 120 bp, synthetic construct
  source 1..120: mol_type = other DNA
tcagcttcccgtctgtgggaggaaatcggggaacccctctttcttgccttcttggggtcagggactccacaatccttccaggtcaattggattccaggcgaaggcatctgaacatgccgt

SEQ ID NO: 89234 - DNA, 120 bp, synthetic construct
  source 1..120: mol_type = other DNA
tgacggagtaactctgaaaggaaggactcaaggttccaaggggcacgatggtgaagccgatgtcaacaacgcagccaaacgtggctacacaggactcgaagtagaaagggaggttgcccc

SEQ ID NO: 89235 - DNA, 120 bp, synthetic construct
  source 1..120: mol_type = other DNA
atggtctttcctgttctatcttttggctttagctccagcccctctttatttattttcctggtattttacgcacaccacacgaattcatctgaacaaacgggggaagaagtgccgtatcgt

SEQ ID NO: 89236 - DNA, 120 bp, synthetic construct
  source 1..120: mol_type = other DNA
ggaccacattttgtctatctcgacgtatgcctcagtgtcatcaaggagactctccttgacatgcagtcacggccatgatccatcttcagagcttctctttcttccccaagttaagtctgt

SEQ ID NO: 89237 - DNA, 120 bp, synthetic construct
  source 1..120: mol_type = other DNA
tgcctcagctactcttaggatcagggggagaaccatggtgtcagacatccggaaagaagacgggatgaatgttttacctctgaagtacatcccaaatgtgggagttaacttcagctttgc

SEQ ID NO: 89238 - DNA, 120 bp, synthetic construct
  source 1..120: mol_type = other DNA
tgttggcagtaatgctgccttgctttctttactccgctgagatatttgtgtggagagaaacataaatctggcctacatgcacgtccaggcatagtaccttcccttgaacttaataatgat

SEQ ID NO: 89239 - DNA, 120 bp, synthetic construct
  source 1..120: mol_type = other DNA
accatgtcccatcacccagcggccggccatgatggggcccagcctctcagagtgctcttccggagactggaaaacggacgctggagctccagcctcctggccgccccctcatttcactct

SEQ ID NO: 89240 - DNA, 120 bp, synthetic construct
  source 1..120: mol_type = other DNA
tgagccagcaacctgccttgggaagggcattagtccgttccacttcatggaaggctgagtggaggcgctttgatccagttaatgcccaagacgcgatcttttgaacaatggtgtgcttag

SEQ ID NO: 89241 - DNA, 120 bp, synthetic construct
  source 1..120: mol_type = other DNA
tccttgttcaagggccccgggttggcttcagcccggggcttccatggtttcaggttttccttcccttcctttttccccaaggtcgctggaaccagggctgccttccagcacttcatgggg

SEQ ID NO: 89242 - DNA, 120 bp, synthetic construct
  source 1..120: mol_type = other DNA
tgaggagacctcaccaccagtcggtcaaatctgtagaacacaatgtgctgtgcgcatcctcggatattgtgtgttcctctgccatgactacctagtccaagagtaaaccccacctgccac

SEQ ID NO: 89243 - DNA, 120 bp, synthetic construct
  source 1..120: mol_type = other DNA
tggaaagcggaggtccctctctgccccttcctccgtcgtcctggatgctgcatcgcttccagccgggctgctgcagcacctgcccatctcagcgccagcctgggaatgaaagtagacgtg

SEQ ID NO: 89244 - DNA, 120 bp, synthetic construct
  source 1..120: mol_type = other DNA
ccagtcactcaatcttgttggccctcaggcgatctcccgttggatgaaatgctcctgctgaaactcgagtcccctttgatttgccttcattaattattcatgattcaggttggaaggcct

SEQ ID NO: 89245 - DNA, 120 bp, synthetic construct
  source 1..120: mol_type = other DNA
ctctgttttggagacgtaacgatttggattgccaacaaatcaagaaatgttcaagcccttggatgtagggtaaagaaagagagatcagactgtcactgtgtctatgtagaaggggaagac

SEQ ID NO: 89246 - DNA, 120 bp, synthetic construct
  source 1..120: mol_type = other DNA
gaaaatcataatcaataaaaacagagggaactcagaggccggtgccggtgcaggtcctaggtgtgctgagtgcctgtcccctggacccactgttgtctccctatactttgtctctgtgtc

SEQ ID NO: 89247 - DNA, 120 bp, synthetic construct
  source 1..120: mol_type = other DNA
acagcagaccttgcctgcccactgcccaggcctgcaccatgtcccatcacccagcggccagccatgatggggcccagcctctcagagtgctcttccggagactggaaaacggacgctgga

SEQ ID NO: 89248 - DNA, 120 bp, synthetic construct
  source 1..120: mol_type = other DNA
ggaacatgcatgtgttcagagaagacgtcccgagtacccttgagccagcaacctgccttgggaagggcattagtccgttccacttcatggaaggctgagtggaggcgctttgatccagtt

SEQ ID NO: 89249 - DNA, 120 bp, synthetic construct; identical to SEQ ID NO: 89241
  source 1..120: mol_type = other DNA

SEQ ID NO: 89250 - DNA, 120 bp, synthetic construct
  source 1..120: mol_type = other DNA
gtagcgattcaagttgtcacaggaagcatcccttatccgtgacttcaagcagacctgccaaagggtggcacacgccatgccctgtgtcttcgatcattctgtccgtcaagggagatagaa

SEQ ID NO: 89251 - DNA, 120 bp, synthetic construct
  source 1..120: mol_type = other DNA
caaaacaaaacaaaacaacaaaaaagatggaaaagaagacaggggtacaggcaccagtgttacatgtctgacggggaacatctattgttcaaagcttgcagctgtacaagtaggttttag

SEQ ID NO: 89252 - DNA, 120 bp, synthetic construct
  source 1..120: mol_type = other DNA
tactttctagttgatctggataatcaagataacgaccctcaacagcggcggaaagggagcagccagttggtgtgtctcagaaaatcccgctgagttccgaggcctcctagatgtggaatc

SEQ ID NO: 89253 - DNA, 120 bp, synthetic construct
  source 1..120: mol_type = other DNA
tataaaatcgaggtttaagggatctagggctgtgcaggacgtgctttgttaaccaaatgtttgcgagcagtatacttggtaaaagtcattgccattctctagtttcaataaaccaggggc

SEQ ID NO: 89254 - DNA, 120 bp, synthetic construct
  source 1..120: mol_type = other DNA
aaagtaatatcatcctcttccctccaggatcgtgggaacaatatccttgggggtgtccactttctgccatatgtgtagtcatatcaccccctccgccttggaatattattaagaaccatg

SEQ ID NO: 89255 - DNA, 120 bp, synthetic construct
  source 1..120: mol_type = other DNA
ttatcccagacttctcttcacagtgtatgtgctagtgtcttccagacttttgtatgacttgctatacagaagatcagatcaaatgggcatgtccctaaaaagtggtgacttgccagttct

SEQ ID NO: 89256 - DNA, 120 bp, synthetic construct
  source 1..120: mol_type = other DNA
tgcttccaagttttggcgattatgaataaagctgctataaacatccaggtgtgggtttactcccttcgttaaatacctgggagcatgatgactgaatcgtaggggtatggtatgttttac

SEQ ID NO: 89257 - DNA, 120 bp, synthetic construct
  source 1..120: mol_type = other DNA
gggtgcggtggctcatacctataagagctcactcccagcaatttaggaggccgaggcaggtggatcgcttgagcccagaatttcaagaccagtctgggcaacgtggtgaagcctggtctt

SEQ ID NO: 89258 - DNA, 120 bp, synthetic construct
  source 1..120: mol_type = other DNA
aaattttgtgtatttttagtagagacggggtttcaccatgttggcaaggctggtctcaaaatcccgaggctgccttggcctcccaaagtgctgggattagaagtgtgagacaccatgccc

SEQ ID NO: 89259 - DNA, 120 bp, synthetic construct; identical to SEQ ID NO: 35
  source 1..120: mol_type = other DNA

SEQ ID NO: 89260 - DNA, 120 bp, synthetic construct
  source 1..120: mol_type = other DNA
aaactcctgactttgggtgattcatgcaagtaggcctaccaaaatgctgggattacaggtgtgagccactgtgtcaggcttttgcttttgtttttgttttttaaaggtcttctgtcactc

SEQ ID NO: 89261 - DNA, 120 bp, synthetic construct; identical to SEQ ID NO: 7112
  source 1..120: mol_type = other DNA

SEQ ID NO: 89262 - DNA, 120 bp, synthetic construct
  source 1..120: mol_type = other DNA
cctagataattaatttacctggagctcaaaagaaacttttacaacagggaattagagatgggatcattcatgttcaccaaactgtggggcacaaagctgattttctgacaagtgcaggtt

SEQ ID NO: 89263 - DNA, 120 bp, synthetic construct
  source 1..120: mol_type = other DNA
tgagctttctctgcagaccacagcagagcctgtttcactaaacgctagtgggcatctactgtgagccagcctatgaggatgaaacagtgaaggggacactagaatgtccatacattgtcc

SEQ ID NO: 89264 - DNA, 120 bp, synthetic construct
  source 1..120: mol_type = other DNA
aacatggtaaaccccaactctactaaaaatactaaaattagctgggcatggtgctgggctcctgtaatcccagctacttgcaaggttgaggcaggagaatcctttgaaccggggaagcag

SEQ ID NO: 89265 - DNA, 120 bp, synthetic construct
  source 1..120: mol_type = other DNA
ttgtaggaactgaaattgtgggcatgtaggcttgtgacactccctttcccattgttttagaaccttgagtaattagtaatttcccccaatggtcggaggggtttgctttcaggttcctcc

SEQ ID NO: 89266 - DNA, 120 bp, synthetic construct
  source 1..120: mol_type = other DNA
ccatcaaaatgaaagatttagggatagggtgaaagtccaagactcattcactgattcactccacaaacgtggagttttactaatatgtgtccttcacagtcctgagtgtgagacagggaa

SEQ ID NO: 89267 - DNA, 120 bp, synthetic construct
  source 1..120: mol_type = other DNA
ctaaaaatacaaaaattagccaggcatggtttcagatgactgttataccagcttctctgtatggagactgatgcatgagaattgcttgaacctgggaggtaaaggttacagtgagttgag

SEQ ID NO: 89268 - DNA, 120 bp, synthetic construct
  source 1..120: mol_type = other DNA
tggctaatttttgtaattttggtagaggtagggttttaccatgtcggccaggcttttctcaaactcctgacctcagataatccacctgcctctgcctcccaaagtgctgggattacagga

SEQ ID NO: 89269 - DNA, 120 bp, synthetic construct; identical to SEQ ID NO: 36
  source 1..120: mol_type = other DNA

SEQ ID NO: 89270 - DNA, 120 bp, synthetic construct
  source 1..120: mol_type = other DNA
tccagatctggtaagtcactaatttctgtaaggacactcccatctgacctacagtcagctggtctgggatgttgacactgcagcctacgatggcacagaagtgtatcctgtctttttttt

SEQ ID NO: 89271 - DNA, 120 bp, synthetic construct; identical to SEQ ID NO: 37
  source 1..120: mol_type = other DNA

SEQ ID NO: 89272 - DNA, 120 bp, synthetic construct
  source 1..120: mol_type = other DNA
ataaattgttttgaaagactcatacttggtcataaggatcaaaaccaaaggggcatccatgcaatgttggatagattcatcctccacccactcaataacccccaacatgttcagcaagtc

SEQ ID NO: 89273 - DNA, 120 bp, synthetic construct
  source 1..120: mol_type = other DNA
gagctatagatgcattctatttccctctagaatctccaatgaaccaatatctagtttcagtaagtttctctgattatatggcagagggtaacatggtcatgttctgattctgtgtctatg

SEQ ID NO: 89274 - DNA, 120 bp, synthetic construct
  source 1..120: mol_type = other DNA
tgattcatattgttactgaacgatgggctcactcttctaagtgcatagaacccaatactatgacaccatgcttgagaaaagtaaaaaagattcaaccaggcatggtggctcacgcctata

SEQ ID NO: 89275 - DNA, 120 bp, synthetic construct; identical to SEQ ID NO: 38
  source 1..120: mol_type = other DNA

SEQ ID NO: 89276 - DNA, 120 bp, synthetic construct
  source 1..120: mol_type = other DNA
ctgggctcaaatgatcctcctgccttggcctcccaaagtgttggaattgtaggcatgagtcactgctcccaccaagaatttttttctttaaattcctggtttaataaggacttgtttatt

SEQ ID NO: 89277 - DNA, 120 bp, synthetic construct
  source 1..120: mol_type = other DNA
agtcttatccttcttcgaggagctgctggtctgctcctcttcagacttagcattctttacctctactccttgcttgcaatgttccttttcaattttttccaggttttccaggagagaatc

SEQ ID NO: 89278 - DNA, 120 bp, synthetic construct; identical to SEQ ID NO: 39
  source 1..120: mol_type = other DNA

SEQ ID NO: 89279 - DNA, 120 bp, synthetic construct; identical to SEQ ID NO: 40
  source 1..120: mol_type = other DNA

SEQ ID NO: 89280 - DNA, 120 bp, synthetic construct
  source 1..120: mol_type = other DNA
cggagcgagactccatctcaaaaaataaatgaataaaataaataaatcaataaaaatattgtgacaggaaccaacattgctcaacttgtacactaatgtcttacaaaatcctttccttgt

SEQ ID NO: 89281 - DNA, 120 bp, synthetic construct; identical to SEQ ID NO: 41
  source 1..120: mol_type = other DNA

SEQ ID NO: 89282 - DNA, 120 bp, synthetic construct
  source 1..120: mol_type = other DNA
ttttttgacagaatctccctccgtcacccagactggagtgcagtggcacaattctggctcactgcaaccattgcctcctgggttcaagcaattctcctgcctcagcctcctgagtcgctg

SEQ ID NO: 89283 - DNA, 120 bp, synthetic construct
  source 1..120: mol_type = other DNA
acacaacgttattttttttgtgaggacggggatggagtctcactgtgttgcccagactggagtgcagtggcacgatctcaactcactgcaacctttaccttccaggttcaagcaattctc

SEQ ID NO: 89284 - DNA, 120 bp, synthetic construct
  source 1..120: mol_type = other DNA
ggctgcagtgagctgagattgggccactgcactccagcctgggcaaaagaatctcacgtctgtctcaaagaaaaaaaaaaaatatgtatgctgtcaaaaataaacacactatgtgacatt

SEQ ID NO: 89285 - DNA, 120 bp, synthetic construct
  source 1..120: mol_type = other DNA
cccctatacagcaggttgtctttggctctgttgattgcattccttgatgcacttaaggttcttaattgtcatacactcaaatttatctatttttttgttgtcctttatttttgtggaata

SEQ ID NO: 89286 - DNA, 120 bp, synthetic construct
  source 1..120: mol_type = other DNA
agcgctattgtttcgttgatacacagtcagtataggtatatatttgtggtggattgatacttgcataatcatgtaaagtccttctttgcctttatttactgtccttgctgtgatctctac

SEQ ID NO: 89287 - DNA, 120 bp, synthetic construct
  source 1..120: mol_type = other DNA
ttacagttccacatggctgggtgcctcacaattatggcgcaagttgaaaggcacatctcacatggtgacagacaagagacttattaaattacaaattcattctctttgttagttgcagga

SEQ ID NO: 89288 - DNA, 120 bp, synthetic construct
  source 1..120: mol_type = other DNA
gcccacatagcagacagtttcctttaatctattccccaaggccacacctactcattggtttattctgaagtctccctccctaagtcattagctgttatttttgatattttacctaaaatc

SEQ ID NO: 89289 - DNA, 120 bp, synthetic construct
  source 1..120: mol_type = other DNA
aagaaaaaatgaagaaagaagaggccgacaaagagcaaagcgagacctcagttctgtgatgtctctagaggtccgccactgaaaagtcatcaatcatacagtcagtgaattctacaccaa

SEQ ID NO: 89290 - DNA, 120 bp, synthetic construct
  source 1..120: mol_type = other DNA
catgccgtttggcaattcttccctgtccctacctccaccatcattctcaaaaaaacccgctgatttgctttctgtcactatctgtttctattttctggaggtttgtaagaatggaatcat

SEQ ID NO: 89291 - DNA, 120 bp, synthetic construct
  source 1..120: mol_type = other DNA
tacacacatatatgtacacatatatgtgtgtatatacgtatatacacatgtgtatatacgtatatacacatatatgtatatacacacatatatacacacacatatgtacacatatatgtg

SEQ ID NO: 89292 - DNA, 120 bp, synthetic construct; identical to SEQ ID NO: 89290
  source 1..120: mol_type = other DNA

SEQ ID NO: 89293 - DNA, 120 bp, synthetic construct
  source 1..120: mol_type = other DNA
cctcttcccctcactccttccttcctcaccatcagagaagtcacagagacatatcctttcgattcaggttgattttattttcatggttttaacctgttggtgtagaattcactgactgta

SEQ ID NO: 89294 - DNA, 120 bp, synthetic construct
  source 1..120: mol_type = other DNA
tatcaaaaataacagctaatgacttagggagggagacttcagaataaaccaatgagtaggtgtggccttggggaatagattaaaggaaactgtctgctatgtgggccaccacaattgaac

SEQ ID NO: 89295 - DNA, 120 bp, synthetic construct; identical to SEQ ID NO: 89287
  source 1..120: mol_type = other DNA

SEQ ID NO: 89296 - DNA, 120 bp, synthetic construct
  source 1..120: mol_type = other DNA
cttcattcatctctattagtttttgcttcatgtatttgaaagcgctattgtttcgttgatacacagtcagtataggtatatatttgtggtggattgatacttgcataatcatgtaaagtc

SEQ ID NO: 89297 - DNA, 120 bp, synthetic construct
  source 1..120: mol_type = other DNA
gtgtatgacaattaagaaccttaagtgcatcaaggaatgcaatcaacagagccaaagacaacctgctgtataggggaaaaatttgcaaagcatataactgatgaggggttaatatccgga

SEQ ID NO: 89298 - DNA, 120 bp, synthetic construct
  source 1..120: mol_type = other DNA
ggaaaggaaaaagtaagagtatctttcttctaagactacacgatcttgtatatggagaacattaaaaatgccacacaaaaactcttctggaatgaatcaacaaattcagtgaagttgcag

SEQ ID NO: 89299 - DNA, 120 bp, synthetic construct
  source 1..120: mol_type = other DNA
aaactgccattgtcatcatggcccattctcaatgagctgttgggtacacctcccagacggggtgatggccgggcagaggggctcctcacttcccagtagaggcggccgggcagaggcgcc

SEQ ID NO: 89300 - DNA, 120 bp, synthetic construct
  source 1..120: mol_type = other DNA
agcaatttttgtatttttaatagagagggagtttcaccatattggtcaggctgatctggagctcctgaccttgtgatccgcccaccttggcctcctaaagtgctgggattacaggtataa

SEQ ID NO: 89301 - DNA, 120 bp, synthetic construct; identical to SEQ ID NO: 7160
  source 1..120: mol_type = other DNA

SEQ ID NO: 89302 - DNA, 120 bp, synthetic construct
  source 1..120: mol_type = other DNA
gtgcacctgcatattgccagtgaaaacttacaggtcacatttttcaggagtccaaattaaccacctgtggaaggtcttatgattggcttacattctgtccctgagtaaagaatctgatct

SEQ ID NO: 89303 - DNA, 120 bp, synthetic construct
  source 1..120: mol_type = other DNA
cttataaactttataaatttaatcagtgaagaagggagggggagaaacagacataaaccaagcttgcagtgcattcagcattcatcatgaggtcagcttgctctctgacctgcttcctca

SEQ ID NO: 89304 - DNA, 120 bp, synthetic construct
  source 1..120: mol_type = other DNA
cttcagaaatgcaatcagatatcacttgttgattggaagctagcagtggatacgtggaggggtgtgggtgggagttgtgattagaaaggtcaataaaagcttctaaagacccacagaaga

SEQ ID NO: 89305 - DNA, 120 bp, synthetic construct
  source 1..120: mol_type = other DNA
atgtagctgggattacaggcatgcacctccacacccatgtctccgtttgggtggaagagttacaatgaggatgtgattggtttaaaattaaggtcaaagatcctctttggttaagatttt

SEQ ID NO: 89306 - DNA, 120 bp, synthetic construct
  source 1..120: mol_type = other DNA
agtgactcacacctgtaatcccagcactttgggaggcagaggcattggattatctgaggtcaggagtttgagaccatcctggccaacatggtaaaacactacctctactaaaattacaaa

SEQ ID NO: 89307 - DNA, 120 bp, synthetic construct; identical to SEQ ID NO: 7161
  source 1..120: mol_type = other DNA

SEQ ID NO: 89308 - DNA, 120 bp, synthetic construct
  source 1..120: mol_type = other DNA
gagaaagctcaccatcatttcttacctgagcaggtgctccaggtgctctttgatattactgatcttttttatataaagcatctgggggtagtacaggcagaggaatggagagtccaagtc

SEQ ID NO: 89309 - DNA, 120 bp, synthetic construct; identical to SEQ ID NO: 7162
  source 1..120: mol_type = other DNA

SEQ ID NO: 89310 - DNA, 120 bp, synthetic construct
  source 1..120: mol_type = other DNA
aatcacttgaacccaggaggtggtgcttgcagtgagctgagattgtgccactgcacttcatcctgagggacacagtgagactctgtctcaaaaaataaaataaaataaaataaaaataaa

SEQ ID NO: 89311 - DNA, 120 bp, synthetic construct
  source 1..120: mol_type = other DNA
gttgctaacacaaagaaatgataaattcttgagatggtggctattcctgttaccatgatttgaacattacacattttatgcttatatcagaatttcaggccaggtgcagtgactaatgtc

SEQ ID NO: 89312 - DNA, 120 bp, synthetic construct; identical to SEQ ID NO: 7163
  source 1..120: mol_type = other DNA

SEQ ID NO: 89313 - DNA, 120 bp, synthetic construct
  source 1..120: mol_type = other DNA
ttaatttatttatttataatgtatttatttattaatttttttttgagatggagtttcactcttgttttccaggctggagtgcaatggtgtgatctcggctcactgcaacctctgcctccc

SEQ ID NO: 89314 - DNA, 120 bp, synthetic construct
  source 1..120: mol_type = other DNA
gtgtttgttttgagacagtctcgctctgtcaccaagttggagtgcagtggtgaaatcttggctgactgcaacctcctcctcctgaattcaagcgactatcatgcctcagtctctcgagta

SEQ ID NO: 89315 - DNA, 120 bp, synthetic construct; identical to SEQ ID NO: 7094
  source 1..120: mol_type = other DNA

SEQ ID NO: 89316 - DNA, 120 bp, synthetic construct; identical to SEQ ID NO: 7093
  source 1..120: mol_type = other DNA

SEQ ID NO: 89317 - DNA, 120 bp, synthetic construct
  source 1..120: mol_type = other DNA
aaataaagacagaactgcctttagaggaaaaaattcaaagcttccaattgttcatataaaaaaaaaaaaaaaaggacaggatatagctctgtgccatcgtaggctgcactgtcaccatcc

SEQ ID NO: 89318 - DNA, 120 bp, synthetic construct; identical to SEQ ID NO: 7164
  source 1..120: mol_type = other DNA

SEQ ID NO: 89319 - DNA, 120 bp, synthetic construct
  source 1..120: mol_type = other DNA
ttccccctctctctcccttttttctttcttgtcttctttccctgcctcccttctctcattctctctctctttctctctctccctctctcactctttctgacagagtcttgctgtgtcacc

SEQ ID NO: 89320 - DNA, 120 bp, synthetic construct; identical to SEQ ID NO: 7165
  source 1..120: mol_type = other DNA

SEQ ID NO: 89321 - DNA, 120 bp, synthetic construct
  source 1..120: mol_type = other DNA
aggatgggcagtacccacttgcaattcacttccacctcctggatacagtctaggttcaccattttcaggatgcttctgatattgcggaagggcattcccaaaattttcagcttcttacag

SEQ ID NO: 89322 - DNA, 120 bp, synthetic construct
  source 1..120: mol_type = other DNA
gagacagggtttcaccatgttggccaggttattctccaactcctgacttcaggtgatccacccaccatggactcccaaagtgctgggattataggcgagagctaccacgcccagccaaca

SEQ ID NO: 89323 - DNA, 120 bp, synthetic construct
  source 1..120: mol_type = other DNA
gactgtaattggtcagtctgatgccactcaggtccagggtctttagttgactgatactcgggcactgggatagatgcttcaagtctgattccaaaagcacacagttagttattgtgagga

SEQ ID NO: 89324 - DNA, 120 bp, synthetic construct; identical to SEQ ID NO: 7166
  source 1..120: mol_type = other DNA

SEQ ID NO: 89325 - DNA, 120 bp, synthetic construct
  source 1..120: mol_type = other DNA
aacaagcaagggttgatgctgcccagagtctccagctaatacacaatatggacatccccttccagggcagtgggaagagagtgggtccttgtgcagtgaagctgacatccaccaaataag

SEQ ID NO: 89326 - DNA, 120 bp, synthetic construct
  source 1..120: mol_type = other DNA
tgtcaaagatgacatttgtcttcctcccacgccccatatccaatctatctgcagatcatgttgactgtgctgtaaaatatatcctgagtctaaccaccatttaccatctctccattgcta

SEQ ID NO: 89327 - DNA, 120 bp, synthetic construct
  source 1..120: mol_type = other DNA
tagttgcctaattactcatccaatgcccctcccccatgatattttcataaaacatggagagtaaggttgagaaggatattttaaatagatgagttggtttgctgccaaccttaggagcat

SEQ ID NO: 89328 - DNA, 120 bp, synthetic construct
  source 1..120: mol_type = other DNA
aagtgctgggattacaggcatgagccaccacacccagcctgcatcaggagttcttttttttttttttttagagggagtctcactctgtcgcccaggctggaatgcagtggcgtgatcttg

SEQ ID NO: 89329 - DNA, 120 bp, synthetic construct
  source 1..120: mol_type = other DNA
ctatttggacagtagaggcctctaataaccaacttcagtttttctttgttacagcagtagatcctatattaactagaagagcagagatctgggattacaggcgcatgccaccatgcctga

SEQ ID NO: 89330 - DNA, 120 bp, synthetic construct
  source 1..120: mol_type = other DNA
ggtcttgttcctaccaatctcccattcaaacccctgtttttccacaaaagcccatctcacatattaccacctctgtaaatccttttctaacttattcagggtgaccgaattctgtgtttc

SEQ ID NO: 89331 - DNA, 120 bp, synthetic construct
  source 1..120: mol_type = other DNA
tcccacagcacaacagccctgcatgggtttgtttgtttttttactgctcactcccaaccttttgtaatgccattttctaaacttatttctgagtgtagtctcagcttaaagttgtgtaat

SEQ ID NO: 89332 - DNA, 120 bp, synthetic construct; identical to SEQ ID NO: 7353
  source 1..120: mol_type = other DNA

SEQ ID NO: 89333 - DNA, 120 bp, synthetic construct; identical to SEQ ID NO: 7354
  source 1..120: mol_type = other DNA

SEQ ID NO: 89334 - DNA, 120 bp, synthetic construct; identical to SEQ ID NO: 7355
  source 1..120: mol_type = other DNA

SEQ ID NO: 89335 - DNA, 120 bp, synthetic construct
  source 1..120: mol_type = other DNA
atgacctctccctcctctcattccagcagctactgccaggattgcttgtttcgtattttacattatttgtatttatttattttttgagacagagtctcactctgtcgcccaggctggagt

SEQ ID NO: 89336 - DNA, 120 bp, synthetic construct; identical to SEQ ID NO: 7356
  source 1..120: mol_type = other DNA

SEQ ID NO: 89337 - DNA, 120 bp, synthetic construct; identical to SEQ ID NO: 7357
  source 1..120: mol_type = other DNA

SEQ ID NO: 89338 - DNA, 120 bp, synthetic construct
  source 1..120: mol_type = other DNA
catgcctataatcccagcactttgagaggccaaggcaggaggattgcttgaacccatgagttcgagaccagcctaggtaatacggtgaaaccccatctctacaaaaaaatacaaaaatta

SEQ ID NO: 89339 - DNA, 120 bp, synthetic construct
  source 1..120: mol_type = other DNA
agtgtggtgtttctctgtaactcacttggttacaacactttaaatatgtacaattgttttgttttgtttttgaggcaaagtctcgctctgtcacccaggctggagtgcagtggcatgatc

SEQ ID NO: 89340 - DNA, 120 bp, synthetic construct; identical to SEQ ID NO: 7358
  source 1..120: mol_type = other DNA

SEQ ID NO: 89341 - DNA, 120 bp, synthetic construct
  source 1..120: mol_type = other DNA
taagttcatgcactcaaaatctatcacgttaataggtgaaaaatcttaccttccagaaaacttggtcatcaaaatatttagccacatgaggtgctttccatattttgagatttaggagca

SEQ ID NO: 89342 - DNA, 120 bp, synthetic construct
  source 1..120: mol_type = other DNA
gtagctgggaccacaagtgtgtgctaccatacccagctcatttttttgtattttttgcagagacggggtttagccatgttgcccaggctggtcttgaacacctgagctcaagtgatctgc

SEQ ID NO: 89343 - DNA, 120 bp, synthetic construct
  source 1..120: mol_type = other DNA
tgttaggctctttgctttcacttctaacttctgctggtgtactttacctctagaaacctagcccacctctaatctgctatttctaatctacctgggctgagaaacccaataactatgctt

SEQ ID NO: 89344 - DNA, 120 bp, synthetic construct
  source 1..120: mol_type = other DNA
aattcattgcgaatttaaaaacagacaccttgcatttttgctaaatccggcagcctttcccagggttggattgccagctgccacgaactgaacgttaacttacggaattaactctactcc

SEQ ID NO: 89345 - DNA, 120 bp, synthetic construct
  source 1..120: mol_type = other DNA
tctgcccacttcggtctcccaaactgctgcaattacaggtatgagccactgcacctagccacatattttcacctggcatataagtaaaactggctaattagcaactcccctagatttttt

SEQ ID NO: 89346 - DNA, 120 bp, synthetic construct; identical to SEQ ID NO: 7359
  source 1..120: mol_type = other DNA

SEQ ID NO: 89347 - DNA, 120 bp, synthetic construct; identical to SEQ ID NO: 7360
  source 1..120: mol_type = other DNA

SEQ ID NO: 89348 - DNA, 120 bp, synthetic construct
  source 1..120: mol_type = other DNA
agggaaatgtttgttgaatgactgaaaaatggagtcaattactcaattcattgatctaaaattaagtgatttttagaaaaaaattcagggggacatatgcatgaccttgcaaatttcttt

SEQ ID NO: 89349 - DNA, 120 bp, synthetic construct
  source 1..120: mol_type = other DNA
gaaaacaccaagtgttaacaaaatgtggagtaaaaggagcttctatacactactggtgattagattggcgcaaactactagagaaaactgtttagcagtagccactaaggctgactgtgt

SEQ ID NO: 89350 - DNA, 120 bp, synthetic construct; identical to SEQ ID NO: 7361
  source 1..120: mol_type = other DNA

SEQ ID NO: 89351 - DNA, 120 bp, synthetic construct; identical to SEQ ID NO: 7362
  source 1..120: mol_type = other DNA

SEQ ID NO: 89352 - DNA, 120 bp, synthetic construct; identical to SEQ ID NO: 7363
  source 1..120: mol_type = other DNA

SEQ ID NO: 89353 - DNA, 120 bp, synthetic construct; identical to SEQ ID NO: 7364
  source 1..120: mol_type = other DNA

SEQ ID NO: 89354 - DNA, 120 bp, synthetic construct; identical to SEQ ID NO: 7365
  source 1..120: mol_type = other DNA

SEQ ID NO: 89355 - DNA, 120 bp, synthetic construct; identical to SEQ ID NO: 7366
  source 1..120: mol_type = other DNA

SEQ ID NO: 89356 - DNA, 120 bp, synthetic construct; identical to SEQ ID NO: 7367
  source 1..120: mol_type = other DNA

SEQ ID NO: 89357 - DNA, 120 bp, synthetic construct
  source 1..120: mol_type = other DNA
actcggttacaacacacctgtggacaagtgttattataagcagattggcaggtgagacccatattccctacccacccctttcacacacccttggtatccggcgccaccaaatggggatgg

SEQ ID NO: 89358 - DNA, 120 bp, synthetic construct
  source 1..120: mol_type = other DNA
cgagacaccgtctcaacaacaacaacaacaacaaaacacacacacacacacacacacacacacacacacacaaattagccaggcatggtggtgggcacctgtaatcccagctactcagga

SEQ ID NO: 89359 - DNA, 120 bp, synthetic construct
  source 1..120: mol_type = other DNA
tttatggctaaataatattccactctgtatataaaacacttttttttttttaagacagagtcttgttctgtcgcccaggctggagtgcagtggcgcaatttcggctcactgcaagctctg

SEQ ID NO: 89360 - DNA, 120 bp, synthetic construct
  source 1..120: mol_type = other DNA
taagagaatgcaccaacacctgcctaatgcagctgtgcactgcacagtggcccatcaggtcccagcgtcctgctggccttcagccaaagcagagagcattagttgtctagtttcttaccg

SEQ ID NO: 89361 - DNA, 120 bp, synthetic construct
  source 1..120: mol_type = other DNA
tctgagcttccctgagctgacacccactcctgccttgctaggtgtcttagactttctgtcaccatggaactcatggccactcacttcctcttagcactgaattctgctgtgaagctgtca

SEQ ID NO: 89362 - DNA, 120 bp, synthetic construct
  source 1..120: mol_type = other DNA
ggccagaacatccacaagaagagggcgcctgggggccagagagggtggttggccagaatcacactcctgctccaaaggtctgagcctcgaggggttttggatgagaatcctagggctgga

SEQ ID NO: 89363 - DNA, 120 bp, synthetic construct
  source 1..120: mol_type = other DNA
ccacagtcagcccaaaataggctgcgaacacgtagaagtgcctcaggttcatgtggtagtctgtctgcaataaaacccagtaagagcagtgagtgtcggcatcctctgcccaggggaaag

SEQ ID NO: 89364 - DNA, 120 bp, synthetic construct
  source 1..120: mol_type = other DNA
ccaccacgcccggcctatcagtagctcttatatgcttttgaccaaggttcacttaggtgtggcaaaaacccacatggacacgcacttcactgattcctacttctcagcggaattttaact

SEQ ID NO: 89365 - DNA, 120 bp, synthetic construct
  source 1..120: mol_type = other DNA
aataaaataaaatgcaagtcagatcatgttactcctctgctcagaagcctccagcggctcccatgtcactcaaagtcaaggtccaggttcttgccacgaccctgcaggatccactctcac

SEQ ID NO: 89366 - DNA, 120 bp, synthetic construct; identical to SEQ ID NO: 7371
  source 1..120: mol_type = other DNA

SEQ ID NO: 89367 - DNA, 120 bp, synthetic construct; identical to SEQ ID NO: 7372
  source 1..120: mol_type = other DNA

SEQ ID NO: 89368 - DNA, 120 bp, synthetic construct
  source 1..120: mol_type = other DNA
ccccttgttttaggaaattgtgttagtctgttttcacactgctataaagatacttcctgagactgcgtaatttataaacaaaagaggctgaattgactcacagtttggcatggccggaga

SEQ ID NO: 89369 - DNA, 120 bp, synthetic construct
  source 1..120: mol_type = other DNA
cagaggttgcagtgagccgagattgcaacattgccatccagcctgggtgacaacagcgaaactccatctgaaaaaaaaaaaaaaaacttcccatattccctcccagaccattgttctttt

SEQ ID NO: 89370 - DNA, 120 bp, synthetic construct; identical to SEQ ID NO: 7373
  source 1..120: mol_type = other DNA

SEQ ID NO: 89371 - DNA, 120 bp, synthetic construct; identical to SEQ ID NO: 7374
  source 1..120: mol_type = other DNA

SEQ ID NO: 89372 - DNA, 120 bp, synthetic construct; identical to SEQ ID NO: 7375
  source 1..120: mol_type = other DNA

SEQ ID NO: 89373 - DNA, 120 bp, synthetic construct; identical to SEQ ID NO: 7376
  source 1..120: mol_type = other DNA

SEQ ID NO: 89374 - DNA, 120 bp, synthetic construct
  source 1..120: mol_type = other DNA
agagatgaggatcttgctatgatgcccaggcgggtctcaaactcctggcctcaagtgatcttccctcctcaacctcccaagtagctgggattacaggttgtctttatttttcaaaacccc

SEQ ID NO: 89375 - DNA, 120 bp, synthetic construct; identical to SEQ ID NO: 7377
  source 1..120: mol_type = other DNA

SEQ ID NO: 89376 - DNA, 120 bp, synthetic construct; identical to SEQ ID NO: 7378
  source 1..120: mol_type = other DNA

SEQ ID NO: 89377 - DNA, 120 bp, synthetic construct
  source 1..120: mol_type = other DNA
ttcgagaccaacctgacccacctggtgaaaccccgtctctactaaaaacacaaaaattagccgggcatggtagcaggcgtctgtaaaaaaatttaactcaggaggctgaggtgggaggat

SEQ ID NO: 89378 - DNA, 120 bp, synthetic construct
  source 1..120: mol_type = other DNA
tgtgtgtgtgtgtgtgtgtattgaatcccggtgggaattaactctaagatggtttttgttttgttttgtttttgagacggagcctcactctgtcgcccaggctacagtgcaatggcgcga

SEQ ID NO: 89379 - DNA, 120 bp, synthetic construct
  source 1..120: mol_type = other DNA
aaaaggttataaaaaaaagttagagccatctccaccacttagctgtgtggccctaggcaagtgccttgccctctctgagcttccacttccttacctgtataccaggttagatccctacct

SEQ ID NO: 89380 - DNA, 120 bp, synthetic construct; identical to SEQ ID NO: 7379
  source 1..120: mol_type = other DNA

SEQ ID NO: 89381 - DNA, 120 bp, synthetic construct; identical to SEQ ID NO: 7380
  source 1..120: mol_type = other DNA

SEQ ID NO: 89382 - DNA, 120 bp, synthetic construct
  source 1..120: mol_type = other DNA
tttttttttttcgagacagagtctctctgttacccaggttggagtgcagtggtgcgatctcggtttgctgcaacctctgcctcccgggttcaagtgattcttgtgcttcagcctcctgtg

SEQ ID NO: 89383 - DNA, 120 bp, synthetic construct; identical to SEQ ID NO: 7381
  source 1..120: mol_type = other DNA

SEQ ID NO: 89384 - DNA, 120 bp, synthetic construct; identical to SEQ ID NO: 7382
  source 1..120: mol_type = other DNA

SEQ ID NO: 89385 - DNA, 120 bp, synthetic construct; identical to SEQ ID NO: 7383
  source 1..120: mol_type = other DNA

SEQ ID NO: 89386 - DNA, 120 bp, synthetic construct; identical to SEQ ID NO: 7384
  source 1..120: mol_type = other DNA

SEQ ID NO: 89387 - DNA, 120 bp, synthetic construct; identical to SEQ ID NO: 7385
  source 1..120: mol_type = other DNA

SEQ ID NO: 89388 - DNA, 120 bp, synthetic construct; identical to SEQ ID NO: 7386
  source 1..120: mol_type = other DNA

SEQ ID NO: 89389 - DNA, 120 bp, synthetic construct; identical to SEQ ID NO: 7387
  source 1..120: mol_type = other DNA

SEQ ID NO: 89390 - DNA, 120 bp, synthetic construct; identical to SEQ ID NO: 7388
  source 1..120: mol_type = other DNA

SEQ ID NO: 89391 - DNA, 120 bp, synthetic construct
  source 1..120: mol_type = other DNA
tctgagcttccatataaagtgagtttctgaggacattttgtacctacgttagtagcacggtgcaggggtaaagaacatggaccctagagtcaatctacagggttggaatagtggctgcta

SEQ ID NO: 89392 - DNA, 120 bp, synthetic construct
  source 1..120: mol_type = other DNA
agcttccaaaagaaaactagtatagatatgagcaagagagctgggcacagtgcttcacgcctgtaattccagcactttgggagactgaggctggaggatcgcttgtgtccaggagtttga

SEQ ID NO: 89393 - DNA, 120 bp, synthetic construct
  source 1..120: mol_type = other DNA
agagctcatcctgtgtccgtctctgtgcaggggttccaccagcaccaggcatcacccctctctccaacacctacttgagggcttgagggagcgataggggagacacccgccaaaggcctt

SEQ ID NO: 89394 - DNA, 120 bp, synthetic construct
  source 1..120: mol_type = other DNA
aagaaggaaggaattggagtttcctcattttctacaatggccccagccactggccactgagtgtaaactgaatgtgtggagccccagagaataaagccagggccaggagctacagggaag

SEQ ID NO: 89395 - DNA, 120 bp, synthetic construct
  source 1..120: mol_type = other DNA
gtgtggggatgaaactgttccacctcagatcatcaggcattagttagattctcctaaggagcacgcaacctagatccctctcatgcgcggttcccaatagggtttgtgcccctgtgagaa

SEQ ID NO: 89396 - DNA, 120 bp, synthetic construct
  source 1..120: mol_type = other DNA
aatcttcaaggcaggtcacctgctacagaaagcacaagggatctaggatagataagtcaaaaaccaaatacagtaaaatgttaattgttgattctagctgtgagatgtatggcttttcac

SEQ ID NO: 89397 - DNA, 120 bp, synthetic construct
  source 1..120: mol_type = other DNA
ctcccgagtagctgggattataggcacgcgataccacacctggctagtttttgtagttttagtagagacagggtttcaccacattggcctggctggtcttgaactcctgacctcaagtga

SEQ ID NO: 89398 - DNA, 120 bp, synthetic construct
  source 1..120: mol_type = other DNA
gcttgtgttgctaatcactttgcaattctgcctcccaagttactaaatcacccagtctcaatttccttatgagtcaagtaagatgtactctggtctcctcacagggttattacaaacgtg

SEQ ID NO: 89399 - DNA, 120 bp, synthetic construct
  source 1..120: mol_type = other DNA
attcccaactctgttactatgtgaccttaggcaagtgccttaactcctctgtgccacagtgtcctcatctgtaatatggtgctagtaatctctatctcataggattgttgtgaggattaa

SEQ ID NO: 89400 - DNA, 120 bp, synthetic construct
  source 1..120: mol_type = other DNA
caagtgcaaatcccttcatcagaaagtcccagaaggagggacaagcctaaattcctctgtaggccttggtcttttgaatgagggcaaattacttcccttccttgtttcactcatttgtaa

SEQ ID NO: 89401 - DNA, 120 bp, synthetic construct
  source 1..120: mol_type = other DNA
gctccccaacgcctttaagcttccattttgatttggttcccacctgtatcttcctcagtgaaccaatctgccttggcagctgaaggcttttttctactgctccacacatagcattctgtt

SEQ ID NO: 89402 - DNA, 120 bp, synthetic construct
  source 1..120: mol_type = other DNA
gaggggtgattacaggccagagagagttctgtgaaacccaggacaaaacaaaatggcatctacttcctgggaagttttttttttttttttttttttgagacaaagtctcgctctcctgcc

SEQ ID NO: 89403 - DNA, 120 bp, synthetic construct
  source 1..120: mol_type = other DNA
gtcaccacgtcgcgggaagctggcagggtgtgtgtctgtgtgcgtgtggggtttgctttgtcattcgtacccccggtgcgcgctgacgcggtcggcctggccgagctctccagcatccgc

SEQ ID NO: 89404 - DNA, 120 bp, synthetic construct
  source 1..120: mol_type = other DNA
ccagcgggaggatgaagcggcggaacgccgactgcagtaagctccgccgccccctaaagcggaaccggatcaccgagggcatttacggcaggtgagcggctgcacccccactccgcgggc

SEQ ID NO: 89405 - DNA, 120 bp, synthetic construct
  source 1..120: mol_type = other DNA
gcttctctagctgtgggatttcaagaaatatgtgaggtagctgatgacacccaagttgtcttaacataactgtacaccttgcacatgctcttgtttacagatgtggaatgattgctttcc

SEQ ID NO: 89406 - DNA, 120 bp, synthetic construct
  source 1..120: mol_type = other DNA
agacctaaatgtatttctaactgtctttcctggttggagtatcatatatcaaatgagcgtttcaactcacttatctgtttcttggtttatattatggagtattggactgaagaacaagat

SEQ ID NO: 89407 - DNA, 120 bp, synthetic construct
  source 1..120: mol_type = other DNA
ataggagaaaggaaataggaatagtgatcttttcatcttactaggggctaaagttcgatgtagttttaaaaaaatctgacccagcccagagcctgacagagtcgacattcagtgttcaat

SEQ ID NO: 89408 - DNA, 120 bp, synthetic construct; identical to SEQ ID NO: 23302
  source 1..120: mol_type = other DNA

SEQ ID NO: 89409 - DNA, 120 bp, synthetic construct
  source 1..120: mol_type = other DNA
gcgggtagatcaactgaggtcaggagtttgagaccagcctggccaacatggtgcaacctctactaaaaatacaaaaaaaaaaaaaaaaaaaaaaaattaaccgggagtggtagtgggtgc

SEQ ID NO: 89410 - DNA, 120 bp, synthetic construct; identical to SEQ ID NO: 2166
  source 1..120: mol_type = other DNA

SEQ ID NO: 89411 - DNA, 120 bp, synthetic construct
  source 1..120: mol_type = other DNA
cttgcctgatgagcaaaatccagaaatataccacggcaggcccagacagccccagctagttcttctacacttaagcagaaaataatccaaaaccaatagatgattgtagaatatagaggt

SEQ ID NO: 89412 - DNA, 120 bp, synthetic construct
  source 1..120: mol_type = other DNA
aacacaagatttcatgcttttgaataggaagactcaatctgtaaattcattgtgactctaattgaaaaaagattcatatgagagagagattcagagttgatgggagtgttgacttgaaaa

SEQ ID NO: 89413 - DNA, 120 bp, synthetic construct
  source 1..120: mol_type = other DNA
acattaagtttgaaaatacccagtgctattatagaaagctgagaaattgggccttttattgtactcttgatggagttacatccttcgatcagtttctagaagataatctggcaatagcta

SEQ ID NO: 89414 - DNA, 120 bp, synthetic construct
  source 1..120: mol_type = other DNA
cctccagtgcaaacaaagtcatgtgcattacccagaaatgagtgagccagatggctggaaaagcacatacaatttatttaactctgaaaatcaaatcttccctcatgatgttcccacctc

SEQ ID NO: 89415 - DNA, 120 bp, synthetic construct
  source 1..120: mol_type = other DNA
ttctaagactaattaactccagtgcatgtgaatcagctaacacattatttttttaaagcccacgtaagtggcttcacttagctgtagctattcttttgggctgttaattctagtagaact

SEQ ID NO: 89416 - DNA, 120 bp, synthetic construct
  source 1..120: mol_type = other DNA
ttttccacatgtacagaaccaggcgtggttacgcaaagtctttggacacggcctccacgaagttgggagccgacatcaggatgccgatggtgcagatgatggtgaagaccgagaaggcca

SEQ ID NO: 89417 - DNA, 120 bp, synthetic construct
  source 1..120: mol_type = other DNA
ctttgcaaagctgtttttcaaagtaccctgataaaaagcaaacaccaaggaacttcatgtgaaacagaaactaggttagtggtctccaatctgatcccaagatttgagaggcggtgccgt

SEQ ID NO: 89418 - DNA, 120 bp, synthetic construct
  source 1..120: mol_type = other DNA
taaaaataaccctttgtttcccattgtactttacaagcaggcggcactctgcgtgtcctggaaaggttgggtctgctgaccttggagggttttttatgatcagtaaggagcagggacata

SEQ ID NO: 89419 - DNA, 120 bp, synthetic construct
  source 1..120: mol_type = other DNA
agtattgacggtagatgcagggtaaaggggaaggaatgggagcaggatttccttatgtataattttaattttattttgactttagaaacaggtaaatgtattacctgcttcaaactgatg

SEQ ID NO: 89420 - DNA, 120 bp, synthetic construct; identical to SEQ ID NO: 573
  source 1..120: mol_type = other DNA

SEQ ID NO: 89421 - DNA, 120 bp, synthetic construct; identical to SEQ ID NO: 574
  source 1..120: mol_type = other DNA

SEQ ID NO: 89422 - DNA, 120 bp, synthetic construct
  source 1..120: mol_type = other DNA
gtttggagggcagagagggcatggcagttccatgccccttcccaaataccttgccctatgcatttctttcatctgactattcatctgtgctttataattaatgaataaatatcagtaaaa

SEQ ID NO: 89423 - DNA, 120 bp, synthetic construct
  source 1..120: mol_type = other DNA
agagctggaagtttgagacctaaagttagcatcagggcccctgagaaaaggaaggagactggagcaaaccgtgacccttatgagctgaattatgcttccccctagaattcatatgttgaa

SEQ ID NO: 89424 - DNA, 120 bp, synthetic construct
  source 1..120: mol_type = other DNA
caaccttccctgcccagtgggagtggagacttgtttttgttgtccctccctgggtagaggatcatgccttatacctgtgcaaaatatatttttctcattcatatttccctagaaactttt

SEQ ID NO: 89425 - DNA, 120 bp, synthetic construct
  source 1..120: mol_type = other DNA
attacactgggtactgtaacatacaaatgcaagctgatactaagctaaattgttccctcgatgaccagtcgccattgaggaacaggtggggtggcaggagggaagaaagcacaggcctct

SEQ ID NO: 89426 - DNA, 120 bp, synthetic construct
  source 1..120: mol_type = other DNA
tggaaagcatggcatatcctaactgttttctgtttctcctcctgtagctctcagtaaattatggagactactgcaaaattcaataaatgctcgcaccggaaaggacagtggaaaatccca

SEQ ID NO: 89427 - DNA, 120 bp, synthetic construct
  source 1..120: mol_type = other DNA
ggagtttgaggctaaagtgaagtgagctatgatcgagcccctgcactccagcctggggaacacacctagaatctgtctgtaagaaaaaaagttaaaacaaacaaacaaacaaacaaacaa

SEQ ID NO: 89428 - DNA, 120 bp, synthetic construct
  source 1..120: mol_type = other DNA
aaaaaataaacacatgaaatgggggggaaagtcatgttatggtcaagtctctatttcaaagcttgaactcaaaacattctttcctatccatgcccctctaactacagacagggcagcatc

SEQ ID NO: 89429 - DNA, 120 bp, synthetic construct
  source 1..120: mol_type = other DNA
gtgtgggtggtatgtgagtggttgtgtgagtggtgtgtgtgttgagtcgtgggtggtatgtgagtggttgtgtgagtggtgtgtgtgattgtgagtggtgtgtgtgttgtgtgaacagtg

SEQ ID NO: 89430 - DNA, 120 bp, synthetic construct
  source 1..120: mol_type = other DNA
gtatttgtacattggctttaaggcacacatggcagaaaataaggacatagtggcaaagacggcttgattgagacaaaagaggaggatggacttctgggggtagaaagcacacagaagcac

SEQ ID NO: 89431 - DNA, 120 bp, synthetic construct
  source 1..120: mol_type = other DNA
tcacatatatatctttttttttttttttgagacagagtcttgctgtgttgcccaggctagagtgcagtggcatgatctcggctcactgcaagctccacctcctgggttcatgtcatcctc

SEQ ID NO: 89432 - DNA, 120 bp, synthetic construct; identical to SEQ ID NO: 575
  source 1..120: mol_type = other DNA

SEQ ID NO: 89433 - DNA, 120 bp, synthetic construct; identical to SEQ ID NO: 576
  source 1..120: mol_type = other DNA

SEQ ID NO: 89434 - DNA, 120 bp, synthetic construct; identical to SEQ ID NO: 577
  source 1..120: mol_type = other DNA

SEQ ID NO: 89435 - DNA, 120 bp, synthetic construct; identical to SEQ ID NO: 578
  source 1..120: mol_type = other DNA

SEQ ID NO: 89436 - DNA, 120 bp, synthetic construct
  source 1..120: mol_type = other DNA
ctacttggcactgaaagcactattaatattttgcttcactttggtctttcaaaaacgtccttctacacaggtttttttggttgtttttatcactaattaagttgactgatataaaccctt

SEQ ID NO: 89437 - DNA, 120 bp, synthetic construct
  source 1..120: mol_type = other DNA
tttgcatcaaatttaaccgatggtggttgtttcattatctgtggttaaaaaaaaaaaaacttttgaggcaattttaaagatggatatctgtctccttatatgtcccttatatcagataat

SEQ ID NO: 89438 - DNA, 120 bp, synthetic construct
  source 1..120: mol_type = other DNA
agaccagcctggccaacatggtaaaaccccatctctactaaaactacaaaacttagccaggtgcagtggcaggtgcctgtaatcctagctactcatgaggctgaggcaggagaatagctt

SEQ ID NO: 89439 - DNA, 120 bp, synthetic construct
  source 1..120: mol_type = other DNA
tattttatgtgtggcccaagacaattcttcttccagtgtggcccagggaagccaaaagactggacacccctgggaaagatatcacaaattgttctagaaagcccactttgaaaatgcgcc

SEQ ID NO: 89440 - DNA, 120 bp, synthetic construct; identical to SEQ ID NO: 579
  source 1..120: mol_type = other DNA

SEQ ID NO: 89441 - DNA, 120 bp, synthetic construct
  source 1..120: mol_type = other DNA
ttttttttttttgagacagagtcttgctctgtcaccaggctagagtgcagtggcgcgatctcagctcaccacaacctctgtctcctgggttaaagtcattctcctgcctcagcctctcca

SEQ ID NO: 89442 - DNA, 120 bp, synthetic construct
  source 1..120: mol_type = other DNA
attatactctcttgcttcaaagtgaacacattatgtataaaaccagaagtagtaatatcaaaatgtatgagatgtatgaggttacagtgaactatgatggtgccactgcactccagcctg

SEQ ID NO: 89443 - DNA, 120 bp, synthetic construct
  source 1..120: mol_type = other DNA
tgtgatctgccctcctcagcctcccacagtgcttggattacaggtgtgagccactgcgcccggcccagaataaatttttaaatttacattgattttctatttcacataaccaaaaaatta

SEQ ID NO: 89444 - DNA, 120 bp, synthetic construct
  source 1..120: mol_type = other DNA
aaatggccaataaacacatgaaaagatactcaacatcatttgccatcaggtaaatgcaaatcaaaaccactaagacatagaaattcacacctactagctgggcgcagtggctcacacatg

SEQ ID NO: 89445 - DNA, 120 bp, synthetic construct
  source 1..120: mol_type = other DNA
cctgggaggcggagcttgcagtgagcccagattgcaccactgcactccagcctgggtaacagagcgagactccctctcaaaataaataaataaataaataaataaaaaataaaaaaacta

SEQ ID NO: 89446 - DNA, 120 bp, synthetic construct; identical to SEQ ID NO: 580
  source 1..120: mol_type = other DNA

SEQ ID NO: 89447 - DNA, 120 bp, synthetic construct
  source 1..120: mol_type = other DNA
tacaaaaaattagcagggcgtggtggcggacgcctgtagtcccagctacttgggaggctgagggaggagaatggcgtgaaaccgggaggcagagcttgcagtgagctgagagcgcgccac

SEQ ID NO: 89448 - DNA, 120 bp, synthetic construct; identical to SEQ ID NO: 581
  source 1..120: mol_type = other DNA

SEQ ID NO: 89449 - DNA, 120 bp, synthetic construct
  source 1..120: mol_type = other DNA
caaaggcatcaggtcccaacctccttccctctttgcccgctctcagaccaaggagttcatcttctcggagctgctgtccaacctgtactcacgtggggaccagaaaacgctgatggaaga

SEQ ID NO: 89450 - DNA, 120 bp, synthetic construct; identical to SEQ ID NO: 15064
  source 1..120: mol_type = other DNA

SEQ ID NO: 89451 - DNA, 120 bp, synthetic construct
  source 1..120: mol_type = other DNA
tgcgatagttaactgagaatgatgatttccaatttcatccatgtccctgcaaaggacatgaactcatcattttttatggctgcatagtattccatggtgtatatgtgccacattttctta

SEQ ID NO: 89452 - DNA, 120 bp, synthetic construct
  source 1..120: mol_type = other DNA
cctctagcgctgggaatcagtcaccgtgctgtccttttggagtcttgtggccaaacaagagaaagctaacccctgacattgcccctccaaagtgcgctaccttcagtgagcctccctgtc

SEQ ID NO: 89453 - DNA, 120 bp, synthetic construct
  source 1..120: mol_type = other DNA
caccagggagccacgaccccatccccgcctccttcctctgtcctatgctagcaataaataagtttcccagccacaaataattattacaacctcctccccatgtgccggctccaacctcag

SEQ ID NO: 89454 - DNA, 120 bp, synthetic construct
  source 1..120: mol_type = other DNA
ccacgacacattctctttacaataattcataaactggtaaaattcattctaagaaaacttggcaaataaaactttggactggaattggcatttctttctctgcttttcgttcccaccatt

SEQ ID NO: 89455 - DNA, 120 bp, synthetic construct
  source 1..120: mol_type = other DNA
ctgtctttaaactgaactcaaagaatgcaaaagcggcaagttcagaaaataaaaggcgagaacaggactttaagtgcattttaaacccacgggctacaaatcgtaccactgttaattagc

SEQ ID NO: 89456 - DNA, 120 bp, synthetic construct
  source 1..120: mol_type = other DNA
ttcattcttgactagagcctgtatgcctgttccagggacatttgaactcgtaaaggatttcttatgatcttcactaaatacattaagaagaatgccaaccagtgcccttttgtgtactgg

SEQ ID NO: 89457 - DNA, 120 bp, synthetic construct
  source 1..120: mol_type = other DNA
aaacacaaataatcatgagtgagtctaacattcaaaggaagtaaatgaattgtgtaggagattaaccccataacttggtttcttatttaaaaatttcttgagcagctgtttgatgatggt

SEQ ID NO: 89458 - DNA, 120 bp, synthetic construct; identical to SEQ ID NO: 582
  source 1..120: mol_type = other DNA

SEQ ID NO: 89459 - DNA, 120 bp, synthetic construct
  source 1..120: mol_type = other DNA
taggcaacttggtgaccgcccgctcacaggaggtcaccacactgatgccgaacttagtgcaggcacccggtcggcataatgaccagctgctctaaaggtctcttccaactcctcaatcct

SEQ ID NO: 89460 - DNA, 120 bp, synthetic construct
  source 1..120: mol_type = other DNA
ttttttttttttaattttagtagagatgaggttttaccacattggccaggttgatctcaaactcccgacctcaagtgattcttctgcctcagcctcccaaagtgctgggattataggcat

SEQ ID NO: 89461 - DNA, 120 bp, synthetic construct; identical to SEQ ID NO: 583
  source 1..120: mol_type = other DNA

SEQ ID NO: 89462 - DNA, 120 bp, synthetic construct; identical to SEQ ID NO: 584
  source 1..120: mol_type = other DNA

SEQ ID NO: 89463 - DNA, 120 bp, synthetic construct; identical to SEQ ID NO: 585
  source 1..120: mol_type = other DNA

SEQ ID NO: 89464 - DNA, 120 bp, synthetic construct
  source 1..120: mol_type = other DNA
ccctcaactctattccccagatcaggaagcggtaggcaggggccaggaatggattttaaaggcaaagttctcagacataatgggaacacgaaccggtaaactctcctcaagctcccaagg

SEQ ID NO: 89465 - DNA, 120 bp, synthetic construct; identical to SEQ ID NO: 586
  source 1..120: mol_type = other DNA

SEQ ID NO: 89466 - DNA, 120 bp, synthetic construct
  source 1..120: mol_type = other DNA
aggattcaaacccagaattcctttttttttttttgagacagagtcttgctctgtcaccaggctggagtgcggtggcataatcttggccactgcaagctccacctcccaggttcacaccat

SEQ ID NO: 89467 - DNA, 120 bp, synthetic construct
  source 1..120: mol_type = other DNA
cagtacctctcaaacttttatatcaatgtgtcctcatggcagaaggcagcctttctcttaaatcagaatttatcagaaagaggacaacccaagcctcatttcagagagaggtctggtata

SEQ ID NO: 89468 - DNA, 120 bp, synthetic construct; identical to SEQ ID NO: 587
  source 1..120: mol_type = other DNA

SEQ ID NO: 89469 - DNA, 120 bp, synthetic construct
  source 1..120: mol_type = other DNA
ctatatttttcatctttgattacagtacaaaaattaccagtattaccttaactgagatacagatcctataaaaatggaaaatgcatagcatgcttgatgattaatgaagcagactatatt

SEQ ID NO: 89470 - DNA, 120 bp, synthetic construct
  source 1..120: mol_type = other DNA
cgctctgtcacccacgctggagtgcagtggcgtgatcttggctcactgcaagctccgcctcccgggttcacaacattctcctgcctcaacctcctgagtagctgggactacaagcgcccg

SEQ ID NO: 89471 - DNA, 120 bp, synthetic construct; identical to SEQ ID NO: 588
  source 1..120: mol_type = other DNA

SEQ ID NO: 89472 - DNA, 120 bp, synthetic construct
  source 1..120: mol_type = other DNA
caagcaatcctcctgcctcagcctcccaagtagctgggactgcagatgggtgtcaccacacctagctattttttttttttgtaaagatggggtctcactatgttgcccaaactagtcttg

SEQ ID NO: 89473 - DNA, 120 bp, synthetic construct; identical to SEQ ID NO: 589
  source 1..120: mol_type = other DNA

SEQ ID NO: 89474 - DNA, 120 bp, synthetic construct
  source 1..120: mol_type = other DNA
cacacgcgcacacacacacacacacacacacacacacacagtttttcctgctaatcattttacgatgaaacagccaagtagctaacccagagcccacaaaggcagagtaaaaattctaac

SEQ ID NO: 89475 - DNA, 120 bp, synthetic construct
  source 1..120: mol_type = other DNA
aacacagcagcgcgcagccaggcctggggcagagggatcactcaaacagcaccagaggctgcattcctacttttcttccgtcaacaagtccattttcattgttagtttctccttcaacac

SEQ ID NO: 89476 - DNA, 120 bp, synthetic construct
  source 1..120: mol_type = other DNA
cacctccaagcctgcatccttcatgcacctccttcctttgcctgggttgccgttccttttctctctgctcttccttctcttttttttttttttttttttttttttttttgagacggagtc

SEQ ID NO: 89477 - DNA, 120 bp, synthetic construct; identical to SEQ ID NO: 27081
  source 1..120: mol_type = other DNA

SEQ ID NO: 89478 - DNA, 120 bp, synthetic construct; identical to SEQ ID NO: 27082
  source 1..120: mol_type = other DNA

SEQ ID NO: 89479 - DNA, 120 bp, synthetic construct; identical to SEQ ID NO: 23298
  source 1..120: mol_type = other DNA

SEQ ID NO: 89480 - DNA, 120 bp, synthetic construct; identical to SEQ ID NO: 23299
  source 1..120: mol_type = other DNA

SEQ ID NO: 89481 - DNA, 120 bp, synthetic construct; identical to SEQ ID NO: 23300
  source 1..120: mol_type = other DNA

SEQ ID NO: 89482 - DNA, 120 bp, synthetic construct; identical to SEQ ID NO: 23301
  source 1..120: mol_type = other DNA

SEQ ID NO: 89483 - DNA, 120 bp, synthetic construct; identical to SEQ ID NO: 87755
  source 1..120: mol_type = other DNA

SEQ ID NO: 89484 - DNA, 120 bp, synthetic construct
  source 1..120: mol_type = other DNA
tgcttcacattgttgcacaaaggtacagtggagtgagactgagtaagaggacagaaatagtggggggtttgtctcagctcactaattacttatttaaccttgggcaagatacttaaagct

SEQ ID NO: 89485 - DNA, 120 bp, synthetic construct
  source 1..120: mol_type = other DNA
agttatatgtgaacataatagctgctttctttaaaacggttactttgagaaactgaatacctatttttttttttttttttttttttgagacggagtttcactcttgttgtccaggctgga

SEQ ID NO: 89486 - DNA, 120 bp, synthetic construct; identical to SEQ ID NO: 8555
  source 1..120: mol_type = other DNA

SEQ ID NO: 89487 - DNA, 120 bp, synthetic construct
  source 1..120: mol_type = other DNA
atacacaaatggtatactttgtctccctctgtgattagttttttcactatcatttagtttttaagatttattcctattgacataaatagctatagtcttttcaattactgtgttgcattt

SEQ ID NO: 89488 - DNA, 120 bp, synthetic construct
  source 1..120: mol_type = other DNA
ggacacacgaggctgcctcgctgcacacccgagaaagtttcagccaaacttccggcggcggctgaggcggcggccgaggagcggcggactcggggcgcggggagtcgaggcatttgcacc

SEQ ID NO: 89489 - DNA, 120 bp, synthetic construct
  source 1..120: mol_type = other DNA
tgtgtccagacccaggaatgtggtgtgacgatcaccaattcctccaacctggcagcagcatttgctgctcctttggcatggctgggggtggggcacgggcgggtgagaaaaagtggatac

SEQ ID NO: 89490 - DNA, 120 bp, synthetic construct; identical to SEQ ID NO: 8553
  source 1..120: mol_type = other DNA

SEQ ID NO: 89491 - DNA, 120 bp, synthetic construct; identical to SEQ ID NO: 8552
  source 1..120: mol_type = other DNA

SEQ ID NO: 89492 - DNA, 120 bp, synthetic construct; identical to SEQ ID NO: 8551
  source 1..120: mol_type = other DNA

SEQ ID NO: 89493 - DNA, 120 bp, synthetic construct; identical to SEQ ID NO: 8737
  source 1..120: mol_type = other DNA

SEQ ID NO: 89494 - DNA, 120 bp, synthetic construct; identical to SEQ ID NO: 8738
  source 1..120: mol_type = other DNA

SEQ ID NO: 89495 - DNA, 120 bp, synthetic construct; identical to SEQ ID NO: 87767
  source 1..120: mol_type = other DNA

SEQ ID NO: 89496 - DNA, 120 bp, synthetic construct; identical to SEQ ID NO: 8739
  source 1..120: mol_type = other DNA

SEQ ID NO: 89497 - DNA, 120 bp, synthetic construct
  source 1..120: mol_type = other DNA
cctttggtttctaatgatattggttaattcatttgttaactgctattttctgtagctacttgaaagttcttatctgactgtatcgtaaatcagcatgctttcagctgtatatgtctagga

SEQ ID NO: 89498 - DNA, 120 bp, synthetic construct; identical to SEQ ID NO: 110
  source 1..120: mol_type = other DNA

SEQ ID NO: 89499 - DNA, 120 bp, synthetic construct
  source 1..120: mol_type = other DNA
gacaggggtttgaatcctggctacacccctcactaaccataggccaacatccaaagctgtgaacctaagttccaaattccttacctataatgtagaaaaatattgtctactccaaaggat

SEQ ID NO: 89500 - DNA, 120 bp, synthetic construct
  source 1..120: mol_type = other DNA
aaccagtgaacaatccacaggctgcaaagatgatgttcctatttcctcatgaaggttcccaatcactcatccacttttgattaaagaaaagtgaatgcaccaagaagccagtctgtactg

SEQ ID NO: 89501 - DNA, 120 bp, synthetic construct; identical to SEQ ID NO: 87773
  source 1..120: mol_type = other DNA

SEQ ID NO: 89502 - DNA, 120 bp, synthetic construct; identical to SEQ ID NO: 87774
  source 1..120: mol_type = other DNA

SEQ ID NO: 89503 - DNA, 120 bp, synthetic construct; identical to SEQ ID NO: 87775
  source 1..120: mol_type = other DNA

SEQ ID NO: 89504 - DNA, 120 bp, synthetic construct; identical to SEQ ID NO: 87776
  source 1..120: mol_type = other DNA

SEQ ID NO: 89505 - DNA, 120 bp, synthetic construct; identical to SEQ ID NO: 8742
  source 1..120: mol_type = other DNA

SEQ ID NO: 89506 - DNA, 120 bp, synthetic construct
  source 1..120: mol_type = other DNA
tgtgtgtgcgtgtgtgtgtgtgtgtgtgtgtgtgtgtgtgtgtgtgtgtgtgttgggaggaggaatagaccttggaattgttttttcaaaactttttttataatagtgcctaatctcagt

SEQ ID NO: 89507 - DNA, 120 bp, synthetic construct; identical to SEQ ID NO: 87779
  source 1..120: mol_type = other DNA

SEQ ID NO: 89508 - DNA, 120 bp, synthetic construct; identical to SEQ ID NO: 87780
  source 1..120: mol_type = other DNA

SEQ ID NO: 89509 - DNA, 120 bp, synthetic construct; identical to SEQ ID NO: 87781
  source 1..120: mol_type = other DNA

SEQ ID NO: 89510 - DNA, 120 bp, synthetic construct; identical to SEQ ID NO: 87782
  source 1..120: mol_type = other DNA

SEQ ID NO: 89511 - DNA, 120 bp, synthetic construct; identical to SEQ ID NO: 87783
  source 1..120: mol_type = other DNA

SEQ ID NO: 89512 - DNA, 120 bp, synthetic construct; identical to SEQ ID NO: 8744
  source 1..120: mol_type = other DNA

SEQ ID NO: 89513 - DNA, 120 bp, synthetic construct
  source 1..120: mol_type = other DNA
gacccgtcttctctgagcagcaggccatgcttctctgttcagtagttcagttttcactaacttaactgcagatgtgttcttggagggatttatttctaatcaattgaattatgggtactt

SEQ ID NO: 89514 - DNA, 120 bp, synthetic construct
  source 1..120: mol_type = other DNA
atgagatcactgtttatgagcagccttctcaggagtgagaaatagagggttgtgagctgactttctgatttgtttggctgaggtgttcacacaagccatagaatgctttgtaggcttggg

SEQ ID NO: 89515 - DNA, 120 bp, synthetic construct
  source 1..120: mol_type = other DNA
attaaagacttggttatcctctctcggaggaagatagaaaactactgggcctgctcattaacagtttagcttggctgacatttttcaagcacttaccatggtattatagctgggctgaag

SEQ ID NO: 89516 - DNA, 120 bp, synthetic construct
  source 1..120: mol_type = other DNA
cagaaaaaaataataatgtgtacttaatgatatttgatgaggagctgataatctcaatgtccaaatcagttcctcttaaaaacgccagtcctccaactccatcagccttttgattactca

SEQ ID NO: 89517 - DNA, 120 bp, synthetic construct; identical to SEQ ID NO: 111
  source 1..120: mol_type = other DNA

SEQ ID NO: 89518 - DNA, 120 bp, synthetic construct
  source 1..120: mol_type = other DNA
gtggtggcgggcacctatagtcccagctactcgggaggctgaggcaggagaatggcgtgaacccaggaggaggagcttgcagtgagctgagattgcgccactgcactccagcctgggcga

SEQ ID NO: 89519 - DNA, 120 bp, synthetic construct; identical to SEQ ID NO: 8457
  source 1..120: mol_type = other DNA

SEQ ID NO: 89520 - DNA, 120 bp, synthetic construct
  source 1..120: mol_type = other DNA
ctcttattgcttttttttttttttttttttttcctttcaatcaagacaaatttcaaggaggaagacagatgtttctccacttcgtttttatttaaatgtaccacttgggatttgaagctt

SEQ ID NO: 89521 - DNA, 120 bp, synthetic construct; identical to SEQ ID NO: 8455
  source 1..120: mol_type = other DNA

SEQ ID NO: 89522 - DNA, 120 bp, synthetic construct; identical to SEQ ID NO: 8746
  source 1..120: mol_type = other DNA

SEQ ID NO: 89523 - DNA, 120 bp, synthetic construct; identical to SEQ ID NO: 8032
  source 1..120: mol_type = other DNA

SEQ ID NO: 89524 - DNA, 120 bp, synthetic construct; identical to SEQ ID NO: 87796
  source 1..120: mol_type = other DNA

SEQ ID NO: 89525 - DNA, 120 bp, synthetic construct; identical to SEQ ID NO: 112
  source 1..120: mol_type = other DNA

SEQ ID NO: 89526 - DNA, 120 bp, synthetic construct; identical to SEQ ID NO: 87798
  source 1..120: mol_type = other DNA

SEQ ID NO: 89527 - DNA, 120 bp, synthetic construct; identical to SEQ ID NO: 8747
  source 1..120: mol_type = other DNA

SEQ ID NO: 89528 - DNA, 120 bp, synthetic construct; identical to SEQ ID NO: 87800
  source 1..120: mol_type = other DNA

SEQ ID NO: 89529 - DNA, 120 bp, synthetic construct; identical to SEQ ID NO: 8453
  source 1..120: mol_type = other DNA

SEQ ID NO: 89530 - DNA, 120 bp, synthetic construct
  source 1..120: mol_type = other DNA
agggaggggagagcattaggatgaatacctaatgcacgtggggcttaaaacctggatgacgggttgataggtgcagcaaaccaccatggcacatgtatacctatgaaacaaacctgcaca

SEQ ID NO: 89531 - DNA, 120 bp, synthetic construct; identical to SEQ ID NO: 113
  source 1..120: mol_type = other DNA

SEQ ID NO: 89532 - DNA, 120 bp, synthetic construct; identical to SEQ ID NO: 8537
  source 1..120: mol_type = other DNA

SEQ ID NO: 89533 - DNA, 120 bp, synthetic construct
  source 1..120: mol_type = other DNA
ctgtagatgggtgcttgcatttgagaatgtccactttttgctaaagtgctgatctaaaaactacactttaaggtaaattattataaatataaagtgttataaaatataactttgtgtcac

SEQ ID NO: 89534 - DNA, 120 bp, synthetic construct
  source 1..120: mol_type = other DNA
ttgaacaactacatacaaacattattttgattagtgagttttttggcactctcttaaatttcacaagagaggcctgtgccttacttgcctcaccatggtcccagccctgccattcactgg

SEQ ID NO: 89535 - DNA, 120 bp, synthetic construct; identical to SEQ ID NO: 114
  source 1..120: mol_type = other DNA

SEQ ID NO: 89536 - DNA, 120 bp, synthetic construct
  source 1..120: mol_type = other DNA
aattcctgggctcaagtgatcctcccacttctgcctcccaaagggctggaattacaggcctgaaccactgtgcctggccagttagtagcttgttaacacatagcaacataatttccatac

SEQ ID NO: 89537 - DNA, 120 bp, synthetic construct
  source 1..120: mol_type = other DNA
gttttatgaaagaaaagtgaaaataaagactaagaaaggcattatttaagtgatgggtgatattattcagcaaacacattcaactagagcattctatccagtttttttgccttcacgtaa

SEQ ID NO: 89538 - DNA, 120 bp, synthetic construct
  source 1..120: mol_type = other DNA
aggccaaaaaggtctgagggaaggagcataattgctcccagctgccctctcttcctgtccccaggtcctctccttcaccctcactctaggcattctacctccaaacgttcaagttaacat

SEQ ID NO: 89539 - DNA, 120 bp, synthetic construct
  source 1..120: mol_type = other DNA
taggagacatcacctattcttttctaaattttataagaattgatgatagcatcatgagatgggaagtgagtaagataagcgtttatgcttgtagagaggatgcataaaaatgaaatctgg

SEQ ID NO: 89540 - DNA, 120 bp, synthetic construct
  source 1..120: mol_type = other DNA
gctagattctgtagtgactgccattgaaaattaaagaagatctctagaaagaaaagtgttggagccttctttccattccccaatgttggtggatgaccaccttcaaagttctgaagtcca

SEQ ID NO: 89541 - DNA, 120 bp, synthetic construct
  source 1..120: mol_type = other DNA
ggattgcaatcccttgcaataactccacagcccataccttgggaacaactgagctaactcattcagttttgtccattacatcgaagggtgttttttgtaaactcatatgtctagaatgtg

SEQ ID NO: 89542 - DNA, 120 bp, synthetic construct
  source 1..120: mol_type = other DNA
aaggaaatactatagcttactcagcaagaaggaaaaacaaaaagaactttaaaaaaaagtatttgtgtatagattggtgtccagaactgggacgcttgtggtaaaacacactttctagtg

SEQ ID NO: 89543 - DNA, 120 bp, synthetic construct
  source 1..120: mol_type = other DNA
gcatgcctctctttttcttcttgtatgtggtgggattttgctttgttgttgttgttgtttttttttgaatggccaaatcctcgttttaaaaaaaaaaaaaaaaaaaaaagctaaagacag

SEQ ID NO: 89544 - DNA, 120 bp, synthetic construct
  source 1..120: mol_type = other DNA
cgaagtatgttctttcagagttccaatgctagagaagagagagtaagtagaagtcactgagagacattgaagagacagttatgaaaataattaataaactccctacaggagggaaacatt

SEQ ID NO: 89545 - DNA, 120 bp, synthetic construct
  source 1..120: mol_type = other DNA
gtgggatgatttgtagaaggcttactataggacaggtttacagcagatttttgaaaaaagggtggaagaaaggaacctaagttggagatataccagaagggaagcatgatgtttctcact

SEQ ID NO: 89546 - DNA, 120 bp, synthetic construct
  source 1..120: mol_type = other DNA
atcctgcctcttccatctactagctgtgaattttttttttttttttttgagagggagtctcgctctgtcgcccaggctggagtgcagtggcgcgatcttggctcactgcaacctccaact

SEQ ID NO: 89547 - DNA, 120 bp, synthetic construct
  source 1..120: mol_type = other DNA
acatggatgaaccttgaaaacatgctaagtgaaagaagccacacacaaaaggccacatattatataattccatttatatgaaatgtccagaatatgcaaatccgtagagatagaaagtag

SEQ ID NO: 89548 - DNA, 120 bp, synthetic construct
  source 1..120: mol_type = other DNA
aactgaacatatgggactggaacagtgtattttggagtcagttacaggaaggaagttgtttaaaaccaagtgaacaacagtaacaaatgcatttgagagaaagagcagtgcagtccagac

SEQ ID NO: 89549 - DNA, 120 bp, synthetic construct
  source 1..120: mol_type = other DNA
gcatcttttacttagtaattttgttttcgtcttcagctattagaatgtaaactccaagagtgtaagaatttttctgccaggactcaaaaggacatgggagtacgtggttaagttctctaa

SEQ ID NO: 89550 - DNA, 120 bp, synthetic construct
  source 1..120: mol_type = other DNA
gagctatgatcgcaccactgcactctagcctgggtgacagagtgagaccctgtctcaaaaaaaaaaatatgtacaccaggatggggaatcagagtttacttcactaaaagaaataagtac

SEQ ID NO: 89551 - DNA, 120 bp, synthetic construct; identical to SEQ ID NO: 8438
  source 1..120: mol_type = other DNA

SEQ ID NO: 89552 - DNA, 120 bp, synthetic construct
  source 1..120: mol_type = other DNA
ttcttcgtacatccggaaacacaccagtccccaactgaaacactcttacataaagttaacgatacttaaatgctgatgtgaagtcaataaatcttatgtcacatgataaaggagaaagga

SEQ ID NO: 89553 - DNA, 120 bp, synthetic construct
  source 1..120: mol_type = other DNA
agcctgagcccactgctgcacttctttagccataaagtgaatgccttggtcagaggcaatgctgtgtggaataccatgacagtggataaggcattccatgagtccgcggatggtagtctt

SEQ ID NO: 89554 - DNA, 120 bp, synthetic construct
  source 1..120: mol_type = other DNA
tcccacaacacatgggaattctgggagatacaattcaagttgagatttgggtggggacactaccaaaccatatcattcatcaaaaggtgttggtggggtagagggtagttaggatgatcc

SEQ ID NO: 89555 - DNA, 120 bp, synthetic construct
  source 1..120: mol_type = other DNA
agcagaggcagcaagttagtgcctatacataatatatatggaaaccaaattcagggttgattctttctttctttctccctccctttctttctttctttctttctttctttctttctttct

SEQ ID NO: 89556 - DNA, 120 bp, synthetic construct
  source 1..120: mol_type = other DNA
cgtcccaccaccccacgacaggccccggtttgtgatgttccccttcctgtgtccaagtgttctcattgttcaattcccacctatgagtgagaacatgcggtgtttggttttttgtccttg

SEQ ID NO: 89557 - DNA, 120 bp, synthetic construct
  source 1..120: mol_type = other DNA
ggaacttttgagtacagttgccaagatagggagagttcactaggaaaacagaagggaagttgatttttttttttttgaaatagagtcttgctgtgtcgcccaggctggagtgcagtggta

SEQ ID NO: 89558 - DNA, 120 bp, synthetic construct
  source 1..120: mol_type = other DNA
agggaggagttttatgggcccactgtggtccataaactgagcaggggataatttagcatgtcagggtttatgatgatgagtggctagaaaattgtttattgtcccttttgtagaaacagt

SEQ ID NO: 89559 - DNA, 120 bp, synthetic construct
  source 1..120: mol_type = other DNA
tattttggaggaattaaaggtcatagtttggtcctcagtataaaatcaactggtaatttgttcatttcatttggtaaaaatgtattgactgcctgctatgttctaggcaccatgctgtgt

SEQ ID NO: 89560 - DNA, 120 bp, synthetic construct
  source 1..120: mol_type = other DNA
aaaatgtcagttttctcttcattgaatctccccattcccactcctcatgctaatctcccctcccacacacacacacaccatcagtgagtaaataagtgtcttgcgttaaactacaaccag

SEQ ID NO: 89561 - DNA, 120 bp, synthetic construct; identical to SEQ ID NO: 115
  source 1..120: mol_type = other DNA

SEQ ID NO: 89562 - DNA, 120 bp, synthetic construct
  source 1..120: mol_type = other DNA
ggttagggccaataatggggagagaaagaggtagactagttttgtgtttgtggctattttaatagagtagcacaagtaatcaaaaaacagtaggctgttttgaatttactggctgtccct

SEQ ID NO: 89563 - DNA, 120 bp, synthetic construct
  source 1..120: mol_type = other DNA
aaaaaaagaaaagaaaagaaaatgacacatgcccccaagtgtgagaatgcaagagggaatccctgacctatccctatccaaccagttttcttggcacacaccttccattctctgaatgag

SEQ ID NO: 89564 - DNA, 120 bp, synthetic construct
  source 1..120: mol_type = other DNA
acagtctacccaaagtaggggaaaggctatatgaaaagttacaaggcacttcttaaaaatatatcttaggtttttagggaaaggtaaacagacaagtttccagacccgtgggtggaatgg

SEQ ID NO: 89565 - DNA, 120 bp, synthetic construct; identical to SEQ ID NO: 8525
  source 1..120: mol_type = other DNA

SEQ ID NO: 89566 - DNA, 120 bp, synthetic construct
  source 1..120: mol_type = other DNA
ttactcctgtaatcccagcacttttggaggcctaggtgggaggatcgcttgaggccagaagttcaaaaccagcctgagcaacatagcaagaccttgtctccatgaaaaataaaaaactag

SEQ ID NO: 89567 - DNA, 120 bp, synthetic construct
  source 1..120: mol_type = other DNA
aatttatactcaaagcatgcttgaatttgaaactagggcttccactcttccaaagttggattgtcactacctcaggcatgtgtcccgaagggctcatgtctctgttgtactcaaagttca

SEQ ID NO: 89568 - DNA, 120 bp, synthetic construct
  source 1..120: mol_type = other DNA
gaatactcttcccgtgacccattctggtcattcttccagcatcacaaaaaccaaaaaatggaaatatggccaaatacgtgattagctgtccctcatcttcaggtttcttatctgttactt

SEQ ID NO: 89569 - DNA, 120 bp, synthetic construct
  source 1..120: mol_type = other DNA
gagacctctatataaatgatttgatcacttgataccttgaaaagaggtcttgtggcactagaatgacatctataagtgacaagtttaaaatgtagtgctcagtgacattaaaaaacacat

SEQ ID NO: 89570 - DNA, 120 bp, synthetic construct
  source 1..120: mol_type = other DNA
aggtggagtcagggactggggagaagaaacccaaacatatgatgggttaaaaactggtgaaatcaaatcggtttaatgaggactgagggatgtcagtaactgaaattcttaacttactgt

SEQ ID NO: 89571 - DNA, 120 bp, synthetic construct
  source 1..120: mol_type = other DNA
aaggattcttctgcctcagcctcccgattagtggtgattacagttgcccgccacgatgcccatctactttttgtatttttagtggagatggggtttctccacgttgcccaggctagtctc

SEQ ID NO: 89572 - DNA, 120 bp, synthetic construct
  source 1..120: mol_type = other DNA
actgtgagttctgactccacttcgttgtggttgaatcatcttgtcaacttccttgatgcgcccttgagtttctctttcttcgtctttaaattttggaggatcagatgccagaaagtcagg

SEQ ID NO: 89573 - DNA, 120 bp, synthetic construct
  source 1..120: mol_type = other DNA
ggtctccttgaggacattgtctcagaagtctctgttgcaatatttgaacggatcactcaaccctttctactcttaaattttctctaccgtctcaccttaggcaatataaagtcctgtttc

SEQ ID NO: 89574 - DNA, 120 bp, synthetic construct
  source 1..120: mol_type = other DNA
tttcctgctccatcgggcaatgcatttctgatgtggagggccaccatcaagatgtggccaaataccgaaaagaccttttgcttcccatatcactggaggcttgtgcagcctctctctgga

SEQ ID NO: 89575 - DNA, 120 bp, synthetic construct
  source 1..120: mol_type = other DNA
ctgtctacaaccagagttgagttgacttcgtcttcctcaaatgtgattttgatgttcttgtgaggctggttggagtcacaagggccgtggctatttgaacaagtgatggcacattcctcc

SEQ ID NO: 89576 - DNA, 120 bp, synthetic construct
  source 1..120: mol_type = other DNA
ctctgcactgcagcctgcgcgacagagtgagactccgtctcaaacaaaaaaaccaaaaaagaaaattaagcaaaacgaaatcttttgtgctacacagaaacattggccactcatggggta

SEQ ID NO: 89577 - DNA, 120 bp, synthetic construct
  source 1..120: mol_type = other DNA
caaactcctgacctcatgatctgcccgcctcagcctcccaaagtgctgggattacaggagtgagccaccatgcacggcccctactccctgctcttgatgctgtcacttatagacagcaca

SEQ ID NO: 89578 - DNA, 120 bp, synthetic construct
  source 1..120: mol_type = other DNA
cttgtccttgaaattcccagtaaaagggaaaccatcagtcccatagtcctaggggctttcccaactgtacaagaaatcactacttcatgccccagtgcagtgttttagaggagaggctgc

SEQ ID NO: 89579 - DNA, 120 bp, synthetic construct
  source 1..120: mol_type = other DNA
gaaaagaaggacagggtcgagaaggcaacattgattgagtgaaagaatgagaagccgcagtcagtcaggaggtgattctcactaagggtaagtggggtggtgatggcacaccattttgag

SEQ ID NO: 89580 - DNA, 120 bp, synthetic construct
  source 1..120: mol_type = other DNA
gttttaaaggacaggaaggaggctgggatgggagcaggcttgttagagtgaaaagagctctggactaagaatgaaggttcccaggctgtcttttcgacaatgttcttagtaactgtcaga

SEQ ID NO: 89581 - DNA, 120 bp, synthetic construct
  source 1..120: mol_type = other DNA
ccgcattcgcttggccacagtatgtgaaatataatccagcttagacacagggtgcggtagctgtcatgtttctctatgtgtgctgagtgtcatgtctgcaccttacagggatagctgagt

SEQ ID NO: 89582 - DNA, 120 bp, synthetic construct; identical to SEQ ID NO: 116
  source 1..120: mol_type = other DNA

SEQ ID NO: 89583 - DNA, 120 bp, synthetic construct; identical to SEQ ID NO: 8755
  source 1..120: mol_type = other DNA

SEQ ID NO: 89584 - DNA, 120 bp, synthetic construct
  source 1..120: mol_type = other DNA
gtgtggagagttctgtagatgtcttttaggtctgcttggtggagagctgagttcaagtcctggatatccttgttaagcttctgtctcattgatctgtttaatattgacagtggggtgtta

SEQ ID NO: 89585 - DNA, 120 bp, synthetic construct
  source 1..120: mol_type = other DNA
gtgaatagtgccgcaataaacatatgtgtgcatgtgtctttacagcagcatgatttataatcctttgggtatacacccagtaatgggatggctgggtcaaatggtatttctagttctaga

SEQ ID NO: 89586 - DNA, 120 bp, synthetic construct
  source 1..120: mol_type = other DNA
tgaagcaagaagagaagtttagagaaaaaagagtaaaaagaaatgaacaagcctccaataaatatgggactatgtggaaagaccaaatctacgtttgattggtgtactgaaagtgacggg

SEQ ID NO: 89587 - DNA, 120 bp, synthetic construct; identical to SEQ ID NO: 8756
  source 1..120: mol_type = other DNA

SEQ ID NO: 89588 - DNA, 120 bp, synthetic construct; identical to SEQ ID NO: 87856
  source 1..120: mol_type = other DNA

SEQ ID NO: 89589 - DNA, 120 bp, synthetic construct
  source 1..120: mol_type = other DNA
aggcaataatctgttacctcattaatggatctgtcctttttcttttcaaactcttccttacattagccatgaaatctagctggggctgtgtggtttctgattccccctggcttattcttt

SEQ ID NO: 89590 - DNA, 120 bp, synthetic construct
  source 1..120: mol_type = other DNA
tgacacctggagatgccaggtccagggaaaacaagagtgtattcaatttcatgttttcaacgaaggttgaattacgcctactgacattgctgttggttttcattgcagtagatgtttagg

SEQ ID NO: 89591 - DNA, 120 bp, synthetic construct
  source 1..120: mol_type = other DNA
atccttcactctaatttcagcgtctaaaatcctcgctaccatgaacaatctgagtatttgatgagacagggctgaatagtgcagtttttctcctagcaaccatttgggggcatttgcttt

SEQ ID NO: 89592 - DNA, 120 bp, synthetic construct
  source 1..120: mol_type = other DNA
ttcgttcttttctacctggccctggtttatcccaacctaaaggcaataattcattccctcagtaatggatctgtcctttttctttttaaacagttccttatcttagccatgaaatctagc

SEQ ID NO: 89593 - DNA, 120 bp, synthetic construct
  source 1..120: mol_type = other DNA
gatcagccttcaggcctcctgaagaatatctctcacagtgtcctattctcatgctgaggagcctgaagtccctgtgtgaggattagacagtggattgttatgtgtgtaggagaaccagct

SEQ ID NO: 89594 - DNA, 120 bp, synthetic construct
  source 1..120: mol_type = other DNA
ctatggtgatcagccttcaggcctcctgaagaatatctctcacagtgtcctattctcatgctgaggagcctgaagtccctgtgtgaagattagacagtggattgttatgtgtgtaggaga

SEQ ID NO: 89595 - DNA, 120 bp, synthetic construct
  source 1..120: mol_type = other DNA
tcagcttaatatatctgtccatgtctgaacttattgcagaaattgaaaagtaccaagaagtggaagaagaccaagacccatcatgccccaggtaactttgagcaattatggatgcttaat

SEQ ID NO: 89596 - DNA, 120 bp, synthetic construct
  source 1..120: mol_type = other DNA
ttggaagcctagacatgaaatgggtcagtgagcaaggctccattcctagtctccagccatgcctgtggcaacctgagcccgctctcagcacattggacccaggcagatgtaaaaaattca

SEQ ID NO: 89597 - DNA, 120 bp, synthetic construct
  source 1..120: mol_type = other DNA
ctctctctctctctctgtgtgtgtgtgtgtgtgtgtgtgtgtgtgtgtgtgtgtctatctgtctttctctttcattcttttccatttggccctgttctgtcccaacatgaaggcaataat

SEQ ID NO: 89598 - DNA, 120 bp, synthetic construct
  source 1..120: mol_type = other DNA
aacaatccactgtctaatcctcacacagggacctcaggctcctcagcataagaataggacactgtgagagatatatttcaggaggcctgaaggctggtcatgatagaaattcctcggttt

SEQ ID NO: 89599 - DNA, 120 bp, synthetic construct
  source 1..120: mol_type = other DNA
actcaccatccatgtcaatagccaagccaacacgctgttgctccaatatgtaaaaggcacttctgtagggctggcatgagtcagtcagttcaagacaacctgaaggagttgaataacatc

SEQ ID NO: 89600 - DNA, 120 bp, synthetic construct
  source 1..120: mol_type = other DNA
aataacatctatccagtgagtcctgcaagacttcaggctctactacctccagcagctccctgctgagcctggaaaaggaggaaaaagtaaagaataagccaggggaaatcagacacaaca

SEQ ID NO: 89601 - DNA, 120 bp, synthetic construct
  source 1..120: mol_type = other DNA
gtgactttcgcaattgtggatgcttaattctgtgttaacacctggaggcaacagattcagggaaaccagagtgtgtttgatgtcatgttttcaacgaaggctgaattactcctcctgtca

SEQ ID NO: 89602 - DNA, 120 bp, synthetic construct
  source 1..120: mol_type = other DNA
ttgagcaattatggatgcttaattctgtgttgacacctggagatgccaggtccagggaaaacaagagtgtgttcaatttcatgttttcaacgaaggttgaattactcctactgacattgc

SEQ ID NO: 89603 - DNA, 120 bp, synthetic construct; identical to SEQ ID NO: 89596
  source 1..120: mol_type = other DNA

SEQ ID NO: 89604 - DNA, 120 bp, synthetic construct; identical to SEQ ID NO: 89597
  source 1..120: mol_type = other DNA

SEQ ID NO: 89605 - DNA, 120 bp, synthetic construct; identical to SEQ ID NO: 87911
  source 1..120: mol_type = other DNA

SEQ ID NO: 89606 - DNA, 120 bp, synthetic construct
  source 1..120: mol_type = other DNA
tttactcatttgaggaagagcatatcagcttcgccctttacttggacaataggttttttactttgacggtgacaagtctccatctggtgttccagatgttagtcatattcccacaatagg

SEQ ID NO: 89607 - DNA, 120 bp, synthetic construct
  source 1..120: mol_type = other DNA
tcattgagccagacagctgacctgtcttctataaacaagtccatgtcaccaccatccatgacaacaacaaaaagatgaggaaatatttggggttcaaaataactaaagaaatgcagctac

SEQ ID NO: 89608 - DNA, 120 bp, synthetic construct; identical to SEQ ID NO: 117
  source 1..120: mol_type = other DNA

SEQ ID NO: 89609 - DNA, 120 bp, synthetic construct
  source 1..120: mol_type = other DNA
tggctcccgtgaaagatacatttgcggaatgtactcaaattagaagcatcatgtaaaccctataatgtagcaatagtgcatcaacttccctacactatagaaacatctgcggtgtagaca

SEQ ID NO: 89610 - DNA, 120 bp, synthetic construct
  source 1..120: mol_type = other DNA
tgagcaaggccttggaagaccggagagattggagtggtaagtcgcgctggtcacgttggacacctgcgcattgggagattctggagccagaaggatagccgaatggccttggcccgccct

SEQ ID NO: 89611 - DNA, 120 bp, synthetic construct
  source 1..120: mol_type = other DNA
gccgtattatttgcaatcataaaatagtagcgccaaagtaatttcaaagatacatgaaaatcgttttatttatttaacaaacacgaacaattgaacaaaccatggaagcaagtccttttg

SEQ ID NO: 89612 - DNA, 120 bp, synthetic construct; identical to SEQ ID NO: 118
  source 1..120: mol_type = other DNA

SEQ ID NO: 89613 - DNA, 120 bp, synthetic construct
  source 1..120: mol_type = other DNA
atatgtaattccttaaatatataattttaatacaatttttttttttgagatggagtctcactctgtctcccaggctggagtgcagtggcaccatcttggctcactgcaagctccacctcc

SEQ ID NO: 89614 - DNA, 120 bp, synthetic construct; identical to SEQ ID NO: 197
  source 1..120: mol_type = other DNA

SEQ ID NO: 89615 - DNA, 120 bp, synthetic construct; identical to SEQ ID NO: 198
  source 1..120: mol_type = other DNA

SEQ ID NO: 89616 - DNA, 120 bp, synthetic construct; identical to SEQ ID NO: 199
  source 1..120: mol_type = other DNA

SEQ ID NO: 89617 - DNA, 120 bp, synthetic construct
  source 1..120: mol_type = other DNA
acatacacttcagagctgtaggggtcaacttagagactcaaaaatctcacccataatcctgccctaaacaccagggctagggaacactgtggccctcaggtgattttctttagccaggtc

SEQ ID NO: 89618 - DNA, 120 bp, synthetic construct
  source 1..120: mol_type = other DNA
tatttacatttcttcgttctagtcatttgtattcttcgtaagtgtgagagtgtgtgtgtgtgtgtgtctgtgtgtgtgtctgtgtgtgcctttggcatttaggaagggttgtatagctca

SEQ ID NO: 89619 - DNA, 120 bp, synthetic construct
  source 1..120: mol_type = other DNA
tccatcctgtagagaacaggagtcaggagccgctggcaggagacagcatgtcacccaggactctgccggtgcagaatatgagcaatgccatgttcttgcagaaaacgcttaacctgagtt

SEQ ID NO: 89620 - DNA, 120 bp, synthetic construct; identical to SEQ ID NO: 200
  source 1..120: mol_type = other DNA

SEQ ID NO: 89621 - DNA, 120 bp, synthetic construct
  source 1..120: mol_type = other DNA
gactccagacactgaaattagagtgaaaaaggaaatctacaaacccttgagtcaaaatcacagttctctgaatttgtcacatctgcccaggtccaatgtcatgagaataggatcagggcg

SEQ ID NO: 89622 - DNA, 120 bp, synthetic construct
  source 1..120: mol_type = other DNA
ataaggggaggaagaaatggaaacctaaacatctactgcaatgaaaaccaacagcaatgtcagtaggagtaattcaaccttcgctgaaaacatgaaattgaacacactcttgttttccct

SEQ ID NO: 89623 - DNA, 120 bp, synthetic construct
  source 1..120: mol_type = other DNA
aagccaacacgctgttgctccaatacataaaaggcacttctgtagggctggcatgagtcacacagttcaagacaacctgaaggagttgaataacatctatccagtgagtcctgcaagact

SEQ ID NO: 89624 - DNA, 120 bp, synthetic construct
  source 1..120: mol_type = other DNA
ttttacccacagtttctgggagaaaaaccgaggaatttctatcatgaccagccttcaggcctcctgaaatatatctctcacagtgtcctattcttatgctgaggagcctgaggtccctgt

SEQ ID NO: 89625 - DNA, 120 bp, synthetic construct
  source 1..120: mol_type = other DNA
ctaactcagagtgtcctgttactccctcatcagtgtgtcacctggacaattcactgagctcgttctctctctctctctctgtgtgtgtgtgtgtgtgtgtgcgtgtgtgtgtgtgtgtgt

SEQ ID NO: 89626 - DNA, 120 bp, synthetic construct
  source 1..120: mol_type = other DNA
atttcatgtctaggcttccaactgagactacagtttcattacaacctatatgcgcccataggtcctgcctgcggcaatgacgtctctcgggtcagtaaggggcacttggaacaggaatat

SEQ ID NO: 89627 - DNA, 120 bp, synthetic construct
  source 1..120: mol_type = other DNA
tacacacataacaatccactgtctaatcctcacacagggacttcaggctcctcagcatgagaataggacactgtgagagatagtcttcaggaggcctgaaggctgatcaccatagagatt

SEQ ID NO: 89628 - DNA, 120 bp, synthetic construct
  source 1..120: mol_type = other DNA
ttcatctttttctacctggccctgttctatcccaacataaaggcaataatctgttacctcattaatggatctgtcctttttcttttcaaactcttccttacattagccatgaaatctagc

SEQ ID NO: 89629 - DNA, 120 bp, synthetic construct
  source 1..120: mol_type = other DNA
cctcggtttttctcccagaaactgtgggtaaaatgtccctattctagtagatcgttatcccaatatcatttgtcccaagtttgtgcaaacagttatgccatatttttccaatcaacttaa

SEQ ID NO: 89630 - DNA, 120 bp, synthetic construct
  source 1..120: mol_type = other DNA
cacacacacacacacacacacacacacacacacacacacacacagagagagagagagaacgagctcagtgaattgtccaggtgacacactgatgagggagtaacaggacactctgagtta

SEQ ID NO: 89631 - DNA, 120 bp, synthetic construct
  source 1..120: mol_type = other DNA
agaattttagacactgaaattagaatgaaggaggaaatctacaaaccttcagtccaaatcatacttctgtgaattttttacatctgcctgggtccaatgtgctgagagcgggctcaggtt

SEQ ID NO: 89632 - DNA, 120 bp, synthetic construct
  source 1..120: mol_type = other DNA
cctaaacatctactgcaatgaaaaccaacagcaatgtcagtaggagtaattcaaccttcgttgaaaacatgaaattgaacacactcttgttttccctggacctggcatctccaggtgtca

SEQ ID NO: 89633 - DNA, 120 bp, synthetic construct
  source 1..120: mol_type = other DNA
ccttcatagaaaggtactcaccatccatgtcaacagccaagccaacatgctgttgctccaatacataaaaggcacttctgtagggctggcatgagtcagtcagttcaagataacctgaag

SEQ ID NO: 89634 - DNA, 120 bp, synthetic construct
  source 1..120: mol_type = other DNA
ccaatatcatttgtcccaagtttgtgcaaacagttacgccatatttttccaatcaacttaaagcaaataccctcaaatgatttctaggagaaaaactgcaatatttagccctgtctcatc

SEQ ID NO: 89635 - DNA, 120 bp, synthetic construct
  source 1..120: mol_type = other DNA
gacacacacacacacacacacacacacacacacacacacacacacacacacagagagagagagagagaacgagctcagtgaattgtccaggtgacacactgatgagggagtaacaggaca

SEQ ID NO: 89636 - DNA, 120 bp, synthetic construct; identical to SEQ ID NO: 89626
  source 1..120: mol_type = other DNA

SEQ ID NO: 89637 - DNA, 120 bp, synthetic construct; identical to SEQ ID NO: 89627
  source 1..120: mol_type = other DNA

SEQ ID NO: 89638 - DNA, 120 bp, synthetic construct
  source 1..120: mol_type = other DNA
ggacagatccattaatgaggtaacaaattattgcctttatgatgggacagaacagggccaggtagaaaacaatgaaagagaaagacagacagagacagagacagagacagagacagagag

SEQ ID NO: 89639 - DNA, 120 bp, synthetic construct; identical to SEQ ID NO: 89634
  source 1..120: mol_type = other DNA

SEQ ID NO: 89640 - DNA, 120 bp, synthetic construct
  source 1..120: mol_type = other DNA
gacacacagcatacagggatcatgaaaagactgtgctcaataattttccataaaacgtgctcaagtttccatgcagtcgccatgagaatagtttttgaagtctggtccacctacagtagg

SEQ ID NO: 89641 - DNA, 120 bp, synthetic construct; identical to SEQ ID NO: 89626
  source 1..120: mol_type = other DNA

SEQ ID NO: 89642 - DNA, 120 bp, synthetic construct; identical to SEQ ID NO: 89627
  source 1..120: mol_type = other DNA

SEQ ID NO: 89643 - DNA, 120 bp, synthetic construct
  source 1..120: mol_type = other DNA
aggtaacaaattattgcctttatgttgggacagaacagggccaggtagaaaacaatgaaagagaaagacagacagagacagagacagagacagagagaaagtgacctagtgaattggcca

SEQ ID NO: 89644 - DNA, 120 bp, synthetic construct; identical to SEQ ID NO: 89634
  source 1..120: mol_type = other DNA

SEQ ID NO: 89645 - DNA, 120 bp, synthetic construct
  source 1..120: mol_type = other DNA
aatgaaagagaaagacagatagacacacacacacacacacacacacacacacacacagagagagagagagagaacgagctcagtgaattgtccaggtgacgcactgatgagggagtaaca

SEQ ID NO: 89646 - DNA, 120 bp, synthetic construct
  source 1..120: mol_type = other DNA
attttagacactgaaattagaatgaaggaggaaatctacaaacccttgagtccaaatcatacttctgtgaattttttacatctgcctgggtccaatgtgctgagagcgggctcaggttgc

SEQ ID NO: 89647 - DNA, 120 bp, synthetic construct
  source 1..120: mol_type = other DNA
agtaaatgataaggggaggaagaaatggaaacctaaacatctactgcaatgaaaaccaacagcaatgtcagtaggagtaattcaaccttcgttgaaaacatgaaattgaacacactcttg

SEQ ID NO: 89648 - DNA, 120 bp, synthetic construct
  source 1..120: mol_type = other DNA
caacagccaagccaacatgctgttgctccaatacataaaaggcacttctgtagggctggcatgagtcagtcagttcaagataacctgaaggagttgaataacatctatccagtgagtcct

SEQ ID NO: 89649 - DNA, 120 bp, synthetic construct; identical to SEQ ID NO: 89634
  source 1..120: mol_type = other DNA

SEQ ID NO: 89650 - DNA, 120 bp, synthetic construct
  source 1..120: mol_type = other DNA
acacagagagagagagagagagagaacgagctcagtgaattgtccaggtgacacactgatgagggagtaacaggacactctgagttagtgccctcaggacacacagcatacagggatcat

SEQ ID NO: 89651 - DNA, 120 bp, synthetic construct; identical to SEQ ID NO: 89626
  source 1..120: mol_type = other DNA

SEQ ID NO: 89652 - DNA, 120 bp, synthetic construct; identical to SEQ ID NO: 89627
  source 1..120: mol_type = other DNA

SEQ ID NO: 89653 - DNA, 120 bp, synthetic construct; identical to SEQ ID NO: 89643
  source 1..120: mol_type = other DNA

SEQ ID NO: 89654 - DNA, 120 bp, synthetic construct; identical to SEQ ID NO: 89634
  source 1..120: mol_type = other DNA

SEQ ID NO: 89655 - DNA, 120 bp, synthetic construct; identical to SEQ ID NO: 89650
  source 1..120: mol_type = other DNA

SEQ ID NO: 89656 - DNA, 120 bp, synthetic construct; identical to SEQ ID NO: 89626
  source 1..120: mol_type = other DNA

SEQ ID NO: 89657 - DNA, 120 bp, synthetic construct; identical to SEQ ID NO: 89627
  source 1..120: mol_type = other DNA

SEQ ID NO: 89658 - DNA, 120 bp, synthetic construct; identical to SEQ ID NO: 89643
  source 1..120: mol_type = other DNA

SEQ ID NO: 89659 - DNA, 120 bp, synthetic construct; identical to SEQ ID NO: 89634
  source 1..120: mol_type = other DNA

SEQ ID NO: 89660 - DNA, 120 bp, synthetic construct; identical to SEQ ID NO: 87885
  source 1..120: mol_type = other DNA

SEQ ID NO: 89661 - DNA, 120 bp, synthetic construct; identical to SEQ ID NO: 89631
  source 1..120: mol_type = other DNA

SEQ ID NO: 89662 - DNA, 120 bp, synthetic construct; identical to SEQ ID NO: 89632
  source 1..120: mol_type = other DNA

SEQ ID NO: 89663 - DNA, 120 bp, synthetic construct; identical to SEQ ID NO: 89633
  source 1..120: mol_type = other DNA

SEQ ID NO: 89664 - DNA, 120 bp, synthetic construct; identical to SEQ ID NO: 89634
  source 1..120: mol_type = other DNA

SEQ ID NO: 89665 - DNA, 120 bp, synthetic construct; identical to SEQ ID NO: 89645
  source 1..120: mol_type = other DNA

SEQ ID NO: 89666 - DNA, 120 bp, synthetic construct; identical to SEQ ID NO: 89631
  source 1..120: mol_type = other DNA

SEQ ID NO: 89667 - DNA, 120 bp, synthetic construct
  source 1..120: mol_type = other DNA
catagttacctggggcatgatgggtcttggtcttcttccacttcttggtacttttcaatttctgcaataagttcagacatggacagacatattaagctggttctcctaaacacacataac

SEQ ID NO: 89668 - DNA, 120 bp, synthetic construct; identical to SEQ ID NO: 89643
  source 1..120: mol_type = other DNA

SEQ ID NO: 89669 - DNA, 120 bp, synthetic construct
  source 1..120: mol_type = other DNA
ttgtcccaagtttgtgcaaacagttacgccatatttttccaatcaacttaaagcaaataccctcaaatgatttctaggagaaaaactgcaatatttagccctgtctcatcaaatactcag

SEQ ID NO: 89670 - DNA, 120 bp, synthetic construct; identical to SEQ ID NO: 89645
  source 1..120: mol_type = other DNA

SEQ ID NO: 89671 - DNA, 120 bp, synthetic construct
  source 1..120: mol_type = other DNA
tcatacttctgtgaattttttacatctgcctgggtccaacgtgctgagagcgggctcaggttgccacaggcatggctggagactaggaatagagccttgctcactgacccattccatgtc

SEQ ID NO: 89672 - DNA, 120 bp, synthetic construct; identical to SEQ ID NO: 89667
  source 1..120: mol_type = other DNA

SEQ ID NO: 89673 - DNA, 120 bp, synthetic construct; identical to SEQ ID NO: 89643
  source 1..120: mol_type = other DNA

SEQ ID NO: 89674 - DNA, 120 bp, synthetic construct; identical to SEQ ID NO: 89669
  source 1..120: mol_type = other DNA

SEQ ID NO: 89675 - DNA, 120 bp, synthetic construct; identical to SEQ ID NO: 89645
  source 1..120: mol_type = other DNA

SEQ ID NO: 89676 - DNA, 120 bp, synthetic construct; identical to SEQ ID NO: 89671
  source 1..120: mol_type = other DNA

SEQ ID NO: 89677 - DNA, 120 bp, synthetic construct; identical to SEQ ID NO: 89667
  source 1..120: mol_type = other DNA

SEQ ID NO: 89678 - DNA, 120 bp, synthetic construct
  source 1..120: mol_type = other DNA
agccaacacgctgttgctccaatacataaaaggcacttctgtagggctggcatgagtcagtcagttcaagacaacctgaaggagttgaataacatctatccagtgagtcctgcaagactt

SEQ ID NO: 89679 - DNA, 120 bp, synthetic construct
  source 1..120: mol_type = other DNA
taggacactgtgagagatatatttcaggaggcctgaaggctggtcatgatagaaattccttggtttttctcccagaaactgtgggtaaagtgtccctattctagtagatcgttatctcaa

SEQ ID NO: 89680 - DNA, 120 bp, synthetic construct
  source 1..120: mol_type = other DNA
acacacacacacacacagagagagagagaacgagctcagtgaattgtccaggtgacgcactgatgagggagtaacaggacactctgagttagtgccctcaggacacacagcatacaggga

SEQ ID NO: 89681 - DNA, 120 bp, synthetic construct; identical to SEQ ID NO: 89626
  source 1..120: mol_type = other DNA

SEQ ID NO: 89682 - DNA, 120 bp, synthetic construct; identical to SEQ ID NO: 89602
  source 1..120: mol_type = other DNA

SEQ ID NO: 89683 - DNA, 120 bp, synthetic construct
  source 1..120: mol_type = other DNA
ctagatttcatggctaacataaggaagagtttgaaaagaaaaaggacagatccattaatgaggtaacaaattattgcctttatgttgggattgactagggccaggtagaaaaggatgaac

SEQ ID NO: 89684 - DNA, 120 bp, synthetic construct
  source 1..120: mol_type = other DNA
cccaaggccagtgtcacccttgtctacctctcagtgaaagatgtgacccaggtttcactgagtttattcccattttctgtgtcttctaagttcgcttgttttagctcatctgtccgtcat

SEQ ID NO: 89685 - DNA, 120 bp, synthetic construct; identical to SEQ ID NO: 201
  source 1..120: mol_type = other DNA

SEQ ID NO: 89686 - DNA, 120 bp, synthetic construct
  source 1..120: mol_type = other DNA
acaagcttcagtagccaattcgatcaagtgcaagaaatggtatcagtgattcaagatcaaattagtgaaatgaagcaagaagagaagtttagagaaaaaagagtaaaaagaaatgaacaa

SEQ ID NO: 89687 - DNA, 120 bp, synthetic construct
  source 1..120: mol_type = other DNA
ctgccttccacaatcgttgaactagtttacagtcccaccaacagtgtaaaagtgttcctatttctccacatcctctccagcaccttcaacattctgaaagaaaagaattttcaaccaaga

SEQ ID NO: 89688 - DNA, 120 bp, synthetic construct
  source 1..120: mol_type = other DNA
acatctttatttctgccttcattttgttattttcccagtagtcattcaggagcaggttgttcagtttccatgtagttgtgtggttttgagtgagtttcttaatcctgagttctaatttga

SEQ ID NO: 89689 - DNA, 120 bp, synthetic construct
  source 1..120: mol_type = other DNA
aagcaagagttgttaaaatttatctatcagtcgtgtttcatgtatagatgcctctaaacatttaatgtccatgttacctggtgatataagtccgtatcgcagcaacactcttagaaaatt

SEQ ID NO: 89690 - DNA, 120 bp, synthetic construct
  source 1..120: mol_type = other DNA
agccatggctatttgaataagtgatggcacattcctccagtgagtcctcagggacttccttttcttcagccttctgcatctccctgatgagccaggtgggacagagatgacagaagatta

SEQ ID NO: 89691 - DNA, 120 bp, synthetic construct
  source 1..120: mol_type = other DNA
catatcactggaggcttgtgcagcctctctctggacgttggcagctgtctcccccatcctgccagatctgattcccaggcacaggcttggtgtcctgtcacggtttgcatttcaaacctc

SEQ ID NO: 89692 - DNA, 120 bp, synthetic construct
  source 1..120: mol_type = other DNA
gtgatccgctcaaatattgcaacagagatttctgagacaatgtcctcaaggagacctcgaagcagaaggtcagcacatgtggaaaggaatgtctgtggccaagagaaagaatagaaaatg

SEQ ID NO: 89693 - DNA, 120 bp, synthetic construct
  source 1..120: mol_type = other DNA
cctacaggacaggagccaggtccatcccaaggacaaaactctccccagtaccagggtctagacagggatttcaacatctttactcttcagtctcctgactttctggcatctgatcctcca

SEQ ID NO: 89694 - DNA, 120 bp, synthetic construct
  source 1..120: mol_type = other DNA
tcatctgcccgcctcagcctcccaaagtgctgggattacaggagtgagccaccatgcacggcccctactccctgctcttgatgctgtcacttatagacagcacaggttctattaggagta

SEQ ID NO: 89695 - DNA, 120 bp, synthetic construct
  source 1..120: mol_type = other DNA
gaaaggcaaacacatgatgggttaaaaactggtgaaatcaaataggcttaatcaggactgagggatgtcactggcagccttgtttacttatttgaagatgatgtttccctggtttcactc

SEQ ID NO: 89696 - DNA, 120 bp, synthetic construct; identical to SEQ ID NO: 202
  source 1..120: mol_type = other DNA

SEQ ID NO: 89697 - DNA, 120 bp, synthetic construct; identical to SEQ ID NO: 203
  source 1..120: mol_type = other DNA

SEQ ID NO: 89698 - DNA, 120 bp, synthetic construct
  source 1..120: mol_type = other DNA
tacggagtgaggagggcctggagatgctcatacaatgagcgggaggcatctctcccttcccgtaacttctcccttagctgggtcagctctcgttcctgagagtgaaccaggactttatat

SEQ ID NO: 89699 - DNA, 120 bp, synthetic construct
  source 1..120: mol_type = other DNA
cagagatctacacacctacccgcctgcctccccctatggggtcccctcacctgagctcctcagcttgcttcagctgctctgcaagcttctcctccttgaactgtcgctcattcctcagca

SEQ ID NO: 89700 - DNA, 120 bp, synthetic construct
  source 1..120: mol_type = other DNA
gaagcaggacttcactctcaccaaggtactctctgctttttatttttatttttgatttatttatcgttttgtttgtttgttttttgacgagtcttgccccgtcacccatgctggagtgca

SEQ ID NO: 89701 - DNA, 120 bp, synthetic construct
  source 1..120: mol_type = other DNA
aactgctgtttcttctctgccagctgggggcgcaatgtctcgttgatttctagaatgttcatctctgccttctcactggaccaagggccggctgataccaccatgctgacgtttgtggca

SEQ ID NO: 89702 - DNA, 120 bp, synthetic construct
  source 1..120: mol_type = other DNA
tcctctatgtgggttgatttgttttttaatgtcactgagcactacattttatacttgtcacttatagatgtcattctagtgccccaagacctcttttcaaggtatcaagtgatcaaagtc

SEQ ID NO: 89703 - DNA, 120 bp, synthetic construct; identical to SEQ ID NO: 89568
  source 1..120: mol_type = other DNA

SEQ ID NO: 89704 - DNA, 120 bp, synthetic construct
  source 1..120: mol_type = other DNA
cttacaagaaaaggaatcatactgctaagaattcaaacttcagcagtcataggtaagtaaggaagtcttataaacctattctagccacctaactagaaactcgaaatttaacaggttctt

SEQ ID NO: 89705 - DNA, 120 bp, synthetic construct
  source 1..120: mol_type = other DNA
gtgatcctcccacctaggcctccaaaagtgctgggattacaagagtaaaccactgagcctggccctgaaatgctttttttttttttttttttaatgaaaatacaaggcatggagatgtgg

SEQ ID NO: 89706 - DNA, 120 bp, synthetic construct; identical to SEQ ID NO: 8525
  source 1..120: mol_type = other DNA

SEQ ID NO: 89707 - DNA, 120 bp, synthetic construct; identical to SEQ ID NO: 204
  source 1..120: mol_type = other DNA

SEQ ID NO: 89708 - DNA, 120 bp, synthetic construct
  source 1..120: mol_type = other DNA
cacggtgattatttatctgttcatctttccaagtagacactctcattttaactccctaccctagtcgccagcatccccagcatagtgcctgtcataaaatggtgccacaatgaaaatttg

SEQ ID NO: 89709 - DNA, 120 bp, synthetic construct
  source 1..120: mol_type = other DNA
aactaattgaatcaaatcaatgaaccatgtctcatctttttggataagtaactgttagtaatccagacacttcatgagctttcattatgtaaagtctttagcagaagctaaaggaggggc

SEQ ID NO: 89710 - DNA, 120 bp, synthetic construct
  source 1..120: mol_type = other DNA
aaaagaaaaccatctccaggcactattcccctttgtggaaatgaagagaatattttctgaactccacctgggacatatgaacaatgagcatgaaatcttacaaactgtataaataacatt

SEQ ID NO: 89711 - DNA, 120 bp, synthetic construct; identical to SEQ ID NO: 8526
  source 1..120: mol_type = other DNA

SEQ ID NO: 89712 - DNA, 120 bp, synthetic construct
  source 1..120: mol_type = other DNA
tacaagcagctgaagcagatgaattactaagcaacaaagatcctgtttttatacaaatatccttagtacaaaaacaaaagaaggaaaactgtaggggggagtaatgtgctaagtaagcag

SEQ ID NO: 89713 - DNA, 120 bp, synthetic construct
  source 1..120: mol_type = other DNA
ctgtcggcagactggtgacttcacttttgagtgcaactgccttccaggtaaggagctccctagtgtcccaggattaggggacaaacccctagcacaggaggtagtgggtgtggctcaatt

SEQ ID NO: 89714 - DNA, 120 bp, synthetic construct; identical to SEQ ID NO: 8527
  source 1..120: mol_type = other DNA

SEQ ID NO: 89715 - DNA, 120 bp, synthetic construct
  source 1..120: mol_type = other DNA
agtattaacaaattcaaggagttctcgccatcccattactgggtatatacccaaagaattataaatcgtgctgctataaagacacatgcacacgtatgtttcttgcggcactattcacaa

SEQ ID NO: 89716 - DNA, 120 bp, synthetic construct
  source 1..120: mol_type = other DNA
gggaggccgaggcgggtggatcatgaggtcaggcgatccagaccattctggctaacaaggtgaaagcccatctctactaaaaatacaaaaattagccgggcatggcggtaggtgcctgta

SEQ ID NO: 89717 - DNA, 120 bp, synthetic construct
  source 1..120: mol_type = other DNA
aaagccagaggaaactctggtggaggtccgtagcagtcctgatgtgcaaatcggtcatccaacctgggtgtaggggcgaaagactaattgaaccatctagtagctggttccctccaaagt

SEQ ID NO: 89718 - DNA, 120 bp, synthetic construct; identical to SEQ ID NO: 87827
  source 1..120: mol_type = other DNA

SEQ ID NO: 89719 - DNA, 120 bp, synthetic construct
  source 1..120: mol_type = other DNA
aagttcttcggttttggaactcagactggctctccttgctcctcagcctgcagacagcctattgtgggaccttgtgatcatgtgaattaatacttaacaaactctcctttatatatatat

SEQ ID NO: 89720 - DNA, 120 bp, synthetic construct; identical to SEQ ID NO: 205
  source 1..120: mol_type = other DNA

SEQ ID NO: 89721 - DNA, 120 bp, synthetic construct
  source 1..120: mol_type = other DNA
gctcttaaatgtcccccagctctggtgcacatttaacattatgataaggaactgggatgttccagacaactatccctaacttccttttaagagtttcagggggcagagaaagagaaagaa

SEQ ID NO: 89722 - DNA, 120 bp, synthetic construct; identical to SEQ ID NO: 8529
  source 1..120: mol_type = other DNA

SEQ ID NO: 89723 - DNA, 120 bp, synthetic construct; identical to SEQ ID NO: 206
  source 1..120: mol_type = other DNA

SEQ ID NO: 89724 - DNA, 120 bp, synthetic construct; identical to SEQ ID NO: 207
  source 1..120: mol_type = other DNA

SEQ ID NO: 89725 - DNA, 120 bp, synthetic construct; identical to SEQ ID NO: 8530
  source 1..120: mol_type = other DNA

SEQ ID NO: 89726 - DNA, 120 bp, synthetic construct; identical to SEQ ID NO: 89548
  source 1..120: mol_type = other DNA

SEQ ID NO: 89727 - DNA, 120 bp, synthetic construct
  source 1..120: mol_type = other DNA
ttttcaaggttcatccatgttgtagcatgtatcagaatgtcattccttttcatggccacatatttcatttatggatataccacattttatttatctgttcatcagcttataggcatttgg

SEQ ID NO: 89728 - DNA, 120 bp, synthetic construct
  source 1..120: mol_type = other DNA
taaaaaattagccaggcgtggtggcgggcgcctgtagtcccagctactcaggaggctgaggcaggagaatggcatgaacccagaagttggaggttgcagtgagccaagatcgcgtcactg

SEQ ID NO: 89729 - DNA, 120 bp, synthetic construct
  source 1..120: mol_type = other DNA
tgcttaggaaagattattcttttagtcatatgcttaggttcagcaaggaatttccagactgtccttagggagaggagaggtatggataggatgctggtccatttaggatgttagagctga

SEQ ID NO: 89730 - DNA, 120 bp, synthetic construct
  source 1..120: mol_type = other DNA
ctgttagtcttggtggaaagtaaggttctctgcttgaaaacaagggcttaaatagctgtcttcttgagatggctaaagttgaatttggttagagagtgaaaacatggctaaacacccaac

SEQ ID NO: 89731 - DNA, 120 bp, synthetic construct
  source 1..120: mol_type = other DNA
aggggcttatttcctgctcagacttcagtcatcttggagctgacacaagctgctacactgttttaagcttttctgtagacgagtggctattcacttaggaaacgtgaaagaacaaatttt

SEQ ID NO: 89732 - DNA, 120 bp, synthetic construct
  source 1..120: mol_type = other DNA
tttaaaacaaagttggtaattagcataacctagttagttacctttacacagagagaattaaaaagttgacaagcccatcagacctcagccaggaggtactgaaaggagggagaccagtga

SEQ ID NO: 89733 - DNA, 120 bp, synthetic construct
  source 1..120: mol_type = other DNA
gaagtatggtaagatcctgattgtgttctggaacacagaggaaagaccaccttctgttatagcaacaacacaagtcttttaacactgtgtgccccttcccaatctttcaagtgatgattg

SEQ ID NO: 89734 - DNA, 120 bp, synthetic construct
  source 1..120: mol_type = other DNA
gctattgaggccactttgtaggatttttttttttttttagtcagggctccaggtccctggtggtttatgtagtcagtcttatcaacaaccgatgaaagaccaataaaagtgcaagaggga

SEQ ID NO: 89735 - DNA, 120 bp, synthetic construct
  source 1..120: mol_type = other DNA
gatggaatctgacctgctgattagttatacaaggctaaaactgactgaagtgtgtatgtaagacaacggtctgggaagagaagcactaaatttaagctcacagggaatcaaccacttaaa

SEQ ID NO: 89736 - DNA, 120 bp, synthetic construct
  source 1..120: mol_type = other DNA
aaggagcataattgctcccagctgccctctcttcctgtccccaggtcctctccttcaccctcactctaggcattctacctccaaacgttcaagttaacatgtgctaaaggaatgattttc

SEQ ID NO: 89737 - DNA, 120 bp, synthetic construct
  source 1..120: mol_type = other DNA
cacctacctttctcctcatatttacgtgaaggcaaaaaactggatagaatgctatagttgaatgtgttcactgaataatatcacccatcacttaaataatgtctttcttagtctttattt

SEQ ID NO: 89738 - DNA, 120 bp, synthetic construct
  source 1..120: mol_type = other DNA
ggtctcaaattcctgggctcaagtgatcctcccacttctgcctcccaaagggctggaattacaggcctgaaccactgtgcctggccagttagtagcttcttaacacatagcaacataatt

SEQ ID NO: 89739 - DNA, 120 bp, synthetic construct
  source 1..120: mol_type = other DNA
ttaatcatattcctgatctgaaaagtcccctttttgtatactttcaaattgagaacagaccctaatacgcaataatgttagctagcattatagactttaacttgccaaagatccaattgt

SEQ ID NO: 89740 - DNA, 120 bp, synthetic construct
  source 1..120: mol_type = other DNA
atttaatgagccaaaaaaacagcattctttgttttatgttaaaaagataaatgaactatggaaaactggccaagcttctgctatcattttccagaaaaactatatacacaatgttcagct

SEQ ID NO: 89741 - DNA, 120 bp, synthetic construct
  source 1..120: mol_type = other DNA
ctcagtatcgcaggacttccgttttctgcttgcacactcttcctcttctgctgcatgaactggggtgtaccttcacgataaaaaaaaacaaaaacaaaactgtaaatgtgggtttcatat

SEQ ID NO: 89742 - DNA, 120 bp, synthetic construct
  source 1..120: mol_type = other DNA
ctgagtacaaaactaatcttcaaaagtagttatcttcatctgtcaatgtgatcttatcaaggatttttataatttctataaacaatcattatattttagctgaatcagtagcattatgct

SEQ ID NO: 89743 - DNA, 120 bp, synthetic construct
  source 1..120: mol_type = other DNA
tcagcctcctgagtaactgggattacaggtgcgtgccaccacgcccagctaattttttgcatttttagtagagatgggatttcaccgtgttagccaggatggtctccaaccttggttgga

SEQ ID NO: 89744 - DNA, 120 bp, synthetic construct
  source 1..120: mol_type = other DNA
tgcacatgtttcttatctatttatgttaaataagaagacactggttctctcctttaaaaatttcagtgtggcgattcctcaaggatctagaaccagaaataccatttggcccagcaatcc

SEQ ID NO: 89745 - DNA, 120 bp, synthetic construct; identical to SEQ ID NO: 208
  source 1..120: mol_type = other DNA

SEQ ID NO: 89746 - DNA, 120 bp, synthetic construct
  source 1..120: mol_type = other DNA
aactgattaaaactctaaaaagaaacccagattaggtgggaatgaatgctgatctggattggattacacttctttggtgtctgagggttatgattagtgacttacttctaatgtgcattt

SEQ ID NO: 89747 - DNA, 120 bp, synthetic construct
  source 1..120: mol_type = other DNA
tgggtagaggaaacttggaggggggaacttctcagttttgctttcaggtatttatacattaactatcataagagatggacatcttaataacttccaagaaagagttcatgagcttcaatt

SEQ ID NO: 89748 - DNA, 120 bp, synthetic construct; identical to SEQ ID NO: 8125
  source 1..120: mol_type = other DNA

SEQ ID NO: 89749 - DNA, 120 bp, synthetic construct
  source 1..120: mol_type = other DNA
agcttttttttttttttttttttttttgagatggagtctctctctgtcactcaggctggagtgcagtggagcaatctcggctcactgcaacctccgccccccaggttcaagtgattctcc

SEQ ID NO: 89750 - DNA, 120 bp, synthetic construct
  source 1..120: mol_type = other DNA
ttgctttttttttttttttttttttttggtggagtagaggagggcctgcacaaacagcagagacacacacagtaaataagatttatttcagccagcaagtatttattgacatgaaaattg

SEQ ID NO: 89751 - DNA, 120 bp, synthetic construct; identical to SEQ ID NO: 8124
  source 1..120: mol_type = other DNA

SEQ ID NO: 89752 - DNA, 120 bp, synthetic construct
  source 1..120: mol_type = other DNA
tttcatggctgaaggtgaagagggagcaggtatgtaacatggcaagagaggagggagcaagagagatgtcagtctctttcaaacaaccagctcacatggtagcgagaactcactcattac

SEQ ID NO: 89753 - DNA, 120 bp, synthetic construct; identical to SEQ ID NO: 8123
  source 1..120: mol_type = other DNA

SEQ ID NO: 89754 - DNA, 120 bp, synthetic construct; identical to SEQ ID NO: 8122
  source 1..120: mol_type = other DNA

SEQ ID NO: 89755 - DNA, 120 bp, synthetic construct; identical to SEQ ID NO: 209
  source 1..120: mol_type = other DNA

SEQ ID NO: 89756 - DNA, 120 bp, synthetic construct
  source 1..120: mol_type = other DNA
gacttgagaatagttagccatacatgtagttggactttatgtaggactaaccaatctcctctgcactatttttgcacagtacattgattatggtatccctgatgacctctgtccccatcc

SEQ ID NO: 89757 - DNA, 120 bp, synthetic construct
  source 1..120: mol_type = other DNA
ttgcaatgagccgagattgtgccactgcactccagcctgggtgacacagcaagactctgcctgagaaaaaaaaaaaaaaatatatatatatatatatattcctgaacttcaatttttatt

SEQ ID NO: 89758 - DNA, 120 bp, synthetic construct
  source 1..120: mol_type = other DNA
caaagcagatgaaatggaaggtaggccagggcatctgctcgttcgctcgctcgcttgctctttctctcttcccttttctttcctttcctttcctttcctttctctctctcctttctttct

SEQ ID NO: 89759 - DNA, 120 bp, synthetic construct
  source 1..120: mol_type = other DNA
agccaactgatttaggatatggctggctatcttctggaactcacattagagttactccttgagagtaaagtcttgtattttctgaaggttgctgcttttggggtattttccgtggaggtg

SEQ ID NO: 89760 - DNA, 120 bp, synthetic construct; identical to SEQ ID NO: 8540
  source 1..120: mol_type = other DNA

SEQ ID NO: 89761 - DNA, 120 bp, synthetic construct; identical to SEQ ID NO: 8541
  source 1..120: mol_type = other DNA

SEQ ID NO: 89762 - DNA, 120 bp, synthetic construct; identical to SEQ ID NO: 8542
  source 1..120: mol_type = other DNA

SEQ ID NO: 89763 - DNA, 120 bp, synthetic construct; identical to SEQ ID NO: 210
  source 1..120: mol_type = other DNA

SEQ ID NO: 89764 - DNA, 120 bp, synthetic construct
  source 1..120: mol_type = other DNA
tagctgggattacaggtgcacgccaccatgtccagctaatttttgcatttttttcagtagagacggggttttgccacattggccaggatggtcttgaactcctgatctcgtgatccgcct

SEQ ID NO: 89765 - DNA, 120 bp, synthetic construct; identical to SEQ ID NO: 8543
  source 1..120: mol_type = other DNA

SEQ ID NO: 89766 - DNA, 120 bp, synthetic construct; identical to SEQ ID NO: 8544
  source 1..120: mol_type = other DNA

SEQ ID NO: 89767 - DNA, 120 bp, synthetic construct; identical to SEQ ID NO: 8119
  source 1..120: mol_type = other DNA

SEQ ID NO: 89768 - DNA, 120 bp, synthetic construct; identical to SEQ ID NO: 8118
  source 1..120: mol_type = other DNA

SEQ ID NO: 89769 - DNA, 120 bp, synthetic construct
  source 1..120: mol_type = other DNA
aatcagtctcaaatagcttaagggaattcctttagaccatatggttagtatatggaaaagccagagctagaacccaggttctgatttccagagcagttcttatttcatgataccgcataa

SEQ ID NO: 89770 - DNA, 120 bp, synthetic construct; identical to SEQ ID NO: 8545
  source 1..120: mol_type = other DNA

SEQ ID NO: 89771 - DNA, 120 bp, synthetic construct; identical to SEQ ID NO: 8546
  source 1..120: mol_type = other DNA

SEQ ID NO: 89772 - DNA, 120 bp, synthetic construct; identical to SEQ ID NO: 8547
  source 1..120: mol_type = other DNA

SEQ ID NO: 89773 - DNA, 120 bp, synthetic construct; identical to SEQ ID NO: 8548
  source 1..120: mol_type = other DNA

SEQ ID NO: 89774 - DNA, 120 bp, synthetic construct; identical to SEQ ID NO: 211
  source 1..120: mol_type = other DNA

SEQ ID NO: 89775 - DNA, 120 bp, synthetic construct; identical to SEQ ID NO: 212
  source 1..120: mol_type = other DNA

SEQ ID NO: 89776 - DNA, 120 bp, synthetic construct
  source 1..120: mol_type = other DNA
tctggagtcaaatacatgattttgggtgggtgacgtaatcggctactgtcctccttttctagatagccaagatttttgaagcatttaacatccctgaaaggcaggactaatgctatgtct

SEQ ID NO: 89777 - DNA, 120 bp, synthetic construct; identical to SEQ ID NO: 8549
  source 1..120: mol_type = other DNA

SEQ ID NO: 89778 - DNA, 120 bp, synthetic construct
  source 1..120: mol_type = other DNA
gacacacccagagttgctgcctcaggtggcattgattaatcatactaatatctccctcacccttttgtacttgtcttggcaaaaccctgttctactagctccccaatagtttggccttta

SEQ ID NO: 89779 - DNA, 120 bp, synthetic construct
  source 1..120: mol_type = other DNA
attgctcctctcacaaagacacttgataatactgtccttgataggaagaaggaagtggcttcagatctgaaaggatatgctcataggcttgagacgggacaaactgcatcactggtagtg

SEQ ID NO: 89780 - DNA, 120 bp, synthetic construct
  source 1..120: mol_type = other DNA
gctgaatataagaagatctttctaagaattagagctggccaaagatggaataaactgctgtggagagctgtctaccacaagagatgttcaagaagagagaaaatatggtacctcttgact

SEQ ID NO: 89781 - DNA, 120 bp, synthetic construct; identical to SEQ ID NO: 8551
  source 1..120: mol_type = other DNA

SEQ ID NO: 89782 - DNA, 120 bp, synthetic construct; identical to SEQ ID NO: 8552
  source 1..120: mol_type = other DNA

SEQ ID NO: 89783 - DNA, 120 bp, synthetic construct; identical to SEQ ID NO: 8553
  source 1..120: mol_type = other DNA

SEQ ID NO: 89784 - DNA, 120 bp, synthetic construct; identical to SEQ ID NO: 8554
  source 1..120: mol_type = other DNA

SEQ ID NO: 89785 - DNA, 120 bp, synthetic construct
  source 1..120: mol_type = other DNA
ggaggaggcggcgaccgagaagatgcccgccctgcgccgctctgctgtgggcgctgctggcgctctggctgtgctgcgcgacccccgcgcatggtgagtatcgggctgaggggcgctgtc

SEQ ID NO: 89786 - DNA, 120 bp, synthetic construct
  source 1..120: mol_type = other DNA
ccattcctctaagggtgggcatttatgttgttttcaaggttttgctattacagtgttacaacgaatatccttagcttagctggtctccttgtcttatacaaattttactgacctttcaag

SEQ ID NO: 89787 - DNA, 120 bp, synthetic construct; identical to SEQ ID NO: 8555
  source 1..120: mol_type = other DNA

SEQ ID NO: 89788 - DNA, 120 bp, synthetic construct
  source 1..120: mol_type = other DNA
cagagattgcagtgagccaagatcgtgccactgtactccagcctggacaacaagagtgaaactccgtctcaaaaaaaaaaaaaaaaaaataggtatgcagtttctcaaagtaaccgtttt

SEQ ID NO: 89789 - DNA, 120 bp, synthetic construct
  source 1..120: mol_type = other DNA
tttgtgcaacaatgtgaagcacatccaagatgatatttagtgtggggacctctgcgtagagggacaccagtttcttgtcacttccatattagcacagaacaagctggcccactgtaacta

SEQ ID NO: 89790 - DNA, 120 bp, synthetic construct
  source 1..120: mol_type = other DNA
tcccagccatgctaaactgtgagtcagttaacctgtttcctttataaattacccagtcttgggcagttctttacagcactgtgaagacagactaatacagtgggcttgttgacatagttt

SEQ ID NO: 89791 - DNA, 120 bp, synthetic construct
  source 1..120: mol_type = other DNA
ggaacttaaggtgactgtaggacttatatatatatacatacatataatatatatacatatttatgtgtatacacacacacacacacacacacacacacacacacagggtcttgctatctt

SEQ ID NO: 89792 - DNA, 120 bp, synthetic construct
  source 1..120: mol_type = other DNA
agagcagttgctccagcatagggattacacagtttttgtttgtttgtttgtttatttatttatttatttttgagacagagtctcgctctgtcacccaggctggagtgcagtggcgccatc

SEQ ID NO: 89793 - DNA, 120 bp, synthetic construct
  source 1..120: mol_type = other DNA
cttcagaaacccccggaaacgccccggttgagaccgcggcccaagccgcctgggggccctagggaggctgaacgcccggtggctcccgggatggctcttcccgttctttgcgccgccttc

SEQ ID NO: 89794 - DNA, 120 bp, synthetic construct
  source 1..120: mol_type = other DNA
ttgctctgttgcccaggcgggagtgtagcggtgcagcctccactggtgcagcctccactgcagcctccacctcccaggttcaaatgattctcctgcctcagaatcccaagtacctgggat

SEQ ID NO: 89795 - DNA, 120 bp, synthetic construct; identical to SEQ ID NO: 117
  source 1..120: mol_type = other DNA

SEQ ID NO: 89796 - DNA, 120 bp, synthetic construct; identical to SEQ ID NO: 89607
  source 1..120: mol_type = other DNA

SEQ ID NO: 89797 - DNA, 120 bp, synthetic construct; identical to SEQ ID NO: 230
  source 1..120: mol_type = other DNA

SEQ ID NO: 89798 - DNA, 120 bp, synthetic construct
  source 1..120: mol_type = other DNA
ttcttccccttcttttcttccccttcttctttccttctttgatcttcttccccttctttttttccccttccccttcttttcaatttctgcaataaattcagacatggacagacacattaa

SEQ ID NO: 89799 - DNA, 120 bp, synthetic construct
  source 1..120: mol_type = other DNA
gaatcagaaaccacacagccccagctagatttcatggctaacataaggaacagtttaaaaagaaaaaggacagatccattaatgaggtaacgaattattgcctttatgttgggatagacc

SEQ ID NO: 89800 - DNA, 120 bp, synthetic construct
  source 1..120: mol_type = other DNA
acatcttgacagtaggattagggcgccacaggcatggcctgagactaggaagagagccttgctcactgacccatcccttgtctgggcttccaagtggaactagagtttcactcaacctac

SEQ ID NO: 89801 - DNA, 120 bp, synthetic construct
  source 1..120: mol_type = other DNA
aatgacagtaggagtaattcagccttcgctgaaaacatgtcatcaaacacactctggtttccctgaatctgttgcctccaggtgttaacacagaattaagcatccacaattgctgaaagt

SEQ ID NO: 89802 - DNA, 120 bp, synthetic construct
  source 1..120: mol_type = other DNA
tctttatatggaagactcagtggatccttatcaccttcatagaaaggtactcacctcccacgtcaagagaaaagccaacatgtttttcctccaatgcataaaaggaacttccatagggct

SEQ ID NO: 89803 - DNA, 120 bp, synthetic construct
  source 1..120: mol_type = other DNA
ctcctcagcatgagaacaggacaatgtgagagatatacttcaggaggcctgaaagctggtcatgatattctttggtttgcatctcagaaccaagggtgaaatatccccattctggtagat

SEQ ID NO: 89804 - DNA, 120 bp, synthetic construct
  source 1..120: mol_type = other DNA
ggacagatccattaatgaggtaatgaattattgcctttatgttgggatagaccagggccaggtagaaaagaatgaaagagaaagacagggagagggagagagagagagaggagaaagtga

SEQ ID NO: 89805 - DNA, 120 bp, synthetic construct
  source 1..120: mol_type = other DNA
aaatccacaagatctacaaaattgagacaaaatcagagttgtgtgaatttgtcacatctgcccagatccaacatcttgacagtaggattagggcgccacaggcatggcctgagactagga

SEQ ID NO: 89806 - DNA, 120 bp, synthetic construct
  source 1..120: mol_type = other DNA
tcgctgaaaacatgtcatcaaacacactctggtttccctgaatctgttgcctccaggtgttaacacagaattaagcatccacaattgctgaaagtcacctggggcatggtgggttttgat

SEQ ID NO: 89807 - DNA, 120 bp, synthetic construct
  source 1..120: mol_type = other DNA
ttcaggctctactacctccagcagctccctgctgagcctggaaaaggaggaaaaagtaaagaataagccaggggaaatcagacacaacagagccccaactaggtttcatgggtagcatag

SEQ ID NO: 89808 - DNA, 120 bp, synthetic construct
  source 1..120: mol_type = other DNA
ctttggtttgcatctcagaaccaagggtgaaatatccccattctggtagatcgttatcccaaaatcatttatcccaagtttgtgcaaacagttatgctttattgctcccatcagttcaaa

SEQ ID NO: 89809 - DNA, 120 bp, synthetic construct
  source 1..120: mol_type = other DNA
tgaaggggtcaaaggacactctgagttagtgccctcgggacacacagcgaacagtgatcacgaaaagagtgggctcaataattttccataaacttgctcaagattccatgcagttgccat

SEQ ID NO: 89810 - DNA, 120 bp, synthetic construct; identical to SEQ ID NO: 89805
  source 1..120: mol_type = other DNA

SEQ ID NO: 89811 - DNA, 120 bp, synthetic construct; identical to SEQ ID NO: 89806
  source 1..120: mol_type = other DNA

SEQ ID NO: 89812 - DNA, 120 bp, synthetic construct; identical to SEQ ID NO: 89802
  source 1..120: mol_type = other DNA

SEQ ID NO: 89813 - DNA, 120 bp, synthetic construct
  source 1..120: mol_type = other DNA
ggaccatgtgagagatatacttcaggaggcctgaaagctggtcatgatattctttggtttgcatctcagaaccaagggtgaaatatccccattctggtagatcgttatcccaaaatcatt

SEQ ID NO: 89814 - DNA, 120 bp, synthetic construct; identical to SEQ ID NO: 89804
  source 1..120: mol_type = other DNA

SEQ ID NO: 89815 - DNA, 120 bp, synthetic construct; identical to SEQ ID NO: 89800
  source 1..120: mol_type = other DNA

SEQ ID NO: 89816 - DNA, 120 bp, synthetic construct; identical to SEQ ID NO: 87911
  source 1..120: mol_type = other DNA

SEQ ID NO: 89817 - DNA, 120 bp, synthetic construct
  source 1..120: mol_type = other DNA
aattcactgagctcgttctctctctctgtgtgtgtgtgtgtgtgtgtgtgtgtgtgtctatctgtctttctctttcattcttttccatttggccctgttctgtcccaacatgaaggcaat

SEQ ID NO: 89818 - DNA, 120 bp, synthetic construct
  source 1..120: mol_type = other DNA
tacatctgcctgggtccaatgtgctgagagcgggctcaggttgccacaggcatggctggagactaggaatagagccttgctcactgacccatttcatgtctaggcttccagctgagacta

SEQ ID NO: 89819 - DNA, 120 bp, synthetic construct
  source 1..120: mol_type = other DNA
gggcatgatgggtcttggtcttcttccacttctttgtacttttcaatttctgcaataagttcagacatggacagacatattaagctggttctcctaaacacacataacaatccactgtct

SEQ ID NO: 89820 - DNA, 120 bp, synthetic construct
  source 1..120: mol_type = other DNA
aaagagagagacagacagagacagagacagagacagagacagagacagagagaaagtgacctagtgaattggccaggtgacatactggtaagggagtcaaaggacactctgagttagtgc

SEQ ID NO: 89821 - DNA, 120 bp, synthetic construct
  source 1..120: mol_type = other DNA
cgccacaggtatggcctgagactaggaagagagtcttgctcactgacccatcccttgtctgggcttccaggtagaactagagtttcattcaacctacatgtgcctataggtcctccctgt

SEQ ID NO: 89822 - DNA, 120 bp, synthetic construct
  source 1..120: mol_type = other DNA
acacccataacagtccactgtctaatccccacacagggatctcaggctcctcagcatgagaacaggaccatgtgagagatatacttcaggaggcctgaaagctggtcatgatattctttg

SEQ ID NO: 89823 - DNA, 120 bp, synthetic construct; identical to SEQ ID NO: 89809
  source 1..120: mol_type = other DNA

SEQ ID NO: 89824 - DNA, 120 bp, synthetic construct
  source 1..120: mol_type = other DNA
ttagggcgccacaggcatggcctgagactaggaagagagccttgctcactgacccatcccttgtctgggcttccaagtggaactagagtttcattcaacctacatgtgcctataggttct

SEQ ID NO: 89825 - DNA, 120 bp, synthetic construct; identical to SEQ ID NO: 89598
  source 1..120: mol_type = other DNA

SEQ ID NO: 89826 - DNA, 120 bp, synthetic construct
  source 1..120: mol_type = other DNA
cacacacaaacacacacacacacacagagagagagagagagagagagagagagaacgagctcagtgaattgtccaggtgacacactgatgagggagtaacaggacactctgagttagtgc

SEQ ID NO: 89827 - DNA, 120 bp, synthetic construct; identical to SEQ ID NO: 89626
  source 1..120: mol_type = other DNA

SEQ ID NO: 89828 - DNA, 120 bp, synthetic construct
  source 1..120: mol_type = other DNA
agacatattaagctggttctcctaaacacacataacaatccactgtctaatcctcacacagggacttcaggctcctcagcatgagaataggacactgtgagagatattcttcaggaggca

SEQ ID NO: 89829 - DNA, 120 bp, synthetic construct
  source 1..120: mol_type = other DNA
cagatccattaatgaggtaacaaattattgcctttatgttgggatagaacagggccaggtagaaaacaatgaaagagaaagacagacagagacagagacagagacagagacagagacaga

SEQ ID NO: 89830 - DNA, 120 bp, synthetic construct
  source 1..120: mol_type = other DNA
aaaactgcaatatttagccctgtctcatcaaatactcagattgttcatggttgtgaggacattagacactgaaattagagtgaaaaaggaaatctacaaacccttgagtcaaaatcatag

SEQ ID NO: 89831 - DNA, 120 bp, synthetic construct
  source 1..120: mol_type = other DNA
ttgaaaagatgtaatcgataatgtcagcccgctctgttttccctgaaccaggagtctccagatgtcaacacagaagtagctgttcacaattgctcagttacctggggcatggtgggtctt

SEQ ID NO: 89832 - DNA, 120 bp, synthetic construct
  source 1..120: mol_type = other DNA
ggaactgtttaaaaagaaaaaggacagatccattaatgaggtaatgaattattgcctttatgttgggatagaccagggccaggtagaaaagaatgaaagagaaagacagggagagggaga

SEQ ID NO: 89833 - DNA, 120 bp, synthetic construct
  source 1..120: mol_type = other DNA
tcatggtagcgaggattttagacgctgaaattagagtgaaggatgaaatctacgagatctacaaaattgagacaaaatcagagttgtgtgaatttgtcacatctgcccagatcccacatc

SEQ ID NO: 89834 - DNA, 120 bp, synthetic construct
  source 1..120: mol_type = other DNA
aattcagccttcgctgaaaacatgtcatcaaacacactctggtttccctgaatctgttgcctccaggtgttaacacagaattaagcatccacaattgctgaaagtcacctggggcatggt

SEQ ID NO: 89835 - DNA, 120 bp, synthetic construct
  source 1..120: mol_type = other DNA
aagactcagtggatcctcatcaccttcatagaaaggtactcacctcccacgtcaagagaaaagccaacatgtttttcctccaatgcataaaaggaacttccatagggctggcaggagtca

SEQ ID NO: 89836 - DNA, 120 bp, synthetic construct
  source 1..120: mol_type = other DNA
agatgtcaacacagaagtagctgttcacaattgctcagttacctggggcatggtgggtcttggtcttcttcctcttcttcgtcctttttaattcctgcaatacattcagacagggacaga

SEQ ID NO: 89837 - DNA, 120 bp, synthetic construct
  source 1..120: mol_type = other DNA
atgaggtaacaaattattgcctttatgttgggatagaacagggccagatagaaaacaatgaaagagagagacagacagagacagagacagagacagagacagagacagagagaaagtgac

SEQ ID NO: 89838 - DNA, 120 bp, synthetic construct
  source 1..120: mol_type = other DNA
aaactgtgggtaaaatgtccctattctagtagatcgttatcccaatatcatttgtcccaagtttctgcaaacagttacgccatatttttccaatcaacttaaagcaaataccctcaaatg

SEQ ID NO: 89839 - DNA, 120 bp, synthetic construct; identical to SEQ ID NO: 89635
  source 1..120: mol_type = other DNA

SEQ ID NO: 89840 - DNA, 120 bp, synthetic construct
  source 1..120: mol_type = other DNA
tggagactaggaatagagccttgctcactgacccatttcatgtctaggcttccaactgagactacagtttcattacaacctatatgcgcccataggtcctgcctgcggcaatgacgtctc

SEQ ID NO: 89841 - DNA, 120 bp, synthetic construct; identical to SEQ ID NO: 89828
  source 1..120: mol_type = other DNA

SEQ ID NO: 89842 - DNA, 120 bp, synthetic construct
  source 1..120: mol_type = other DNA
gaaaaggatgaacgagaaagacacacacacacacacacacacacacacacacactcacacacacacagagcgaggtcagtcaattggtcaggtgacacactgatgagggagtcaaaggac

SEQ ID NO: 89843 - DNA, 120 bp, synthetic construct; identical to SEQ ID NO: 89684
  source 1..120: mol_type = other DNA

SEQ ID NO: 89844 - DNA, 120 bp, synthetic construct; identical to SEQ ID NO: 201
  source 1..120: mol_type = other DNA

SEQ ID NO: 89845 - DNA, 120 bp, synthetic construct
  source 1..120: mol_type = other DNA
accttgaaaaaagattagacaaatggctaaccagaatgaacagtgtagagaagaccttaaatgacctgatggagctgaaaaccatggcacgagaactacgtgatgcatgcacaagcttca

SEQ ID NO: 89846 - DNA, 120 bp, synthetic construct; identical to SEQ ID NO: 87853
  source 1..120: mol_type = other DNA

SEQ ID NO: 89847 - DNA, 120 bp, synthetic construct
  source 1..120: mol_type = other DNA
gtttagggtgcatatatatttaggatagttaactcttcttgttgaattgatccctttaccattatgtagtggccttctttgtctcttttgatctttgttggtttaaagtctgttttatca

SEQ ID NO: 89848 - DNA, 120 bp, synthetic construct; identical to SEQ ID NO: 109
  source 1..120: mol_type = other DNA

SEQ ID NO: 89849 - DNA, 120 bp, synthetic construct; identical to SEQ ID NO: 116
  source 1..120: mol_type = other DNA

SEQ ID NO: 89850 - DNA, 120 bp, synthetic construct
  source 1..120: mol_type = other DNA
catagagaaacatgacagctaccgcaccctgtgtctaagctggattatatttcacatactgtggccaagcgaatgcgggtttttggcccatcatagatgccagagagggtgtgcctccta

SEQ ID NO: 89851 - DNA, 120 bp, synthetic construct
  source 1..120: mol_type = other DNA
acagatgctgcctcttgctccaaagaccacctttcatcaagggaggagggacacttgcaatactgtgacctccaaccccatgggtttcccatctccgttcttacccaagaagtcctggtc

SEQ ID NO: 89852 - DNA, 120 bp, synthetic construct; identical to SEQ ID NO: 232
  source 1..120: mol_type = other DNA

SEQ ID NO: 89853 - DNA, 120 bp, synthetic construct
  source 1..120: mol_type = other DNA
gatagcagtgcagtgtacagagcagggaccgtgggcctgtctcctgggctccatccaagttgcttgtcttgtctgtccctcagtttcctcacctgttcagagggtactacaataatacct

SEQ ID NO: 89854 - DNA, 120 bp, synthetic construct
  source 1..120: mol_type = other DNA
ccccgtacttctaggaaaacagaaatgggtattttaacattttgtcaaagttggaagacagaggtaccaaagtatttagcaactttccatgtttgcaatcaggtgggggtgggactagag

SEQ ID NO: 89855 - DNA, 120 bp, synthetic construct
  source 1..120: mol_type = other DNA
tttcgaactcctgagctcaggtgttccgcccacctcagcctcccaaagtgctgggattaagatgtgagccagcgcccctggtcagagacttactttttttttttttttttttttttttga

SEQ ID NO: 89856 - DNA, 120 bp, synthetic construct
  source 1..120: mol_type = other DNA
gggattggaccccagggagtcctagctggttttgacaggtggcattaagagagtggttccagaaagcaaaacggaggttcccttaaagagggaacaggcaatcctcttctctctgcaaca

SEQ ID NO: 89857 - DNA, 120 bp, synthetic construct
  source 1..120: mol_type = other DNA
ggcagtgttcttagtaagtgtcagtgagtgatttatcttttcagagtttctctctctccatctgcaaaggcagacaaattgtctcttgcaagggtctgaagcatccaaatatgggaacac

SEQ ID NO: 89858 - DNA, 120 bp, synthetic construct
  source 1..120: mol_type = other DNA
catgtgaaaatacacatagtgcatcttgcggccactacatacaaagccacgtacagaaatgaggccaggtgcagatggggcgaattgaaaagatgaaagaagaaaagaaggacagggtcg

SEQ ID NO: 89859 - DNA, 120 bp, synthetic construct; identical to SEQ ID NO: 233
  source 1..120: mol_type = other DNA

SEQ ID NO: 89860 - DNA, 120 bp, synthetic construct
  source 1..120: mol_type = other DNA
tacagagaggattcttgaaaacacgattgagccccttggagaaaacaggtcattctgtgcctgcgttagaaatcaataactgtgagtttaactctagttccacccccatctgattgcaaa

SEQ ID NO: 89861 - DNA, 120 bp, synthetic construct
  source 1..120: mol_type = other DNA
ttgggaaagacatgggtctgtggcattgtcacaagggtacacgaatactgagagtgaatgctgaaggaatgatccccattggtggtgaccctcaggtgaaagtagggtgcctgtgtttca

SEQ ID NO: 89862 - DNA, 120 bp, synthetic construct
  source 1..120: mol_type = other DNA
cttgacagattttcattctgacacagaatgtcaggtctcccagaccctagaaaatacattgacttaaagcctttgatacatctcaaagcagtatccttacagtgtcactggaagatggtg

SEQ ID NO: 89863 - DNA, 120 bp, synthetic construct; identical to SEQ ID NO: 8436
  source 1..120: mol_type = other DNA

SEQ ID NO: 89864 - DNA, 120 bp, synthetic construct; identical to SEQ ID NO: 234
  source 1..120: mol_type = other DNA

SEQ ID NO: 89865 - DNA, 120 bp, synthetic construct; identical to SEQ ID NO: 8753
  source 1..120: mol_type = other DNA

SEQ ID NO: 89866 - DNA, 120 bp, synthetic construct
  source 1..120: mol_type = other DNA
gaacagaaactttacccaattgcagtccatatgttttctgggatcccggagttccctttcaacaatgtaaaatacaaacttaggtcaaaagttcccatgtctgagaaaactcaagccaaa

SEQ ID NO: 89867 - DNA, 120 bp, synthetic construct
  source 1..120: mol_type = other DNA
cgggaggtggaggttgcagtgagccaagatagcaccattgcactccagcctgggagaaagagcgatgctccgtctcaaaaaaaaaaaaaaaaaaaaagaaaagaaaagaaaatgacacat

SEQ ID NO: 89868 - DNA, 120 bp, synthetic construct
  source 1..120: mol_type = other DNA
attttgtttaaacttcataaagagctctctgatctttcctttccaaacaatgaaggtttatcctttgtaaactacctctgtactccacaggctgatgatatatgatatccctatatcatt

SEQ ID NO: 89869 - DNA, 120 bp, synthetic construct; identical to SEQ ID NO: 8437
  source 1..120: mol_type = other DNA

SEQ ID NO: 89870 - DNA, 120 bp, synthetic construct
  source 1..120: mol_type = other DNA
tcttcccacatgaagtaactgaagtttggagatgttaagtgattcacccaaagttgtacagctaatatgtggttaggctgggtcctgaaaccgaggcagtttattttcaaagcctttgct

SEQ ID NO: 89871 - DNA, 120 bp, synthetic construct
  source 1..120: mol_type = other DNA
aataaagaatagataatgctatcattctagatactaaataagtattttcttaacataatattactatccactttatcttgtagaagaagtaactaaaatacatctgtcttcactcctgta

SEQ ID NO: 89872 - DNA, 120 bp, synthetic construct
  source 1..120: mol_type = other DNA
ctatgtgcttgtgcttttgcttttgatggagtaattcattgttttcttatccacctaaatgcacccagctgcccttgattttctctgggctactggccttcacaaccctctcccatgtac

SEQ ID NO: 89873 - DNA, 120 bp, synthetic construct
  source 1..120: mol_type = other DNA
ctgatagcgtcctgcaggattgggcttcaatgtgactaacctacaattgcctccaggtgctccacccactgagtccttgtgtctctgctgaggtccttggagagttactggagagggctc

SEQ ID NO: 89874 - DNA, 120 bp, synthetic construct; identical to SEQ ID NO: 8136
  source 1..120: mol_type = other DNA

SEQ ID NO: 89875 - DNA, 120 bp, synthetic construct
  source 1..120: mol_type = other DNA
ggattacaggtatgcgctatgaagcccggctaatttttgtatttttagaaaagatggcgtttcaccatgttggccaggctggtctcaaactcctaaccacaagtgatctgcccacctcag

SEQ ID NO: 89876 - DNA, 120 bp, synthetic construct; identical to SEQ ID NO: 89554
  source 1..120: mol_type = other DNA

SEQ ID NO: 89877 - DNA, 120 bp, synthetic construct; identical to SEQ ID NO: 89553
  source 1..120: mol_type = other DNA

SEQ ID NO: 89878 - DNA, 120 bp, synthetic construct
  source 1..120: mol_type = other DNA
ctttgtatccttcaattcaatcaagttgacacactcagttttaaccaccacaaatctaccccttgtcaacttgaacccatacacatctcctgagatcacacataatcttcaaataaagac

SEQ ID NO: 89879 - DNA, 120 bp, synthetic construct; identical to SEQ ID NO: 8438
  source 1..120: mol_type = other DNA

SEQ ID NO: 89880 - DNA, 120 bp, synthetic construct; identical to SEQ ID NO: 89550
  source 1..120: mol_type = other DNA

SEQ ID NO: 89881 - DNA, 120 bp, synthetic construct
  source 1..120: mol_type = other DNA
atacagctgatactctgtcacctgccaggactcaaaaggacatgggagtatgtggttaagttctctaaggactctttcttctaaagggaagcagttttataggtggtccttgtaggtctg

SEQ ID NO: 89882 - DNA, 120 bp, synthetic construct; identical to SEQ ID NO: 8439
  source 1..120: mol_type = other DNA

SEQ ID NO: 89883 - DNA, 120 bp, synthetic construct
  source 1..120: mol_type = other DNA
acgcttgtaatcccagctactcgggaggctgaggcatgagaattgcttgaacccgggaggcggaggttgcagtgagccgacgagattgtgccactacactccagcctgggcaacagagtg

SEQ ID NO: 89884 - DNA, 120 bp, synthetic construct; identical to SEQ ID NO: 8440
  source 1..120: mol_type = other DNA

SEQ ID NO: 89885 - DNA, 120 bp, synthetic construct; identical to SEQ ID NO: 8441
  source 1..120: mol_type = other DNA

SEQ ID NO: 89886 - DNA, 120 bp, synthetic construct
  source 1..120: mol_type = other DNA
caagatttatccggcaccatgctacatgcttgtattcaagcagaggctggtgatcatcttttagaaatattttagaaatgattacttaattggatagaaattaaatttcttgaatctgaa

SEQ ID NO: 89887 - DNA, 120 bp, synthetic construct; identical to SEQ ID NO: 235
  source 1..120: mol_type = other DNA

SEQ ID NO: 89888 - DNA, 120 bp, synthetic construct
  source 1..120: mol_type = other DNA
cagtgctataggggttcagaccatttggtttctgagatcactgctgaaattctgtgattgtatgagtataatgtaaaagttgtctcaatcaaggaaacttggagtaaagactcaatatga

SEQ ID NO: 89889 - DNA, 120 bp, synthetic construct; identical to SEQ ID NO: 87816
  source 1..120: mol_type = other DNA

SEQ ID NO: 89890 - DNA, 120 bp, synthetic construct; identical to SEQ ID NO: 8132
  source 1..120: mol_type = other DNA

SEQ ID NO: 89891 - DNA, 120 bp, synthetic construct; identical to SEQ ID NO: 8131
  source 1..120: mol_type = other DNA

SEQ ID NO: 89892 - DNA, 120 bp, synthetic construct
  source 1..120: mol_type = other DNA
ctaggtgctcagctcagcctttgagttctgataaatgagcccagactgtaaactggaagataaggatgtttgtaaagttcttgtataaataaagcatggtttctcattgcagtggttact

SEQ ID NO: 89893 - DNA, 120 bp, synthetic construct
  source 1..120: mol_type = other DNA
gtgtgtgttggttaacttcatatttggtaggtgggagggaaggtgattaaaaaataatctactttgcatggagttggcccaatttgactgatataggggtgagtgggggttaagaagtag

SEQ ID NO: 89894 - DNA, 120 bp, synthetic construct
  source 1..120: mol_type = other DNA
taattcaatatacacttatgtaaatgaattgttccacaactcacactttcagctagcccctcacagatgcataagaaagcaaagaacaaccaaagagaaggaacaatatatttaaacaag

SEQ ID NO: 89895 - DNA, 120 bp, synthetic construct
  source 1..120: mol_type = other DNA
atgtactatataatcagaggaaacaagcagtaaaggacctgagctaatttggggtaaccaaagacttggctaacagatgcttccttactctggatccctcatatgaatcagatctggcca

SEQ ID NO: 89896 - DNA, 120 bp, synthetic construct
  source 1..120: mol_type = other DNA
acttccttattcacaagtatacgtacccagagactgtctgacagtgaatgcagtttctcctgcataagacatggtggcagtcttctgaagtcttgctggggagatgaagcatacagagat

SEQ ID NO: 89897 - DNA, 120 bp, synthetic construct; identical to SEQ ID NO: 8128
  source 1..120: mol_type = other DNA

SEQ ID NO: 89898 - DNA, 120 bp, synthetic construct
  source 1..120: mol_type = other DNA
cttatgtcctattaaaatcctttatcaaatatgatgtttccctaaggggtcttttgtaaaggaagtcttggttactagcatctccatctgtggcccaggcttgagtgcagtagagcaatc

SEQ ID NO: 89899 - DNA, 120 bp, synthetic construct
  source 1..120: mol_type = other DNA
caaaaaattagccgggtgtggtggcgggcgcttgtagtcccggctacttgagaggctgaggcaggagaatggcatgaacccgggaggcggagcttgcagtgagccaagaaagcgccactg

SEQ ID NO: 89900 - DNA, 120 bp, synthetic construct; identical to SEQ ID NO: 87805
  source 1..120: mol_type = other DNA

SEQ ID NO: 89901 - DNA, 120 bp, synthetic construct
  source 1..120: mol_type = other DNA
tacaactctgctcaaatccttaaataattcctgactatgcatgagcaagataagattcagaaacccaagagaaagtaagagctggacggctgaaaagactgagcagaaggctcctggggc

SEQ ID NO: 89902 - DNA, 120 bp, synthetic construct; identical to SEQ ID NO: 8127
  source 1..120: mol_type = other DNA

SEQ ID NO: 89903 - DNA, 120 bp, synthetic construct; identical to SEQ ID NO: 236
  source 1..120: mol_type = other DNA

SEQ ID NO: 89904 - DNA, 120 bp, synthetic construct
  source 1..120: mol_type = other DNA
aacatgtggtgcattctcctctaagaatggagatacaactggagataataagggagggaacttaataccttagagtaggccactgaaatcttgtttagtctttttgtggcatttggtgcc

SEQ ID NO: 89905 - DNA, 120 bp, synthetic construct
  source 1..120: mol_type = other DNA
ctgagtagctgggactccaggcatgcgccaccacacccggctaatttttgtatttttagtagagatagggtttcactatgttggccaggctggtcttgaactcctgacctcgtgattcgc

SEQ ID NO: 89906 - DNA, 120 bp, synthetic construct
  source 1..120: mol_type = other DNA
gggaatgggggaatcaacagtttgagaatttttgttttatctgtatgtataaaattgccttctccttttatttcttttgatactctctctgcagtctctattcatgatctactccccatc

SEQ ID NO: 89907 - DNA, 120 bp, synthetic construct
  source 1..120: mol_type = other DNA
aatatccaccctgccaatcctgagaaatttcaggtagtgggaagcagtgtatcttggtggttaagggcagagtctctggattcaaattctagctttctaactcagtggcatggcagtagg

SEQ ID NO: 89908 - DNA, 120 bp, synthetic construct; identical to SEQ ID NO: 112
  source 1..120: mol_type = other DNA

SEQ ID NO: 89909 - DNA, 120 bp, synthetic construct
  source 1..120: mol_type = other DNA
gtgtggtgaatatagttaataatagggtattatacatttcaaaattgctaagagagtaaatttcaaaaaatgttaaatatttgagatgaaggatatactacctaccttttaattgttcta

SEQ ID NO: 89910 - DNA, 120 bp, synthetic construct; identical to SEQ ID NO: 8454
  source 1..120: mol_type = other DNA

SEQ ID NO: 89911 - DNA, 120 bp, synthetic construct; identical to SEQ ID NO: 8746
  source 1..120: mol_type = other DNA

SEQ ID NO: 89912 - DNA, 120 bp, synthetic construct; identical to SEQ ID NO: 8455
  source 1..120: mol_type = other DNA

SEQ ID NO: 89913 - DNA, 120 bp, synthetic construct; identical to SEQ ID NO: 8456
  source 1..120: mol_type = other DNA

SEQ ID NO: 89914 - DNA, 120 bp, synthetic construct; identical to SEQ ID NO: 8457
  source 1..120: mol_type = other DNA

SEQ ID NO: 89915 - DNA, 120 bp, synthetic construct; identical to SEQ ID NO: 89518
  source 1..120: mol_type = other DNA

SEQ ID NO: 89916 - DNA, 120 bp, synthetic construct; identical to SEQ ID NO: 237
  source 1..120: mol_type = other DNA

SEQ ID NO: 89917 - DNA, 120 bp, synthetic construct; identical to SEQ ID NO: 8745
  source 1..120: mol_type = other DNA

SEQ ID NO: 89918 - DNA, 120 bp, synthetic construct; identical to SEQ ID NO: 8458
  source 1..120: mol_type = other DNA

SEQ ID NO: 89919 - DNA, 120 bp, synthetic construct
  source 1..120: mol_type = other DNA
tgactttgggcaaggcccttatttctttgagttgcagtttcttgtgtaaaatggtgctaataccaatttacatgcctcatagtgttgttgtggggatcaaatgagatcactgtttatgag

SEQ ID NO: 89920 - DNA, 120 bp, synthetic construct
  source 1..120: mol_type = other DNA
tatacttttaattttggaggacaaaagtcttgtattctcagccttgtggataagacagtgctctgagctgtctgaggtttcctaaattgggattcaacatcatgaagggtatgtgtctgg

SEQ ID NO: 89921 - DNA, 120 bp, synthetic construct; identical to SEQ ID NO: 8459
  source 1..120: mol_type = other DNA

SEQ ID NO: 89922 - DNA, 120 bp, synthetic construct; identical to SEQ ID NO: 8460
  source 1..120: mol_type = other DNA

SEQ ID NO: 89923 - DNA, 120 bp, synthetic construct
  source 1..120: mol_type = other DNA
tcaaatgatccacctgcctcagcctcccagagtgctgggattacaggtgttagccactgtgccaggccagatgtctgactttttagcccttggtccattgctttattcttcacaccatac

SEQ ID NO: 89924 - DNA, 120 bp, synthetic construct; identical to SEQ ID NO: 8461
  source 1..120: mol_type = other DNA

SEQ ID NO: 89925 - DNA, 120 bp, synthetic construct
  source 1..120: mol_type = other DNA
tcaaacttgagtgcacatcaagttttggaggacttgttagaatacagattgctgggctcacccccagagtttctgatctggtaggtctggagcgggacctggtagattgcatttctaaaa

SEQ ID NO: 89926 - DNA, 120 bp, synthetic construct; identical to SEQ ID NO: 8462
  source 1..120: mol_type = other DNA

SEQ ID NO: 89927 - DNA, 120 bp, synthetic construct; identical to SEQ ID NO: 89506
  source 1..120: mol_type = other DNA

SEQ ID NO: 89928 - DNA, 120 bp, synthetic construct; identical to SEQ ID NO: 8742
  source 1..120: mol_type = other DNA

SEQ ID NO: 89929 - DNA, 120 bp, synthetic construct
  source 1..120: mol_type = other DNA
aagtggcctatgtcggatttctgagctaggaaaggctaggggaggttgaggagattattgtacttgtaattcctgagcatggttgagacacaaggagaggattgtggaaattgtttttaa

SEQ ID NO: 89930 - DNA, 120 bp, synthetic construct; identical to SEQ ID NO: 8463
  source 1..120: mol_type = other DNA

SEQ ID NO: 89931 - DNA, 120 bp, synthetic construct; identical to SEQ ID NO: 8464
  source 1..120: mol_type = other DNA

SEQ ID NO: 89932 - DNA, 120 bp, synthetic construct
  source 1..120: mol_type = other DNA
ctgaggtacagctttgagaacagtatcaggtctaacactcttgtttccaaatttcctatgatatgacaaacataatcacatgccatccagtgtcaccatgcagagtactaatgtgaagcc

SEQ ID NO: 89933 - DNA, 120 bp, synthetic construct; identical to SEQ ID NO: 8465
  source 1..120: mol_type = other DNA

SEQ ID NO: 89934 - DNA, 120 bp, synthetic construct
  source 1..120: mol_type = other DNA
cgtactcctgacctcaggtgatccacccacctcagcctcccaaagtgctgggattacaggtgagccaccgtgcctggtccttgcagcttgattttttaaacatcagatttttttttcttt

SEQ ID NO: 89935 - DNA, 120 bp, synthetic construct; identical to SEQ ID NO: 8466
  source 1..120: mol_type = other DNA

SEQ ID NO: 89936 - DNA, 120 bp, synthetic construct
  source 1..120: mol_type = other DNA
acaaacgccactgatgatatgaaaaaacattcaatatcactgtaatgaggcatattaagattaagtaatatttaccacttatcaaatggtaaagatttttaaaaataaaacctagtgttg

SEQ ID NO: 89937 - DNA, 120 bp, synthetic construct; identical to SEQ ID NO: 8467
  source 1..120: mol_type = other DNA

SEQ ID NO: 89938 - DNA, 120 bp, synthetic construct; identical to SEQ ID NO: 8468
  source 1..120: mol_type = other DNA

SEQ ID NO: 89939 - DNA, 120 bp, synthetic construct
  source 1..120: mol_type = other DNA
catagcagctttcttctctgtactaagtggccagcaagtaggaggcatttccaagggggaaaaatgaccacaggatctagccaaagcaacctgtctctaatactctcaaaaaacaaacaa

SEQ ID NO: 89940 - DNA, 120 bp, synthetic construct
  source 1..120: mol_type = other DNA
tttttttgagatttttttcattgagttggatattgcaaacttgtactggattgagagaatatgtacatttagtaaagtatatttgcttttttttttttgaaccaagagagtcccctgaac

SEQ ID NO: 89941 - DNA, 120 bp, synthetic construct; identical to SEQ ID NO: 8111
  source 1..120: mol_type = other DNA

SEQ ID NO: 89942 - DNA, 120 bp, synthetic construct
  source 1..120: mol_type = other DNA
gctccttgttttcttttgctttgcaatgggaagtgactccctgattttgctgcctgctagataatttctcagctgaattcttctcttaaacaaaatcggagtaattttctttcagatggt

SEQ ID NO: 89943 - DNA, 120 bp, synthetic construct; identical to SEQ ID NO: 8469
  source 1..120: mol_type = other DNA

SEQ ID NO: 89944 - DNA, 120 bp, synthetic construct
  source 1..120: mol_type = other DNA
cgcagccagcctcgcctttgccagggggcggcacatgggccgggtgtgtgggcttggtttggatggggacggggttttgcggcgcgcctgagttttgacactccaaccccaccgaaagtc

SEQ ID NO: 89945 - DNA, 120 bp, synthetic construct
  source 1..120: mol_type = other DNA
acccccacgccccttctgcactggtcaagccagcgagccgctgcagccctgatcgagttaaggcgcggcggcccccggggccgctggagaaggatgcggacggggccagtgactcgtata

SEQ ID NO: 89946 - DNA, 120 bp, synthetic construct; identical to SEQ ID NO: 8107
  source 1..120: mol_type = other DNA

SEQ ID NO: 89947 - DNA, 120 bp, synthetic construct; identical to SEQ ID NO: 238
  source 1..120: mol_type = other DNA

SEQ ID NO: 89948 - DNA, 120 bp, synthetic construct
  source 1..120: mol_type = other DNA
catcaagacattcttccagtcttgcattgctccccagtttatatagatatatatgttcctcattcagcatttatgtaaagcatatattattgagcacttatgtgatagaaaccggggcaa

SEQ ID NO: 89949 - DNA, 120 bp, synthetic construct
  source 1..120: mol_type = other DNA
cctagacccaattaattacctctgctctaattaagggaatcagtaatgtaagtaattgtaatatgggcgatatagtttgcctgtgtccccacccaatatcttattttgaattgtaatccc

SEQ ID NO: 89950 - DNA, 120 bp, synthetic construct
  source 1..120: mol_type = other DNA
aagtgctgggattacagatgtgagccactgtgcctggtcaattgctggacgttcatgatacacctggagtatccacagtatcacaagggccatttttttccataatccaatttatttata

SEQ ID NO: 89951 - DNA, 120 bp, synthetic construct
  source 1..120: mol_type = other DNA
cttagtttttctgtgaatctaaaactgctgtaaaggaaaaaataggctgggtgtggtggctcacgtctatagtcatagcattttgggaagccgaggcaggtggatcacctgagatcaggg

SEQ ID NO: 89952 - DNA, 120 bp, synthetic construct
  source 1..120: mol_type = other DNA
gcgcctgtcaccacgccaggctaattttttgtatttttcgtagagacggggtttcatcatgttggccaggctggtctggaactcctgacctcgtgatctgcccacctcggcctcccaaag

SEQ ID NO: 89953 - DNA, 120 bp, synthetic construct; identical to SEQ ID NO: 24
  source 1..120: mol_type = other DNA

SEQ ID NO: 89954 - DNA, 120 bp, synthetic construct
  source 1..120: mol_type = other DNA
atcgcttgaaccccggaaattgaggttgcagtgaggtatgattgtgccactgcactgtagcctgagtgacaggagacctttaaaaaacaaacaaacaaaaaagcctgacacagtggctca

SEQ ID NO: 89955 - DNA, 120 bp, synthetic construct
  source 1..120: mol_type = other DNA
atacagaaaaagatcctcttggggtgccttaagtccctcactctgttcatcagctcagccctaatttgagcaaatctgttccagcagagagtaccatcagcaccataactctcccgcggg

SEQ ID NO: 89956 - DNA, 120 bp, synthetic construct; identical to SEQ ID NO: 25
  source 1..120: mol_type = other DNA

SEQ ID NO: 89957 - DNA, 120 bp, synthetic construct
  source 1..120: mol_type = other DNA
aacactagtgggcatctactgtgagccagcctatgaggatgaaacagtgaagaggacactagaatgtccatgcattgtcctgttggtggccctgtcctgaaatgggtatcatgcaaccat

SEQ ID NO: 89958 - DNA, 120 bp, synthetic construct
  source 1..120: mol_type = other DNA
cccagattcaaatgattctcctgcctcaacctcacaagtagctgggattacaggagcccaccaccatgcccagctaattttagtatttttagtagagttggggtttaccatgttggacag

SEQ ID NO: 89959 - DNA, 120 bp, synthetic construct
  source 1..120: mol_type = other DNA
gactagtgagtgtggaggaacctgaaagtgaacccctcctaccattgggggaaactactaattactcaaggttctaaaacaatgggaatgggaatgtcacaagcctacatgcccacattt

SEQ ID NO: 89960 - DNA, 120 bp, synthetic construct; identical to SEQ ID NO: 7164
  source 1..120: mol_type = other DNA

SEQ ID NO: 89961 - DNA, 120 bp, synthetic construct
  source 1..120: mol_type = other DNA
caactccctgcaacctttacttcccgggttcaagcaattctcatgcctcagtctccatcctcagaagctggtgtcacagacatctgaaaccatgcctggctaagttttgtatttttagta

SEQ ID NO: 89962 - DNA, 120 bp, synthetic construct
  source 1..120: mol_type = other DNA
caggggttcaagaccagtcaggtcaaaaaggtgaaaccccgtctctacaaaaatacaaaaattagctgggcatgatggcaggcacctgaaacccagctacttgggaggctgaggcaggag

SEQ ID NO: 89963 - DNA, 120 bp, synthetic construct
  source 1..120: mol_type = other DNA
tactgaaggtttccagtggatcctggatagcaaggggccggaaagttggggtagcggtaagagggaagaagtcaacaggatgtagaaactgcattatttggtgagttggtgcattgcatg

SEQ ID NO: 89964 - DNA, 120 bp, synthetic construct
  source 1..120: mol_type = other DNA
ctcactctattgcccgggctgggaaagggactcctcctattaattatttttttaaattttcttttgttttattgacctgacaagggtcaaatagagttgagtttttgtttttgttttttc

SEQ ID NO: 89965 - DNA, 120 bp, synthetic construct
  source 1..120: mol_type = other DNA
ccagcactttgggaggccaaggcagacagaccacgaagtcaggagattgagaccatcctagttaacatggtgaaaccccgtctttactaaaaatacaaaaaattagccaggtgtagtggc

SEQ ID NO: 89966 - DNA, 120 bp, synthetic construct
  source 1..120: mol_type = other DNA
agcctcccaaagtgctgggattacaggcaggagccaccacatccagctagaggacatttctgatgtctccatattgatggaatttaaaataactctctggtaaattgttttctataatag

SEQ ID NO: 89967 - DNA, 120 bp, synthetic construct
  source 1..120: mol_type = other DNA
agtaatccacctgcctcagcctcccaaaattctgggattacaggcatgagccactgcactcagcttgcactctcctatttattgtagcactatccacaatagccaaaatttggaatcaac

SEQ ID NO: 89968 - DNA, 120 bp, synthetic construct; identical to SEQ ID NO: 26
  source 1..120: mol_type = other DNA

SEQ ID NO: 89969 - DNA, 120 bp, synthetic construct; identical to SEQ ID NO: 27
  source 1..120: mol_type = other DNA

SEQ ID NO: 89970 - DNA, 120 bp, synthetic construct
  source 1..120: mol_type = other DNA
taccatcctctgtatgaagaatgtgttttcatcatattaactttatacactgttcctcacaaggagttcacaaatgcaccctcactagatctgaaccctcaactaaccggctccctacac

SEQ ID NO: 89971 - DNA, 120 bp, synthetic construct
  source 1..120: mol_type = other DNA
tctcatcaacatccctcaaatccagcacttgaagtttccacctcctatgagtaacataggggaaaagctcagaatgtaggcaaggacccacccctgacctgagctttcactccacatcca

SEQ ID NO: 89972 - DNA, 120 bp, synthetic construct
  source 1..120: mol_type = other DNA
tagtgaaacccactgtctttacaaaaagtcaaaaaataaaagattagctgggcatgagatccgagcttcagagatcctcggtaacatttcccagtgctatgagtttattgcaacagtggc

SEQ ID NO: 89973 - DNA, 120 bp, synthetic construct
  source 1..120: mol_type = other DNA
acagtccctaagaaaacacagtagaaatcttcatgaatccaatgatcacctgggtggtataatttaatttttttcgtgtcggggtagctgagtctcacttcatcacccaggctggagtac

SEQ ID NO: 89974 - DNA, 120 bp, synthetic construct
  source 1..120: mol_type = other DNA
cttcaaattgttcatatgagaaaaaaaacaaaacaggatataactctatgccatcttaggctgcactgtcaccatcccagaccagctgactgtaggtcagttgggagtgtccttacagag

SEQ ID NO: 89975 - DNA, 120 bp, synthetic construct
  source 1..120: mol_type = other DNA
cctcagtggcacctctcttccaccagcaggagtgaaaaaattgctaccttaggtgatataaaacccacaagaccattcaatacatggagatttttattttgattttgtagggacgactcc

SEQ ID NO: 89976 - DNA, 120 bp, synthetic construct
  source 1..120: mol_type = other DNA
gatgtgagattattcagggaggtaaaggaagacaaaggttttgaaaggaaaaatcaggagaattacatacactgttttggaagactcattcttggtcacaagtatcaacaccaagggggc

SEQ ID NO: 89977 - DNA, 120 bp, synthetic construct
  source 1..120: mol_type = other DNA
tgtcttccacattgattctcacatttagcttccaatgaagatttatttaattatttctgccttaagcgccttaccttccactgacaccaggttgcatggtgacagtttgaactggggtgg

SEQ ID NO: 89978 - DNA, 120 bp, synthetic construct
  source 1..120: mol_type = other DNA
gtaacaatatgactcagtactgcaagacctttcaaagcctatttccagttggtgaaggagggtttcgatgatcactggaccttcatgccctaccatttggagactgcatcttttaaaatg

SEQ ID NO: 89979 - DNA, 120 bp, synthetic construct
  source 1..120: mol_type = other DNA
gccaccccgtctgggaagtgaggagcgtctctgctcggccgcccatcgtctgagatgtggggagcgcttctgccccgccgccccttctgggaggtgaggagaccctccacctggcagccg

SEQ ID NO: 89980 - DNA, 120 bp, synthetic construct; identical to SEQ ID NO: 26689
  source 1..120: mol_type = other DNA

SEQ ID NO: 89981 - DNA, 120 bp, synthetic construct; identical to SEQ ID NO: 26690
  source 1..120: mol_type = other DNA

SEQ ID NO: 89982 - DNA, 120 bp, synthetic construct; identical to SEQ ID NO: 26691
  source 1..120: mol_type = other DNA

SEQ ID NO: 89983 - DNA, 120 bp, synthetic construct; identical to SEQ ID NO: 26692
  source 1..120: mol_type = other DNA

SEQ ID NO: 89984 - DNA, 120 bp, synthetic construct; identical to SEQ ID NO: 26693
  source 1..120: mol_type = other DNA

SEQ ID NO: 89985 - DNA, 120 bp, synthetic construct; identical to SEQ ID NO: 26694
  source 1..120: mol_type = other DNA

SEQ ID NO: 89986 - DNA, 120 bp, synthetic construct; identical to SEQ ID NO: 26695
  source 1..120: mol_type = other DNA

SEQ ID NO: 89987 - DNA, 120 bp, synthetic construct; identical to SEQ ID NO: 26696
  source 1..120: mol_type = other DNA

SEQ ID NO: 89988 - DNA, 120 bp, synthetic construct
  source 1..120: mol_type = other DNA
tgttagcccagcactttgggaggccgaagcgggtggattacctgaggttgggagctcaagaccattctgaccaacatggagaaaccccatctctactaaaaatacaaaattagccaagtg

SEQ ID NO: 89989 - DNA, 120 bp, synthetic construct; identical to SEQ ID NO: 26697
  source 1..120: mol_type = other DNA

SEQ ID NO: 89990 - DNA, 120 bp, synthetic construct
  source 1..120: mol_type = other DNA
atagtttttatattttttgtagaaacggggtttcatcatgttgtccaggcaggtcttgaacttctggggtcaagtgatttgcccacctcagtcccccaaagtgctggaattacaggtgtg

SEQ ID NO: 89991 - DNA, 120 bp, synthetic construct
  source 1..120: mol_type = other DNA
ttaccatcatggctgtggaaatcagtttagcatttcctcaaaaagttaaaacaggccaggctcagtggcttacacttgtaaatccagcactttgggaggccgaggcgagcggatcaactt

SEQ ID NO: 89992 - DNA, 120 bp, synthetic construct
  source 1..120: mol_type = other DNA
agcctgggggacaaagcgagactccgtctcaaaaaaaaaaaaaagtaccctgaacatccagcttttctttattgtaatccagttttagtgactagcttttgggcttttttgcttgtaaga

SEQ ID NO: 89993 - DNA, 120 bp, synthetic construct
  source 1..120: mol_type = other DNA
aagtaaacttaaatatataatagaagttagggtccatttgtataattttgctttgaaatcaagttaaagggccaggtgcggtggcttatgcccacaatcccagcactttgggaggccgag

SEQ ID NO: 89994 - DNA, 120 bp, synthetic construct
  source 1..120: mol_type = other DNA
tagaattttttgtgtctaatactgaattcgacaaccaggaagttttttgggtttttgtggggtgttttttttttttttgagacagagtcttgctctctcgcccaggctagagcgcagcag

SEQ ID NO: 89995 - DNA, 120 bp, synthetic construct
  source 1..120: mol_type = other DNA
tcaagtgagccaccttccacctctgcccaaagtgctgggattacaggcgtgagccaccatgcctggccattcttgattaatttttatggcatttaattaaataaatttattgttaagagg

SEQ ID NO: 89996 - DNA, 120 bp, synthetic construct
  source 1..120: mol_type = other DNA
cctcggcctcccaaagtgctgggattacaggcatgagccaccacgcccagccttaggagaatgattgtaaaaagtaaattcatgtaatgattttatttagtttggatattgttagggctt

SEQ ID NO: 89997 - DNA, 120 bp, synthetic construct; identical to SEQ ID NO: 26698
  source 1..120: mol_type = other DNA

SEQ ID NO: 89998 - DNA, 120 bp, synthetic construct
  source 1..120: mol_type = other DNA
gaccagcctggccaatatggtgaaacccgtctctactaaaaatacaaaaattagccaggtatggtggtgtgtgcctgtaataccagctacttgggaggctgaggcaggagaatcgcttga

SEQ ID NO: 89999 - DNA, 120 bp, synthetic construct
  source 1..120: mol_type = other DNA
actgcactccatgcactccagcctgggcgacagagtgagactccgtctcaaaaaaaaaaaaagaaaaaaagaaaaaaaaagtgcagctggctgccagcgctcatttaattttacataaac

SEQ ID NO: 90000 - DNA, 120 bp, synthetic construct
  source 1..120: mol_type = other DNA
taggagctacaattcaggatgagatttgggttggggacacagccaaactatatcatcccccaaaaaatttagggttctttgccaaaaggaagggagaatggatgctgagcagactaaaat

SEQ ID NO: 90001 - DNA, 120 bp, synthetic construct; identical to SEQ ID NO: 26699
  source 1..120: mol_type = other DNA

SEQ ID NO: 90002 - DNA, 120 bp, synthetic construct; identical to SEQ ID NO: 26700
  source 1..120: mol_type = other DNA

SEQ ID NO: 90003 - DNA, 120 bp, synthetic construct
  source 1..120: mol_type = other DNA
tcatgcctgtaatctgagcactttgggagaccaaggcgggtagatcccttgtgcccaggagttcaagaccagcctgggcaacatggcgaaaccccatttctactaaaaatacaaaaatta

SEQ ID NO: 90004 - DNA, 120 bp, synthetic construct
  source 1..120: mol_type = other DNA
atgatccacccgccttggcctcccaaagtgctgggattataggtgtaagtcaccatgcccagcccattagtctatatttttaagtaaacataccaattaagaaagaagccaaaaaccaaa

SEQ ID NO: 90005 - DNA, 120 bp, synthetic construct; identical to SEQ ID NO: 26701
  source 1..120: mol_type = other DNA

SEQ ID NO: 90006 - DNA, 120 bp, synthetic construct
  source 1..120: mol_type = other DNA
tatattcctgaaattttttgtttttttgttttttttttgagatgaagtctcaccctgtcactcagactggagtgcactggcacgatctcagctcactgcaacctccgcttcctaggttca

SEQ ID NO: 90007 - DNA, 120 bp, synthetic construct
  source 1..120: mol_type = other DNA
tgacctcatgtgatccacctgcctcggactcccacagtgctgggattacaggtgttagccaccaccccgacattatttgaaacttttattttatcatgagagagttccaggagtcaactg

SEQ ID NO: 90008 - DNA, 120 bp, synthetic construct
  source 1..120: mol_type = other DNA
aatgcaattgtgagaatttttatgattcagaaaaatctaagcaagctttataaaaacatacttttttttttacttttttttttttttctgagacacagcctcactctgtcgcccaggctg

SEQ ID NO: 90009 - DNA, 120 bp, synthetic construct
  source 1..120: mol_type = other DNA
agtgagctgagatcacgccactgcattccagcctgggtgacagagcaatactctgtcgcaaaaaaaaaaaagaatactggaggctgggcgaggtggctcacacctgtaatcccagcattt

SEQ ID NO: 90010 - DNA, 120 bp, synthetic construct; identical to SEQ ID NO: 26702
  source 1..120: mol_type = other DNA

SEQ ID NO: 90011 - DNA, 120 bp, synthetic construct
  source 1..120: mol_type = other DNA
tgcagtgatctgtgattgcgcctctgcactccagcctgggcgacagagccagaccctgtcttaaaacaaaataaacggccgggcgcggtggctcaagcctgtaatcccagcactttggga

SEQ ID NO: 90012 - DNA, 120 bp, synthetic construct; identical to SEQ ID NO: 26703
  source 1..120: mol_type = other DNA

SEQ ID NO: 90013 - DNA, 120 bp, synthetic construct
  source 1..120: mol_type = other DNA
aaactttgtctttaaaaaaaaaaaaaaaaaaagaatacaaaaattagccgggcgtggtggcgcgtgcctataatcccagctacttgggaggctgaggcaggagaatcagttgaacacggg

SEQ ID NO: 90014 - DNA, 120 bp, synthetic construct; identical to SEQ ID NO: 26704
  source 1..120: mol_type = other DNA

SEQ ID NO: 90015 - DNA, 120 bp, synthetic construct; identical to SEQ ID NO: 26705
  source 1..120: mol_type = other DNA

SEQ ID NO: 90016 - DNA, 120 bp, synthetic construct
  source 1..120: mol_type = other DNA
ttaacaagtagagccactatgaatattagtgtataagacttcatatagccaaggctggcagatcgcttgagcccaggagtttgagaccagcctgggaaacatggtgaaacctctattttt

SEQ ID NO: 90017 - DNA, 120 bp, synthetic construct; identical to SEQ ID NO: 26706
  source 1..120: mol_type = other DNA

SEQ ID NO: 90018 - DNA, 120 bp, synthetic construct; identical to SEQ ID NO: 26707
  source 1..120: mol_type = other DNA

SEQ ID NO: 90019 - DNA, 120 bp, synthetic construct
  source 1..120: mol_type = other DNA
tttttcgttttttttttttgagacaagagtttcgctcttgttgcccaggctggagtgcagtggcgcgatcttggctcaccacaacctccacctcccaggttcaagcaattcttctgcctc

SEQ ID NO: 90020 - DNA, 120 bp, synthetic construct
  source 1..120: mol_type = other DNA
ccttgattttgtgatttctttatttcttcaggaccacccttcattttctactgtttgcttcctttttttttgagatggagtctcactctgtcactcaggctggagtgcagtgatcttggc

SEQ ID NO: 90021 - DNA, 120 bp, synthetic construct
  source 1..120: mol_type = other DNA
accagttttgccaagatgatgaaagcccatgtctactaaaaatacaaaaattagcccagcttgatggtgggcgcctataatcccagctatttgagagactgaggcaggagaatcacttga

SEQ ID NO: 90022 - DNA, 120 bp, synthetic construct
  source 1..120: mol_type = other DNA
ttttttttttgggggttttttttgtttttttttgtttttttttcccagacaaggtctcaatttgttacccaggctggagtgcagcggcgccatctccactcactgcatcctcaacttcct

SEQ ID NO: 90023 - DNA, 120 bp, synthetic construct
  source 1..120: mol_type = other DNA
tcagtgacttgcacagtgctagcagatagtgctaaaaaattatttattattattattattttgttattgttgttgttgttgttagacagggtcttcctctgtcacccaggctagagggca

SEQ ID NO: 90024 - DNA, 120 bp, synthetic construct; identical to SEQ ID NO: 26708
  source 1..120: mol_type = other DNA

SEQ ID NO: 90025 - DNA, 120 bp, synthetic construct; identical to SEQ ID NO: 26709
  source 1..120: mol_type = other DNA

SEQ ID NO: 90026 - DNA, 120 bp, synthetic construct
  source 1..120: mol_type = other DNA
gcctgtaatcccagtactttgggaggctgaggcgagcaaatcacgaggtcaggagttcaagaccagcctggcccacatggtgaaaccccgtctttattaaaaatacaaaaattagctgtg

SEQ ID NO: 90027 - DNA, 120 bp, synthetic construct; identical to SEQ ID NO: 26710
  source 1..120: mol_type = other DNA

SEQ ID NO: 90028 - DNA, 120 bp, synthetic construct; identical to SEQ ID NO: 26711
  source 1..120: mol_type = other DNA

SEQ ID NO: 90029 - DNA, 120 bp, synthetic construct; identical to SEQ ID NO: 26712
  source 1..120: mol_type = other DNA

SEQ ID NO: 90030 - DNA, 120 bp, synthetic construct; identical to SEQ ID NO: 26713
  source 1..120: mol_type = other DNA

SEQ ID NO: 90031 - DNA, 120 bp, synthetic construct; identical to SEQ ID NO: 26714
  source 1..120: mol_type = other DNA

SEQ ID NO: 90032 - DNA, 120 bp, synthetic construct
  source 1..120: mol_type = other DNA
ctcctgcctcagcctcagaggtagctgggactacaggtgcctgccaccacgcctgtctaattttttgtatttttttgtaaagacagggtttcactgtgttagccaggatggtctcaatct

SEQ ID NO: 90033 - DNA, 120 bp, synthetic construct
  source 1..120: mol_type = other DNA
ctcacacctataatcccagtactttgggaggtagaggcaggtggatcacttgaggttaggagttcaggaccagcctggccaacatggtgactactccatttctactaaatacacaaaact

SEQ ID NO: 90034 - DNA, 120 bp, synthetic construct; identical to SEQ ID NO: 26715
  source 1..120: mol_type = other DNA

SEQ ID NO: 90035 - DNA, 120 bp, synthetic construct; identical to SEQ ID NO: 26716
  source 1..120: mol_type = other DNA

SEQ ID NO: 90036 - DNA, 120 bp, synthetic construct
  source 1..120: mol_type = other DNA
ctgggttcaagtgattctcctgcctcagcttcccgagtagctgtgattacagccatatgccaccacgcccagccagttttgtgttttgttttgttttttgttttttttttttgagagggt

SEQ ID NO: 90037 - DNA, 120 bp, synthetic construct
  source 1..120: mol_type = other DNA
ccccctacctccgcctcccaaagttgtgggattgtaggcatgagccactgcaagaaaaccttaactgcagcctaataattgttttctttgggataacttttaaagtacattaaaagacta

SEQ ID NO: 90038 - DNA, 120 bp, synthetic construct; identical to SEQ ID NO: 26717
  source 1..120: mol_type = other DNA

SEQ ID NO: 90039 - DNA, 120 bp, synthetic construct; identical to SEQ ID NO: 26718
  source 1..120: mol_type = other DNA

SEQ ID NO: 90040 - DNA, 120 bp, synthetic construct
  source 1..120: mol_type = other DNA
atcacctgagatcaggagttccagaccagcctggccaacatagtaaaaccctgtctctactaaaaatacaaaaattagcccggcatggtggcacgccctgtagtcccagctacttgggag

SEQ ID NO: 90041 - DNA, 120 bp, synthetic construct; identical to SEQ ID NO: 26719
  source 1..120: mol_type = other DNA

SEQ ID NO: 90042 - DNA, 120 bp, synthetic construct
  source 1..120: mol_type = other DNA
accatttattaaatagggaatcctttccccattgcttgtttttctcaggtttgtcaaagatcagatagttgtagatatgcggcgttatttctgagggctctgttctgttccattggtcta

SEQ ID NO: 90043 - DNA, 120 bp, synthetic construct
  source 1..120: mol_type = other DNA
gagggattgttgaattttgtcaaaggccttttctgcatctattgagataatcatgtggtttttgtctttggttctgtttatatgctggattacatttattgatttgcgtatgttgaacca

SEQ ID NO: 90044 - DNA, 120 bp, synthetic construct
  source 1..120: mol_type = other DNA
gtctttgttctcgttggtttcaaagaacatctttatttctgccttcatttcgttatgtacccagtagtcattcaggagcaggttgttcagtttccatgtagttgagtggttttgagtgag

SEQ ID NO: 90045 - DNA, 120 bp, synthetic construct; identical to SEQ ID NO: 23296
  source 1..120: mol_type = other DNA

SEQ ID NO: 90046 - DNA, 120 bp, synthetic construct; identical to SEQ ID NO: 23297
  source 1..120: mol_type = other DNA

SEQ ID NO: 90047 - DNA, 120 bp, synthetic construct; identical to SEQ ID NO: 15487
  source 1..120: mol_type = other DNA

SEQ ID NO: 90048 - DNA, 120 bp, synthetic construct; identical to SEQ ID NO: 15488
  source 1..120: mol_type = other DNA

SEQ ID NO: 90049 - DNA, 120 bp, synthetic construct
  source 1..120: mol_type = other DNA
atccacccacctcggcctcctaaagtgctgggattacaggcgtgagccacggccctggccttgaatcatttttatgtgcttattggccatttttattcttgtgggaagtgcctgtttctc

SEQ ID NO: 90050 - DNA, 120 bp, synthetic construct; identical to SEQ ID NO: 641
  source 1..120: mol_type = other DNA

SEQ ID NO: 90051 - DNA, 120 bp, synthetic construct; identical to SEQ ID NO: 642
  source 1..120: mol_type = other DNA

SEQ ID NO: 90052 - DNA, 120 bp, synthetic construct; identical to SEQ ID NO: 643
  source 1..120: mol_type = other DNA

SEQ ID NO: 90053 - DNA, 120 bp, synthetic construct; identical to SEQ ID NO: 644
  source 1..120: mol_type = other DNA

SEQ ID NO: 90054 - DNA, 120 bp, synthetic construct
  source 1..120: mol_type = other DNA
atcagtgtctttcaaacttgttttttagctgaagtccccttagttcaagtgaactcttactcaggagtctgtttttttttaatggaggtggaggtctggagctctaccagattcatcgtc

SEQ ID NO: 90055 - DNA, 120 bp, synthetic construct
  source 1..120: mol_type = other DNA
ccacttgtctcagcctcctgaactgctgggattacatgtgtgagccactgtgcccggctccttgctgtttttatactttctccatatacataactatttcccatgtaagtttttttttaa

SEQ ID NO: 90056 - DNA, 120 bp, synthetic construct
  source 1..120: mol_type = other DNA
ggtgggccttcctgagactccctctctagaggtttatgttactgtcctttcaagagaatccagattcaggctttgagttctgtggctgtgggcaaaaaccaacaaagacccaagtcctct

SEQ ID NO: 90057 - DNA, 120 bp, synthetic construct; identical to SEQ ID NO: 15489
  source 1..120: mol_type = other DNA

SEQ ID NO: 90058 - DNA, 120 bp, synthetic construct
  source 1..120: mol_type = other DNA
aaattctatctctttccctctcccttccaactttactgagttcttttaataaccaggccacgggcttggaaatgccttgacctttactgaccgagttgtatattgagcctagccctagcc

SEQ ID NO: 90059 - DNA, 120 bp, synthetic construct
  source 1..120: mol_type = other DNA
tgcccgttgtcagccacccacagtgctctctatgtgaaagtggcttggaaattggctaccattgggtgcgaggaatgattagcagtgaggccaagtttgggaagcctgagaggagctgtg

SEQ ID NO: 90060 - DNA, 120 bp, synthetic construct
  source 1..120: mol_type = other DNA
caacgagaaaaagagcgcactgcagttggagcagcaagtaaaggagctgcaggagaagctagacgaggtgaaggagatggtaacctccaccccatccaagaagggctgggaggcgggcac

SEQ ID NO: 90061 - DNA, 120 bp, synthetic construct
  source 1..120: mol_type = other DNA
gccctcgctaccctattaatgggcccagaatctggaagccagccaccatgtgccctcatgcccagggtcttcctgcaggtggagctgaagagccaagagtctcagagtctgcagcagcag

SEQ ID NO: 90062 - DNA, 120 bp, synthetic construct; identical to SEQ ID NO: 15490
  source 1..120: mol_type = other DNA

SEQ ID NO: 90063 - DNA, 120 bp, synthetic construct
  source 1..120: mol_type = other DNA
ctcgcactgtgctcagacccccgcctccctctctccgaagttttttatgaagtgagcctggacaacaacgtggagcctgcaccaggagtggccagggagggttctccccataacaacccc

SEQ ID NO: 90064 - DNA, 120 bp, synthetic construct
  source 1..120: mol_type = other DNA
agaatgagcgctgcactatggtagttcccttaggatttgtatgtgctctgggctcatgaagatattgcatcatgagctgcagcagttgtaccctttcttgatgacctaaaaagggattat

SEQ ID NO: 90065 - DNA, 120 bp, synthetic construct
  source 1..120: mol_type = other DNA
tacattgcctaaatcataactttaagatgcttgggaaagaatcaacagctaaaagttcatgaagttctaatgtctgtgttccaaaatacgtcacagtattaggatgcagggagagatgtg

SEQ ID NO: 90066 - DNA, 120 bp, synthetic construct; identical to SEQ ID NO: 15460
  source 1..120: mol_type = other DNA

SEQ ID NO: 90067 - DNA, 120 bp, synthetic construct
  source 1..120: mol_type = other DNA
gatgattgttatttaagagccagaggctggtggagtcggtttgtttggaggcggcctgatggcctccctaccctcaccaaagcaacttttccctcagggggctcccatcttcttattcag

SEQ ID NO: 90068 - DNA, 120 bp, synthetic construct; identical to SEQ ID NO: 15491
  source 1..120: mol_type = other DNA

SEQ ID NO: 90069 - DNA, 120 bp, synthetic construct; identical to SEQ ID NO: 15492
  source 1..120: mol_type = other DNA

SEQ ID NO: 90070 - DNA, 120 bp, synthetic construct; identical to SEQ ID NO: 15493
  source 1..120: mol_type = other DNA

SEQ ID NO: 90071 - DNA, 120 bp, synthetic construct; identical to SEQ ID NO: 15494
  source 1..120: mol_type = other DNA

SEQ ID NO: 90072 - DNA, 120 bp, synthetic construct
  source 1..120: mol_type = other DNA
agctttgtcaatggagacaggatactctagaaagttgagagattccctggtccagtctgggggaggaaaaaatatgcagtgtagcatagatggttgtacttgtccactcagacacatgct

SEQ ID NO: 90073 - DNA, 120 bp, synthetic construct; identical to SEQ ID NO: 635
  source 1..120: mol_type = other DNA

SEQ ID NO: 90074 - DNA, 120 bp, synthetic construct
  source 1..120: mol_type = other DNA
aaagtgatcctcccaccttggcttgccaaagtgttgggattacaggtgtgaactactgctcctggccgagggctcattttgtttgctagtggtgatattggtatctgtttatatttgagg

SEQ ID NO: 90075 - DNA, 120 bp, synthetic construct
  source 1..120: mol_type = other DNA
gaagctcacaggttatggagcaaatcatgaaagattcaacccttgatcccagcctagtgtggaattcaggtaacaatcaatacacagtgacataacacaattcttggttttcatgattgc

SEQ ID NO: 90076 - DNA, 120 bp, synthetic construct; identical to SEQ ID NO: 15495
  source 1..120: mol_type = other DNA

SEQ ID NO: 90077 - DNA, 120 bp, synthetic construct
  source 1..120: mol_type = other DNA
acatagacatcgacagtgtgaaaagcctacacttcccctgtgagctcaaaacgttgacagtatctctgggtggtaatgggagaatgggtttggtttggttttctcccaggcttctactct

SEQ ID NO: 90078 - DNA, 120 bp, synthetic construct; identical to SEQ ID NO: 15496
  source 1..120: mol_type = other DNA

SEQ ID NO: 90079 - DNA, 120 bp, synthetic construct; identical to SEQ ID NO: 636
  source 1..120: mol_type = other DNA

SEQ ID NO: 90080 - DNA, 120 bp, synthetic construct
  source 1..120: mol_type = other DNA
aaacatagaatcattggtaagtccagtggggtcccctgattccatgctgccaatcctgggctttagtttccccttggggccctgaagaaaggggctgggggcccctggtgccaagggcaa

SEQ ID NO: 90081 - DNA, 120 bp, synthetic construct
  source 1..120: mol_type = other DNA
tggtggcattctgggggcatgtctcttgctgtgccatctctgcctccctgtgataagagctctgtcttcctcttcctacaggcaaagaaaacaaacaatgaaatacacaaagcacaaatg

SEQ ID NO: 90082 - DNA, 120 bp, synthetic construct; identical to SEQ ID NO: 637
  source 1..120: mol_type = other DNA

SEQ ID NO: 90083 - DNA, 120 bp, synthetic construct; identical to SEQ ID NO: 15497
  source 1..120: mol_type = other DNA

SEQ ID NO: 90084 - DNA, 120 bp, synthetic construct; identical to SEQ ID NO: 638
  source 1..120: mol_type = other DNA

SEQ ID NO: 90085 - DNA, 120 bp, synthetic construct
  source 1..120: mol_type = other DNA
aatcgcttgagcccacgtggtggaggctgcagtgagctgagattgcaccactgcactccagcctgggccacagagtgacactgtctcaaaacaaaacaaaaaaggctccttagattcaaa

SEQ ID NO: 90086 - DNA, 120 bp, synthetic construct
  source 1..120: mol_type = other DNA
gaagctgccagccagcggaaccaacagctagagacccagctaagcctcgtggctctccctggagaaggtacaggagaccactcagaggaagaggagagagccccaggaggaaggggggac

SEQ ID NO: 90087 - DNA, 120 bp, synthetic construct; identical to SEQ ID NO: 15498
  source 1..120: mol_type = other DNA

SEQ ID NO: 90088 - DNA, 120 bp, synthetic construct; identical to SEQ ID NO: 639
  source 1..120: mol_type = other DNA

SEQ ID NO: 90089 - DNA, 120 bp, synthetic construct
  source 1..120: mol_type = other DNA
acctctctggctaatacctattcttcaaccacactagttactctgacataggaatttacttcttttctttgaatggaaaacactttaaaaataataacaatcattattataaaccaatat

SEQ ID NO: 90090 - DNA, 120 bp, synthetic construct
  source 1..120: mol_type = other DNA
agcccgagggtttaaaatggacttcaagtcctgttcttgccttttattttctgaacttgccacttttgcattctttgagttcagtttaaagacagtttgagtccaatttagaccctcggg

SEQ ID NO: 90091 - DNA, 120 bp, synthetic construct
  source 1..120: mol_type = other DNA
tattcaaaacagatccctttcgatcacacctaagtttatgtaaaggagatgtaaagtctctaaggatgagggctagttgccagggaacaaaacccttgcgattagagggaagaaaggaga

SEQ ID NO: 90092 - DNA, 120 bp, synthetic construct
  source 1..120: mol_type = other DNA
gaagccactggcttagtatgaaggatatagttgaggttctcagtgaccggggtcatgagattgtagtggtggtgcctgaagttaatttgcttttgaaagaatccaaatactacacaagaa

SEQ ID NO: 90093 - DNA, 120 bp, synthetic construct
  source 1..120: mol_type = other DNA
ataatcaccttatatcagaaggtctctgtttggctgttaagatatgactttgtgcttgaatatcctaggccggtcatgcccaacatggtcttcattggaggtatcaactgtaagaagagg

SEQ ID NO: 90094 - DNA, 120 bp, synthetic construct
  source 1..120: mol_type = other DNA
ccagttccttttttatcagagagaaagcctcaaacaggtcccaaagacccttacctctcttctttacacctgctgatttctctgttaacaatttgaacagttggcagtagccactgtgaa

SEQ ID NO: 90095 - DNA, 120 bp, synthetic construct
  source 1..120: mol_type = other DNA
ttcacccccccttccctacttaccctttccaccttctggtaattaccaatgaactctctacctccatgagacccacttttttagctccacatataaatgagaacatgtggtatttgtctt

SEQ ID NO: 90096 - DNA, 120 bp, synthetic construct
  source 1..120: mol_type = other DNA
aataatttgacttcttcctttccaacttggatgccctttctttctttctttctcttgcttaattgctttggataggacttccagtactatgaagaataacagtgctgacagtcagcatct

SEQ ID NO: 90097 - DNA, 120 bp, synthetic construct
  source 1..120: mol_type = other DNA
tcctttgtatttctgtggtgtcagttgctgtgtttcctttttcatttctgattttatctgagtgttttctctttttcttagtctagctcaaggtttgccaattttgtttatctttttttt

SEQ ID NO: 90098 - DNA, 120 bp, synthetic construct
  source 1..120: mol_type = other DNA
agaagatatatcacagatcatagaaaatgaagccctgatttatagcttaaaaatgcagtcctcattaggcaaatcacataatcggcaatacataaagtaaacagaacacgagtggccaac

SEQ ID NO: 90099 - DNA, 120 bp, synthetic construct
  source 1..120: mol_type = other DNA
tcattggagtgttttccttagaacaaaggaggtcagaagtaaatcctagtctcttctacttgtaatacaaagaactgttcaagccttccgaaggacagggccattcacatcatagagcca

SEQ ID NO: 90100 - DNA, 120 bp, synthetic construct
  source 1..120: mol_type = other DNA
aatacgtgacttaggccaatgtctacaatgcctttaaaattctgcctctctttcaaaaccctgtgcttatctttatggctgattatctggggcatttccaggcatgtggaacattttggc

SEQ ID NO: 90101 - DNA, 120 bp, synthetic construct
  source 1..120: mol_type = other DNA
ttagagatctacaaagagacttagactcccacacaataatagtgggagactttaacaccccactgtcaacattagacagatcaacgagacagaaagttaacaaggatacccaggaattga

SEQ ID NO: 90102 - DNA, 120 bp, synthetic construct; identical to SEQ ID NO: 22105
  source 1..120: mol_type = other DNA

SEQ ID NO: 90103 - DNA, 120 bp, synthetic construct
  source 1..120: mol_type = other DNA
gccttgtagaagaaactggggaatgttctcttctattttttgggaacagtctgtcaagaattggtattcattctttacatatttgatagaattcactagtgaagctgtctgggcctaggc

SEQ ID NO: 90104 - DNA, 120 bp, synthetic construct
  source 1..120: mol_type = other DNA
gtagatggaattatgtctaccatcatttttttcttttcttttttttttgagacaaaatctcattctgttacccagactggagtgcagtggtgtgatcttggcccactgcaacctccgcct

SEQ ID NO: 90105 - DNA, 120 bp, synthetic construct
  source 1..120: mol_type = other DNA
tataattatatatatgtatattgctttttaggattgcttttaaaatcagttaagagaatagggccgggcacggtggctcactcctgtaatcccagcactttggaaggctgaggcaggtgg

SEQ ID NO: 90106 - DNA, 120 bp, synthetic construct
  source 1..120: mol_type = other DNA
gatcagctgcatactttgagtgtcttagtgcaaaatgccccttgttcaaaaattattaagaatttcaggccgagcacagtggctggagctgaagtgggaagctgaggcaggcagatcact

SEQ ID NO: 90107 - DNA, 120 bp, synthetic construct
  source 1..120: mol_type = other DNA
aggcattttacaatcctagctgccagagtatgagtctggtgagatggaatgcttgtgcaagtcaggcaaagaaacttgattcttcacagataggcagtaagaatcaacaggaacctagga

SEQ ID NO: 90108 - DNA, 120 bp, synthetic construct
  source 1..120: mol_type = other DNA
acctaggggtggagctgctgcgttggagggcgtgcatatcattaatttaataagatgtaactatttttcagagtggttgtacatatccctgattgctaaggcattagttatgtacatgac

SEQ ID NO: 90109 - DNA, 120 bp, synthetic construct
  source 1..120: mol_type = other DNA
actccccacccccccccaaatcaatgcaacctgtgatcactttatttgggcaacttccccaaattcttgactcagtgaatttgttgcagggcttttcttttttaatctcttttattggtt

SEQ ID NO: 90110 - DNA, 120 bp, synthetic construct
  source 1..120: mol_type = other DNA
gcaccgttttaatgatacatttctgagttgtaatgattttatttagctgtgcagccatcaccacattcaagacacggagcactccattacccagtaacttcccttctgtcctatctcagt

SEQ ID NO: 90111 - DNA, 120 bp, synthetic construct
  source 1..120: mol_type = other DNA
ggtttgggtggaaagaggtctttagaccacttagtctttgtttaggtctttgtttatgtctctgagattggcagaggggaatatacaatcattcagatcaggctattggatgcctttttc

SEQ ID NO: 90112 - DNA, 120 bp, synthetic construct
  source 1..120: mol_type = other DNA
aggcgtcagcaatcttgccaagcacaagtatgagtgactttctggagcaggacgagtctcatgggcgtgagaccattgtgagtgctcagggtctctccattagaaaggcacacgtttaat

SEQ ID NO: 90113 - DNA, 120 bp, synthetic construct
  source 1..120: mol_type = other DNA
gggcccataatgcaagacaattatagattaacgggtaataagtaactggaggagggcactctgtcttcaattacatgttgatttgctaggtgtctcagtgacaaggtaattaagacgaag

SEQ ID NO: 90114 - DNA, 120 bp, synthetic construct
  source 1..120: mol_type = other DNA
agagggaggtgtcagtggtggatcttctcagccatgcatctgtgtggctgttccgaggggactttgtgatggattaccccaggccgatcatgcccaacatggtcttcattgggggcatca

SEQ ID NO: 90115 - DNA, 120 bp, synthetic construct
  source 1..120: mol_type = other DNA
cctttcaacatgtgaactgtttaacgtagctttttttgttgttaagtcttcaaaatctagcatatatttgacacttacagtatatctcaatttggaatagccacatttcaagtgctcaat

SEQ ID NO: 90116 - DNA, 120 bp, synthetic construct
  source 1..120: mol_type = other DNA
ctatgttattttttgaattccccatctcttttaatttgaaaatgatttgtgtgcaagtgggtagctcacacctgtaatttcagccctttgggagaccgagggaggaggattgcttgagcc

SEQ ID NO: 90117 - DNA, 120 bp, synthetic construct
  source 1..120: mol_type = other DNA
catcttattcaaaacttggaggttttccttcatttggccatttaaatttaatttttgtttctgtcctccgtagtcttctattctccaggcttcagagctctcagcttaccattcaattat

SEQ ID NO: 90118 - DNA, 120 bp, synthetic construct
  source 1..120: mol_type = other DNA
gaatctgttatcaatgtggatttctaatgggagtaacttcctccataagggaagcctcagcctcaccagcaatggcagacatggccaggcatgtagacacagaggtagtgagatggaaag

SEQ ID NO: 90119 - DNA, 120 bp, synthetic construct
  source 1..120: mol_type = other DNA
gttgtatgtcttttggatgtgctgtgttattcacatatgagaagaaagagtttcaagggttagcaaatagcgtcacattcagcagagaacatgtggttggggactagggcaatggtgact

SEQ ID NO: 90120 - DNA, 120 bp, synthetic construct
  source 1..120: mol_type = other DNA
tttttttggaggtacattccatgtgacttagactttaagggcacacagtgtccaaatccttcctcctatattcctaagttactaacgaccaattcagaccacatgacattcctgcaaagg

SEQ ID NO: 90121 - DNA, 120 bp, synthetic construct
  source 1..120: mol_type = other DNA
catcgtagagtttggaaggtatggtgatggttgcatgtcaaaagggtcttctacttggaatgctgaaattatcaagagtgggtggaagggactagggaggagataagaccgtgaatctat

SEQ ID NO: 90122 - DNA, 120 bp, synthetic construct
  source 1..120: mol_type = other DNA
gactgaactgcactggctcaaatcttcactctcatttttctagctatgtgacctaggacaggtaccctaagcattgtggttttaatgttgttatagtgagcacccaataaatattatctg

SEQ ID NO: 90123 - DNA, 120 bp, synthetic construct
  source 1..120: mol_type = other DNA
cactgtttcattttccgtttcgttaattgcagcttatttttgccttaatgatttcatcctagtttcttttggttgatttgtagctgcttttgcaacttcgttagaggactattacacttc

SEQ ID NO: 90124 - DNA, 120 bp, synthetic construct
  source 1..120: mol_type = other DNA
ttgctttagtttcagtgcccaaaccatagaagggtccatgtggtaaaaaaagtcaaaactgacttttttttttttttttgagttggagtcctgctgtcacccaggctggagtgcaatggc

SEQ ID NO: 90125 - DNA, 120 bp, synthetic construct
  source 1..120: mol_type = other DNA
aagaggcgctcctcacttcctagatgggatggcggccgggtgaagacgctcctcgctttccagactgggcagccaggcagaggggctcctcacatcccagacgatgggcggccaggcaga

SEQ ID NO: 90126 - DNA, 120 bp, synthetic construct
  source 1..120: mol_type = other DNA
ataatccttaaaatccattttattggataccagtattgctactcctatgttattttttcaattccccatctcttttaatttgaaaatgatttgtaggcaggtgggtggctcacacctgca

SEQ ID NO: 90127 - DNA, 120 bp, synthetic construct
  source 1..120: mol_type = other DNA
tacactgtcctgcccagatacccaggacaatctccccatcttaaaactcttaatttaatcatatctgtgaagtctcttccacctgtaacggaacatattcccaggtttgaggaagtacaa

SEQ ID NO: 90128 - DNA, 120 bp, synthetic construct
  source 1..120: mol_type = other DNA
gaaatcagatgacttcactgtctaaataaaacactactacttggaggtagaacatgggagcccatgaatgtgggaagagcacactaccaggcgtgttccacccgtcacctgggctcatca

SEQ ID NO: 90129 - DNA, 120 bp, synthetic construct
  source 1..120: mol_type = other DNA
acatagccagcctccacgctgttcagagaaagctggcttagcaatgttgtatggtttttggatgcgctgcgttactcatacatgagaagaaagtttcaagggttagcaaatagggtcaca

SEQ ID NO: 90130 - DNA, 120 bp, synthetic construct
  source 1..120: mol_type = other DNA
tacctgtcgattcctgctgtgtttttcttgaggaacattccatgtgatttagactttaagggcacacagtgtccaaacccttcctcctatattcctagattactaacgaccaattcagac

SEQ ID NO: 90131 - DNA, 120 bp, synthetic construct
  source 1..120: mol_type = other DNA
tcagagttcggaaggcaaagtaatggttgcatctcaaatgattcttctacttggaatgctgaaattatcaagaaatggcggaaggggctagggaggagataagactgtgaatctataagc

SEQ ID NO: 90132 - DNA, 120 bp, synthetic construct
  source 1..120: mol_type = other DNA
gcatgtgtccttagagtagtatcatttataatcgtttgggtatatacccagtaatggtatggctgtgtcaaatggtatttctagttctaggtccttgaggaatcgccacactgtcttcca

SEQ ID NO: 90133 - DNA, 120 bp, synthetic construct
  source 1..120: mol_type = other DNA
ccatatgaactttaaagtagttttttccaattttgtgaagtcattggtagcttgatgggtttggcattgaatctataaattaccttgggcagtatggccattttcacgatattgattctt

SEQ ID NO: 90134 - DNA, 120 bp, synthetic construct
  source 1..120: mol_type = other DNA
tgctggatttggtttgcagaattttactgaggatttttgcatcgatgttcatcagggatatttgtctaaaattttctttttttgttgtgtccctgccaacctttggtatcaggatgatgc

SEQ ID NO: 90135 - DNA, 120 bp, synthetic construct
  source 1..120: mol_type = other DNA
agtttccatgtagttgtgcgattttgagtgagtttcttaatccagagttctaatttgactgcactatggtctgagagacagtttgttgtgatttctattcttttacatttgctaaggagt

SEQ ID NO: 90136 - DNA, 120 bp, synthetic construct
  source 1..120: mol_type = other DNA
tcagcatttgcttgtctataaaggattttatttctccttcacttatgaagcttactttggctgcatatgaatttctgggttgaaaattcttttctttaagaatgttgaatattggccccc

SEQ ID NO: 90137 - DNA, 120 bp, synthetic construct
  source 1..120: mol_type = other DNA
ttgctagcaaggagctgtgatcctttggaggagatgtgcttatgcgctatggtttttagaattttcagcttttctgctctagtttccccccatctttgtggttttatgtaccttaggtct

SEQ ID NO: 90138 - DNA, 120 bp, synthetic construct
  source 1..120: mol_type = other DNA
atcatccatcttctgcgtcgatcatgctgggagctgcagatcggagctgttcctatttggccattggtgctgaagcttccgttctcctctccaacacctcctttttttttccttttctct

SEQ ID NO: 90139 - DNA, 120 bp, synthetic construct
  source 1..120: mol_type = other DNA
ctttatagcagtgtgtgaatggactaatacagtaaattggtgtcatggagagtggggtactgctataaaactacttgaaaatgtggaagtgacttggaactgggtaacaggcagaggctg

SEQ ID NO: 90140 - DNA, 120 bp, synthetic construct
  source 1..120: mol_type = other DNA
cctagtggagttgtgagaagaaggccacagtccttcagaacccagaagggcagatccaatagcttgcactgtgtgcctggaagagccacagacatcaatgccaccctctgaaagcagcca

SEQ ID NO: 90141 - DNA, 120 bp, synthetic construct
  source 1..120: mol_type = other DNA
gttatactgaaagggtttaaaggagagtctgagaaaaggaaatgaatctgcatttattgagaaagttgatgagaaagtggaattagaaattcctagaaaggtaagttgttgtgtgaatta

SEQ ID NO: 90142 - DNA, 120 bp, synthetic construct
  source 1..120: mol_type = other DNA
tatgacagcactaatccaggatatatcaaaactgaacttgtgtttgctttcaactgttaaaactagccagagttgttacagacccactacctctgagtgacactggtatgccactctttg

SEQ ID NO: 90143 - DNA, 120 bp, synthetic construct
  source 1..120: mol_type = other DNA
ttcagggctgagagccccaaacagagatttacccacatatttattgacagcaagcctgtgataagcatcatttctatagattatagattaactaaaagtattccttacgggaaacaaagg

SEQ ID NO: 90144 - DNA, 120 bp, synthetic construct
  source 1..120: mol_type = other DNA
ctagcactaggaaataatcattgtctgcctcaggcttaagtttaataaatagcaaattgcatacagatatttacaatgatcgaaagacaaacagaggtcctatccgtgcagtcccaacaa

SEQ ID NO: 90145 - DNA, 120 bp, synthetic construct
  source 1..120: mol_type = other DNA
ttgagcgccagcttgcggtacgccttcttgatggcctcggatgaggcctgccggggcacgtccagcacctcgtagtagtccaccatgctggatggccagaacggcccaccaggcactggc

SEQ ID NO: 90146 - DNA, 120 bp, synthetic construct
  source 1..120: mol_type = other DNA
tgtacacttgtgagagaatgacggtgaaaaaatcaagtagcattattatggaaatagttttaactttgcaaaattctcctgaaaaattcttggggatccctaggatttcctggctcatac

SEQ ID NO: 90147 - DNA, 120 bp, synthetic construct
  source 1..120: mol_type = other DNA
ttggtaagcacacaatgaacagtcatagaaagctggccgagggtagagttcagtgtgaacaaagcaatttgggaacatcaaagcaagtttggagaacaacaagtgatccagaatggctgg

SEQ ID NO: 90148 - DNA, 120 bp, synthetic construct
  source 1..120: mol_type = other DNA
gttcacctgacccctcctttcaggcaaggaccatttctaacttggctttctgtcccgagttcctagcatagtaggtagggctcacacattccataaatatttggtggataagggaattag

SEQ ID NO: 90149 - DNA, 120 bp, synthetic construct
  source 1..120: mol_type = other DNA
actttgaaacagaacattttctgaagacattttctaaaagtatggcaattttgaaaaattcatctttggtctttcataggtcttgtgtggagctactgcataatgaggccctgatcaggc

SEQ ID NO: 90150 - DNA, 120 bp, synthetic construct
  source 1..120: mol_type = other DNA
tgactcagttcagtggaagtagagcaacgaacgtgggatatatgtctgtgattatagaattacacactgagttcagtttccagagagggatctgtgctgacaaaagatttttctggtcag

SEQ ID NO: 90151 - DNA, 120 bp, synthetic construct
  source 1..120: mol_type = other DNA
acagatcactcttgctatgccccttagagaattagagaacactagcaaggctaattttcgagtgtggtaaagaacaggctaatgtattcaatagtgaggccactgactctgtctcaacat

SEQ ID NO: 90152 - DNA, 120 bp, synthetic construct
  source 1..120: mol_type = other DNA
aaattcaaaccagctacagaaatactggctatagaaatttgcataagtaaggaggagccaaatgttaattgccaagacaatggggaaaatggcttcagtgcacatcagagacctttgcag

SEQ ID NO: 90153 - DNA, 120 bp, synthetic construct
  source 1..120: mol_type = other DNA
aagactttggactatggacttttgagctagtgctgaaatgagttaagactttggaagattgttgggaaggcacgattggttttgaaatgtgaaaagacatgagatttgggaggggccaga

SEQ ID NO: 90154 - DNA, 120 bp, synthetic construct
  source 1..120: mol_type = other DNA
tgcttggtgagaaggaacaagtgtttccatggaggaaattcattttaggggtctcaagagggtcatctttgcaacagaggaaatgcccctttttccattctgaaaacctgatttatcgaa

SEQ ID NO: 90155 - DNA, 120 bp, synthetic construct
  source 1..120: mol_type = other DNA
aaagccctgacagtctgtcttattttgatacttcttgtatagttattatttaagaagcaactacccaggcaccttggagcatgttgatttcagagttcagtgtgagaccccgtgtgcccc

SEQ ID NO: 90156 - DNA, 120 bp, synthetic construct
  source 1..120: mol_type = other DNA
tttgttacagccatgataggaaacgaatgcatccactttgccaggtttacctgcttttataaagcctgggtttaaccttttatctaaataatggtcaactcttcctacatcacgagcatt

SEQ ID NO: 90157 - DNA, 120 bp, synthetic construct
  source 1..120: mol_type = other DNA
cacttgagcgccagcttgcggtacgccttcttgataccctcggacgaggcctaccggggtactcccagcacctcgtagtagtccactatgctggactgccaaagagcctgcggggcactg

SEQ ID NO: 90158 - DNA, 120 bp, synthetic construct
  source 1..120: mol_type = other DNA
gatattacacatcccccatgtagcttctggaaaactccactgtacacttgtgggagaatgacaatgagaaaatcaagtaacattattacggaaatagttttgactttgtaaaattctcct

SEQ ID NO: 90159 - DNA, 120 bp, synthetic construct
  source 1..120: mol_type = other DNA
tacataacctgaaacccggacttggcacttggtaagcacgcaatgaacagtcatagtaagctggccaagggtagagttcagtttgaacaaagcaatttgagaacatcaaaggaagtttgg

SEQ ID NO: 90160 - DNA, 120 bp, synthetic construct
  source 1..120: mol_type = other DNA
tagcatagtgactgccatccagtagggctcacacgttccataaatatttggcagatgagggaattagcaatgggttctgctttggtttcagagcagatattaattggattgcttagtagt

SEQ ID NO: 90161 - DNA, 120 bp, synthetic construct
  source 1..120: mol_type = other DNA
gtttcctgttgtgaacaaaagttctctgaaaaggaatttggaagaaagagactttgttctagtgaacagtttgcaaaccagggagttacagcctctggtacgcaatgaaggtgagttcca

SEQ ID NO: 90162 - DNA, 120 bp, synthetic construct
  source 1..120: mol_type = other DNA
agaagcctaacttgttcactacatagtcgtccttcttcctctctggtaacacttgttggtctgtggaaatactaatttaatggatcctgaggttctggaagtactttgctgtgttcactc

SEQ ID NO: 90163 - DNA, 120 bp, synthetic construct
  source 1..120: mol_type = other DNA
ctaggcccatcatgcccaatatggtttttgttggtggaatcaactgccttcaccaaaatccactatcccaggtgtgtattggagtgggacttttacatgcgtatattctttcagatgtat

SEQ ID NO: 90164 - DNA, 120 bp, synthetic construct
  source 1..120: mol_type = other DNA
gtgcattttccttcatagcacatcaaatatggcagccatttcacttagatagttgttgattgtccgcttcacatcatgagccatgtggggacctgtgtgactttgcattaatcacatcca

SEQ ID NO: 90165 - DNA, 120 bp, synthetic construct
  source 1..120: mol_type = other DNA
gagaggcaccgaactttatcagctgcctttctggcatttattgatataaccataaaagtctaagtggtgaactgtgttgactacatatttgttgttgccttgtttggtgcagtcaggctt

SEQ ID NO: 90166 - DNA, 120 bp, synthetic construct
  source 1..120: mol_type = other DNA
ggtaaagtttaggagttatgttaaatgtctcattttggctggtgaagtctcatcagaacagggaaattctctcattcaggggcatctcatcttttctttgaagggaatcaatggtggggg

SEQ ID NO: 90167 - DNA, 120 bp, synthetic construct
  source 1..120: mol_type = other DNA
tgtgcaaattgcgtttgctgagccctgtcagaggtctcctgtgtctcacatctagggtgaccagcatcctggcttcctcaggactgttcaggttttagcactgaacatcacatgtcctag

SEQ ID NO: 90168 - DNA, 120 bp, synthetic construct
  source 1..120: mol_type = other DNA
ccttcttttagttttgccctctatagtcagcttgtgttaaccagctcaattacaccctctaccttgtcgcaaggacagagggctttctgtatcctgggggcttgccttggtgtaccagaa

SEQ ID NO: 90169 - DNA, 120 bp, synthetic construct
  source 1..120: mol_type = other DNA
caattgctgatgctttgggcaaaatccctcagacagtaagaagattctataccatggcctcatatctattttcacaggagcgctaatcccagacttccagcttccagattaattctctta

SEQ ID NO: 90170 - DNA, 120 bp, synthetic construct
  source 1..120: mol_type = other DNA
tacattgctttttatctagtggggtatctcaacccacattttcttctgcaaatttctgcaagggcatgtgagtaacactgagtctttggagtgttttcagaacctagatgtgtccagctg

SEQ ID NO: 90171 - DNA, 120 bp, synthetic construct
  source 1..120: mol_type = other DNA
ctcaaatgtggccctgaaaacgattcaaagggcaaatgatttctggattaaagttagtatattactgtcaagctcactggtaataggcttattagaaccttatgggaagaagtggtggcc

SEQ ID NO: 90172 - DNA, 120 bp, synthetic construct
  source 1..120: mol_type = other DNA
aaaaacacaaatcaatgagctcaacttattaactaactttcatctattcatttttgagccatccctgtctgattgtgaatctccatgattccaacactctgagctggggatagtgcctac

SEQ ID NO: 90173 - DNA, 120 bp, synthetic construct
  source 1..120: mol_type = other DNA
gccccatctccagcactggggattacaattcaacatgagatctgagtgtggacaaatatccaaactgtatcagtcaacagcgatcataattagtcctgaataggagtgcctttttttttc

SEQ ID NO: 90174 - DNA, 120 bp, synthetic construct
  source 1..120: mol_type = other DNA
ccagcccgggcaacagggcaagactctgtatctaaaaacaacaacaacaacaataatagaaacaggtttcctttcccaagtttggaaaatctggtagtcttcttaagcagccatgagcat

SEQ ID NO: 90175 - DNA, 120 bp, synthetic construct
  source 1..120: mol_type = other DNA
tggttgcaattgatccttaaccaataatggtcagtcctcatctctgtcgtgcttcataggtgccaccttgtgtgtttaaagaagggaagctttgtacctttagagtgtaggtgaaatgaa

SEQ ID NO: 90176 - DNA, 120 bp, synthetic construct
  source 1..120: mol_type = other DNA
gcgattattaaaaaattaagaaacaatagatgctggtgaggctgagaagaaagaggaaggtttttacactgttggtgaaactgtaaattagttcaaccattgtggaagacagtatggcta

SEQ ID NO: 90177 - DNA, 120 bp, synthetic construct
  source 1..120: mol_type = other DNA
tgacagcatttttaaaaaagtcaaaatcagaaaagattcacaaattggaagatatctaagctaaatcttttgtttcttaaaggaatgatgaaaataattgcaatgtaacacacggcctgt

SEQ ID NO: 90178 - DNA, 120 bp, synthetic construct; identical to SEQ ID NO: 31101
  source 1..120: mol_type = other DNA

SEQ ID NO: 90179 - DNA, 120 bp, synthetic construct; identical to SEQ ID NO: 31102
  source 1..120: mol_type = other DNA

SEQ ID NO: 90180 - DNA, 120 bp, synthetic construct
  source 1..120: mol_type = other DNA
aacttccaagtatgtacttttggcagctatcatcatcctctcagcgacagaaggacaagaaatcggaagtgtgctttctgacctgagattagtcaatgaagtatggtatttagcacagcg

SEQ ID NO: 90181 - DNA, 120 bp, synthetic construct
  source 1..120: mol_type = other DNA
tccttagagtgatgatctacctgcttgtggccgggaaggcatgcctttttcatggcatccacagtgaacatgagaaattcatggacatcttcctgcttgcctctatggaagccagaagcc

SEQ ID NO: 90182 - DNA, 120 bp, synthetic construct
  source 1..120: mol_type = other DNA
gtgggtcgacacttccactgagatcactggcacacaagcagagccctcttgctgtgtttgttcttccctttggctctcctggtcctcccttgcagagaagcgagtgtgccagtgttcatg

SEQ ID NO: 90183 - DNA, 120 bp, synthetic construct
  source 1..120: mol_type = other DNA
ggggagcccaatcgataacctgtctgcgagtcatgctcatcacactgtagttttcacacacgtcacacggagaccctgttcgtatgcacatttgggtgcttgagcagggttgcgtccaag

SEQ ID NO: 90184 - DNA, 120 bp, synthetic construct
  source 1..120: mol_type = other DNA
ttgtttattaaagaactgatgaaaatcaaaacaacgtatctcacagcatgggtgatactatttccacacgtatgtgataatggctcaacatttcatagagatgaaataaaaagttctaat

SEQ ID NO: 90185 - DNA, 120 bp, synthetic construct
  source 1..120: mol_type = other DNA
gtggggtgttcccggctggtgggggtgagttctataagggatgatgcggccagagagctcgtcatttgaagactctctcggaagagatagcgtcttgctgcaacctgcggtcccagcaga

SEQ ID NO: 90186 - DNA, 120 bp, synthetic construct
  source 1..120: mol_type = other DNA
gtgacctcggcatcatccattttataccactggccttcttgagctttgacataagagaagtaatatccgttgtgacaactccacccagcgtggaccagcacagcatagaggacatagaca

SEQ ID NO: 90187 - DNA, 120 bp, synthetic construct; identical to SEQ ID NO: 31103
  source 1..120: mol_type = other DNA

SEQ ID NO: 90188 - DNA, 120 bp, synthetic construct
  source 1..120: mol_type = other DNA
tgtccattttcgacagcattaaaattttggcaccaaatgtgctaactgcaattccaccatacaatgcgtaactggaaatggaggcaacatctcatatcctgaacaattcatgcgagaatc

SEQ ID NO: 90189 - DNA, 120 bp, synthetic construct
  source 1..120: mol_type = other DNA
gtaaaagaatgtcagggaagaaatctttatctatgaaaccgtgtgtgtgtctctctctgtgtgagtgtgtgtgtgtgtgtgtttgtgctgggatgtacttccgagtatgtgcttttggca

SEQ ID NO: 90190 - DNA, 120 bp, synthetic construct
  source 1..120: mol_type = other DNA
ctagagatctcaaatcaagtgtctctacttccacggcatttcagacaccttcgacccttacctggatatcgccctggatatccaggcagctcagagtgtcaagcaagcttaggaacagtt

SEQ ID NO: 90191 - DNA, 120 bp, synthetic construct
  source 1..120: mol_type = other DNA
gcctagaggtgtaaagaaaacagcttctgacccagggctcatgaagtcagcatagtgtcagaggcgatggtggagtgagcatagtatggtctttggaaccattccttccccatatttctt

SEQ ID NO: 90192 - DNA, 120 bp, synthetic construct; identical to SEQ ID NO: 30162
  source 1..120: mol_type = other DNA

SEQ ID NO: 90193 - DNA, 120 bp, synthetic construct
  source 1..120: mol_type = other DNA
actcatatcaaacattattgatagagattggagcacctgctctggatcagggtagggtcctccacagctagaactgtggaaaacatctcaacagtaggcactggaattgtgttttcccca

SEQ ID NO: 90194 - DNA, 120 bp, synthetic construct; identical to SEQ ID NO: 30163
  source 1..120: mol_type = other DNA

SEQ ID NO: 90195 - DNA, 120 bp, synthetic construct
  source 1..120: mol_type = other DNA
ggctggctacatgtgggaattatgcaagctacaattcaagatgggatctgcgtaaggacacagccaaaccatatcagcaggcattgaagaacattgttgtagcaagtcaggtatgagatc

SEQ ID NO: 90196 - DNA, 120 bp, synthetic construct; identical to SEQ ID NO: 30164
  source 1..120: mol_type = other DNA

SEQ ID NO: 90197 - DNA, 120 bp, synthetic construct; identical to SEQ ID NO: 30165
  source 1..120: mol_type = other DNA

SEQ ID NO: 90198 - DNA, 120 bp, synthetic construct; identical to SEQ ID NO: 28324
  source 1..120: mol_type = other DNA

SEQ ID NO: 90199 - DNA, 120 bp, synthetic construct; identical to SEQ ID NO: 28323
  source 1..120: mol_type = other DNA

SEQ ID NO: 90200 - DNA, 120 bp, synthetic construct; identical to SEQ ID NO: 30166
  source 1..120: mol_type = other DNA

SEQ ID NO: 90201 - DNA, 120 bp, synthetic construct; identical to SEQ ID NO: 30167
  source 1..120: mol_type = other DNA

SEQ ID NO: 90202 - DNA, 120 bp, synthetic construct; identical to SEQ ID NO: 30168
  source 1..120: mol_type = other DNA

SEQ ID NO: 90203 - DNA, 120 bp, synthetic construct; identical to SEQ ID NO: 30169
  source 1..120: mol_type = other DNA

SEQ ID NO: 90204 - DNA, 120 bp, synthetic construct; identical to SEQ ID NO: 30170
  source 1..120: mol_type = other DNA

SEQ ID NO: 90205 - DNA, 120 bp, synthetic construct; identical to SEQ ID NO: 30171
  source 1..120: mol_type = other DNA

SEQ ID NO: 90206 - DNA, 120 bp, synthetic construct; identical to SEQ ID NO: 30172
  source 1..120: mol_type = other DNA

SEQ ID NO: 90207 - DNA, 120 bp, synthetic construct; identical to SEQ ID NO: 30173
  source 1..120: mol_type = other DNA

SEQ ID NO: 90208 - DNA, 120 bp, synthetic construct; identical to SEQ ID NO: 30174
  source 1..120: mol_type = other DNA

SEQ ID NO: 90209 - DNA, 120 bp, synthetic construct; identical to SEQ ID NO: 30175
  source 1..120: mol_type = other DNA

SEQ ID NO: 90210 - DNA, 120 bp, synthetic construct
  source 1..120: mol_type = other DNA
cgagtagctgggattacaggtccgcgccaccatgcccggctaatttttgtattttttagtagaggccgggtttcgccatgttggccaggctggtctggaaactcctgacctcaggtgatg

SEQ ID NO: 90211 - DNA, 120 bp, synthetic construct; identical to SEQ ID NO: 30176
  source 1..120: mol_type = other DNA

SEQ ID NO: 90212 - DNA, 120 bp, synthetic construct; identical to SEQ ID NO: 30177
  source 1..120: mol_type = other DNA

SEQ ID NO: 90213 - DNA, 120 bp, synthetic construct; identical to SEQ ID NO: 30178
  source 1..120: mol_type = other DNA

SEQ ID NO: 90214 - DNA, 120 bp, synthetic construct; identical to SEQ ID NO: 30179
  source 1..120: mol_type = other DNA

SEQ ID NO: 90215 - DNA, 120 bp, synthetic construct
  source 1..120: mol_type = other DNA
atgtttctcgaatcgagaattcagttccagctctcatttctggcactgacatattggccaaatatgattcttatacaataatcagctgctttgctgtgagccttggaagtggtcatgctg

SEQ ID NO: 90216 - DNA, 120 bp, synthetic construct
  source 1..120: mol_type = other DNA
cctttgaaccaaacacagttgatatttcatacatatgttaaaaactgagctgtgagaccagacatgatgactcacgcttgaaatctcagcatttcgggaggccaagacagaaggatcact

SEQ ID NO: 90217 - DNA, 120 bp, synthetic construct
  source 1..120: mol_type = other DNA
tgaaaccctgtctctactaaaaatacaaaaattggctgggtgtggtggtgggcacctgtaatcccagctacttgggaaactgaggcatgaaaaccactagaacccaggaggcggaggttg

SEQ ID NO: 90218 - DNA, 120 bp, synthetic construct
  source 1..120: mol_type = other DNA
aagtgatccacccaccttggcgtcccaaagtgctgggattacaggcatgagccactgtgcccaggccccatttttatcttttacacagtattttaactatatattttccatgtttacata

SEQ ID NO: 90219 - DNA, 120 bp, synthetic construct
  source 1..120: mol_type = other DNA
gtgatccccccacctcggcctcccaaagttctgggattatgggtgtgagccaccacacccggccccccttcaattttaaagccatcactatgcaccctatgtctatgccaagcactaaaa

SEQ ID NO: 90220 - DNA, 120 bp, synthetic construct
  source 1..120: mol_type = other DNA
tctcggagctgccagaatgtcttctgctcagtgcccggcactagtgtgtgtcatgtcccggctgcgtttctggggcccatggcccctccttatgtggcaactattgtggctactagttaa

SEQ ID NO: 90221 - DNA, 120 bp, synthetic construct
  source 1..120: mol_type = other DNA
taactctaccgaatcatgaggtgtcagttcaacctccaggtgaggatcaagcttattatcacttgcccaacattacagttaaacctgcagatgtggaggttaccataacttcagagccta

SEQ ID NO: 90222 - DNA, 120 bp, synthetic construct
  source 1..120: mol_type = other DNA
tgacacttccacatccagaccaggttcagactcagcattcacacctgactcgagccacagttcaacctttggacctggggtttaccatcactccaaaatccatgacagaggttgaacctt

SEQ ID NO: 90223 - DNA, 120 bp, synthetic construct; identical to SEQ ID NO: 897
  source 1..120: mol_type = other DNA

SEQ ID NO: 90224 - DNA, 120 bp, synthetic construct; identical to SEQ ID NO: 898
  source 1..120: mol_type = other DNA

SEQ ID NO: 90225 - DNA, 120 bp, synthetic construct
  source 1..120: mol_type = other DNA
ctccaaatatgacaaaaagctaactgcattgtaagatccttcttggtccagaattttgaggtcggtacctctgaggaaagatatttctcctccacgccccaaatcaaccactgttgattg

SEQ ID NO: 90226 - DNA, 120 bp, synthetic construct; identical to SEQ ID NO: 916
  source 1..120: mol_type = other DNA

SEQ ID NO: 90227 - DNA, 120 bp, synthetic construct
  source 1..120: mol_type = other DNA
tgggtatctgcttcataattattaaactgaatattttggccaggtgaggtggctcatgtctgcagtcacagcactttgggaagcagacacaggaggatcacttgagccaggagtttgaga

SEQ ID NO: 90228 - DNA, 120 bp, synthetic construct
  source 1..120: mol_type = other DNA
gttcacatatcattctttttctattcagtctacaaccaatagatccaatctaatttatggtctatttttaaatagcccattaagttaagaatgggttttgcatttttaaagggactgtga

SEQ ID NO: 90229 - DNA, 120 bp, synthetic construct
  source 1..120: mol_type = other DNA
aatggatgtgggcactaggagggataaattgtttctcgaacatagaagaggaaaaaatgccttcaatttggacccaggaggatgttactagaacaatgccatttgaataggactttaaag

SEQ ID NO: 90230 - DNA, 120 bp, synthetic construct
  source 1..120: mol_type = other DNA
ccattctcctgcctcagcctcctgagcagctaggactacaggcacgtgccactaggcccggctaattttttattttttttgtagagacagggtttcaccgtgttagccaggatggtctcg

SEQ ID NO: 90231 - DNA, 120 bp, synthetic construct
  source 1..120: mol_type = other DNA
tggtgggcaaaggccagagatgctgctaaacatccttcaaggtataagacaaacccccatggcaaagagttatatagtccaaaatgttgatggcactgaagttgtgaaatcctgttctag

SEQ ID NO: 90232 - DNA, 120 bp, synthetic construct
  source 1..120: mol_type = other DNA
caggagggggaagttgcagtgagccgagattgtgccactaccctccaacctcccctccaggctggtctcgaactcctgtgacctcaggtgatccgcccacctcagcctcccaaagtgctg

SEQ ID NO: 90233 - DNA, 120 bp, synthetic construct
  source 1..120: mol_type = other DNA
ggcggaggttgcagtgagccgagatggcaccattgcactccagcctgagggacagagtgagactctgtctcaaataataataataatataataataataatcatcatcatcatctagcca

SEQ ID NO: 90234 - DNA, 120 bp, synthetic construct
  source 1..120: mol_type = other DNA
ttactagataaggctcaggccccacaaaatcctgaaatcatccctgggttccaatagttacaacccagtaaatctcttgaatgaagcctctatgttattgacaaatactgactggccaag

SEQ ID NO: 90235 - DNA, 120 bp, synthetic construct
  source 1..120: mol_type = other DNA
ttcggagaggcgcaaacattaaagacaaaaagaacaactcgagtctgtcctttggggtgatttagggtggctgtttaaatttgtagtggttgaaaagtcttgagattgtcacacctagca

SEQ ID NO: 90236 - DNA, 120 bp, synthetic construct
  source 1..120: mol_type = other DNA
ttcaaggttattctcaggactttgattaagatacaggctcacagctgggcatggtgtctcatgctgtaatctcagcactttgggaggccaaggtgggtggatcacttgagctcagaagtt

SEQ ID NO: 90237 - DNA, 120 bp, synthetic construct
  source 1..120: mol_type = other DNA
aatgtataaaatgaaggacttgaaccagaaatggaaatggtcatctactgtgaatctaaaaacactcaaggctgggcgcgctggctcatgcctgtaatcccagcactttaagaggccaag

SEQ ID NO: 90238 - DNA, 120 bp, synthetic construct; identical to SEQ ID NO: 899
  source 1..120: mol_type = other DNA

SEQ ID NO: 90239 - DNA, 120 bp, synthetic construct
  source 1..120: mol_type = other DNA
ttctttgaagaaatatttattcacatcctctgcccatttaaaaaattgatttgtctttttattgaattataggaatttctctatatcttctggatactctggatattagaccttaacaga

SEQ ID NO: 90240 - DNA, 120 bp, synthetic construct; identical to SEQ ID NO: 900
  source 1..120: mol_type = other DNA

SEQ ID NO: 90241 - DNA, 120 bp, synthetic construct
  source 1..120: mol_type = other DNA
tatctttttcttttttttttttctttattttgggacagagtctcactctgttgcccaggctagagtgcagtggcacaatctttactcgccgcaacctctgcctcccaggttcaagcgatt

SEQ ID NO: 90242 - DNA, 120 bp, synthetic construct
  source 1..120: mol_type = other DNA
aaccctgagtggacacagcacatgtttcagagagcactgggttgggggtaaggtcatagatcaacagcatcccaaggcagaagaatttttcttagtacagaacaaaatggagtcttctat

SEQ ID NO: 90243 - DNA, 120 bp, synthetic construct; identical to SEQ ID NO: 917
  source 1..120: mol_type = other DNA

SEQ ID NO: 90244 - DNA, 120 bp, synthetic construct
  source 1..120: mol_type = other DNA
tgttactcctgcttgtgttagtagttgctatttatttagtgacttttctgaacttcttctgtaaagtctcgcattatatgtcatgtgttcccactaaagtccctcctcggttagcttacc

SEQ ID NO: 90245 - DNA, 120 bp, synthetic construct
  source 1..120: mol_type = other DNA
ttttttttttgctattttttttggtatttgttgcttttatgaagggatgaatttttggatgtctctttttttttttttttttttttttttgagacagagtctcactctgttgtccaggct

SEQ ID NO: 90246 - DNA, 120 bp, synthetic construct
  source 1..120: mol_type = other DNA
ctttgggaggccaaggcaggcggatcacttgagatcaggagttcaagaccagcctggcaaacatggtgaaactcccatctctactaaaaacacaaaaaatagccaggcgtggtggtgcgt

SEQ ID NO: 90247 - DNA, 120 bp, synthetic construct
  source 1..120: mol_type = other DNA
actccagcctgggtgacagagtgagactccgtctcagaaaaaaaaaaaaaaaaaaaaaaatgtggtctctgccctcaaagcgctcatagtccaggagcctgacaagtggacaggtgatta

SEQ ID NO: 90248 - DNA, 120 bp, synthetic construct; identical to SEQ ID NO: 918
  source 1..120: mol_type = other DNA

SEQ ID NO: 90249 - DNA, 120 bp, synthetic construct
  source 1..120: mol_type = other DNA
tcatatagcacatagcctcttgtgtttggctcctttcacaaagcctaattttttttttgtttttgaaatggaatctcactctgtcgcccaggctgcagtgcagcggcatgacctaggctc

SEQ ID NO: 90250 - DNA, 120 bp, synthetic construct; identical to SEQ ID NO: 919
  source 1..120: mol_type = other DNA

SEQ ID NO: 90251 - DNA, 120 bp, synthetic construct; identical to SEQ ID NO: 920
  source 1..120: mol_type = other DNA

SEQ ID NO: 90252 - DNA, 120 bp, synthetic construct
  source 1..120: mol_type = other DNA
tgcttgtgcccaggagttcgagaccagcctggacaacatggtgaaaccccatttctacaaaatatacaaaaattagccaggtgtggtggcacacacctgtagttctaggtactcaggagg

SEQ ID NO: 90253 - DNA, 120 bp, synthetic construct
  source 1..120: mol_type = other DNA
ctctactttctttgatctttcatgacactggcattttttaagagtcaaagatagttgtcttgtaaattgtcccacaatccagatttgtctgtttcctcatgatgaaattcaagttaagca

SEQ ID NO: 90254 - DNA, 120 bp, synthetic construct; identical to SEQ ID NO: 18089
  source 1..120: mol_type = other DNA

SEQ ID NO: 90255 - DNA, 120 bp, synthetic construct; identical to SEQ ID NO: 18090
  source 1..120: mol_type = other DNA

SEQ ID NO: 90256 - DNA, 120 bp, synthetic construct; identical to SEQ ID NO: 18091
  source 1..120: mol_type = other DNA

SEQ ID NO: 90257 - DNA, 120 bp, synthetic construct
  source 1..120: mol_type = other DNA
tccattttagaaagtgcaaaggctagagttacaaatacgaagacgtctaaaccaatcgtacatgccagaaaaaaataccgctttcacaaaactcgctcccacgtgacccacagaacaccc

SEQ ID NO: 90258 - DNA, 120 bp, synthetic construct
  source 1..120: mol_type = other DNA
aggcgaaggtgggtggattacttgaagtcaggagtttgagaccagcttggccaacatagtgaaagcctgtctccacaaaaaataagaaaattagctgggttgatgacacgtgcctgtagt

SEQ ID NO: 90259 - DNA, 120 bp, synthetic construct; identical to SEQ ID NO: 18092
  source 1..120: mol_type = other DNA

SEQ ID NO: 90260 - DNA, 120 bp, synthetic construct; identical to SEQ ID NO: 921
  source 1..120: mol_type = other DNA

SEQ ID NO: 90261 - DNA, 120 bp, synthetic construct; identical to SEQ ID NO: 922
  source 1..120: mol_type = other DNA

SEQ ID NO: 90262 - DNA, 120 bp, synthetic construct
  source 1..120: mol_type = other DNA
tcttttatttcttttttttttcccctggatcctagaactgaggaaacactattttctcatcttactggtttttgggcccctactctattccttttatgcaaacctcacagaattttaacc

SEQ ID NO: 90263 - DNA, 120 bp, synthetic construct
  source 1..120: mol_type = other DNA
agtcctaataagaccagagaagtacattgtgagatacgtgggaaacggctgcatcactcactgtcttgtgcatgtgtctccccaggggcattttcagatttctgccatggaggggatgct

SEQ ID NO: 90264 - DNA, 120 bp, synthetic construct; identical to SEQ ID NO: 18093
  source 1..120: mol_type = other DNA

SEQ ID NO: 90265 - DNA, 120 bp, synthetic construct; identical to SEQ ID NO: 18094
  source 1..120: mol_type = other DNA

SEQ ID NO: 90266 - DNA, 120 bp, synthetic construct
  source 1..120: mol_type = other DNA
gttttgctcttgttgctcagtctggaatgcaatggcacgatctcagctcactgcatcctccgcctcctgggttcaagcaagtctcctgcctcagcctccctagtagctggggttacaggc

SEQ ID NO: 90267 - DNA, 120 bp, synthetic construct
  source 1..120: mol_type = other DNA
cctcaagtgatcctcccgccttggtctctcaacgtactgggattacaggtgggagtccccgcgcccggcaaagcctatattaaacccttttatgcacactcggcggtactgcagagaggg

SEQ ID NO: 90268 - DNA, 120 bp, synthetic construct; identical to SEQ ID NO: 923
  source 1..120: mol_type = other DNA

SEQ ID NO: 90269 - DNA, 120 bp, synthetic construct; identical to SEQ ID NO: 924
  source 1..120: mol_type = other DNA

SEQ ID NO: 90270 - DNA, 120 bp, synthetic construct; identical to SEQ ID NO: 925
  source 1..120: mol_type = other DNA

SEQ ID NO: 90271 - DNA, 120 bp, synthetic construct
  source 1..120: mol_type = other DNA
tgccacccaggcagtgactcagcctcggctcactgcagccttgaccttctggcctcgagtgatcctcccacctcagcgccaccccccactgccctccaatatctgggactacaggtgcgc

SEQ ID NO: 90272 - DNA, 120 bp, synthetic construct; identical to SEQ ID NO: 926
  source 1..120: mol_type = other DNA

SEQ ID NO: 90273 - DNA, 120 bp, synthetic construct; identical to SEQ ID NO: 927
  source 1..120: mol_type = other DNA

SEQ ID NO: 90274 - DNA, 120 bp, synthetic construct; identical to SEQ ID NO: 928
  source 1..120: mol_type = other DNA

SEQ ID NO: 90275 - DNA, 120 bp, synthetic construct; identical to SEQ ID NO: 929
  source 1..120: mol_type = other DNA

SEQ ID NO: 90276 - DNA, 120 bp, synthetic construct; identical to SEQ ID NO: 930
  source 1..120: mol_type = other DNA

SEQ ID NO: 90277 - DNA, 120 bp, synthetic construct
  source 1..120: mol_type = other DNA
cttggcttcccaaagtgctgggattacaggtgtaagccaccacactcagccaggatacatttgatacaactggagaaattagaataaggactaggtgctagatattaaagaattattatt

SEQ ID NO: 90278 - DNA, 120 bp, synthetic construct; identical to SEQ ID NO: 18096
  source 1..120: mol_type = other DNA

SEQ ID NO: 90279 - DNA, 120 bp, synthetic construct; identical to SEQ ID NO: 18097
  source 1..120: mol_type = other DNA

SEQ ID NO: 90280 - DNA, 120 bp, synthetic construct; identical to SEQ ID NO: 931
  source 1..120: mol_type = other DNA

SEQ ID NO: 90281 - DNA, 120 bp, synthetic construct; identical to SEQ ID NO: 932
  source 1..120: mol_type = other DNA

SEQ ID NO: 90282 - DNA, 120 bp, synthetic construct; identical to SEQ ID NO: 933
  source 1..120: mol_type = other DNA

SEQ ID NO: 90283 - DNA, 120 bp, synthetic construct; identical to SEQ ID NO: 18098
  source 1..120: mol_type = other DNA

SEQ ID NO: 90284 - DNA, 120 bp, synthetic construct
  source 1..120: mol_type = other DNA
gccaacatggtgaaaccccgtctctactaaaaacacaaaaattagctgggcacggtggtgcacgcctgtagtaccagctactcaggatgctaaggcataggaatcacttgaacctgggga

SEQ ID NO: 90285 - DNA, 120 bp, synthetic construct
  source 1..120: mol_type = other DNA
agttcaatacattttcatgaaccaaacacacctatgtaaccaaatcaagaaaagatgatttatcaggctgggcacagtggctcatgcctgtaatcccaacactttgggagaccaaggtgg

SEQ ID NO: 90286 - DNA, 120 bp, synthetic construct; identical to SEQ ID NO: 18099
  source 1..120: mol_type = other DNA

SEQ ID NO: 90287 - DNA, 120 bp, synthetic construct; identical to SEQ ID NO: 18100
  source 1..120: mol_type = other DNA

SEQ ID NO: 90288 - DNA, 120 bp, synthetic construct
  source 1..120: mol_type = other DNA
gctgcagagagccgtgatcacgccactgcactccagcctgggtgacaaagcgagaccctgtctcaaaaaacacgaacaaaaaaagttagaagatactgctagaattgactaaataaataa

SEQ ID NO: 90289 - DNA, 120 bp, synthetic construct; identical to SEQ ID NO: 934
  source 1..120: mol_type = other DNA

SEQ ID NO: 90290 - DNA, 120 bp, synthetic construct
  source 1..120: mol_type = other DNA
gtgagccgagatagagccactgcactgggtgcagagcctgggtgacagagtgagactctgtctcaaacaacaacaacaacaacaaaaaactcatgctagtttaattttcatttatttgat

SEQ ID NO: 90291 - DNA, 120 bp, synthetic construct
  source 1..120: mol_type = other DNA
agtagctgggattacaggcgcacaccaccatgcccagctaatttttgttgtttttagtagagacggggtttcaccatgttggccaggctcgtctcgaactcctgaccttatgatccacct

SEQ ID NO: 90292 - DNA, 120 bp, synthetic construct; identical to SEQ ID NO: 2408
  source 1..120: mol_type = other DNA

SEQ ID NO: 90293 - DNA, 120 bp, synthetic construct; identical to SEQ ID NO: 6851
  source 1..120: mol_type = other DNA

SEQ ID NO: 90294 - DNA, 120 bp, synthetic construct; identical to SEQ ID NO: 6852
  source 1..120: mol_type = other DNA

SEQ ID NO: 90295 - DNA, 120 bp, synthetic construct; identical to SEQ ID NO: 6853
  source 1..120: mol_type = other DNA

SEQ ID NO: 90296 - DNA, 120 bp, synthetic construct
  source 1..120: mol_type = other DNA
ctcgtgatcagcctgcctctgcctcccaaagtgctgggattacaggcgtgagccaccgcgcctggcctcccccaagctcttaatgttgcttcctgagttcttggtaactggggaaatctc

SEQ ID NO: 90297 - DNA, 120 bp, synthetic construct; identical to SEQ ID NO: 6854
  source 1..120: mol_type = other DNA

SEQ ID NO: 90298 - DNA, 120 bp, synthetic construct; identical to SEQ ID NO: 6855
  source 1..120: mol_type = other DNA

SEQ ID NO: 90299 - DNA, 120 bp, synthetic construct; identical to SEQ ID NO: 6856
  source 1..120: mol_type = other DNA

SEQ ID NO: 90300 - DNA, 120 bp, synthetic construct
  source 1..120: mol_type = other DNA
ttttggcttacgatactgcagactgtacaagaagcatggtgccagtatctgcttctgatgaggcctcaggaagcttacaatcatggcagaaggaaaaagggagcaagtgtgtcacatggc

SEQ ID NO: 90301 - DNA, 120 bp, synthetic construct
  source 1..120: mol_type = other DNA
ctggctaattttttgtattgagatggggtttcactgtgttgctcaggctggtctcaaattcctggcctcaactgatccccacacctcagccccccaaaatattgggattacaggcatgag

SEQ ID NO: 90302 - DNA, 120 bp, synthetic construct; identical to SEQ ID NO: 519
  source 1..120: mol_type = other DNA

SEQ ID NO: 90303 - DNA, 120 bp, synthetic construct
  source 1..120: mol_type = other DNA
atgttcagagaagtagcacttttaatttccttcaagaatttttcctttgcattcacaatttggctaactggtgcacatggtctaactttcagcctgcctcagctttcaacatgccttcct

SEQ ID NO: 90304 - DNA, 120 bp, synthetic construct
  source 1..120: mol_type = other DNA
aactgagtttacttattttattttaggttatttatttatttttgtgatggagcctcactctgttacccaggctggagtgcagtggtgctatctcagctcactgcaacctccacctcccgg

SEQ ID NO: 90305 - DNA, 120 bp, synthetic construct
  source 1..120: mol_type = other DNA
gagctacttctccctgaacctcagttccttcatgtgtaagatgcaggtatatcatcctaagatcttcgtcagctctgacaaacatcctaggaacccactctaactcctcattttttcatg

SEQ ID NO: 90306 - DNA, 120 bp, synthetic construct; identical to SEQ ID NO: 520
  source 1..120: mol_type = other DNA

SEQ ID NO: 90307 - DNA, 120 bp, synthetic construct
  source 1..120: mol_type = other DNA
tcccaccaacagtgtaaaagtgttcctatttctccacatcctctccagcacctgttgtttcctgactttttaatgatcgccattctaactggtgtgagatgatatctcatagtggttttg

SEQ ID NO: 90308 - DNA, 120 bp, synthetic construct
  source 1..120: mol_type = other DNA
caagggatgtgaaggacctcttcaaggagaactacaaaccactgctcaaggaaataaaagaggacacaaacaaatggaagaacattccatgctcatgggtaggaagaatcaatatcgtga

SEQ ID NO: 90309 - DNA, 120 bp, synthetic construct; identical to SEQ ID NO: 521
  source 1..120: mol_type = other DNA

SEQ ID NO: 90310 - DNA, 120 bp, synthetic construct
  source 1..120: mol_type = other DNA
gtttctatagtatttgaatattatgggtaatagttttgcagagtacagtatgcttatactaaattataacagcatatcctcgtggtaaccctatttgataggcagaaagcttgtacactg

SEQ ID NO: 90311 - DNA, 120 bp, synthetic construct
  source 1..120: mol_type = other DNA
gagagcagaagtctattcaggctggatctctggatcccccagccctcctccctgtctccagaacttgagcgtgatgttcacgggtggaggtgtctgcagagctgccagctggaaggaagg

SEQ ID NO: 90312 - DNA, 120 bp, synthetic construct
  source 1..120: mol_type = other DNA
cggggccgtgggggagggaagtcctccattgctaaggcttcagtaggcgttctatgatcacagtgtaaacaaagctgcagggaagctctaactgggcggaacccaccgcagctcagcaag

SEQ ID NO: 90313 - DNA, 120 bp, synthetic construct
  source 1..120: mol_type = other DNA
gatatcagtgattgaatataaaattaatgaaataaagtgagaacacaagattagagacaagaaaagaaaaaagaaacattcaaattcaggaaatacagagaacatcacaaagacactcct

SEQ ID NO: 90314 - DNA, 120 bp, synthetic construct
  source 1..120: mol_type = other DNA
actgggttcgtggcctcactggcctcaggagtgaagctgcagaccttcacgatgagtgttacagctcataaaggccgtgtggacccaaagagtgaggggcagcaagatttattgcaaaga

SEQ ID NO: 90315 - DNA, 120 bp, synthetic construct
  source 1..120: mol_type = other DNA
ccaggaggccatatttcagactatcacatggggagaaaccttggacaataccctgctttcaagggcagaggtccctgcggctttctgcagtgcactgtgcccctggtttattgagactag

SEQ ID NO: 90316 - DNA, 120 bp, synthetic construct
  source 1..120: mol_type = other DNA
tctccttcacactcagtctctttttctttttctttttctccctggctctccacatctgccgttttctctcctttctctttctgatttctcttctcactttctctcttcctttctttccca

SEQ ID NO: 90317 - DNA, 120 bp, synthetic construct
  source 1..120: mol_type = other DNA
ttctgaggcggtgcccacaccaacaaatcctgtaacaggcttttgtttaggacaattttttggccattgatttaagacaataatagaaacatcagccccagtagccactaatccttcaaa

SEQ ID NO: 90318 - DNA, 120 bp, synthetic construct
  source 1..120: mol_type = other DNA
catattctgtaattacatcaactcctgctgaaacctttcctcttaatggctttatggccaattgacatcctggatttgcattttgataacccattatttctacaacaactttttgggcgt

SEQ ID NO: 90319 - DNA, 120 bp, synthetic construct
  source 1..120: mol_type = other DNA
actgaaattcggctgatggctggtgttcataaactactgatggttgggttttattttctaccggctgatattgtggatactgtgtctggattggcatttgaggttgtaatgtcacaggca

SEQ ID NO: 90320 - DNA, 120 bp, synthetic construct
  source 1..120: mol_type = other DNA
ttattgattattattgtcatcatttcagtaaaaaggaatgtagtaggagggcagggtgattataaggagaaggtcagcaacaatcatgtgaggaatagaatctacgtcataattaagttc

SEQ ID NO: 90321 - DNA, 120 bp, synthetic construct
  source 1..120: mol_type = other DNA
gcacccaatacaggagaacccagattcataaagcaagttcttagagacctacaaagaggcttagactcccatacaatagtaatgggagacagtaacaccccactgttaatattagacaga

SEQ ID NO: 90322 - DNA, 120 bp, synthetic construct
  source 1..120: mol_type = other DNA
tcaccagtgatcccgcagaaatacacactaccatcagagaatactataaacacctctatgcaaataaactagaaaacctagaagaattggataaattattggacacatataccttcccca

SEQ ID NO: 90323 - DNA, 120 bp, synthetic construct
  source 1..120: mol_type = other DNA
aggaaaagaggaagtcaaattgtctctgtttgcagatgatttcaccgtatatttagaaaccccatgatctcagcccaaaatctccttaagctgataagcaacttcagcaaagtctcagga

SEQ ID NO: 90324 - DNA, 120 bp, synthetic construct
  source 1..120: mol_type = other DNA
actaaagagcttctgcacagcaaaagaaactatcatcagagtgagaaggcaacttacagaataggagaaaattcttgcaatctatccatctgacaaagggctaatatccagaatacaaag

SEQ ID NO: 90325 - DNA, 120 bp, synthetic construct
  source 1..120: mol_type = other DNA
tggaacaagcagaccacatggaaacagagaggggatcatcatacaccagggtctgttagaggctggggggctgggggagggatagcattaggagaaatacctaatgtaaatgacgagttg

SEQ ID NO: 90326 - DNA, 120 bp, synthetic construct
  source 1..120: mol_type = other DNA
caattactacaccctctaaaaaacatgttaaatgtatccttcccaaaaagaaacactgcgtttaacctatcaaatggctgtaactatgtgccaaccttgtacgaataatgttataatttt

SEQ ID NO: 90327 - DNA, 120 bp, synthetic construct
  source 1..120: mol_type = other DNA
tacaagagctcctgaaggaagcactaaacatggaaaggatcaaccagtaccagccactgcaaaaccataccaaattgtcaagactattgacactatgaagaaactgcgtcaactaatggg

SEQ ID NO: 90328 - DNA, 120 bp, synthetic construct
  source 1..120: mol_type = other DNA
aataacttctttgaaaccagggagaacaaagacactatgtaccagaatccctgggacacagccaaagcagtgtttagagtgaaatttatagcactaaatgcccacaggagaaagcaggaa

SEQ ID NO: 90329 - DNA, 120 bp, synthetic construct
  source 1..120: mol_type = other DNA
acccacagccaatatcatactgaatgggcaaaagctggatgcattccctttgaaaatcggctggatgcattccctttgaaaatcggcacaagacaaggatgcattatctcaccactccta

SEQ ID NO: 90330 - DNA, 120 bp, synthetic construct
  source 1..120: mol_type = other DNA
cacctgtgggtatttcttgtcaggcaggatgagagactgaggaaagaaataagacacaaagtatagagaaagaaaagtgggcccaggggactggcactcagcatacagaggacccacact

SEQ ID NO: 90331 - DNA, 120 bp, synthetic construct
  source 1..120: mol_type = other DNA
tctgcatagacacagtaacagtctgatctctcttccttttccctacatatagccaagacaatccaaagcaaaaagaacacagctggaggcatcacgctacctgacttcaaactatactgc

SEQ ID NO: 90332 - DNA, 120 bp, synthetic construct
  source 1..120: mol_type = other DNA
tacactgttggtgggagtgtaaattagttcaaccgttgtggaagacagtgtggccattcctcaaagacctagacacataattgtcagattcaccaaagttgaaatgaaggaaaaaatgtt

SEQ ID NO: 90333 - DNA, 120 bp, synthetic construct
  source 1..120: mol_type = other DNA
acccagattcataaagcaagtccttagagacctacaaagagacttagactccccacacaataataatgggagactttaatatcccactgtcaatattagacagatcaatgagacagaaaa

SEQ ID NO: 90334 - DNA, 120 bp, synthetic construct
  source 1..120: mol_type = other DNA
tggcaccattccttccgaaactattccaatcaataaaaaagagggaatcctccccaactcattttatgaagccagcatcatcctgataccaaagcctggcagagaaacaacagaaaaaga

SEQ ID NO: 90335 - DNA, 120 bp, synthetic construct
  source 1..120: mol_type = other DNA
aagaggatacaaacaaatggaagaacactccatgctcatgggtaggaagaatcaatatcttgaaaatggccatactgcccaaggtaatttatagattcaatgccatccccatcaagctac

SEQ ID NO: 90336 - DNA, 120 bp, synthetic construct
  source 1..120: mol_type = other DNA
tgaatagacacttctcaaaagaagacatttatgcacccaaaaaacacatgaaaaaatgctcatcatcactggccatcagagaaatgcaaatcaaaaccacaatgagataccatctcacac

SEQ ID NO: 90337 - DNA, 120 bp, synthetic construct
  source 1..120: mol_type = other DNA
gcttcggtgcagcaaaagaatctcatcagagtgaacaggccatctacagatgggagaaaatttttgcaatctatccatctgacaatgggctaatatccagactaaaaatacttaaacaaa

SEQ ID NO: 90338 - DNA, 120 bp, synthetic construct
  source 1..120: mol_type = other DNA
gagcatgggagaaagaaaagaaaagcaatttgaaggacagtatgtatagtgtcatctcatttgtgaaacaatttttaaaagaaaaatgcatgtaaatgtataagaaactgctggaaggat

SEQ ID NO: 90339 - DNA, 120 bp, synthetic construct
  source 1..120: mol_type = other DNA
tgccctcagcaaaccttctggcagcaggtgcagaagtgagtttgtacacgttctgcattcatgataaacagtttgctgtttgatcatgcagccttcagtggaatgctgagttggtcacaa

SEQ ID NO: 90340 - DNA, 120 bp, synthetic construct
  source 1..120: mol_type = other DNA
cctaaagtgctgggattacaggcatgagccaccatgcccggaccaagatttcctgctcttatctccaataagccagcttgatgaggagtagtgctagagattcccacacttcttgacttc

SEQ ID NO: 90341 - DNA, 120 bp, synthetic construct
  source 1..120: mol_type = other DNA
cccgagtagctgcgactacatgcacatgccaccacgcccggataattttttgtatttttagtagagaccggtttcatcgtgttagccaggatggacttgatctcctgaccttgtgatcca

SEQ ID NO: 90342 - DNA, 120 bp, synthetic construct
  source 1..120: mol_type = other DNA
ctttggcgagggatatgagatcctgtttggccaatgatcattgtctgcaacatggagaccttgggcagagggaagggcagtgccaggcctggtgcagctactccctatcacgtctctctc

SEQ ID NO: 90343 - DNA, 120 bp, synthetic construct
  source 1..120: mol_type = other DNA
tgcccccgtcaaccagcaccacctagcgtccgggaagaccagaaactagaaatccaagggaatctggatttcaaaatcatatcccaaggcctccagcactttgaaaatgtaccagacatt

SEQ ID NO: 90344 - DNA, 120 bp, synthetic construct
  source 1..120: mol_type = other DNA
cagcattggtgagatccaacgcagtgatgttaactaaaacataacagtgtgttctgcatacccaaccagcccaccagcacgtttttattgtgtgcctttctattatgtccatatattaaa

SEQ ID NO: 90345 - DNA, 120 bp, synthetic construct
  source 1..120: mol_type = other DNA
gccgtttgggagtctgggtcaattagtgactaaccatatcacatgtaagtagcaatgtaatgtgaaaaccctgttgggaaaacatcctgtggcccccaccaggttcacttaacatggcct

SEQ ID NO: 90346 - DNA, 120 bp, synthetic construct
  source 1..120: mol_type = other DNA
cgaagcttctcactggtgttgtaagtggaaaccagagtagctgcctatctgcttgattatattttttcttaaaaatgtataactatcagaacacagaacaaacagctcctaaccacttta

SEQ ID NO: 90347 - DNA, 120 bp, synthetic construct
  source 1..120: mol_type = other DNA
ccagttccaggcaaatgcaaagtctggtttcagggtggctttgtactgaaaacccttgttggcagattctgcttggccattcattactctagcacatgcctcactacctacttataactt

SEQ ID NO: 90348 - DNA, 120 bp, synthetic construct
  source 1..120: mol_type = other DNA
ttagaagaataggaggtgggaagaaaacactgcaaaagaaataaggccaacttcctggtggctcacacctgtaacactttgagaggccgaggcaggcggatggctttagctcaggagttc

SEQ ID NO: 90349 - DNA, 120 bp, synthetic construct
  source 1..120: mol_type = other DNA
gttgatttccaacagagacgtggcagctaatatgccaacaactatgacacttaaacttacacacccaactgtccccctttcagctgccaaaaaggaatcatttttcattagctgggaaat

SEQ ID NO: 90350 - DNA, 120 bp, synthetic construct
  source 1..120: mol_type = other DNA
cagagcgagactccgtctcaaaaaaaaaaaaaaaagaaaagaaaagagggttgttttggtttacacttctgcagactgcagaagaagcatggtgccagtatctgcttctgatgaggcctc

SEQ ID NO: 90351 - DNA, 120 bp, synthetic construct
  source 1..120: mol_type = other DNA
ttccaggccaccgcacaataaagtgaatattataataaagtgagacacacgaattttttggtttcccagtgcatataaaagttacgtttacactataatggtcatctaatggttgtctat

SEQ ID NO: 90352 - DNA, 120 bp, synthetic construct
  source 1..120: mol_type = other DNA
aaccactttatttgcttatccgtaagaaccagctcctcagccatctacattttgtcgtgagattgcagcaattcagtcccatcttccagctccacttctagttctcttgctatttccacc

SEQ ID NO: 90353 - DNA, 120 bp, synthetic construct
  source 1..120: mol_type = other DNA
aataattggcctaatttcaatgtaaatgtgtctcagggaatatggaggccaacagagagggagagagatgggagaagggcggagcagtcagaacacacaacatttttccattaagttgac

SEQ ID NO: 90354 - DNA, 120 bp, synthetic construct
  source 1..120: mol_type = other DNA
gctcccactttctaaccatgcctagccagacagtccaccctagaggaccaatagcatctcattccctaaatgcagaagccagagaagtgctagaacaaccccaggtatccaaggtcaggc

SEQ ID NO: 90355 - DNA, 120 bp, synthetic construct
  source 1..120: mol_type = other DNA
ctgccctctatgtctagttattagaaccaagaatgacctggaaactatgagtctaacacattctcttctttctccagggcttcagtccttacaatgtcagtaaaacagccttgctgggcc

SEQ ID NO: 90356 - DNA, 120 bp, synthetic construct; identical to SEQ ID NO: 521
  source 1..120: mol_type = other DNA

SEQ ID NO: 90357 - DNA, 120 bp, synthetic construct
  source 1..120: mol_type = other DNA
tgggtaatggtttttgcagagtacagtatgcttatactaaattataacagcatatcctcatggtaaccctatttgataggcggaaagtttgtacactgatcctgaaaagttatctgataa

SEQ ID NO: 90358 - DNA, 120 bp, synthetic construct
  source 1..120: mol_type = other DNA
gctctgggaggaatctaaaagacaaggaagtaaggaagaaagaaaggaaggaagggagggaggaaggaagggagggagggagggagggagggagggagggaggaaaggagaagaggagag

SEQ ID NO: 90359 - DNA, 120 bp, synthetic construct; identical to SEQ ID NO: 2237
  source 1..120: mol_type = other DNA

SEQ ID NO: 90360 - DNA, 120 bp, synthetic construct
  source 1..120: mol_type = other DNA
agctcttgcttataaatggaaaaaggtggtattccattttctgttcccacgtgagttcgcttagagtaatggcctccagctccatccatgttgctgcaaaagacatgatctcgttttttt

SEQ ID NO: 90361 - DNA, 120 bp, synthetic construct
  source 1..120: mol_type = other DNA
agagacagcaccgaggtcagcgacccacaactgctctgctcttgctcgtccagcttccagagatgctctttacaccatactgccactgcctaggatagggaaggggtggggtcagcgatt

SEQ ID NO: 90362 - DNA, 120 bp, synthetic construct
  source 1..120: mol_type = other DNA
gcttggtggatacacatcggttagcgggaaaagacaccacagggattcaccatggagtcacccgtggatggggttttagtttctgtctttgaattgaccttcacatagtgtctacctctt

SEQ ID NO: 90363 - DNA, 120 bp, synthetic construct
  source 1..120: mol_type = other DNA
caaactttattttcattgcccaaggttgagagatgtagcttcttgctactttgcaggtatttcaaccattatttccatgaattcctcctcctccatttggagggggttgattctgttctc

SEQ ID NO: 90364 - DNA, 120 bp, synthetic construct
  source 1..120: mol_type = other DNA
ctcaagggtgtggctttgccttgtcaccaggagggtatacatagggagggcaagagctccgggccactgagaagattcaaaacctacaaaagcctgccactgacattgaagaaccaatat

SEQ ID NO: 90365 - DNA, 120 bp, synthetic construct
  source 1..120: mol_type = other DNA
ctttgagatgcaaatttcactatctgattttttttacctaagggttcctttaatatgcacatttagggctatctagctgacaattgcctagggcaataaaataggttatgaagaaattgt

SEQ ID NO: 90366 - DNA, 120 bp, synthetic construct
  source 1..120: mol_type = other DNA
aataaaataactggttatttaagaaaaaggaagcctgggcatggtggctcatgcttgttaattccagcattttgggaggccgaggtggatggatcacctgaggtcaggagttcgagacca

SEQ ID NO: 90367 - DNA, 120 bp, synthetic construct
  source 1..120: mol_type = other DNA
cctgcttcagcctcccaaagtgctaggattacaggcatgagccactatgacaggccaaaaattttttcttcaaggtctaaaaaagtgttttcttccatctgtgtaactttctgtatgtgc

SEQ ID NO: 90368 - DNA, 120 bp, synthetic construct
  source 1..120: mol_type = other DNA
tgggaaactcttataattctgaaataacttctgtatgttattaattataaactttatgttaaattgttgtatgctacagaagtaaccaaaatttacttgtcaatggtggttttaataatg

SEQ ID NO: 90369 - DNA, 120 bp, synthetic construct
  source 1..120: mol_type = other DNA
ttgggatgcatcttcaggggatgctgaaacaacagcagcatttggtttgctctacacccctgtcacccctcgcccgcaagcccagggagtggtcagcagtggggctttgtgatgtgaagc

SEQ ID NO: 90370 - DNA, 120 bp, synthetic construct
  source 1..120: mol_type = other DNA
tgctttcttaacagatgccggagaccccaactggggactcagacccgcaacctgctcctaaaaaaatgaaaacatctgagtcctcgaccatactagtggttcgctacaggaggaacttta

SEQ ID NO: 90371 - DNA, 120 bp, synthetic construct
  source 1..120: mol_type = other DNA
tgtgttgatatccgcaaagggtgaatattcaaaatcgccatgacttgggaaaaggaaagtaaaacactcttaagtatgaggagctttttcccatggaatgtgaactgcaaggtggtgaga

SEQ ID NO: 90372 - DNA, 120 bp, synthetic construct
  source 1..120: mol_type = other DNA
agacattaaagaatttttcatatttaggatagtaatacgggatcacattctttagccttaggcattgcagaggaaaaacaaacaaaaccaaaccaaaactaagctgagagaggcggagca

SEQ ID NO: 90373 - DNA, 120 bp, synthetic construct
  source 1..120: mol_type = other DNA
caaaatctttgctattgtgaatagtgctgtgaagaacatacgcatgcgtatgtcttaatggtagaatgatatatatcctttgggtatatatccagtaatgtgattgctgagatgaatggt

SEQ ID NO: 90374 - DNA, 120 bp, synthetic construct
  source 1..120: mol_type = other DNA
ttcttcaagaaaggaagtagagctgttataggccatttagtgactatgtgctgctctcaggtagcccctctccctctgctgtcctgcacagaaaaacatagtacatgattaactatgtaa

SEQ ID NO: 90375 - DNA, 120 bp, synthetic construct
  source 1..120: mol_type = other DNA
actcatttcagacagcaaacctcgtcctgtgttatcttatgctctgggaggaatctaaaagacaaggaagtaaggaagaaagaaaggaaggaagggagggaggaaggaagggagggaggg

SEQ ID NO: 90376 - DNA, 120 bp, synthetic construct; identical to SEQ ID NO: 23457
  source 1..120: mol_type = other DNA

SEQ ID NO: 90377 - DNA, 120 bp, synthetic construct; identical to SEQ ID NO: 23458
  source 1..120: mol_type = other DNA

SEQ ID NO: 90378 - DNA, 120 bp, synthetic construct; identical to SEQ ID NO: 23459
  source 1..120: mol_type = other DNA

SEQ ID NO: 90379 - DNA, 120 bp, synthetic construct
  source 1..120: mol_type = other DNA
atcaccactccctaatctcaagtaagcagggacacaaaacactgcagaaggccgcagggacctctgcctaggaaagccaggtattgtccaaggtttctccccaggtgacagtctgaaata

SEQ ID NO: 90380 - DNA, 120 bp, synthetic construct; identical to SEQ ID NO: 23460
  source 1..120: mol_type = other DNA

SEQ ID NO: 90381 - DNA, 120 bp, synthetic construct; identical to SEQ ID NO: 23461
  source 1..120: mol_type = other DNA

SEQ ID NO: 90382 - DNA, 120 bp, synthetic construct; identical to SEQ ID NO: 23462
  source 1..120: mol_type = other DNA

SEQ ID NO: 90383 - DNA, 120 bp, synthetic construct; identical to SEQ ID NO: 23463
  source 1..120: mol_type = other DNA

SEQ ID NO: 90384 - DNA, 120 bp, synthetic construct
  source 1..120: mol_type = other DNA
gcctcctgggttcaagcgattctcctgcctcggcctcccaagtagctgggactataggcgcccaccaccacgcctggctaatttttgtatttttaatagagacagggtttcactgtgttg

SEQ ID NO: 90385 - DNA, 120 bp, synthetic construct
  source 1..120: mol_type = other DNA
ctcacgcctgtaatcctagcactctgggaggcaggtggattgcctgagctcaggagttcaaggccagcctgggcaacatggcgaatcctcgtctctactaaaaatacaaaaaaaaaaaaa

SEQ ID NO: 90386 - DNA, 120 bp, synthetic construct; identical to SEQ ID NO: 23464
  source 1..120: mol_type = other DNA

SEQ ID NO: 90387 - DNA, 120 bp, synthetic construct; identical to SEQ ID NO: 23465
  source 1..120: mol_type = other DNA

SEQ ID NO: 90388 - DNA, 120 bp, synthetic construct; identical to SEQ ID NO: 23466
  source 1..120: mol_type = other DNA

SEQ ID NO: 90389 - DNA, 120 bp, synthetic construct
  source 1..120: mol_type = other DNA
ttctgatcccatcctcctccttgtcctaccaaccgtctgtactcaccctgtgtatttagtttatataaatgttaatgcctggccagccgtggtggctcacgcctgtaatcccagcactct

SEQ ID NO: 90390 - DNA, 120 bp, synthetic construct
  source 1..120: mol_type = other DNA
ctctactgaaaatacaaggattagccagacgtggtggtgggcgtctgtagtccagctacttgagaggctgaggcaggagaatcacttgaaccaccacgcccaacctaatttttttgttgt

SEQ ID NO: 90391 - DNA, 120 bp, synthetic construct
  source 1..120: mol_type = other DNA
agaattttgagaccatccagggcaacaaagtgagactctgtccctacaaaaaaaattttttttttttttttttttgagacagactctcgctctgtcgcccaggctagagtgcagtggcgt

SEQ ID NO: 90392 - DNA, 120 bp, synthetic construct
  source 1..120: mol_type = other DNA
ggcctcccaaagtgctgggattacaggcgtgagccaccgtgcccggccgtctactacttcttaaagggtgagaggcggaaggatcacttgagccctgaagtgtgcgactgcagttagctt

SEQ ID NO: 90393 - DNA, 120 bp, synthetic construct; identical to SEQ ID NO: 23467
  source 1..120: mol_type = other DNA

SEQ ID NO: 90394 - DNA, 120 bp, synthetic construct; identical to SEQ ID NO: 23468
  source 1..120: mol_type = other DNA

SEQ ID NO: 90395 - DNA, 120 bp, synthetic construct; identical to SEQ ID NO: 23469
  source 1..120: mol_type = other DNA

SEQ ID NO: 90396 - DNA, 120 bp, synthetic construct; identical to SEQ ID NO: 23470
  source 1..120: mol_type = other DNA

SEQ ID NO: 90397 - DNA, 120 bp, synthetic construct
  source 1..120: mol_type = other DNA
cctactaggttcaagtgattgtcctgcctcagcctcctgagtagctgggactacagatgcattccaccatgcccagctaatttttgtatttttagcagagacagggtttcaccgtgttgg

SEQ ID NO: 90398 - DNA, 120 bp, synthetic construct
  source 1..120: mol_type = other DNA
aagccaggagttcaagatcagcctggccaacatgacgaaaccccttctcttctaaaagtacaaaaattaattagctgggtgtggtggcgtgcagctgaaatcccagctacttaggaggct

SEQ ID NO: 90399 - DNA, 120 bp, synthetic construct; identical to SEQ ID NO: 23471
  source 1..120: mol_type = other DNA

SEQ ID NO: 90400 - DNA, 120 bp, synthetic construct; identical to SEQ ID NO: 23472
  source 1..120: mol_type = other DNA

SEQ ID NO: 90401 - DNA, 120 bp, synthetic construct; identical to SEQ ID NO: 90191
  source 1..120: mol_type = other DNA

SEQ ID NO: 90402 - DNA, 120 bp, synthetic construct
  source 1..120: mol_type = other DNA
tgcttgacactctgagctgcctggatatccagggcgatatccaggtaagggtcgaaggtgtctgaaatgccgtggaagtagagacacttgatttgagatctctagtaccctccaaatatt

SEQ ID NO: 90403 - DNA, 120 bp, synthetic construct
  source 1..120: mol_type = other DNA
gaattcaacagacacagcccacatcatgacttctaaaacacctgcatcaaattactcctcaggatgataggcacatataatatgattgtaaccgggttgggacagtggccacacagttgc

SEQ ID NO: 90404 - DNA, 120 bp, synthetic construct
  source 1..120: mol_type = other DNA
actggaaatggaggcaacatctcatatcctgaacaattcatgcgagaatctaggagacacacggcttacttttgccttttcccactgaaacaagggccagtattaacaatgttatgctat

SEQ ID NO: 90405 - DNA, 120 bp, synthetic construct
  source 1..120: mol_type = other DNA
tttagtatcaatgagaattagttccaaatgacttccgtgccagtgggaaaattttccgtttccacgcaatggaagtggacaccgtgaaacaggtaagtcggtctgtctgtttcccgcatt

SEQ ID NO: 90406 - DNA, 120 bp, synthetic construct
  source 1..120: mol_type = other DNA
tctaaggtgctttcctcagtggctctttccaccaagtgctcgtccaactcgggtacctggaggcaagggtggtctctcttgagctctccttgcgttgctggcctgtctgtgtcttcagcg

SEQ ID NO: 90407 - DNA, 120 bp, synthetic construct
  source 1..120: mol_type = other DNA
gtgtgtatgtcaggcactgcagggaagcattcaagtagcaggtatttcccatattctggagaccagcccccacagcagcaggtctcctgctactcagaggaagcttctccctgggagcaa

SEQ ID NO: 90408 - DNA, 120 bp, synthetic construct
  source 1..120: mol_type = other DNA
actattgattctctatccgagtgaaattaccggccagtggagaacaagacaggtctttgcatgaaatgctcttgtggaagctaggctgccaaatactaaagcatcaaatggtagaaacat

SEQ ID NO: 90409 - DNA, 120 bp, synthetic construct
  source 1..120: mol_type = other DNA
cgttgctcatgcttctggggatcattctcctgaaaatggtggcttctttctccctgtggagcatctttctaagcagtgctcctttcttcccccaggacactttacatcaggcgcacgaag

SEQ ID NO: 90410 - DNA, 120 bp, synthetic construct
  source 1..120: mol_type = other DNA
ctgaggtcccttcagaaaccaatgtaaaaacggcgagccagggtaagaaagaagagcaccgttcctatcttctaaatgcattccagtttccactattcaaggtggtgagaatgatccacg

SEQ ID NO: 90411 - DNA, 120 bp, synthetic construct
  source 1..120: mol_type = other DNA
aagcaaggagagctcaagagagaccacccctgcctccaggcacccgagttggacgagcacttggtggaaagagccactcaggaaagcaccttagaccactggaaattcctgcaagagcaa

SEQ ID NO: 90412 - DNA, 120 bp, synthetic construct
  source 1..120: mol_type = other DNA
cgtgtcgacctctgtgatgatttggctcctgtggcaagacagctcgctcccagggagaagcttcctctgagtagcaggagacctgctgcggtgggggctgggctccagaatatgggaaat

SEQ ID NO: 90413 - DNA, 120 bp, synthetic construct
  source 1..120: mol_type = other DNA
catgctcttgtggaagctaggttgccaaataataaagcatcaaatggtagaaatatgcactgaagtttgaagagatactcattgcacaaagtagactgtgaaagactttggggaaatcat

SEQ ID NO: 90414 - DNA, 120 bp, synthetic construct
  source 1..120: mol_type = other DNA
cccatgaaaagacaagggaaagaaaaagggccaaaggtcacagtcctctcattacatcatcatccttaaaatcatcctaatttcatgagccctgaagacagggctgtttctttacaccta

SEQ ID NO: 90415 - DNA, 120 bp, synthetic construct
  source 1..120: mol_type = other DNA
gggcttccggattttattttagctgaatacatccactctcctgtttcaatttctttcaaacgcctttaaataattatcttgctgcatcagcccttatttaactactgtccacccaccgag

SEQ ID NO: 90416 - DNA, 120 bp, synthetic construct; identical to SEQ ID NO: 90177
  source 1..120: mol_type = other DNA

SEQ ID NO: 90417 - DNA, 120 bp, synthetic construct; identical to SEQ ID NO: 90176
  source 1..120: mol_type = other DNA

SEQ ID NO: 90418 - DNA, 120 bp, synthetic construct; identical to SEQ ID NO: 12084
  source 1..120: mol_type = other DNA

SEQ ID NO: 90419 - DNA, 120 bp, synthetic construct; identical to SEQ ID NO: 23632
  source 1..120: mol_type = other DNA

SEQ ID NO: 90420 - DNA, 120 bp, synthetic construct; identical to SEQ ID NO: 23633
  source 1..120: mol_type = other DNA

SEQ ID NO: 90421 - DNA, 120 bp, synthetic construct; identical to SEQ ID NO: 23630
  source 1..120: mol_type = other DNA

SEQ ID NO: 90422 - DNA, 120 bp, synthetic construct; identical to SEQ ID NO: 23634
  source 1..120: mol_type = other DNA

SEQ ID NO: 90423 - DNA, 120 bp, synthetic construct; identical to SEQ ID NO: 23635
  source 1..120: mol_type = other DNA

SEQ ID NO: 90424 - DNA, 120 bp, synthetic construct; identical to SEQ ID NO: 23636
  source 1..120: mol_type = other DNA

SEQ ID NO: 90425 - DNA, 120 bp, synthetic construct; identical to SEQ ID NO: 23629
  source 1..120: mol_type = other DNA

SEQ ID NO: 90426 - DNA, 120 bp, synthetic construct
  source 1..120: mol_type = other DNA
gcaatcccagttactctcacgggatctgtttctctgatgtctgggtatgaaaggactttctaagcctcagaacagtgggagaactcaacaaagaaaaaaccaatacatatacaaggttac

SEQ ID NO: 90427 - DNA, 120 bp, synthetic construct
  source 1..120: mol_type = other DNA
gatgccattcttcttggcgaagatgtagacggcgcggctgggctgggacaccaggtcaagaaacagctctaggcccatggcgggggcggcaaggacagcggggatggcagtgaaggcgct

SEQ ID NO: 90428 - DNA, 120 bp, synthetic construct
  source 1..120: mol_type = other DNA
ctccagagtagctgggactacagacgcccgccaccacgcccggttaattttttttccatttttagtagagacggtgtttcacggtgttagccaggatggtctcggtctcctgacctcgtg

SEQ ID NO: 90429 - DNA, 120 bp, synthetic construct; identical to SEQ ID NO: 23627
  source 1..120: mol_type = other DNA

SEQ ID NO: 90430 - DNA, 120 bp, synthetic construct; identical to SEQ ID NO: 23626
  source 1..120: mol_type = other DNA

SEQ ID NO: 90431 - DNA, 120 bp, synthetic construct; identical to SEQ ID NO: 23625
  source 1..120: mol_type = other DNA

SEQ ID NO: 90432 - DNA, 120 bp, synthetic construct; identical to SEQ ID NO: 25304
  source 1..120: mol_type = other DNA

SEQ ID NO: 90433 - DNA, 120 bp, synthetic construct
  source 1..120: mol_type = other DNA
acctgcggtcccagcagaaaaaccttgtgatccttgttccagtcgacatggaggacgactcactctacttgggaggtgagtggcagttcaaccacttttcaaaactcacatcttctcggc

SEQ ID NO: 90434 - DNA, 120 bp, synthetic construct
  source 1..120: mol_type = other DNA
tctatgtcctctatgctgtgctggtccacgctgggtggagttgtcacaacggacattactcctcttatgtcaaagctcaagaaggccagtggtataaaatggatgatgccgaggtcaccg

SEQ ID NO: 90435 - DNA, 120 bp, synthetic construct
  source 1..120: mol_type = other DNA
cgtcaatcctacataaactaatgaggagcccaagtttctgtctgtacaacagggacaactggatagagatggctacatctcaggatgagcccgcatatgggaaacatcaagttttggggt

SEQ ID NO: 90436 - DNA, 120 bp, synthetic construct
  source 1..120: mol_type = other DNA
aaatgtgcatacgaacagggtctccgtgtgacgtgtgtgaaaactacagtgtgatgagcatgactggcagacagcttatcgattgggctcccctcaaaatcggttatgagcattcaagca

SEQ ID NO: 90437 - DNA, 120 bp, synthetic construct
  source 1..120: mol_type = other DNA
agtgtcatgaccgtctctcttttctggcaaacataaatttggggattgtcatcaattagtctctcggggattgcatgatttccccaaaggctttcacagtctactttgtgcactgagtat

SEQ ID NO: 90438 - DNA, 120 bp, synthetic construct
  source 1..120: mol_type = other DNA
agggctgatgcgccagagagctcgtcatttgaagactctctcggaagggatagcgtcttgctgcaaactgcggtcccagcagaaaaaccttgtgatccttgttccagtcgacatggagga

SEQ ID NO: 90439 - DNA, 120 bp, synthetic construct
  source 1..120: mol_type = other DNA
gtcctgagtcaacaggcctacgtcctcttttacatccagaagagtgaatgggaaagacatagtgagagtgtgtcaagaggcagggaaccaagagcccttggcgcagaagacacagacagg

SEQ ID NO: 90440 - DNA, 120 bp, synthetic construct
  source 1..120: mol_type = other DNA
tgtttcattcgtcagttgttggtcggcatgagaaggtgaaaggtggctcatgtgggacatccgtggatcattctcgccaccttgaatagtggaaactggaatgcatttggaagagaagaa

SEQ ID NO: 90441 - DNA, 120 bp, synthetic construct
  source 1..120: mol_type = other DNA
ttctccctgtggagcatctttctaagcagtgctcttttcttcccccaggacactttacatccggcacaggaagccttctgatggagcacacctggcccatgaaaagacaagggaaagaaa

SEQ ID NO: 90442 - DNA, 120 bp, synthetic construct
  source 1..120: mol_type = other DNA
aatttcactcggacagagaatcaataggctcaacgtggaaagcttatcgctggaaggtctgtttgattccacggatctctcctttctcattagggaagaaaatacgctgtgctaaatact

SEQ ID NO: 90443 - DNA, 120 bp, synthetic construct
  source 1..120: mol_type = other DNA
catgctctgtacgatgcaagctcacatcacacgggccctccacaatcctggccacgtcatccagccctcacaggcattggctgctggcttccatagaggcaagcaggaagatgcccatga

SEQ ID NO: 90444 - DNA, 120 bp, synthetic construct
  source 1..120: mol_type = other DNA
gtgtgggatgaagaaccatcatcctgaacagcaaagctccctgctaaaactctcttcgacgaccccgacacatcaggagtccatgaacactggcacactcgcttccctgcgagggagggc

SEQ ID NO: 90445 - DNA, 120 bp, synthetic construct
  source 1..120: mol_type = other DNA
ctgcaatcaatctcactgggtgtgtttaaaaatggcatttggggaatttctgggtcatttgtccagctgcgaaagctgcatctctgaagcacagtccctgtcccgcagtgagacttattt

SEQ ID NO: 90446 - DNA, 120 bp, synthetic construct
  source 1..120: mol_type = other DNA
tctctgatgtttctccctgagacagggcctcacttccgtcagccgggcttttctacggtataattttccttgtttgcttttgtccaaattagaactttttattttatctctaggaaacgt

SEQ ID NO: 90447 - DNA, 120 bp, synthetic construct
  source 1..120: mol_type = other DNA
aggccactgtcccaacccggttacactcctattatatgtgcctatcatcctgaggagtaatttgattcaggtgttctggaagtcatgctgtgggctgtgtctgttgaattcccagcgatg

SEQ ID NO: 90448 - DNA, 120 bp, synthetic construct
  source 1..120: mol_type = other DNA
gagtgtccagcaagctttggaacagttggtgaagcccgaagaactcaatggagagaatgcctatcattgtggtgtttgtctccagagggcgccggcctccaagacgttaactttacacac

SEQ ID NO: 90449 - DNA, 120 bp, synthetic construct
  source 1..120: mol_type = other DNA
acaaacacgaacaccgtcaatcctacataaactaatgaggagcccaagtttctgtctctacaacagggacaactggatagtgatggctacatctcaggatgagcccgcatatgggaaaca

SEQ ID NO: 90450 - DNA, 120 bp, synthetic construct
  source 1..120: mol_type = other DNA
aactcagggctccgtagaaccacagaatcttgggcgcaaccctgctcaagcacccaaatgtgcatacgaacagggtctccgtgtgacgtgtgtgaaaactacagtgtgatgagcatgact

SEQ ID NO: 90451 - DNA, 120 bp, synthetic construct
  source 1..120: mol_type = other DNA
tatcacacatgctgtgagatacgttgtttttattttcatcaattctttaataaacaaaagggtatagctgggataccttctgagttctcaagttttttgtttcgtgttttcttaaactgc

SEQ ID NO: 90452 - DNA, 120 bp, synthetic construct
  source 1..120: mol_type = other DNA
tcactctacttgggtggtgagtggcagttcaaccacttttcaaaactcacatcttctcggctcgatgcagcttttgctgaaatccagcggacttctctccctgagaagtcaccactctca

SEQ ID NO: 90453 - DNA, 120 bp, synthetic construct
  source 1..120: mol_type = other DNA
acgctgagtggagttgtcacaacggacattacttctcttatgtcaaagctcaagaaggccagtggtataaaatggatgatgccgaggtcaccgccgctagcatcacttctgtcctgagtc

SEQ ID NO: 90454 - DNA, 120 bp, synthetic construct; identical to SEQ ID NO: 90440
  source 1..120: mol_type = other DNA

SEQ ID NO: 90455 - DNA, 120 bp, synthetic construct; identical to SEQ ID NO: 90441
  source 1..120: mol_type = other DNA

SEQ ID NO: 90456 - DNA, 120 bp, synthetic construct
  source 1..120: mol_type = other DNA
agtatctcttcaaacttcagtgcatgtttctaccatttgattctttcttatttggcaatctagcttccacaagagcatttcatgcaaagacttgtcttgttctcccctggcaggtaattt

SEQ ID NO: 90457 - DNA, 120 bp, synthetic construct
  source 1..120: mol_type = other DNA
ggacttctctccctgagaagtcaccactctcatgtgagacccgtgtcgacctctgtgatgatttggctcctgtggcaagacagcttgctcccagggagaagcttcctctgagtagcagga

SEQ ID NO: 90458 - DNA, 120 bp, synthetic construct
  source 1..120: mol_type = other DNA
ggaaagacatagtgagagtgtgtcaagaggcagggaaccaagagcccttggcgcagaagacacagacaggcgagcaacgcaaggagagctcaagagagaccacccctgcctccaggcccc

SEQ ID NO: 90459 - DNA, 120 bp, synthetic construct
  source 1..120: mol_type = other DNA
cggacagaccgacttgcctgtttcacggtgcccgcttcccatgagtccaaacggaaaattttcccacgggcatgtaagtcatctggaagtaagctgtattgataataaaggaaagcaaac

SEQ ID NO: 90460 - DNA, 120 bp, synthetic construct
  source 1..120: mol_type = other DNA
catgttgggaaaatccctagagccaggatcttcattcctgctaagccagacagccggaagacacacccaaattctgtccctcttacttcagggaacatgtccactttcggcagcattaca

SEQ ID NO: 90461 - DNA, 120 bp, synthetic construct
  source 1..120: mol_type = other DNA
gtcttcttgtccttccgtcgcggagaggatgatggcagctgccaaaagtacatacttggaagttcatcccagcacaaacacacacacacacgccccccccacacacacacacacaaacac

SEQ ID NO: 90462 - DNA, 120 bp, synthetic construct
  source 1..120: mol_type = other DNA
aagcaggtagatcatcactctaaggacaccaccctcatccaccaaatatttggaggctactggagatctcaaatcaagtgtctccactgccacggcatttcagacacttttgacccttac

SEQ ID NO: 90463 - DNA, 120 bp, synthetic construct
  source 1..120: mol_type = other DNA
aaatacaagtgtgggatgaagaaccatcatcctgaacagcaaagctccctgctaaacctctcttcgtcgaccccgacacatcaggagtccatgaacactggcacactcgcttccctgcga

SEQ ID NO: 90464 - DNA, 120 bp, synthetic construct; identical to SEQ ID NO: 79751
  source 1..120: mol_type = other DNA

SEQ ID NO: 90465 - DNA, 120 bp, synthetic construct
  source 1..120: mol_type = other DNA
tacttcagggaacatgtccactttcggcagcattacaattttggcaccaaatgtgctaactgcaattccaccatacaatgcgtaactggaaatggaggcaacatctccgatcctgaacga

SEQ ID NO: 90466 - DNA, 120 bp, synthetic construct
  source 1..120: mol_type = other DNA
tccgtcgctgagaggatgatggcagttgccaaaagtacatacttggaagttcatcccagcacaaacacacacacacacgcgccccccccacacacacacagacgaacacaatcacacaca

SEQ ID NO: 90467 - DNA, 120 bp, synthetic construct; identical to SEQ ID NO: 90443
  source 1..120: mol_type = other DNA

SEQ ID NO: 90468 - DNA, 120 bp, synthetic construct
  source 1..120: mol_type = other DNA
acgtcagaaaagtcgaaggtaccctgcctcccgacgtacttgtgattcatcaatcaaaatacaagtgtgggatgaagaaccatcatcctgaacagcaaagctccctgctaaacctctctt

SEQ ID NO: 90469 - DNA, 120 bp, synthetic construct
  source 1..120: mol_type = other DNA
gtgtttccgtggaaatgattgtgggaaatggccccttccttttctctatttgctgattagacttcatggtccctttctcgtcaggtatagtgatcaaagttgaccaacccagaggaaagc

SEQ ID NO: 90470 - DNA, 120 bp, synthetic construct
  source 1..120: mol_type = other DNA
ccctgagacagggcctcacttccgtcagccgggcttttctacggtataattttccttgtttgcttttgtccaaattagaactttttatttcatctctaggaaacgttgatccattatcac

SEQ ID NO: 90471 - DNA, 120 bp, synthetic construct
  source 1..120: mol_type = other DNA
gaattgagtgctgatatttgattggcttatcgcgcacctgatgagtgggtgtggtgttcgcggttggagggggtgacttacagaagggctgatgcggccagagagctcgtcatttgaaga

SEQ ID NO: 90472 - DNA, 120 bp, synthetic construct
  source 1..120: mol_type = other DNA
catacatgtctcagacgaacacaggacctctcgtctatgtcctctatgctgtgctggtccacgctgggtggagttgtcacaacggacattacttctcttatgtcaaagctcaagaaggcc

SEQ ID NO: 90473 - DNA, 120 bp, synthetic construct; identical to SEQ ID NO: 90440
  source 1..120: mol_type = other DNA

SEQ ID NO: 90474 - DNA, 120 bp, synthetic construct; identical to SEQ ID NO: 90441
  source 1..120: mol_type = other DNA

SEQ ID NO: 90475 - DNA, 120 bp, synthetic construct
  source 1..120: mol_type = other DNA
catgctttcttatttggcaatctagcttccacaagagcatttcatgcaaagacttgtcttgttctccactggcaggtaatttcactcagatagagaatcaataggctcaacgtggaaagg

SEQ ID NO: 90476 - DNA, 120 bp, synthetic construct
  source 1..120: mol_type = other DNA
aacgtgtcatcgtcacaagggctgcatgctctgtacgatgcaagctcacatcacacgggccctccacaatcctggccacgtcatccagccctcacaggcattggctgctggcttccatag

SEQ ID NO: 90477 - DNA, 120 bp, synthetic construct
  source 1..120: mol_type = other DNA
cctctcttcgacgaccccgacacatcaggagtccatgaacactggcacactcgcttccctgcgagggagggccaggagatccaaagggaagaacaaacacagcaagagggctctgcttgt

SEQ ID NO: 90478 - DNA, 120 bp, synthetic construct
  source 1..120: mol_type = other DNA
ccctgaaatcaatctcactgggtgtgtttaaaaatggcatttggggaatttctgggtcatttgtccagctgcgaaagctgcatctctgaagcacagtccctgtcccgcagtgagacttat

SEQ ID NO: 90479 - DNA, 120 bp, synthetic construct; identical to SEQ ID NO: 90465
  source 1..120: mol_type = other DNA

SEQ ID NO: 90480 - DNA, 120 bp, synthetic construct
  source 1..120: mol_type = other DNA
acacacacacacacatgccccccccacacacacacaaacacactcacacacacacacgcacacggtttcctaggtaaagatttcttccctgccattgctttacctaaaataaggcaactg

SEQ ID NO: 90481 - DNA, 120 bp, synthetic construct
  source 1..120: mol_type = other DNA
atttctcatgttcactgtggatgccatgaaaaaggcatgccttcccgggcacaagcaggtggatcatcactctaaggacaccaccctcatccaccaaatatttggaggctactggagatc

SEQ ID NO: 90482 - DNA, 120 bp, synthetic construct
  source 1..120: mol_type = other DNA
caagtgtgggatgaagaaccatcatcctgaacagcaaagctccctgctaaacctctcttcgacgaccccgacacatcagcagtccatgaacaatggcacactcgcttccctgcgagggag

SEQ ID NO: 90483 - DNA, 120 bp, synthetic construct; identical to SEQ ID NO: 90478
  source 1..120: mol_type = other DNA

SEQ ID NO: 90484 - DNA, 120 bp, synthetic construct; identical to SEQ ID NO: 90465
  source 1..120: mol_type = other DNA

SEQ ID NO: 90485 - DNA, 120 bp, synthetic construct; identical to SEQ ID NO: 90466
  source 1..120: mol_type = other DNA

SEQ ID NO: 90486 - DNA, 120 bp, synthetic construct; identical to SEQ ID NO: 90481
  source 1..120: mol_type = other DNA

SEQ ID NO: 90487 - DNA, 120 bp, synthetic construct; identical to SEQ ID NO: 90463
  source 1..120: mol_type = other DNA

SEQ ID NO: 90488 - DNA, 120 bp, synthetic construct; identical to SEQ ID NO: 90445
  source 1..120: mol_type = other DNA

SEQ ID NO: 90489 - DNA, 120 bp, synthetic construct; identical to SEQ ID NO: 90470
  source 1..120: mol_type = other DNA

SEQ ID NO: 90490 - DNA, 120 bp, synthetic construct; identical to SEQ ID NO: 90447
  source 1..120: mol_type = other DNA

SEQ ID NO: 90491 - DNA, 120 bp, synthetic construct; identical to SEQ ID NO: 90448
  source 1..120: mol_type = other DNA

SEQ ID NO: 90492 - DNA, 120 bp, synthetic construct
  source 1..120: mol_type = other DNA
actttctgtctctacaacagggacaactggatagtgatggctacatctcaggatgagcccgcatatgggaaacatcaagttttggggtcgtgagtcttccgaacctctggtgggactgtc

SEQ ID NO: 90493 - DNA, 120 bp, synthetic construct
  source 1..120: mol_type = other DNA
ccccagaggaaagctgcccagggcacaactcagggctccgtagaaccacagaatcttgggcgcaaccctgctcaagcacccaaatgtgcatacgaacagggtctccgtgtgacgtgtgtg

SEQ ID NO: 90494 - DNA, 120 bp, synthetic construct; identical to SEQ ID NO: 90451
  source 1..120: mol_type = other DNA

SEQ ID NO: 90495 - DNA, 120 bp, synthetic construct
  source 1..120: mol_type = other DNA
cagcagaaaaaccttgtgatcctcgttccagtcgacatggaggacgactcactctacttgggaggtgagtggcagttcaaccacttttcaaaactcacatcttctcggcccgatgcagct

SEQ ID NO: 90496 - DNA, 120 bp, synthetic construct; identical to SEQ ID NO: 20343
  source 1..120: mol_type = other DNA

SEQ ID NO: 90497 - DNA, 120 bp, synthetic construct; identical to SEQ ID NO: 20344
  source 1..120: mol_type = other DNA

SEQ ID NO: 90498 - DNA, 120 bp, synthetic construct; identical to SEQ ID NO: 1502
  source 1..120: mol_type = other DNA

SEQ ID NO: 90499 - DNA, 120 bp, synthetic construct
  source 1..120: mol_type = other DNA
ccaatgtcaccttctttcttcctgcagcaccctgagggctcgccatgtgccaagcacagtcagaaggctggggtgacagcaggttggagaaggacagacaatcaacaagtcaacagagaa

SEQ ID NO: 90500 - DNA, 120 bp, synthetic construct; identical to SEQ ID NO: 28878
  source 1..120: mol_type = other DNA

SEQ ID NO: 90501 - DNA, 120 bp, synthetic construct; identical to SEQ ID NO: 1501
  source 1..120: mol_type = other DNA

SEQ ID NO: 90502 - DNA, 120 bp, synthetic construct
  source 1..120: mol_type = other DNA
gagacagtgacagatcatcaggcatcagattctcataaggagcgtgcaacctacatccctcgtgtgtgcagttcacaatagggctcgtgctgctatgagaatctaatgcccaccgctgat

SEQ ID NO: 90503 - DNA, 120 bp, synthetic construct; identical to SEQ ID NO: 28879
  source 1..120: mol_type = other DNA

SEQ ID NO: 90504 - DNA, 120 bp, synthetic construct; identical to SEQ ID NO: 28880
  source 1..120: mol_type = other DNA

SEQ ID NO: 90505 - DNA, 120 bp, synthetic construct
  source 1..120: mol_type = other DNA
ctgtctcaaaaaaaacaaaacaaaacaaaagcccctctccttataggtcagcattgtaaagtgtgcaagagctggattcggagtcctgcattgcccattaccagttctatgggtttgttt

SEQ ID NO: 90506 - DNA, 120 bp, synthetic construct
  source 1..120: mol_type = other DNA
ggaggtcgaggctgcagtgagtagtgtcacaccactgcactccagtctgggtatcagagcaagactctgtctcaaaaatgactataattacaagtttcaagtaccatcagtttataaaaa

SEQ ID NO: 90507 - DNA, 120 bp, synthetic construct
  source 1..120: mol_type = other DNA
ccctctaaatctaaaataaaataatttttttaaatacataaaattaccttcaggccaggcacagtggcttacgcctgtaatcccagcactttgggaggctgaggcaggtggctcacctga

SEQ ID NO: 90508 - DNA, 120 bp, synthetic construct
  source 1..120: mol_type = other DNA
taatcaggtttcagaataaaatcggcatgaagagcttccgatttcttttgaagcatcagtggattttactgaagatttacaaatctacgaccatcaccccacaccttcctccccttcctg

SEQ ID NO: 90509 - DNA, 120 bp, synthetic construct
  source 1..120: mol_type = other DNA
aacatacccttcaaaacaaaacaaagcaacgacaaacacttagaatacagctgacacatatacatatttgagatagggtctggttctgtcacccaggctggagtgcagtggtgtgatcat

SEQ ID NO: 90510 - DNA, 120 bp, synthetic construct; identical to SEQ ID NO: 28881
  source 1..120: mol_type = other DNA

SEQ ID NO: 90511 - DNA, 120 bp, synthetic construct
  source 1..120: mol_type = other DNA
atttgtttacagactattttgatgaccgtggcagaaagagggatttcctgaccgggcatggtggctcacgcctgtaatcccaatactttgggaggccaaggtgggcagatcatctgaggt

SEQ ID NO: 90512 - DNA, 120 bp, synthetic construct
  source 1..120: mol_type = other DNA
tggcgccattgcactacagcctgggcgacagagtgagactctgtctcaaaaataaaaacaaaaataaaatctttttctagagacagggtcttcctaggttgcccagactggcctcaaatt

SEQ ID NO: 90513 - DNA, 120 bp, synthetic construct
  source 1..120: mol_type = other DNA
aaattcacatcacataaattaaccattttattaatttttttttttttgagatggagtcttgctctgtcgcccaggcgggagtgcaatggtgccatctcagctcactgcaacctctgcctc

SEQ ID NO: 90514 - DNA, 120 bp, synthetic construct
  source 1..120: mol_type = other DNA
caagaaaatggtaaaactgctgcacaaagggaaatgagataatgtcacaaatcaattgctccttaataaagtgccatattggccaggcacggtggctcacgtctgtaatcccagcacttt

SEQ ID NO: 90515 - DNA, 120 bp, synthetic construct
  source 1..120: mol_type = other DNA
ctttaagacattcttttaaacactccccttgagctcctttgaagaaatccaccccttgtacttatacaatcttctctgtatttaaattcaggccaggcgtggtggctcacgcctgtaatc

SEQ ID NO: 90516 - DNA, 120 bp, synthetic construct
  source 1..120: mol_type = other DNA
gtttctaaaaaaaaaaaaattatttttttagttagccaggcatggtggcagtgggcacctctgtagtctcagctacaggggaggctgaggtgggaggatcgcttgagccaaggaggtaga

SEQ ID NO: 90517 - DNA, 120 bp, synthetic construct; identical to SEQ ID NO: 28859
  source 1..120: mol_type = other DNA

SEQ ID NO: 90518 - DNA, 120 bp, synthetic construct; identical to SEQ ID NO: 28858
  source 1..120: mol_type = other DNA

SEQ ID NO: 90519 - DNA, 120 bp, synthetic construct
  source 1..120: mol_type = other DNA
agtgagttaagactgtgctactgcactccagcctgagtgacagcgaggctccacctcaaaaaaaaaaaaaattgtggggcacgatggctcacgcctgtaatcccaacacttttggaggct

SEQ ID NO: 90520 - DNA, 120 bp, synthetic construct
  source 1..120: mol_type = other DNA
acccagctatgtggtcattggagaatgcgccttcgtacacacgcccgttcttgaaagttaatcggccctgcagacagaaaaactttttacagtttaggaaaagatttcttagaaaaacac

SEQ ID NO: 90521 - DNA, 120 bp, synthetic construct
  source 1..120: mol_type = other DNA
tatgatcacgccactgcactccaacctgggcaacagagtgagatcctgtctctaaaaaaaacattttttaaaagcagttgccagctaggcacaatggcttgcagctgtaatctcagcact

SEQ ID NO: 90522 - DNA, 120 bp, synthetic construct
  source 1..120: mol_type = other DNA
tacgctgagcattcattcctgcttttgaaaacgcaattcaactgaataaacacatacaatctaaagcattgttctaggccgggtgtggtggctcacacccataatcccagtattttggga

SEQ ID NO: 90523 - DNA, 120 bp, synthetic construct
  source 1..120: mol_type = other DNA
gagatcgcaccacttcactccagccaaggtgacggagcaagaccctaagaccctatctcaacaagaaaaaaaaaaaaacaaaaaaaaagataatatagcagcaccaagtagggtttctcc

SEQ ID NO: 90524 - DNA, 120 bp, synthetic construct
  source 1..120: mol_type = other DNA
atacaagtaaagtaatggcatttagctctttccactgtaagaacttaagaagtgtttgtttgttttgttttgagatggagtcttgctctgtcacccaggctgcagtgcagtggcacgatc

SEQ ID NO: 90525 - DNA, 120 bp, synthetic construct
  source 1..120: mol_type = other DNA
ctgggtccaagcgattctcctgcctcagcctcccaagtggctgggattataggcatgcaccaccacgcctggctaattttttgtatcttttagtagagacggggtttcaccatgttggtc

SEQ ID NO: 90526 - DNA, 120 bp, synthetic construct
  source 1..120: mol_type = other DNA
gaccgattttgtagaagacagtttttccatgaatggtggaaagcggtggggggctgttggtttcaggatgattcaagcacattcgaattactgcacgccttatttctattattatgacac

SEQ ID NO: 90527 - DNA, 120 bp, synthetic construct
  source 1..120: mol_type = other DNA
ctcactgcaacctccgcctcgcgagttcaagcgattcttctgcctcagcctcccgagtagctgggactacaggcacgtaccaccacacccagctaattttttgtatttttagtagagacg

SEQ ID NO: 90528 - DNA, 120 bp, synthetic construct; identical to SEQ ID NO: 28854
  source 1..120: mol_type = other DNA

SEQ ID NO: 90529 - DNA, 120 bp, synthetic construct
  source 1..120: mol_type = other DNA
accttggcctcccaaaatgctgggattataggtttgagccactgactttgccttccctttctatactctatacattagaagcaaattattaagtctagcccgtgctcaaggagaagggaa

SEQ ID NO: 90530 - DNA, 120 bp, synthetic construct; identical to SEQ ID NO: 28882
  source 1..120: mol_type = other DNA

SEQ ID NO: 90531 - DNA, 120 bp, synthetic construct
  source 1..120: mol_type = other DNA
agaatagcaataaagtcaactgaaatctttttaaaaaggaaggactttggaaggcagagggggtggatcacctgaggtcaggagtttgagaccagcctggccaatgctgtgaaaccccct

SEQ ID NO: 90532 - DNA, 120 bp, synthetic construct
  source 1..120: mol_type = other DNA
atggataataacctagtgtctaactataggaaaatagttttgtttttttgagcaaggttctcactctgtcacccaggctggagtacagtggtgcaatcttggcttcctgcaacctcaacc

SEQ ID NO: 90533 - DNA, 120 bp, synthetic construct; identical to SEQ ID NO: 88537
  source 1..120: mol_type = other DNA

SEQ ID NO: 90534 - DNA, 120 bp, synthetic construct
  source 1..120: mol_type = other DNA
acattgcgcccagccataaattaatatcttaaagactgataattttgaaaagcattctggattaacatgggcatttgcggccagacatggtggctcacacctgtaatcccagaaccttgt

SEQ ID NO: 90535 - DNA, 120 bp, synthetic construct; identical to SEQ ID NO: 88535
  source 1..120: mol_type = other DNA

SEQ ID NO: 90536 - DNA, 120 bp, synthetic construct; identical to SEQ ID NO: 28883
  source 1..120: mol_type = other DNA

SEQ ID NO: 90537 - DNA, 120 bp, synthetic construct
  source 1..120: mol_type = other DNA
aaggatcagctttgataagtttgaagctgagcctctctctgatctctaaatcacactcccaaattgttggtcaaaagggagcacgacatgaacgttcagtttccagtgtctttttagtag

SEQ ID NO: 90538 - DNA, 120 bp, synthetic construct; identical to SEQ ID NO: 28884
  source 1..120: mol_type = other DNA

SEQ ID NO: 90539 - DNA, 120 bp, synthetic construct; identical to SEQ ID NO: 28852
  source 1..120: mol_type = other DNA

SEQ ID NO: 90540 - DNA, 120 bp, synthetic construct; identical to SEQ ID NO: 88530
  source 1..120: mol_type = other DNA

SEQ ID NO: 90541 - DNA, 120 bp, synthetic construct; identical to SEQ ID NO: 28851
  source 1..120: mol_type = other DNA

SEQ ID NO: 90542 - DNA, 120 bp, synthetic construct; identical to SEQ ID NO: 28885
  source 1..120: mol_type = other DNA

SEQ ID NO: 90543 - DNA, 120 bp, synthetic construct; identical to SEQ ID NO: 28849
  source 1..120: mol_type = other DNA

SEQ ID NO: 90544 - DNA, 120 bp, synthetic construct
  source 1..120: mol_type = other DNA
tttgaaacccctttagagacaaggatagctgtgtatcccaagtgaatcctctctcctagagaactagacaacgggttactctcacaaaagtaatttcctagtagttatagttatccctct

SEQ ID NO: 90545 - DNA, 120 bp, synthetic construct; identical to SEQ ID NO: 28886
  source 1..120: mol_type = other DNA

SEQ ID NO: 90546 - DNA, 120 bp, synthetic construct
  source 1..120: mol_type = other DNA
actttatggagggtccaatatgtagacctgattaagtcactggctattagttattgaactcaatctccagcccctctcccttcctgggaggttgggctggagctgaaagtcccaaccttc

SEQ ID NO: 90547 - DNA, 120 bp, synthetic construct; identical to SEQ ID NO: 28887
  source 1..120: mol_type = other DNA

SEQ ID NO: 90548 - DNA, 120 bp, synthetic construct
  source 1..120: mol_type = other DNA
agtgttgataggctcaaaactcctgaggcctggtaggttttgtaggtggattttttcccctcttctacttgttaacatttcttggctgggcacagtggttcatgcctgtaatcccagcac

SEQ ID NO: 90549 - DNA, 120 bp, synthetic construct
  source 1..120: mol_type = other DNA
ctaggagttgggggctgtggtgagctatgattgcaccactgcactccagcctgtgtgacaaagtgagaacctgtctccaaaaaaagggggacatttcttaatataaagtcattttttttt

SEQ ID NO: 90550 - DNA, 120 bp, synthetic construct
  source 1..120: mol_type = other DNA
gccgagatcgtgtcactgcactccagcctgggcgacagtaagactccatctcaaaaaaattttaaaagaagaatctagttgtatccggcccgagtgctactgtcttcgtgacatgttttc

SEQ ID NO: 90551 - DNA, 120 bp, synthetic construct; identical to SEQ ID NO: 28888
  source 1..120: mol_type = other DNA

SEQ ID NO: 90552 - DNA, 120 bp, synthetic construct; identical to SEQ ID NO: 28844
  source 1..120: mol_type = other DNA

SEQ ID NO: 90553 - DNA, 120 bp, synthetic construct; identical to SEQ ID NO: 28843
  source 1..120: mol_type = other DNA

SEQ ID NO: 90554 - DNA, 120 bp, synthetic construct
  source 1..120: mol_type = other DNA
gtgtcaaactcctgggctcaagcgatccacccatcttagcctcccaaagtgctgggatttcgggcgtgagcccccacacccagcccattaaatgataaatgtgttgtcataagcaatata

SEQ ID NO: 90555 - DNA, 120 bp, synthetic construct
  source 1..120: mol_type = other DNA
gtcagagaacgaaatctgtggctttcatcatcaggcctggtgttctgctcagcctctcttaaccatacattgctttgataacttttaaacatttttggttatctgtggtcctggttgttg

SEQ ID NO: 90556 - DNA, 120 bp, synthetic construct; identical to SEQ ID NO: 28840
  source 1..120: mol_type = other DNA

SEQ ID NO: 90557 - DNA, 120 bp, synthetic construct
  source 1..120: mol_type = other DNA
acgatgacactctactgcaataaaagtcatgtgaatgcggtttgcttcccccttccctcaatattttattatactgtccctcacataacagaaaccatgggaaacaaaaccagggggaag

SEQ ID NO: 90558 - DNA, 120 bp, synthetic construct; identical to SEQ ID NO: 28838
  source 1..120: mol_type = other DNA

SEQ ID NO: 90559 - DNA, 120 bp, synthetic construct
  source 1..120: mol_type = other DNA
accactgcattctagcctgggtgacagagtgaaaccctctcaaaaataatgaaactggtatcaacagtttcatatccagcaccagacattatgtgacagtggaagagagactttcaaagt

SEQ ID NO: 90560 - DNA, 120 bp, synthetic construct; identical to SEQ ID NO: 28837
  source 1..120: mol_type = other DNA

SEQ ID NO: 90561 - DNA, 120 bp, synthetic construct
  source 1..120: mol_type = other DNA
aacatggcaaaacctcatctctactaaaactacaaaaattagctggttctggtggtgggcacctgcaatcccagctactagagaggctgaggcaggggaattgcttgaacccaggagatg

SEQ ID NO: 90562 - DNA, 120 bp, synthetic construct
  source 1..120: mol_type = other DNA
ccaaagtgctgggattataggcatgagccacctcacctggccaaaaatttaaaaactagccaggtttggtcacacatgcctctatcaggaggctgaggtgggaggattgcttgagcctag

SEQ ID NO: 90563 - DNA, 120 bp, synthetic construct; identical to SEQ ID NO: 78923
  source 1..120: mol_type = other DNA

SEQ ID NO: 90564 - DNA, 120 bp, synthetic construct; identical to SEQ ID NO: 78924
  source 1..120: mol_type = other DNA

SEQ ID NO: 90565 - DNA, 120 bp, synthetic construct; identical to SEQ ID NO: 8359
  source 1..120: mol_type = other DNA

SEQ ID NO: 90566 - DNA, 120 bp, synthetic construct; identical to SEQ ID NO: 8147
  source 1..120: mol_type = other DNA

SEQ ID NO: 90567 - DNA, 120 bp, synthetic construct; identical to SEQ ID NO: 78927
  source 1..120: mol_type = other DNA

SEQ ID NO: 90568 - DNA, 120 bp, synthetic construct; identical to SEQ ID NO: 8148
  source 1..120: mol_type = other DNA

SEQ ID NO: 90569 - DNA, 120 bp, synthetic construct; identical to SEQ ID NO: 8149
  source 1..120: mol_type = other DNA

SEQ ID NO: 90570 - DNA, 120 bp, synthetic construct; identical to SEQ ID NO: 8150
  source 1..120: mol_type = other DNA

SEQ ID NO: 90571 - DNA, 120 bp, synthetic construct; identical to SEQ ID NO: 78931
  source 1..120: mol_type = other DNA

SEQ ID NO: 90572 - DNA, 120 bp, synthetic construct; identical to SEQ ID NO: 8151
  source 1..120: mol_type = other DNA

SEQ ID NO: 90573 - DNA, 120 bp, synthetic construct; identical to SEQ ID NO: 78933
  source 1..120: mol_type = other DNA

SEQ ID NO: 90574 - DNA, 120 bp, synthetic construct
  source 1..120: mol_type = other DNA
gcaccttaacacaaggaaaaagaaattttttttttaaaagaattggtagtgtactttcttactaaaataattttttttttttttttttgagacagggtctcactctgttgcccaggctgg

SEQ ID NO: 90575 - DNA, 120 bp, synthetic construct; identical to SEQ ID NO: 179
  source 1..120: mol_type = other DNA

SEQ ID NO: 90576 - DNA, 120 bp, synthetic construct
  source 1..120: mol_type = other DNA
gcttcaaagcttcaaaggacaggctgaatctcttgttagaggataatgcagctggtgactttaagttgaatccaatgctcatttactgttctgaaatttctagggttcttaggaattatg

SEQ ID NO: 90577 - DNA, 120 bp, synthetic construct; identical to SEQ ID NO: 78937
  source 1..120: mol_type = other DNA

SEQ ID NO: 90578 - DNA, 120 bp, synthetic construct; identical to SEQ ID NO: 298
  source 1..120: mol_type = other DNA

SEQ ID NO: 90579 - DNA, 120 bp, synthetic construct; identical to SEQ ID NO: 299
  source 1..120: mol_type = other DNA

SEQ ID NO: 90580 - DNA, 120 bp, synthetic construct; identical to SEQ ID NO: 300
  source 1..120: mol_type = other DNA

SEQ ID NO: 90581 - DNA, 120 bp, synthetic construct; identical to SEQ ID NO: 8152
  source 1..120: mol_type = other DNA

SEQ ID NO: 90582 - DNA, 120 bp, synthetic construct; identical to SEQ ID NO: 78942
  source 1..120: mol_type = other DNA

SEQ ID NO: 90583 - DNA, 120 bp, synthetic construct; identical to SEQ ID NO: 78943
  source 1..120: mol_type = other DNA

SEQ ID NO: 90584 - DNA, 120 bp, synthetic construct; identical to SEQ ID NO: 8153
  source 1..120: mol_type = other DNA

SEQ ID NO: 90585 - DNA, 120 bp, synthetic construct; identical to SEQ ID NO: 8154
  source 1..120: mol_type = other DNA

SEQ ID NO: 90586 - DNA, 120 bp, synthetic construct; identical to SEQ ID NO: 78946
  source 1..120: mol_type = other DNA

SEQ ID NO: 90587 - DNA, 120 bp, synthetic construct; identical to SEQ ID NO: 78947
  source 1..120: mol_type = other DNA

SEQ ID NO: 90588 - DNA, 120 bp, synthetic construct; identical to SEQ ID NO: 8155
  source 1..120: mol_type = other DNA

SEQ ID NO: 90589 - DNA, 120 bp, synthetic construct; identical to SEQ ID NO: 8156
  source 1..120: mol_type = other DNA

SEQ ID NO: 90590 - DNA, 120 bp, synthetic construct; identical to SEQ ID NO: 78950
  source 1..120: mol_type = other DNA

SEQ ID NO: 90591 - DNA, 120 bp, synthetic construct; identical to SEQ ID NO: 8157
  source 1..120: mol_type = other DNA

SEQ ID NO: 90592 - DNA, 120 bp, synthetic construct; identical to SEQ ID NO: 78952
  source 1..120: mol_type = other DNA

SEQ ID NO: 90593 - DNA, 120 bp, synthetic construct; identical to SEQ ID NO: 78953
  source 1..120: mol_type = other DNA

SEQ ID NO: 90594 - DNA, 120 bp, synthetic construct; identical to SEQ ID NO: 8158
  source 1..120: mol_type = other DNA

SEQ ID NO: 90595 - DNA, 120 bp, synthetic construct; identical to SEQ ID NO: 78955
  source 1..120: mol_type = other DNA

SEQ ID NO: 90596 - DNA, 120 bp, synthetic construct; identical to SEQ ID NO: 301
  source 1..120: mol_type = other DNA

SEQ ID NO: 90597 - DNA, 120 bp, synthetic construct; identical to SEQ ID NO: 78957
  source 1..120: mol_type = other DNA

SEQ ID NO: 90598 - DNA, 120 bp, synthetic construct; identical to SEQ ID NO: 302
  source 1..120: mol_type = other DNA

SEQ ID NO: 90599 - DNA, 120 bp, synthetic construct; identical to SEQ ID NO: 8159
  source 1..120: mol_type = other DNA

SEQ ID NO: 90600 - DNA, 120 bp, synthetic construct; identical to SEQ ID NO: 8160
  source 1..120: mol_type = other DNA

SEQ ID NO: 90601 - DNA, 120 bp, synthetic construct; identical to SEQ ID NO: 303
  source 1..120: mol_type = other DNA

SEQ ID NO: 90602 - DNA, 120 bp, synthetic construct; identical to SEQ ID NO: 8161
  source 1..120: mol_type = other DNA

SEQ ID NO: 90603 - DNA, 120 bp, synthetic construct; identical to SEQ ID NO: 78963
  source 1..120: mol_type = other DNA

SEQ ID NO: 90604 - DNA, 120 bp, synthetic construct; identical to SEQ ID NO: 304
  source 1..120: mol_type = other DNA

SEQ ID NO: 90605 - DNA, 120 bp, synthetic construct; identical to SEQ ID NO: 78965
  source 1..120: mol_type = other DNA

SEQ ID NO: 90606 - DNA, 120 bp, synthetic construct; identical to SEQ ID NO: 8162
  source 1..120: mol_type = other DNA

SEQ ID NO: 90607 - DNA, 120 bp, synthetic construct; identical to SEQ ID NO: 305
  source 1..120: mol_type = other DNA

SEQ ID NO: 90608 - DNA, 120 bp, synthetic construct; identical to SEQ ID NO: 8163
  source 1..120: mol_type = other DNA

SEQ ID NO: 90609 - DNA, 120 bp, synthetic construct; identical to SEQ ID NO: 8164
  source 1..120: mol_type = other DNA

SEQ ID NO: 90610 - DNA, 120 bp, synthetic construct; identical to SEQ ID NO: 78970
  source 1..120: mol_type = other DNA

SEQ ID NO: 90611 - DNA, 120 bp, synthetic construct; identical to SEQ ID NO: 78971
  source 1..120: mol_type = other DNA

SEQ ID NO: 90612 - DNA, 120 bp, synthetic construct; identical to SEQ ID NO: 8345
  source 1..120: mol_type = other DNA

SEQ ID NO: 90613 - DNA, 120 bp, synthetic construct; identical to SEQ ID NO: 78973
  source 1..120: mol_type = other DNA

SEQ ID NO: 90614 - DNA, 120 bp, synthetic construct
  source 1..120: mol_type = other DNA
cacttgacctcgtgatctgcttgcctcggcctctcagagtgctgggattacaggggtgagccaccatacccagcccagaatggtattcttaatgtatggacttaaaaggagcatttgcaa

SEQ ID NO: 90615 - DNA, 120 bp, synthetic construct; identical to SEQ ID NO: 8165
  source 1..120: mol_type = other DNA

SEQ ID NO: 90616 - DNA, 120 bp, synthetic construct; identical to SEQ ID NO: 174
  source 1..120: mol_type = other DNA

SEQ ID NO: 90617 - DNA, 120 bp, synthetic construct; identical to SEQ ID NO: 78977
  source 1..120: mol_type = other DNA

SEQ ID NO: 90618 - DNA, 120 bp, synthetic construct; identical to SEQ ID NO: 78978
  source 1..120: mol_type = other DNA

SEQ ID NO: 90619 - DNA, 120 bp, synthetic construct; identical to SEQ ID NO: 78979
  source 1..120: mol_type = other DNA

SEQ ID NO: 90620 - DNA, 120 bp, synthetic construct
  source 1..120: mol_type = other DNA
gtaaatgccagcctggccaacatggtgaaaccccgtctctactaaaaaaaaaaaaatacaaaaattagctaggtgggtggcaggtgcccgtaatcccagctactcgggaggctaaggcac

SEQ ID NO: 90621 - DNA, 120 bp, synthetic construct; identical to SEQ ID NO: 8166
  source 1..120: mol_type = other DNA

SEQ ID NO: 90622 - DNA, 120 bp, synthetic construct; identical to SEQ ID NO: 173
  source 1..120: mol_type = other DNA

SEQ ID NO: 90623 - DNA, 120 bp, synthetic construct
  source 1..120: mol_type = other DNA
gggttcaagcagctctcctgcctcagcctcctgagtagctgggattacaggcgcccaccaccatgcccagctaatttttttgtatttttagtagagacgaggtttcaccatgttagtcag

SEQ ID NO: 90624 - DNA, 120 bp, synthetic construct; identical to SEQ ID NO: 78984
  source 1..120: mol_type = other DNA

SEQ ID NO: 90625 - DNA, 120 bp, synthetic construct
  source 1..120: mol_type = other DNA
taatgctgggaggagtttgtgtgtgtgtgtgtgtgtgtgtgtgtgtgtgtgtgtgtgtgtgttttatctccttcaactctgaccacctggaagtcagcctaatctctgccctcgtgttga

SEQ ID NO: 90626 - DNA, 120 bp, synthetic construct; identical to SEQ ID NO: 78986
  source 1..120: mol_type = other DNA

SEQ ID NO: 90627 - DNA, 120 bp, synthetic construct; identical to SEQ ID NO: 8167
  source 1..120: mol_type = other DNA

SEQ ID NO: 90628 - DNA, 120 bp, synthetic construct; identical to SEQ ID NO: 307
  source 1..120: mol_type = other DNA

SEQ ID NO: 90629 - DNA, 120 bp, synthetic construct; identical to SEQ ID NO: 8168
  source 1..120: mol_type = other DNA

SEQ ID NO: 90630 - DNA, 120 bp, synthetic construct; identical to SEQ ID NO: 78990
  source 1..120: mol_type = other DNA

SEQ ID NO: 90631 - DNA, 120 bp, synthetic construct; identical to SEQ ID NO: 8169
  source 1..120: mol_type = other DNA

SEQ ID NO: 90632 - DNA, 120 bp, synthetic construct; identical to SEQ ID NO: 308
  source 1..120: mol_type = other DNA

SEQ ID NO: 90633 - DNA, 120 bp, synthetic construct; identical to SEQ ID NO: 309
  source 1..120: mol_type = other DNA

SEQ ID NO: 90634 - DNA, 120 bp, synthetic construct; identical to SEQ ID NO: 310
  source 1..120: mol_type = other DNA

SEQ ID NO: 90635 - DNA, 120 bp, synthetic construct; identical to SEQ ID NO: 311
  source 1..120: mol_type = other DNA

SEQ ID NO: 90636 - DNA, 120 bp, synthetic construct; identical to SEQ ID NO: 78996
  source 1..120: mol_type = other DNA

SEQ ID NO: 90637 - DNA, 120 bp, synthetic construct; identical to SEQ ID NO: 8170
  source 1..120: mol_type = other DNA

SEQ ID NO: 90638 - DNA, 120 bp, synthetic construct; identical to SEQ ID NO: 8171
  source 1..120: mol_type = other DNA

SEQ ID NO: 90639 - DNA, 120 bp, synthetic construct
  source 1..120: mol_type = other DNA
gagatccagtaatttatagtctattatttctggagtctggagatgactctgtataagctttgctgaagcagattttattacattagaagagaacctacctggctgcatccaacaccagaa

SEQ ID NO: 90640 - DNA, 120 bp, synthetic construct; identical to SEQ ID NO: 79000
  source 1..120: mol_type = other DNA

SEQ ID NO: 90641 - DNA, 120 bp, synthetic construct
  source 1..120: mol_type = other DNA
gactattacttgctcctctgggctccaccatgctccagctactctgaccatctttacggtgcttacgcaccgtgccaagcctgttcacatcttaggtccctgcacttgccgttccaccca

SEQ ID NO: 90642 - DNA, 120 bp, synthetic construct; identical to SEQ ID NO: 8172
  source 1..120: mol_type = other DNA

SEQ ID NO: 90643 - DNA, 120 bp, synthetic construct; identical to SEQ ID NO: 8173
  source 1..120: mol_type = other DNA

SEQ ID NO: 90644 - DNA, 120 bp, synthetic construct; identical to SEQ ID NO: 8174
  source 1..120: mol_type = other DNA

SEQ ID NO: 90645 - DNA, 120 bp, synthetic construct; identical to SEQ ID NO: 8175
  source 1..120: mol_type = other DNA

SEQ ID NO: 90646 - DNA, 120 bp, synthetic construct; identical to SEQ ID NO: 8176
  source 1..120: mol_type = other DNA

SEQ ID NO: 90647 - DNA, 120 bp, synthetic construct; identical to SEQ ID NO: 79007
  source 1..120: mol_type = other DNA

SEQ ID NO: 90648 - DNA, 120 bp, synthetic construct; identical to SEQ ID NO: 8177
  source 1..120: mol_type = other DNA

SEQ ID NO: 90649 - DNA, 120 bp, synthetic construct
  source 1..120: mol_type = other DNA
ctcatgcctgtaatcccagcagtttgggaggcagaggcgggaggatcacctgaggtcaggagtccaagaccagcctgaccaacatggagaaactccatctctactaaaaatacaacatta

SEQ ID NO: 90650 - DNA, 120 bp, synthetic construct; identical to SEQ ID NO: 8178
  source 1..120: mol_type = other DNA

SEQ ID NO: 90651 - DNA, 120 bp, synthetic construct; identical to SEQ ID NO: 79011
  source 1..120: mol_type = other DNA

SEQ ID NO: 90652 - DNA, 120 bp, synthetic construct; identical to SEQ ID NO: 79012
  source 1..120: mol_type = other DNA

SEQ ID NO: 90653 - DNA, 120 bp, synthetic construct; identical to SEQ ID NO: 8179
  source 1..120: mol_type = other DNA

SEQ ID NO: 90654 - DNA, 120 bp, synthetic construct; identical to SEQ ID NO: 313
  source 1..120: mol_type = other DNA

SEQ ID NO: 90655 - DNA, 120 bp, synthetic construct; identical to SEQ ID NO: 79015
  source 1..120: mol_type = other DNA

SEQ ID NO: 90656 - DNA, 120 bp, synthetic construct; identical to SEQ ID NO: 8180
  source 1..120: mol_type = other DNA

SEQ ID NO: 90657 - DNA, 120 bp, synthetic construct
  source 1..120: mol_type = other DNA
tttttgagactgagtcttgctttgtcacccaggctggagtgcagtgatacaatctcggctcactgcaacctacgcctcccgggttcaagcgattctcctgtctcagcctcctgagtagct

SEQ ID NO: 90658 - DNA, 120 bp, synthetic construct
  source 1..120: mol_type = other DNA
acccatagacattagaaagcctgtggtcaccacactacagatgactgctctaaggcaaatagagatttaaagcaaagcagggtattcctgatactttttgacctttttgctctgccagtt

SEQ ID NO: 90659 - DNA, 120 bp, synthetic construct
  source 1..120: mol_type = other DNA
atattgtgaccaagctttcctgcttacctcctgccatctgcaaaattaaattaaatggtccttcgcttctgaaatcctgccatcagtgaccaaagggaacatctgagtataccagtcaga

SEQ ID NO: 90660 - DNA, 120 bp, synthetic construct; identical to SEQ ID NO: 8181
  source 1..120: mol_type = other DNA

SEQ ID NO: 90661 - DNA, 120 bp, synthetic construct
  source 1..120: mol_type = other DNA
actccagcctgggtgacagagtgagactgtctcaaaaaaaaaaagagaagaaaatagagtagaagaccctttttttcttttagccactaccaagtaggtgaagatatacttatatgtttt

SEQ ID NO: 90662 - DNA, 120 bp, synthetic construct
  source 1..120: mol_type = other DNA
tagtaaggcttcgatgccaggttttgtatattctcccttataatcaactttcccctcaattcttagaaagatcttatggagttcagaagacgataaagatggaaagttgtaagtcctgag

SEQ ID NO: 90663 - DNA, 120 bp, synthetic construct; identical to SEQ ID NO: 314
  source 1..120: mol_type = other DNA

SEQ ID NO: 90664 - DNA, 120 bp, synthetic construct; identical to SEQ ID NO: 79024
  source 1..120: mol_type = other DNA

SEQ ID NO: 90665 - DNA, 120 bp, synthetic construct; identical to SEQ ID NO: 315
  source 1..120: mol_type = other DNA

SEQ ID NO: 90666 - DNA, 120 bp, synthetic construct; identical to SEQ ID NO: 316
  source 1..120: mol_type = other DNA

SEQ ID NO: 90667 - DNA, 120 bp, synthetic construct; identical to SEQ ID NO: 8182
  source 1..120: mol_type = other DNA

SEQ ID NO: 90668 - DNA, 120 bp, synthetic construct
  source 1..120: mol_type = other DNA
gctcagtatctcccctgtatctttctgtctcaggtataatctgcatcttctgctcttttcgtgataagaaaaggaacagcaacagcatgtctactatgcaaatgtggactactaatctgg

SEQ ID NO: 90669 - DNA, 120 bp, synthetic construct; identical to SEQ ID NO: 79029
  source 1..120: mol_type = other DNA

SEQ ID NO: 90670 - DNA, 120 bp, synthetic construct; identical to SEQ ID NO: 79030
  source 1..120: mol_type = other DNA

SEQ ID NO: 90671 - DNA, 120 bp, synthetic construct; identical to SEQ ID NO: 8183
  source 1..120: mol_type = other DNA

SEQ ID NO: 90672 - DNA, 120 bp, synthetic construct; identical to SEQ ID NO: 79032
  source 1..120: mol_type = other DNA

SEQ ID NO: 90673 - DNA, 120 bp, synthetic construct; identical to SEQ ID NO: 8184
  source 1..120: mol_type = other DNA

SEQ ID NO: 90674 - DNA, 120 bp, synthetic construct; identical to SEQ ID NO: 8185
  source 1..120: mol_type = other DNA

SEQ ID NO: 90675 - DNA, 120 bp, synthetic construct; identical to SEQ ID NO: 8186
  source 1..120: mol_type = other DNA

SEQ ID NO: 90676 - DNA, 120 bp, synthetic construct; identical to SEQ ID NO: 8187
  source 1..120: mol_type = other DNA

SEQ ID NO: 90677 - DNA, 120 bp, synthetic construct; identical to SEQ ID NO: 8188
  source 1..120: mol_type = other DNA

SEQ ID NO: 90678 - DNA, 120 bp, synthetic construct; identical to SEQ ID NO: 319
  source 1..120: mol_type = other DNA

SEQ ID NO: 90679 - DNA, 120 bp, synthetic construct; identical to SEQ ID NO: 79039
  source 1..120: mol_type = other DNA

SEQ ID NO: 90680 - DNA, 120 bp, synthetic construct; identical to SEQ ID NO: 320
  source 1..120: mol_type = other DNA

SEQ ID NO: 90681 - DNA, 120 bp, synthetic construct; identical to SEQ ID NO: 79041
  source 1..120: mol_type = other DNA

SEQ ID NO: 90682 - DNA, 120 bp, synthetic construct; identical to SEQ ID NO: 8189
  source 1..120: mol_type = other DNA

SEQ ID NO: 90683 - DNA, 120 bp, synthetic construct; identical to SEQ ID NO: 79043
  source 1..120: mol_type = other DNA

SEQ ID NO: 90684 - DNA, 120 bp, synthetic construct; identical to SEQ ID NO: 321
  source 1..120: mol_type = other DNA

SEQ ID NO: 90685 - DNA, 120 bp, synthetic construct; identical to SEQ ID NO: 79045
  source 1..120: mol_type = other DNA

SEQ ID NO: 90686 - DNA, 120 bp, synthetic construct; identical to SEQ ID NO: 79046
  source 1..120: mol_type = other DNA

SEQ ID NO: 90687 - DNA, 120 bp, synthetic construct; identical to SEQ ID NO: 8190
  source 1..120: mol_type = other DNA

SEQ ID NO: 90688 - DNA, 120 bp, synthetic construct; identical to SEQ ID NO: 8191
  source 1..120: mol_type = other DNA

SEQ ID NO: 90689 - DNA, 120 bp, synthetic construct; identical to SEQ ID NO: 8192
  source 1..120: mol_type = other DNA

SEQ ID NO: 90690 - DNA, 120 bp, synthetic construct
  source 1..120: mol_type = other DNA
gtgggtacttggtctcactgacttcaagaatgaggccgcggaccctcgcggtgagtgttacagctcttaaggtggtgtgtctggagtctgtcccttctgatgttcagatgtgtttggagt

SEQ ID NO: 90691 - DNA, 120 bp, synthetic construct
  source 1..120: mol_type = other DNA
accaatcggcactccatatctagctcaaggtttgtaaacacaccaatcagcaccctgtgtttagctcaaggtttgtaagtgcaccaatcgacactctgtatctagctgctctggtgagga

SEQ ID NO: 90692 - DNA, 120 bp, synthetic construct
  source 1..120: mol_type = other DNA
ggccagcccagaaaggggctcccacagtgcaggggggggtgctgaagggctcctcgaattccattaaagtgggagcccaggcaggggaggtgccgagagcaagcgagggctctgaggact

SEQ ID NO: 90693 - DNA, 120 bp, synthetic construct
  source 1..120: mol_type = other DNA
accctctcaaagtgctggggttacaggcataagtcaccatgctccgcttaaacaggaattcctaagtttatgttagttcctataggaatcaacacagagcacagtactcagtaggtattt

SEQ ID NO: 90694 - DNA, 120 bp, synthetic construct; identical to SEQ ID NO: 8193
  source 1..120: mol_type = other DNA

SEQ ID NO: 90695 - DNA, 120 bp, synthetic construct; identical to SEQ ID NO: 8194
  source 1..120: mol_type = other DNA

SEQ ID NO: 90696 - DNA, 120 bp, synthetic construct
  source 1..120: mol_type = other DNA
atcaatggtcccccatgcttacagaataaagcccgaaccctgtcgcctggcattcatagacctctttaatcttctggcccctatcttttccaggtttatttcactatcacatttataatt

SEQ ID NO: 90697 - DNA, 120 bp, synthetic construct; identical to SEQ ID NO: 8195
  source 1..120: mol_type = other DNA

SEQ ID NO: 90698 - DNA, 120 bp, synthetic construct; identical to SEQ ID NO: 8196
  source 1..120: mol_type = other DNA

SEQ ID NO: 90699 - DNA, 120 bp, synthetic construct; identical to SEQ ID NO: 8197
  source 1..120: mol_type = other DNA

SEQ ID NO: 90700 - DNA, 120 bp, synthetic construct; identical to SEQ ID NO: 8198
  source 1..120: mol_type = other DNA

SEQ ID NO: 90701 - DNA, 120 bp, synthetic construct
  source 1..120: mol_type = other DNA
ccaccaaggttgaactatatgacaccttacagaacaaaacatacaattgctgagtttttatagggactgaccatgcaattacacagagtcacataattgcctatgtcctgcccaatgtag

SEQ ID NO: 90702 - DNA, 120 bp, synthetic construct; identical to SEQ ID NO: 8199
  source 1..120: mol_type = other DNA

SEQ ID NO: 90703 - DNA, 120 bp, synthetic construct
  source 1..120: mol_type = other DNA
cattaccggagaaaacaggagcaagaacaagactgacaaatccagtcaatgtataaaaaggagtgagagaggagaaggaggggaggaagtcaatacacgtaagaagccaaccctttctta

SEQ ID NO: 90704 - DNA, 120 bp, synthetic construct
  source 1..120: mol_type = other DNA
acttggtatgtgtgcttggggactaggggatggggatcaagaagaggcagcactgaagtcttcataagccatattctcatcactcacctctgttttttgttgttgtttttttttgagacg

SEQ ID NO: 90705 - DNA, 120 bp, synthetic construct; identical to SEQ ID NO: 8200
  source 1..120: mol_type = other DNA

SEQ ID NO: 90706 - DNA, 120 bp, synthetic construct; identical to SEQ ID NO: 8201
  source 1..120: mol_type = other DNA

SEQ ID NO: 90707 - DNA, 120 bp, synthetic construct
  source 1..120: mol_type = other DNA
gagaatggggtgaacccgggaggtggagcttgcagtgagccgagatcgtgccactgcactccagcctgggtgacagaccgagactccatatcaaaaaaaaaaaaaaaaaaagaattacta

SEQ ID NO: 90708 - DNA, 120 bp, synthetic construct
  source 1..120: mol_type = other DNA
gttcactaaatgcaaaagaggtgatcagggagaatggcaaggagaacctaggagcaggcttaggagaaactggcaagggtctcaatccataagatggcttgcttagagacagggctggtc

SEQ ID NO: 90709 - DNA, 120 bp, synthetic construct; identical to SEQ ID NO: 8202
  source 1..120: mol_type = other DNA

SEQ ID NO: 90710 - DNA, 120 bp, synthetic construct
  source 1..120: mol_type = other DNA
gctttgtgtgatgtactctgagattttctactttgttctgttattcttttttttgttgagatggggtctcactctttcacccgggctggagtgtaatggcgccatcttggctcactgcaa

SEQ ID NO: 90711 - DNA, 120 bp, synthetic construct
  source 1..120: mol_type = other DNA
gcctgaaagcatgttgacacactgcatgtggttacacatgaaaggcaagtgaataggaaaagcagttttgaatcccaccccattctaattttggactggctctgggcacctactggagga

SEQ ID NO: 90712 - DNA, 120 bp, synthetic construct
  source 1..120: mol_type = other DNA
gttgcggtgagccgagatcgcaccattgcactctagcctggacaacaagagtgaaactctgtctcaaaaaaaaaaaaaaaaaggaagtgttcctatttagtatactaatgaagtagggaa

SEQ ID NO: 90713 - DNA, 120 bp, synthetic construct
  source 1..120: mol_type = other DNA
aataaacatacgtgtgcatgtgtctttatagcagcatgatttatagtcatttgggtatatacccagtaatgggatggctgggtcaaatggtatttctagttctagatccctgaggaatca

SEQ ID NO: 90714 - DNA, 120 bp, synthetic construct
  source 1..120: mol_type = other DNA
tctcttttggtaccagtaccatgctgttttgcttactgtagccttgtagtatagtttgaagtcaggtagtgtgatgcctccagctttgttcttttggcttaggattgacttggcgatgcg

SEQ ID NO: 90715 - DNA, 120 bp, synthetic construct
  source 1..120: mol_type = other DNA
tgaattctaccagaggtacaaggaggaactggtaccattccttctgaaactattccaatcaatagaaaaagagggaatcctccctaactcattttatgaggccagcatcattctgatacc

SEQ ID NO: 90716 - DNA, 120 bp, synthetic construct
  source 1..120: mol_type = other DNA
gagagttctgtagatgtctattaggtccgcttggtgcagagctgagttcaattcctgggtatccttgttgactttctgtctcgttgatctatctaatgttgacagtggggtgttaaagtc

SEQ ID NO: 90717 - DNA, 120 bp, synthetic construct
  source 1..120: mol_type = other DNA
cttcttcaggagtatctttgtggcattctctgtatttcctgaatctgaacgttggcctgccttgttagattggggaagttctcctggataatatcctgcagagtgttttccaacttggtt

SEQ ID NO: 90718 - DNA, 120 bp, synthetic construct
  source 1..120: mol_type = other DNA
aggagccaagatggccgaataggaacagctccggtctacagctccagcgtgagcgacacagaagacgggtgatttctgcatttccatctgagctttgaagagagcagtggttctcccagc

SEQ ID NO: 90719 - DNA, 120 bp, synthetic construct; identical to SEQ ID NO: 8203
  source 1..120: mol_type = other DNA

SEQ ID NO: 90720 - DNA, 120 bp, synthetic construct; identical to SEQ ID NO: 8204
  source 1..120: mol_type = other DNA

SEQ ID NO: 90721 - DNA, 120 bp, synthetic construct; identical to SEQ ID NO: 8205
  source 1..120: mol_type = other DNA

SEQ ID NO: 90722 - DNA, 120 bp, synthetic construct; identical to SEQ ID NO: 8206
  source 1..120: mol_type = other DNA

SEQ ID NO: 90723 - DNA, 120 bp, synthetic construct; identical to SEQ ID NO: 8207
  source 1..120: mol_type = other DNA

SEQ ID NO: 90724 - DNA, 120 bp, synthetic construct
  source 1..120: mol_type = other DNA
gtggttgggtagcgaaaatcaacatgcttaatatcataccatctcatcatcagttgttgcgatgcctattatacatgttggggcttatccaattaatatttatgaaggggaatagctgct

SEQ ID NO: 90725 - DNA, 120 bp, synthetic construct
  source 1..120: mol_type = other DNA
ccacttaatgctaataagttttattgagaacttgtaaggtgtggctcacgcctgcaatcccagcactttgggaggccaaggcaggtggatcacttgagaccaagagttcaagaccagcct

SEQ ID NO: 90726 - DNA, 120 bp, synthetic construct; identical to SEQ ID NO: 8208
  source 1..120: mol_type = other DNA

SEQ ID NO: 90727 - DNA, 120 bp, synthetic construct; identical to SEQ ID NO: 8209
  source 1..120: mol_type = other DNA

SEQ ID NO: 90728 - DNA, 120 bp, synthetic construct
  source 1..120: mol_type = other DNA
atgttgattacctgggtgacaaaattatctgtacaccagacccccatgacatgcaatttacccatgtaacaaacttgcacatataccccccttgaacctaaaataaaagttggaaagaaa

SEQ ID NO: 90729 - DNA, 120 bp, synthetic construct; identical to SEQ ID NO: 8210
  source 1..120: mol_type = other DNA

SEQ ID NO: 90730 - DNA, 120 bp, synthetic construct; identical to SEQ ID NO: 8211
  source 1..120: mol_type = other DNA

SEQ ID NO: 90731 - DNA, 120 bp, synthetic construct
  source 1..120: mol_type = other DNA
cagtggtatcctgaatttggaaggcaccatggagatcacatagaccacactctttttttaaagtttagggaactgaggcacagaaagaagtcattgtccaaggtctcagagttaagagca

SEQ ID NO: 90732 - DNA, 120 bp, synthetic construct
  source 1..120: mol_type = other DNA
ctagcttgagtaacagagccagaccctgtctgtttaaaaaaaaaaaaaaaacaaaaaacaaaaaacaaaacagagggctgggagtggtgactcatgcctgtaatcgcagcgctttgggag

SEQ ID NO: 90733 - DNA, 120 bp, synthetic construct
  source 1..120: mol_type = other DNA
tttatttcagtttaaactaagcaagtgggaaaaattatttctgttcttggtgggcttctttagaacatgcccctcatggagaccacagggagatgggagtcaaacttggcagtttttgcc

SEQ ID NO: 90734 - DNA, 120 bp, synthetic construct
  source 1..120: mol_type = other DNA
ttccaaagtggttgtaccactttcacactctcactagcaacatatgagggttctggccaacttccttaacacttggtattgccagatgttttaattttaaccatcctagtgaatgtatgg

SEQ ID NO: 90735 - DNA, 120 bp, synthetic construct; identical to SEQ ID NO: 8212
  source 1..120: mol_type = other DNA

SEQ ID NO: 90736 - DNA, 120 bp, synthetic construct; identical to SEQ ID NO: 8213
  source 1..120: mol_type = other DNA

SEQ ID NO: 90737 - DNA, 120 bp, synthetic construct; identical to SEQ ID NO: 8214
  source 1..120: mol_type = other DNA

SEQ ID NO: 90738 - DNA, 120 bp, synthetic construct; identical to SEQ ID NO: 8215
  source 1..120: mol_type = other DNA

SEQ ID NO: 90739 - DNA, 120 bp, synthetic construct; identical to SEQ ID NO: 8216
  source 1..120: mol_type = other DNA

SEQ ID NO: 90740 - DNA, 120 bp, synthetic construct; identical to SEQ ID NO: 8217
  source 1..120: mol_type = other DNA

SEQ ID NO: 90741 - DNA, 120 bp, synthetic construct; identical to SEQ ID NO: 8218
  source 1..120: mol_type = other DNA

SEQ ID NO: 90742 - DNA, 120 bp, synthetic construct; identical to SEQ ID NO: 8219
  source 1..120: mol_type = other DNA

SEQ ID NO: 90743 - DNA, 120 bp, synthetic construct; identical to SEQ ID NO: 8220
  source 1..120: mol_type = other DNA

SEQ ID NO: 90744 - DNA, 120 bp, synthetic construct; identical to SEQ ID NO: 8221
  source 1..120: mol_type = other DNA

SEQ ID NO: 90745 - DNA, 120 bp, synthetic construct; identical to SEQ ID NO: 8222
  source 1..120: mol_type = other DNA

SEQ ID NO: 90746 - DNA, 120 bp, synthetic construct; identical to SEQ ID NO: 8223
  source 1..120: mol_type = other DNA

SEQ ID NO: 90747 - DNA, 120 bp, synthetic construct; identical to SEQ ID NO: 8224
  source 1..120: mol_type = other DNA

SEQ ID NO: 90748 - DNA, 120 bp, synthetic construct; identical to SEQ ID NO: 8225
  source 1..120: mol_type = other DNA

SEQ ID NO: 90749 - DNA, 120 bp, synthetic construct; identical to SEQ ID NO: 8307
  source 1..120: mol_type = other DNA

SEQ ID NO: 90750 - DNA, 120 bp, synthetic construct; identical to SEQ ID NO: 79110
  source 1..120: mol_type = other DNA

SEQ ID NO: 90751 - DNA, 120 bp, synthetic construct; identical to SEQ ID NO: 79111
  source 1..120: mol_type = other DNA

SEQ ID NO: 90752 - DNA, 120 bp, synthetic construct; identical to SEQ ID NO: 79112
  source 1..120: mol_type = other DNA

SEQ ID NO: 90753 - DNA, 120 bp, synthetic construct; identical to SEQ ID NO: 8226
  source 1..120: mol_type = other DNA

SEQ ID NO: 90754 - DNA, 120 bp, synthetic construct; identical to SEQ ID NO: 79114
  source 1..120: mol_type = other DNA

SEQ ID NO: 90755 - DNA, 120 bp, synthetic construct; identical to SEQ ID NO: 8227
  source 1..120: mol_type = other DNA

SEQ ID NO: 90756 - DNA, 120 bp, synthetic construct
  source 1..120: mol_type = other DNA
aaacgagatcaagccactacactccagcctgggcaactgagtgagactccatctccaaaaaaaagaaaaaagaaaaaaaatatagatctaagtgaataatcactgttaaaaacaacacta

SEQ ID NO: 90757 - DNA, 120 bp, synthetic construct; identical to SEQ ID NO: 8228
  source 1..120: mol_type = other DNA

SEQ ID NO: 90758 - DNA, 120 bp, synthetic construct; identical to SEQ ID NO: 8229
  source 1..120: mol_type = other DNA

SEQ ID NO: 90759 - DNA, 120 bp, synthetic construct
  source 1..120: mol_type = other DNA
gattaaatacttttaagaaagaggaacccagcagcaaagccaattcatcgagagatctgtgtagttttagaacactgggagtagcctttagaatcgagaggaagaggctccagtgagtta

SEQ ID NO: 90760 - DNA, 120 bp, synthetic construct
  source 1..120: mol_type = other DNA
cccactacctaggtcacagaataccaaaaccacccatcaagttctggttcagtgaaatccaggacctctctcctctaggacagaaatggctttctgaaagccatttccttacggcttttc

SEQ ID NO: 90761 - DNA, 120 bp, synthetic construct; identical to SEQ ID NO: 8230
  source 1..120: mol_type = other DNA

SEQ ID NO: 90762 - DNA, 120 bp, synthetic construct; identical to SEQ ID NO: 8231
  source 1..120: mol_type = other DNA

SEQ ID NO: 90763 - DNA, 120 bp, synthetic construct; identical to SEQ ID NO: 8232
  source 1..120: mol_type = other DNA

SEQ ID NO: 90764 - DNA, 120 bp, synthetic construct; identical to SEQ ID NO: 8233
  source 1..120: mol_type = other DNA

SEQ ID NO: 90765 - DNA, 120 bp, synthetic construct; identical to SEQ ID NO: 8234
  source 1..120: mol_type = other DNA

SEQ ID NO: 90766 - DNA, 120 bp, synthetic construct
  source 1..120: mol_type = other DNA
atataacctatgtgtggcctctgtcatgagtaagcatgaatttttacatctgatagtggggaaaggggtggaaggagccctaaattagcaatcacaagattctctttctattcctggctc

SEQ ID NO: 90767 - DNA, 120 bp, synthetic construct
  source 1..120: mol_type = other DNA
ggcatacaacacttagtatagaaggtgtgacaatttccttcctgcttcctcctttctttccttttcttttcttttcttttttttgagacagagtctcactcttgtcacccaggctggagt

SEQ ID NO: 90768 - DNA, 120 bp, synthetic construct; identical to SEQ ID NO: 8235
  source 1..120: mol_type = other DNA

SEQ ID NO: 90769 - DNA, 120 bp, synthetic construct; identical to SEQ ID NO: 8236
  source 1..120: mol_type = other DNA

SEQ ID NO: 90770 - DNA, 120 bp, synthetic construct; identical to SEQ ID NO: 9268
  source 1..120: mol_type = other DNA

SEQ ID NO: 90771 - DNA, 120 bp, synthetic construct; identical to SEQ ID NO: 8237
  source 1..120: mol_type = other DNA

SEQ ID NO: 90772 - DNA, 120 bp, synthetic construct; identical to SEQ ID NO: 8238
  source 1..120: mol_type = other DNA

SEQ ID NO: 90773 - DNA, 120 bp, synthetic construct
  source 1..120: mol_type = other DNA
agcctgggcaacagagcgagactccatctcaaaaaaaaaaaaaaggaagtctgagaacagtgaggccccaagatcccctctcccattgtagtggaagactagatgagaggtttattctgt

SEQ ID NO: 90774 - DNA, 120 bp, synthetic construct; identical to SEQ ID NO: 8239
  source 1..120: mol_type = other DNA

SEQ ID NO: 90775 - DNA, 120 bp, synthetic construct
  source 1..120: mol_type = other DNA
agagagattaactatcatacccaaggtcatacaatgagtaaatggtggaatcaggattcaaacccaggtctgtcagactccaaagaccacattcttagccattaagcaacaccgactctc

SEQ ID NO: 90776 - DNA, 120 bp, synthetic construct; identical to SEQ ID NO: 8240
  source 1..120: mol_type = other DNA

SEQ ID NO: 90777 - DNA, 120 bp, synthetic construct; identical to SEQ ID NO: 8241
  source 1..120: mol_type = other DNA

SEQ ID NO: 90778 - DNA, 120 bp, synthetic construct; identical to SEQ ID NO: 8300
  source 1..120: mol_type = other DNA

SEQ ID NO: 90779 - DNA, 120 bp, synthetic construct; identical to SEQ ID NO: 8242
  source 1..120: mol_type = other DNA

SEQ ID NO: 90780 - DNA, 120 bp, synthetic construct; identical to SEQ ID NO: 8243
  source 1..120: mol_type = other DNA

SEQ ID NO: 90781 - DNA, 120 bp, synthetic construct
  source 1..120: mol_type = other DNA
tgaataatgttaagatcaggatgccaatatcccaggctcctcacttagtcctgctctaactgcatccttttggccctttttatctcataggtcagcaagaaaaagaaagacactaccgat

SEQ ID NO: 90782 - DNA, 120 bp, synthetic construct; identical to SEQ ID NO: 8244
  source 1..120: mol_type = other DNA

SEQ ID NO: 90783 - DNA, 120 bp, synthetic construct; identical to SEQ ID NO: 8245
  source 1..120: mol_type = other DNA

SEQ ID NO: 90784 - DNA, 120 bp, synthetic construct; identical to SEQ ID NO: 8246
  source 1..120: mol_type = other DNA

SEQ ID NO: 90785 - DNA, 120 bp, synthetic construct; identical to SEQ ID NO: 9271
  source 1..120: mol_type = other DNA

SEQ ID NO: 90786 - DNA, 120 bp, synthetic construct; identical to SEQ ID NO: 8247
  source 1..120: mol_type = other DNA

SEQ ID NO: 90787 - DNA, 120 bp, synthetic construct; identical to SEQ ID NO: 8248
  source 1..120: mol_type = other DNA

SEQ ID NO: 90788 - DNA, 120 bp, synthetic construct
  source 1..120: mol_type = other DNA
attcacatgcccacggaccattcccttgcttgaaaagaaaaaacctttcttcaaatggagggggctgggacttgaccttttcctccattggcttttaagctcccaactgacttgacctct

SEQ ID NO: 90789 - DNA, 120 bp, synthetic construct; identical to SEQ ID NO: 8297
  source 1..120: mol_type = other DNA

SEQ ID NO: 90790 - DNA, 120 bp, synthetic construct
  source 1..120: mol_type = other DNA
gaaataaaactgctctgtctcttgctggttggctctcctcttagcaatgctgggcttgctcatgaaggtttcagagaccgtggacttgacggactccatggagttgctgtactggaagca

SEQ ID NO: 90791 - DNA, 120 bp, synthetic construct
  source 1..120: mol_type = other DNA
ttggtcatcagaagattaggaaataaattttagtccaggcaatagatcctacttggcaagctcaaaataactcaattattaaaaagcagcacacaaagaccagtagtgacttccaaagga

SEQ ID NO: 90792 - DNA, 120 bp, synthetic construct; identical to SEQ ID NO: 8249
  source 1..120: mol_type = other DNA

SEQ ID NO: 90793 - DNA, 120 bp, synthetic construct; identical to SEQ ID NO: 79154
  source 1..120: mol_type = other DNA

SEQ ID NO: 90794 - DNA, 120 bp, synthetic construct
  source 1..120: mol_type = other DNA
cagtgatgttttgtggttttaaattttctttacttattatattgttaaggatttttttttttagtgaaattttccaaagtgatttacaaaactgtttggtttataaggtgtggtcaccga

SEQ ID NO: 90795 - DNA, 120 bp, synthetic construct
  source 1..120: mol_type = other DNA
cgtcacaaacaggctttcataccattcttaatttggtcctgtaattcttcattgctgtattaattttctgatgcttttaaggatgttttataacaaattgtgtagctttttccaatggaa

SEQ ID NO: 90796 - DNA, 120 bp, synthetic construct
  source 1..120: mol_type = other DNA
tgtcagcatgagtggtagtagtggtgagaagtcgttaggccatggatgtatttcataggactggccaagagaactgcagctaaattggagtgtagggagtgaaatagagaactcaaagat

SEQ ID NO: 90797 - DNA, 120 bp, synthetic construct
  source 1..120: mol_type = other DNA
ggaaataggaagattttagaagactcagacattgactttcttctgtgcaaaaaaaaaagacgtattgagataagacaagtctttccttgcaaggatacctctaatgctcatacaccacct

SEQ ID NO: 90798 - DNA, 120 bp, synthetic construct
  source 1..120: mol_type = other DNA
ttcccagggaagaaaatcaaattcataagatatgctaggacaatttaactcaagatgttcaaaactgaaatgacatattctacaacatgtgataaaaccaccccctaacaacttaaagca

SEQ ID NO: 90799 - DNA, 120 bp, synthetic construct; identical to SEQ ID NO: 8250
  source 1..120: mol_type = other DNA

SEQ ID NO: 90800 - DNA, 120 bp, synthetic construct
  source 1..120: mol_type = other DNA
gtctaacgacctcacccagcaggagatacagaccctggaggtaaggggttcggggacccgggctgggctccaggagcggcccggacacctccttcgggggccccagttcactcctggccg

SEQ ID NO: 90801 - DNA, 120 bp, synthetic construct
  source 1..120: mol_type = other DNA
cctttggctagacacagagtgctgattggtgaatttacaatcctttagctaaacacaaaagttctccaagtccccacccgactcagaagcccagagggcttcacctctcacaacctctgc

SEQ ID NO: 90802 - DNA, 120 bp, synthetic construct
  source 1..120: mol_type = other DNA
gacagagcaaaactccgtcaggaaagtaaggaaagaaaggaaaggaaggaaggagggaaggaaggaaggaaagagagaaagagaaagaaggaaagaaaggaaagaaaagaaaggaaacaa

SEQ ID NO: 90803 - DNA, 120 bp, synthetic construct
  source 1..120: mol_type = other DNA
agaatccttgcctaattcctcttccttctccaaaccacagggtccccctcatcagaaagaagtccttgaggcgcaccctgtccgagcgtggcctgctgaaggacttcctgaagaagcaca

SEQ ID NO: 90804 - DNA, 120 bp, synthetic construct
  source 1..120: mol_type = other DNA
cagagactggcctctgccatccagcagacctggtgcaaatatgggtcctagtgcctctaagccacaggaccttggccaagtcatttaaatactctgagcctgtgtcttggtctggaaaac

SEQ ID NO: 90805 - DNA, 120 bp, synthetic construct
  source 1..120: mol_type = other DNA
aaaaaaaagaataaaaattctggcaatgccctttctcaaaacctgctgtacacatctagacgtagaaataagaaaactggacaggtttccatctttaagtggcttgcttagcttctgata

SEQ ID NO: 90806 - DNA, 120 bp, synthetic construct; identical to SEQ ID NO: 11957
  source 1..120: mol_type = other DNA

SEQ ID NO: 90807 - DNA, 120 bp, synthetic construct; identical to SEQ ID NO: 11958
  source 1..120: mol_type = other DNA

SEQ ID NO: 90808 - DNA, 120 bp, synthetic construct; identical to SEQ ID NO: 11959
  source 1..120: mol_type = other DNA

SEQ ID NO: 90809 - DNA, 120 bp, synthetic construct; identical to SEQ ID NO: 11960
  source 1..120: mol_type = other DNA

SEQ ID NO: 90810 - DNA, 120 bp, synthetic construct; identical to SEQ ID NO: 11961
  source 1..120: mol_type = other DNA

SEQ ID NO: 90811 - DNA, 120 bp, synthetic construct; identical to SEQ ID NO: 11962
  source 1..120: mol_type = other DNA

SEQ ID NO: 90812 - DNA, 120 bp, synthetic construct
  source 1..120: mol_type = other DNA
ggtcaaaatactgggctaattgtcttctcatagaagggacacagagctgagatcgtgccattgtactccagcctgggcgacacagagagactccagctcagaaagaaaaaaataggtcac

SEQ ID NO: 90813 - DNA, 120 bp, synthetic construct; identical to SEQ ID NO: 11963
  source 1..120: mol_type = other DNA

SEQ ID NO: 90814 - DNA, 120 bp, synthetic construct; identical to SEQ ID NO: 11964
  source 1..120: mol_type = other DNA

SEQ ID NO: 90815 - DNA, 120 bp, synthetic construct
  source 1..120: mol_type = other DNA
ggtggaggttgcagtgagccgagatggcaccattgcacttcagcctgggcgacacagcgagattctgtctccaaaaaaaaaacaaaggaatgataaatgttcaagatgataaatatgcta

SEQ ID NO: 90816 - DNA, 120 bp, synthetic construct; identical to SEQ ID NO: 11965
  source 1..120: mol_type = other DNA

SEQ ID NO: 90817 - DNA, 120 bp, synthetic construct; identical to SEQ ID NO: 11966
  source 1..120: mol_type = other DNA

SEQ ID NO: 90818 - DNA, 120 bp, synthetic construct; identical to SEQ ID NO: 11967
  source 1..120: mol_type = other DNA

SEQ ID NO: 90819 - DNA, 120 bp, synthetic construct; identical to SEQ ID NO: 461
  source 1..120: mol_type = other DNA

SEQ ID NO: 90820 - DNA, 120 bp, synthetic construct; identical to SEQ ID NO: 462
  source 1..120: mol_type = other DNA

SEQ ID NO: 90821 - DNA, 120 bp, synthetic construct
  source 1..120: mol_type = other DNA
ctccccatggtgcaaggttacaatggaaagtgcctcagctggaaaggtctcagaatgtggctcagggcagccacaatcttatcaggagcttctctgtttgggatcaggggaaccggtgac

SEQ ID NO: 90822 - DNA, 120 bp, synthetic construct; identical to SEQ ID NO: 11969
  source 1..120: mol_type = other DNA

SEQ ID NO: 90823 - DNA, 120 bp, synthetic construct; identical to SEQ ID NO: 463
  source 1..120: mol_type = other DNA

SEQ ID NO: 90824 - DNA, 120 bp, synthetic construct; identical to SEQ ID NO: 464
  source 1..120: mol_type = other DNA

SEQ ID NO: 90825 - DNA, 120 bp, synthetic construct; identical to SEQ ID NO: 11945
  source 1..120: mol_type = other DNA

SEQ ID NO: 90826 - DNA, 120 bp, synthetic construct; identical to SEQ ID NO: 11946
  source 1..120: mol_type = other DNA

SEQ ID NO: 90827 - DNA, 120 bp, synthetic construct; identical to SEQ ID NO: 11947
  source 1..120: mol_type = other DNA

SEQ ID NO: 90828 - DNA, 120 bp, synthetic construct; identical to SEQ ID NO: 11948
  source 1..120: mol_type = other DNA

SEQ ID NO: 90829 - DNA, 120 bp, synthetic construct; identical to SEQ ID NO: 11949
  source 1..120: mol_type = other DNA

SEQ ID NO: 90830 - DNA, 120 bp, synthetic construct; identical to SEQ ID NO: 465
  source 1..120: mol_type = other DNA

SEQ ID NO: 90831 - DNA, 120 bp, synthetic construct; identical to SEQ ID NO: 466
  source 1..120: mol_type = other DNA

SEQ ID NO: 90832 - DNA, 120 bp, synthetic construct; identical to SEQ ID NO: 11950
  source 1..120: mol_type = other DNA

SEQ ID NO: 90833 - DNA, 120 bp, synthetic construct; identical to SEQ ID NO: 467
  source 1..120: mol_type = other DNA

SEQ ID NO: 90834 - DNA, 120 bp, synthetic construct; identical to SEQ ID NO: 468
  source 1..120: mol_type = other DNA

SEQ ID NO: 90835 - DNA, 120 bp, synthetic construct; identical to SEQ ID NO: 11951
  source 1..120: mol_type = other DNA

SEQ ID NO: 90836 - DNA, 120 bp, synthetic construct; identical to SEQ ID NO: 11952
  source 1..120: mol_type = other DNA

SEQ ID NO: 90837 - DNA, 120 bp, synthetic construct; identical to SEQ ID NO: 11953
  source 1..120: mol_type = other DNA

SEQ ID NO: 90838 - DNA, 120 bp, synthetic construct
  source 1..120: mol_type = other DNA
tagacacgaaagttctccaagtccctaatcgactcagaagcccagacggcttcacctcttacaacctctgcctcctgggttcaagtgattctcctgcctcagcctacccagtagctggga

SEQ ID NO: 90839 - DNA, 120 bp, synthetic construct
  source 1..120: mol_type = other DNA
gtcaatgcttcagaaataagcctctggcggcgcgacagagcaaaactccctcaggaaagaaaggaaagaaatggagaaagggagaaagggagaaagagaggaaaagaaagaaagaaagaa

SEQ ID NO: 90840 - DNA, 120 bp, synthetic construct; identical to SEQ ID NO: 11955
  source 1..120: mol_type = other DNA

SEQ ID NO: 90841 - DNA, 120 bp, synthetic construct; identical to SEQ ID NO: 11956
  source 1..120: mol_type = other DNA

SEQ ID NO: 90842 - DNA, 120 bp, synthetic construct
  source 1..120: mol_type = other DNA
actcccgcctggacaacagagtgagacttgtctcaaaaaaaaagaataaaaatactgtcaatgccctttcttgcaacctgctatacacatctagatgtagaaataagaaaactggacagg

SEQ ID NO: 90843 - DNA, 120 bp, synthetic construct; identical to SEQ ID NO: 11957
  source 1..120: mol_type = other DNA

SEQ ID NO: 90844 - DNA, 120 bp, synthetic construct; identical to SEQ ID NO: 11958
  source 1..120: mol_type = other DNA

SEQ ID NO: 90845 - DNA, 120 bp, synthetic construct
  source 1..120: mol_type = other DNA
gcagggagaatcgcttgagcctgggaggcataggttgcagtgaacaaagattgtaccactgcatcctagcctgggcaacagagcaagactccatctcaataaataaataaataaataaat

SEQ ID NO: 90846 - DNA, 120 bp, synthetic construct
  source 1..120: mol_type = other DNA
ccgaggttctgaatggtccagggatgagcagtgatgcctcaagctaagccaatcaaagccttccctgggattgtctcaaggagtccgcagtgagattctgggtctcagtactgggaaagg

SEQ ID NO: 90847 - DNA, 120 bp, synthetic construct
  source 1..120: mol_type = other DNA
ttaagcttgtcctgtacatttcatttacaaaggactttcacaagcatgaatggaggtgaccccaccacaccccaggtttcggataaggaaaccgaggcttcagtaggaagtactgtaccc

SEQ ID NO: 90848 - DNA, 120 bp, synthetic construct
  source 1..120: mol_type = other DNA
tctgcctcctgggttcaagcgattctccctgcctcagcctcccgagtagctggggttacaggaatccaccaccacgcctggctaatttttgtattttttagtagagatggggtttcacca

SEQ ID NO: 90849 - DNA, 120 bp, synthetic construct
  source 1..120: mol_type = other DNA
atatggtgaaaccccttctctactaaaaatacaaatattagccgggtacagtgcacctgtaatcccagctactcgggaggctgaggcacaaggatcacttgaacccgagaggcagaggtt

SEQ ID NO: 90850 - DNA, 120 bp, synthetic construct; identical to SEQ ID NO: 1595
  source 1..120: mol_type = other DNA

SEQ ID NO: 90851 - DNA, 120 bp, synthetic construct; identical to SEQ ID NO: 1596
  source 1..120: mol_type = other DNA

SEQ ID NO: 90852 - DNA, 120 bp, synthetic construct; identical to SEQ ID NO: 1597
  source 1..120: mol_type = other DNA

SEQ ID NO: 90853 - DNA, 120 bp, synthetic construct
  source 1..120: mol_type = other DNA
ctgagcccaggctggagttcagtgatggatctcagctcactgcagccgccacctcctgggctcaagagatcctcctgcctcggcctcccaagtagctgggattacagacgtgcaccacca

SEQ ID NO: 90854 - DNA, 120 bp, synthetic construct
  source 1..120: mol_type = other DNA
aggctgaggtaggaggattgcttgaggccaggagttcaaaaccagcccaggcaacaaagtgagacccctgtctctactaaagtaaataaaacaataaaataaaaaaaaaaattcgagaga

SEQ ID NO: 90855 - DNA, 120 bp, synthetic construct
  source 1..120: mol_type = other DNA
tgagaagctaggtattccaatgtcgggctctcgctgggggcttctggtgcttcttctgtctcactgacaagctttcataggggagcaggtgggagatcagggtagaggccttgtaggttc

SEQ ID NO: 90856 - DNA, 120 bp, synthetic construct
  source 1..120: mol_type = other DNA
gtcctaccacctggacaccaaggtgcgctgccccatgtgctggcaggtggtggacggcagcagctccttgcccaacgtctccctggcctgggtgatcgaagccctgaggctccctgggga

SEQ ID NO: 90857 - DNA, 120 bp, synthetic construct
  source 1..120: mol_type = other DNA
tgtcccctggtgtatttcagtgcctggagccatgcctggcacattgtaaatgtccaaaatgctgaatcagtgaattcctgcctttataggccatcaccaaacctagcagatcattcttta

SEQ ID NO: 90858 - DNA, 120 bp, synthetic construct; identical to SEQ ID NO: 1598
  source 1..120: mol_type = other DNA

SEQ ID NO: 90859 - DNA, 120 bp, synthetic construct; identical to SEQ ID NO: 1599
  source 1..120: mol_type = other DNA

SEQ ID NO: 90860 - DNA, 120 bp, synthetic construct
  source 1..120: mol_type = other DNA
gaatattctttgaagaaaaaaaaaacattagagatgggatttcactgtgttgcccagtctggtctcaaattcctagcctcaagtgatcctcccatcttggcctcctaaagtgctgggatt

SEQ ID NO: 90861 - DNA, 120 bp, synthetic construct; identical to SEQ ID NO: 1600
  source 1..120: mol_type = other DNA

SEQ ID NO: 90862 - DNA, 120 bp, synthetic construct
  source 1..120: mol_type = other DNA
tatgatcgtgccactgcgctccagcctgggcaacagagtgagaccctgtctgttaaaaaaaaaattaaaaattaaaacaggccaaagcagagcctctccatttgaaatgggagctggggc

SEQ ID NO: 90863 - DNA, 120 bp, synthetic construct
  source 1..120: mol_type = other DNA
aggccgggagttcgagaccagcctggccaatgtagtaacacccccgtctctacaaaaaatacaaaaataaaaaaattagttgggcatggtggcatgcgcctatagtccctgctactcata

SEQ ID NO: 90864 - DNA, 120 bp, synthetic construct
  source 1..120: mol_type = other DNA
ccagcctgggtgacagagcaagactccatctcaaaaaaaaaagaaaagaaaacaagaaaaaaaaaagtccgggcatggtggctcatgcctataatcccagcactttatgctcaagtctgc

SEQ ID NO: 90865 - DNA, 120 bp, synthetic construct; identical to SEQ ID NO: 1601
  source 1..120: mol_type = other DNA

SEQ ID NO: 90866 - DNA, 120 bp, synthetic construct; identical to SEQ ID NO: 1602
  source 1..120: mol_type = other DNA

SEQ ID NO: 90867 - DNA, 120 bp, synthetic construct
  source 1..120: mol_type = other DNA
gtgggaagatcactttaggccaggagttcgagaccatccatgggcaacatggtgagaccgcatttctacaaaagataaaattagctgggtgtggtggtgcacgtctgtagtcccagctac

SEQ ID NO: 90868 - DNA, 120 bp, synthetic construct
  source 1..120: mol_type = other DNA
atgtgaacatattcaacgcaataactgcggttaaacagcagtaaaatcccattatttatccatcagattgacaaagactgaagaactggagaagaagtggcgaaacgggctcgcagcgtc

SEQ ID NO: 90869 - DNA, 120 bp, synthetic construct; identical to SEQ ID NO: 29474
  source 1..120: mol_type = other DNA

SEQ ID NO: 90870 - DNA, 120 bp, synthetic construct
  source 1..120: mol_type = other DNA
tctttctcagctccactccttttttttttttttttttaggactgagtctcgctctgtcactctcaccgaggctggagtgcagtggcatgatcttggttcactacctccaaggttcatgca

SEQ ID NO: 90871 - DNA, 120 bp, synthetic construct
  source 1..120: mol_type = other DNA
aatctgtgtcataattaagttcaaagggaggtactatgcctggatgtgcacgtaggccagatttatgtttccctccgcccaaacatctgtggagtaaagcataacaaggcagcattgctg

SEQ ID NO: 90872 - DNA, 120 bp, synthetic construct; identical to SEQ ID NO: 29475
  source 1..120: mol_type = other DNA

SEQ ID NO: 90873 - DNA, 120 bp, synthetic construct; identical to SEQ ID NO: 29476
  source 1..120: mol_type = other DNA

SEQ ID NO: 90874 - DNA, 120 bp, synthetic construct; identical to SEQ ID NO: 29477
  source 1..120: mol_type = other DNA

SEQ ID NO: 90875 - DNA, 120 bp, synthetic construct; identical to SEQ ID NO: 29478
  source 1..120: mol_type = other DNA

SEQ ID NO: 90876 - DNA, 120 bp, synthetic construct; identical to SEQ ID NO: 29479
  source 1..120: mol_type = other DNA

SEQ ID NO: 90877 - DNA, 120 bp, synthetic construct; identical to SEQ ID NO: 29480
  source 1..120: mol_type = other DNA

SEQ ID NO: 90878 - DNA, 120 bp, synthetic construct; identical to SEQ ID NO: 29481
  source 1..120: mol_type = other DNA

SEQ ID NO: 90879 - DNA, 120 bp, synthetic construct
  source 1..120: mol_type = other DNA
tgtggtggaagaagggaagaaaattggccaggcacactctggtaggggatggttggatgatgaaatacagacaatagaaaaacctagataaagacctggcgtaatggctcatgcttgtaa

SEQ ID NO: 90880 - DNA, 120 bp, synthetic construct
  source 1..120: mol_type = other DNA
gctcatgcctgtaatcccagcactttgagaggccgaggtgggcggatcatgatgtcaggagttcaagaccagcctggccaacatagtgagacctcgtcgctactaaaaatagaaaaaaat

SEQ ID NO: 90881 - DNA, 120 bp, synthetic construct
  source 1..120: mol_type = other DNA
gcggcgggcggccaataatcctggctacttgggaggctgaggcaggagaatcacttgaacctgggaggcggaggttgcagtgagccaagatgatactactgcactccagcctgggtgaca

SEQ ID NO: 90882 - DNA, 120 bp, synthetic construct
  source 1..120: mol_type = other DNA
ggacactctgttgaacgaagtgcaaggtggtaggtttttgcttttttttttttttctgagacagagtctcactctgtctcctaggctggagtgcagtggcatgatctcgactcattgcaa

SEQ ID NO: 90883 - DNA, 120 bp, synthetic construct
  source 1..120: mol_type = other DNA
cacacacacacacacacacacacacacacacacacacacattaattagctgggtgtggtggcgcatgcctccagatactcaggaggctgagcgggaaggatggtttgagccctggaggtt

SEQ ID NO: 90884 - DNA, 120 bp, synthetic construct
  source 1..120: mol_type = other DNA
cctcctgggttcaagcatttctcctgcctcagcctccggagtagctgggactataggcgcgggccaccatgcccagtgattttttatttttattttttttgagacggagtctcgctctgt

SEQ ID NO: 90885 - DNA, 120 bp, synthetic construct
  source 1..120: mol_type = other DNA
aaagtgctgggattacaggcgtgagccaccgcgcccggcctctttcaatcatttctgatgacaccggagaaggcagtgtcctttccttattgtctcttttttttttttacctgggtattc

SEQ ID NO: 90886 - DNA, 120 bp, synthetic construct
  source 1..120: mol_type = other DNA
cccagcactttgggaggctgaggtgggcagatcatgaggtcaggagattgagaccatcctagctaacacagtgaaaccccgtctctagtaaaaatacaaaaaattagccaggcgtggtgg

SEQ ID NO: 90887 - DNA, 120 bp, synthetic construct; identical to SEQ ID NO: 23591
  source 1..120: mol_type = other DNA

SEQ ID NO: 90888 - DNA, 120 bp, synthetic construct; identical to SEQ ID NO: 23592
  source 1..120: mol_type = other DNA

SEQ ID NO: 90889 - DNA, 120 bp, synthetic construct; identical to SEQ ID NO: 23593
  source 1..120: mol_type = other DNA

SEQ ID NO: 90890 - DNA, 120 bp, synthetic construct; identical to SEQ ID NO: 23594
  source 1..120: mol_type = other DNA

SEQ ID NO: 90891 - DNA, 120 bp, synthetic construct; identical to SEQ ID NO: 23595
  source 1..120: mol_type = other DNA

SEQ ID NO: 90892 - DNA, 120 bp, synthetic construct; identical to SEQ ID NO: 23596
  source 1..120: mol_type = other DNA

SEQ ID NO: 90893 - DNA, 120 bp, synthetic construct; identical to SEQ ID NO: 23597
  source 1..120: mol_type = other DNA

SEQ ID NO: 90894 - DNA, 120 bp, synthetic construct; identical to SEQ ID NO: 23598
  source 1..120: mol_type = other DNA

SEQ ID NO: 90895 - DNA, 120 bp, synthetic construct
  source 1..120: mol_type = other DNA
cccaagtagctgggattacaggcttgagccaccatgcccagctaattttttgtactttttagtagagacagggtttcagtatgttggccaggatggtcttgaacttctgacctcaagtga

SEQ ID NO: 90896 - DNA, 120 bp, synthetic construct
  source 1..120: mol_type = other DNA
ggtttcatcatgttggccaggatgatttcgatctcctgaccttgtgatccgcccactttggcctcccaaaatggtgggattacaggcgtgagccaccgtgcccagcccagatgttcttta

SEQ ID NO: 90897 - DNA, 120 bp, synthetic construct
  source 1..120: mol_type = other DNA
tggtggcgggcacctgtagtctcacttatttgggaggccgaggcaggagaatgacatgaactcaggaggtggagcttgcagtgggccgagatcccgccactgcactccagcctgggcgac

SEQ ID NO: 90898 - DNA, 120 bp, synthetic construct
  source 1..120: mol_type = other DNA
gagaggtgaactggcccaggttagaaaaggagcaggttggccgggctcggtggctcatgtctgtaatcccagcactttggggggccaaggcgggcaggtcacctgaggtcaggagttcgg

SEQ ID NO: 90899 - DNA, 120 bp, synthetic construct
  source 1..120: mol_type = other DNA
gctgaagtgggagaatagtttgagcccaagaattcaaagctgcagtgagcaatgatcatgccactgcactccagcctgggctacaaagagactccatctctaaaaaaaaagtaaaataaa

SEQ ID NO: 90900 - DNA, 120 bp, synthetic construct
  source 1..120: mol_type = other DNA
cttgagcctgggaggcagaggttacagtggactgagattgtgccactccacttccacctggacgaaagagccagactctgtttcaaacaaccaaaaaaacgaaaaacccaaccccccaaa

SEQ ID NO: 90901 - DNA, 120 bp, synthetic construct
  source 1..120: mol_type = other DNA
ttaagcttcccatcccccattgctacagtagctcccccagcttttcattccatatcctttatttttatttattaaaaacttaatttttggccgggcgcagtggcttacgcctgtaatccc

SEQ ID NO: 90902 - DNA, 120 bp, synthetic construct
  source 1..120: mol_type = other DNA
gtggtggcaggtgcctgtaatcccagctactcgggaggctgaggcaggagaattgctttaaccctggagacagaggttgcagtgagcccagatcgtgatattgcgctccagcctgggcga

SEQ ID NO: 90903 - DNA, 120 bp, synthetic construct
  source 1..120: mol_type = other DNA
agggacttatgggcaggtctgtgtgacctgagtctgggctctgaactggtgcttgcagggtcttgccctctggctctggcagcctgagtgttactgtaatccctgagcctttgaacaagc

SEQ ID NO: 90904 - DNA, 120 bp, synthetic construct
  source 1..120: mol_type = other DNA
ctgggtaatatagagacaaactgtctctataaattttcttttcccaaaaattagccaggcatggaggtgtgcacctgtagttctagctgcttgagagtctgaagtgggaggataacttga

SEQ ID NO: 90905 - DNA, 120 bp, synthetic construct
  source 1..120: mol_type = other DNA
tcctgcctcagtctcctgagtagctggtactacaggggcccgccactgcacccggctaattttttctttttttctttttttttttttgagacggagtctcgctctgtctcccaggctgga

SEQ ID NO: 90906 - DNA, 120 bp, synthetic construct
  source 1..120: mol_type = other DNA
tataatcccagcactttgggaggccaagtcgggcagatcacgagctcaggagatcgagagcatcctgcctaacacagtgaaaccccatctctactgaaaataccaaaaaaaaaaaaaaaa

SEQ ID NO: 90907 - DNA, 120 bp, synthetic construct
  source 1..120: mol_type = other DNA
atcctcctgccttggcctccccaagtgctaggattacaggcatgagtcaccacaaggttacttctgatgggaggcttgggcagatggcacagaaaggataggtctgtatgaacaaggttt

SEQ ID NO: 90908 - DNA, 120 bp, synthetic construct
  source 1..120: mol_type = other DNA
ctatatatatatatttttgagactgagtcttgctgtgttacccaggctggagtgctgtggagctatctccactcacggcaagctccgcctcccgggttcacgccattctcctgcctcagc

SEQ ID NO: 90909 - DNA, 120 bp, synthetic construct
  source 1..120: mol_type = other DNA
aaagtgctgggattacaggcatcagccactgtgccaagccccaaagtactctttaaaacatgcgtctcagcccaggtgtggtggctcatgcctgtaatcccaccactttgggaggttgcg

SEQ ID NO: 90910 - DNA, 120 bp, synthetic construct
  source 1..120: mol_type = other DNA
tttggcttccttgacctctcaaagtatgtccccacagtcactttcctatcacccagttttcttcacagagcttggcagtgtgaagtaaccttggttattcaactttttttttttccccca

SEQ ID NO: 90911 - DNA, 120 bp, synthetic construct
  source 1..120: mol_type = other DNA
tcacgccactctccgcccggagcttggccgcgtccccctgtcgcggaggccgcggtccgatctgagggcgtcgttaatgtgagagcccggttgggaggctccaaaccgggcgccttcggg

SEQ ID NO: 90912 - DNA, 120 bp, synthetic construct
  source 1..120: mol_type = other DNA
aacgtttcctttcttttgttccctaagggctagagaggacattaactttataaaactggagtggaagtgggcacaaaagaacagtcagaggacttcagacctctcctcatctcttaagct

SEQ ID NO: 90913 - DNA, 120 bp, synthetic construct
  source 1..120: mol_type = other DNA
tttaatccttcctgtgaagtagacattgtgatttccattttgtcgatgagaaaagattctttggcttgcccagggttacctagctagggagagtgagttgtgatcgaattcggttctttc

SEQ ID NO: 90914 - DNA, 120 bp, synthetic construct
  source 1..120: mol_type = other DNA
gttgataaacagtcttttcagtacatagggtggtaataaagtgattttcgttggtgaaaagttggggcttagtgcatggaacagtgccttaggcatagcaatctagcaaatgttgaatga

SEQ ID NO: 90915 - DNA, 120 bp, synthetic construct
  source 1..120: mol_type = other DNA
aagtgctgggattacaggtgtgagccactgcgcccagcctaatgctatttaaaaatgttcactcagaacttcatattgttatattttctcccagttcatagtcatagtaggaggaacctc

SEQ ID NO: 90916 - DNA, 120 bp, synthetic construct
  source 1..120: mol_type = other DNA
attacgtttaagatatttctatattctttgctacagcagtaaatgtgagagccacatttctttgcagcttcacactgcacacacactgcacacactgtgcacattagagagccacagaga

SEQ ID NO: 90917 - DNA, 120 bp, synthetic construct
  source 1..120: mol_type = other DNA
ttcctctgcccttgaggagctcaacaaaggagaaaaatggcacgtacctggaacaaagaaatcctgggctggccactgtgtgctagatgtctgccacctgaataatggcttgcaggagag

SEQ ID NO: 90918 - DNA, 120 bp, synthetic construct
  source 1..120: mol_type = other DNA
cctggacataccctcatcactgagagcccattctcttacctgtggtactctcttattctgtaggttggagaaagagttactgagacagctgtgtgaatgtttgtttaaaaatgttggctg

SEQ ID NO: 90919 - DNA, 120 bp, synthetic construct
  source 1..120: mol_type = other DNA
aggttgcagtgagctgagatggtgccactgcgctccagcctgggtgatagagcgagactctcgaaagaaaaaagagaaaagtttacttttcccaacaaagttgaatagcttttttttttt

SEQ ID NO: 90920 - DNA, 120 bp, synthetic construct
  source 1..120: mol_type = other DNA
ctgcaagctccacctcccaggttcacgccattcttctgcctcagcctcccgagtagccaggactacaagtgcccgccaccatgcccagctaatttttttgtatttttagtagagacgggg

SEQ ID NO: 90921 - DNA, 120 bp, synthetic construct
  source 1..120: mol_type = other DNA
ttagccaggatggtctcgatctcctgacttcatgatccacccaccttggcctcccgaagtgctggtattacaggcgtgagccaccgtgcctggcctgatttttgcattttttagtagaga

SEQ ID NO: 90922 - DNA, 120 bp, synthetic construct
  source 1..120: mol_type = other DNA
gggaggctgaggcaggagaatggtgtgaacccgggagtcggagcttgtagtgagccgggattgcgccactgcactccagcctgggtgacagagcaagactctgtctcgaaagaaaaaaaa

SEQ ID NO: 90923 - DNA, 120 bp, synthetic construct
  source 1..120: mol_type = other DNA
gctgacctatggaagggatgatgtcttggcatgggtcctgcccccttagctaaatgttagttgaaatgagagaattgcattagaaggccatgaggcttatgtttagattttcagtatatt

SEQ ID NO: 90924 - DNA, 120 bp, synthetic construct
  source 1..120: mol_type = other DNA
aggactatgaattgtaaacagtgcagaatggccttataattgaccacttcctctcaagccatggctacccctttcccagcatctctttgttttctgttcttgttggaattactcttttct

SEQ ID NO: 90925 - DNA, 120 bp, synthetic construct
  source 1..120: mol_type = other DNA
ttgttatccttattatttgtagagatgggatcttgctatgttgcctaggctggtcttgaactcctggcctcaagcgatcctcctaccttgacttcccaaaatgctgggattataggtgtg

SEQ ID NO: 90926 - DNA, 120 bp, synthetic construct
  source 1..120: mol_type = other DNA
agggattttttccatgtgcttagctcagtgggaggttttagtccttttaggagcttgtttctagctgtagaaatgacactgcattcatcaaggctccagttttttccttgccaagaaact

SEQ ID NO: 90927 - DNA, 120 bp, synthetic construct
  source 1..120: mol_type = other DNA
ttggtaaacactgcagctaaactggtttcctttctgcttccctaacgcccccactgatttctgccctccatgtctctgcatacacatttcccacacatggacacctgttctctagcagtt

SEQ ID NO: 90928 - DNA, 120 bp, synthetic construct
  source 1..120: mol_type = other DNA
ctcctgcctcagcctcctgagtagctgggattacaggcgtgtgccaccatgctgggctaattttgtatttttagtagagacggggtttctccatgttggtcaggctggtctcgaactccc

SEQ ID NO: 90929 - DNA, 120 bp, synthetic construct
  source 1..120: mol_type = other DNA
tgtggaattactggcataagccacttcgtccaaccagcaggtgaactttttaacgtttgaagacagatgtatgtcatcttcacatttctttaggccataggttcctggaccttttgattg

SEQ ID NO: 90930 - DNA, 120 bp, synthetic construct
  source 1..120: mol_type = other DNA
gtaggattctgcacactgctcatttgggttgcaccaagagctttagttggaattactgggttgcaccaaagagttttagctggaaatattggatgggaggattcctacatattttgttgg

SEQ ID NO: 90931 - DNA, 120 bp, synthetic construct
  source 1..120: mol_type = other DNA
gttgaagcgttggaattacaggtgtgagccactgtgcccggccttttttttttttttttttttttaagataggttctcgctctgtcgcccaggctggagttggagtacaatggtgtgatc

SEQ ID NO: 90932 - DNA, 120 bp, synthetic construct
  source 1..120: mol_type = other DNA
tagtgcttgcaaagctgttaagtaaccatccctctctgccatgcttcacactttgccctggagtgggcatcaagctctctggggttgagtttggggcatgggtgttttccattttcagga

SEQ ID NO: 90933 - DNA, 120 bp, synthetic construct
  source 1..120: mol_type = other DNA
gggaccacaggcatgtaccaccatgcctggctacttttttttattttttatttttatttatttatttttgagacagagtcttgctctgtcactcaggctggagtgcagtggcgcaatctt

SEQ ID NO: 90934 - DNA, 120 bp, synthetic construct
  source 1..120: mol_type = other DNA
cgtatctggatgccagcaacaccctgttgagaaactttctactatggtatgctcatcattctctgaagatgtcagggcctgtttgtttgtttgcctgtttctctcacttttgccttataa

SEQ ID NO: 90935 - DNA, 120 bp, synthetic construct
  source 1..120: mol_type = other DNA
ccaccttggcttcccaaagtgttgggattacaggcgtgagccaacgcactcagccatcacccatactttatactgttggagtgtggatttctgaaaccataaagtatatttacagatgat

SEQ ID NO: 90936 - DNA, 120 bp, synthetic construct
  source 1..120: mol_type = other DNA
aaccagtaacctgggctccggttcccccttccttgccaattgtttccttccctgcctgtgtagcctcagggtgccttttaaactaccactgtgtgatggaagtatgaggtgcaaggatct

SEQ ID NO: 90937 - DNA, 120 bp, synthetic construct
  source 1..120: mol_type = other DNA
ataatcagtgcttaatgaatcttgattggaaggtatcaggtgtagagcacctcaggatagctcctgccacatgtctgccctatgcagggtgctgagggatttaaacagccatggtgacca

SEQ ID NO: 90938 - DNA, 120 bp, synthetic construct
  source 1..120: mol_type = other DNA
tagatattttgctttctctcttggttttgcattcatgtctctaaccctttggatacctgtatttcgggctttattcctggtcccctccaacctgtgccttccatttgtctcaagtccctt

SEQ ID NO: 90939 - DNA, 120 bp, synthetic construct
  source 1..120: mol_type = other DNA
ctcctgtagatgctttcttcttgatgctggttataaggtgagcatggagcatgctccctcctgtagatgctttcttcttgatgctggttataaggtcatgcttttttttttttaagtccc

SEQ ID NO: 90940 - DNA, 120 bp, synthetic construct
  source 1..120: mol_type = other DNA
tgggtttgtatgaggaatgtttcaatgaagtcttcttccttctccagagcagttaaggcattgttgacatctgacatccccagggtccacacttgtaccccaacctgggctttaggtctt

SEQ ID NO: 90941 - DNA, 120 bp, synthetic construct
  source 1..120: mol_type = other DNA
ttcatgcagtttttaataaaccatttcataacttcataataatgttttggttttttgaggcagggttttgtgctgtcacccaggctagggtgcagtggtgtgatcatggcccattgcagc

SEQ ID NO: 90942 - DNA, 120 bp, synthetic construct
  source 1..120: mol_type = other DNA
tacaggcttgagccaccgtgcctggcctgatgcactaaagttttaaattttttaatttaatttttatttttagagaaggggtcttgctctgtcatccaggctggagtgcagtggctcaat

SEQ ID NO: 90943 - DNA, 120 bp, synthetic construct
  source 1..120: mol_type = other DNA
cgcctgccttagcctcccaaagtgctgggattacaccactatgccctgcctcatttcttattttaataatatgagtcttttctctttttccttttatcagtctagctaaagttttttcaa

SEQ ID NO: 90944 - DNA, 120 bp, synthetic construct
  source 1..120: mol_type = other DNA
tgttggccaggctggtcttgaactcctggcctctttcacctttttgcagttacatttgtagttagacctctcaccttctttctgcaagcttatttgcacagcagttgctcctaaaatcca

SEQ ID NO: 90945 - DNA, 120 bp, synthetic construct
  source 1..120: mol_type = other DNA
gtttatgaacattatgaaatgaaagattggaaaaccagttctaaaatacttattcctggccgggcgcggtggctcatgccagtaatcccagcactttgggaggccgaggcaagtggatca

SEQ ID NO: 90946 - DNA, 120 bp, synthetic construct
  source 1..120: mol_type = other DNA
ggaggttgcagtgagctgagatcgcgtcattgcactccagcctcggtgacagagcgagactctttcaaagaaaaatcaatcaatcaatcaatcatacttaaaggcaatttacaaagttaa

SEQ ID NO: 90947 - DNA, 120 bp, synthetic construct
  source 1..120: mol_type = other DNA
cagagactccatctcaaaaaaaaaaaaaaaaaagacaaaccagcctggggcactccgagcagggcaagccgcgtccccttgttctctcttaacaggggactggactgtgtagggataggc

SEQ ID NO: 90948 - DNA, 120 bp, synthetic construct
  source 1..120: mol_type = other DNA
aggggcggaatatgggctggagatggcacggaaaagcacctggcatctaagtacttgagaaactttggtcaaatttttttaaattggctttcccaggttgaaatgatcaactcttattta

SEQ ID NO: 90949 - DNA, 120 bp, synthetic construct
  source 1..120: mol_type = other DNA
gtaatcatagctcactgcagcctcaaactcctgggcttaagcaatcctcccacctcggccttccaaagtgctggagtttaagtttttgaactagtttagagtgtgtaaaattatcataag

SEQ ID NO: 90950 - DNA, 120 bp, synthetic construct
  source 1..120: mol_type = other DNA
cttcttttttttccttcctctttttggaagaaaaaagaggcaggatctcactgtcttgtccaggctggaaggcagtggcgtgatcatggctcactacagccttaacaactaacaacttaa

SEQ ID NO: 90951 - DNA, 120 bp, synthetic construct
  source 1..120: mol_type = other DNA
ggcatgtaggactttatagtccttatctctcatcataaactctgggtacaggctgttgctactcccattttacagatgtacaggaacattctcagactctttaagctaggaagaggcaaa

SEQ ID NO: 90952 - DNA, 120 bp, synthetic construct
  source 1..120: mol_type = other DNA
ttgctctatgctattccttccaagtccctgccatctagtctttagtcctctctgcctgggaggcctcttccactcctcagccttatgtcatcttatccatcctttaaggcccttgctcca

SEQ ID NO: 90953 - DNA, 120 bp, synthetic construct
  source 1..120: mol_type = other DNA
ataagaaaacaacaataaataacaccgtgcatctcttagaatgaccaaaatccagaacactgccaaatgctgctgaggacgtagagcaacaggaactctcgctctttcctggtgggaatg

SEQ ID NO: 90954 - DNA, 120 bp, synthetic construct
  source 1..120: mol_type = other DNA
cccaggctaatatatttaatttttttttttttttttttttgtagagatggggtcttgttatgtttcacaaactggtcttgaactcccggcctcaagtgatcctccctccctggcctccca

SEQ ID NO: 90955 - DNA, 120 bp, synthetic construct
  source 1..120: mol_type = other DNA
gcttgagcctgtgaagtcaaggttgcaatgagccaagatcacgccaccatccagtgggcaacagagcaagaccctgtcaaaaataaataagtaagtatgaagtgggggaaaaacaagtaa

SEQ ID NO: 90956 - DNA, 120 bp, synthetic construct
  source 1..120: mol_type = other DNA
tctattttttaaaaaagtatgaagagaccaggacatcaatctcaagccccttctcagtttagcagatagcttgctctagaaatacttttgggtggctgggttgtcctgaaggtggcaggg

SEQ ID NO: 90957 - DNA, 120 bp, synthetic construct
  source 1..120: mol_type = other DNA
gtgcacatgtctgtgtgtggctgtgtgaacataaacatgctcattcttctgggaagaatatttgagtcagtattgtggttgtcctcccttttgtcccctagaagtgactagtttgttatg

SEQ ID NO: 90958 - DNA, 120 bp, synthetic construct
  source 1..120: mol_type = other DNA
cttttcttttcttttttttttttttttttttttttttttgagacggagtcacccaggctggagtgcagtgatgccatcccagatcactgtaacctccgcctcccgggttcaagcaattct

SEQ ID NO: 90959 - DNA, 120 bp, synthetic construct
  source 1..120: mol_type = other DNA
taacccctatcaaaactttgtggcttaaagtaataccagtttattagtttttactctggaggttggctgggcttagctacatggttctacagctgactgttcattcctggggtcactcat

SEQ ID NO: 90960 - DNA, 120 bp, synthetic construct
  source 1..120: mol_type = other DNA
cctcctcaattcacaacctgtagctgactttagccacccacaagtacagaaaagtaagcataatggaagaaatagtaatatgaaaagatgctcatatgacccagcaattccactcttagc

SEQ ID NO: 90961 - DNA, 120 bp, synthetic construct
  source 1..120: mol_type = other DNA
gattccatttgtagttgagcctcattgttcatagagtctgcgtttgcgaatttgcctactcactaaagttttttgtagccccaaaatcaatactctcggcactcgtctatcacagatgtg

SEQ ID NO: 90962 - DNA, 120 bp, synthetic construct
  source 1..120: mol_type = other DNA
atctccaaaaaaaaaaaaaaaaattagccaggcgtggtgacaggcacctgtaatcccagctacttggggggcaaaaaaacaaaacaaaacaccccccccctttttttaaagcacattcca

SEQ ID NO: 90963 - DNA, 120 bp, synthetic construct
  source 1..120: mol_type = other DNA
agtttagctaaggagccagaaatgcacccaggggaacagcgaaagaatgaaatacttatcagaactactaagtaaatttaaaaatactcagacttgaggccgggcatggtggctcatgcc

SEQ ID NO: 90964 - DNA, 120 bp, synthetic construct
  source 1..120: mol_type = other DNA
tcacagctcactacagcctcaatattgtgggctcaagcaatcatcccacctcagcctcccaaggagctgggactacaggcatgtgccaccacaaccggctaattttattttttatttttt

SEQ ID NO: 90965 - DNA, 120 bp, synthetic construct
  source 1..120: mol_type = other DNA
aatgtgtgctgttgaatgattatgcctttgcatatgactcagccagcatcagcattttgttttatttatttacttttgagacagagtctcgctctgttgcccaagctagagtgcagtggc

SEQ ID NO: 90966 - DNA, 120 bp, synthetic construct
  source 1..120: mol_type = other DNA
tctagagggttcagaaactcctaagggtcttccagagttgggtcattgcgcattgacaagtgcagcgccatcacatacccttctctctagtgcccactcagtcaccttaaccgaaacttc

SEQ ID NO: 90967 - DNA, 120 bp, synthetic construct
  source 1..120: mol_type = other DNA
gtgccaccgcctggcgttcgcttgtggcagttactaactttctacagttttcttaatcaaaagtggtctaggtaacctgtaaagaaaggattaaaaatttaagatgttctagttctgctc

SEQ ID NO: 90968 - DNA, 120 bp, synthetic construct
  source 1..120: mol_type = other DNA
gtccttgcaggcaaagctacagccagaatgtccgtttgaaactcctagctcatctgtcaccgagcttcatccgaatgtgccacggagcttgctctccacttcctccgtgcagtggccctg

SEQ ID NO: 90969 - DNA, 120 bp, synthetic construct
  source 1..120: mol_type = other DNA
aagggcaccgggctggcgtttccacatctgtcttcattagcagaaaagtgatgatggattttatttcactcacactccagtttgtaataaaatgccaaattctgtcagctatccaaacaa

SEQ ID NO: 90970 - DNA, 120 bp, synthetic construct
  source 1..120: mol_type = other DNA
gcccatacggtggctcatgcctataatcccagcactttgggaagtcgaggaaggaggatcacttgcttgagcccgggagtttgagaccagcctgggcaacatggcaaaaccttgtctcta

SEQ ID NO: 90971 - DNA, 120 bp, synthetic construct; identical to SEQ ID NO: 18069
  source 1..120: mol_type = other DNA

SEQ ID NO: 90972 - DNA, 120 bp, synthetic construct; identical to SEQ ID NO: 18070
  source 1..120: mol_type = other DNA

SEQ ID NO: 90973 - DNA, 120 bp, synthetic construct; identical to SEQ ID NO: 18071
  source 1..120: mol_type = other DNA

SEQ ID NO: 90974 - DNA, 120 bp, synthetic construct; identical to SEQ ID NO: 18103
  source 1..120: mol_type = other DNA

SEQ ID NO: 90975 - DNA, 120 bp, synthetic construct; identical to SEQ ID NO: 18072
  source 1..120: mol_type = other DNA

SEQ ID NO: 90976 - DNA, 120 bp, synthetic construct; identical to SEQ ID NO: 18073
  source 1..120: mol_type = other DNA

SEQ ID NO: 90977 - DNA, 120 bp, synthetic construct
  source 1..120: mol_type = other DNA
ctctactaaaaatacagaaaaaaattagtcaggcatggtggtgggtgcctggagtcccagctactcgggaggctgaggcaggagaatggcgtgaacctgggaggcagagcttgcagtgag

SEQ ID NO: 90978 - DNA, 120 bp, synthetic construct; identical to SEQ ID NO: 18074
  source 1..120: mol_type = other DNA

SEQ ID NO: 90979 - DNA, 120 bp, synthetic construct; identical to SEQ ID NO: 18075
  source 1..120: mol_type = other DNA

SEQ ID NO: 90980 - DNA, 120 bp, synthetic construct
  source 1..120: mol_type = other DNA
ggcgtggtggtgggtgcctgtaatcccatctacttgggaagctgaggcaggagaattgctttatttattttttcagatggaattttgttcttgttgcccaggctggagtgcaatggtgcg

SEQ ID NO: 90981 - DNA, 120 bp, synthetic construct; identical to SEQ ID NO: 18076
  source 1..120: mol_type = other DNA

SEQ ID NO: 90982 - DNA, 120 bp, synthetic construct; identical to SEQ ID NO: 18077
  source 1..120: mol_type = other DNA

SEQ ID NO: 90983 - DNA, 120 bp, synthetic construct; identical to SEQ ID NO: 18078
  source 1..120: mol_type = other DNA

SEQ ID NO: 90984 - DNA, 120 bp, synthetic construct; identical to SEQ ID NO: 18079
  source 1..120: mol_type = other DNA

SEQ ID NO: 90985 - DNA, 120 bp, synthetic construct; identical to SEQ ID NO: 18080
  source 1..120: mol_type = other DNA

SEQ ID NO: 90986 - DNA, 120 bp, synthetic construct; identical to SEQ ID NO: 18081
  source 1..120: mol_type = other DNA

SEQ ID NO: 90987 - DNA, 120 bp, synthetic construct; identical to SEQ ID NO: 18082
  source 1..120: mol_type = other DNA

SEQ ID NO: 90988 - DNA, 120 bp, synthetic construct; identical to SEQ ID NO: 18083
  source 1..120: mol_type = other DNA

SEQ ID NO: 90989 - DNA, 120 bp, synthetic construct; identical to SEQ ID NO: 18084
  source 1..120: mol_type = other DNA

SEQ ID NO: 90990 - DNA, 120 bp, synthetic construct; identical to SEQ ID NO: 18085
  source 1..120: mol_type = other DNA

SEQ ID NO: 90991 - DNA, 120 bp, synthetic construct
  source 1..120: mol_type = other DNA
tgccttacagtcattatttttggtgtttagaaaaaaatagaaacagggtctcactttgttacccaggctggtctcaaactcctgggctcaagctttccttctgctttggcctcccaaagt

SEQ ID NO: 90992 - DNA, 120 bp, synthetic construct; identical to SEQ ID NO: 18086
  source 1..120: mol_type = other DNA

SEQ ID NO: 90993 - DNA, 120 bp, synthetic construct; identical to SEQ ID NO: 18104
  source 1..120: mol_type = other DNA

SEQ ID NO: 90994 - DNA, 120 bp, synthetic construct
  source 1..120: mol_type = other DNA
cacttgagcccgggagatcggtgctgcagtgagccatgattgttccactgcactccagcctgggaaacagagtgaaaacctgtcttgaaaaatgaacagtaagaaaacaaaatgtttgtg

SEQ ID NO: 90995 - DNA, 120 bp, synthetic construct
  source 1..120: mol_type = other DNA
atgccatttcattgccttttgtcctccagtgttgtgtgtggttgctttgtttttagacagggtcttgctctgttacccaggctggagtgcagtggtgcaaccactcacaacgttgcagcc

SEQ ID NO: 90996 - DNA, 120 bp, synthetic construct
  source 1..120: mol_type = other DNA
gagcaaccatgtccagcacctgcattgtttttgaagagaaattagctattaatcttattgaggatcccttgtatgtgatgagttgcttttctcttgctgctttcaagatattctgtcttt

SEQ ID NO: 90997 - DNA, 120 bp, synthetic construct; identical to SEQ ID NO: 18087
  source 1..120: mol_type = other DNA

SEQ ID NO: 90998 - DNA, 120 bp, synthetic construct; identical to SEQ ID NO: 90245
  source 1..120: mol_type = other DNA

SEQ ID NO: 90999 - DNA, 120 bp, synthetic construct
  source 1..120: mol_type = other DNA
actttgggaggccaaggcaggcggatcacttgagatcaggagttcaagaccagcctggcaaacatggtgaaactcccatctctactaaaaacacaaaaaatagccaggcgtggtggtgcg

SEQ ID NO: 91000 - DNA, 120 bp, synthetic construct; identical to SEQ ID NO: 90247
  source 1..120: mol_type = other DNA

SEQ ID NO: 91001 - DNA, 120 bp, synthetic construct; identical to SEQ ID NO: 918
  source 1..120: mol_type = other DNA

SEQ ID NO: 91002 - DNA, 120 bp, synthetic construct; identical to SEQ ID NO: 90249
  source 1..120: mol_type = other DNA

SEQ ID NO: 91003 - DNA, 120 bp, synthetic construct; identical to SEQ ID NO: 919
  source 1..120: mol_type = other DNA

SEQ ID NO: 91004 - DNA, 120 bp, synthetic construct; identical to SEQ ID NO: 920
  source 1..120: mol_type = other DNA

SEQ ID NO: 91005 - DNA, 120 bp, synthetic construct; identical to SEQ ID NO: 90252
  source 1..120: mol_type = other DNA

SEQ ID NO: 91006 - DNA, 120 bp, synthetic construct; identical to SEQ ID NO: 18088
  source 1..120: mol_type = other DNA

SEQ ID NO: 91007 - DNA, 120 bp, synthetic construct; identical to SEQ ID NO: 18089
  source 1..120: mol_type = other DNA

SEQ ID NO: 91008 - DNA, 120 bp, synthetic construct; identical to SEQ ID NO: 18090
  source 1..120: mol_type = other DNA

SEQ ID NO: 91009 - DNA, 120 bp, synthetic construct; identical to SEQ ID NO: 18091
  source 1..120: mol_type = other DNA

SEQ ID NO: 91010 - DNA, 120 bp, synthetic construct; identical to SEQ ID NO: 90257
  source 1..120: mol_type = other DNA

SEQ ID NO: 91011 - DNA, 120 bp, synthetic construct; identical to SEQ ID NO: 90258
  source 1..120: mol_type = other DNA

SEQ ID NO: 91012 - DNA, 120 bp, synthetic construct; identical to SEQ ID NO: 18092
  source 1..120: mol_type = other DNA

SEQ ID NO: 91013 - DNA, 120 bp, synthetic construct; identical to SEQ ID NO: 921
  source 1..120: mol_type = other DNA

SEQ ID NO: 91014 - DNA, 120 bp, synthetic construct; identical to SEQ ID NO: 922
  source 1..120: mol_type = other DNA

SEQ ID NO: 91015 - DNA, 120 bp, synthetic construct
  source 1..120: mol_type = other DNA
taatcacagcactttgggatcacttgaggttaggagctcgtgaccagcctgaccaacatggtgaaaccccatctctactaaaaatactaaattagctgggtgtggtggcgcaggcgtgta

SEQ ID NO: 91016 - DNA, 120 bp, synthetic construct
  source 1..120: mol_type = other DNA
ggattcattgctgtggccagggaaagcagaggacatgcaaaattaatatttccctttctatcttctaggatggactttcctcatttggacagccgctctggtttaaagatatgtacaaac

SEQ ID NO: 91017 - DNA, 120 bp, synthetic construct; identical to SEQ ID NO: 18093
  source 1..120: mol_type = other DNA

SEQ ID NO: 91018 - DNA, 120 bp, synthetic construct; identical to SEQ ID NO: 18094
  source 1..120: mol_type = other DNA

SEQ ID NO: 91019 - DNA, 120 bp, synthetic construct; identical to SEQ ID NO: 90266
  source 1..120: mol_type = other DNA

SEQ ID NO: 91020 - DNA, 120 bp, synthetic construct; identical to SEQ ID NO: 18095
  source 1..120: mol_type = other DNA

SEQ ID NO: 91021 - DNA, 120 bp, synthetic construct; identical to SEQ ID NO: 923
  source 1..120: mol_type = other DNA

SEQ ID NO: 91022 - DNA, 120 bp, synthetic construct; identical to SEQ ID NO: 924
  source 1..120: mol_type = other DNA

SEQ ID NO: 91023 - DNA, 120 bp, synthetic construct; identical to SEQ ID NO: 925
  source 1..120: mol_type = other DNA

SEQ ID NO: 91024 - DNA, 120 bp, synthetic construct; identical to SEQ ID NO: 90271
  source 1..120: mol_type = other DNA

SEQ ID NO: 91025 - DNA, 120 bp, synthetic construct; identical to SEQ ID NO: 926
  source 1..120: mol_type = other DNA

SEQ ID NO: 91026 - DNA, 120 bp, synthetic construct; identical to SEQ ID NO: 927
  source 1..120: mol_type = other DNA

SEQ ID NO: 91027 - DNA, 120 bp, synthetic construct; identical to SEQ ID NO: 928
  source 1..120: mol_type = other DNA

SEQ ID NO: 91028 - DNA, 120 bp, synthetic construct; identical to SEQ ID NO: 929
  source 1..120: mol_type = other DNA

SEQ ID NO: 91029 - DNA, 120 bp, synthetic construct; identical to SEQ ID NO: 930
  source 1..120: mol_type = other DNA

SEQ ID NO: 91030 - DNA, 120 bp, synthetic construct; identical to SEQ ID NO: 90277
  source 1..120: mol_type = other DNA

SEQ ID NO: 91031 - DNA, 120 bp, synthetic construct; identical to SEQ ID NO: 18096
  source 1..120: mol_type = other DNA

SEQ ID NO: 91032 - DNA, 120 bp, synthetic construct; identical to SEQ ID NO: 18097
  source 1..120: mol_type = other DNA

SEQ ID NO: 91033 - DNA, 120 bp, synthetic construct; identical to SEQ ID NO: 931
  source 1..120: mol_type = other DNA

SEQ ID NO: 91034 - DNA, 120 bp, synthetic construct; identical to SEQ ID NO: 932
  source 1..120: mol_type = other DNA

SEQ ID NO: 91035 - DNA, 120 bp, synthetic construct; identical to SEQ ID NO: 933
  source 1..120: mol_type = other DNA

SEQ ID NO: 91036 - DNA, 120 bp, synthetic construct; identical to SEQ ID NO: 18098
  source 1..120: mol_type = other DNA

SEQ ID NO: 91037 - DNA, 120 bp, synthetic construct; identical to SEQ ID NO: 90284
  source 1..120: mol_type = other DNA

SEQ ID NO: 91038 - DNA, 120 bp, synthetic construct; identical to SEQ ID NO: 90285
  source 1..120: mol_type = other DNA

SEQ ID NO: 91039 - DNA, 120 bp, synthetic construct; identical to SEQ ID NO: 18099
  source 1..120: mol_type = other DNA

SEQ ID NO: 91040 - DNA, 120 bp, synthetic construct; identical to SEQ ID NO: 18100
  source 1..120: mol_type = other DNA

SEQ ID NO: 91041 - DNA, 120 bp, synthetic construct; identical to SEQ ID NO: 90288
  source 1..120: mol_type = other DNA

SEQ ID NO: 91042 - DNA, 120 bp, synthetic construct; identical to SEQ ID NO: 934
  source 1..120: mol_type = other DNA

SEQ ID NO: 91043 - DNA, 120 bp, synthetic construct; identical to SEQ ID NO: 90290
  source 1..120: mol_type = other DNA

SEQ ID NO: 91044 - DNA, 120 bp, synthetic construct; identical to SEQ ID NO: 90291
  source 1..120: mol_type = other DNA

SEQ ID NO: 91045 - DNA, 120 bp, synthetic construct; identical to SEQ ID NO: 2408
  source 1..120: mol_type = other DNA

SEQ ID NO: 91046 - DNA, 120 bp, synthetic construct; identical to SEQ ID NO: 29883
  source 1..120: mol_type = other DNA

SEQ ID NO: 91047 - DNA, 120 bp, synthetic construct; identical to SEQ ID NO: 29884
  source 1..120: mol_type = other DNA

SEQ ID NO: 91048 - DNA, 120 bp, synthetic construct; identical to SEQ ID NO: 29885
  source 1..120: mol_type = other DNA

SEQ ID NO: 91049 - DNA, 120 bp, synthetic construct; identical to SEQ ID NO: 28727
  source 1..120: mol_type = other DNA

SEQ ID NO: 91050 - DNA, 120 bp, synthetic construct; identical to SEQ ID NO: 28728
  source 1..120: mol_type = other DNA

SEQ ID NO: 91051 - DNA, 120 bp, synthetic construct
  source 1..120: mol_type = other DNA
tagtcttccatggtgtatatgtgccacattttcttaatccagtctgtcattgttggacatttgggttggttccaagtctttactattgtgtatagtgccacaataaacatacgtgtgcat

SEQ ID NO: 91052 - DNA, 120 bp, synthetic construct
  source 1..120: mol_type = other DNA
gccatgctgttttggttactgtagccttgtagtatagtttgaagtcaggtagcataatgcctccagctttgttcttttggcttaggattgacttggtgttgcgggctgttttttggttcc

SEQ ID NO: 91053 - DNA, 120 bp, synthetic construct
  source 1..120: mol_type = other DNA
cttttgcatcaatgttcatcaaggatattggtctaaaattctcttatttggttgtgtctctgcccggctttggtatcaggatgatgctggcctcataaaatgagttagggaggattccct

SEQ ID NO: 91054 - DNA, 120 bp, synthetic construct; identical to SEQ ID NO: 7193
  source 1..120: mol_type = other DNA

SEQ ID NO: 91055 - DNA, 120 bp, synthetic construct; identical to SEQ ID NO: 7194
  source 1..120: mol_type = other DNA

SEQ ID NO: 91056 - DNA, 120 bp, synthetic construct; identical to SEQ ID NO: 7195
  source 1..120: mol_type = other DNA

SEQ ID NO: 91057 - DNA, 120 bp, synthetic construct; identical to SEQ ID NO: 7196
  source 1..120: mol_type = other DNA

SEQ ID NO: 91058 - DNA, 120 bp, synthetic construct; identical to SEQ ID NO: 7197
  source 1..120: mol_type = other DNA

SEQ ID NO: 91059 - DNA, 120 bp, synthetic construct
  source 1..120: mol_type = other DNA
cgaggtgcgactcgctgagtctcaggctcaagctttaatctctgcgaagttgggcggctccacgggctcgcccccgcccccccccgccccccaatatataaaggcatatccatagttctg

SEQ ID NO: 91060 - DNA, 120 bp, synthetic construct
  source 1..120: mol_type = other DNA
atctgggcaggtggtttcacctctagatccctgctaagcttctctccctcctgcctggttaatatcaggcctgactcaggattgtttacactgacagccaaatgtacgaattaagaatcc

SEQ ID NO: 91061 - DNA, 120 bp, synthetic construct
  source 1..120: mol_type = other DNA
aaaagcagtggtggcgcgggcaaaaagccacggcggcgggggcacaaagacgcaaaaagccgcggcggcggggggggggggaggggtgggggaggggcgacaaaaagccgcgtccgcagg

SEQ ID NO: 91062 - DNA, 120 bp, synthetic construct; identical to SEQ ID NO: 160
  source 1..120: mol_type = other DNA

SEQ ID NO: 91063 - DNA, 120 bp, synthetic construct
  source 1..120: mol_type = other DNA
atacatttccaacttgtatccaatttataaaactatctctaggctgctgatttcaggaggaggctcatgaatattctctttgcagagaatatatcaggagttaacaacagcttcaatatt

SEQ ID NO: 91064 - DNA, 120 bp, synthetic construct
  source 1..120: mol_type = other DNA
tggcaagctagtgaatcaccgttataatttaacaatcttcaagataaaattatctctgatatttagattttgcccaattattaagatatttgggtgttccgttaagaatggaaaactcta

SEQ ID NO: 91065 - DNA, 120 bp, synthetic construct
  source 1..120: mol_type = other DNA
catggcctaacgacttctcaccactactaccactcatgctgacagcattctcacctaagtcactacctttttttgctggattagagtagcctcccaatttatttgctcacataacctatt

SEQ ID NO: 91066 - DNA, 120 bp, synthetic construct
  source 1..120: mol_type = other DNA
gaaaggaagaggaagaaaagtaaaaaggaggaggagggggaaggaagaaggaagaaaggtgaaaagaaagaatggtaaactttttaacaacataatttatccttctagaatatgaatgtt

SEQ ID NO: 91067 - DNA, 120 bp, synthetic construct
  source 1..120: mol_type = other DNA
ctccagcctgggtgacagagtaagactctgcctaaaaaaaaaaaagaaagattaaaaaataaataaatctgctgggcgtggtggctcacgcctgtaatcccagcactttgggaggccgag

SEQ ID NO: 91068 - DNA, 120 bp, synthetic construct
  source 1..120: mol_type = other DNA
gagggctttttggggtggtgaaatagacatttatggaaaatgggatacccacattaagcagggtgactacctgtttaccatacaacccacacaaagccaatacaactatagatgtgcttt

SEQ ID NO: 91069 - DNA, 120 bp, synthetic construct
  source 1..120: mol_type = other DNA
actgtcagcattcccagcttgtagcacagtgtctggcaatagtaaatcctcaaaaaatgatcaatgaataatttaataatgattaataaataaattaatgatgatggtgaagataaattt

SEQ ID NO: 91070 - DNA, 120 bp, synthetic construct
  source 1..120: mol_type = other DNA
aatatgtgttattatgaatatttgtatgtactctccaagaactaaaagatgaagttcccctttcaggatcccctgtgcctgagaaggaaactttccagtgaaagcctactagctagttaa

SEQ ID NO: 91071 - DNA, 120 bp, synthetic construct
  source 1..120: mol_type = other DNA
cagctaattaaaatgtgtgatgggcctagtactgcaaagccccaggttctgtttcatgaccttcaacaaactgatgaacttgtttgctcatttgcaaactaagtgacctatccctacttc

SEQ ID NO: 91072 - DNA, 120 bp, synthetic construct
  source 1..120: mol_type = other DNA
aaacacaatgctttggcacagtgaagatttcctgccaaaggtccaagtggccacctctctggcccctccctcatcccccttcatacaccagagtgaaagcaggagagaagtgggtcagga

SEQ ID NO: 91073 - DNA, 120 bp, synthetic construct; identical to SEQ ID NO: 79148
  source 1..120: mol_type = other DNA

SEQ ID NO: 91074 - DNA, 120 bp, synthetic construct
  source 1..120: mol_type = other DNA
gtaggttgaaatctagtggaaagagtctctgcctccctcctcaaagcccccataaagtttgtgtgtctcattggttttgattgggtaaagtgcttatgcctgggtccatgcaaagcacgt

SEQ ID NO: 91075 - DNA, 120 bp, synthetic construct
  source 1..120: mol_type = other DNA
catcgagaatgcagtagaaaacctggatgccaccagtgacaagcagcgcctcatggagatgtacaacaacgtcttctgcccccctatgaagtttgagtttcagccccacatgggggatat

SEQ ID NO: 91076 - DNA, 120 bp, synthetic construct; identical to SEQ ID NO: 79145
  source 1..120: mol_type = other DNA

SEQ ID NO: 91077 - DNA, 120 bp, synthetic construct; identical to SEQ ID NO: 79144
  source 1..120: mol_type = other DNA

SEQ ID NO: 91078 - DNA, 120 bp, synthetic construct; identical to SEQ ID NO: 79143
  source 1..120: mol_type = other DNA

SEQ ID NO: 91079 - DNA, 120 bp, synthetic construct
  source 1..120: mol_type = other DNA
tgtgaaacacccatttttcctttccaggccttgtggagtctctgggtgaagatatcagctgggaaagggttaatgagctatcaactcaagtcatcatacatctggatgggctgtcattaa

SEQ ID NO: 91080 - DNA, 120 bp, synthetic construct
  source 1..120: mol_type = other DNA
acacttaagtttagttactgtatgtaaattatacttcaaaaccatattgaaaggtacaaaaagaaaaaccgatcttagcttagatgatcatcttcctcctctttctattcctttcttcct

SEQ ID NO: 91081 - DNA, 120 bp, synthetic construct; identical to SEQ ID NO: 79140
  source 1..120: mol_type = other DNA

SEQ ID NO: 91082 - DNA, 120 bp, synthetic construct; identical to SEQ ID NO: 79139
  source 1..120: mol_type = other DNA

SEQ ID NO: 91083 - DNA, 120 bp, synthetic construct
  source 1..120: mol_type = other DNA
atctgccaggaaatactttcttcctttttttttttttttttttttttgagatagagtcttgctttgtcccccaggctggagtgcagtggtgcaatcttggctcactgcaacctccatctc

SEQ ID NO: 91084 - DNA, 120 bp, synthetic construct
  source 1..120: mol_type = other DNA
actgggaagagcagacgaggaagctctgggttcttttagtgcctaatgactgaaaatgaggccttgctctgtgccctggcaggaatactaggtattggaagaactgggcacgtgggatcc

SEQ ID NO: 91085 - DNA, 120 bp, synthetic construct
  source 1..120: mol_type = other DNA
atgtgttgtgtggtacttggcataaagccaggaatatactaagtgctcagtaaatgataactggcattgcagttgctgtgagagggtgtttgatctggataaagcagaacagacagatcc

SEQ ID NO: 91086 - DNA, 120 bp, synthetic construct
  source 1..120: mol_type = other DNA
ttctttcgtctgcctctagctgatcgtagggcctagattagtatacccacaaagtctttctaagctagattttctcaacgtcagcaccattgacatttgggccagataattaattgttgt

SEQ ID NO: 91087 - DNA, 120 bp, synthetic construct
  source 1..120: mol_type = other DNA
ttctttgcagaactgagaatttagacttttcagtttttccccatagtttgcatttgcctatctatatatagatagaagtatgtatatgtatatctttatgtatacatatctatatataca

SEQ ID NO: 91088 - DNA, 120 bp, synthetic construct
  source 1..120: mol_type = other DNA
ttcttagctgcctattcacattttaaagtgaggcactaaaagattctatgtcagctgtggccttcacagtagggtgttctaactgggctgtgtccttgtggaagccccaactttagtatt

SEQ ID NO: 91089 - DNA, 120 bp, synthetic construct
  source 1..120: mol_type = other DNA
ccataatgagctggcttgtatgtaagccatggcataagtggttttcattttctgactgatgcaccgggaatgcctttgaagtcagaacacactgcttcccaaagaactctgggattcttt

SEQ ID NO: 91090 - DNA, 120 bp, synthetic construct
  source 1..120: mol_type = other DNA
ccagaagaaataattctattctctgaactgctattttttttttttttttgagaccgagtcttgctctgtcccccaggctggagtgcagtggcacgatcttggctcactgcaagctctgcc

SEQ ID NO: 91091 - DNA, 120 bp, synthetic construct; identical to SEQ ID NO: 9268
  source 1..120: mol_type = other DNA

SEQ ID NO: 91092 - DNA, 120 bp, synthetic construct
  source 1..120: mol_type = other DNA
tcagcaacatctgatcccaaatgcctgtcatgcatgtcaccactgcctgttctgtgaattaaaaaaaaaaaacaaaggaagaaaagaaaagaaaaaatgcagcaaataagcaagtaaaca

SEQ ID NO: 91093 - DNA, 120 bp, synthetic construct; identical to SEQ ID NO: 8235
  source 1..120: mol_type = other DNA

SEQ ID NO: 91094 - DNA, 120 bp, synthetic construct
  source 1..120: mol_type = other DNA
attgtcacaccttctatactaagtgttctatgccaaacctaagagagctaaaactgattggcagcatgggtcattgagagggaaagcccttgttttatcttttgccagctccttctagat

SEQ ID NO: 91095 - DNA, 120 bp, synthetic construct
  source 1..120: mol_type = other DNA
gagttacctctttggtaatgcaggagccaggaatagaaagagaatcttgtgattgctaatttagggctccttccacccctttccccactatcagatgtaaaaattcatgcttactcatga

SEQ ID NO: 91096 - DNA, 120 bp, synthetic construct; identical to SEQ ID NO: 8234
  source 1..120: mol_type = other DNA

SEQ ID NO: 91097 - DNA, 120 bp, synthetic construct
  source 1..120: mol_type = other DNA
tcccggatgcctaggatccttatgtttccgtacatatctgctgttacatcctttctgtgagcaaggaggctttggaacattacagtcttgtcttggggagatgagatgacacagtgcatt

SEQ ID NO: 91098 - DNA, 120 bp, synthetic construct; identical to SEQ ID NO: 161
  source 1..120: mol_type = other DNA

SEQ ID NO: 91099 - DNA, 120 bp, synthetic construct; identical to SEQ ID NO: 8231
  source 1..120: mol_type = other DNA

SEQ ID NO: 91100 - DNA, 120 bp, synthetic construct
  source 1..120: mol_type = other DNA
agtttctgacattttcttttaaaatataacttgtcactaggatagtttatatccattaactcctgagtgaaggagcttctggtgaaattgttttttatggtgcttacaagctcaaggggt

SEQ ID NO: 91101 - DNA, 120 bp, synthetic construct
  source 1..120: mol_type = other DNA
gtgggcccgaagggaagaacgttctctgtttttccttatgcctgctgttgcataatctttttcttccccagtttcagtaagaactaaatgactctgtaagaaataattcagctttcctga

SEQ ID NO: 91102 - DNA, 120 bp, synthetic construct
  source 1..120: mol_type = other DNA
caaatctctcagcagctgtaaaatgaactaaggaggaaaaacaatcaatggcttggaactgggagagaatcgggggaaagagccagaatgataaggtacttgaaaacatatgcccttcta

SEQ ID NO: 91103 - DNA, 120 bp, synthetic construct
  source 1..120: mol_type = other DNA
ctacaggtgcccgccactacgcccggctaactttttttttgtatttttagtagagacggggtttcaccttggtctcgatctcctgacctcgtgatccgcccgcctcggcctcccaaagtg

SEQ ID NO: 91104 - DNA, 120 bp, synthetic construct
  source 1..120: mol_type = other DNA
aaggacagaaagaaagaagtgggggggcagagagagagagaaagagagagagagagaaagaaaagaaagaaagaaagaaagaaagaaagaaagaaagaaagaaagaaagaaagaaagaaa

SEQ ID NO: 91105 - DNA, 120 bp, synthetic construct
  source 1..120: mol_type = other DNA
ccttggacttccaaagtgctgtggttacaggcatgagccaccacaccaggccaaccctgtggggttttaaatatgtataaaattaatataaatggcaacaatgaaatcaacaatagaatc

SEQ ID NO: 91106 - DNA, 120 bp, synthetic construct; identical to SEQ ID NO: 146
  source 1..120: mol_type = other DNA

SEQ ID NO: 91107 - DNA, 120 bp, synthetic construct
  source 1..120: mol_type = other DNA
atcctggctaacatggtgaaaccctgcctctactaaaaatacaaaaaaattggccaggcgtgatggcaggcacctgtggtcccagctactggggaagctgaggcaggagaatggcgtgaa

SEQ ID NO: 91108 - DNA, 120 bp, synthetic construct; identical to SEQ ID NO: 162
  source 1..120: mol_type = other DNA

SEQ ID NO: 91109 - DNA, 120 bp, synthetic construct
  source 1..120: mol_type = other DNA
ctcagaccccagatggccccatatagagcttttatacgtgccaatttttagaatttcttgtagagttcctccatttggtggtcaccagaggatctctgagattagtatctggattcttaa

SEQ ID NO: 91110 - DNA, 120 bp, synthetic construct
  source 1..120: mol_type = other DNA
accttttctgcagtatatatctgatgaatttaaaaactgatacatcaagaatattcttttgtatatgtctttcttgctgtgaaaatttatggcctttcttccccctatcttcgctctgta

SEQ ID NO: 91111 - DNA, 120 bp, synthetic construct
  source 1..120: mol_type = other DNA
atgtctacatacttgcctaagaaaatatttctcaactcctccagaatatttagggttaactaaaaattataaaaacataccacagagctagtccactctttatgcctagggtttacccaa

SEQ ID NO: 91112 - DNA, 120 bp, synthetic construct
  source 1..120: mol_type = other DNA
tttttcatgactgggagtttaatttggtttataacattacttaaagataactttgaaattggtctaagaacttagggttgttcctgaccccaggtcaatggcctacttgacctaggcgag

SEQ ID NO: 91113 - DNA, 120 bp, synthetic construct
  source 1..120: mol_type = other DNA
tgccttagatcagggccccgctcttgaatgaactactgtagtaactttttccctgttctcacatctctctcacatccaaacatttcagagtaatctttctaaaaggcaaatctgtccatg

SEQ ID NO: 91114 - DNA, 120 bp, synthetic construct
  source 1..120: mol_type = other DNA
ggtgaggtttgccttatgatgtcctttgtatcttaggaagaatgggagtgtaggagaggggagcataggggatttctgggagataaaaccatttatgcagaaagcaaggaagtataatag

SEQ ID NO: 91115 - DNA, 120 bp, synthetic construct
  source 1..120: mol_type = other DNA
gagcacatgatttctgacacactggatgggcttcctccccaggttagatgtaaggaagtgatctgagcttgttgcctctggcctgataccacatagctcggggctatgcagtgtctgcct

SEQ ID NO: 91116 - DNA, 120 bp, synthetic construct
  source 1..120: mol_type = other DNA
agggcaagagctagaagaagacttgaaaattaaccacacaaaagaccagttgaggtcatgaaagggtattcagagtaaagggtagttgaggcctagaaagaagactttgaagagctagca

SEQ ID NO: 91117 - DNA, 120 bp, synthetic construct
  source 1..120: mol_type = other DNA
tgtaaatatctgctgaatgactaagtgaactgctgaatgactaagttgaatgacctcctcccacctcatgtcaggccactcagtcctgtctataatgtctttcctctgccttctggtaaa

SEQ ID NO: 91118 - DNA, 120 bp, synthetic construct
  source 1..120: mol_type = other DNA
catgcagaagagcgtgtgtcttgtgccttcgcccagctagggtggtctttgcaatctctaagctaatctttttttagcggtatattatcatataggctagaaaggaaatacagagaacaa

SEQ ID NO: 91119 - DNA, 120 bp, synthetic construct
  source 1..120: mol_type = other DNA
aaaaatgagagttacattatatattaagcttagtgtaatttttttcatttaacatttggagaagcatttttatcatgtcattgcatcttcttttaaatgttgcctatatgatcatacagc

SEQ ID NO: 91120 - DNA, 120 bp, synthetic construct
  source 1..120: mol_type = other DNA
gatctcttcacatcatcatgctctgctgccttgcatgtaggaaggtggcagtcatattggtaagctaaagaaccagtgcttgtgcagggaattaatgactcatgcattctgcagtcatat

SEQ ID NO: 91121 - DNA, 120 bp, synthetic construct; identical to SEQ ID NO: 163
  source 1..120: mol_type = other DNA

SEQ ID NO: 91122 - DNA, 120 bp, synthetic construct
  source 1..120: mol_type = other DNA
gcctttctggggttttcatgggaagcccaagatgtttatcaagcccctctaacttggcaggctttgaatgccaaattctatcttccttacagtgggcagcacctaagacgaccaactatc

SEQ ID NO: 91123 - DNA, 120 bp, synthetic construct
  source 1..120: mol_type = other DNA
ccatttttttcaaatttttgttttctgtatgctttagtttagatgatttctaaagtttaccaatttggctgggcatggtggctcacacctgtaatcccagcactttgggaggccaaggtg

SEQ ID NO: 91124 - DNA, 120 bp, synthetic construct
  source 1..120: mol_type = other DNA
cccaagggagcttggggtttttggtttatttaggtctctcaaaactttctgtgggatgatgatgatgacaaagtaataatagtaacctttcgtaaaattcacactgtgaatacctcccac

SEQ ID NO: 91125 - DNA, 120 bp, synthetic construct; identical to SEQ ID NO: 8213
  source 1..120: mol_type = other DNA

SEQ ID NO: 91126 - DNA, 120 bp, synthetic construct; identical to SEQ ID NO: 8212
  source 1..120: mol_type = other DNA

SEQ ID NO: 91127 - DNA, 120 bp, synthetic construct; identical to SEQ ID NO: 90734
  source 1..120: mol_type = other DNA

SEQ ID NO: 91128 - DNA, 120 bp, synthetic construct
  source 1..120: mol_type = other DNA
tagaacatgcccctcatggagaccacagggagatgggagtcaaacttggcagtttttgcccatggtttttgaagccaccgcattaaacaaatgaaggtggcagcaataatatttgcccaa

SEQ ID NO: 91129 - DNA, 120 bp, synthetic construct
  source 1..120: mol_type = other DNA
aaacagagggctgagagcggtggctcacgcctgtaatcgcagcgctttgggaggccaaggtgggcagatcacctgaggtcaggagttcaagaccagcttggccaacatggtgaaaccccg

SEQ ID NO: 91130 - DNA, 120 bp, synthetic construct
  source 1..120: mol_type = other DNA
ggtcacttggaaaaggcatctcctctgatagcacaaagcaaatccccgggaagattcatgtaactacagaatggctgaggacattccttaggactcttatctgatactatatcttaacca

SEQ ID NO: 91131 - DNA, 120 bp, synthetic construct
  source 1..120: mol_type = other DNA
ttcctagccatgggctcagggttgacttccttaagccgtgtattactatgctagagcgtgaggaagaacttatttctcataggactgtttatatattacatttcactgaagaaaagtatg

SEQ ID NO: 91132 - DNA, 120 bp, synthetic construct
  source 1..120: mol_type = other DNA
agcctcttgaaaatccaggaagctcttttctaagctgtctcagcttgagctcaaagtggaatcatttattcatgaggttgggttacagacagcggtgaaggccccaaccattgtatatga

SEQ ID NO: 91133 - DNA, 120 bp, synthetic construct
  source 1..120: mol_type = other DNA
agaaaactagagaggtgagcttcaggaaaaatatctttatttctggattggctttgattgctgtgattttaggacacggactatagttgtagatgttgccctggctgcgtatcaacaatg

SEQ ID NO: 91134 - DNA, 120 bp, synthetic construct
  source 1..120: mol_type = other DNA
gcagtgagccaagattgtgccactgtactccagcctgggtgacagagtgagactttgtctcaaaaaaaaaaaaaaaaaaaaaaaagggaatgagcaccttggtttagcactttactgctc

SEQ ID NO: 91135 - DNA, 120 bp, synthetic construct
  source 1..120: mol_type = other DNA
ttttgatttccatagaaatctttcagtttccctaaaaaggtaagtgttgtcacagtgattggcacgcttaagagttagtgattttggctacagaagagtgatgcctggggcagggggtga

SEQ ID NO: 91136 - DNA, 120 bp, synthetic construct; identical to SEQ ID NO: 90725
  source 1..120: mol_type = other DNA

SEQ ID NO: 91137 - DNA, 120 bp, synthetic construct
  source 1..120: mol_type = other DNA
gttgagtcactatcatcacctagcagctattccccttcataaatattaattggataagccccaacatgtataataggcatcgcaacaactgatgatgagatggtatgatattaagcatgt

SEQ ID NO: 91138 - DNA, 120 bp, synthetic construct; identical to SEQ ID NO: 8207
  source 1..120: mol_type = other DNA

SEQ ID NO: 91139 - DNA, 120 bp, synthetic construct; identical to SEQ ID NO: 8206
  source 1..120: mol_type = other DNA

SEQ ID NO: 91140 - DNA, 120 bp, synthetic construct; identical to SEQ ID NO: 8205
  source 1..120: mol_type = other DNA

SEQ ID NO: 91141 - DNA, 120 bp, synthetic construct; identical to SEQ ID NO: 8204
  source 1..120: mol_type = other DNA

SEQ ID NO: 91142 - DNA, 120 bp, synthetic construct; identical to SEQ ID NO: 164
  source 1..120: mol_type = other DNA

SEQ ID NO: 91143 - DNA, 120 bp, synthetic construct; identical to SEQ ID NO: 90718
  source 1..120: mol_type = other DNA

SEQ ID NO: 91144 - DNA, 120 bp, synthetic construct
  source 1..120: mol_type = other DNA
aaatgaaggaaaaaatgttaagggcagccagagagaaaggtcgggttaccctcaaagggaagcccatcagactaacagcaaatctctcggcagaaaccctacaagccagaagagagtggg

SEQ ID NO: 91145 - DNA, 120 bp, synthetic construct
  source 1..120: mol_type = other DNA
ccacgtagttggaagtaaagctctcctcagcaaatgtaaaagaacagaaattataacaaactatctctcagaccacagtgcaatcaaactagaactcaggattaagaatctcactcaaag

SEQ ID NO: 91146 - DNA, 120 bp, synthetic construct
  source 1..120: mol_type = other DNA
accgaatccagcagcacatcaaaaagcttatccaccatgatcaagtgggcttcatccctgggatgcaaggctggttcaatatacgcaaatcaataaatgtaatccagcatataaacagag

SEQ ID NO: 91147 - DNA, 120 bp, synthetic construct
  source 1..120: mol_type = other DNA
tggaaccaaaaaagagcccgcatcgccaagtcaatcctaaggcaaaagaacaaagctggaggcatcacactacctgacttcaaactatactacaaggctacagtaaccaaaacagcatgg

SEQ ID NO: 91148 - DNA, 120 bp, synthetic construct
  source 1..120: mol_type = other DNA
aaatgactataaatcctgctgctataaagacacatgcacacgtatgtttattgcggcattattcacaatagcaaagacttggaaccaacccaaatgtccaacaatgatagactggattaa

SEQ ID NO: 91149 - DNA, 120 bp, synthetic construct
  source 1..120: mol_type = other DNA
catctctgcaaaaaaaagtatgggccgggtgcggtggttcacacctgtaatcccagcactttgggaggccaatgtggacagatcacctgaggtcaggagttggagaccagcctgaccaac

SEQ ID NO: 91150 - DNA, 120 bp, synthetic construct
  source 1..120: mol_type = other DNA
agatactagtggggatcatctgactccagactgggaatcttctcgttacaggatgaccccaatcacttaggtttacttctggatcttgataattccttgatagtcctcttttactgatgt

SEQ ID NO: 91151 - DNA, 120 bp, synthetic construct; identical to SEQ ID NO: 165
  source 1..120: mol_type = other DNA

SEQ ID NO: 91152 - DNA, 120 bp, synthetic construct; identical to SEQ ID NO: 79068
  source 1..120: mol_type = other DNA

SEQ ID NO: 91153 - DNA, 120 bp, synthetic construct
  source 1..120: mol_type = other DNA
atccctcaacctccagaccttcaatgtagttatattatttgtttgaaatataatttggtttatttatttgtttgtatttaatgttttcctctccggaatggggtcttgacatttctcact

SEQ ID NO: 91154 - DNA, 120 bp, synthetic construct; identical to SEQ ID NO: 166
  source 1..120: mol_type = other DNA

SEQ ID NO: 91155 - DNA, 120 bp, synthetic construct
  source 1..120: mol_type = other DNA
tgatatttctggcaatttctgataatttccttattattagattcaagtcacacacttttggcaggaataccataaaatgtaatgtcacgttcttctcagtgcatcatatcaggaagcact

SEQ ID NO: 91156 - DNA, 120 bp, synthetic construct
  source 1..120: mol_type = other DNA
agaagtccacttctggctgttttgtccatttgtacgaatttggtgaacaccaatcctggtatgtgaggttcacttaatctttcagcaaacatttattgaacatttattctgtgccaagag

SEQ ID NO: 91157 - DNA, 120 bp, synthetic construct
  source 1..120: mol_type = other DNA
attgttatgggctttgtcttggattttaacctgatactttctcagtgttggttttgctagatgttcattacttcattaaacagaggtgccgggtgcggtggctcacgcctgtaatcccag

SEQ ID NO: 91158 - DNA, 120 bp, synthetic construct
  source 1..120: mol_type = other DNA
aatttcatgcaaggatgccctgtcccgactgcttaagcaggaatcagcaaacacagctcagcatcctactgttgaagataatcctagtttgttcgattcattttctaatcctggctcttt

SEQ ID NO: 91159 - DNA, 120 bp, synthetic construct; identical to SEQ ID NO: 79061
  source 1..120: mol_type = other DNA

SEQ ID NO: 91160 - DNA, 120 bp, synthetic construct
  source 1..120: mol_type = other DNA
cttgcttaaggtcacaagctaggagtagaagagacaagattcagacccaagtttttctggctcaaagctctggtttttcccacacaaagtcacaaagcttcccaaagaacttttaactga

SEQ ID NO: 91161 - DNA, 120 bp, synthetic construct
  source 1..120: mol_type = other DNA
ctggagatagagaagaataagacaatctcctattttcactaatattaaattagcagaatatcaaggaggtagacatagaaagtaaactttcttgtttggctggttatcagttgtgtcact

SEQ ID NO: 91162 - DNA, 120 bp, synthetic construct
  source 1..120: mol_type = other DNA
tggtaggaatgaaaagaaggggaatttatccttctgtccatttagcaaatatatatcttcttaccatgtgccagacacatgccagatacccacccctgtactcctagagcttacagtcta

SEQ ID NO: 91163 - DNA, 120 bp, synthetic construct; identical to SEQ ID NO: 8195
  source 1..120: mol_type = other DNA

SEQ ID NO: 91164 - DNA, 120 bp, synthetic construct
  source 1..120: mol_type = other DNA
ttattctgtaagcatgggggaccattgatagtttttgagcaaggaacataattatggctgtgctttcgaagggtaactatggcaacgatgcatatgatcaattggagcagagagactgga

SEQ ID NO: 91165 - DNA, 120 bp, synthetic construct; identical to SEQ ID NO: 8194
  source 1..120: mol_type = other DNA

SEQ ID NO: 91166 - DNA, 120 bp, synthetic construct; identical to SEQ ID NO: 8193
  source 1..120: mol_type = other DNA

SEQ ID NO: 91167 - DNA, 120 bp, synthetic construct
  source 1..120: mol_type = other DNA
atgggcatttaacaaatcacacaattagatatgtaatttaaagttggggtaagtgttgtggaaggaaagtatttaatacaaggtggcacaagaacctggaagagggcaacttttccactt

SEQ ID NO: 91168 - DNA, 120 bp, synthetic construct
  source 1..120: mol_type = other DNA
ccggccagccctgctggccccgggcaatgggggacttagcacccgggccagtggctgcggagggtgtactgagtcccccagcagtgccggcccatcggcgctgtgctcgatttctcgctg

SEQ ID NO: 91169 - DNA, 120 bp, synthetic construct
  source 1..120: mol_type = other DNA
ctgctgattggtagagccgagtggcctgttttgtcagggtactgattggtgcatttacaatctctgagatagatacaaaggttctccacctccccatcagattagttagatacagagttt

SEQ ID NO: 91170 - DNA, 120 bp, synthetic construct; identical to SEQ ID NO: 167
  source 1..120: mol_type = other DNA

SEQ ID NO: 91171 - DNA, 120 bp, synthetic construct
  source 1..120: mol_type = other DNA
tctgcctgctccattgtgatcggagttaatcttcctggaacacactggcgatcagagaatttctttctgcaaaactttcaatgtctctccattgtctatgttctttttattatgattatt

SEQ ID NO: 91172 - DNA, 120 bp, synthetic construct; identical to SEQ ID NO: 9252
  source 1..120: mol_type = other DNA

SEQ ID NO: 91173 - DNA, 120 bp, synthetic construct
  source 1..120: mol_type = other DNA
atcccagcttcaccacttaaaagtttgacttcttcaagactctgttttctcatttttaaaatggggatgaggtagtacctgcctcataggatggttggggtgataattcatttgggccct

SEQ ID NO: 91174 - DNA, 120 bp, synthetic construct; identical to SEQ ID NO: 9250
  source 1..120: mol_type = other DNA

SEQ ID NO: 91175 - DNA, 120 bp, synthetic construct; identical to SEQ ID NO: 168
  source 1..120: mol_type = other DNA

SEQ ID NO: 91176 - DNA, 120 bp, synthetic construct
  source 1..120: mol_type = other DNA
gaagaacaggaggtggagaaggagaaggaaaaggaggagaaaaagaaagaagaaagagaatgaagaaggaaaaagaagaaaggaagcagaaagaagaagatgcctcccttgttaccatct

SEQ ID NO: 91177 - DNA, 120 bp, synthetic construct
  source 1..120: mol_type = other DNA
ttagatcttcaggttggggcttattaccacagctttgttataataaagaatatttaaagcagaaacaataagactttttgtgttctcttgtcctttctcttctttgtcaagccatgcctc

SEQ ID NO: 91178 - DNA, 120 bp, synthetic construct; identical to SEQ ID NO: 79041
  source 1..120: mol_type = other DNA

SEQ ID NO: 91179 - DNA, 120 bp, synthetic construct; identical to SEQ ID NO: 320
  source 1..120: mol_type = other DNA

SEQ ID NO: 91180 - DNA, 120 bp, synthetic construct; identical to SEQ ID NO: 169
  source 1..120: mol_type = other DNA

SEQ ID NO: 91181 - DNA, 120 bp, synthetic construct; identical to SEQ ID NO: 319
  source 1..120: mol_type = other DNA

SEQ ID NO: 91182 - DNA, 120 bp, synthetic construct
  source 1..120: mol_type = other DNA
attttcatgtgtgttccaatgattcatcacccagatcttcccacagagttggtgttagataaatatttgctgggtttgttggttgattatcgtggtccttgggaactgacttgcagcttg

SEQ ID NO: 91183 - DNA, 120 bp, synthetic construct
  source 1..120: mol_type = other DNA
gttaacttcctaactgccatctataatatttgctgatggctcccaagtgtctatttctagacttgacctctcctgagaacagaaggagaatacaactgccttttccagtaggatgctttg

SEQ ID NO: 91184 - DNA, 120 bp, synthetic construct
  source 1..120: mol_type = other DNA
aaataaatggttatctattctgaaggatctgctgggcagattctttcattggaataagttttgtcaaggacgggactgtctacccaacatccagaacagtacctgtcacaaggtaggtgt

SEQ ID NO: 91185 - DNA, 120 bp, synthetic construct; identical to SEQ ID NO: 170
  source 1..120: mol_type = other DNA

SEQ ID NO: 91186 - DNA, 120 bp, synthetic construct
  source 1..120: mol_type = other DNA
ttctttgctccaaaggtacagtgaatgatgacggttgctgggcctcaaaataaggaagacgaaactaagagaacaggccacaggactctccctgatgttgaatggcagcaccttagattg

SEQ ID NO: 91187 - DNA, 120 bp, synthetic construct
  source 1..120: mol_type = other DNA
ttctgtgttcatttcatgatatattatgggccttttctattcacagatttagttctctggatatttttttctgttttatttattgtcttcctctgcatttattgtgagtctcttaagcct

SEQ ID NO: 91188 - DNA, 120 bp, synthetic construct
  source 1..120: mol_type = other DNA
tcccctcctacctgcctgccctgtctcagcctctaacctaggtttatctttctacctgcaaaccagaacccaccccttcttgcttactcaagccctttcctcctaaaattatacactctt

SEQ ID NO: 91189 - DNA, 120 bp, synthetic construct
  source 1..120: mol_type = other DNA
aggaggcagcaagaccagttaggagctaccacagcaattcagaacaaaatgaggctgagttgcactgttcaaaaggtggaagggataggaagggttgaattctagactcattttgaaggt

SEQ ID NO: 91190 - DNA, 120 bp, synthetic construct
  source 1..120: mol_type = other DNA
ggattatggtagcaatattgaaaaaaatattatagtggggagtaaaatttaggaaaaccttgcaaatttttattcttactcaggagctttgtcttcatactccatggtcagccctgggca

SEQ ID NO: 91191 - DNA, 120 bp, synthetic construct; identical to SEQ ID NO: 318
  source 1..120: mol_type = other DNA

SEQ ID NO: 91192 - DNA, 120 bp, synthetic construct; identical to SEQ ID NO: 8182
  source 1..120: mol_type = other DNA

SEQ ID NO: 91193 - DNA, 120 bp, synthetic construct
  source 1..120: mol_type = other DNA
tgctgagccctagaccaatttctgtatactcctacagcatcgtctttttccccgataatgggctttttacattgcaattacttcttatggtagtctgtcttctctggtagactagattcc

SEQ ID NO: 91194 - DNA, 120 bp, synthetic construct; identical to SEQ ID NO: 171
  source 1..120: mol_type = other DNA

SEQ ID NO: 91195 - DNA, 120 bp, synthetic construct; identical to SEQ ID NO: 172
  source 1..120: mol_type = other DNA

SEQ ID NO: 91196 - DNA, 120 bp, synthetic construct
  source 1..120: mol_type = other DNA
ctgtccatagaccagtgtttttccaagtgcagattgcaactcctttgcagagtaggttgtggagccattttagctgactactcaccagctttcttcaaaatgtaaatggaataggataga

SEQ ID NO: 91197 - DNA, 120 bp, synthetic construct
  source 1..120: mol_type = other DNA
cccccaccccccattctctggcatacagaacaggaatacttatatagcttactctcaacccaacctttcccttcgtctgcttcaagaatctcaaatacttacgatttttggcatatttga

SEQ ID NO: 91198 - DNA, 120 bp, synthetic construct
  source 1..120: mol_type = other DNA
ttcttctttcttcttctacttttttttttttttttttttttttaaagagacaaggtctctctctctcttgcccaggttggagtgcagtggcaccatgatagctcattgcagcctccaact

SEQ ID NO: 91199 - DNA, 120 bp, synthetic construct
  source 1..120: mol_type = other DNA
ctcatggataagtagtgaactttttaaagttgctgtttttgtcttaaatccctcctgtctttgctcttttcccttcctttgtggtggctgccaatcctaccttgcagataacttctccct

SEQ ID NO: 91200 - DNA, 120 bp, synthetic construct
  source 1..120: mol_type = other DNA
taccttgtagtgatgttgctttgggcatatggattatgaccagatacagattaacccgttcctctataattgttttatggcctcatccttctgaaattgcctccttgtggcctgaaatcc

SEQ ID NO: 91201 - DNA, 120 bp, synthetic construct; identical to SEQ ID NO: 9240
  source 1..120: mol_type = other DNA

SEQ ID NO: 91202 - DNA, 120 bp, synthetic construct
  source 1..120: mol_type = other DNA
gcagggactacaggaacacaccatcacacccggtgaattttttattttttatttttagtagagataaggtctcactacattgtccaggttggtcttcaactcctaggctcaagtgatcct

SEQ ID NO: 91203 - DNA, 120 bp, synthetic construct
  source 1..120: mol_type = other DNA
actaatattttacaacaaagaggttccattttaaaaacccaaggacacagagggacagccaaggtgacaaggctcaaattctgatagaaaatataaatccccagatatcctcttcccctg

SEQ ID NO: 91204 - DNA, 120 bp, synthetic construct
  source 1..120: mol_type = other DNA
gctgaggcaggagaatcgcttgaacccaggaggttgagactgcagagagccgagatcgtgccactgcactccagcctgggtgacggagcgagactccatcaaaaaagagaaaaacgaaaa

SEQ ID NO: 91205 - DNA, 120 bp, synthetic construct; identical to SEQ ID NO: 313
  source 1..120: mol_type = other DNA

SEQ ID NO: 91206 - DNA, 120 bp, synthetic construct
  source 1..120: mol_type = other DNA
gctcatacattgcattctgagtacagagtagcaagaagtctcctatattgttgaatgggcagtattagaaataatttaaaatgtatataccctttgacttactggtttccttctaccact

SEQ ID NO: 91207 - DNA, 120 bp, synthetic construct
  source 1..120: mol_type = other DNA
agggtaatgactggaagggaagccaaaggggctttcagagcactagcgatgctctattttttatctgggtgctggttgcatgattttgttaactttgtgaaaattctttaagctggatac

SEQ ID NO: 91208 - DNA, 120 bp, synthetic construct
  source 1..120: mol_type = other DNA
attcttccatcctttccttacctttgctttagtcttatatctatcttaaaatatattccatgtttgaatactatacagccataaaaaaggatgagttcaagtcctttgtagggacatgga

SEQ ID NO: 91209 - DNA, 120 bp, synthetic construct
  source 1..120: mol_type = other DNA
tattctgaggtgctgaactttaggatcgagtatgaacggaaaattgactagccctcatagagactgaggcccagcttcataccctctcattccctgactgggttaaggatcttgattgga

SEQ ID NO: 91210 - DNA, 120 bp, synthetic construct; identical to SEQ ID NO: 90649
  source 1..120: mol_type = other DNA

SEQ ID NO: 91211 - DNA, 120 bp, synthetic construct
  source 1..120: mol_type = other DNA
agttggggatttaaagatgttctctttgaatgttcattaatagctgaagatttgggcttgagaggcacttagaaaattgctcctaaagtcctagaaagacggtcacagaaataccaagag

SEQ ID NO: 91212 - DNA, 120 bp, synthetic construct
  source 1..120: mol_type = other DNA
ttttctggaagaaacatagggatagagctcaggtctgatcattgaggaacattaggttcagtgccagttggcaatgatgatttactttgtgtgaccgtaagaaatctcttggtacgaggg

SEQ ID NO: 91213 - DNA, 120 bp, synthetic construct
  source 1..120: mol_type = other DNA
aactttcaccatcaccaaggcaagaaaagagagcactgaactgtcccatactggcaactgcttctgcccagaattgccatgtatggccacattttgctggccaatgcaagtcaaatggta

SEQ ID NO: 91214 - DNA, 120 bp, synthetic construct
  source 1..120: mol_type = other DNA
ccaatctcctcatgtaaaagagagtgccttcctttgctccaaaactatcatgagattctttagaagaccctctgttaataatattaatagtatcagctaccacctattgagggccaactt

SEQ ID NO: 91215 - DNA, 120 bp, synthetic construct
  source 1..120: mol_type = other DNA
cacagtaataaaatagggaactgggccattgtagccgttactactaggagttagtaatctcgtacaaacctctggggctctgtggtgggtagaatgtcctgtttattatagacaacaaat

SEQ ID NO: 91216 - DNA, 120 bp, synthetic construct; identical to SEQ ID NO: 79003
  source 1..120: mol_type = other DNA

SEQ ID NO: 91217 - DNA, 120 bp, synthetic construct; identical to SEQ ID NO: 79002
  source 1..120: mol_type = other DNA

SEQ ID NO: 91218 - DNA, 120 bp, synthetic construct
  source 1..120: mol_type = other DNA
gaaactactcaactctgctcttgtaacattaaaaatagccatggacgatatacaaacccatgggtatgactgttccaatatggcttattcataaaaataggcagcaggacagatttgacc

SEQ ID NO: 91219 - DNA, 120 bp, synthetic construct
  source 1..120: mol_type = other DNA
cagcaagccatgatcacactactgcactccatcctgggaaacaagagtgagaccccatctcaaaaaaaaaaaaaaaaaaaaaaatagcagtgtgtagtggtgcacaattgtagtccctgc

SEQ ID NO: 91220 - DNA, 120 bp, synthetic construct
  source 1..120: mol_type = other DNA
ctgttcacatacccatcaggctaaattaggtgaaatctctttggccttaatgaatgttgaaggattttaaagggctaatggaaattcttctagaagtaacaattcccattctattggtga

SEQ ID NO: 91221 - DNA, 120 bp, synthetic construct
  source 1..120: mol_type = other DNA
aaccttaaatccctttgccaatgatacagagccagagtatgctactccctagagcaggaactcaacatgatgacctactaaacaccattcagaagatgctgagactcatgaattgcaata

SEQ ID NO: 91222 - DNA, 120 bp, synthetic construct
  source 1..120: mol_type = other DNA
gtgactagtaacctccactgtagtgaccaatagttttttttcctgaatatcgtaatgagctcatagattattgtttgcatttgagcccattgtagtcactattaattgttttagatgctc

SEQ ID NO: 91223 - DNA, 120 bp, synthetic construct
  source 1..120: mol_type = other DNA
ctctctctctttctttctcttttctttctttctttttttttttttgaggcggagtctcgctccgtcccccaggctggagtgcagtggctagatctcggctcgctgcaagctccgcctccc

SEQ ID NO: 91224 - DNA, 120 bp, synthetic construct
  source 1..120: mol_type = other DNA
gctcacactgactccagcttcctggatctgattacatttagccaagactgtcatccatactgtaccctttcaaagagtcctaaaaacagctcttcacctactctttcaagacaagtaata

SEQ ID NO: 91225 - DNA, 120 bp, synthetic construct
  source 1..120: mol_type = other DNA
ctctgtctcaaaaaaaaaaaaaaaaaaaaaaaaaaaaaagaaccaagggggagatccctcttgccacctcagttgtttgaactcagctactcaaggtccacgttgtccagatcaagggct

SEQ ID NO: 91226 - DNA, 120 bp, synthetic construct; identical to SEQ ID NO: 9228
  source 1..120: mol_type = other DNA

SEQ ID NO: 91227 - DNA, 120 bp, synthetic construct
  source 1..120: mol_type = other DNA
tgagaggcaagggaagtgatagcattaagagaaatacctaatgtagattatgggttgatgggggcagcaaaccaccatggcacatgtgtacctatgtaacaaacctgcacattctgcaca

SEQ ID NO: 91228 - DNA, 120 bp, synthetic construct
  source 1..120: mol_type = other DNA
ttttggtctcccaaagacctatcaaactgcagatcttttggctttgtaatatattcagttccacatttattcattcaagatttttgtgtcctcattatgtgccaagtactgggttggaca

SEQ ID NO: 91229 - DNA, 120 bp, synthetic construct
  source 1..120: mol_type = other DNA
tgagaatggattcacatctagggctcctgacagtatctgtcaagatgctggccccaaaccctgagtttgtcatgttatgtgggcatatttggttgcccaactctgaagccaaatgatgcc

SEQ ID NO: 91230 - DNA, 120 bp, synthetic construct
  source 1..120: mol_type = other DNA
cagtggacttagcactgtataaatctgtccctccatgcttcccacttgcccatttgtcaaatggacttgacattccttactcagtggttgacagggagccaagtgatatatctgagctgt

SEQ ID NO: 91231 - DNA, 120 bp, synthetic construct
  source 1..120: mol_type = other DNA
taaccatgtcagagccaggccctggagacctggcttggaaaagaatgaagttttcctactaggaacttctgtagagccctagacctttccatcttagtgccgagttaaatgagtcacgta

SEQ ID NO: 91232 - DNA, 120 bp, synthetic construct
  source 1..120: mol_type = other DNA
gtttcctggtggcattttcccacaggattaggatggtggtggcattagccaggatctcttttgtcactgccactgttactgaatgatctgtattttgaactttcttgacttagtatagta

SEQ ID NO: 91233 - DNA, 120 bp, synthetic construct
  source 1..120: mol_type = other DNA
cggcctgtcttacgaggtgttccatagtggaaccacctgggaaacaattgattttgcattcttgtttgttagctaaatgcctgatttgctttttaggattcttttaggttaaatcatatg

SEQ ID NO: 91234 - DNA, 120 bp, synthetic construct
  source 1..120: mol_type = other DNA
acacacacacacacacgcaaactcctcccagcattaaaaaataataataataaaaaagtcatttgggtcaccttttaaatccataaagcaatcatttctaaaagaaacagcaggtacaaa

SEQ ID NO: 91235 - DNA, 120 bp, synthetic construct
  source 1..120: mol_type = other DNA
cttccattccttggaagtaaattgaaatgggtttgggttggcgctgtggctcacacctgtaatcccaccactttgggaggctgaggtgggtggattgcttgaacccaggagttcgagagc

SEQ ID NO: 91236 - DNA, 120 bp, synthetic construct
  source 1..120: mol_type = other DNA
catgttagaatgaaatctctgggtctttttcggattactttatgttccttaaaaagaaagacattgggccaggcacggtggctcacgcctgtaatcccagcactttgggaggccaaggcg

SEQ ID NO: 91237 - DNA, 120 bp, synthetic construct; identical to SEQ ID NO: 173
  source 1..120: mol_type = other DNA

SEQ ID NO: 91238 - DNA, 120 bp, synthetic construct; identical to SEQ ID NO: 78981
  source 1..120: mol_type = other DNA

SEQ ID NO: 91239 - DNA, 120 bp, synthetic construct
  source 1..120: mol_type = other DNA
aagcattttatttattttaatttttttttgagacagggtctctctattattgccccagctggtctctaactcctgggctcaagccatcctacagtctcagcctcctgagtagctgggatt

SEQ ID NO: 91240 - DNA, 120 bp, synthetic construct; identical to SEQ ID NO: 78979
  source 1..120: mol_type = other DNA

SEQ ID NO: 91241 - DNA, 120 bp, synthetic construct; identical to SEQ ID NO: 78978
  source 1..120: mol_type = other DNA

SEQ ID NO: 91242 - DNA, 120 bp, synthetic construct; identical to SEQ ID NO: 78977
  source 1..120: mol_type = other DNA

SEQ ID NO: 91243 - DNA, 120 bp, synthetic construct; identical to SEQ ID NO: 174
  source 1..120: mol_type = other DNA

SEQ ID NO: 91244 - DNA, 120 bp, synthetic construct
  source 1..120: mol_type = other DNA
tccatagcttcagaatggtatctgccctggtgtctgcattctggtcaggcggctgcgttcagcgtctgtgctcccgggctggggtgcttatctgtagtagccagatggcctgggcgctca

SEQ ID NO: 91245 - DNA, 120 bp, synthetic construct
  source 1..120: mol_type = other DNA
gattctcatttatgcaagatatgtaatgcctttctaaagaatagtgttgctacttacagctcgggcttggagataagacccactactctgcaggtccacttgaacttctttgtaagccca

SEQ ID NO: 91246 - DNA, 120 bp, synthetic construct
  source 1..120: mol_type = other DNA
taagtaaagaaaaaaggtttctctgcttttgacttgaattgttgaactatttgtcccttggtaaactgatcagttgccgtgcagattgagagaaagccattcagtcaatcaaaatgtttc

SEQ ID NO: 91247 - DNA, 120 bp, synthetic construct
  source 1..120: mol_type = other DNA
tgtcaaccgttgtacttttgtctgcagggaacaactcaagtttcgtcctgtcctcagtaagcagatgagaggtagggttgacgttagaagccaagtttttgtggagcaataaggtaaaat

SEQ ID NO: 91248 - DNA, 120 bp, synthetic construct; identical to SEQ ID NO: 9217
  source 1..120: mol_type = other DNA

SEQ ID NO: 91249 - DNA, 120 bp, synthetic construct
  source 1..120: mol_type = other DNA
cgcactcatgcttaggccaaatctccattattaatcacatatttaccagctaagtcactttcctaatgtctaccctacccaagtcactgttttgtttctaagaaggaggaaggtgcgtgt

SEQ ID NO: 91250 - DNA, 120 bp, synthetic construct
  source 1..120: mol_type = other DNA
acctgacctcccatgggtgactgaagagccagctaatgaacaagttcttttaaaggcagcctggggagtgtgggagaggctgagttcagcaaaacatgactaggtggtgctggtgctgtt

SEQ ID NO: 91251 - DNA, 120 bp, synthetic construct
  source 1..120: mol_type = other DNA
agttgaagagtgatgaagtgtgatgaagtcatttcagagggactccctggttgctctgagttgcctggctgggggcaagaggcttgttcctgcccacacagcataccaggccttgtggtg

SEQ ID NO: 91252 - DNA, 120 bp, synthetic construct
  source 1..120: mol_type = other DNA
tcaaatattttcccctttgaggtagcagcactaggctgtccccacagctccaaccagaatagctctgcttttatgttcacgatattgggtgtcccgctaagattttatttgaataacttt

SEQ ID NO: 91253 - DNA, 120 bp, synthetic construct
  source 1..120: mol_type = other DNA
cacttgaggtcaggagttcaagaccagcctggccaacacagtgaaaccccgtctctactgaaaatacaaaaattggcccagcgtggtggcacgcacctataatcccagttacttgggagg

SEQ ID NO: 91254 - DNA, 120 bp, synthetic construct; identical to SEQ ID NO: 175
  source 1..120: mol_type = other DNA

SEQ ID NO: 91255 - DNA, 120 bp, synthetic construct
  source 1..120: mol_type = other DNA
ctaatttcaacctggcagccatttatttagcacctactgtatgttgtcttttttttttttttgaggcagagtcttgctctgtcactcaggctggagtgcagtgatgttatcttggctcac

SEQ ID NO: 91256 - DNA, 120 bp, synthetic construct
  source 1..120: mol_type = other DNA
ttctttctaagagtgaatgtgtgcgtatgagctttcttttgctgttttggccagggagtgggactgccagtccagaaaggccagctcttctggattcagtagcaaaagagttaatcatta

SEQ ID NO: 91257 - DNA, 120 bp, synthetic construct
  source 1..120: mol_type = other DNA
ctcttagtattacagatatttatgttgttgtgtgcagtacttaaatttaaaagaaaaaggaagttgattgattgtccttaatgaaaattaaagaaataaggaagtgggaggctcttaatc

SEQ ID NO: 91258 - DNA, 120 bp, synthetic construct; identical to SEQ ID NO: 303
  source 1..120: mol_type = other DNA

SEQ ID NO: 91259 - DNA, 120 bp, synthetic construct; identical to SEQ ID NO: 78960
  source 1..120: mol_type = other DNA

SEQ ID NO: 91260 - DNA, 120 bp, synthetic construct; identical to SEQ ID NO: 8159
  source 1..120: mol_type = other DNA

SEQ ID NO: 91261 - DNA, 120 bp, synthetic construct; identical to SEQ ID NO: 176
  source 1..120: mol_type = other DNA

SEQ ID NO: 91262 - DNA, 120 bp, synthetic construct
  source 1..120: mol_type = other DNA
gttcaggccagatctattttttcatttgcttgttttttgtttttgagatggaggcttgctctgtcacccaggctagagtgcagtggcatgatctcggctcactgcaacctctgcctcttg

SEQ ID NO: 91263 - DNA, 120 bp, synthetic construct
  source 1..120: mol_type = other DNA
gtttttgttttttgtttttttttcttgcaaagatggggtcccactatgtttcccagtttggtcttgaactcctgggctcaagcaatcctcccaccttggcctcccaaagtgctggaatta

SEQ ID NO: 91264 - DNA, 120 bp, synthetic construct; identical to SEQ ID NO: 177
  source 1..120: mol_type = other DNA

SEQ ID NO: 91265 - DNA, 120 bp, synthetic construct
  source 1..120: mol_type = other DNA
caacaacaaaaaaagctactctgcagcagtaaggtgaactggaagaaaatgaaactcttggaaactttcaagtaccatactctgcatcttgcaattgaaagaccctagaggaaggtggtg

SEQ ID NO: 91266 - DNA, 120 bp, synthetic construct
  source 1..120: mol_type = other DNA
acgtataacctatgtacacacatccttctgtatactttaaatcatctctagattacttataatacctaatacagtgtaaatgctatgtaaatagttgttatactgcttttaaaatttgta

SEQ ID NO: 91267 - DNA, 120 bp, synthetic construct
  source 1..120: mol_type = other DNA
tagctgttacagcaattttctttttatcttggcatctgtaagagaagtctggcagcaccatgagtcccatataacacacaaaaagctgacactcataataattctgacccagggcttcta

SEQ ID NO: 91268 - DNA, 120 bp, synthetic construct
  source 1..120: mol_type = other DNA
gttgccatcgggagtgttaataactttgatcttcccagatttctctccagaagcacgccatttgactaaggtgcaaagtgactttaaatgtttaatttttggaaggttcaaggctgatag

SEQ ID NO: 91269 - DNA, 120 bp, synthetic construct
  source 1..120: mol_type = other DNA
gccttattctctgatctctgattgtatgcaggccgaccagagaccaggcaggtacaaggtacacccaaggtggcaatggacttttggtgccaatgccattgcaaatctcatgttttaata

SEQ ID NO: 91270 - DNA, 120 bp, synthetic construct
  source 1..120: mol_type = other DNA
gcaacagcgcagactggatcggaagtcgtttgctccggttcacttgcctgtaaatgcaggaaaagggggagggggcgatcagccagagcgcagatcctaatcgcggcgggggtggggtag

SEQ ID NO: 91271 - DNA, 120 bp, synthetic construct
  source 1..120: mol_type = other DNA
tggagttgcacacgctcggaaggcgggaggcggcaaggagaaggctgccttagaggtgaggggaattggggcatgatcatgggccgcgatgttgcgtgaagcgcaaggatgtcaggaact

SEQ ID NO: 91272 - DNA, 120 bp, synthetic construct
  source 1..120: mol_type = other DNA
gccttagccctagtgaaagtggcaagacacgcccttcccgcttcttattggaagagggactacagtctccaccggcctctactctttattggttaaaattccccgcaacacccctcctct

SEQ ID NO: 91273 - DNA, 120 bp, synthetic construct
  source 1..120: mol_type = other DNA
aaattcaaattgcgggacctagagcttttctaagtcctaatattgggaaggaaattagtttttttttctgttttcccggtggcggagtagaagaagtatttattgagtaggaacagggga

SEQ ID NO: 91274 - DNA, 120 bp, synthetic construct
  source 1..120: mol_type = other DNA
ttgaaattttattattaaaaggaaagtaattatccaaaatatgagtggacagttattctctaagtctttggatatagagccagaggaagcaggttaataaccacaattcattttaaatga

SEQ ID NO: 91275 - DNA, 120 bp, synthetic construct
  source 1..120: mol_type = other DNA
ccagagtttcctgagtaggtggaactataggcgccctataccacattttgtttatctgttcatctgtagaatcaatggacatttggattgcttccacctcttggctattgtgaataatgc

SEQ ID NO: 91276 - DNA, 120 bp, synthetic construct
  source 1..120: mol_type = other DNA
tttgggaagctgaggagagaggatcacttgaggccaggagtttgagatcagcctgggcaacatagcaagaccctattgctacaaaaataaaaaacttagccaggtctggtggtgcctgcc

SEQ ID NO: 91277 - DNA, 120 bp, synthetic construct
  source 1..120: mol_type = other DNA
ctttggacattattttcttctttctttttttttttttttttttaagacggagttttgctctgtcgcccaggctagagtgcagtggcacgatctcagcttactgcaacctccgcctcccag

SEQ ID NO: 91278 - DNA, 120 bp, synthetic construct
  source 1..120: mol_type = other DNA
atagccactagccacatgtggctgttgtacacttgcagtggggctggcctgaattgagatgtgctgttaagtgtaaaatgtacaccagatttcaaagagtaagaccaaaaaatggaatat

SEQ ID NO: 91279 - DNA, 120 bp, synthetic construct; identical to SEQ ID NO: 299
  source 1..120: mol_type = other DNA

SEQ ID NO: 91280 - DNA, 120 bp, synthetic construct; identical to SEQ ID NO: 178
  source 1..120: mol_type = other DNA

SEQ ID NO: 91281 - DNA, 120 bp, synthetic construct; identical to SEQ ID NO: 78937
  source 1..120: mol_type = other DNA

SEQ ID NO: 91282 - DNA, 120 bp, synthetic construct; identical to SEQ ID NO: 90576
  source 1..120: mol_type = other DNA

SEQ ID NO: 91283 - DNA, 120 bp, synthetic construct; identical to SEQ ID NO: 179
  source 1..120: mol_type = other DNA

SEQ ID NO: 91284 - DNA, 120 bp, synthetic construct; identical to SEQ ID NO: 90574
  source 1..120: mol_type = other DNA

SEQ ID NO: 91285 - DNA, 120 bp, synthetic construct; identical to SEQ ID NO: 78933
  source 1..120: mol_type = other DNA

SEQ ID NO: 91286 - DNA, 120 bp, synthetic construct
  source 1..120: mol_type = other DNA
agggttacaaagcagaagcttgatattcttggagtcagtactcagagacatgaagcagctcagcacaattggttcaaaggaggaaaaataaactaagagattggatctgacagaagcagc

SEQ ID NO: 91287 - DNA, 120 bp, synthetic construct; identical to SEQ ID NO: 78931
  source 1..120: mol_type = other DNA

SEQ ID NO: 91288 - DNA, 120 bp, synthetic construct
  source 1..120: mol_type = other DNA
ccttgacctcccaaactgttgggattacaggcatgagccaccatgcctggcaaacacttttttttaaagggctaggacataaacattctttaaatccttttaagcaagggcttgaattct

SEQ ID NO: 91289 - DNA, 120 bp, synthetic construct
  source 1..120: mol_type = other DNA
ttattctatttcctgattcacaaactcttgctccatgttaaagcagttatcaccaatagaacctatgagaaccagtgcccatggaaacctaacagcttgtttttttaatcccctattaaa

SEQ ID NO: 91290 - DNA, 120 bp, synthetic construct
  source 1..120: mol_type = other DNA
tggcaaatgattctttcaatgccctcaggtcacttataccctaagaccctgcatgagtttattcaaccttcaaatcagtcacttctgccctcatctagggcacataacaatgtagttagt

SEQ ID NO: 91291 - DNA, 120 bp, synthetic construct
  source 1..120: mol_type = other DNA
gttggccagcctggtcttgaactcttggcctcaagtgatccaccagcctcggcctcccaaagtattgggattacacgcatgagtgtgaatccaacactgtttttgggatttttttttttt

SEQ ID NO: 91292 - DNA, 120 bp, synthetic construct
  source 1..120: mol_type = other DNA
tctcactctgtcacgcaggctggagcagagtggtccaatcatggctcactgcagcctcagcctcctaggctcaagtgatcctcccgccccagcctcccaagtacctgggactacaagcct

SEQ ID NO: 91293 - DNA, 120 bp, synthetic construct; identical to SEQ ID NO: 2259
  source 1..120: mol_type = other DNA

SEQ ID NO: 91294 - DNA, 120 bp, synthetic construct
  source 1..120: mol_type = other DNA
gaaagcacagttattaagctacttaattctgggctttccaaatcttagagtggtgtcatttgctagctgggtgaccacgaacaagttctttaacctctctgtgcctcagtttcctgatct

SEQ ID NO: 91295 - DNA, 120 bp, synthetic construct
  source 1..120: mol_type = other DNA
ggccaatgttaaaaaaatcctttaacttttttgtagagatgcactcctggcctcaagcgatcctccttctggtccccacccccagcctctttctgataaacatttacactgtttattatc

SEQ ID NO: 91296 - DNA, 120 bp, synthetic construct
  source 1..120: mol_type = other DNA
ggctggagtgcaatggctcaatcagctcactttagccttgaactcccaggctcaagtgatactgccacctcaacctctcaagtctgctactacaggaagacaaactccttttttaaattt

SEQ ID NO: 91297 - DNA, 120 bp, synthetic construct
  source 1..120: mol_type = other DNA
tcgtgatccacctgccttggcctcccaaaatactgggattacaggcgtgagccaccgcacctggacacgttactgaatatttctgtgccttggtttcttcatctgtgaaatgggattgtt

SEQ ID NO: 91298 - DNA, 120 bp, synthetic construct; identical to SEQ ID NO: 2382
  source 1..120: mol_type = other DNA

SEQ ID NO: 91299 - DNA, 120 bp, synthetic construct; identical to SEQ ID NO: 2383
  source 1..120: mol_type = other DNA

SEQ ID NO: 91300 - DNA, 120 bp, synthetic construct; identical to SEQ ID NO: 16029
  source 1..120: mol_type = other DNA

SEQ ID NO: 91301 - DNA, 120 bp, synthetic construct
  source 1..120: mol_type = other DNA
gtgtgtgtgtgtgtgtgtgtgtgtgtgtgtgtgtgtgtgtacacggtgcatctgaattgtcctgagtgctgtctcgggtatccttgagctgtgtgtgcgtgtgtccccctagcggtatgt

SEQ ID NO: 91302 - DNA, 120 bp, synthetic construct; identical to SEQ ID NO: 16030
  source 1..120: mol_type = other DNA

SEQ ID NO: 91303 - DNA, 120 bp, synthetic construct
  source 1..120: mol_type = other DNA
caaaactccatcacacacaaacatacacacacacacacacacaaaattaaccaggcatggtggcacgtgcctgtagtctcagcggctcgggaggctgatgtacaagaatcgcttgaatct

SEQ ID NO: 91304 - DNA, 120 bp, synthetic construct; identical to SEQ ID NO: 16031
  source 1..120: mol_type = other DNA

SEQ ID NO: 91305 - DNA, 120 bp, synthetic construct
  source 1..120: mol_type = other DNA
gcagaggttgcagtgagccaaaatcacgccattgcactccagcctgggtgacagattgagactccgtctcaaaaaagcaaaaagcaaaaaacaaaaacaaacaacaacaacaaaaaccaa

SEQ ID NO: 91306 - DNA, 120 bp, synthetic construct
  source 1..120: mol_type = other DNA
tccagcctgggcgacagtgtgagactctgtctcaaaaaataaatataaaaaataaaaagctgctatgctccattaattcctgcaggcccaacgaaggcagcctaggaattctagatcaat

SEQ ID NO: 91307 - DNA, 120 bp, synthetic construct; identical to SEQ ID NO: 16032
  source 1..120: mol_type = other DNA

SEQ ID NO: 91308 - DNA, 120 bp, synthetic construct
  source 1..120: mol_type = other DNA
attcatttattttatttattattatttttttattttttgagatggagttttgctcttgtcgcccaggctgcagtgcagtggcacgatcttggctcactgcaacctctgcctcccaggttg

SEQ ID NO: 91309 - DNA, 120 bp, synthetic construct; identical to SEQ ID NO: 16033
  source 1..120: mol_type = other DNA

SEQ ID NO: 91310 - DNA, 120 bp, synthetic construct; identical to SEQ ID NO: 16034
  source 1..120: mol_type = other DNA

SEQ ID NO: 91311 - DNA, 120 bp, synthetic construct; identical to SEQ ID NO: 16035
  source 1..120: mol_type = other DNA

SEQ ID NO: 91312 - DNA, 120 bp, synthetic construct; identical to SEQ ID NO: 16036
  source 1..120: mol_type = other DNA

SEQ ID NO: 91313 - DNA, 120 bp, synthetic construct
  source 1..120: mol_type = other DNA
gaagccactagaaattggtttttagttcattggtttttattttttttatttctgagacagagtctcagtctgtcgcccaggctggagtgcagtggcacaattttggttcactgcaacctc

SEQ ID NO: 91314 - DNA, 120 bp, synthetic construct
  source 1..120: mol_type = other DNA
agggtcatgccattctcctgcctcagcctctcagcctcccaagtagctgggactacaggtacccgccaccatgcccggctaattttttttttgtgtgtttttagtagagacgaggtttca

SEQ ID NO: 91315 - DNA, 120 bp, synthetic construct; identical to SEQ ID NO: 16037
  source 1..120: mol_type = other DNA

SEQ ID NO: 91316 - DNA, 120 bp, synthetic construct; identical to SEQ ID NO: 16038
  source 1..120: mol_type = other DNA

SEQ ID NO: 91317 - DNA, 120 bp, synthetic construct; identical to SEQ ID NO: 16039
  source 1..120: mol_type = other DNA

SEQ ID NO: 91318 - DNA, 120 bp, synthetic construct
  source 1..120: mol_type = other DNA
caaaacctcgtccctattaaaaatacaaaaattagccgggcatggtggtgtcagcctgtagtcccagctactcaggaggctgagacaggagaattgctgagattcaggaggtggaggttt

SEQ ID NO: 91319 - DNA, 120 bp, synthetic construct
  source 1..120: mol_type = other DNA
gcctcagccttccaagtaggtgggactacaggcgcccaccaccacacccagctaatttttgtattttattagagacagggtttcaccatattggccaggctggtctggaactcctgacct

SEQ ID NO: 91320 - DNA, 120 bp, synthetic construct
  source 1..120: mol_type = other DNA
ttgctggaacaaaataagtcaggttaatttttgtaaatgtaccatgcatgcttaaaatgaatgtatgtacatttgttcctgagatacaggttgatggacggatggctacatggatgtgat

SEQ ID NO: 91321 - DNA, 120 bp, synthetic construct
  source 1..120: mol_type = other DNA
acctgtgtgagtagatgggtgctgtggctgctcttttggctcctgctgggatttatcagccatcagtccacctgtgtgagtagacgctggacccgcggggtttcttcctttttactgggc

SEQ ID NO: 91322 - DNA, 120 bp, synthetic construct
  source 1..120: mol_type = other DNA
cataaaccaacccccgttcaagatctacattattttatttatttatttatttatttatttgagacagtttctcccttgttgctgaggctggagtgcaatggggcaatatcagctcaccgc

SEQ ID NO: 91323 - DNA, 120 bp, synthetic construct
  source 1..120: mol_type = other DNA
aagtaatctcttcattgtatttttttttttttacttatactgagctttaaatgacaaagattcatgtaatccaagagagaagtattatttagagggattcttttaccatgtgatatgtaa

SEQ ID NO: 91324 - DNA, 120 bp, synthetic construct
  source 1..120: mol_type = other DNA
gtgacagagtgagaccccatctcaaaaacaaacaacaaacaaaaacaaaaaaaatggccgggcacggtggctcacacctgtaatcccagcactttgggaggccgaggcaggcagatctcc

SEQ ID NO: 91325 - DNA, 120 bp, synthetic construct
  source 1..120: mol_type = other DNA
gtatgaggtttcgtcacttaaatgggaaagtctttctaaactcttctgctttatagttctatcgtatgggtggaaggaaagcttccaatctcctctctgaagattcactgcagaaatgag

SEQ ID NO: 91326 - DNA, 120 bp, synthetic construct
  source 1..120: mol_type = other DNA
gagtctccctctgttgcccaggctggagtataatggtgtgatctcggctcactgcaacctccacctcctggcttcaagtgattcccctgcctcagcctctcaagtagctgggattacagg

SEQ ID NO: 91327 - DNA, 120 bp, synthetic construct
  source 1..120: mol_type = other DNA
gacccacatctgagatgggatttgcattgcattttagctatgatgagaacaaatatttaatatcttagaagattaaaagcatactgtgataatatggaaatcttggcgggaattcagtca

SEQ ID NO: 91328 - DNA, 120 bp, synthetic construct
  source 1..120: mol_type = other DNA
ctgccccagcctcctgactagctgggattacaggcatgcaccaccatgcctggctaattttgtatttttagcagagacagcgtttctccatgttggtgaggctggtctcaaactcccgac

SEQ ID NO: 91329 - DNA, 120 bp, synthetic construct
  source 1..120: mol_type = other DNA
tgtaagatgaaggtgacaacaaaagtcaaccgtcatgacaaaatcaatggaaagaggaagaccgccaaagaacagtaagatgtgccttgacacaaatactgttgtatgaaccatgtgcca

SEQ ID NO: 91330 - DNA, 120 bp, synthetic construct
  source 1..120: mol_type = other DNA
gttcaccatgttggccaggctagtcttgaactcctgacctcaggtgatctgcctacctcagcctcccggtgtgagccaccgcacccagcctggattgttgaattcaatgctcgggtcacc

SEQ ID NO: 91331 - DNA, 120 bp, synthetic construct
  source 1..120: mol_type = other DNA
tctgtttcctagcattctgggaattttacacatccttcctataaaaccaagtatcaggtgagatccttaggatcaggaccatgaatcaagtggtgtgagggcaacacagcaaacttaccc

SEQ ID NO: 91332 - DNA, 120 bp, synthetic construct
  source 1..120: mol_type = other DNA
actaagcatgaaagaacgtgagcacggagaaaaggagaggcaggtgtcagaggcagaggaaaacgggaaattggatatgaaagaaatacacacctacatgtgagttcagaaactgaaccc

SEQ ID NO: 91333 - DNA, 120 bp, synthetic construct
  source 1..120: mol_type = other DNA
aggcgtcagccaccgtgaccggctcagactgtactcttacagccatctgaaatacgttttctaggtagagatagattgtgtaagggtacagttgtgaggataacagaaacatggcagatt

SEQ ID NO: 91334 - DNA, 120 bp, synthetic construct
  source 1..120: mol_type = other DNA
gcacttacaatttggtattacctgggagtgaaaagaaatattacagccatgcctaactgacttcttgaggtaagattgttctgtcagaaaaccctctcccagttcccctgcagctcttca

SEQ ID NO: 91335 - DNA, 120 bp, synthetic construct
  source 1..120: mol_type = other DNA
gacacctgcggagtgtctgctctatccccttccaccctcagcggatgataatctcaagacacctcccgagtgtctgctcactccccttccaccctcagctccaccctcagtggatgataa

SEQ ID NO: 91336 - DNA, 120 bp, synthetic construct
  source 1..120: mol_type = other DNA
ataaataaaataaatatcacttacattagatacacccaaggggtggtctatagagacttggaagcagtggttattgcaacaggggcacggaagtcatctggctatgccaggatgcccagg

SEQ ID NO: 91337 - DNA, 120 bp, synthetic construct
  source 1..120: mol_type = other DNA
aggctacaccctctcataaaatcggattccctcccttcagggtaggtttataatgaaaccctccttagaggccaggtgcggtgacacccatctgtaatcccagcactttgggaggctaag

SEQ ID NO: 91338 - DNA, 120 bp, synthetic construct
  source 1..120: mol_type = other DNA
ctcctgggttgaagcaattctcctgcctcggtctcctgagtagctgggattacagacgcctgccaccacacacagctaatttttgcatttttagtacagatggggtttcaccatattggc

SEQ ID NO: 91339 - DNA, 120 bp, synthetic construct
  source 1..120: mol_type = other DNA
cctgtaatcccagctactagggaggctgaggaaggagagtcacttgaacctgagagatgaaggttgcagtgagccaagattttgccactgcattccaacctgggtgacagagcaagagtc

SEQ ID NO: 91340 - DNA, 120 bp, synthetic construct
  source 1..120: mol_type = other DNA
attataggcatgagccactgcgctcatcctgatcatcttgtctctcttttttttttttttagagacagtgtctcactttgtcacccacactggagtgcagtggcacaatcagttcactgc

SEQ ID NO: 91341 - DNA, 120 bp, synthetic construct
  source 1..120: mol_type = other DNA
ggacgagtccattcttatattcccttgaaggggtggctcgaatgcacctggctgggggggacgctcctattttctactgatgtgggggacagaaaaggaagatgacaaaatgtgaaaatt

SEQ ID NO: 91342 - DNA, 120 bp, synthetic construct; identical to SEQ ID NO: 9027
  source 1..120: mol_type = other DNA

SEQ ID NO: 91343 - DNA, 120 bp, synthetic construct; identical to SEQ ID NO: 28554
  source 1..120: mol_type = other DNA

SEQ ID NO: 91344 - DNA, 120 bp, synthetic construct; identical to SEQ ID NO: 28555
  source 1..120: mol_type = other DNA

SEQ ID NO: 91345 - DNA, 120 bp, synthetic construct
  source 1..120: mol_type = other DNA
atgaggggttgtcagatacacagaaaacaagtgaaagagcctccaggtgaaggaactggcttgtacgaaggccctggggtggaaagtggcctagatgtgcctggagtcagaaagaaaaat

SEQ ID NO: 91346 - DNA, 120 bp, synthetic construct
  source 1..120: mol_type = other DNA
tcgccagagaaagtactaaggacagatgggagacttctcttccctcggtatctgcaaagagggtcccccccggcctctcccctgttgccagagaaagtactaaggacagatgggagattt

SEQ ID NO: 91347 - DNA, 120 bp, synthetic construct
  source 1..120: mol_type = other DNA
ccacagtccttaggagcctagtgtagttggggagtaaataagcaaacagataatttctatacctggtaattactaccttgatagggcaaagaggattctgtttgtgctgtataagcacat

SEQ ID NO: 91348 - DNA, 120 bp, synthetic construct
  source 1..120: mol_type = other DNA
gactaaagctaggaagataggaagagttttacaagatccttttggctatatagttaaagttattagcagttagagtttcccttacagttgacaagtgaaccatacaagtgaatgacttgt

SEQ ID NO: 91349 - DNA, 120 bp, synthetic construct
  source 1..120: mol_type = other DNA
atataaatgaaggggtagtgaaaatttatcggaacatttataacctaacagaaccccatgtcttttaccccattctaattccagaccactagagattagaaaattattctctggggtatc

SEQ ID NO: 91350 - DNA, 120 bp, synthetic construct
  source 1..120: mol_type = other DNA
gcagatcacctgaggtcgggagtttgagaccagcctgactaacatggagaaacccgtctctactaaaaatacaaagttagctgggcatggtggctcattcctgtaatccaagctacttgg

SEQ ID NO: 91351 - DNA, 120 bp, synthetic construct
  source 1..120: mol_type = other DNA
gatgcttctctccttagctcacagatggctgccttctagttgtgtcctcatactgtcttcccttggtcagtgttgtctgtgtcctcgtctcctcttcttaaagggacaccagtcatatta

SEQ ID NO: 91352 - DNA, 120 bp, synthetic construct
  source 1..120: mol_type = other DNA
attctgacagctgaagtgaaggactcccaacttctggaactgcccaatgaaagtagccttgtgtgagtgttagctggcctgctttggtctgggatgcaagtagaaataaactcctctcat

SEQ ID NO: 91353 - DNA, 120 bp, synthetic construct
  source 1..120: mol_type = other DNA
ggagcttacaagaatgaagctattgtggtgtgattcaatagggaataggtggggccttggcaacatcaatttgtagtatccctgccaattgatactacaacatcaatttgtagtatccct

SEQ ID NO: 91354 - DNA, 120 bp, synthetic construct
  source 1..120: mol_type = other DNA
taggttctgctagtatctagaatattcaaagtttatgtttagtctgacactaaagaatccattatttctcttgacttccaggctggtcagtgtctttcctgtgtcatataccaaacaatg

SEQ ID NO: 91355 - DNA, 120 bp, synthetic construct
  source 1..120: mol_type = other DNA
aaagtacagtgaagggtatatgggaatctctactatttttgtaacttttgtaagttgaaattgtttcaaaatgagttagaaaattaaaaggaagttttctctttcagctgggaaaacagc

SEQ ID NO: 91356 - DNA, 120 bp, synthetic construct
  source 1..120: mol_type = other DNA
atttagactctttctatccaactttttcttagaggctattcaaaataaaggtgcttctaacagtttcatatcgaaatacgatgcaaagccttgctcttccatggtatcctttgagtgagc

SEQ ID NO: 91357 - DNA, 120 bp, synthetic construct
  source 1..120: mol_type = other DNA
gtgagtttccctgcataatctctcttctcctgtctggttccatgtgagatgtgccttttgccttccgccatgattgtgaggcctccccagccatgcggacccgtaagtccaataaacctc

SEQ ID NO: 91358 - DNA, 120 bp, synthetic construct
  source 1..120: mol_type = other DNA
gccttggcagcttccacatggctttgagcctgcgggtgcacagaagtcaagaattgaggtttgggaaactcctcctagatatcagaagatgtagaagtttgctgtaggggtgggtccctc

SEQ ID NO: 91359 - DNA, 120 bp, synthetic construct
  source 1..120: mol_type = other DNA
ttctgccatgattgtgaggcctctccagccatgtggaactgtaagtccaataaacctctttcttttgcaaattgcccagcaatgtgaaaacagactaatacagtgggagattacttctcc

SEQ ID NO: 91360 - DNA, 120 bp, synthetic construct
  source 1..120: mol_type = other DNA
ttatcaagatgcaatatgtgaactcatctttcttctagcatcagttcagaattaattttaatctgtgtattgtatactgctgccaaaaactcattaaccacaattaaattatgaaagtac

SEQ ID NO: 91361 - DNA, 120 bp, synthetic construct
  source 1..120: mol_type = other DNA
ggggcaaaggtaatattggaccaaaaaaatctggacctatgtctattaaattgctcacagtgtttatataatatcggtgaagggaagtaaaattgaggttagtgaaagatactccacgtt

SEQ ID NO: 91362 - DNA, 120 bp, synthetic construct
  source 1..120: mol_type = other DNA
aagtatgattaaacactcttcgagggaatagaaaggggaaggaagaatggagatggatcatttgtttcatgccttttacttacgtgtaaggaattatgagcaggtgcctatggattttgg

SEQ ID NO: 91363 - DNA, 120 bp, synthetic construct
  source 1..120: mol_type = other DNA
aactattcaagagagaagaaccaagcaaaggggagtagtagggaattagtagggaattgtgccaaaggacatatggcaaggttattgtcagaaagctgagctgctgaaatccagacagtt

SEQ ID NO: 91364 - DNA, 120 bp, synthetic construct
  source 1..120: mol_type = other DNA
cagctacttgggaggttgaggcagaagaattgcttgaacccgaaaggtgaggttgcagtgagccaagattgtgccactgcactccatcctgggtgacaaaaaaataaaaaagtaatctga

SEQ ID NO: 91365 - DNA, 120 bp, synthetic construct
  source 1..120: mol_type = other DNA
tgtaatcccagctctttaggaggctgaggtggatggatcaggaggtcaggagttcaagaccagcctggctaacgtggtgaaacctcgtctctactaaaaatacaaaaattagctgggggt

SEQ ID NO: 91366 - DNA, 120 bp, synthetic construct; identical to SEQ ID NO: 79269
  source 1..120: mol_type = other DNA

SEQ ID NO: 91367 - DNA, 120 bp, synthetic construct
  source 1..120: mol_type = other DNA
gaattgctgggtcctagattattcaaatgttttacttcacaagaaaatgcacaattatttttcaaaatgtttgtacaaattgatacattttcccagcaaattataagagatctcattggt

SEQ ID NO: 91368 - DNA, 120 bp, synthetic construct; identical to SEQ ID NO: 79271
  source 1..120: mol_type = other DNA

SEQ ID NO: 91369 - DNA, 120 bp, synthetic construct; identical to SEQ ID NO: 79272
  source 1..120: mol_type = other DNA

SEQ ID NO: 91370 - DNA, 120 bp, synthetic construct
  source 1..120: mol_type = other DNA
atgaaaaaaaaaaacactttaagacatagctcattcattcgaaggtttctaatacgttacaaatttatgctgggccttggtgaaaaagtgaacaagatagtctctgccttcatagagctt

SEQ ID NO: 91371 - DNA, 120 bp, synthetic construct; identical to SEQ ID NO: 79205
  source 1..120: mol_type = other DNA

SEQ ID NO: 91372 - DNA, 120 bp, synthetic construct; identical to SEQ ID NO: 1876
  source 1..120: mol_type = other DNA

SEQ ID NO: 91373 - DNA, 120 bp, synthetic construct
  source 1..120: mol_type = other DNA
tcccaatgagtaaaaaccctagttcatcctgaggaaggtttttggccagtgtaccatgtgctcatttaaaaattaaatttatagggaggccaaggcgggcggataacgaggtcaggagat

SEQ ID NO: 91374 - DNA, 120 bp, synthetic construct; identical to SEQ ID NO: 79277
  source 1..120: mol_type = other DNA

SEQ ID NO: 91375 - DNA, 120 bp, synthetic construct; identical to SEQ ID NO: 79278
  source 1..120: mol_type = other DNA

SEQ ID NO: 91376 - DNA, 120 bp, synthetic construct; identical to SEQ ID NO: 1847
  source 1..120: mol_type = other DNA

SEQ ID NO: 91377 - DNA, 120 bp, synthetic construct
  source 1..120: mol_type = other DNA
tgtgatgtgacaggcctgtagtcccagctacttggatcacttgagctcaggagtttgaggctgcagtgagtcatgattgcaccaccgcactccagcctggatgacagcatgagaccccat

SEQ ID NO: 91378 - DNA, 120 bp, synthetic construct
  source 1..120: mol_type = other DNA
attgctcattgacaacacacctgatcacccaagagctgtgatggagatgtacaaggagattaatgttgttttcatgcctgctaacacaacatccattctgcagcccactgatcaaggagt

SEQ ID NO: 91379 - DNA, 120 bp, synthetic construct; identical to SEQ ID NO: 79213
  source 1..120: mol_type = other DNA

SEQ ID NO: 91380 - DNA, 120 bp, synthetic construct; identical to SEQ ID NO: 79283
  source 1..120: mol_type = other DNA

SEQ ID NO: 91381 - DNA, 120 bp, synthetic construct
  source 1..120: mol_type = other DNA
ttaccagaaatacactccaaaatggcaaaaagtagagccgaggaatgaataagcaacagagggaaaagtcaacaaaaaaatttcaagagtgagttttaaccatctccatgctttgggaag

SEQ ID NO: 91382 - DNA, 120 bp, synthetic construct; identical to SEQ ID NO: 79216
  source 1..120: mol_type = other DNA

SEQ ID NO: 91383 - DNA, 120 bp, synthetic construct; identical to SEQ ID NO: 1877
  source 1..120: mol_type = other DNA

SEQ ID NO: 91384 - DNA, 120 bp, synthetic construct; identical to SEQ ID NO: 21346
  source 1..120: mol_type = other DNA

SEQ ID NO: 91385 - DNA, 120 bp, synthetic construct; identical to SEQ ID NO: 21347
  source 1..120: mol_type = other DNA

SEQ ID NO: 91386 - DNA, 120 bp, synthetic construct
  source 1..120: mol_type = other DNA
cgggtggatcacttgaggtcaggagttcatgaccaggctggtcaacatggtaaaatcctgtctctactaaaaatacaaaattagctgggcatggtggtgtgcacctgtaatcccagatac

SEQ ID NO: 91387 - DNA, 120 bp, synthetic construct; identical to SEQ ID NO: 79290
  source 1..120: mol_type = other DNA

SEQ ID NO: 91388 - DNA, 120 bp, synthetic construct; identical to SEQ ID NO: 21348
  source 1..120: mol_type = other DNA

SEQ ID NO: 91389 - DNA, 120 bp, synthetic construct; identical to SEQ ID NO: 79223
  source 1..120: mol_type = other DNA

SEQ ID NO: 91390 - DNA, 120 bp, synthetic construct; identical to SEQ ID NO: 79293
  source 1..120: mol_type = other DNA

SEQ ID NO: 91391 - DNA, 120 bp, synthetic construct
  source 1..120: mol_type = other DNA
agcctgcacttcagcctgggtgacagagtgagattctgtctcaaaaaataataataataattattattatacatatatatatatatatatatatatatataaaatcttcaatcccaaaga

SEQ ID NO: 91392 - DNA, 120 bp, synthetic construct
  source 1..120: mol_type = other DNA
agacttatctttgtagcgcaagagtagcaagtaacagaacttagtaaatactttgcaaatgggtaatgtgaaatctgaacttgcatagtaatgaatacaattcattcacattgaaaagtt

SEQ ID NO: 91393 - DNA, 120 bp, synthetic construct
  source 1..120: mol_type = other DNA
cagtcagcaaaatgactgttagcacatatttcagcatcattcatattgtcctgattgtcctatgctgatcagccttggctatggacaaagaagatatacaagcaagctggaagacaatgc

SEQ ID NO: 91394 - DNA, 120 bp, synthetic construct; identical to SEQ ID NO: 79228
  source 1..120: mol_type = other DNA

SEQ ID NO: 91395 - DNA, 120 bp, synthetic construct; identical to SEQ ID NO: 21350
  source 1..120: mol_type = other DNA

SEQ ID NO: 91396 - DNA, 120 bp, synthetic construct; identical to SEQ ID NO: 21351
  source 1..120: mol_type = other DNA

SEQ ID NO: 91397 - DNA, 120 bp, synthetic construct; identical to SEQ ID NO: 79460
  source 1..120: mol_type = other DNA

SEQ ID NO: 91398 - DNA, 120 bp, synthetic construct; identical to SEQ ID NO: 79232
  source 1..120: mol_type = other DNA

SEQ ID NO: 91399 - DNA, 120 bp, synthetic construct
  source 1..120: mol_type = other DNA
tttttatttttatttatttttatctttttgagacagaatctcactctggtttgagacagaatctcactctgtcccccaagttggagtgtggtggtgcgttctcggctcactgaaacctct

SEQ ID NO: 91400 - DNA, 120 bp, synthetic construct; identical to SEQ ID NO: 79234
  source 1..120: mol_type = other DNA

SEQ ID NO: 91401 - DNA, 120 bp, synthetic construct; identical to SEQ ID NO: 1771
  source 1..120: mol_type = other DNA

SEQ ID NO: 91402 - DNA, 120 bp, synthetic construct
  source 1..120: mol_type = other DNA
ccagcacctgttgtttcctgactttttaatgattgccattctaactggtgtgagatagtatctcattgtggttttgatttgcatttctctgatggccagtgatggtgagcattttttcac

SEQ ID NO: 91403 - DNA, 120 bp, synthetic construct
  source 1..120: mol_type = other DNA
agtatggccattttcaggatattgattcttcctacccatgagcatggaatgttcttccatttgtttgtatcctcttttatttccttgagcagtggtttgtagttctccttgaagaggtcc

SEQ ID NO: 91404 - DNA, 120 bp, synthetic construct; identical to SEQ ID NO: 79453
  source 1..120: mol_type = other DNA

SEQ ID NO: 91405 - DNA, 120 bp, synthetic construct; identical to SEQ ID NO: 79308
  source 1..120: mol_type = other DNA

SEQ ID NO: 91406 - DNA, 120 bp, synthetic construct
  source 1..120: mol_type = other DNA
cagacgatcaaattactccaagctacgggaggacattcaaaccaaaggcaaagaagttgaaaactttgaaaaaaatttagaagaatgtataactagaataaccaatacagagaagtgctt

SEQ ID NO: 91407 - DNA, 120 bp, synthetic construct
  source 1..120: mol_type = other DNA
agtgggtgcgtgctccatccgcgagccaaagcagggcgaggcattgtctcacttgggaagcacagggggtcagggagttccctttcctagtcaaagaaaggggtgacagactgcacctgt

SEQ ID NO: 91408 - DNA, 120 bp, synthetic construct
  source 1..120: mol_type = other DNA
aggaggttgaggctgcagtaagccatgtttgtgccactgcactccagcctgagtgacagagaaccccatctcaaaaaaataaataaaaagaaaagaaatatatataggaatgggaattag

SEQ ID NO: 91409 - DNA, 120 bp, synthetic construct; identical to SEQ ID NO: 79312
  source 1..120: mol_type = other DNA

SEQ ID NO: 91410 - DNA, 120 bp, synthetic construct
  source 1..120: mol_type = other DNA
agcactttaagaggccaagtaggagaatcacttgaggccaggagttcaagacgagcctgagcaacgtagcgagagcctgtcactacaaaaaagtaaaaataaaaaattagccaggcatgg

SEQ ID NO: 91411 - DNA, 120 bp, synthetic construct
  source 1..120: mol_type = other DNA
tctctttggggggtcctagtaaggagaatgtcaaattaaatccttcccagctggttgctcaggaaaagattctcctgtttagcagttaagcacacacaaaaaagtcatgcaatggccttc

SEQ ID NO: 91412 - DNA, 120 bp, synthetic construct; identical to SEQ ID NO: 79315
  source 1..120: mol_type = other DNA

SEQ ID NO: 91413 - DNA, 120 bp, synthetic construct
  source 1..120: mol_type = other DNA
atctcgaatgaacccctattgtggcagttatgatgccttgtagtttggttgaaatgcttttgccttgcattagtctataaattccttaaatataaaatctttattgctcagtacagggct

SEQ ID NO: 91414 - DNA, 120 bp, synthetic construct; identical to SEQ ID NO: 1792
  source 1..120: mol_type = other DNA

SEQ ID NO: 91415 - DNA, 120 bp, synthetic construct
  source 1..120: mol_type = other DNA
aaggtgagaatcttatagatgagtaggtctctggtacagaagtcttagtggagagttggtactggaatcctggtctaaggtattaggttttaatttgctagacaaagagaactcaagcag

SEQ ID NO: 91416 - DNA, 120 bp, synthetic construct; identical to SEQ ID NO: 1878
  source 1..120: mol_type = other DNA

SEQ ID NO: 91417 - DNA, 120 bp, synthetic construct
  source 1..120: mol_type = other DNA
cctgttgctcctaggctacaaacctgtacagcatatatgttactgtactgaacagtgtatcgaaataataacacaatggtatttgtgtgacagtaatttttcagctccatcataatctta

SEQ ID NO: 91418 - DNA, 120 bp, synthetic construct; identical to SEQ ID NO: 79252
  source 1..120: mol_type = other DNA

SEQ ID NO: 91419 - DNA, 120 bp, synthetic construct
  source 1..120: mol_type = other DNA
gatgcaaatacaagaagcacaaagaacatctgggaaattcatcgcaaaaagatcatcatctaggcacattgtcgtcaggttatctaaagttaagatgaaagaaagagctgtgaaacaaaa

SEQ ID NO: 91420 - DNA, 120 bp, synthetic construct; identical to SEQ ID NO: 79323
  source 1..120: mol_type = other DNA

SEQ ID NO: 91421 - DNA, 120 bp, synthetic construct
  source 1..120: mol_type = other DNA
gtagccaaagcaagactaagcaaaaagaacaaatctgaaggcatcacattacctgatttcaaacttatactataaggccatagtcaccaaaacagcatggtacggttataaaaataggca

SEQ ID NO: 91422 - DNA, 120 bp, synthetic construct; identical to SEQ ID NO: 79436
  source 1..120: mol_type = other DNA

SEQ ID NO: 91423 - DNA, 120 bp, synthetic construct
  source 1..120: mol_type = other DNA
gccaggaataaaactcaaaaccaaagtaaatctgttctcttaaaaaaaaatacaaaagaaaggcttggcttatctttaactgaataagcatgtgccaagaggagaagagttcttagcgat

SEQ ID NO: 91424 - DNA, 120 bp, synthetic construct; identical to SEQ ID NO: 79258
  source 1..120: mol_type = other DNA

SEQ ID NO: 91425 - DNA, 120 bp, synthetic construct
  source 1..120: mol_type = other DNA
tttaaaagaggacctgaatggttaatctgtttaagtggcacatgatatccctttcaaatatatttttcactttgtttcaaaactgtgaatcctttgagacttaccaatgaggaccaatcg

SEQ ID NO: 91426 - DNA, 120 bp, synthetic construct; identical to SEQ ID NO: 32002
  source 1..120: mol_type = other DNA

SEQ ID NO: 91427 - DNA, 120 bp, synthetic construct
  source 1..120: mol_type = other DNA
actccctccacatccttagaagtaacacgatttttagattggcttcatgaaaattagctcagagactaaagtagcactacagaggaataaaaaaaatttgttatataaataagaatctta

SEQ ID NO: 91428 - DNA, 120 bp, synthetic construct; identical to SEQ ID NO: 1879
  source 1..120: mol_type = other DNA

SEQ ID NO: 91429 - DNA, 120 bp, synthetic construct
  source 1..120: mol_type = other DNA
cgatgtacgaggaggggggctttgccggctgccgggcatcttcagaggccgccgcagaccttggcggtgccctgaactcggtgccaaactctgaggggtcgctcgggccgccgccgccct

SEQ ID NO: 91430 - DNA, 120 bp, synthetic construct
  source 1..120: mol_type = other DNA
tccgccgccgctgctgctcggacaattttgcagcaatagcagcagcatcaggaggactgcgccaacggctgcgctcccaccaagggcgcggtgctgggcgggcacctgtcggcctcgtcg

SEQ ID NO: 91431 - DNA, 120 bp, synthetic construct
  source 1..120: mol_type = other DNA
gaaaagaataggagggcatgtaaatatattctccatttatttttcatcacccctcaacaagctggaaaaccatttgagataaatttggaatgtagtggccaacatgtactcagagaaaat

SEQ ID NO: 91432 - DNA, 120 bp, synthetic construct; identical to SEQ ID NO: 79426
  source 1..120: mol_type = other DNA

SEQ ID NO: 91433 - DNA, 120 bp, synthetic construct
  source 1..120: mol_type = other DNA
actgaagaagacactatggaattctccgttttccagactagaaataagtaactcggagaaattaagaaactcgcccgacgaccctcaggcagtagcacctggccaggtttgctttctgaa

SEQ ID NO: 91434 - DNA, 120 bp, synthetic construct
  source 1..120: mol_type = other DNA
attttggaatcataagctacattccaatgtataaacagattttattcattttggatactcaatgtacacagaatcggcactgtagaatgtgactgccctgccagaaggcatctgcttggg

SEQ ID NO: 91435 - DNA, 120 bp, synthetic construct
  source 1..120: mol_type = other DNA
gggcatatttatgaccagtagttcctaaaattaaggggactattattgtgttactcaaggtatcagttgtataggatacattatgtcatatttcaaacaatgtttataaagagattagta

SEQ ID NO: 91436 - DNA, 120 bp, synthetic construct
  source 1..120: mol_type = other DNA
agtattttagttgaagatccaaagacattttatgttaaaactttaggttttatattgttttgtgttttaaaacataaaatctaaaatgtggtaatatccatgaggtgcagatagagtaat

SEQ ID NO: 91437 - DNA, 120 bp, synthetic construct; identical to SEQ ID NO: 27079
  source 1..120: mol_type = other DNA

SEQ ID NO: 91438 - DNA, 120 bp, synthetic construct; identical to SEQ ID NO: 27080
  source 1..120: mol_type = other DNA

SEQ ID NO: 91439 - DNA, 120 bp, synthetic construct
  source 1..120: mol_type = other DNA
tggtgagccaagatcgagccattgcactccagcctgggcaacaagagcaaaatggcgaaactccatctccgagaaaaaaaaaaaaaagaatactttctgaaagtatttattcatacaaat

SEQ ID NO: 91440 - DNA, 120 bp, synthetic construct; identical to SEQ ID NO: 32947
  source 1..120: mol_type = other DNA

SEQ ID NO: 91441 - DNA, 120 bp, synthetic construct; identical to SEQ ID NO: 32948
  source 1..120: mol_type = other DNA

SEQ ID NO: 91442 - DNA, 120 bp, synthetic construct
  source 1..120: mol_type = other DNA
aggctgcacagctaggcagatcttctgcttttaggcacctgcctcactgtagggacagctgagctctacagaggcccaggggtggtggatgagagcccaggagggagaagtccctgtgaa

SEQ ID NO: 91443 - DNA, 120 bp, synthetic construct
  source 1..120: mol_type = other DNA
tagaggcaagtaagctgaggttcagagacagaaaatgacttgcccaagatcacccagctgggaagtgacagtgccagggttggagccctggttgagctggttccacaggccagagctcat

SEQ ID NO: 91444 - DNA, 120 bp, synthetic construct
  source 1..120: mol_type = other DNA
gaagaagggacttgcttcctctttgccttccaccatgattgtaagtttcctgaggcctcccagccatgcttcctctgaagcctgcggaactgtgagtcaattaaacctctttttttcata

SEQ ID NO: 91445 - DNA, 120 bp, synthetic construct
  source 1..120: mol_type = other DNA
cagtcctgtgtcctcaggcaccactcccctttgtacctcctgtcccaacagccaagctccacagggccaagactacagcatcctttgctcagcacccaaaccactgctgtgcccacagca

SEQ ID NO: 91446 - DNA, 120 bp, synthetic construct; identical to SEQ ID NO: 7544
  source 1..120: mol_type = other DNA

SEQ ID NO: 91447 - DNA, 120 bp, synthetic construct; identical to SEQ ID NO: 7545
  source 1..120: mol_type = other DNA

SEQ ID NO: 91448 - DNA, 120 bp, synthetic construct
  source 1..120: mol_type = other DNA
tatacttgatatgtcagcttgatgtgagagaaggtgtggacaacctggaggaagggtcaaggggttcaaataggcctgtggatatagcctcaaaagccaacatccttggctattccgctg

SEQ ID NO: 91449 - DNA, 120 bp, synthetic construct
  source 1..120: mol_type = other DNA
ctaaaagaagggaacactgctgtgaagcagagctcctttgcagacacccctgaagcacccttgttaccccaacatcctaccagagctgctgggaaacaagggtgctgctgggatcagcac

SEQ ID NO: 91450 - DNA, 120 bp, synthetic construct
  source 1..120: mol_type = other DNA
tccctgctcctcgcctgcctacccgtcttctccatggtaggtcccgtttctcttggtcgtaccagcttagcaggctccctcggaaggctgtgacttcagctacgtctctgaatagatggt

SEQ ID NO: 91451 - DNA, 120 bp, synthetic construct
  source 1..120: mol_type = other DNA
tagtaagtctcttaatgtcttgatacgtatcacaatcccttcccagcctgaatctgcctttcatggccaatgagccttgggccacaacctagttccttaccatcacaggcagaaggcttg

SEQ ID NO: 91452 - DNA, 120 bp, synthetic construct
  source 1..120: mol_type = other DNA
gaaattgaggtttatggagattaagcgacttgttctttcaaatccacgaccagcattcttatactgtgataaaatgcagtccctgctaagcctctgtatcaaactctccccccaaacctt

SEQ ID NO: 91453 - DNA, 120 bp, synthetic construct
  source 1..120: mol_type = other DNA
aaaacagaaaaacagaatttctcttctaccccttgtcaggcctctgagcccaagctaagccatcatatcctcagtaacctgcacttatacatccagatggcctgaagcaactgaagatct

SEQ ID NO: 91454 - DNA, 120 bp, synthetic construct
  source 1..120: mol_type = other DNA
ctccagagctcaagcaatcaacccgcctcggcctcccaaagtgctgggatacaggcatgagccacggcgcctggtgacaccccattatattcttttattttctttcttttctcttttttt

SEQ ID NO: 91455 - DNA, 120 bp, synthetic construct
  source 1..120: mol_type = other DNA
gcttaaacacctcaagtgtgtctgcccaccttggggcctcacacaatccatttcctctgtttggactcttttatgcttttacctaacaccttatcatttttcaagtcttgactgaaatgt

SEQ ID NO: 91456 - DNA, 120 bp, synthetic construct
  source 1..120: mol_type = other DNA
ctctttcaaattcaatcaccctctaggtcgactataccgcctagctgcttcacaatttgtcccttcctcgccatccatactgccagccttaattcaagttcacattatcacttgattgga

SEQ ID NO: 91457 - DNA, 120 bp, synthetic construct
  source 1..120: mol_type = other DNA
aggtagccttcaaagcctctgcgctctgggagaggggaaggcctcgggctcatagttctagaggctcctcaagcttcagaggactgctccttccgcctgaactagccacgaggagactac

SEQ ID NO: 91458 - DNA, 120 bp, synthetic construct; identical to SEQ ID NO: 33008
  source 1..120: mol_type = other DNA

SEQ ID NO: 91459 - DNA, 120 bp, synthetic construct; identical to SEQ ID NO: 33009
  source 1..120: mol_type = other DNA

SEQ ID NO: 91460 - DNA, 120 bp, synthetic construct; identical to SEQ ID NO: 33006
  source 1..120: mol_type = other DNA

SEQ ID NO: 91461 - DNA, 120 bp, synthetic construct; identical to SEQ ID NO: 33007
  source 1..120: mol_type = other DNA

SEQ ID NO: 91462 - DNA, 120 bp, synthetic construct; identical to SEQ ID NO: 17077
  source 1..120: mol_type = other DNA

SEQ ID NO: 91463 - DNA, 120 bp, synthetic construct
  source 1..120: mol_type = other DNA
agatgatcaacgtgcagcgtctgctggaggctgccgagtttttggagcgccgggagcgaggtaatggctgggcgccgctgcgtgagcccgagcgctactaatctttttcggcagtgcggt

SEQ ID NO: 91464 - DNA, 120 bp, synthetic construct
  source 1..120: mol_type = other DNA
ggaggtgtgtgtgctgagatcgtgagtggaggcgtgtgtgagaggtcgcgcaggtgctgggggaggtgcgagggtgcgcacggagggtggggctgtgggtgtgcggcgagcgggaaggag

SEQ ID NO: 91465 - DNA, 120 bp, synthetic construct; identical to SEQ ID NO: 11152
  source 1..120: mol_type = other DNA

SEQ ID NO: 91466 - DNA, 120 bp, synthetic construct; identical to SEQ ID NO: 33382
  source 1..120: mol_type = other DNA

SEQ ID NO: 91467 - DNA, 120 bp, synthetic construct; identical to SEQ ID NO: 33383
  source 1..120: mol_type = other DNA

SEQ ID NO: 91468 - DNA, 120 bp, synthetic construct; identical to SEQ ID NO: 33384
  source 1..120: mol_type = other DNA

SEQ ID NO: 91469 - DNA, 120 bp, synthetic construct
  source 1..120: mol_type = other DNA
gaagaccacttgaacccaggaggttgaggctgcagagagctgtgattgtgccactgtactccagcctgggcaacagagcaataccccatatcaaaaaaaaaaaaaaaaaaaaaaaaaaaa

SEQ ID NO: 91470 - DNA, 120 bp, synthetic construct
  source 1..120: mol_type = other DNA
gcctgatatcccccttcccaacacacaacacaaacacacaaacctgctgtgcaagaagcaccgcaaatagatatatattatgtataatagatatatattatatatcatgtataatatata

SEQ ID NO: 91471 - DNA, 120 bp, synthetic construct; identical to SEQ ID NO: 18524
  source 1..120: mol_type = other DNA

SEQ ID NO: 91472 - DNA, 120 bp, synthetic construct; identical to SEQ ID NO: 18525
  source 1..120: mol_type = other DNA

SEQ ID NO: 91473 - DNA, 120 bp, synthetic construct
  source 1..120: mol_type = other DNA
ggagagcaaaacacctccaaacaaactccttcgggctcgcccctcgccacactttctgggggagggcggcgagtttgcggggctgcggcttagcatggcgggacctgcatttcctgcggg

SEQ ID NO: 91474 - DNA, 120 bp, synthetic construct
  source 1..120: mol_type = other DNA
cctggtggtggaggggaagtccgtggggtggggcagacccccgagggcctggataggggagggggagtcactgggggaggggcggaccctgatggtcctgatgggggagggtgaatcagt

SEQ ID NO: 91475 - DNA, 120 bp, synthetic construct
  source 1..120: mol_type = other DNA
tcacacagacctacatagccctccctgccaccgtgctgggctttggatggcacctgcccttgagtggggaagccagggcatgggcgtgggccagggccaggctccaagccagccggttct

SEQ ID NO: 91476 - DNA, 120 bp, synthetic construct; identical to SEQ ID NO: 19962
  source 1..120: mol_type = other DNA

SEQ ID NO: 91477 - DNA, 120 bp, synthetic construct; identical to SEQ ID NO: 19963
  source 1..120: mol_type = other DNA

SEQ ID NO: 91478 - DNA, 120 bp, synthetic construct
  source 1..120: mol_type = other DNA
cacatcctgttttcacccctgagctgtttctctttttcttttcttttttttttttttttttttttaagacggattctcactctgtggcccaggctggagtgcagtggtgcgatctcgact

SEQ ID NO: 91479 - DNA, 120 bp, synthetic construct
  source 1..120: mol_type = other DNA
tctctattaaaaatacaaaaattagccgggcgtggtggcgggcgcctgtaatcccaggtatttggggggactgagacaggagaatcccttcaacccgggaggtggaggttgcagtaagtc

SEQ ID NO: 91480 - DNA, 120 bp, synthetic construct
  source 1..120: mol_type = other DNA
cctaaagacataatcatgattttgcacaaagctttatatgttatctgtagtactgaaaaagtagacactaagcttatccaccatgatcaagcaggcttcatccctgggatgcaaggctgg

SEQ ID NO: 91481 - DNA, 120 bp, synthetic construct
  source 1..120: mol_type = other DNA
ccaagtcaatcctaagccaaaagaacaaagctggaggcatcatgctacctgatttcaaactatactacaaggctacagtaaccaaaacagcatggtactggtaccaaaacagagatatag

SEQ ID NO: 91482 - DNA, 120 bp, synthetic construct
  source 1..120: mol_type = other DNA
tgtaaactagttcaactattgcggaagtcagtgtggcgattcctcagggatctagaatagaaataccatttgacccagccatcccattactgggtatatacccaaaggactataaatcat

SEQ ID NO: 91483 - DNA, 120 bp, synthetic construct; identical to SEQ ID NO: 22530
  source 1..120: mol_type = other DNA

SEQ ID NO: 91484 - DNA, 120 bp, synthetic construct; identical to SEQ ID NO: 22531
  source 1..120: mol_type = other DNA

SEQ ID NO: 91485 - DNA, 120 bp, synthetic construct; identical to SEQ ID NO: 22532
  source 1..120: mol_type = other DNA

SEQ ID NO: 91486 - DNA, 120 bp, synthetic construct
  source 1..120: mol_type = other DNA
ggcgtgattttttttttttttttttttttaaatgagcagggtcttgctctgtaccccagactgtagtgcagtggcgtgatcatagctcactgcaaccttgaactcatgaactcaaggggt

SEQ ID NO: 91487 - DNA, 120 bp, synthetic construct; identical to SEQ ID NO: 13160
  source 1..120: mol_type = other DNA

SEQ ID NO: 91488 - DNA, 120 bp, synthetic construct; identical to SEQ ID NO: 13161
  source 1..120: mol_type = other DNA

SEQ ID NO: 91489 - DNA, 120 bp, synthetic construct; identical to SEQ ID NO: 13162
  source 1..120: mol_type = other DNA

SEQ ID NO: 91490 - DNA, 120 bp, synthetic construct; identical to SEQ ID NO: 19910
  source 1..120: mol_type = other DNA

SEQ ID NO: 91491 - DNA, 120 bp, synthetic construct
  source 1..120: mol_type = other DNA
cgccactgcactccagtctgggcaacagagtgagactgtttcaaaaacaacaaccacaaaaaattaaatatcggcaatctcatatgcattatctgctggcccacttatccatcttcactt

SEQ ID NO: 91492 - DNA, 120 bp, synthetic construct; identical to SEQ ID NO: 19912
  source 1..120: mol_type = other DNA

SEQ ID NO: 91493 - DNA, 120 bp, synthetic construct
  source 1..120: mol_type = other DNA
gtgagttctctgtgactgcacttatcttttattgcccaataaacattgggaagacatagcaggccagaaaggcctgtccccagacattgtttcttgaggccaccctccttttaccccaaa

SEQ ID NO: 91494 - DNA, 120 bp, synthetic construct
  source 1..120: mol_type = other DNA
ggtccaggccattcttgaaccaggaaatcttgggctataaataaggtaaagagagggagggaagccatccaggctgagaggggacctggcagggacccagggagacacatctgtgtttct

SEQ ID NO: 91495 - DNA, 120 bp, synthetic construct
  source 1..120: mol_type = other DNA
atggtcttcttgtcggctttctgcactgtgtacccccagagctccgtgttgccgacatcctggggtggcttccactccagagccacattaagaccccaggcgtcagtcacccggagatcc

SEQ ID NO: 91496 - DNA, 120 bp, synthetic construct
  source 1..120: mol_type = other DNA
ttccagctttgagaaccaatccttacaaaagatggaccctttgttgggacaaggaacaaaggaatgggaagtggatcccagagggaccaatctgactacatagacaatatttacctgttg

SEQ ID NO: 91497 - DNA, 120 bp, synthetic construct
  source 1..120: mol_type = other DNA
ttttaaatttttatttgtttatttatttttgagatggagtttcgctcttgtctcccaggctggagtgcaatggcatgatcttggctcaccgcaacttctgcctcccgagttcaagtgatt

SEQ ID NO: 91498 - DNA, 120 bp, synthetic construct
  source 1..120: mol_type = other DNA
ctgttcagctggcttttggccactttaaggaatattttgtccctgttacaagacatgtctgtagattggcttaaaaacaaacagcaacagcagccaggcacggtggctcacgcctgtaat

SEQ ID NO: 91499 - DNA, 120 bp, synthetic construct
  source 1..120: mol_type = other DNA
aggggacaatgaacatttattgagcacctgttagatgccagatggcctgcctggtcatcccatatcatcctaacagctctctgagataggcagtgtcattattcccattttgtagacatg

SEQ ID NO: 91500 - DNA, 120 bp, synthetic construct
  source 1..120: mol_type = other DNA
tcttttcctttttttttttttttttttagtgatatggagtctcactgtgttgtccaggctgggtctcaacaggatgcatttctgatcatgtcgccagccctccgtcaaccctttaaggct

SEQ ID NO: 91501 - DNA, 120 bp, synthetic construct
  source 1..120: mol_type = other DNA
gaagaaccaacagtgccaggcaggagcaagaccccggcagctacactggcagaaaagtgtctcagaaactactcctgagttgagagggagcacaaggtcaaggtcaaggtcagcttagga

SEQ ID NO: 91502 - DNA, 120 bp, synthetic construct
  source 1..120: mol_type = other DNA
tagatttgtattgaggtatagtttatgctcagatctgacagtaggctgagttctgacagatgaatacacccatgcaattattaatccaaccaagatctggaacattcccatcaccccagg

SEQ ID NO: 91503 - DNA, 120 bp, synthetic construct
  source 1..120: mol_type = other DNA
aggtctgatacatcatgtcacctcatctttataactatcctatgaggtggcactatcagggttcccattttagagaagaggaaactgaggctcacagagattataattgacccatggtca

SEQ ID NO: 91504 - DNA, 120 bp, synthetic construct
  source 1..120: mol_type = other DNA
gttcttctctgtctctgacgaactctcctatgtgtgtgcctccctgtgcatatctttctgtctctatagaactatttctgtctttctgtctctttgtctttttgggtctgtctgtttctc

SEQ ID NO: 91505 - DNA, 120 bp, synthetic construct
  source 1..120: mol_type = other DNA
gggtgggtggcaagtgctgtggcctcttctgggcagatgcccccaacacccatgccccgtgcttctggaactcaccatttgacttgcgccccctcctccgatacttcacactcaaactcc

SEQ ID NO: 91506 - DNA, 120 bp, synthetic construct
  source 1..120: mol_type = other DNA
tctgtgtctctatttctttttgttttgtttgtttgtctgtttgtttgttttttggacagagtcttgctctgttggccaggctggagtgcaatggcgccatcttggctcactgcaacctct

SEQ ID NO: 91507 - DNA, 120 bp, synthetic construct
  source 1..120: mol_type = other DNA
tttcgagaattaaatgagataattacataaagcacctagtggctggcttaggaaggaactcactcactttttttgagatggagtctcattctgtcacccaggttggagtgcaatggcaca

SEQ ID NO: 91508 - DNA, 120 bp, synthetic construct
  source 1..120: mol_type = other DNA
gctctccaggcttagcgggcctcttcccttttcttttgggtgtggagagggttaaccgggcttcatttcttttcagaagagggtagagaaagaaagtgtagcctgatttttccttggtga

SEQ ID NO: 91509 - DNA, 120 bp, synthetic construct
  source 1..120: mol_type = other DNA
ctttacttcctccctattttccgcacttgcactccctgtgttgtggggcacccatgctgctccggaggctctggcaggacctcctgtgtgcattactttttcttatccctcctaagctct

SEQ ID NO: 91510 - DNA, 120 bp, synthetic construct
  source 1..120: mol_type = other DNA
acctccagccaggctcctgtgggggttagactcagtatcctcacctgcctgggaagcttgctctcccctgcagcccccactgacttcagctccgccccgcaaatcatccccagccctgac

SEQ ID NO: 91511 - DNA, 120 bp, synthetic construct
  source 1..120: mol_type = other DNA
gggcggatcacataagaccaggagctccagaccagcctggccaacgtggtgaaattccgtctctactaaaaataacgaaaattagccaagtatggtggtgcacacctctagtttcagcta

SEQ ID NO: 91512 - DNA, 120 bp, synthetic construct
  source 1..120: mol_type = other DNA
ctgcctcccagattccccacaccccttgcttgcagctcgtgtgtgcctctgggtctcatggtgccctctgtgtgccttgtgccttctagggctctccatgtcccctctctccgtgtctcc

SEQ ID NO: 91513 - DNA, 120 bp, synthetic construct
  source 1..120: mol_type = other DNA
tctggaggggatcagatgggagtcgtggtgcagccactaaccagagacccctccaccctctctctcctgagcattggacccatgagcccgctgtggatgaggaaagtctgccatggctgt

SEQ ID NO: 91514 - DNA, 120 bp, synthetic construct
  source 1..120: mol_type = other DNA
agtaaatactgtgctagcactttctatgcatcccctcacgtaatactctaccagttctctgaggtagttgcagttattctgttcatttctcagaggaggacactgaggctcagagaagct

SEQ ID NO: 91515 - DNA, 120 bp, synthetic construct
  source 1..120: mol_type = other DNA
aagaaaccgagaatcaaaaaaggaccctggaggactggctgcccctgtcctggggctcagaggccacgtcctcgtcaaccccctcaagaactccctcctagccctgctccccaattgtag

SEQ ID NO: 91516 - DNA, 120 bp, synthetic construct; identical to SEQ ID NO: 13798
  source 1..120: mol_type = other DNA

SEQ ID NO: 91517 - DNA, 120 bp, synthetic construct
  source 1..120: mol_type = other DNA
aaaaccacaaagatggggaaaaaacagagcagaaaaactggaaactctaaaaagcagagcaactctcctcctccaaagaaacacagttcctcaccagcaacggaacaaagctggatggag

SEQ ID NO: 91518 - DNA, 120 bp, synthetic construct
  source 1..120: mol_type = other DNA
ttctttaagaaaagaatttccaacccagaatttcatatccagccaaactaagcttcataagtgaaggagaaataaaatactttacagacaagcaaatgctgagagattttgtcaccacca

SEQ ID NO: 91519 - DNA, 120 bp, synthetic construct
  source 1..120: mol_type = other DNA
caaactagaactcaggattaagaatctcactcaaaaccactcaactacatggaaactgaacaacctgctcctgaatgactactgggtacacaatgaaatgaaggcagaaataaagatgtt

SEQ ID NO: 91520 - DNA, 120 bp, synthetic construct
  source 1..120: mol_type = other DNA
tgcaaggatggttcaatatatgcaaatcaataaatgtaatccagcatataaacagaaccaaagacaaaaaccacaggattatctcaacagatgcagaaaaggcctttgacaaaattcaac

SEQ ID NO: 91521 - DNA, 120 bp, synthetic construct
  source 1..120: mol_type = other DNA
aggctacagtaaccaaaacagcatggtattggtaccaaaacagagatatagatcaatggaacggaacagagccctcagaaataatgccacatatctacaactatctgatctttgacaaac

SEQ ID NO: 91522 - DNA, 120 bp, synthetic construct
  source 1..120: mol_type = other DNA
taaactatcgcaagaacaaaaaaccaaacaccgcatattctcactcataggtgggaattgaacaatgagaacacatggacacaggaaggggaacatcacactctggagactgttgtgggg

SEQ ID NO: 91523 - DNA, 120 bp, synthetic construct; identical to SEQ ID NO: 3637
  source 1..120: mol_type = other DNA

SEQ ID NO: 91524 - DNA, 120 bp, synthetic construct
  source 1..120: mol_type = other DNA
atacataagattttcaatataaaaaacaagctaatagctgagtgcattggtgtgtgcctgtagtctcagttacttggagactgaggtgggagggtcatttgagcccaaaactttgagacc

SEQ ID NO: 91525 - DNA, 120 bp, synthetic construct
  source 1..120: mol_type = other DNA
atactcatttgggtatatacccagtaacgggatggctgggtcaaatggtatttctagttctagatccctgaggaatcgccacactgacttccacaatggttgaactagtttacagtccca

SEQ ID NO: 91526 - DNA, 120 bp, synthetic construct
  source 1..120: mol_type = other DNA
atatgcggcattatttctgagggctctgttctgttccattgatctatatctctgttttggtaccagtaccatgctgttttggttactgtaaccttgtagtatagtttgaagtcaggtagt

SEQ ID NO: 91527 - DNA, 120 bp, synthetic construct
  source 1..120: mol_type = other DNA
tagcatgaagggttgttgaattttgtcaaaggctttttctgcatctattgagataatcatgtggtttttgtctttggctctgtttatatgctggattacatttattgatttgcgtatatt

SEQ ID NO: 91528 - DNA, 120 bp, synthetic construct
  source 1..120: mol_type = other DNA
ctttcctgctttctcttgtaggcatttagtgctataaatttccctctacacactgctttgaatgcgtcccagagattctggtatgtggtgtctttgttctcgttggtttcaaagaacatc

SEQ ID NO: 91529 - DNA, 120 bp, synthetic construct; identical to SEQ ID NO: 28433
  source 1..120: mol_type = other DNA

SEQ ID NO: 91530 - DNA, 120 bp, synthetic construct; identical to SEQ ID NO: 19440
  source 1..120: mol_type = other DNA

SEQ ID NO: 91531 - DNA, 120 bp, synthetic construct; identical to SEQ ID NO: 19441
  source 1..120: mol_type = other DNA

SEQ ID NO: 91532 - DNA, 120 bp, synthetic construct; identical to SEQ ID NO: 17410
  source 1..120: mol_type = other DNA

SEQ ID NO: 91533 - DNA, 120 bp, synthetic construct
  source 1..120: mol_type = other DNA
ccgccccgtctgggatgtgaggagcacctctgcccggccccgaccccgtctgggaggtgaggagcatctctgcccggccgccccgtctgagaagtgaggagcccctccgcccggcagccg

SEQ ID NO: 91534 - DNA, 120 bp, synthetic construct; identical to SEQ ID NO: 17411
  source 1..120: mol_type = other DNA

SEQ ID NO: 91535 - DNA, 120 bp, synthetic construct
  source 1..120: mol_type = other DNA
ttcatgtaaacagaattgccagggaccggttaccgtggatatgtttttctaaaaactcagtgtctgcacaatccattgatagaactggaggatgtgtctgtgtttcctgttgggtttttc

SEQ ID NO: 91536 - DNA, 120 bp, synthetic construct
  source 1..120: mol_type = other DNA
ggattctggtctgctgtggtctttgatttagaataggaaaaaaacgccaaaaaccaagcaggggattttgtcttctgactttattcatagcccatggggcagagttgaagagagaacata

SEQ ID NO: 91537 - DNA, 120 bp, synthetic construct
  source 1..120: mol_type = other DNA
gactttgggtaggaggaagagagtgggcagaagaaggaaaaatcagatctgcctgctgccagccttcaccgttcagaagaaacacttaactcttttcagcaaccgcaacaaataattatg

SEQ ID NO: 91538 - DNA, 120 bp, synthetic construct
  source 1..120: mol_type = other DNA
gcctgtaatcccagcacttggggaggccgaggtgggcagatcactcgtgaggtcagttgttcgaggccatcctggccaatatggtgaaaccccgtctctactaaatatactaaattagcc

SEQ ID NO: 91539 - DNA, 120 bp, synthetic construct
  source 1..120: mol_type = other DNA
gcttgaagtgtcctagaaactcatctgctcccccacaaaactggctcttaacaagacctcaccctgcgctttaagtattttggtagtgacagcaaagctgagattctccaaaaatgaaga

SEQ ID NO: 91540 - DNA, 120 bp, synthetic construct
  source 1..120: mol_type = other DNA
gtggaactgtcatattcattcagtgcagtgtcttcactggacaagggaggacagcactgctgagtgccctaaccacgtaagagtggcttttggcatgaaaggaagaaaaatccaagctac

SEQ ID NO: 91541 - DNA, 120 bp, synthetic construct
  source 1..120: mol_type = other DNA
ggcattaaaagcacccttaagtcaacgttgcagtgaatcacctgacgccaagagcatttggtgaggctggtagatgaaaggataagcagttttttgatactctgtcacccaggatggagt

SEQ ID NO: 91542 - DNA, 120 bp, synthetic construct
  source 1..120: mol_type = other DNA
gtttttgtgcacccaaaagatgcagaaggcaggacagaccttccacctgcattatgtgtgtattcgtgtcggaactggcaaaaatggtctttttgttccactttgcccttggctgcccaa

SEQ ID NO: 91543 - DNA, 120 bp, synthetic construct
  source 1..120: mol_type = other DNA
gtcttcacagtgagaacagctctcctccactgacccctcaaccctgggagatgcttccaggcccctgctgtactttgggagcctaggcctggtttctctcctatccatgggggaccaaca

SEQ ID NO: 91544 - DNA, 120 bp, synthetic construct
  source 1..120: mol_type = other DNA
tttagggaaagttgaccagattctcccatagatgggatgtggggtataaaggagaccaaaacgttaagaaggaccacgaggtttgtgatgtgaattgttggcaacttcatcattttagct

SEQ ID NO: 91545 - DNA, 120 bp, synthetic construct
  source 1..120: mol_type = other DNA
ccaccacacctggctaatttttatattttttggtagagacagggtttcggcattcacatccagttttgtagtaagggtagcaaggtagacatggggctaagaggttattccatttgctga

SEQ ID NO: 91546 - DNA, 120 bp, synthetic construct
  source 1..120: mol_type = other DNA
ttgtgctttcaccaaatgattgcagcaatgcaagagggggaaccggatgttgaggatgcgcgacgggggttactagacagctggtttggagctgggtcagaggctgatggcattaatgga

SEQ ID NO: 91547 - DNA, 120 bp, synthetic construct
  source 1..120: mol_type = other DNA
actaagcttagtgattaaggagaagcaggaataaaccacagaagggagtggcggctgtgggcacaaggggcatttgcaggccgaaaggagcccgagcccccagtgcttttctctggcctg

SEQ ID NO: 91548 - DNA, 120 bp, synthetic construct
  source 1..120: mol_type = other DNA
agcctcccaagtagctgggactacaggcgtacaccagcatgctcagacttttaaaagtttttcatagaaacggagtctctggccaggcgtggtggctcatgcctgtaatcccagtactct

SEQ ID NO: 91549 - DNA, 120 bp, synthetic construct
  source 1..120: mol_type = other DNA
tttaggtgcttgccctaggccaggaaccagcagggcactttgctgtgtttacgttcagttctcacaacatacctgcactgtaggcatcacagagcttgcttcttacaagccagaactgat

SEQ ID NO: 91550 - DNA, 120 bp, synthetic construct
  source 1..120: mol_type = other DNA
gttactggatggtccctagtgcccaccatggaactagtgctcagtgacatcaccaagggctcactggataaggtcagagcttcagctaggggaaaacgcaatgaaagagcatcccaaggc

SEQ ID NO: 91551 - DNA, 120 bp, synthetic construct
  source 1..120: mol_type = other DNA
tattgggaatgaatgaaagcagccacacccccaaacaggcatgaaagcgctgacggaaaacctaaccaccatgggtctgtccccaatctcagaggacgcttcgtcagcagcagcattgaa

SEQ ID NO: 91552 - DNA, 120 bp, synthetic construct
  source 1..120: mol_type = other DNA
tttcttctcattctctttggctgtggcaaagatctcatctctggaggcacgggcatcttccagctctctttgaaagtccttcatctgagcctgcatgagtcaacagggaggacaagctca

SEQ ID NO: 91553 - DNA, 120 bp, synthetic construct
  source 1..120: mol_type = other DNA
agtgagctgagattacgccactgcactccagcctgggcgacagagcgagactctgtttcaaaaaaaaataaagaaaacgaagtttccacaccaaccatgagagtggtgataggaatgaaa

SEQ ID NO: 91554 - DNA, 120 bp, synthetic construct
  source 1..120: mol_type = other DNA
tgtgtcctgctgaatgtattgaggtgcaggtgtaagcagtgtaggttagctatgggagtaatttatataatcatctggcgttctgacttctacatcaaccttatgcagagccagaaatca

SEQ ID NO: 91555 - DNA, 120 bp, synthetic construct
  source 1..120: mol_type = other DNA
aaactgggatgttatctagaatcctgacactaggaggtcagtcagggaggggtagggaacctgcaggcatctggcatttagcctcactgtacaatcctcattttatttatttttgagaca

SEQ ID NO: 91556 - DNA, 120 bp, synthetic construct
  source 1..120: mol_type = other DNA
ccagcctgggtgacagagctagatcctgtctcaaaataagtatctgataaagttcatataatacagtgtcaatgactgaatccaggtggtggccttaaaggtgttcaccgtacaattctg

SEQ ID NO: 91557 - DNA, 120 bp, synthetic construct
  source 1..120: mol_type = other DNA
tcttgcaggctgttccgctcctcctccagctggcgcagcttcgtagacacgttgagcttctgccgggtttcttcttgaagcagctcctgcaaaagggatgcaaagaggtcccagggacct

SEQ ID NO: 91558 - DNA, 120 bp, synthetic construct
  source 1..120: mol_type = other DNA
ctacccctccatctcttccattgacaaggaggatatgaatgatcttgacactgcttatatgagggcggcaaaagccctgctctcaactgcatgtgagaaaaaaacatctcacttaattct

SEQ ID NO: 91559 - DNA, 120 bp, synthetic construct
  source 1..120: mol_type = other DNA
tcccaaagtgctgggattacaggcatgagccaccgtgcctggccagaaggtttttttaatatttaattgaacagggagatcatcgcctctcctccaggaacgcaactagaggaaaggact

SEQ ID NO: 91560 - DNA, 120 bp, synthetic construct
  source 1..120: mol_type = other DNA
aatgtcacataaaaatctggattcccagcttctttttcaaaaaactttaatgtttgaaggcatgccatggcagctcatacttgtcatccccagcactttgggaagcaggcagaaggatcg

SEQ ID NO: 91561 - DNA, 120 bp, synthetic construct
  source 1..120: mol_type = other DNA
ccgtccttcacaggtgtcgtgtgattgacactgctacttctgtcctagttaagggaaacttattttatggaaccagctcctgtaggcatgtgagttgccctacaggaaaaaaaaagtgtg

SEQ ID NO: 91562 - DNA, 120 bp, synthetic construct
  source 1..120: mol_type = other DNA
gaatgggcttggcttctagctcctgttcacgtctaatgaaccccaagcatggggagggtcagtgattctgtctggggcctcactcttccaaccataattttttttttttttttttgaaac

SEQ ID NO: 91563 - DNA, 120 bp, synthetic construct
  source 1..120: mol_type = other DNA
atcacgccactgaactccagcctgagtgacagagtaagactccactgctcaaaaaataaacaaataatccaatcttgggtatttctgtagagcagtgcaacaacggaccaatacactagt

SEQ ID NO: 91564 - DNA, 120 bp, synthetic construct
  source 1..120: mol_type = other DNA
attgacatactgtatgagaagcatttctattcattcttttttttttttctttttttgagatggcggctcactctgtcgcccagactggagtgcagtagcacgatctgagctcactgcaac

SEQ ID NO: 91565 - DNA, 120 bp, synthetic construct
  source 1..120: mol_type = other DNA
cctccccaagtactgggattacaggcgtgagccacctcacccagcctgtatgggaagcattttgtaaataaatataagctgctatcatcatcattagaatcttatgtaacttgttttttg

SEQ ID NO: 91566 - DNA, 120 bp, synthetic construct
  source 1..120: mol_type = other DNA
tttgtttgtttgtttttgagatggagtttcactcctgttgcccaggctggagtgcgacagcgcaatcttggccccctgcaacctccacctcccgggttcaagcgattctcctgcctcggc

SEQ ID NO: 91567 - DNA, 120 bp, synthetic construct
  source 1..120: mol_type = other DNA
acacacagacaggaaggaatttctcaagaatgttaactggtgtgactaagggtgatttttttgttttttgtttttttttgagatggagtctcactcactgtgtcacccaggctggagtgc

SEQ ID NO: 91568 - DNA, 120 bp, synthetic construct
  source 1..120: mol_type = other DNA
aaaaaaaaagaaagaaaaaaaagaaacagccaaccatgcttctataagttaaagcaaaccgcggccaggaaggtaaatgcacaggggctgatgcacgatttgctttgggtttgtcccctc

SEQ ID NO: 91569 - DNA, 120 bp, synthetic construct
  source 1..120: mol_type = other DNA
aaatagttgggttggggtgagactgcagagggtggatgggctctgagggtgaggctaaggaaactggattttccctagtaagccagtgaagttaggtttttgttttgttgttattattgt

SEQ ID NO: 91570 - DNA, 120 bp, synthetic construct
  source 1..120: mol_type = other DNA
tgactcattgggcaatcggaaattcagaagggggtctagatgagaaaagcctggatgtcgaagaggcagcagcaacaccatgggagtaggtgagatcaactgcaaagacatgatgtgttt

SEQ ID NO: 91571 - DNA, 120 bp, synthetic construct
  source 1..120: mol_type = other DNA
gactaagggtgatttcgagaggtggcatagagttagttgtcactcatgggatgatctgccatcctcaaatttcctttctgattttcctgcttttaaaaatacccattcaagcccaggaat

SEQ ID NO: 91572 - DNA, 120 bp, synthetic construct
  source 1..120: mol_type = other DNA
tctttaagtttctgcttaaatgtcacctcctccaggaagtcttctatgaatacccttcctctatcccccactgctgtattctttttttttttttgagacagagtctcactctgtcgccca

SEQ ID NO: 91573 - DNA, 120 bp, synthetic construct
  source 1..120: mol_type = other DNA
tgggattacagacactggccaccacacctggctaatctttgtatttttagtagagatggagttttaccctgttggccaggctagtctcaaactcctggcctcaagtgatccacatacctt

SEQ ID NO: 91574 - DNA, 120 bp, synthetic construct
  source 1..120: mol_type = other DNA
cctaattctcctccccttgagtgggggttagatttgcttctaacaacaacaacaaaaatcaggaagaagtgatggaatgtaacttcagagattaggctataaaaggcattgcggcttcct

SEQ ID NO: 91575 - DNA, 120 bp, synthetic construct
  source 1..120: mol_type = other DNA
caagtcctgttccccagcaaccccagccatgcatccatacaggtacctgcgagtgcttctgttccagctccttaagctcattctctgccttctgctgccgctccttggtcttctgcagtt

SEQ ID NO: 91576 - DNA, 120 bp, synthetic construct
  source 1..120: mol_type = other DNA
gaggctgcagtgagccacgattgtgccactgcactccagcctgggtgacacagtgagaccctgtctccacaaataaaatttttttaaaaattataagatatgtattaccccatgctgtta

SEQ ID NO: 91577 - DNA, 120 bp, synthetic construct
  source 1..120: mol_type = other DNA
agcttgcttcatgcacttatcacagtttgccattatgtatctgtctctgtgattatctgtttattgtttactccccaccaattcggctagaatattcatggaggtcagggaccatggtgt

SEQ ID NO: 91578 - DNA, 120 bp, synthetic construct
  source 1..120: mol_type = other DNA
tgcctggccttttttttaaataaaaaaaaaaagaaagaagagacagagtctcaatctttcacccaggctggagtgcaggcatgatcttggctcactgcaacctctgtctcctgagttcaa

SEQ ID NO: 91579 - DNA, 120 bp, synthetic construct
  source 1..120: mol_type = other DNA
gacttagctgagatccaaacaccactcagaaaacacaactatgtgcatcattcctaagggggctcccgtactccccagctgcactagctgtttcttttttctttctttcttttttttttt

SEQ ID NO: 91580 - DNA, 120 bp, synthetic construct
  source 1..120: mol_type = other DNA
ggctatcgatagattgagaaacgatagaacagtgaacgtaattctgtcttccctgcttggctgccatcttggacacaggaaaactttaagaataaaattgccccagttatccaggaagga

SEQ ID NO: 91581 - DNA, 120 bp, synthetic construct
  source 1..120: mol_type = other DNA
tcatgcgttatcttagtgacacctcatgaacagctctctgaggtcaaaatgattatgctcagtttccagctaaaaaactggaagctcagagaggtagagtaacttgcccaaggttcatca

SEQ ID NO: 91582 - DNA, 120 bp, synthetic construct
  source 1..120: mol_type = other DNA
ccatgagggtaccaacagaagcacccaaggagggcttagctgagggccgaggggcaaagcagtgcccccctctgggttttcatctctttgcttcggcaatggctgcctcatgatctctct

SEQ ID NO: 91583 - DNA, 120 bp, synthetic construct
  source 1..120: mol_type = other DNA
tgcaacatgaaatgacctatttagcattttctttccttttttttttttttttttaagatggagtctcgctctgctgcccaggctggaatgctgtggtgcaatctcagctcactgcaacct

SEQ ID NO: 91584 - DNA, 120 bp, synthetic construct
  source 1..120: mol_type = other DNA
tcaccctcttctcgtggttggggatgatgcagcgcacgaagttgggcgtggtgttgcgtagcgtggtcatcagcttgcccagctgctccttgtacagctgccccactgtgcggaacatgc

SEQ ID NO: 91585 - DNA, 120 bp, synthetic construct
  source 1..120: mol_type = other DNA
tattattattattattattattattatcattattttattttattgagacggagtttcactcttgttggccaggctggagtgcaatggcgtgatctcggctcaccacaacgtccgcctccc

SEQ ID NO: 91586 - DNA, 120 bp, synthetic construct
  source 1..120: mol_type = other DNA
accacgcccagttagtttttgtatttttagtagagatggggtttcgccacgttggccagactggtctcgaactcttgacctcaactgatcctcctgcctcagcctcccaaagtgctgaga

SEQ ID NO: 91587 - DNA, 120 bp, synthetic construct
  source 1..120: mol_type = other DNA
ggggtcatgatgcctgcttgagtttgagcatcactggtctaatttaaccctcataatacctctagtagagacggcaactattattgcatctcctgttttactaatgaggacaatgaagct

SEQ ID NO: 91588 - DNA, 120 bp, synthetic construct
  source 1..120: mol_type = other DNA
tcatttgaggtcaggcgttcaagaccaacctgaccaacatggtgaaaccccatgtctactaaaaatacaaaaaaaaaaaaaaaattagccaggcatggtggtgcacacctgtaatgccag

SEQ ID NO: 91589 - DNA, 120 bp, synthetic construct
  source 1..120: mol_type = other DNA
caactctagcactgtagtatacaaaagcagccagccatagacattatgcatacaaatgggcatggctgtgttccaataaaactttatttacaataacaagctgtgggccagatcggactc

SEQ ID NO: 91590 - DNA, 120 bp, synthetic construct
  source 1..120: mol_type = other DNA
tctccaacaaaaacagaaagaaataactgtctggacgtcacggttggaaaacatgagagtggctacagctgatgccttacagatgcgtagacaaattacgaataggacttggttgggatt

SEQ ID NO: 91591 - DNA, 120 bp, synthetic construct
  source 1..120: mol_type = other DNA
ggccgagttcataattcttgcaaatgaatttgttgcttgacttgaattcacctagggttcctgttagaaaagttttttttggagacagggtctcactctgttatccaggctggaatgcag

SEQ ID NO: 91592 - DNA, 120 bp, synthetic construct
  source 1..120: mol_type = other DNA
cacacaccttaaagatgcttatctcctccatctgcacaaccatctatggatggacaaacctcgtaaggcacgctactgcatgtacagatgtggaaacattttacagatgtgaaaacagag

SEQ ID NO: 91593 - DNA, 120 bp, synthetic construct
  source 1..120: mol_type = other DNA
ttgcaagctcctgcaaacagttcttggcttggaggtgaccatgtagcccaattcaggtgagtaagagtcagtgagacttaattccaagattttggttggaactgttagaaaagagatatg

SEQ ID NO: 91594 - DNA, 120 bp, synthetic construct
  source 1..120: mol_type = other DNA
accactgcacccccccctgggcaacagagcaaggctctggctcaaaaacaaaaaacaaacaaacaaacaaaacctgacatgggactgtgaatattctagtattgaataaatgagggataa

SEQ ID NO: 91595 - DNA, 120 bp, synthetic construct
  source 1..120: mol_type = other DNA
aaaagctctttaccctcccagcatcttgcttttctcagctttaaaaagggtcagctcttcggtaccttgttggtacccaggactaaataaggtaaagtatgtaaagtccctgagatagat

SEQ ID NO: 91596 - DNA, 120 bp, synthetic construct
  source 1..120: mol_type = other DNA
acactgaacaagatctgacctaacggactccaccttgcttctaacctccaagctccactgaaccatttgtgggtgtaagccgaattaacttggcaggaacttagtttatagtttattttt

SEQ ID NO: 91597 - DNA, 120 bp, synthetic construct
  source 1..120: mol_type = other DNA
ttaaaaactctgatccacgaatgctcaaggagattgatttgagtaataataaaactctgttctcccatgcagccggctctgcgtgagttactcttactctatcgcaattcccctgtcttg

SEQ ID NO: 91598 - DNA, 120 bp, synthetic construct
  source 1..120: mol_type = other DNA
ttgagcactgaaaagtttgaaaaagtgagtgataagaacctagtccaactgttgttaaaatcccagataccttcaccttgaaaaataaccagtggttaaatgtcacctcccccacccccc

SEQ ID NO: 91599 - DNA, 120 bp, synthetic construct
  source 1..120: mol_type = other DNA
cttagaaggtgcatgtgggagcttccatggggctggtggcattgtcttatttaaaatggattctagttacacagacgtgttcagtttataataattctttgcactgcacgctatggcata

SEQ ID NO: 91600 - DNA, 120 bp, synthetic construct
  source 1..120: mol_type = other DNA
ccatccatttgctcccacttactatggtagaaagccttctccccaaaatgaatgaagctgctgttgacagggcttggaaacacacttccttttaaccataacatctatgaaagagtcttt

SEQ ID NO: 91601 - DNA, 120 bp, synthetic construct
  source 1..120: mol_type = other DNA
aaccattggtttgcactttctggtatagttaaatgtaattccagaaatgacaaaagaatgccaccactcccaggccataagagatgaaccttggggcagaattagcagacagcaaagaag

SEQ ID NO: 91602 - DNA, 120 bp, synthetic construct
  source 1..120: mol_type = other DNA
aaatcggtcttcgcagatggaatcaagtacaagatctcaagatgagatcatcttggattaacctggtgggccctacatttaatgtcaagtgtctttatgatggacagaagagaagaccca

SEQ ID NO: 91603 - DNA, 120 bp, synthetic construct
  source 1..120: mol_type = other DNA
cacttgccataaatagatggcaattataaatataaatacaaggaaaacagtattaccaaattctagctagatgcttggggctgccgaaggtgctgggcctggagtctggtctctgtggtt

SEQ ID NO: 91604 - DNA, 120 bp, synthetic construct
  source 1..120: mol_type = other DNA
aagcctccatctcaaacaaaacaaaacaaaaaccctaaaatcaaaaattagccaggcgtggtagcacatgtctgtagtctcaacgacttgagaggctgagctgggaggactgcttgagcc

SEQ ID NO: 91605 - DNA, 120 bp, synthetic construct
  source 1..120: mol_type = other DNA
aagggaaactttccacagttctgtcctggtgttcctgaaagagattaaccttcaacactgaggcacatctaacgcagaaggaaaatcgtttctggaaacacagtgtcccgaccaagaatt

SEQ ID NO: 91606 - DNA, 120 bp, synthetic construct
  source 1..120: mol_type = other DNA
ctaacctccctgaacttctcaacattctgagttagtcactttccctttggtttaagccagctcgggttacttgcaaccctagttatacagccacttttctacaacacaaacaaaccacct

SEQ ID NO: 91607 - DNA, 120 bp, synthetic construct
  source 1..120: mol_type = other DNA
tcaggtgatccacccaccttggcctctcaaagttctgggattacagacgtgagccaccgcacctggccttattcatgtatttataaaatttttatcaaattcaaacaggcacatgagttt

SEQ ID NO: 91608 - DNA, 120 bp, synthetic construct
  source 1..120: mol_type = other DNA
ccagctatttttttttttttttttgagagggagtttcacctttgtccaggttggagtgcagtggtgcgatattggctgctcactgcaacctctgcctcccggattcaagcaattctcctg

SEQ ID NO: 91609 - DNA, 120 bp, synthetic construct
  source 1..120: mol_type = other DNA
tatttggttctttctaaaagcctaacatctttccagttctatcatctagaatacaaacggcccctgggaatttagttctgagccctatacttgcccatttctggaagaccagaggcaaag

SEQ ID NO: 91610 - DNA, 120 bp, synthetic construct
  source 1..120: mol_type = other DNA
aacacagtgatgcatctgcactcactgatttatgtgttgcctatgttcattggtttatgtgctgcctgtgctcattggtttatgtactgcctgtgctcattggtttatgtgttgcctgag

SEQ ID NO: 91611 - DNA, 120 bp, synthetic construct
  source 1..120: mol_type = other DNA
gcagacttcagatgcaaaaaaaagggaggggaatagagtgaaaagaaaaagcataaaaaggctccaggaagaaggtaatggtaacgagatgttcccctaacagccatcaccagcaaatct

SEQ ID NO: 91612 - DNA, 120 bp, synthetic construct
  source 1..120: mol_type = other DNA
gtgctggaattacaggcgtgaaccaccgtgcctggctgagatgtgtgtttctaaagagctcccaagtgatgctgatgctgctggtttggaaacatactttgagaaccactgatctaaaag

SEQ ID NO: 91613 - DNA, 120 bp, synthetic construct
  source 1..120: mol_type = other DNA
ttcatgaaagagatgctctacttgttccttgcgataccagcattcttctgggtaaactctgttttcatcaatttcctacctaagaagtggagccgatcacagaccaactctctaagagga

SEQ ID NO: 91614 - DNA, 120 bp, synthetic construct
  source 1..120: mol_type = other DNA
tgaccgtagtccatcatggctatccctatttaaaaaaacttatttatttattagagacaaggttttgctctgtcagcgagggctggagtgcagtggtgcaatcacagctcactgtaacct

SEQ ID NO: 91615 - DNA, 120 bp, synthetic construct
  source 1..120: mol_type = other DNA
tttatgacaggctagaaacattgcacagaattggaacatgcaaacgcagtgcttctcagtggaggcggcacatctgctatggagattttggaaatcggtggaagccattatttggcttgt

SEQ ID NO: 91616 - DNA, 120 bp, synthetic construct
  source 1..120: mol_type = other DNA
attcatctaatacgtgtaggaggtgatactatctatgattctaatttcgggcgaggaaaggagacattatgtaattgtttgttactaaaatgggccttggggatcacagggtcagggacc

SEQ ID NO: 91617 - DNA, 120 bp, synthetic construct
  source 1..120: mol_type = other DNA
ccaggccaatcaatatttgttgagtgaatagtgaataaattaatgaatgaatgagagagtgagaggcaggagcccttgcaagattgtgagatacagcccatctctccagggtcagatgcc

SEQ ID NO: 91618 - DNA, 120 bp, synthetic construct
  source 1..120: mol_type = other DNA
cagacaagtaaggaatgcacaaaacccaccaggaatcctcttagcggactgcggaataaagcttcaaagcaggttgcctgagctccattcattgggttaaaggaagctgagactgtacac

SEQ ID NO: 91619 - DNA, 120 bp, synthetic construct
  source 1..120: mol_type = other DNA
gatcccaaataagaactgtaattctccttctgatctgcaacacagtcacccagggtctaactaagatggattgaatgatcttttcgggagccaaggaagacacctgtgggtttcttctag

SEQ ID NO: 91620 - DNA, 120 bp, synthetic construct
  source 1..120: mol_type = other DNA
gtctcaacctactgggctcaggcaatcctcctgcctcagcctcccaagtagctaagactacaggcatgcacaccaggcccagctaattctcttgatttttttttttttttttttttggta

SEQ ID NO: 91621 - DNA, 120 bp, synthetic construct
  source 1..120: mol_type = other DNA
gaaggatgggccctagaggtgatgactctagaaacctgctcttcttttcctcccaagctcttagtcataccgtgtcatcatctgtttatttgagggattctttgacaactacatgctctt

SEQ ID NO: 91622 - DNA, 120 bp, synthetic construct
  source 1..120: mol_type = other DNA
agtaacttgcccaaggccacatctctggtagtgagcggaactgggtccccagcctaggtccaatgcccaatctattccttccaagaggacatagaaaagaattcagatacaaagagtgaa

SEQ ID NO: 91623 - DNA, 120 bp, synthetic construct
  source 1..120: mol_type = other DNA
gaggaatcccaccccatgtatcaggaagctggctgatgatctcagccaagtatctaagaataaacccagttgaagtaattcacactaaagtgtaaatgactgatatgtttagatcagcac

SEQ ID NO: 91624 - DNA, 120 bp, synthetic construct
  source 1..120: mol_type = other DNA
agagaagcctgggcaacatagcaagatcccatctcttaagacagagaagaattggcgtttgtcattggggggatatagggggaagggtccctttgctaaatgctctacatgaattatttc

SEQ ID NO: 91625 - DNA, 120 bp, synthetic construct
  source 1..120: mol_type = other DNA
ggctaacgtcagaaccttgcttgacttcattctaaagtgaaggggttggattctgattaaagcaagagaaaggagagaaatttttggatgtaggaaaccacttgcgtaggtggtcatgaa

SEQ ID NO: 91626 - DNA, 120 bp, synthetic construct
  source 1..120: mol_type = other DNA
gctggcttcatgagtgtgacctgtaccgtctcacagggaccaccctgtgcttcatactctaatgttgccatctggaaattcttcctaattctttataaacgctctgcattttttttcttt

SEQ ID NO: 91627 - DNA, 120 bp, synthetic construct
  source 1..120: mol_type = other DNA
cttgtatgatttttttttttttttttttgagacaagatctcactctgtggcccaggctggagtgcagtgatgcaatcatagctcactgcagctgagaattcctaggctcaagtgatactc

SEQ ID NO: 91628 - DNA, 120 bp, synthetic construct
  source 1..120: mol_type = other DNA
tcccactgtttaagctaggagttagcaaactctttttgtaaaaggtcagacagtaaatattttagactttgagggtcacgcattctttgtcacatctgctcagctctccactgcagcaca

SEQ ID NO: 91629 - DNA, 120 bp, synthetic construct
  source 1..120: mol_type = other DNA
cctcccgcctcggcctctcaaggccctgagtttccaggcataagccaccacacccagccaattttcagtttcttttcttttcttttttttttttttttttttttgagacagagtctcgct

SEQ ID NO: 91630 - DNA, 120 bp, synthetic construct
  source 1..120: mol_type = other DNA
ccaagtccttgctaacgctgcattccaggagatggagatacacaatagccaagtaaacaaataatcaagatagttcgtggtggagatatcattgctacatctgggtgatgtgactgagaa

SEQ ID NO: 91631 - DNA, 120 bp, synthetic construct
  source 1..120: mol_type = other DNA
cagagtgagactctgtctcaacaaaaaaatcaacaacaacaacaaactgcaggatgggccaggctcagcggctcatgcctgtaatcccagcacttgggaggccgaggctccccgggtcac

SEQ ID NO: 91632 - DNA, 120 bp, synthetic construct
  source 1..120: mol_type = other DNA
ttaagagctcaattaagtgaacttttaagtgaactttgtgctcatcacaaagttcttttggatagcaccgttttagatgaaacagcacctgctgatggcatgggtgctggaaatgagagc

SEQ ID NO: 91633 - DNA, 120 bp, synthetic construct
  source 1..120: mol_type = other DNA
gagccaagtccatcacagggagttattctggttagataaatactccaaacttgcacagctgggctccttagtccaatgtgattacttctccttccatcccaacttttgttttttcctgga

SEQ ID NO: 91634 - DNA, 120 bp, synthetic construct
  source 1..120: mol_type = other DNA
tgctcaagtgttggctcatgtttccaagcacaataaagttgtgatacccattatgtaataaatacacatcagataaacttcatccaggcatcagccacagagctgctggctgtgagttca

SEQ ID NO: 91635 - DNA, 120 bp, synthetic construct
  source 1..120: mol_type = other DNA
aaacgcagatgttggatctatacagattggggtcccccttagccacttctccgctctgtggccttgggcaaatattcttaaactccatgcctcagttccttcatctgtaatatagtattg

SEQ ID NO: 91636 - DNA, 120 bp, synthetic construct
  source 1..120: mol_type = other DNA
tatctctagtactggcacatagatggtaggtgctgaattatgcttgttagatggatggattgagggatggatgagtagatggatgggaagatgagtggacggaaggaaggaagaaaggaa

SEQ ID NO: 91637 - DNA, 120 bp, synthetic construct
  source 1..120: mol_type = other DNA
cctcggattatagatggatgtttgggtggcctggttgaacgaaatcctcaagacaaaaggcctaaagactagtcagctctggggtttcaattctggtgtgtttatataatggcacattta

SEQ ID NO: 91638 - DNA, 120 bp, synthetic construct
  source 1..120: mol_type = other DNA
ttgcagtgaggtgagatcatgccactacactccagcctgggcaacagagcgagactccaaaaacaaaacaaaacaaacaaaaaaaaccaacaaacaggcctgagcctgaagtattgagaa

SEQ ID NO: 91639 - DNA, 120 bp, synthetic construct
  source 1..120: mol_type = other DNA
ccactgtatcccacctgtgattttatttagaataagggtcttgcagatgtaattaagggaaggatgttgagatgaggtcatcctggcttggagtgagacctaaatcaatggtgtccctat

SEQ ID NO: 91640 - DNA, 120 bp, synthetic construct
  source 1..120: mol_type = other DNA
ttaaggaaagattttgagatggacagacagatgggctgtgttgatccactacttcagggagagaggcaggctttcctggcagccttgtgaatcctaggcccagagcaggagagatttata

SEQ ID NO: 91641 - DNA, 120 bp, synthetic construct
  source 1..120: mol_type = other DNA
gaaaccctctacccgttaagcagccactcccccataagcccttgcaaccgccaatttgctttctgtctctatggtcttacctattctagatatttttgcataaatggaattataacatgt

SEQ ID NO: 91642 - DNA, 120 bp, synthetic construct
  source 1..120: mol_type = other DNA
gacaatggcttgagcccaggaggtggaggttgtagtaagccacgactgcaccacggtactccagctggggtgacagagacagaccctgtcttaaaaaatatataaatagtatgaatccat

SEQ ID NO: 91643 - DNA, 120 bp, synthetic construct
  source 1..120: mol_type = other DNA
ccacttcatgcagctctattaggtttccaacaattacaaaattgttcattttcaatgcttttcccctgaaccaatgagctcctgaaggtacaaggaacaatgcctgacacacagtaggtg

SEQ ID NO: 91644 - DNA, 120 bp, synthetic construct
  source 1..120: mol_type = other DNA
gaccactgaacagcattaagaaaaatgtgaaagaatctcctggggagaggtcgaggcagagcatcccaagcagagggcctgggacagaagctccaaagtgggcggggacacagtaccgag

SEQ ID NO: 91645 - DNA, 120 bp, synthetic construct
  source 1..120: mol_type = other DNA
actctactctcccggcagagttggttaggatgacatgctgagtaagaagagatactttgagagcctttgctgcaacccaacaggtgttttccaaacctacaggaagccctggtattgtaa

SEQ ID NO: 91646 - DNA, 120 bp, synthetic construct
  source 1..120: mol_type = other DNA
caacataatgagacctcatctctacaaaaaatcaaaaaattagccaggcgtgatgatctgtgcctgtggtcccagctacttgggaggctgagaggggaggatcacttgagcccaggagtt

SEQ ID NO: 91647 - DNA, 120 bp, synthetic construct
  source 1..120: mol_type = other DNA
aataaaataaagataaaaacgtgaacttttcatgattagtcagagcaccaaacagacactcctagcacctctgtaaagactgagccagccagacagagccattcattcccacacacagtc

SEQ ID NO: 91648 - DNA, 120 bp, synthetic construct
  source 1..120: mol_type = other DNA
tcagtttcctcttccgttatatggggacaagaatactacactatctataccacgctacccaggagggaagagtaacattctgagggcagcgaagctgggtccccaggtttgactctcagt

SEQ ID NO: 91649 - DNA, 120 bp, synthetic construct
  source 1..120: mol_type = other DNA
ctccggctttggagtcaggataatccaagtgtatatttggctctgacacttaacaaatctgcagcaagttctccactcctctgagtctgttttcccagctgtaaaagggagctaataata

SEQ ID NO: 91650 - DNA, 120 bp, synthetic construct
  source 1..120: mol_type = other DNA
tccagcctgggtgacaggggtgaaactctgtctcaaaacaaacaaacaaaaaacagttgtttttttttaattagctgagcatggtggtacatctctgtagtctcagctacttgggaagct

SEQ ID NO: 91651 - DNA, 120 bp, synthetic construct
  source 1..120: mol_type = other DNA
cagtgagcagagatcgtgcactccagcttgcgcgacaagagggaaactccatcccccaaaaaaaaacaaacaaaccaaaaagtgtaaaaatacatgaggcagtttaaaaagaactagaga

SEQ ID NO: 91652 - DNA, 120 bp, synthetic construct
  source 1..120: mol_type = other DNA
tgctttcatattatagccaagcacatcagcaagcccatcctataagcactgagcttccatcaacaatttggtatcctgtgtactaaagcatccaagatgaatggatagccaagaatccca

SEQ ID NO: 91653 - DNA, 120 bp, synthetic construct
  source 1..120: mol_type = other DNA
caatgcctcaagatcacgtacattctttcttgggaagctactggacaaagtgcttgatttaagcaggagagtaaagcaagaaagaggaagacatgaaaactgggaaacaaggaatccact

SEQ ID NO: 91654 - DNA, 120 bp, synthetic construct
  source 1..120: mol_type = other DNA
acactagaaaccataattgtctcttgggagggaagctaagggtctaatgcacaagggttgaagggagaagttcaccttttgaatttgtatgtaacatctttccaaaaacaaaccacggcc

SEQ ID NO: 91655 - DNA, 120 bp, synthetic construct
  source 1..120: mol_type = other DNA
gcaccagaaaatgtgctggagatacaatgatgcacatgcaagaaggatggagtttataggtcctcaggaacttactgtctatgtgacacaactgcaatgcttcatcttatattcagtgca

SEQ ID NO: 91656 - DNA, 120 bp, synthetic construct
  source 1..120: mol_type = other DNA
gtttatcttttatggatgtgcatattcacggttttcattttctttctttctttcgtgacagggtcttactctgttgccaaggctggagtaccatagcacgatcatagcacactgcattct

SEQ ID NO: 91657 - DNA, 120 bp, synthetic construct
  source 1..120: mol_type = other DNA
atatgacaatgtaatcatagaaataaagtgcacaataaatgtaatgcgctcgaatcatcccgaaccatctctcccctgcggtccatggaaaaactgacttctatgaaactggtccctggt

SEQ ID NO: 91658 - DNA, 120 bp, synthetic construct
  source 1..120: mol_type = other DNA
actggtgacccatcaaataaatctgtaagaatgatcctttttagctcgggctgcagaagtcaagcatgacatgaagatgtcgttttatgctcacatgatttcatccctcagcccagaaaa

SEQ ID NO: 91659 - DNA, 120 bp, synthetic construct
  source 1..120: mol_type = other DNA
aattttctttctttttggtatttagattaaaatgtgcttagtgggacctcagctccagaaaagaaccaggaattgctgggtatggtggcttatgcctgtaatcccagcactttgggaggc

SEQ ID NO: 91660 - DNA, 120 bp, synthetic construct
  source 1..120: mol_type = other DNA
aaacaaaacaaaaacaaaacaaaaaaacccacctttttaaaattagcttgacatgacagtccacacctatagtcccagctacttgggaggctgaggcaggagaattgcttgagcccagga

SEQ ID NO: 91661 - DNA, 120 bp, synthetic construct
  source 1..120: mol_type = other DNA
acttccagacctcctccagggtagacagattgcacagaagcactcaatattctcatgttagagatggggaaactggagcttggagtcttagtggaaaccctgggcctcactgatattcca

SEQ ID NO: 91662 - DNA, 120 bp, synthetic construct
  source 1..120: mol_type = other DNA
agtaggtggtaccacaggtgtgcacaaccatgcccaggtaatttttattttgttttttgtagagacagggtttcaccatattgcccaggctggtctcgaactcctgagctgaggtgatgc

SEQ ID NO: 91663 - DNA, 120 bp, synthetic construct
  source 1..120: mol_type = other DNA
taatagtgagctatgattgtaccattgcactctagcccctgggtgacagagcaagaccctgtcttgaaattgatagctgtacaacattgtgaatgcacttaatggcactgttttctttaa

SEQ ID NO: 91664 - DNA, 120 bp, synthetic construct
  source 1..120: mol_type = other DNA
tctcaaaaaagaaaaagaaagaaaaagagagagtgggaaggtccttccagggctcagtccactcagggacaatggtatgtaatgtctgggggtgctgcagaggaatattctttgaaggta

SEQ ID NO: 91665 - DNA, 120 bp, synthetic construct
  source 1..120: mol_type = other DNA
agtgccttgagtccggggaaccccctttctcctcttcagtcccagcacaggccttggtatagaataggtgctaactaaatgcttgctaaatgcatgccaggggaataaattaatgataca

SEQ ID NO: 91666 - DNA, 120 bp, synthetic construct
  source 1..120: mol_type = other DNA
agtgagctgagatcatggtgctgcactccagcctgggcaacagagtgagactctaaaaaaaaaaaaaaaagaaggaaggaaggaaggaaagtaagaaagaaaggaagaaagagagatgag

SEQ ID NO: 91667 - DNA, 120 bp, synthetic construct
  source 1..120: mol_type = other DNA
atctcatgggccctgtgccaccagcaagtcccagctgcaggcccaggatttccctcttgtgaccgtattaggaagcagctccagtttttctctgacgctttatatggtcagccacagagc

SEQ ID NO: 91668 - DNA, 120 bp, synthetic construct
  source 1..120: mol_type = other DNA
gatcacttgaggtcaggagttcaagaccagcctggctaacatggcaaaaacccatctttacaaaaaatacaaaaattatctgggtgtggtgatgcacacctgtaatcccagctactcagg

SEQ ID NO: 91669 - DNA, 120 bp, synthetic construct
  source 1..120: mol_type = other DNA
tattctcctgaggtctttgcatagattatccttgtattactggaggaggttctttgaagcaataatgacttgaaagatcagaaggctgggtgcagtggctcatgcctgtaatcccagcac

SEQ ID NO: 91670 - DNA, 120 bp, synthetic construct
  source 1..120: mol_type = other DNA
gtaatcattagtctagcacctagttaggtgctcaaggaatcataataaaaggttcaattccttcttgctctgcacttaaagcttgtctacctcaaagctaacaaggcctctggcactgtc

SEQ ID NO: 91671 - DNA, 120 bp, synthetic construct
  source 1..120: mol_type = other DNA
tcttcagcagtttaggtagactgctggacattgctgagcccagaacctgcatctctaagattaggaggaaagctcctctggcttctatagactcttctagatccaagagcacaagaggtc

SEQ ID NO: 91672 - DNA, 120 bp, synthetic construct
  source 1..120: mol_type = other DNA
gtccaccatacaaacagccccagatcaataatttttccatacaaacagtgccacagacaagagacttcccctacttaagaaagtaaagatacattttgcaacactgcacctcagcttcct

SEQ ID NO: 91673 - DNA, 120 bp, synthetic construct
  source 1..120: mol_type = other DNA
gatgccaagtgatggaagaagaacatcttactagtaaaatcaaaagtgatcatgaccacagcaaaaaccaatctagtaacacttaacattttcagtgcctgcacttaacatgtagcagga

SEQ ID NO: 91674 - DNA, 120 bp, synthetic construct
  source 1..120: mol_type = other DNA
atgtatttatttagagatgaagttttgctcttattgcccaagctggagtacaataacgcgattttggctcactgcaacctccatctcccaggttcaagcgattctcctgcctcggcctcc

SEQ ID NO: 91675 - DNA, 120 bp, synthetic construct
  source 1..120: mol_type = other DNA
caagggctgagatgtgaacccaccttggaatgattccacctcatcttgcaatctccctcgatcaaaccttcagcctcccatttcctttttttttttttttgagacagagtcttattctgt

SEQ ID NO: 91676 - DNA, 120 bp, synthetic construct
  source 1..120: mol_type = other DNA
aaagggatgtgtgtcatcgcctaaaataccaaaagtcagacaacccaaatgtccaccaacatacagctggatacataagccatgctatttccacactgtgaaatactacccagtgctcag

SEQ ID NO: 91677 - DNA, 120 bp, synthetic construct
  source 1..120: mol_type = other DNA
tctattactccttcaatacgaaaaactattaggctggtgcaaacgtaagtgtggttattgagatagaaggtaatggcggccgggcgcggtggctcacgcctgtaatctcagcaccttggg

SEQ ID NO: 91678 - DNA, 120 bp, synthetic construct
  source 1..120: mol_type = other DNA
aggcaccacctttcggggtgataaaagtattccctgtggtcatggtggtgcttacaagactgtatacatttgtcaaaactcattaagaatgttctatccactataggatgagtaaagtga

SEQ ID NO: 91679 - DNA, 120 bp, synthetic construct
  source 1..120: mol_type = other DNA
atttaaatgcatttgttcaaaatgatttttgttgttgttgtttgagatggagtcttgctctgttgtctatgctggagggcagtggtgcaatcttggctcactgcaacctctgcctctggg

SEQ ID NO: 91680 - DNA, 120 bp, synthetic construct
  source 1..120: mol_type = other DNA
acctatttttttcctttcagggctgaaaataataattaaaaaactaattttaagaacctgctgctgggtgcagtggctcatgcctgtaatcccagcactttgggaggccaaggccggtgg

SEQ ID NO: 91681 - DNA, 120 bp, synthetic construct
  source 1..120: mol_type = other DNA
tattgaatttggcttagctcatagtaagaccaacagtgtcctgcccctgactccagttaccctatcttaaaaaagactcccttctacatggaagaattccagcgaatacatgcagaacaa

SEQ ID NO: 91682 - DNA, 120 bp, synthetic construct
  source 1..120: mol_type = other DNA
caccacaagactgactatatcagatgaagagctcttgtggaatttttaagggatgggtccgcctgccatcacctaaatctactaattaaccctaacatcacaaaaagagagagctgacta

SEQ ID NO: 91683 - DNA, 120 bp, synthetic construct
  source 1..120: mol_type = other DNA
agtcatgtaaagacacccagactttgcaatcagatgctaattcaaacgtgactctgccactgcagaatgcgtgcttctgggtgacttacgtagatctgagactcagatttactgtatatt

SEQ ID NO: 91684 - DNA, 120 bp, synthetic construct
  source 1..120: mol_type = other DNA
caacattgtgaaaccctgtctctactaaaaatacaaaaattaaaaattagccaggattggtggtacgtgcctgtagccccagctacttgggaggctgagtcaggagaatcacttgaaccc

SEQ ID NO: 91685 - DNA, 120 bp, synthetic construct
  source 1..120: mol_type = other DNA
tgatcatgccactgcactgcagcctgggtgacagagtgagacccccatctataaaaaatatatcctcttgaaaattcatcaagctgcacacttttttgcacatcaagcgtacttttttgg

SEQ ID NO: 91686 - DNA, 120 bp, synthetic construct
  source 1..120: mol_type = other DNA
gttacgacgtgcaaaatctgctttggtcaaaagacagcaagatgggggatgagaagcttcgactcatgctagaatggtgttttccatagcatgccccttggaaccctaattccctgaaat

SEQ ID NO: 91687 - DNA, 120 bp, synthetic construct
  source 1..120: mol_type = other DNA
cttccagttgagaaccacagctttagaataaaaacaagggctgtcttgggaaaggcagttaaagctgagagcagctctcacttagtcaaactcaactcggaataccaactgcagaagatc

SEQ ID NO: 91688 - DNA, 120 bp, synthetic construct
  source 1..120: mol_type = other DNA
tgtatttttcatttagggaaaataaatcaatggtaggctggcccagctctaccattttatgggacccgtctgtgactcccagtcaaagggctgaaactggaccaactgagaatgtcaggt

SEQ ID NO: 91689 - DNA, 120 bp, synthetic construct
  source 1..120: mol_type = other DNA
aagaaaaattgctcatattctaaatgtcataaagggctggatacagtggttcacacctgtaatccaagaactatgggaggccaagccaagaggattgcttgaattaggagctctagacta

SEQ ID NO: 91690 - DNA, 120 bp, synthetic construct
  source 1..120: mol_type = other DNA
actgtgttttatattttacaattctggcataccacagcttaaaataaatgtatagtctcctatgtcaggggtccccaacccttgtgctgcagtatcagtcaatggcctgttaggaaccag

SEQ ID NO: 91691 - DNA, 120 bp, synthetic construct
  source 1..120: mol_type = other DNA
tataattagacaaaaagtccaaggatgaaagagtggcattatctattattcccattttcctgctaagcctatcggggtcttgaaaggtaaatgcaaggccctcccttgcaaaagttgggg

SEQ ID NO: 91692 - DNA, 120 bp, synthetic construct
  source 1..120: mol_type = other DNA
ggctcacgcctgtaatctgagcactttgggagaccaagccaggcgaatcacttgaggtcagcggttcgagaccagcctggccaatatggtgaaaccccatctctactaaaaatacaaaaa

SEQ ID NO: 91693 - DNA, 120 bp, synthetic construct; identical to SEQ ID NO: 16117
  source 1..120: mol_type = other DNA

SEQ ID NO: 91694 - DNA, 120 bp, synthetic construct; identical to SEQ ID NO: 16118
  source 1..120: mol_type = other DNA

SEQ ID NO: 91695 - DNA, 120 bp, synthetic construct
  source 1..120: mol_type = other DNA
acggtcaaatccacaaggagcctcactttgcccttctgtgtgatagcaagtgacttttcagtgaagttcagctgtaaattttttggtgcctagaataaaagtgagatgccttgattgtct

SEQ ID NO: 91696 - DNA, 120 bp, synthetic construct; identical to SEQ ID NO: 19907
  source 1..120: mol_type = other DNA

SEQ ID NO: 91697 - DNA, 120 bp, synthetic construct
  source 1..120: mol_type = other DNA
gagtctgagggaggaggggctgggggcctgaacctctgggtctgagggaggaggggctggggccctggattcttgagtctgagggaggaggggctggggacctggactcttgagtctggg

SEQ ID NO: 91698 - DNA, 120 bp, synthetic construct
  source 1..120: mol_type = other DNA
caccaaacagcatgttttgacagcagctctgtctcagtgctgcattagtttgcttaggctaacaaagtaccacaaacctagtgcctaaaacaacagaaattgattgtcttgtggttctgg

SEQ ID NO: 91699 - DNA, 120 bp, synthetic construct
  source 1..120: mol_type = other DNA
tgcatgcatatgtgtgcatgcgtgtgtgtgcaagtgtgtgtgcatgcacgtgtgtgcgtgtgtgtgtgcatgcatatgtgtgcatgcgtgtgtgtgcatgtgtgtgtgtgcatgcgtttg

SEQ ID NO: 91700 - DNA, 120 bp, synthetic construct
  source 1..120: mol_type = other DNA
gtccaggcttcttggttctgcagtccctgaggggccctgtgggcagggcaggccctgttcagagtaagactggcaacacagaggctggacttagccgcagggtgaccagctgtcctagtg

SEQ ID NO: 91701 - DNA, 120 bp, synthetic construct; identical to SEQ ID NO: 24518
  source 1..120: mol_type = other DNA

SEQ ID NO: 91702 - DNA, 120 bp, synthetic construct
  source 1..120: mol_type = other DNA
gtttggcactcatatttattacaggttggcaagagtgaggttcccgaggcagtgtcactcctcatcgtgcattttttgctgcaaaaagaataagaggtgtgagggggcagctggcaagag

SEQ ID NO: 91703 - DNA, 120 bp, synthetic construct
  source 1..120: mol_type = other DNA
ggtgcctttgttaattcagaacacctgacagctctgagcataccagatgtgtcaaacaaatgtttgagagttaaagtttatagcaaactctttgtccaggcccctctgtaggagatattc

SEQ ID NO: 91704 - DNA, 120 bp, synthetic construct
  source 1..120: mol_type = other DNA
ttctatggaagatttccgggtcttttcccctcccctgactcttatccccacagtcgaaggtggaaggattctttgaactgttctgaagtcttcatggtagcacttagagttattaaaaaa

SEQ ID NO: 91705 - DNA, 120 bp, synthetic construct
  source 1..120: mol_type = other DNA
tgtatctaagattactaaactctgaaaaaagacttcaaatagcaaaaggtctgcagtattaccctggagctctttagcaacatgtttacgtaggagcatgacaatattccaaggaagatg

SEQ ID NO: 91706 - DNA, 120 bp, synthetic construct
  source 1..120: mol_type = other DNA
gaggaatctggtgcctgtatccagacaccactgcttctccaggccacatggaggccagtcccctgaggggacctcccgcccccatgtaccttcagcaagctctggaggctcttgacttgc

SEQ ID NO: 91707 - DNA, 120 bp, synthetic construct
  source 1..120: mol_type = other DNA
acactcctacccactgtctaagtggttattattatggccagattccaacttttaaaacctggtgggaaacaaaacctttggcctctaatcagactgacattttcctttgtgcagaccttg

SEQ ID NO: 91708 - DNA, 120 bp, synthetic construct
  source 1..120: mol_type = other DNA
ctcagccgcatgtccaagatctgtccctggtcccgagcctgggcttagccctcctcctccacctccaaggaggttgcctttggcctctcactgaacccctcatgcccccttgccctgcat

SEQ ID NO: 91709 - DNA, 120 bp, synthetic construct
  source 1..120: mol_type = other DNA
tctcttcttatgtagtacttcaaccaagcccagccttattcaccatgtgggctgatgtggcacctcactgtttgaggagtttcccagtctgctcaccccatccccttacgaataagaaaa

SEQ ID NO: 91710 - DNA, 120 bp, synthetic construct
  source 1..120: mol_type = other DNA
gcagagcctgccttggccttgatgatctgctccatgttggaggtgacgtcatccagctccagcttgaactcgctcttctccttctccagcttctgcttcacccgctgcaggttgtcgatc

SEQ ID NO: 91711 - DNA, 120 bp, synthetic construct
  source 1..120: mol_type = other DNA
cctcttcacctcatctccttatcctctttaagtgcccttacctcattttttgggccttagccttggtcttgactaaattgggagaatatcgtatctaccattttgatctgttgtctggct

SEQ ID NO: 91712 - DNA, 120 bp, synthetic construct
  source 1..120: mol_type = other DNA
tagttgacaaaatggtttcaaatacattatcccctctggtcctgtgtggtaggtattgtcagtctcattttacaggtgagaagagaatctgaggatcagggagggtaagtgacttgctca

SEQ ID NO: 91713 - DNA, 120 bp, synthetic construct
  source 1..120: mol_type = other DNA
gtggaaaacatgaaatccatagtgtatgctcttttgcctccttctaaacttgaagtccagtgggattggaagtcaaaccaacagagaaatcctgcaagcacaaaggattcagagacctac

SEQ ID NO: 91714 - DNA, 120 bp, synthetic construct
  source 1..120: mol_type = other DNA
ttcctgggagaagagaacagggaggaagctgatggttaaagagaggagacctagggtcttaaaaagagctggcactcctagactcccagtccctggttgtgagatgggctataatctagg

SEQ ID NO: 91715 - DNA, 120 bp, synthetic construct
  source 1..120: mol_type = other DNA
tcctttccttgctttttcaaaaattactttaaccacatatgaatgtatctttatttttattttactttatttattttgagatggagtttcactcttgttgcccaggctggagtgcaatgg

SEQ ID NO: 91716 - DNA, 120 bp, synthetic construct
  source 1..120: mol_type = other DNA
ccgcgcctggcctgcagctgttcaactttaaaagatagtgataaactgttttcctaggaagttgcactaatttacacatctgtaagcagtgggtcaggcttcttaatttttgtcagtcta

SEQ ID NO: 91717 - DNA, 120 bp, synthetic construct
  source 1..120: mol_type = other DNA
gaattaggcttctgcctcctaaactcctctctgctccactcaacatggccacctgccctgcaaccacccagtggggctctagactcaccttggtgtggccaaacttgtactggttgtgat

SEQ ID NO: 91718 - DNA, 120 bp, synthetic construct
  source 1..120: mol_type = other DNA
gcagagctctgctgctcgcttggtagctctgagactttgggcaaggaattctccaagattcagtttaccatgaggatgacagtaacaacttcccaaagttgtaaagaggattagataaga

SEQ ID NO: 91719 - DNA, 120 bp, synthetic construct
  source 1..120: mol_type = other DNA
aggatccttgtttttttccagccagcccaggatgttgtagtccacagtgccggcgtagtggatcagggagaagtgggcttcctgcttccccttgatgttgcgtggcttctggaaattgtt

SEQ ID NO: 91720 - DNA, 120 bp, synthetic construct
  source 1..120: mol_type = other DNA
gaatgtacacatgcttttttccacacacagttttatggcattctgagggctctgaaacatgagaactctggttaagaatctggataatgacccaaagcatgtggggaagctcccatttca

SEQ ID NO: 91721 - DNA, 120 bp, synthetic construct
  source 1..120: mol_type = other DNA
gagctgctcaaagctgttgaactgcagggggcatgaggggtgggagcagtcagaaagtgggtgtgagtggccattggggctgtgcccgtgcactgtgccgagcccagcagggtatggctg

SEQ ID NO: 91722 - DNA, 120 bp, synthetic construct
  source 1..120: mol_type = other DNA
agcatcaggtccaatttcttttccttaaagaggaagaaatcaaggcctggaagagcacagggcttgccttggttactcaaccaacgtgtgcctgagtcaggctggagcacagccccctta

SEQ ID NO: 91723 - DNA, 120 bp, synthetic construct
  source 1..120: mol_type = other DNA
aaaattccccacctcagttctggtgagtgcagctggggttgaggagttgggattgtggtggactctctgtctgcccacgtctcccacgtccctgtccctcaccatcccacaacacacccc

SEQ ID NO: 91724 - DNA, 120 bp, synthetic construct
  source 1..120: mol_type = other DNA
gcaggagtcgttggggtgtgcagcagggacagcagtgggtggggggtggcaggcaggttcacccagcaactccggcttcttgttggacagaatctggtagaagatgtggtagtttctctc

SEQ ID NO: 91725 - DNA, 120 bp, synthetic construct
  source 1..120: mol_type = other DNA
aaagccagatacagtacaatcaactgggtgtggcaaaacagcaccccctttttcttgtcaaggctggatgaggccactgggagtggtcaaaggcactcacaaagcgggaggagttgtcgt

SEQ ID NO: 91726 - DNA, 120 bp, synthetic construct
  source 1..120: mol_type = other DNA
gaagcaatggggtcagggctgaggatctgggtgggtgtctgggaggaggagcagagaccaggggccaccaggctcacctgtcagcatgtactgataggcgttgtcggagatggagaagat

SEQ ID NO: 91727 - DNA, 120 bp, synthetic construct
  source 1..120: mol_type = other DNA
ttcacccatctactccacactccccatccatcactgttggtgtggtttgattggcagcagtcagtttgccatgccctgatgtcattagatcctgccagtaggtattccagtgttttttat

SEQ ID NO: 91728 - DNA, 120 bp, synthetic construct
  source 1..120: mol_type = other DNA
tactcaccttcccattctcggtttcagcaatgaccttgcctccctcccgggacaaaatcttggctttgacaaactcttccttgtcatcgggcacgaagcactcagtgcgaatgtcaaagg

SEQ ID NO: 91729 - DNA, 120 bp, synthetic construct
  source 1..120: mol_type = other DNA
agccatccaaaggaggaaggaagatggaaagatggagacaacatgtaggagactcagaatgatgcagagaaagaaatggagagtcagagaaggagaaaagaggtttctgggtttcctgtg

SEQ ID NO: 91730 - DNA, 120 bp, synthetic construct
  source 1..120: mol_type = other DNA
ctgggatgtccattttaggtttgagttacaagattgcaggacaaaattaggtggaagggaactggaaactagcagttggggggaaactgggatatactggttgtatataaattagggtct

SEQ ID NO: 91731 - DNA, 120 bp, synthetic construct
  source 1..120: mol_type = other DNA
acagtcatagaaggtagcatcccctccgccctgccctgcttcatctgatatcctgacccaattctactttctgatcctcactaaacacttgaattctccttataatttcttaccaaatat

SEQ ID NO: 91732 - DNA, 120 bp, synthetic construct
  source 1..120: mol_type = other DNA
gtgctgcaggtccttaatggtctgttccatgttcttcttcatgcgctccaggtgggcgctggtgtcctgctccttcttcagctcctctgccatcatggcggcctgtgtgcaggagagagg

SEQ ID NO: 91733 - DNA, 120 bp, synthetic construct
  source 1..120: mol_type = other DNA
agggaggtctgcagcgagtccaccacccgctggtggttgcgcttggcctgttccatctcctcgtccttctctgccagcttccgctcgatctctgccttgatctggttgaactctagctgg

SEQ ID NO: 91734 - DNA, 120 bp, synthetic construct
  source 1..120: mol_type = other DNA
ggcccccagcacaccctgcaggtttttgttctcccgcttgaaggtctccagatgttccagggactcctcataggcgttcttgagtttgaagagctctgtgctgagggagcgagcctcctt

SEQ ID NO: 91735 - DNA, 120 bp, synthetic construct
  source 1..120: mol_type = other DNA
gctgggctgagtcctgcctgcaaaggggcctcagccagaagtcaggctgctcagaactcacttggcctcctcgagctcctcagtccgctgaatggcgtccgtctcatacttggtcctcca

SEQ ID NO: 91736 - DNA, 120 bp, synthetic construct
  source 1..120: mol_type = other DNA
gccttattgctgggaagggaagtgatttgatgcaaggctagtcagtgtgctccttgcttgggccaggtggcccgagtctagcccttaccttaacctcctcctccagctgcctcttgaggt

SEQ ID NO: 91737 - DNA, 120 bp, synthetic construct
  source 1..120: mol_type = other DNA
ggacccctccactggaatccccccggctctaaaaggctctcggcttctctggaacagcaagtcagtttagctcttccagtggagaggtgggaattaaaggatttggggaagatagtttga

SEQ ID NO: 91738 - DNA, 120 bp, synthetic construct
  source 1..120: mol_type = other DNA
tgatggggcctgggctctacaggacattcccatctttggtccttgttttctcataatgtaaaatgagggggtcggactagattgtttcaaaggtcctttttagctctgatggtctttaat

SEQ ID NO: 91739 - DNA, 120 bp, synthetic construct
  source 1..120: mol_type = other DNA
tccaggtccatgcgcaccttcttctcttgctccagggatccttccagctggtagagagaaggagccaggcccagtgaggcaaagcatcctgacttggtgattttgttgttcagttacctc

SEQ ID NO: 91740 - DNA, 120 bp, synthetic construct
  source 1..120: mol_type = other DNA
atcaccacctctgacttttcattccccagctcctttctagaaagatatcagaaaagttaacatcctctaaccctacccccctctaaacataaacacaaacacacacacacacacacacac

SEQ ID NO: 91741 - DNA, 120 bp, synthetic construct
  source 1..120: mol_type = other DNA
acagctttattccctgtctagaggaaattgaggctcaaagatgatgcatggtctgcccaaggtcacaaaataattaagctgtgtatctaggttgaacccaagtagaaagcctgtgctttt

SEQ ID NO: 91742 - DNA, 120 bp, synthetic construct
  source 1..120: mol_type = other DNA
gtggtgctagatgttccactgggaggggtagcatacaggtaagagattttgctaagatgattacaacaggaaaagcatcagaggagtcaatggaaaagagatgtcttcctttaattaatt

SEQ ID NO: 91743 - DNA, 120 bp, synthetic construct
  source 1..120: mol_type = other DNA
ctgcaggtaaatttaaagttgaactaagattctgtcttggacaaccagctatccaaggggttgtagggccactgatgaggtaatgtccatcagagtgccttacacatcaccctcattaca

SEQ ID NO: 91744 - DNA, 120 bp, synthetic construct
  source 1..120: mol_type = other DNA
cctttgcccttctcaatagctgcaggaaggagagtcaacaaaagaagcatcagtgtggggaggtagggtgtgagtaaagaatcacagcccctctttacatccttgctggcatttggcccc

SEQ ID NO: 91745 - DNA, 120 bp, synthetic construct
  source 1..120: mol_type = other DNA
ctatttttatattccccagaagggagaggggctgctattttgtctatggtgttcttgttgggtgtgcagggagaattcaggtggtaaggccaaagaggcaccttctcgatgaggtcaatg

SEQ ID NO: 91746 - DNA, 120 bp, synthetic construct
  source 1..120: mol_type = other DNA
gcctgtaattccagctactcgggaggctgaggcaggagaatcacttgaacccaggatgtggaggtggcagtgagccaagatcgtgccactgcgctccagcctgggcaacagagcaagact

SEQ ID NO: 91747 - DNA, 120 bp, synthetic construct
  source 1..120: mol_type = other DNA
ttcctggtttgatagaacaccagatactggccagtcctgtctcacctcatccattccccagtacaccctgatcacagggcacattctggctctcaggaggtccataccactttaaacaac

SEQ ID NO: 91748 - DNA, 120 bp, synthetic construct
  source 1..120: mol_type = other DNA
ccagatggtctagagcaagggtgagcttaggctgagcctagcagattcatggcactcacaggtctctatgtctgcagatgccaactttcctgttgccccaaaatgaattcgaatgaattt

SEQ ID NO: 91749 - DNA, 120 bp, synthetic construct
  source 1..120: mol_type = other DNA
agaaaatgcagaggtgaagacatggcgataatgagcttctggataaacgcgtgatgagttggagagtgggtgaaggaggtgggagaggaaaaacatgaaggggatggaaagcagaaagga

SEQ ID NO: 91750 - DNA, 120 bp, synthetic construct
  source 1..120: mol_type = other DNA
ttccctccttcctcaagagggttaggagttggtgagtgacagggcaatagtgctcaagagagaaggaaccaggatctcacagggaagacagaagggatattgggaaggagagggctcttt

SEQ ID NO: 91751 - DNA, 120 bp, synthetic construct
  source 1..120: mol_type = other DNA
aaggtggaaagggtggtcagcttctctggtcccatccttcttgtttttcaaaccctattccctttttcctcaagaactagttctaacagcttcctggtgtcaactcaacctgaaccctaa

SEQ ID NO: 91752 - DNA, 120 bp, synthetic construct
  source 1..120: mol_type = other DNA
ttgatatttctgtatcagtcagtgaggtacataccctttctcacattcagactatgcaggcttgtccacacacacacacacacacacacacacacacacaccctgtaatgcatattggtc

SEQ ID NO: 91753 - DNA, 120 bp, synthetic construct; identical to SEQ ID NO: 23776
  source 1..120: mol_type = other DNA

SEQ ID NO: 91754 - DNA, 120 bp, synthetic construct
  source 1..120: mol_type = other DNA
tctgcccggccgccccgtctgagaagtgaggagaccctctgcctggcaaccgccccgtctgagaggtgaggagcccctccgccctgcagccgccccgtctgagaggtgaggagcccctcc

SEQ ID NO: 91755 - DNA, 120 bp, synthetic construct; identical to SEQ ID NO: 23777
  source 1..120: mol_type = other DNA

SEQ ID NO: 91756 - DNA, 120 bp, synthetic construct
  source 1..120: mol_type = other DNA
atacacgacctcctgtttattggaacatggcctctggatggatttccaactgtaggatgtgcggccacgaagtacccatagccacccaggctgcaaagaagatggaggtggataaatggg

SEQ ID NO: 91757 - DNA, 120 bp, synthetic construct
  source 1..120: mol_type = other DNA
cactttccccacattaacatgtcgaatcctcgcaatctcctatgaggtagcttctattattattcccactttacagatgaggaaattgaggtgcagtgaggttaaggagcttgttcaaag

SEQ ID NO: 91758 - DNA, 120 bp, synthetic construct
  source 1..120: mol_type = other DNA
tgtgattattgttattttagatgagtgactttacttccctgggtctcagtttgcctatctgtaaaatggcagttatgccagtccctacctcatagggtggcagagaatgaaatgaggcca

SEQ ID NO: 91759 - DNA, 120 bp, synthetic construct
  source 1..120: mol_type = other DNA
tggggattacaggcatcagccactgcgcccagccaagttgctgttttcattatttttttccaatggtgctttatctcttttaaagttaaccatcttctgccagcccccccgaagaaacat

SEQ ID NO: 91760 - DNA, 120 bp, synthetic construct
  source 1..120: mol_type = other DNA
atgcagatattttcatttttcactcaaatgggaaaggctcatgttgtaaattagcccttcacagttggaggcgggagagacagatcaggatcacctgagggaacttttacaagttaaacc

SEQ ID NO: 91761 - DNA, 120 bp, synthetic construct
  source 1..120: mol_type = other DNA
ccaagagattgggccaaggacttggcaggagtggattctgggatcttcaaagatcattgtaggacctcagattaaaagtcaacaattgaagataatccaacagtttcttcaaaacgtcag

SEQ ID NO: 91762 - DNA, 120 bp, synthetic construct
  source 1..120: mol_type = other DNA
tataactctataaagctatttatttatttatttatttatttttgagaaagagtcttgctatgtcacccaggccgcagtgcagtggtgcaatctcggctcactgtaacctccgcctcccgg

SEQ ID NO: 91763 - DNA, 120 bp, synthetic construct
  source 1..120: mol_type = other DNA
atctcaagttcagatatgacacttgcctcaggaatttctctttccctatgggacacggcattcctgcaatctgaatgttagtgaggacaaaaggtacgactgttcatttcctgtttggaa

SEQ ID NO: 91764 - DNA, 120 bp, synthetic construct
  source 1..120: mol_type = other DNA
cattataaacaaatgtcatatttaaccataggaaatggtttaaatacatgataggaaatgttaatggtgaatttctcaacgaaaaaaatgcaggtgtaatcagtgggcacagaagattat

SEQ ID NO: 91765 - DNA, 120 bp, synthetic construct
  source 1..120: mol_type = other DNA
tccagccacttttgttctgatgcatttcacaaaaagctcagtaatgcacagaaggagaattgattggagggaaagaaaaagtcaggctcactaagccatgatgaatgccaagatgaaatg

SEQ ID NO: 91766 - DNA, 120 bp, synthetic construct
  source 1..120: mol_type = other DNA
aggagggagtgggtgcctacctgggcacgaggtttagctggacatgatgtgcttcacaaatgctggaaagaagaggagagtgagtggcaggagtgcaacatggggaagccatggctggga

SEQ ID NO: 91767 - DNA, 120 bp, synthetic construct
  source 1..120: mol_type = other DNA
gatgtcatcccccttctgtgagctgcaccagcatgcttgctttactctcctcctaagtaacatttctgttgtctgccattgaggctccctaattatgtaactctctccatttcaccaatg

SEQ ID NO: 91768 - DNA, 120 bp, synthetic construct
  source 1..120: mol_type = other DNA
tgggaccataggtgcatgtcaccatgccaagctaaatttttaatttttgtagagatagaatctcactatgttacccaggctggtctcactcctggcctcaagtgatcctcccaaagcatt

SEQ ID NO: 91769 - DNA, 120 bp, synthetic construct
  source 1..120: mol_type = other DNA
ttctggacagatgtaccttaagccacaagccccagtcaggctggctttgcttggggcctggtgggcaggactgtcagcaaaagtgagatgggagggcccagggtggtagaaggagtaagg

SEQ ID NO: 91770 - DNA, 120 bp, synthetic construct
  source 1..120: mol_type = other DNA
ttgctgttctgtttcacagctgaggaaaccacgcctcagagcagcgaagaacttggcaactaaaatggagcagagttgggatttgaacccttgcctcaaaggacatggtaggtgtctctg

SEQ ID NO: 91771 - DNA, 120 bp, synthetic construct
  source 1..120: mol_type = other DNA
cgggagctggagctgccttgggggctgccttggcatcatccttcttgggctctggctttttgggggccattgggggctgtaagtacagagagggatgtggagagaagaatgcagaaagca

SEQ ID NO: 91772 - DNA, 120 bp, synthetic construct; identical to SEQ ID NO: 24617
  source 1..120: mol_type = other DNA

SEQ ID NO: 91773 - DNA, 120 bp, synthetic construct; identical to SEQ ID NO: 24618
  source 1..120: mol_type = other DNA

SEQ ID NO: 91774 - DNA, 120 bp, synthetic construct
  source 1..120: mol_type = other DNA
ggagggtgggggtgggggaggagggggggatggctaatgggtacaaaaaaaaaagaaaaaataagacctactattcgatagcacaacagggtacctatagtcaataataattgtattttt

SEQ ID NO: 91775 - DNA, 120 bp, synthetic construct; identical to SEQ ID NO: 24619
  source 1..120: mol_type = other DNA

SEQ ID NO: 91776 - DNA, 120 bp, synthetic construct; identical to SEQ ID NO: 24620
  source 1..120: mol_type = other DNA

SEQ ID NO: 91777 - DNA, 120 bp, synthetic construct; identical to SEQ ID NO: 24621
  source 1..120: mol_type = other DNA

SEQ ID NO: 91778 - DNA, 120 bp, synthetic construct; identical to SEQ ID NO: 27441
  source 1..120: mol_type = other DNA

SEQ ID NO: 91779 - DNA, 120 bp, synthetic construct; identical to SEQ ID NO: 26337
  source 1..120: mol_type = other DNA

SEQ ID NO: 91780 - DNA, 120 bp, synthetic construct; identical to SEQ ID NO: 26338
  source 1..120: mol_type = other DNA

SEQ ID NO: 91781 - DNA, 120 bp, synthetic construct; identical to SEQ ID NO: 26339
  source 1..120: mol_type = other DNA

SEQ ID NO: 91782 - DNA, 120 bp, synthetic construct
  source 1..120: mol_type = other DNA
ggcgtgagccaccgcacccggcctaatttggaaagatttcaaaggattaaagagacccacaatcttactgaagaatttcttaagagagattcttgaactatcaaaagtcacctctatgtg

SEQ ID NO: 91783 - DNA, 120 bp, synthetic construct
  source 1..120: mol_type = other DNA
gggcggggggcggggggcggttatttttatggaacttttcctgaaggaaacaagggccacaatactgtaacaagatgtttttctaaaaatcacaagttggaataaactgagttactttaa

SEQ ID NO: 91784 - DNA, 120 bp, synthetic construct; identical to SEQ ID NO: 5494
  source 1..120: mol_type = other DNA

SEQ ID NO: 91785 - DNA, 120 bp, synthetic construct
  source 1..120: mol_type = other DNA
caagactccatctaaaaaaaaaagcgggggggggggggggtttcttttctatcacatagtcaggctgcaaaatttccaaaccgttatgctcgcttcccttataaaactgaatgcctttaa

SEQ ID NO: 91786 - DNA, 120 bp, synthetic construct; identical to SEQ ID NO: 13911
  source 1..120: mol_type = other DNA

SEQ ID NO: 91787 - DNA, 120 bp, synthetic construct; identical to SEQ ID NO: 13912
  source 1..120: mol_type = other DNA

SEQ ID NO: 91788 - DNA, 120 bp, synthetic construct
  source 1..120: mol_type = other DNA
cctacaaaggacatgaactcatccgtttttatggctgcatagtattccatggtatataccatgtgtattccatggtatacaccaagaaatgtgccacattttcttaatccagtctatcat

SEQ ID NO: 91789 - DNA, 120 bp, synthetic construct
  source 1..120: mol_type = other DNA
agggacatggatgaagctggaaaccatcattttcagcaaactatcgcaaggacaaaaaactaaacaccacatgttctcactcataggtgggaattgaataatgagaacacatggacacag

SEQ ID NO: 91790 - DNA, 120 bp, synthetic construct; identical to SEQ ID NO: 13914
  source 1..120: mol_type = other DNA

SEQ ID NO: 91791 - DNA, 120 bp, synthetic construct; identical to SEQ ID NO: 13915
  source 1..120: mol_type = other DNA

SEQ ID NO: 91792 - DNA, 120 bp, synthetic construct
  source 1..120: mol_type = other DNA
ggcagtgtgccccttttgaccttaataaaaggataagactcacaatagatttgggaaagctctgaaaaatcacaacctactcatctgacaaagggctaatatccagaatctacaatgaac

SEQ ID NO: 91793 - DNA, 120 bp, synthetic construct; identical to SEQ ID NO: 13916
  source 1..120: mol_type = other DNA

SEQ ID NO: 91794 - DNA, 120 bp, synthetic construct
  source 1..120: mol_type = other DNA
caaaggcatgtagtgaatctcttaaagccatgatgtctagtaaaattacatgttaacaatatgctggaatgacaggtgcattggctcctgtctgtaatcccagcactttgggaagccaag

SEQ ID NO: 91795 - DNA, 120 bp, synthetic construct; identical to SEQ ID NO: 13918
  source 1..120: mol_type = other DNA

SEQ ID NO: 91796 - DNA, 120 bp, synthetic construct; identical to SEQ ID NO: 17844
  source 1..120: mol_type = other DNA

SEQ ID NO: 91797 - DNA, 120 bp, synthetic construct; identical to SEQ ID NO: 17845
  source 1..120: mol_type = other DNA

SEQ ID NO: 91798 - DNA, 120 bp, synthetic construct; identical to SEQ ID NO: 23690
  source 1..120: mol_type = other DNA

SEQ ID NO: 91799 - DNA, 120 bp, synthetic construct; identical to SEQ ID NO: 23691
  source 1..120: mol_type = other DNA

SEQ ID NO: 91800 - DNA, 120 bp, synthetic construct
  source 1..120: mol_type = other DNA
actgaagaataactcctggtgatgcaccaggggtgacattttgagtgggctcagaacctggcagcttcaaatgcaaatttatttgctttctcccaggtgtgagttgatgaatagttgtga

SEQ ID NO: 91801 - DNA, 120 bp, synthetic construct
  source 1..120: mol_type = other DNA
agacctactaggtgctcagcgttctgaatgtgcaggcatcctactgtcagctgagcattataaagatataagggcatcagcgaggctcaactgtgtgttcccatctgcaacgataagcaa

SEQ ID NO: 91802 - DNA, 120 bp, synthetic construct; identical to SEQ ID NO: 23692
  source 1..120: mol_type = other DNA

SEQ ID NO: 91803 - DNA, 120 bp, synthetic construct
  source 1..120: mol_type = other DNA
tctgcccgcctcgcctcccaaagtgctgggattacaggcatgagccaccacgcctggccaagttctttttttaaaaagccacttgcaccaaggggagagaaaaccactgaccgcatgtca

SEQ ID NO: 91804 - DNA, 120 bp, synthetic construct; identical to SEQ ID NO: 21878
  source 1..120: mol_type = other DNA

SEQ ID NO: 91805 - DNA, 120 bp, synthetic construct
  source 1..120: mol_type = other DNA
cccatccccaatgagccgctgggcacacctcccagacggggtcgtggccgggcagaggggctcctcacttcccagtaggggcggccgggcagaagcgcccctcacctcccggatggggcg

SEQ ID NO: 91806 - DNA, 120 bp, synthetic construct
  source 1..120: mol_type = other DNA
caacacagcaaaaccccgtctccaccaaaaaaaaacgaaaaccagtcaggcgtggcggcacgcacctgcaatcgcaggcactcggcaggctgaggcaggagaatcaggcagggaggttgc

SEQ ID NO: 91807 - DNA, 120 bp, synthetic construct
  source 1..120: mol_type = other DNA
ccttactgcattttattttctgccacggcctcaatttccctgtttattgtttatcaccctggaaggcaggatttttgtttgctttgtttgactgctggaattgcagcacctggaatagtc

SEQ ID NO: 91808 - DNA, 120 bp, synthetic construct; identical to SEQ ID NO: 17896
  source 1..120: mol_type = other DNA

SEQ ID NO: 91809 - DNA, 120 bp, synthetic construct; identical to SEQ ID NO: 17897
  source 1..120: mol_type = other DNA

SEQ ID NO: 91810 - DNA, 120 bp, synthetic construct
  source 1..120: mol_type = other DNA
atgtgtgtgttggctgcataaatgtcttcttttgagaagtgtctgttcatatctttctcccacttgttgatggggttgctttttttcttgtaaatttgtttgagttctttgtagattctg

SEQ ID NO: 91811 - DNA, 120 bp, synthetic construct
  source 1..120: mol_type = other DNA
tggtttgttctccttgaagaggtccttcacaacccttgtaagttggattcctaggtattttattctctttgaagcaattgtgaatgggagttcactcatgatttggctctctgtctgtta

SEQ ID NO: 91812 - DNA, 120 bp, synthetic construct; identical to SEQ ID NO: 17898
  source 1..120: mol_type = other DNA

SEQ ID NO: 91813 - DNA, 120 bp, synthetic construct
  source 1..120: mol_type = other DNA
tcaattttgtcttttgttgccattgcttttggtgttttgtacatgaagtccttgcccacgcctatgtcctgaatggtaatgcctaggttttcttctagggtttttatggttttaggtcta

SEQ ID NO: 91814 - DNA, 120 bp, synthetic construct
  source 1..120: mol_type = other DNA
gcggtgagagagggcatccctgtcttgtgccagttttcaaagggaatgcttccagtttttgcccattcagtatgatattggctgtgggtttgtcatagatagctcttattattttgaaat

SEQ ID NO: 91815 - DNA, 120 bp, synthetic construct
  source 1..120: mol_type = other DNA
tgattcttctctctttttttctttattagtcttgctagtggtctatcaattttgttgctcttttcaaaaaaccagctcctggattcattgatttttcgaagggttttttatgtctctatt

SEQ ID NO: 91816 - DNA, 120 bp, synthetic construct
  source 1..120: mol_type = other DNA
tttgagcctatgtgtgtctctgcacgtgagatgggtttcctgaatacagcacactgatgggtcttgactctttatccaatttgccagtctgtgtcttttcattggagcatttagtccatt

SEQ ID NO: 91817 - DNA, 120 bp, synthetic construct
  source 1..120: mol_type = other DNA
ttttcaaagttttcaacttctttgcctttggtttgaatgtcctcccgtagcttagagtaatttgatcgtctgaagccttcttctctcagctcgtcaaagtcattctccatccagctttgt

SEQ ID NO: 91818 - DNA, 120 bp, synthetic construct; identical to SEQ ID NO: 17899
  source 1..120: mol_type = other DNA

SEQ ID NO: 91819 - DNA, 120 bp, synthetic construct; identical to SEQ ID NO: 17900
  source 1..120: mol_type = other DNA

SEQ ID NO: 91820 - DNA, 120 bp, synthetic construct
  source 1..120: mol_type = other DNA
ataagcataggatttttgttcaaaaagtgaaagaaagagacaaaatatgaatgcagggattaggttgtggacatcctttgggggtgatggtggggcataattctgccaaccacaggcagc

SEQ ID NO: 91821 - DNA, 120 bp, synthetic construct
  source 1..120: mol_type = other DNA
acgttgtgcacatgtaccctaaaacttaaagtataataaaaataaataaataaaattagtggttttaaccatgacttttacttggtctggtaaaattatcatggtaaatattcttgtttt

SEQ ID NO: 91822 - DNA, 120 bp, synthetic construct; identical to SEQ ID NO: 17901
  source 1..120: mol_type = other DNA

SEQ ID NO: 91823 - DNA, 120 bp, synthetic construct
  source 1..120: mol_type = other DNA
aaattctcttgggtaactgctttttattctttctctctcaggaagtgcttcccgtaagcattaccaaaacggttctgtcctctttccctcacaaactccaggaaccctagaatggtggct

SEQ ID NO: 91824 - DNA, 120 bp, synthetic construct
  source 1..120: mol_type = other DNA
ctcaacccaactctatgcctactaaactctcacccagcacaggtcaggcatcatcttgctaagaagcctgctctaacagcattacctgagtgcctggctccctgattaaactgaccccta

SEQ ID NO: 91825 - DNA, 120 bp, synthetic construct; identical to SEQ ID NO: 19521
  source 1..120: mol_type = other DNA

SEQ ID NO: 91826 - DNA, 120 bp, synthetic construct
  source 1..120: mol_type = other DNA
taacagagcccttatgagagcatttctttttgtcctttggggagataggtaccttgggtgtttgttttttttgttttgttctgttttattttgttttgagatggaattttgctctgtcac

SEQ ID NO: 91827 - DNA, 120 bp, synthetic construct; identical to SEQ ID NO: 19522
  source 1..120: mol_type = other DNA

SEQ ID NO: 91828 - DNA, 120 bp, synthetic construct; identical to SEQ ID NO: 19523
  source 1..120: mol_type = other DNA

SEQ ID NO: 91829 - DNA, 120 bp, synthetic construct; identical to SEQ ID NO: 19524
  source 1..120: mol_type = other DNA

SEQ ID NO: 91830 - DNA, 120 bp, synthetic construct
  source 1..120: mol_type = other DNA
accactaagcccagctaattttttgtatttttggtagagacggggtttcactgtgttgctcaggctggtcttgaactcctgagttcaagcgaccttcctgcctcgatcttccaaactgct

SEQ ID NO: 91831 - DNA, 120 bp, synthetic construct
  source 1..120: mol_type = other DNA
ttcagaaatatggttcctaaggaaagaaggatgtgtgctaaacgggacattgaacagggttggcaaactttttctgtaaagggccagatagtaagtatcttaggctcacctctttgtagc

SEQ ID NO: 91832 - DNA, 120 bp, synthetic construct; identical to SEQ ID NO: 10162
  source 1..120: mol_type = other DNA

SEQ ID NO: 91833 - DNA, 120 bp, synthetic construct
  source 1..120: mol_type = other DNA
agatccctgaggaatcaccacactatcttccacaatggttgaactagtttacagtcccaccaacagtgtaaaagtgttcctatttctccacatcctctccagcacctgttgtttcctgac

SEQ ID NO: 91834 - DNA, 120 bp, synthetic construct
  source 1..120: mol_type = other DNA
ccaattctgtgaagaaaggcattggtagcttgatggggatggcactgaatctgtaaattaccttgggcagtatggccattttcacaatattgattcttcctacccatgagcatggaatgg

SEQ ID NO: 91835 - DNA, 120 bp, synthetic construct
  source 1..120: mol_type = other DNA
ggattcggtttgccagtattttattgaggatatttgcattgatgttcatcagggatattggtctaaaattctctttttttgttgcatctctgccaggctttggtatcaggatgatgctgg

SEQ ID NO: 91836 - DNA, 120 bp, synthetic construct
  source 1..120: mol_type = other DNA
taaaatcagagcagaactgaagaaaatagagacacaaaaaacccttcaaaaaactaatgaatccaggagctggttttttgaaaggatcaacaaaattgatagactgctagcaagactaat

SEQ ID NO: 91837 - DNA, 120 bp, synthetic construct
  source 1..120: mol_type = other DNA
aaaactctcaataaattagggattgattggacgtgtctcaaaataataagagctatctatgacaaacccacagccaatatcatactgaatgggcaaaaactggaagcattccctttgaaa

SEQ ID NO: 91838 - DNA, 120 bp, synthetic construct
  source 1..120: mol_type = other DNA
tccttacaccttatacaaaaattaattcaagatggattaaagacttaaccattagacctaaaaccataaaaaccctagaagaaaacctaggcattaccattcaggacataggcatgggca

SEQ ID NO: 91839 - DNA, 120 bp, synthetic construct
  source 1..120: mol_type = other DNA
gggagggaggagggatagctttaggagatatacctaatgctaaatgatgagttaatgggtgcagcacaccagcaccagcatggcacatgtatacatatgtaactaacctgcacattgtgc

SEQ ID NO: 91840 - DNA, 120 bp, synthetic construct; identical to SEQ ID NO: 3059
  source 1..120: mol_type = other DNA

SEQ ID NO: 91841 - DNA, 120 bp, synthetic construct
  source 1..120: mol_type = other DNA
tcaggagattgagaccatcctggctaacatggtgaaaccccatctctactaaaagtacaaaaattagccatgcatggtagcgcgcctgtagtctcagctactcgggaggctgaggcagga

SEQ ID NO: 91842 - DNA, 120 bp, synthetic construct; identical to SEQ ID NO: 10164
  source 1..120: mol_type = other DNA

SEQ ID NO: 91843 - DNA, 120 bp, synthetic construct; identical to SEQ ID NO: 10165
  source 1..120: mol_type = other DNA

SEQ ID NO: 91844 - DNA, 120 bp, synthetic construct; identical to SEQ ID NO: 10166
  source 1..120: mol_type = other DNA

SEQ ID NO: 91845 - DNA, 120 bp, synthetic construct
  source 1..120: mol_type = other DNA
gttttccagggctgccataacaaagtaccatagactgagtgatttaaacagcagaaacttactttctcacagttctggaggctagaagttcaagatcaaggtgtcagcaaggttgttttc

SEQ ID NO: 91846 - DNA, 120 bp, synthetic construct
  source 1..120: mol_type = other DNA
aatgtcttcttttgagaagtgtctgttcatatccttcgcccactttttgatggggttgtttgtttttttcttgtaaatttgtttgagttcactgtagattctagatattagccctttgtc

SEQ ID NO: 91847 - DNA, 120 bp, synthetic construct; identical to SEQ ID NO: 21792
  source 1..120: mol_type = other DNA

SEQ ID NO: 91848 - DNA, 120 bp, synthetic construct
  source 1..120: mol_type = other DNA
atttaaggttaatattgttatgtgtgaatttgatcctgtcattatgatgttagctggctattttgctcattagttgatgcagtttcttccgaggatagatggtctttacaatttggcaag

SEQ ID NO: 91849 - DNA, 120 bp, synthetic construct
  source 1..120: mol_type = other DNA
agtcattctccgtccagctttgttctgttgctggtgaggagctgtgttcctttggaagaggagaggcgctctgatttttagaattttctgtttttctgttctgttttttccccatctttg

SEQ ID NO: 91850 - DNA, 120 bp, synthetic construct
  source 1..120: mol_type = other DNA
acagctgggtgcccctctgagacgaagcttcagaggaaggatcaggcagcaacatttgctgttctgcagcctccgctgcttatacccaggcaaacagggtctggagtggacctccaacaa

SEQ ID NO: 91851 - DNA, 120 bp, synthetic construct
  source 1..120: mol_type = other DNA
gtaaagagatgattccaacaagaagagctaactatcctaaatatatacaggagcacccagattcataaagcaagtctgagagacccacaaggagacttagactcccacacaataatagtg

SEQ ID NO: 91852 - DNA, 120 bp, synthetic construct
  source 1..120: mol_type = other DNA
ccttttcaaaaagtaactctaaaagaaacatactattttaaaagttgcctaatagaatggaaatatttatgactttattgttaagtggggggggggggggaggggcggggagccataacc

SEQ ID NO: 91853 - DNA, 120 bp, synthetic construct
  source 1..120: mol_type = other DNA
gatgtgtaagaatgcttgtgatttttgcacacggattttgtatcctgagactgctgaagttgcttatcagcttaaggagatttggggctgagacaatggggttttctaaatatacaatca

SEQ ID NO: 91854 - DNA, 120 bp, synthetic construct
  source 1..120: mol_type = other DNA
ttgggagggtgtatgtgtccaggaatttatccatttcttctagattttctagtttacttgtgtagaggtgtttacagtattctctgatggtagtttgtatctctgtgagatcagtggtga

SEQ ID NO: 91855 - DNA, 120 bp, synthetic construct; identical to SEQ ID NO: 19018
  source 1..120: mol_type = other DNA

SEQ ID NO: 91856 - DNA, 120 bp, synthetic construct; identical to SEQ ID NO: 19019
  source 1..120: mol_type = other DNA

SEQ ID NO: 91857 - DNA, 120 bp, synthetic construct
  source 1..120: mol_type = other DNA
tacagtaaccaaaacagcatggtactggtaccaaaacagagacatagatcaatgggatctatgtctgaggacagagccctcagaaataatgctgcatatctacaaccatctgatctttga

SEQ ID NO: 91858 - DNA, 120 bp, synthetic construct
  source 1..120: mol_type = other DNA
tggtgtggcgattcctcagggatctagaactagaaataccatttgacacggccatcacattactgggtatatacccaaaggattataaatcatgctgctataaagacacatgcacatgta

SEQ ID NO: 91859 - DNA, 120 bp, synthetic construct; identical to SEQ ID NO: 19020
  source 1..120: mol_type = other DNA

SEQ ID NO: 91860 - DNA, 120 bp, synthetic construct
  source 1..120: mol_type = other DNA
cgttgtgcacatgtacccaaaacctttaagtataataataataataataataaagtgtacaaaaaaaaaaacacaaacatttaatgactgttctgctgtgtctcattctctaacagtccc

SEQ ID NO: 91861 - DNA, 120 bp, synthetic construct
  source 1..120: mol_type = other DNA
caatgaactctaacaaatttataagaaaaaaacaaacaaccccatcaaaaagtgggtgaaggatatgaacagacacttctcaaaagaagacatttatgcagccaaaaaacacatgaaaaa

SEQ ID NO: 91862 - DNA, 120 bp, synthetic construct; identical to SEQ ID NO: 19022
  source 1..120: mol_type = other DNA

SEQ ID NO: 91863 - DNA, 120 bp, synthetic construct; identical to SEQ ID NO: 19023
  source 1..120: mol_type = other DNA

SEQ ID NO: 91864 - DNA, 120 bp, synthetic construct; identical to SEQ ID NO: 19024
  source 1..120: mol_type = other DNA

SEQ ID NO: 91865 - DNA, 120 bp, synthetic construct
  source 1..120: mol_type = other DNA
gcatataaacagaaccaaagacaaaaatcacatgattatctcaatagatgcagaaaaggtctttgacaaaattcaacaaccttcatgctaaaaactctcaataaattaggtattgatggg

SEQ ID NO: 91866 - DNA, 120 bp, synthetic construct
  source 1..120: mol_type = other DNA
ccttatacaaaaatcaattcaagatggattaaagacttacatgttagacctaaaaccataaaaaccctagaagaaaacctaggcattaccattcaggacacaggcacgggcaaggacttc

SEQ ID NO: 91867 - DNA, 120 bp, synthetic construct
  source 1..120: mol_type = other DNA
taatgctagatgacaagttagtgggtgcagtgcaccagcacgtcacatgtatacatatgtaactaacctgcacattgtgcacatgtaccctaaaacttaaagtataataataaaaaaaaa

SEQ ID NO: 91868 - DNA, 120 bp, synthetic construct; identical to SEQ ID NO: 15310
  source 1..120: mol_type = other DNA

SEQ ID NO: 91869 - DNA, 120 bp, synthetic construct
  source 1..120: mol_type = other DNA
tgggatgtgaggagcgtctctgcccggccgccccgtctgagaagtgaggagcccctccgcccggcagccgcaccctctgagaagtgaggagtccctccgcccggcagccaccccgtctgg

SEQ ID NO: 91870 - DNA, 120 bp, synthetic construct; identical to SEQ ID NO: 15311
  source 1..120: mol_type = other DNA

SEQ ID NO: 91871 - DNA, 120 bp, synthetic construct; identical to SEQ ID NO: 28092
  source 1..120: mol_type = other DNA

SEQ ID NO: 91872 - DNA, 120 bp, synthetic construct; identical to SEQ ID NO: 28093
  source 1..120: mol_type = other DNA

SEQ ID NO: 91873 - DNA, 120 bp, synthetic construct
  source 1..120: mol_type = other DNA
gttgtttgttttcttgtaaatttgtttgagttcattgtagattctggatattagccctttgtcagatgagtaggttgcgaaaattttctcccattttgtgggttgcctgttcactaggat

SEQ ID NO: 91874 - DNA, 120 bp, synthetic construct
  source 1..120: mol_type = other DNA
ttgtacattgattttgtatcctgagactttgctgaagttgcttagcagcttaaggagattttgggctgagacaatggggttttctagatatacaatcatgtcgtctgcaaacagggacaa

SEQ ID NO: 91875 - DNA, 120 bp, synthetic construct
  source 1..120: mol_type = other DNA
gcgtctatttgattcttctctctttttttctttattagtcttgctagcggtctatcaattttgttgatcctttcaaaaaaccacctcctggattcattaattttttgaagggttttttgt

SEQ ID NO: 91876 - DNA, 120 bp, synthetic construct
  source 1..120: mol_type = other DNA
tcaattcctgggtatccttgttgactttccgtctcgttgatctgtctaatgtggacagtggggtgttaaagtctcccattattaatgtgtgggagtctaagtctctttgtaggtcactca

SEQ ID NO: 91877 - DNA, 120 bp, synthetic construct
  source 1..120: mol_type = other DNA
gaggagtatctttgtggcgttctctgtatttcctgaatctgaatgttggcctgccttgctagattgggtaagttctcctggataatatcctgcagagtgttttccaacttggttccattc

SEQ ID NO: 91878 - DNA, 120 bp, synthetic construct
  source 1..120: mol_type = other DNA
ccacgtaagccaaataatgcaatacattcacctacatatgcacatgcacacgtagatacatgagactcacatgtggacccactgttcatgtcagatgctgatgaaattttgcaaagagga

SEQ ID NO: 91879 - DNA, 120 bp, synthetic construct; identical to SEQ ID NO: 12127
  source 1..120: mol_type = other DNA

SEQ ID NO: 91880 - DNA, 120 bp, synthetic construct; identical to SEQ ID NO: 12128
  source 1..120: mol_type = other DNA

SEQ ID NO: 91881 - DNA, 120 bp, synthetic construct; identical to SEQ ID NO: 21424
  source 1..120: mol_type = other DNA

SEQ ID NO: 91882 - DNA, 120 bp, synthetic construct; identical to SEQ ID NO: 21425
  source 1..120: mol_type = other DNA

SEQ ID NO: 91883 - DNA, 120 bp, synthetic construct; identical to SEQ ID NO: 21426
  source 1..120: mol_type = other DNA

SEQ ID NO: 91884 - DNA, 120 bp, synthetic construct; identical to SEQ ID NO: 21427
  source 1..120: mol_type = other DNA

SEQ ID NO: 91885 - DNA, 120 bp, synthetic construct
  source 1..120: mol_type = other DNA
tgcctcagcctcccgattagctgggactacaggccccaccaccacacccggctaattttttttttcttttttttttttattattatactttaagtgttagggtacatgtgcacaatgtgc

SEQ ID NO: 91886 - DNA, 120 bp, synthetic construct
  source 1..120: mol_type = other DNA
tgatggtgagcattttttcatgtgttttttggctgcataaatgtcttcttttgagaagtgtctgttcatgtccttcacccgctttttgatggggttgtttgtttttttcttgtaaatgtg

SEQ ID NO: 91887 - DNA, 120 bp, synthetic construct; identical to SEQ ID NO: 15446
  source 1..120: mol_type = other DNA

SEQ ID NO: 91888 - DNA, 120 bp, synthetic construct; identical to SEQ ID NO: 15447
  source 1..120: mol_type = other DNA

SEQ ID NO: 91889 - DNA, 120 bp, synthetic construct; identical to SEQ ID NO: 15448
  source 1..120: mol_type = other DNA

SEQ ID NO: 91890 - DNA, 120 bp, synthetic construct
  source 1..120: mol_type = other DNA
aaaaaaaaaaaaagcaaaggatcaggaatggaaaaagggataaaaactaacatcagaaataacagattagggtaatcccagcactctgggaggtgaggcaggcggatcacctgaggtcag

SEQ ID NO: 91891 - DNA, 120 bp, synthetic construct
  source 1..120: mol_type = other DNA
accctctgcccggcaaccaccccgtctgagaagtgaggagaccctccacccggcagctgccccgtctgagaaatgaggagcctctccgcccggcagccaccccgtctgggaagtgaggag

SEQ ID NO: 91892 - DNA, 120 bp, synthetic construct; identical to SEQ ID NO: 15449
  source 1..120: mol_type = other DNA

SEQ ID NO: 91893 - DNA, 120 bp, synthetic construct; identical to SEQ ID NO: 19626
  source 1..120: mol_type = other DNA

SEQ ID NO: 91894 - DNA, 120 bp, synthetic construct; identical to SEQ ID NO: 11030
  source 1..120: mol_type = other DNA

SEQ ID NO: 91895 - DNA, 120 bp, synthetic construct; identical to SEQ ID NO: 11031
  source 1..120: mol_type = other DNA

SEQ ID NO: 91896 - DNA, 120 bp, synthetic construct; identical to SEQ ID NO: 18748
  source 1..120: mol_type = other DNA

SEQ ID NO: 91897 - DNA, 120 bp, synthetic construct; identical to SEQ ID NO: 18749
  source 1..120: mol_type = other DNA

SEQ ID NO: 91898 - DNA, 120 bp, synthetic construct; identical to SEQ ID NO: 31005
  source 1..120: mol_type = other DNA

SEQ ID NO: 91899 - DNA, 120 bp, synthetic construct; identical to SEQ ID NO: 31006
  source 1..120: mol_type = other DNA

SEQ ID NO: 91900 - DNA, 120 bp, synthetic construct; identical to SEQ ID NO: 31007
  source 1..120: mol_type = other DNA

SEQ ID NO: 91901 - DNA, 120 bp, synthetic construct; identical to SEQ ID NO: 31008
  source 1..120: mol_type = other DNA

SEQ ID NO: 91902 - DNA, 120 bp, synthetic construct; identical to SEQ ID NO: 31009
  source 1..120: mol_type = other DNA

SEQ ID NO: 91903 - DNA, 120 bp, synthetic construct; identical to SEQ ID NO: 31010
  source 1..120: mol_type = other DNA

SEQ ID NO: 91904 - DNA, 120 bp, synthetic construct; identical to SEQ ID NO: 31011
  source 1..120: mol_type = other DNA

SEQ ID NO: 91905 - DNA, 120 bp, synthetic construct; identical to SEQ ID NO: 31012
  source 1..120: mol_type = other DNA

SEQ ID NO: 91906 - DNA, 120 bp, synthetic construct
  source 1..120: mol_type = other DNA
ctgggactggggtgaggcaggggcggtgctcagagcgcaaatttctttctttctttcttccttcctttctttctttctttctttccttctttctttctttctttccttctttctttcttt

SEQ ID NO: 91907 - DNA, 120 bp, synthetic construct; identical to SEQ ID NO: 7302
  source 1..120: mol_type = other DNA

SEQ ID NO: 91908 - DNA, 120 bp, synthetic construct; identical to SEQ ID NO: 7303
  source 1..120: mol_type = other DNA

SEQ ID NO: 91909 - DNA, 120 bp, synthetic construct
  source 1..120: mol_type = other DNA
agaggcttgcaaaagaagctcatgtaatcccactccttaaataccactaagacacgtgagatattgtttagattgtggactcttactttgacatgccagcataggtagatggacaggcaa

SEQ ID NO: 91910 - DNA, 120 bp, synthetic construct
  source 1..120: mol_type = other DNA
ttccttgctatctgaaatgagtctcaataatgtacctgcccagaaagaaatttaggaatcaaactctggattcaattctgcaacagactgaataaaccgataactacaaaactacttgcc

SEQ ID NO: 91911 - DNA, 120 bp, synthetic construct
  source 1..120: mol_type = other DNA
ctggaatgcagcctgtaacatatgttctacacaaacatatacacacagtcactccttaattaatatctagtttagtaatatggtcaatttggaatcaaggagagaaaaagaagcagtgaa

SEQ ID NO: 91912 - DNA, 120 bp, synthetic construct
  source 1..120: mol_type = other DNA
aaacctccagcttctctagccagaccaaacagtcttccattatcatccagccccgccagtgtacagagcaaagattttctgcctcctcaacactgagctctcacatcaccatgtcctcct

SEQ ID NO: 91913 - DNA, 120 bp, synthetic construct
  source 1..120: mol_type = other DNA
tggaactcagaccctggaatgtatacattttccttactgtgatcagaagaaggaaggcctgaatagatgaaggcttatgaccttacggtttcgtttggtaattaaaaccacaccttgttc

SEQ ID NO: 91914 - DNA, 120 bp, synthetic construct
  source 1..120: mol_type = other DNA
aaccagagatcaaagatccactttagctgttccattttcagcaaccacagataactctttaatcttcccatagctacttgatacccatttcgtgtccagctgtgcagagtggaaagccct

SEQ ID NO: 91915 - DNA, 120 bp, synthetic construct
  source 1..120: mol_type = other DNA
ggttgcagtgagccaagtccatgccattgcactccagcctggacaacaagaatgaaactccgtctcaaaaaaaaaaaagtggtctattataattctatacgattgaaaaaatatgagatc

SEQ ID NO: 91916 - DNA, 120 bp, synthetic construct
  source 1..120: mol_type = other DNA
cgcgccactgcactccagcctgggcaacagagcgggactccatctcaaaaaaataaataaaaattaaaaataaagattagcccctgcagggctctgaatggataaactaggtaaaaactg

SEQ ID NO: 91917 - DNA, 120 bp, synthetic construct
  source 1..120: mol_type = other DNA
gctctcaagctgccactaactagacttactctcacattccttagggaatatcttcaaggaaggacatcctccttatgtctaatctaaattcttcctcctgacacttaatttccatttgcc

SEQ ID NO: 91918 - DNA, 120 bp, synthetic construct
  source 1..120: mol_type = other DNA
ctgctctcaatcagaagttagtacaatcaaatattcagtgctcatttaataaaagttacttctggctgggtgcagtggctcacgtctgtaatcccagcactttgggaggccaaggcaggt

SEQ ID NO: 91919 - DNA, 120 bp, synthetic construct
  source 1..120: mol_type = other DNA
ttattaaatctaattactgtctcaataaattctctaaagcgtctaacatatgaagagaagatggctcgcagattgctaggaccacagaatgcagctgctgtgtttcaagctcaggatgac

SEQ ID NO: 91920 - DNA, 120 bp, synthetic construct
  source 1..120: mol_type = other DNA
aagtgctaggattataggcatgagccaccacgcctggcctcaacttgattttaacaagtaaacttaaccccaaagaaaaatgtacagttggtggctgggcacagtggctcacgcctgtaa

SEQ ID NO: 91921 - DNA, 120 bp, synthetic construct
  source 1..120: mol_type = other DNA
acatggagaacctacttgtatgttgggctctgcacttggtatggaagattatagcaaaaatgagacacaaactcatcactattaggggaattactcaaagcaatattatactgatgatgg

SEQ ID NO: 91922 - DNA, 120 bp, synthetic construct
  source 1..120: mol_type = other DNA
tccagtctaatatgtgtttactgctgttggtgccacttttgagcagcaggcataataccctgcagctactgccaatacaagtgacttcatgtctattcctgttttactaaaggacaatct

SEQ ID NO: 91923 - DNA, 120 bp, synthetic construct
  source 1..120: mol_type = other DNA
catcaaatatgccacaggtaaatacagccctaaggcctctcttcattgttattacactatcagatcaaacagtagattctgtggtttcaaatttgatggctaggctggacgcagtggctc

SEQ ID NO: 91924 - DNA, 120 bp, synthetic construct
  source 1..120: mol_type = other DNA
tacgtacaatggacaagaacacaaattctgaagtcaaactgatgtgggtttgaattctggctctgccatcctccagctaagcaaccttagacaagtcatttaacctctctgtgcttttgt

SEQ ID NO: 91925 - DNA, 120 bp, synthetic construct
  source 1..120: mol_type = other DNA
acccactcagatacgggaactgtttaaattcatatatggacaaataggtttcagtgatgcaatactttaaaattctgccatctccttgtgtttttctttctaggtgagtggactgccagc

SEQ ID NO: 91926 - DNA, 120 bp, synthetic construct
  source 1..120: mol_type = other DNA
aggaggataacttgagcctggagtttgaggtttcagtgagctatgattgcaccactgtactccggcctgggtgacacagtcagaccttgtttaaaaaaatttcttaaaaaatcaagagta

SEQ ID NO: 91927 - DNA, 120 bp, synthetic construct
  source 1..120: mol_type = other DNA
aaatactacaatagtagagctgaaagagatcttggctgccatccgtttaatctcatttctccttcagaaaaaccagggttatggtactgaactatcgtttcctgtctcccctcaggtagc

SEQ ID NO: 91928 - DNA, 120 bp, synthetic construct
  source 1..120: mol_type = other DNA
gttttagagggagattcagtgaaactagaatgccagatctcggctatacctccaccaaagcttttctggaaaagaaataatgaaatggtacaattcaacactgaccgaataaggtaggat

SEQ ID NO: 91929 - DNA, 120 bp, synthetic construct
  source 1..120: mol_type = other DNA
agatgctgggtggtatactgtgtcagcagttaatgaagctggagtgactacatgtaacacaagattagacgttacgggtatgtcatactattaaccaaagtattataagggatttaacta

SEQ ID NO: 91930 - DNA, 120 bp, synthetic construct
  source 1..120: mol_type = other DNA
ttgtaataacgtttactggtactgctttctaaatactgttttacccgttttctcttgtaggaatactaacatggtatagattatctgagtgttccacagttgtatgtcaaaagaaaataa

SEQ ID NO: 91931 - DNA, 120 bp, synthetic construct; identical to SEQ ID NO: 25769
  source 1..120: mol_type = other DNA

SEQ ID NO: 91932 - DNA, 120 bp, synthetic construct; identical to SEQ ID NO: 19835
  source 1..120: mol_type = other DNA

SEQ ID NO: 91933 - DNA, 120 bp, synthetic construct; identical to SEQ ID NO: 19836
  source 1..120: mol_type = other DNA

SEQ ID NO: 91934 - DNA, 120 bp, synthetic construct
  source 1..120: mol_type = other DNA
ggcagaggggctcctcacatcccagacgatgggcggccgggcagagacgatcctcacttcccagacggggaggcagccgggaagaggcgctcctcacttcccagactgggcggcggggca

SEQ ID NO: 91935 - DNA, 120 bp, synthetic construct
  source 1..120: mol_type = other DNA
ccatccatgtccctgcaaaggacatgatctcattcctttttatggttttatagtattccatggtgtatattaccacactttctttatccattctatcattgatggacatttaggttgatt

SEQ ID NO: 91936 - DNA, 120 bp, synthetic construct
  source 1..120: mol_type = other DNA
ctatcattgttggacatttgggttggttccaagtctttgctattgcgaatagtgccgcaataaacatacatgtgcatgtgtctttatagcagcatgatttatagtcctttgggtatatac

SEQ ID NO: 91937 - DNA, 120 bp, synthetic construct
  source 1..120: mol_type = other DNA
gcatgaaatgttcttccatttgtttgtaacctcttttatttcattgagcagtggtttgtagttctccttgaagaggtccttcacatcccttgtaagttggattcctaggtattttattct

SEQ ID NO: 91938 - DNA, 120 bp, synthetic construct
  source 1..120: mol_type = other DNA
ctgtgaatccatctggtcctggactctttttggttggtaagctattgattattgccgcaatttcagagcctgttattgatctattcagaaatttattttcagtggtaactcgagggacaa

SEQ ID NO: 91939 - DNA, 120 bp, synthetic construct
  source 1..120: mol_type = other DNA
gcgaggctgggggaggggcgcccaccattgcccaggcttgcttaggtaaacaaagcaaccaggaagctcgaactgggtggagcccaccacagctcaaggaggcctgcctgcctgtgtagg

SEQ ID NO: 91940 - DNA, 120 bp, synthetic construct
  source 1..120: mol_type = other DNA
gcttaaaggagctgatggagctgaaaaccaaggttcgagaactacgtgaagaatgcagaagcctcaggagccgatgcgatcaactggaagaaagggtatcagcaatggaagatgaaatgg

SEQ ID NO: 91941 - DNA, 120 bp, synthetic construct
  source 1..120: mol_type = other DNA
gaaacccatctcatgtgcagagacacacataggctcaaaataaaaggatggaggaagatctaccaagcaaatggaaaacaaaaaaaggcaggggttgcaatcctagtctctgataaaaca

SEQ ID NO: 91942 - DNA, 120 bp, synthetic construct
  source 1..120: mol_type = other DNA
gatcaacaaaattgatagaccgctagcaagactaataaagaaaaaaagacagaagaatcaaatagatgcaataaaaaatgataaaggggatatcaccaccgatcccacagaaatacaaac

SEQ ID NO: 91943 - DNA, 120 bp, synthetic construct
  source 1..120: mol_type = other DNA
agcattccctttgaaaactggcacaagacagggatgccctctctcaccagtcctattcaacatagtgttggaagttctggccagggcaattaggcaggagaaggaaataaagggtattca

SEQ ID NO: 91944 - DNA, 120 bp, synthetic construct
  source 1..120: mol_type = other DNA
ctaggcattgccattcaggacataggcatgggcaaggacttcatgtctaaaacaccaaaagcaatggcaacaaaagccaaaattgacaaatgggatctaattaaactaaagagcttctgc

SEQ ID NO: 91945 - DNA, 120 bp, synthetic construct
  source 1..120: mol_type = other DNA
aataataaaagaaaaaaaaagaaaagacaaatatttaaagtaatggatatcccttgggctaggggagggatagcattaggagaaatacctaatgtagatgacgggttgatgggtgcagca

SEQ ID NO: 91946 - DNA, 120 bp, synthetic construct; identical to SEQ ID NO: 24219
  source 1..120: mol_type = other DNA

SEQ ID NO: 91947 - DNA, 120 bp, synthetic construct
  source 1..120: mol_type = other DNA
actatcgcaagaacaaaaaaccaaacaccgcatattctcactcataggtgggaagtgaacaatgagatcacatggacacaggaaggggggaatatcacactctggggactgtggtggggt

SEQ ID NO: 91948 - DNA, 120 bp, synthetic construct; identical to SEQ ID NO: 24220
  source 1..120: mol_type = other DNA

SEQ ID NO: 91949 - DNA, 120 bp, synthetic construct
  source 1..120: mol_type = other DNA
cgggaggcggaacttgcagggagccgagatcacaccactgcactccaacctgggcaacagatcgagactccatctcaaaaaaaaaaaaaaaaaaaaaaaaaaaagacattctcagaagaa

SEQ ID NO: 91950 - DNA, 120 bp, synthetic construct
  source 1..120: mol_type = other DNA
tatatctatgtgttatatatcgatagatatatatctatgtgttatatatccacagataatatgtgtctatgtgttatatatccacagataatatgtgtctatgtgttatatatccacaga

SEQ ID NO: 91951 - DNA, 120 bp, synthetic construct
  source 1..120: mol_type = other DNA
atctcatgtgcggagacaaacataggctcaaaataaagggctggaggaagatctaccaagcaaatggaaaacaaaaaaaggcaggggttgcaatcctagtctctgataaaacagacttta

SEQ ID NO: 91952 - DNA, 120 bp, synthetic construct
  source 1..120: mol_type = other DNA
agaagaaaagagagaagaatcaaatagacgcaatagaaaatgacaaaggggatatcaacactgatcccacagaaatacaaactaccatcagagaatactattaacacctctacgtgaata

SEQ ID NO: 91953 - DNA, 120 bp, synthetic construct; identical to SEQ ID NO: 24223
  source 1..120: mol_type = other DNA

SEQ ID NO: 91954 - DNA, 120 bp, synthetic construct
  source 1..120: mol_type = other DNA
ccacatcctctccagcacctgttgtttcctgactttttaatgattgccattctaactggtgtgagatggtatctcactgtggttttgatttgcatttctctgatggccagtgatggcgag

SEQ ID NO: 91955 - DNA, 120 bp, synthetic construct
  source 1..120: mol_type = other DNA
ctgatgatttggctctctgtttgtctgttgttggtgtataagaatgcttgtgatttttgtacattgattttgtatcctgaagactttgctgaagttgcttatcagcttaaggagattttg

SEQ ID NO: 91956 - DNA, 120 bp, synthetic construct
  source 1..120: mol_type = other DNA
attattgccacaatttcagatcctgttattggtctattcagagattcaacttcttcctggtttagtcttgggagagtgtatttgtcgaggaatttatccatttcttctagattttctagt

SEQ ID NO: 91957 - DNA, 120 bp, synthetic construct
  source 1..120: mol_type = other DNA
gggagtctaagtctctttgtaggtcactcaggacttgctttatgaatctgggtgctcctgtattgggtgcatagatatttaggatacttagctcttcttgttgaattgatccctttacca

SEQ ID NO: 91958 - DNA, 120 bp, synthetic construct
  source 1..120: mol_type = other DNA
agatttggtcttttcacatagtcccatatttcttggaggctttgctcatttcttttcattcttttttctctaaacttcccttctcacttcatttcattcatttcatcttccatcactgat

SEQ ID NO: 91959 - DNA, 120 bp, synthetic construct
  source 1..120: mol_type = other DNA
tcccccagcctcgctgccaccttgcagtttgatctcagactgctgtgctagcaatcagcgagactccgtgggcgtaggaccctccgagccatatgcgggatataatctcctggtgtgccg

SEQ ID NO: 91960 - DNA, 120 bp, synthetic construct; identical to SEQ ID NO: 24224
  source 1..120: mol_type = other DNA

SEQ ID NO: 91961 - DNA, 120 bp, synthetic construct; identical to SEQ ID NO: 24225
  source 1..120: mol_type = other DNA

SEQ ID NO: 91962 - DNA, 120 bp, synthetic construct
  source 1..120: mol_type = other DNA
tacacacatggcagcacccagctgtggggctgaggcccaggtaatccagaacatacctcttttttaggtgatcaatgagatgaaaaccaaaatgtaaggttattgtaaagaacttgcaca

SEQ ID NO: 91963 - DNA, 120 bp, synthetic construct; identical to SEQ ID NO: 24226
  source 1..120: mol_type = other DNA

SEQ ID NO: 91964 - DNA, 120 bp, synthetic construct
  source 1..120: mol_type = other DNA
ccagaaaccttaaaggcctgaaatatatgattgcataaatattttgtttgttttattttattttttaaactttattattatcatagtttaagttttagggtacatgtgcacaacgtgcag

SEQ ID NO: 91965 - DNA, 120 bp, synthetic construct
  source 1..120: mol_type = other DNA
tggccagtgatgatgagcattttttcatatgttttttggctgcataaatgtcttcttttgagaagtgtctgttcatatccttcgcccactttttgatggggttgtttgtttttttcttgt

SEQ ID NO: 91966 - DNA, 120 bp, synthetic construct; identical to SEQ ID NO: 24227
  source 1..120: mol_type = other DNA

SEQ ID NO: 91967 - DNA, 120 bp, synthetic construct
  source 1..120: mol_type = other DNA
caaaagccaaaattgacaaatgggatctaattaaactaaagagcttctgcacagcaaaagaaactaccatcagagtgaacaggcaacctacaaaatgggagaaaattttcgcaacctact

SEQ ID NO: 91968 - DNA, 120 bp, synthetic construct
  source 1..120: mol_type = other DNA
ttttttcttgtacatttgtttgtgttcattgtagattctggatattagccctttgtcagatgagtaggttgtgaaaattttctcccattttgtaggttgcctgttcactctgatggtagt

SEQ ID NO: 91969 - DNA, 120 bp, synthetic construct
  source 1..120: mol_type = other DNA
attgtgaatgggagttcactcatgatttggctctctgtttgtctgttgttggcgtataagaatgcttgtgatttttgtacattgattttgtatcctgaagacattgctgaagttgcttat

SEQ ID NO: 91970 - DNA, 120 bp, synthetic construct
  source 1..120: mol_type = other DNA
tgatggtagtttgtatttctgtgggatcagtggtgataggcctttatcattttttattgcatctatttgattcttctctcttttcttctttcttagtcttgctagtggtctatcaatttt

SEQ ID NO: 91971 - DNA, 120 bp, synthetic construct
  source 1..120: mol_type = other DNA
tgataaaacagattttaaaccaacaaagatcaaaagagacaaaaaaggccattatgtaatggtaaagggatcaattcaacaagaagagctaactatcctaaatatatatgcacccaatac

SEQ ID NO: 91972 - DNA, 120 bp, synthetic construct
  source 1..120: mol_type = other DNA
ccaacttggtttgattctccccgtcgctttcaggtacaccaatcagacatagatttggtcttttcacatagtcccatatttcttggaggctttgcttgtttctttttattcttttttctc

SEQ ID NO: 91973 - DNA, 120 bp, synthetic construct
  source 1..120: mol_type = other DNA
gctgcgtgctgggagaaccactgctctcttcaaagctgtcagacagggacatataagtctgcagaggttactgctgtctttttgtttgtctgtgccctgcccccagaggtggagcctaca

SEQ ID NO: 91974 - DNA, 120 bp, synthetic construct; identical to SEQ ID NO: 24216
  source 1..120: mol_type = other DNA

SEQ ID NO: 91975 - DNA, 120 bp, synthetic construct
  source 1..120: mol_type = other DNA
gaaaagacaatttttgaatattggcccccactctcttctggcttgtagagtttctgccgagagatccgctgttagtctgatgggcttccctttgagggtaacccaacctttctctctggc

SEQ ID NO: 91976 - DNA, 120 bp, synthetic construct
  source 1..120: mol_type = other DNA
ccaaaatataaagaccatcgagactaggaagaaactgcatcaactaacgagcaaactaaccagctaacatcataatgacaggatcaaattcacacataacaatattaactttaaatgtaa

SEQ ID NO: 91977 - DNA, 120 bp, synthetic construct
  source 1..120: mol_type = other DNA
aataactaaaatcagagcagaactgaaggaaatagagacacaaaaaaccattcaaaaaattaaggaatccaggagctggttttttgaaaggatcaacaaaattgataaactgctagcaag

SEQ ID NO: 91978 - DNA, 120 bp, synthetic construct
  source 1..120: mol_type = other DNA
cagctttgttcttttggcttaggattgacttggtgatgtgggcccttttttggttccatatgaactttaaagtagttttttctaattctgtgaagaaaggcattggtagcttgatgggaa

SEQ ID NO: 91979 - DNA, 120 bp, synthetic construct
  source 1..120: mol_type = other DNA
ctcagggatctagaactagaaatgccatttgacccagccatcccattactgggtatatacctaaaggagtataaataatgctgctataaagacacatgcacacgtatgtttattgtggca

SEQ ID NO: 91980 - DNA, 120 bp, synthetic construct
  source 1..120: mol_type = other DNA
caaagggctaatatccagaatctacaaagaacttaaacaaatttacaagagaaaatcaaccccatcaaaaagtgggtgaagtatatgaacaagacacttctcaacagaagatatttatgc

SEQ ID NO: 91981 - DNA, 120 bp, synthetic construct
  source 1..120: mol_type = other DNA
cttcaaagagaataaaatacctaggaatccgatttacaagggacgtgaaggacctcttcaaggagaactacaaaccactgctcaaggaaataaaagaggatacaaacaaatggaagaaca

SEQ ID NO: 91982 - DNA, 120 bp, synthetic construct
  source 1..120: mol_type = other DNA
gaaagctgaaactggatcccttccttacatcttatacaaaaattaattccagatggattaaagacttaaatgttagacctcaaaccatgaaaaccctagaagaaaacctagacaatacca

SEQ ID NO: 91983 - DNA, 120 bp, synthetic construct
  source 1..120: mol_type = other DNA
acctatgagtgagaatatgcagtgtttggttttttgttcttgcgatagtttactgacaatgatgatttccaatttcatccatgtccctacaaaggacataaacgcatcattttttatggc

SEQ ID NO: 91984 - DNA, 120 bp, synthetic construct
  source 1..120: mol_type = other DNA
ccaatgcctttcttcacagaattggaaaaaactactttaaagttcatatggaaccaaaaaagagcccgcatcgccaagtcaatcctaagccaaaagaacaaagctggaggcatcacgcta

SEQ ID NO: 91985 - DNA, 120 bp, synthetic construct; identical to SEQ ID NO: 24217
  source 1..120: mol_type = other DNA

SEQ ID NO: 91986 - DNA, 120 bp, synthetic construct
  source 1..120: mol_type = other DNA
agttctgtagatgtctattaggtccacttggtgcaggctctgaaattgtggcaataatcaatagcttaccaaccaaaaagagtccaggacaaaatggattcacagccgaattctaccaga

SEQ ID NO: 91987 - DNA, 120 bp, synthetic construct
  source 1..120: mol_type = other DNA
tggaaccaaaaaagaggcggcattgccaagtcaatcctaagccaaaagaacaaagctggaggcatcacgctacctgacttcaaactatactacaaggctacagtaaccaaaacagcatgg

SEQ ID NO: 91988 - DNA, 120 bp, synthetic construct
  source 1..120: mol_type = other DNA
tatgtttgttgtggcactattcacaatagcaaagacttggaaccaacccaaatgtccaacaatgatagagtggattaagaaaatgtggcacatatacaccatggaatactatgcagccat

SEQ ID NO: 91989 - DNA, 120 bp, synthetic construct; identical to SEQ ID NO: 22756
  source 1..120: mol_type = other DNA

SEQ ID NO: 91990 - DNA, 120 bp, synthetic construct
  source 1..120: mol_type = other DNA
tgtccatttcccctccctggcttctcctgcagcatctttcctagttgtgtccatttcccctccctggcttctcctgcagcatctttccctgtagttgtgtccatttcccctccctggctt

SEQ ID NO: 91991 - DNA, 120 bp, synthetic construct
  source 1..120: mol_type = other DNA
ccctccctggcttctcctgtagcatctttccctgtagttgtgtccatttcccctccctggcttctcctgcagcatctttcctagttgtgtccatttcccctccctggcttctcctgcagc

SEQ ID NO: 91992 - DNA, 120 bp, synthetic construct
  source 1..120: mol_type = other DNA
agcatccttccctttagttgtgtccatttcccctccctgacttctcctcctgcagcatctttcctagttgtgtccatttcccctccctgacttctcctcctgcagcatctttccttgtag

SEQ ID NO: 91993 - DNA, 120 bp, synthetic construct; identical to SEQ ID NO: 22757
  source 1..120: mol_type = other DNA

SEQ ID NO: 91994 - DNA, 120 bp, synthetic construct; identical to SEQ ID NO: 22758
  source 1..120: mol_type = other DNA

SEQ ID NO: 91995 - DNA, 120 bp, synthetic construct; identical to SEQ ID NO: 22759
  source 1..120: mol_type = other DNA

SEQ ID NO: 91996 - DNA, 120 bp, synthetic construct; identical to SEQ ID NO: 22760
  source 1..120: mol_type = other DNA

SEQ ID NO: 91997 - DNA, 120 bp, synthetic construct; identical to SEQ ID NO: 22761
  source 1..120: mol_type = other DNA

SEQ ID NO: 91998 - DNA, 120 bp, synthetic construct
  source 1..120: mol_type = other DNA
gacacttacgttctcttaacaggctgacaacttctcaggaaaagtttgtctcctacaccttatgccctgtccctcccattcataccttctcaggaaaagtttgtctcctacaccttatgc

SEQ ID NO: 91999 - DNA, 120 bp, synthetic construct
  source 1..120: mol_type = other DNA
atgtaccaagccttggagagagagcagagaaaaaaaggacaactaccccttatccttgtagagtgcattttgggcagagtaggtgggacagcctgtaaacaaataaatacgtaaattact

SEQ ID NO: 92000 - DNA, 120 bp, synthetic construct; identical to SEQ ID NO: 22762
  source 1..120: mol_type = other DNA

SEQ ID NO: 92001 - DNA, 120 bp, synthetic construct; identical to SEQ ID NO: 22763
  source 1..120: mol_type = other DNA

SEQ ID NO: 92002 - DNA, 120 bp, synthetic construct; identical to SEQ ID NO: 22764
  source 1..120: mol_type = other DNA

SEQ ID NO: 92003 - DNA, 120 bp, synthetic construct; identical to SEQ ID NO: 20272
  source 1..120: mol_type = other DNA

SEQ ID NO: 92004 - DNA, 120 bp, synthetic construct; identical to SEQ ID NO: 20273
  source 1..120: mol_type = other DNA

SEQ ID NO: 92005 - DNA, 120 bp, synthetic construct; identical to SEQ ID NO: 20274
  source 1..120: mol_type = other DNA

SEQ ID NO: 92006 - DNA, 120 bp, synthetic construct; identical to SEQ ID NO: 20281
  source 1..120: mol_type = other DNA

SEQ ID NO: 92007 - DNA, 120 bp, synthetic construct
  source 1..120: mol_type = other DNA
tttcttgtcttcaaagaaatcagtaatctatcacacatcctcgtgaggcttgtttatactgaattggcataaactggaagcattccctttgaaaactggcacaagacagggatgccctct

SEQ ID NO: 92008 - DNA, 120 bp, synthetic construct
  source 1..120: mol_type = other DNA
cataaaaactctagaagaaaacctaggcactaccattcagaacataggcaccgcaaggacttcatgtctgaaacaccaaaagcaatggtaacaaaagccacaattgacaaatgggatcta

SEQ ID NO: 92009 - DNA, 120 bp, synthetic construct
  source 1..120: mol_type = other DNA
ggtggggggaggggggagggatagcattgggagatatacctaatgctagatgacgagttagtgggtgcagcgcaccagcatggcacatgtatacatatgtaattaacctgcacattgtgc

SEQ ID NO: 92010 - DNA, 120 bp, synthetic construct; identical to SEQ ID NO: 20282
  source 1..120: mol_type = other DNA

SEQ ID NO: 92011 - DNA, 120 bp, synthetic construct; identical to SEQ ID NO: 20283
  source 1..120: mol_type = other DNA

SEQ ID NO: 92012 - DNA, 120 bp, synthetic construct
  source 1..120: mol_type = other DNA
gagcaggactgaaggaaatagagacacaaaaaaaccttcaaaaaatcaatgaatccaggagctggttttttgaaaagatcaacaaaattgatagaccactagcaagactaataaagaaga

SEQ ID NO: 92013 - DNA, 120 bp, synthetic construct
  source 1..120: mol_type = other DNA
tctggccagggcaatcaggcaggagaaagaaataaagggtattcaattaggaaaaaggaagtcaaattgtccgtgtttgcagatgacattactgcatatttagaaaaccccatcgtctca

SEQ ID NO: 92014 - DNA, 120 bp, synthetic construct
  source 1..120: mol_type = other DNA
aacataggcaccgcaaggacttcatgtctgaaacaccaaaagcaatggtaacaaaagccacaattgacaaatgggatctaattaaactaaagagcttctgcacagcaaaagaaactacca

SEQ ID NO: 92015 - DNA, 120 bp, synthetic construct
  source 1..120: mol_type = other DNA
ggacacaggaaggggaacatcacatacaggggcctgttgtggggtggggtggggggaggggggagggatagcattaggagatatacctaatgctaaatgacgagttaatgggtgcagcac

SEQ ID NO: 92016 - DNA, 120 bp, synthetic construct; identical to SEQ ID NO: 20284
  source 1..120: mol_type = other DNA

SEQ ID NO: 92017 - DNA, 120 bp, synthetic construct; identical to SEQ ID NO: 20285
  source 1..120: mol_type = other DNA

SEQ ID NO: 92018 - DNA, 120 bp, synthetic construct
  source 1..120: mol_type = other DNA
ggcattaccattcaggacataggcgtgggcaaggacttcatgtccaaaacaccaaaagcaatggcaacaaaagccaaaattgacaaatgggatctaattaaactaaagagcttctgcaca

SEQ ID NO: 92019 - DNA, 120 bp, synthetic construct
  source 1..120: mol_type = other DNA
gcacatgtaccctaaaacttagagtataataaaaaaaaaaacattaaaaaaaaaaatggaactatgtgaggtgatagatgtattagttagcttgattgtggtatcctttcctaatgtata

SEQ ID NO: 92020 - DNA, 120 bp, synthetic construct; identical to SEQ ID NO: 20286
  source 1..120: mol_type = other DNA

SEQ ID NO: 92021 - DNA, 120 bp, synthetic construct; identical to SEQ ID NO: 20287
  source 1..120: mol_type = other DNA

SEQ ID NO: 92022 - DNA, 120 bp, synthetic construct; identical to SEQ ID NO: 20275
  source 1..120: mol_type = other DNA

SEQ ID NO: 92023 - DNA, 120 bp, synthetic construct; identical to SEQ ID NO: 20276
  source 1..120: mol_type = other DNA

SEQ ID NO: 92024 - DNA, 120 bp, synthetic construct; identical to SEQ ID NO: 20277
  source 1..120: mol_type = other DNA

SEQ ID NO: 92025 - DNA, 120 bp, synthetic construct; identical to SEQ ID NO: 20278
  source 1..120: mol_type = other DNA

SEQ ID NO: 92026 - DNA, 120 bp, synthetic construct; identical to SEQ ID NO: 20279
  source 1..120: mol_type = other DNA

SEQ ID NO: 92027 - DNA, 120 bp, synthetic construct; identical to SEQ ID NO: 20280
  source 1..120: mol_type = other DNA

SEQ ID NO: 92028 - DNA, 120 bp, synthetic construct; identical to SEQ ID NO: 20258
  source 1..120: mol_type = other DNA

SEQ ID NO: 92029 - DNA, 120 bp, synthetic construct; identical to SEQ ID NO: 20259
  source 1..120: mol_type = other DNA

SEQ ID NO: 92030 - DNA, 120 bp, synthetic construct; identical to SEQ ID NO: 20260
  source 1..120: mol_type = other DNA

SEQ ID NO: 92031 - DNA, 120 bp, synthetic construct; identical to SEQ ID NO: 20261
  source 1..120: mol_type = other DNA

SEQ ID NO: 92032 - DNA, 120 bp, synthetic construct; identical to SEQ ID NO: 20262
  source 1..120: mol_type = other DNA

SEQ ID NO: 92033 - DNA, 120 bp, synthetic construct; identical to SEQ ID NO: 20263
  source 1..120: mol_type = other DNA

SEQ ID NO: 92034 - DNA, 120 bp, synthetic construct; identical to SEQ ID NO: 20264
  source 1..120: mol_type = other DNA

SEQ ID NO: 92035 - DNA, 120 bp, synthetic construct; identical to SEQ ID NO: 20265
  source 1..120: mol_type = other DNA

SEQ ID NO: 92036 - DNA, 120 bp, synthetic construct; identical to SEQ ID NO: 20266
  source 1..120: mol_type = other DNA

SEQ ID NO: 92037 - DNA, 120 bp, synthetic construct; identical to SEQ ID NO: 20267
  source 1..120: mol_type = other DNA

SEQ ID NO: 92038 - DNA, 120 bp, synthetic construct; identical to SEQ ID NO: 20268
  source 1..120: mol_type = other DNA

SEQ ID NO: 92039 - DNA, 120 bp, synthetic construct; identical to SEQ ID NO: 20269
  source 1..120: mol_type = other DNA

SEQ ID NO: 92040 - DNA, 120 bp, synthetic construct; identical to SEQ ID NO: 20270
  source 1..120: mol_type = other DNA

SEQ ID NO: 92041 - DNA, 120 bp, synthetic construct; identical to SEQ ID NO: 20271
  source 1..120: mol_type = other DNA

SEQ ID NO: 92042 - DNA, 120 bp, synthetic construct
  source 1..120: mol_type = other DNA
catctctggtttttcttcccagaaagaaaaatatatttgccagtattttctggcaattcttgtgctttgccatctggccaacactctggcatttactgcagaggtcagctgtttgagctg

SEQ ID NO: 92043 - DNA, 120 bp, synthetic construct; identical to SEQ ID NO: 25386
  source 1..120: mol_type = other DNA

SEQ ID NO: 92044 - DNA, 120 bp, synthetic construct; identical to SEQ ID NO: 25387
  source 1..120: mol_type = other DNA

SEQ ID NO: 92045 - DNA, 120 bp, synthetic construct
  source 1..120: mol_type = other DNA
gggtggctgccgggcggtgacgctcctcacttgtcagacggggcggcttccgggcggagggtctcctcacttctcagacggggcagccgggcagagacgctcctcacctcccagacgggg

SEQ ID NO: 92046 - DNA, 120 bp, synthetic construct
  source 1..120: mol_type = other DNA
gagagggagagggagaccgtggggagagggagagggagaccatagggagagggggagggggagggagagggagagggagagggcagcgtgtaaccttggtaacttcacttcagcctctgc

SEQ ID NO: 92047 - DNA, 120 bp, synthetic construct; identical to SEQ ID NO: 25388
  source 1..120: mol_type = other DNA

SEQ ID NO: 92048 - DNA, 120 bp, synthetic construct
  source 1..120: mol_type = other DNA
ccacctccctcccagacggggcggctggccctcacttcccagacggggtggctgccgggcggaggggcttctcacttctcagatggggcggctgctgggcggaggggctcctcacttctc

SEQ ID NO: 92049 - DNA, 120 bp, synthetic construct; identical to SEQ ID NO: 13635
  source 1..120: mol_type = other DNA

SEQ ID NO: 92050 - DNA, 120 bp, synthetic construct; identical to SEQ ID NO: 13636
  source 1..120: mol_type = other DNA

SEQ ID NO: 92051 - DNA, 120 bp, synthetic construct; identical to SEQ ID NO: 25789
  source 1..120: mol_type = other DNA

SEQ ID NO: 92052 - DNA, 120 bp, synthetic construct
  source 1..120: mol_type = other DNA
ttgcttgagcgtggcaggtccaggcttcagtgagcagtgttcatgccactgcactccagcctgagtgacagcgtgagaccgcgtctcaagaacaacaataacaacaacaacaacgactcg

SEQ ID NO: 92053 - DNA, 120 bp, synthetic construct
  source 1..120: mol_type = other DNA
gatttatatgtatatatgttagcattgccaattttaaaaaatatacccattttatggctgggcacagtggctcacgcctgtaatcccagcattttgggaggcagaggcgagcggatcatg

SEQ ID NO: 92054 - DNA, 120 bp, synthetic construct
  source 1..120: mol_type = other DNA
atcacatctcatgactttttgagtccatgatattttgcttacactgaagaacttgtaatcttttttttttaaatttatttattatacttttaagttttagggtacatgtgcacattgtgc

SEQ ID NO: 92055 - DNA, 120 bp, synthetic construct
  source 1..120: mol_type = other DNA
gaatctacaatgaactcaaacaaatttacaagaaaaaaacaaccccatcaaaaagtgggcgaaggacatgaacagacacttctcaaaagaagacatttatgcagccaaaaacacttgaaa

SEQ ID NO: 92056 - DNA, 120 bp, synthetic construct
  source 1..120: mol_type = other DNA
ctgggccatatctgttacatggtttgtttattccctatgtccaaacaaaaaacaaaagcccccccccttttttttttttttttttgagatggaatctcactctgtcccccaggctggagt

SEQ ID NO: 92057 - DNA, 120 bp, synthetic construct; identical to SEQ ID NO: 24898
  source 1..120: mol_type = other DNA

SEQ ID NO: 92058 - DNA, 120 bp, synthetic construct; identical to SEQ ID NO: 24899
  source 1..120: mol_type = other DNA

SEQ ID NO: 92059 - DNA, 120 bp, synthetic construct; identical to SEQ ID NO: 24900
  source 1..120: mol_type = other DNA

SEQ ID NO: 92060 - DNA, 120 bp, synthetic construct; identical to SEQ ID NO: 24901
  source 1..120: mol_type = other DNA

SEQ ID NO: 92061 - DNA, 120 bp, synthetic construct; identical to SEQ ID NO: 24902
  source 1..120: mol_type = other DNA

SEQ ID NO: 92062 - DNA, 120 bp, synthetic construct
  source 1..120: mol_type = other DNA
atctcattgtggttttgatttgcatttctctgatggccagtgatgatgagcattttttcatgtgttttttggctgcataaatgtcttcttttgagaagtgtctgttcatgtccttcgccc

SEQ ID NO: 92063 - DNA, 120 bp, synthetic construct
  source 1..120: mol_type = other DNA
ttcccatcccttgtaagttggattcctaggtattttattctcttggaagcaattgtgaatgggagttcactcatgatttggctctctgtctgttattggtgtataagaatgcttgtgatt

SEQ ID NO: 92064 - DNA, 120 bp, synthetic construct
  source 1..120: mol_type = other DNA
cctccttgtacctctgatagaattcggctgtgaatccatctggtcctggactatttttggttggtaaactattgattattgccacaatttcagctcctgttattggtctattcagagatt

SEQ ID NO: 92065 - DNA, 120 bp, synthetic construct
  source 1..120: mol_type = other DNA
cctgggtatccttgttgactttctgtcttgttgatctgtctaaagttgacagtggggtgttaaagtctcccattattaatgtgtgggagtctaagtctctttgtaggtcactcaggactt

SEQ ID NO: 92066 - DNA, 120 bp, synthetic construct
  source 1..120: mol_type = other DNA
tcttggagttgctcttctcgaggagtatctttgtggcgttctctgtatttcctgaatctgaaccttggcctgccttgctagattggggaagttctcctggataatatcctgcaaagtgtt

SEQ ID NO: 92067 - DNA, 120 bp, synthetic construct
  source 1..120: mol_type = other DNA
ccttgagctgtggtgggctccacccagttcgagcttcccggctgctttgtttacctaatcaagcctgggcaatggcgggtgcccctcccccagccttcctgctgccttgcagtttgatct

SEQ ID NO: 92068 - DNA, 120 bp, synthetic construct
  source 1..120: mol_type = other DNA
gctagtgctaaagctgcacacagacacacacacacacacacacacacacacacacaaaaccctacttatgagggtgtattgttacttttgattttaggtgtagtagttgagttagagtta

SEQ ID NO: 92069 - DNA, 120 bp, synthetic construct; identical to SEQ ID NO: 24890
  source 1..120: mol_type = other DNA

SEQ ID NO: 92070 - DNA, 120 bp, synthetic construct; identical to SEQ ID NO: 24891
  source 1..120: mol_type = other DNA

SEQ ID NO: 92071 - DNA, 120 bp, synthetic construct
  source 1..120: mol_type = other DNA
attgtggcactattcacaatagcaaagacttggaaccaacgcaaatgtccaacaatgatagactggattaagaaaatgtggcacatatacaccatggaatactatgcagccataaaaaat

SEQ ID NO: 92072 - DNA, 120 bp, synthetic construct
  source 1..120: mol_type = other DNA
acctctttctacacagacatggcaaccatccgatttctcaatcttttccccgcctttccccgctttctattccacaaaaccgccattgtcatcctggcccgttctcaatgagctgttggg

SEQ ID NO: 92073 - DNA, 120 bp, synthetic construct
  source 1..120: mol_type = other DNA
tcttctcagacggggcggccgggcagagacgctcctcacctcccagacggagtcgcagccaggtagaggcactccccacatcccagacggggcggcggggcagaggcgctccccacatcc

SEQ ID NO: 92074 - DNA, 120 bp, synthetic construct; identical to SEQ ID NO: 24892
  source 1..120: mol_type = other DNA

SEQ ID NO: 92075 - DNA, 120 bp, synthetic construct
  source 1..120: mol_type = other DNA
ccacagccaatatcatactgaatgggcaaaaactggaagcattccctttgaaaacttgcacaagacagggatgccctctctcaccactcctattcaacatagtgttggaagttctggcca

SEQ ID NO: 92076 - DNA, 120 bp, synthetic construct
  source 1..120: mol_type = other DNA
tcagagtgaacaggcaacctacaaaatgggagaaaattttcgcaacccactcatctgacaaagggctaatatccagaatctacaatgaactcaaacaaatttacaagaaaaaacaaacaa

SEQ ID NO: 92077 - DNA, 120 bp, synthetic construct; identical to SEQ ID NO: 24893
  source 1..120: mol_type = other DNA

SEQ ID NO: 92078 - DNA, 120 bp, synthetic construct
  source 1..120: mol_type = other DNA
gctcactctggtggtagtttcttttgctgtgcagaaactcttcagtttaattagatcccatttgtcaattttggcttttgttgccattgcttttggtgttttagtcatgaagtccttgcc

SEQ ID NO: 92079 - DNA, 120 bp, synthetic construct; identical to SEQ ID NO: 24894
  source 1..120: mol_type = other DNA

SEQ ID NO: 92080 - DNA, 120 bp, synthetic construct
  source 1..120: mol_type = other DNA
gattctggatattagccctttgtcagatgagtaggttgcgaaaattttctcccattttgtaggttgcctgttcactctgttggtagtttcttttgctgtgcagaagctctttagtataat

SEQ ID NO: 92081 - DNA, 120 bp, synthetic construct
  source 1..120: mol_type = other DNA
ctgtctgttattggtgtataagaatgcttgtgatttttgtacatggattttgtatcctgaaactttgctgaagttgcttatcagcttaaggagattttgggctgagacaatggggttttc

SEQ ID NO: 92082 - DNA, 120 bp, synthetic construct
  source 1..120: mol_type = other DNA
ttgaaaggactgtagcaggtgtgtgtgagtgtgtgtgtgtgtgtgtgtgtgtttatagccagtatgtatatatgtagcaaatacgttcatgtgccatttaataatggagatgctttctga

SEQ ID NO: 92083 - DNA, 120 bp, synthetic construct; identical to SEQ ID NO: 24895
  source 1..120: mol_type = other DNA

SEQ ID NO: 92084 - DNA, 120 bp, synthetic construct; identical to SEQ ID NO: 24896
  source 1..120: mol_type = other DNA

SEQ ID NO: 92085 - DNA, 120 bp, synthetic construct; identical to SEQ ID NO: 24897
  source 1..120: mol_type = other DNA

SEQ ID NO: 92086 - DNA, 120 bp, synthetic construct
  source 1..120: mol_type = other DNA
tgtctgttcatgtccttcgcccactttttgatggggttgtttgttttttcttgtaaatttgtttgagttcattgtagattctggatattagccctttgtcagatgagtaggttgcgaaaa

SEQ ID NO: 92087 - DNA, 120 bp, synthetic construct
  source 1..120: mol_type = other DNA
gctacagtaaccaaaacagcatggtactggtaccaaaacagagatatagatcaatgtgtagtactttttaaaaagtaaaattatactctgcataatctatatattcttttagtatcagaa

SEQ ID NO: 92088 - DNA, 120 bp, synthetic construct; identical to SEQ ID NO: 4716
  source 1..120: mol_type = other DNA

SEQ ID NO: 92089 - DNA, 120 bp, synthetic construct; identical to SEQ ID NO: 12971
  source 1..120: mol_type = other DNA

SEQ ID NO: 92090 - DNA, 120 bp, synthetic construct; identical to SEQ ID NO: 12972
  source 1..120: mol_type = other DNA

SEQ ID NO: 92091 - DNA, 120 bp, synthetic construct; identical to SEQ ID NO: 29117
  source 1..120: mol_type = other DNA

SEQ ID NO: 92092 - DNA, 120 bp, synthetic construct; identical to SEQ ID NO: 29118
  source 1..120: mol_type = other DNA

SEQ ID NO: 92093 - DNA, 120 bp, synthetic construct; identical to SEQ ID NO: 29119
  source 1..120: mol_type = other DNA

SEQ ID NO: 92094 - DNA, 120 bp, synthetic construct; identical to SEQ ID NO: 33144
  source 1..120: mol_type = other DNA

SEQ ID NO: 92095 - DNA, 120 bp, synthetic construct
  source 1..120: mol_type = other DNA
gtgagccgaggttgtgccactgcactccagcccgggcgacagagcaagactccgtctcaaaaaaaaaaagaaaaaagaagaaaaagaaaacaaagttcttcattccagaaacattaaggt

SEQ ID NO: 92096 - DNA, 120 bp, synthetic construct; identical to SEQ ID NO: 6882
  source 1..120: mol_type = other DNA

SEQ ID NO: 92097 - DNA, 120 bp, synthetic construct; identical to SEQ ID NO: 6883
  source 1..120: mol_type = other DNA

SEQ ID NO: 92098 - DNA, 120 bp, synthetic construct; identical to SEQ ID NO: 6884
  source 1..120: mol_type = other DNA

SEQ ID NO: 92099 - DNA, 120 bp, synthetic construct; identical to SEQ ID NO: 6885
  source 1..120: mol_type = other DNA

SEQ ID NO: 92100 - DNA, 120 bp, synthetic construct; identical to SEQ ID NO: 26505
  source 1..120: mol_type = other DNA

SEQ ID NO: 92101 - DNA, 120 bp, synthetic construct; identical to SEQ ID NO: 25898
  source 1..120: mol_type = other DNA

SEQ ID NO: 92102 - DNA, 120 bp, synthetic construct; identical to SEQ ID NO: 25899
  source 1..120: mol_type = other DNA

SEQ ID NO: 92103 - DNA, 120 bp, synthetic construct
  source 1..120: mol_type = other DNA
aacggcaagttaagagccccccagtgccagacgctccagacagactgccactcttggggggcaagagttggttgtcgtcatggcgacggcgctgatggctgtggttctgcgggcagctgc

SEQ ID NO: 92104 - DNA, 120 bp, synthetic construct
  source 1..120: mol_type = other DNA
taccccagcgtgagacaagggagtggcaagacccaacggggcaaagggcggagcaggtgggcactggtggccagaactgggtcctgacagcttctggaagggtagggtcaccgagacggc

SEQ ID NO: 92105 - DNA, 120 bp, synthetic construct
  source 1..120: mol_type = other DNA
aaagaacggcagcagatgcggctcatcgtggacgtgctcagccgcctgccccaccactcctcggccgtcatcaccgccgctagcacgctgctcactgagctctttagcaacaagggtgag

SEQ ID NO: 92106 - DNA, 120 bp, synthetic construct
  source 1..120: mol_type = other DNA
agatgctgtgggagtgcctgcggcgggaccttcagacacttttctggcgctcccgggtcaccaaccccatcaatccctggtaggtcctgccactcccagctctgggctgggccctgactt

SEQ ID NO: 92107 - DNA, 120 bp, synthetic construct
  source 1..120: mol_type = other DNA
ctcactctaaagctacaaccaaatggccttcgattttcaacctggggattaggggaggggagggtgccttccagggctctactcaggactaaccctaagggtgagctagtttctgtgcct

SEQ ID NO: 92108 - DNA, 120 bp, synthetic construct; identical to SEQ ID NO: 6434
  source 1..120: mol_type = other DNA

SEQ ID NO: 92109 - DNA, 120 bp, synthetic construct; identical to SEQ ID NO: 2211
  source 1..120: mol_type = other DNA

SEQ ID NO: 92110 - DNA, 120 bp, synthetic construct; identical to SEQ ID NO: 2212
  source 1..120: mol_type = other DNA

SEQ ID NO: 92111 - DNA, 120 bp, synthetic construct; identical to SEQ ID NO: 1407
  source 1..120: mol_type = other DNA

SEQ ID NO: 92112 - DNA, 120 bp, synthetic construct; identical to SEQ ID NO: 1408
  source 1..120: mol_type = other DNA

SEQ ID NO: 92113 - DNA, 120 bp, synthetic construct
  source 1..120: mol_type = other DNA
ttcctggttccattgtgctcctctaggcagacacctgcaacacctgtgccatctgcaataccagctcctgtagcacatacactctgcctctgcagcacctcgttctggctgcacacttct

SEQ ID NO: 92114 - DNA, 120 bp, synthetic construct
  source 1..120: mol_type = other DNA
caccatgcctggctttttttttttttttaatttttttttgtatttttagtagagacaggatttcaccatgttggccaggctggtctcgaactcctgacctcaagtgatctgcccacctcg

SEQ ID NO: 92115 - DNA, 120 bp, synthetic construct
  source 1..120: mol_type = other DNA
gcacccagtcataagtggttttctaaacaaatgagaccacaccatacatactgtccctatatttcatacttgggcaaggggaggggagttgacttttttcttagtgagaataaaaatgag

SEQ ID NO: 92116 - DNA, 120 bp, synthetic construct
  source 1..120: mol_type = other DNA
gaacggcagtatccatttctggagaatagttaagtacttagattgaggatgtctttctttcatgacattaagcaatgcaatatcatctgcatccaagagccaacttaacatgttcagtct

SEQ ID NO: 92117 - DNA, 120 bp, synthetic construct
  source 1..120: mol_type = other DNA
gatcctcctgcctcagcttcccaagtaggtgggattacaagcacgtgtcactgtgcccagcttaatataatattttgaaaatatctccttaaaaaccccaaagagctgatgggttaataa

SEQ ID NO: 92118 - DNA, 120 bp, synthetic construct
  source 1..120: mol_type = other DNA
gctaatttttcaattttttatggagacaaggtcttgctatgttgcccaatcttgtctcaaactcctggcctcaagcagtccttctatcttggcctcccaacgtgttgggattacaggcat

SEQ ID NO: 92119 - DNA, 120 bp, synthetic construct
  source 1..120: mol_type = other DNA
aggaggaagaaacaaggcctttaagaaaaaggttgtaagttgtcattgttttttgttttttgttttttttttttgagacggagtctcgttctgttgcccaggctggagtgcagtggcatg

SEQ ID NO: 92120 - DNA, 120 bp, synthetic construct
  source 1..120: mol_type = other DNA
gcttgtatatccacaaatgggagacctttttgtacttccaaatctgaccagaatgcgcctaaatccacagaaggacactagaaggaacagtatgatagtgaaaatgaggaagcgggttga

SEQ ID NO: 92121 - DNA, 120 bp, synthetic construct; identical to SEQ ID NO: 1409
  source 1..120: mol_type = other DNA

SEQ ID NO: 92122 - DNA, 120 bp, synthetic construct; identical to SEQ ID NO: 1410
  source 1..120: mol_type = other DNA

SEQ ID NO: 92123 - DNA, 120 bp, synthetic construct
  source 1..120: mol_type = other DNA
attatttgagaaacaatttttcttttctttctttctttttttaaagagacaaggtctgtgtcacccaggctggagtgcagtgataccatcacagctcgctgcagcttcaaccttctgggc

SEQ ID NO: 92124 - DNA, 120 bp, synthetic construct
  source 1..120: mol_type = other DNA
cagtagcatcaccttcagctttaacacctaataactctaagtttgtacatgacatttacacaataagaatacaaagaggccaggtgctgtggctcatgcctgtaatcccagcactttggg

SEQ ID NO: 92125 - DNA, 120 bp, synthetic construct
  source 1..120: mol_type = other DNA
cgcctcggccacccaaagtgctaagattacaggtgtgagtcactgtgcctggccaacaatgaagcttttgcatgcaagtctttatgtcaattccatagagttgtatatttcttcaatctt

SEQ ID NO: 92126 - DNA, 120 bp, synthetic construct
  source 1..120: mol_type = other DNA
tgtctcagttttcccagctacaaaatagcattaataatagtactttactttggccaggcacggtggctcatgcctgtaatcccagcactttgggaggccgaggcgggaagatcatgaggt

SEQ ID NO: 92127 - DNA, 120 bp, synthetic construct
  source 1..120: mol_type = other DNA
ttttttaaagaatacatatatgaagatattgctttttgcagcttatgcactgtatgggaagccctgtgctactcttcagactcacaaaaagaaatacagcatctcggctaggcgcagtgg

SEQ ID NO: 92128 - DNA, 120 bp, synthetic construct
  source 1..120: mol_type = other DNA
atgataatcacaaaacaaaatgggctgggtgaggtggctcatacctgtaatcccagcactttggaaggccaaggtgggtggatcatttgagcccaggagttcaagaccagactaggggcc

SEQ ID NO: 92129 - DNA, 120 bp, synthetic construct
  source 1..120: mol_type = other DNA
tccagcctgggtgacagaattagactctgtctccacaaaaacaaaaattaacaagtgctgaagaggatgtggagtaattggaacctttgtacatggatagtgggaatgtaagatggtgca

SEQ ID NO: 92130 - DNA, 120 bp, synthetic construct; identical to SEQ ID NO: 1411
  source 1..120: mol_type = other DNA

SEQ ID NO: 92131 - DNA, 120 bp, synthetic construct
  source 1..120: mol_type = other DNA
atgccctgcgctgcatatccatatagctctttacattatcctctttttcagctaaatttcgctcccattcattcataggttcaaaggcagaagcatagtcctgatctatagttggcacct

SEQ ID NO: 92132 - DNA, 120 bp, synthetic construct
  source 1..120: mol_type = other DNA
agttgctttgagaatttcagctgtcgctttgttccttaaggaaaggcgttccatataggacttgaaaacagccacatcatcaaaggatgggtcaaaaggatactgaaaccaatgagcaca

SEQ ID NO: 92133 - DNA, 120 bp, synthetic construct
  source 1..120: mol_type = other DNA
aaagtgccacacttgaagcagggacctagacataatgtgtgcttatcataagcaccatgcatctcaggaaagaggccaggcaaagtgactcatgcctgtaatcccagcactgtgggagac

SEQ ID NO: 92134 - DNA, 120 bp, synthetic construct
  source 1..120: mol_type = other DNA
gcaaacatctgcaggaatgtgtgttcctcagtggttcatatatgatacaatccatgggtgatactatccaggtaacgagaatcatagtgtcttgagcaagaaggttcctccaaaagtcat

SEQ ID NO: 92135 - DNA, 120 bp, synthetic construct
  source 1..120: mol_type = other DNA
tatttttgttgttgttgttgctgttgttgtttgttttgttttttcagagacagggtctcactatgttgcccaggctgttctggtttcaaacttctggccttgagcaattctcctccctag

SEQ ID NO: 92136 - DNA, 120 bp, synthetic construct
  source 1..120: mol_type = other DNA
gtggatcacttgaggtcaggagtttgagaccaacctgaccaacatggtgaaacctcacctctactaaaaatacaaaaattagccgggcgttgtggcggacgcctgtaatcccagcgactt

SEQ ID NO: 92137 - DNA, 120 bp, synthetic construct
  source 1..120: mol_type = other DNA
attttttttttttctgggctcaaggtatcctcccacctcagtttcccaaagtgctgggattacaggcgtgagccactgcatgtggcccagatacttcatttgtattgccttcaggtgact

SEQ ID NO: 92138 - DNA, 120 bp, synthetic construct
  source 1..120: mol_type = other DNA
cccaggttgctctggaactcttgacctcaagtgatctgcctgcctcagcctcccaaattaccgggattacaggcatgagccactgcacccagctgttataatatttttgaagattactat

SEQ ID NO: 92139 - DNA, 120 bp, synthetic construct
  source 1..120: mol_type = other DNA
tccacacctgtaatcccagcactctgggaagacaaggcaggagaattgcttgtggctaggtgttcgagatcagactgggcaacatagtgagaccttgtctctataaaaaactaacaaact

SEQ ID NO: 92140 - DNA, 120 bp, synthetic construct
  source 1..120: mol_type = other DNA
gaccagcctgaccaacatggagaaaccccatctctactaaaaatacaaaattagctgggcgtggtggcacatgcctgtaatcccagctactcgggaggctgaggcaggagaatcacttga

SEQ ID NO: 92141 - DNA, 120 bp, synthetic construct
  source 1..120: mol_type = other DNA
cctgcctcagcctccctaatagctgggactacaggcgtgtgtcaccaggcccggttaaatttttctgttttttaacagagatggggtttcaccatgttgcccaggctggtctcgaactct

SEQ ID NO: 92142 - DNA, 120 bp, synthetic construct; identical to SEQ ID NO: 1412
  source 1..120: mol_type = other DNA

SEQ ID NO: 92143 - DNA, 120 bp, synthetic construct
  source 1..120: mol_type = other DNA
gctcacgcctgtaataccagcactttgggaggctgaggcaggcggatcacttgaggtcaggagtttgaaactagcctggccaacgtggcaaaactccatctctattaaaaatacaaaaat

SEQ ID NO: 92144 - DNA, 120 bp, synthetic construct; identical to SEQ ID NO: 1413
  source 1..120: mol_type = other DNA

SEQ ID NO: 92145 - DNA, 120 bp, synthetic construct
  source 1..120: mol_type = other DNA
ggaactagatagagggggtggttgcacaacattgtgaatgtactataataaatgccacagaattgtgtactctaaaatggtttaattgctgtgcatggtggctcacgcctataatcccag

SEQ ID NO: 92146 - DNA, 120 bp, synthetic construct; identical to SEQ ID NO: 1414
  source 1..120: mol_type = other DNA

SEQ ID NO: 92147 - DNA, 120 bp, synthetic construct; identical to SEQ ID NO: 1415
  source 1..120: mol_type = other DNA

SEQ ID NO: 92148 - DNA, 120 bp, synthetic construct; identical to SEQ ID NO: 1416
  source 1..120: mol_type = other DNA

SEQ ID NO: 92149 - DNA, 120 bp, synthetic construct; identical to SEQ ID NO: 1417
  source 1..120: mol_type = other DNA

SEQ ID NO: 92150 - DNA, 120 bp, synthetic construct; identical to SEQ ID NO: 1418
  source 1..120: mol_type = other DNA

SEQ ID NO: 92151 - DNA, 120 bp, synthetic construct
  source 1..120: mol_type = other DNA
gaagatgggagccaggggaatgaaaggagaaaggaagaaagaaatcaaacccatgacataaaaagaatgcctatgcccttctgagtcagacacttacaggtaatccaaaaacttgagaaa

SEQ ID NO: 92152 - DNA, 120 bp, synthetic construct
  source 1..120: mol_type = other DNA
tttgggaggccgagacaggtggatcacgaggtcaggagttcgagaccagcctggccaagatggtgaaaccctgtctctactaaaagtacaaaaattagctgggtgtggtggcgggcgcct

SEQ ID NO: 92153 - DNA, 120 bp, synthetic construct; identical to SEQ ID NO: 1419
  source 1..120: mol_type = other DNA

SEQ ID NO: 92154 - DNA, 120 bp, synthetic construct
  source 1..120: mol_type = other DNA
taagcagcttatgtgaacttctcccttttgccaagaaaaattccctttactcttccctcactgcacgtgcctgtggtttacagtagtgcattccaaatcataaccctcttttcttattcc

SEQ ID NO: 92155 - DNA, 120 bp, synthetic construct; identical to SEQ ID NO: 1420
  source 1..120: mol_type = other DNA

SEQ ID NO: 92156 - DNA, 120 bp, synthetic construct
  source 1..120: mol_type = other DNA
agttaatttagtatccaaccaacaactttgcatgtagtaggtgtgtgacaaatatttgttaaagaaaatagaatctgaggctgggcacggtggctcatgcctataatcccagcactttgg

SEQ ID NO: 92157 - DNA, 120 bp, synthetic construct
  source 1..120: mol_type = other DNA
gtgggaggattgcttgagtctgagaggtggaggttgcagtgagctgagattgcaccactaaactccagtctgggctccagtctgggcaacagagcaaaactcactctcaaaaaaaaaaaa

SEQ ID NO: 92158 - DNA, 120 bp, synthetic construct; identical to SEQ ID NO: 3663
  source 1..120: mol_type = other DNA

SEQ ID NO: 92159 - DNA, 120 bp, synthetic construct; identical to SEQ ID NO: 13889
  source 1..120: mol_type = other DNA

SEQ ID NO: 92160 - DNA, 120 bp, synthetic construct
  source 1..120: mol_type = other DNA
cattgtgcacatgtaccctaaaatttaaagtataataaaaaaaagagttggaaaaaataaataaataaatcatgctgctataaagacacatgcacacatatgtttactgtggcactattc

SEQ ID NO: 92161 - DNA, 120 bp, synthetic construct; identical to SEQ ID NO: 13891
  source 1..120: mol_type = other DNA

SEQ ID NO: 92162 - DNA, 120 bp, synthetic construct
  source 1..120: mol_type = other DNA
gagaaaatttttacaatctacccatctgacaaagggctaatatccagaatctacaaagaacttaaatttacaagaaaaaatcaaacaactccttcaaaaagtgggcgaaggatatgaaca

SEQ ID NO: 92163 - DNA, 120 bp, synthetic construct
  source 1..120: mol_type = other DNA
ggggcagggatagctttaggagatatacctaatgctagatgacgagttagtgggtgcagcacaccagcatggcacatgtatacatatgtaactaacctgcacattgtgcacatgtaccct

SEQ ID NO: 92164 - DNA, 120 bp, synthetic construct
  source 1..120: mol_type = other DNA
taaagtcagaactgaatcagaaaataggatattcacatatggaatgtgtaaaaaaatctcttgatggggatggcactgaatctgtaaattaccatgggcagtgtggccattttcacgata

SEQ ID NO: 92165 - DNA, 120 bp, synthetic construct
  source 1..120: mol_type = other DNA
ttcctccttgtacctctggtagaattcggctgtgaatccatctggtcccggactttttttggttggtaagctattgattattgccacaatttcagagcctgttattggtctattcagaga

SEQ ID NO: 92166 - DNA, 120 bp, synthetic construct
  source 1..120: mol_type = other DNA
aaaaaactactttaaagttcatatggaaccaaaaaagagcccgcatcaccaagtcaatcctaagccaaaagagcaaagctgcaggcatcaagctacctgacttcaaactatactacaagg

SEQ ID NO: 92167 - DNA, 120 bp, synthetic construct
  source 1..120: mol_type = other DNA
agacttggaaccaacccaaatgtccaacaacgagagactggattaggaaaatgtggcacatatacaccatggaatactatgcagccataaaaaatgaagagttcatgtcctttgtaggga

SEQ ID NO: 92168 - DNA, 120 bp, synthetic construct; identical to SEQ ID NO: 13894
  source 1..120: mol_type = other DNA

SEQ ID NO: 92169 - DNA, 120 bp, synthetic construct; identical to SEQ ID NO: 3665
  source 1..120: mol_type = other DNA

SEQ ID NO: 92170 - DNA, 120 bp, synthetic construct; identical to SEQ ID NO: 13902
  source 1..120: mol_type = other DNA

SEQ ID NO: 92171 - DNA, 120 bp, synthetic construct; identical to SEQ ID NO: 13903
  source 1..120: mol_type = other DNA

SEQ ID NO: 92172 - DNA, 120 bp, synthetic construct
  source 1..120: mol_type = other DNA
aaaaaaagcaagagagagataaaaaaagagaacaaaaaattagcagggaatggtggcatacacctataagctcagttacttgggaggctgggtttggaggattgcctgagcccaggagtt

SEQ ID NO: 92173 - DNA, 120 bp, synthetic construct
  source 1..120: mol_type = other DNA
aataatgaacagcagcaattgactggcagatacagcaatttcttcagagtttagaaatgaacacaggttttacaaaatgggagaaaattttcgcaacctactcatctgacaaacggctaa

SEQ ID NO: 92174 - DNA, 120 bp, synthetic construct; identical to SEQ ID NO: 13904
  source 1..120: mol_type = other DNA

SEQ ID NO: 92175 - DNA, 120 bp, synthetic construct
  source 1..120: mol_type = other DNA
agatctcttatttttaacaacagtatgcgtttttaggctttgatttccttatcatttaaaaataatgagtgtccgcatgttctcactcataggtgggaattgaacaatgagaacacatgg

SEQ ID NO: 92176 - DNA, 120 bp, synthetic construct; identical to SEQ ID NO: 13906
  source 1..120: mol_type = other DNA

SEQ ID NO: 92177 - DNA, 120 bp, synthetic construct
  source 1..120: mol_type = other DNA
agtgctgcaataaacatacgtgtgcatgtgtccttatagcagcatgatttatagtcctttgggtatatacccagtaatgggatggctgggtcaaatggtatttctagttctagatccctg

SEQ ID NO: 92178 - DNA, 120 bp, synthetic construct; identical to SEQ ID NO: 13907
  source 1..120: mol_type = other DNA

SEQ ID NO: 92179 - DNA, 120 bp, synthetic construct
  source 1..120: mol_type = other DNA
tgtagaaagaagtagacatgggagacttttcattttgttctgtactaagaaaaattcttctgccttgggatcctgttgatctgtgaccttaccccccaaccttgtgctctctgaaacatg

SEQ ID NO: 92180 - DNA, 120 bp, synthetic construct; identical to SEQ ID NO: 13908
  source 1..120: mol_type = other DNA

SEQ ID NO: 92181 - DNA, 120 bp, synthetic construct
  source 1..120: mol_type = other DNA
ttatctctctctgtctcttttgcctacataaatattaccaggctttgaaggaaggtctgacttgcttcctaatcatcagccgaccccatcctctgtagagtgggaaacaataatggagag

SEQ ID NO: 92182 - DNA, 120 bp, synthetic construct; identical to SEQ ID NO: 34076
  source 1..120: mol_type = other DNA

SEQ ID NO: 92183 - DNA, 120 bp, synthetic construct; identical to SEQ ID NO: 29919
  source 1..120: mol_type = other DNA

SEQ ID NO: 92184 - DNA, 120 bp, synthetic construct; identical to SEQ ID NO: 29920
  source 1..120: mol_type = other DNA

SEQ ID NO: 92185 - DNA, 120 bp, synthetic construct; identical to SEQ ID NO: 12651
  source 1..120: mol_type = other DNA

SEQ ID NO: 92186 - DNA, 120 bp, synthetic construct
  source 1..120: mol_type = other DNA
aatctgcccgccttggccttccaaagtgttgggattacaggcatgagatatggcacctggccaggaataaaagttagcaatatactttgattcaaagtacctctgtattatgaatatttt

SEQ ID NO: 92187 - DNA, 120 bp, synthetic construct
  source 1..120: mol_type = other DNA
tgttctggtttccatgatgcccatccagtcaatctcatggagggtggagtatggttggagcctaatcagcgaggtttctttttttttttttttcctattggatcttcctggagaaaatac

SEQ ID NO: 92188 - DNA, 120 bp, synthetic construct
  source 1..120: mol_type = other DNA
aggagaatcgcttgaacctggtaggtggaggttgtagtgagccaatatcacaccactgcactccagcttgggcgacaagagcaaaactcccatctcaaaaataaataaataaataagtaa

SEQ ID NO: 92189 - DNA, 120 bp, synthetic construct
  source 1..120: mol_type = other DNA
tgtgtcaactcagggttaaatggattaaggccggtgcaagatgtgctttgttttttttttttttttttttttttttatgtttaagctgtatatttactcattgaaacactcggtgaaatc

SEQ ID NO: 92190 - DNA, 120 bp, synthetic construct
  source 1..120: mol_type = other DNA
ctcccatccctcataggatttttcttgtttggaaaccacgtgttctggtttccatgatgcccatccagtcaatctcatggagggtggagtatggttggagcctaatcagcgaggtttctt

SEQ ID NO: 92191 - DNA, 120 bp, synthetic construct; identical to SEQ ID NO: 15140
  source 1..120: mol_type = other DNA

SEQ ID NO: 92192 - DNA, 120 bp, synthetic construct
  source 1..120: mol_type = other DNA
gtgtgtcgtgtggtgtgtgtactgtgcaatgtgttttgtgtgaggggtgtgtcgtgtgtgtgtagtgtgtgtgcgatatgtgtggtgtgtgatgtgtttgctgtgtgtggtgtgtgtgta

SEQ ID NO: 92193 - DNA, 120 bp, synthetic construct
  source 1..120: mol_type = other DNA
gggatagcgccactgcagtccagcttgcgcgaaagagtgagactccgtctcaaaaaaaaaaaaaaaagtatgcccagccattctatacttttactgtacgttctacttttaaacacatca

SEQ ID NO: 92194 - DNA, 120 bp, synthetic construct; identical to SEQ ID NO: 12144
  source 1..120: mol_type = other DNA

SEQ ID NO: 92195 - DNA, 120 bp, synthetic construct
  source 1..120: mol_type = other DNA
ccaagtgatcccaggctgaaaactaacacattctgctcaaataaagcctaggccaaactgcacaaatcaggtagtctctttatgtcattgcttgttctctggttataaatgtagctcacc

SEQ ID NO: 92196 - DNA, 120 bp, synthetic construct
  source 1..120: mol_type = other DNA
aaagaggggtgcagtttgaccgaattaaccctgttttgcttcctacatgtttttacctcaagtttctgaatctgttaaccttttggctcaattacctttttgccagaaagagctaggagg

SEQ ID NO: 92197 - DNA, 120 bp, synthetic construct
  source 1..120: mol_type = other DNA
tccacatgttttataagactgttgacatttaactgcttctacctcccgacatgccactttcctcaactttagcttttcaaactgacttctgatcacactgcttcatcaaaacgcctgctg

SEQ ID NO: 92198 - DNA, 120 bp, synthetic construct
  source 1..120: mol_type = other DNA
aggatatgagcagaaatacatcacatttctttgatccttattgcagtcaaggcacatgggtgcagctgcaacttgaactttagaatcagggtgtctcgttcctcgaatgagttcatacta

SEQ ID NO: 92199 - DNA, 120 bp, synthetic construct
  source 1..120: mol_type = other DNA
gtgtgtgagtcatcctccttgtgaggttctgtgtgtgatgaatggctcactggcgccctagggtcactaagaagagagaaaaagatgattagaagaaacggaacattttgcaataaaata

SEQ ID NO: 92200 - DNA, 120 bp, synthetic construct
  source 1..120: mol_type = other DNA
ctcagaacaagtatgtacaacgctgtgttgatcttcttatattcctgctgcctggttttattaagttcaatatttctgtatcatattcatgattccttaatttttttgtagagagtttta

SEQ ID NO: 92201 - DNA, 120 bp, synthetic construct
  source 1..120: mol_type = other DNA
ccaaaatgactgtactaatttatgttcccaacagcatacaagggtttcctattctccagatccttgctaacacttatcattcctcttttggataatagctattttaacagatgtaaggca

SEQ ID NO: 92202 - DNA, 120 bp, synthetic construct
  source 1..120: mol_type = other DNA
tacattcataatatttttgaaatcaggaaatgtgatgccttctactttgttctttttgctcaagattgttttggctattcagggtctttgtggttccatatgcatgttaggatttttttt

SEQ ID NO: 92203 - DNA, 120 bp, synthetic construct
  source 1..120: mol_type = other DNA
atgcagtgggaggaaagacattcgtatcccactgtcctaaagccaaacaataatgtttatgttgacctttcagatttgctcatcattttccttagctggaatcagaagaatagaagtctt

SEQ ID NO: 92204 - DNA, 120 bp, synthetic construct
  source 1..120: mol_type = other DNA
aattgagtcatattcctttgagagaggaaggagtagataaaatatcaggactgtaaccagtttccctaacagatgagtgagtgttaggagaaggaatgccgggttttgaacagagacttc

SEQ ID NO: 92205 - DNA, 120 bp, synthetic construct
  source 1..120: mol_type = other DNA
gagtctgcagaccccaggaaaatcgtacatgtgttctcaaatgtctataagggatcaagtttcagaggcgtgggagacagaatcagagcataaagcatacttctttagtcaatcatagta

SEQ ID NO: 92206 - DNA, 120 bp, synthetic construct
  source 1..120: mol_type = other DNA
ctctgctccagtattttgttgaggatttttgaatctatgttcattaggaatgtttgcctgtaattttcttttcttgtagtgtccttatttggctttgatactagaataatgctggcctca

SEQ ID NO: 92207 - DNA, 120 bp, synthetic construct
  source 1..120: mol_type = other DNA
tcagtaggattcaatgggattgctttctcaatttctaagatttttttgcaattggctattggctgagtacagattcaacgcaatccctatcaaaataaccatgacattcttcacagaaat

SEQ ID NO: 92208 - DNA, 120 bp, synthetic construct
  source 1..120: mol_type = other DNA
gaaggtgtcttcttgcaaggatagttgttccatttgatgttcctgtggggggtgattgacagaaggcctgttcagctattttgctccccatatttgaaactcagcatttctttaatattc

SEQ ID NO: 92209 - DNA, 120 bp, synthetic construct
  source 1..120: mol_type = other DNA
gctataacagaataacacagatggagtaatttataaacagaaatgtattggctcatagttctgaggactgggaagactaaggtcaatgcaccaaccagaggggagaagaacgctgactcc

SEQ ID NO: 92210 - DNA, 120 bp, synthetic construct
  source 1..120: mol_type = other DNA
ttgccataacatcctttgaagtcttgttgaagaaattcatgcctcctcagctctggcactatgtgagcctgcagaattagaaccacatagatgcctcgaaggtttacaatctgccttctg

SEQ ID NO: 92211 - DNA, 120 bp, synthetic construct
  source 1..120: mol_type = other DNA
ttcaggtttcaggagtgcttgtttcggtttcaggagtgcttgtttcagtttcaggagtgattgttctgtaatttttccttcgggaatgtccgtatcaagtttgtgtaccgacattagatt

SEQ ID NO: 92212 - DNA, 120 bp, synthetic construct
  source 1..120: mol_type = other DNA
gaaagtttaagtcctctttttgttattggtttctagtttaattgcgttgtagtcaaagcacacagtacgtatgatttcaaccctttggaactggttaacacttgcgttacacgtttggga

SEQ ID NO: 92213 - DNA, 120 bp, synthetic construct
  source 1..120: mol_type = other DNA
ctagaggtcaaattaagaaatctggcaaaaagtaagctgttccttgtgcctgaggagttggtgactcttgatttcatttgtacttaaacacctgtattccccgccataacatcttttgcc

SEQ ID NO: 92214 - DNA, 120 bp, synthetic construct
  source 1..120: mol_type = other DNA
tagggtactatgcatattacccgggtgatgaaataatctgtacaccaaacccgtgtgacatgagtttacctatataacaaacctgcgcatatgccccggaacctaaaagtttaacagatc

SEQ ID NO: 92215 - DNA, 120 bp, synthetic construct
  source 1..120: mol_type = other DNA
tgaaatttaattttttaattgatatgtaatagatatacctacttttagaaaaacatcaggccgggcgtggtggctcatacctgtaatctcagcacctgggaggctgaggcgggtggatca

SEQ ID NO: 92216 - DNA, 120 bp, synthetic construct
  source 1..120: mol_type = other DNA
tcccttgcagtatgggctggttacactgtgttccacctgcatgatgactgtgaagcttagaagtcacagagttctgtggttgttgtttaggatcactgttatgtagtattgacatttgat

SEQ ID NO: 92217 - DNA, 120 bp, synthetic construct
  source 1..120: mol_type = other DNA
taagaataaaaaataaataagtaaatatatagataggtaataaacagggccaggcatggtgactcatgcctgtaatcccagcgctttgggaggccgaggtgggtggataacctgagatca

SEQ ID NO: 92218 - DNA, 120 bp, synthetic construct
  source 1..120: mol_type = other DNA
tggtaccaaaacagagatatagatcgatggaacagaacagagccctcagaaataacgccgcatatctacaactatctgatctttgacaaacctgagaaaaagcaatggggaaaggattcc

SEQ ID NO: 92219 - DNA, 120 bp, synthetic construct
  source 1..120: mol_type = other DNA
actatcgcaaggacaaaaaaccaaacactgcatgttctcacccatagatgggaattgaacaacgagaacacatggacacaggaaggggaacatcacactctggggactgttgtggggtgg

SEQ ID NO: 92220 - DNA, 120 bp, synthetic construct
  source 1..120: mol_type = other DNA
cgggatattgtaataatgctacctgtaaacctgctttttttttttttttttttttttcgagatggactttcactcttggggtcacccaggctggagtgcaatggtacgatctcagctcac

SEQ ID NO: 92221 - DNA, 120 bp, synthetic construct
  source 1..120: mol_type = other DNA
tggccaacatggtaaaactctgtctctactaaaaatacaaaaattagccgggcatggtggcaggtacctgcaatcccagctacttgggaggctgaggcaggagaatcgcttgaaccctgg

SEQ ID NO: 92222 - DNA, 120 bp, synthetic construct
  source 1..120: mol_type = other DNA
ataaagaaattttaaagcaccacacgatcccactactaagagttagggtctaaaatagtgtggtctgtcctcctgagcttttttctaggtgtaaatgagctagcatcagctgcactcaga

SEQ ID NO: 92223 - DNA, 120 bp, synthetic construct
  source 1..120: mol_type = other DNA
gaagctcttagtattttttctctcccttctgggaaggttagaaagatgacaatgataaatgcataaataaccagcagggagggaaggtgcatcattacatttagaaacacctgactgtcc

SEQ ID NO: 92224 - DNA, 120 bp, synthetic construct
  source 1..120: mol_type = other DNA
gggcaccctaatctcagtttaggagtaaatattggttagactagattaatcatggtaatcccatttcctgtcagcagttgattatcagggatgggcatgtgacctggttctgaccaataa

SEQ ID NO: 92225 - DNA, 120 bp, synthetic construct
  source 1..120: mol_type = other DNA
tgcattgtgaaatgattaccataataaagctaagtagcatatccatcacctcacatggtgaccatttccttttgtagtgagaacaccacacagtgaaatggtcacttctgtgggctgcct

SEQ ID NO: 92226 - DNA, 120 bp, synthetic construct
  source 1..120: mol_type = other DNA
ataagtcactggtgacggctgcagttttggaagtagctcatagcatttacaatgagtggttattacagctgggggctactcgtttctttgtgcatttaggtaagaaaagcatgatctgca

SEQ ID NO: 92227 - DNA, 120 bp, synthetic construct
  source 1..120: mol_type = other DNA
ttaattaagtaatatgtaggtatcaggcatacgtgatcaatcccttcatttgtttatattggaggaaggatgggatccagccccattcacctaggagaaccgcagaggtagcaacactca

SEQ ID NO: 92228 - DNA, 120 bp, synthetic construct
  source 1..120: mol_type = other DNA
gtggctgtttttcacacacatatgaagccctggaagctgcaaatgctttccttgcccttttcatcaaaggactccaccttgaagtcagtaatctcatgaataaacaagctaagtggaaaa

SEQ ID NO: 92229 - DNA, 120 bp, synthetic construct
  source 1..120: mol_type = other DNA
ttagaggcgctgattggtccattttatagagtactgattggtcgattttacagagtactgattggtgcgtttacaatcctttagctagacacagagcgagattggtgtgcttttacagag

SEQ ID NO: 92230 - DNA, 120 bp, synthetic construct
  source 1..120: mol_type = other DNA
gcactatgtagacgtcatacctgatctaaccaatttgtgagccctttgtaaatcagacaccactttctcctgcctgcctataaaattggctgcagtccgctgcctccttgactttttgga

SEQ ID NO: 92231 - DNA, 120 bp, synthetic construct
  source 1..120: mol_type = other DNA
cttgagtttaggtatccactgtgttgaggggggtcgaggtactcccggaccattggtcactacactccgatgggtggtgtcggccaaagcatttcatagtgcggttacagcaagatccat

SEQ ID NO: 92232 - DNA, 120 bp, synthetic construct
  source 1..120: mol_type = other DNA
tcctatttcttctctaagcagctctccctgccaacttgtgtctatggtggctgaagggtctccttctgctggagttccagagactcgtggtgaaagtgagttgctccataccagttcaac

SEQ ID NO: 92233 - DNA, 120 bp, synthetic construct
  source 1..120: mol_type = other DNA
ataaggcttaaggaaggggtctagtttcatttttctgtgtatggctagccagttctcccagcaccatttattaaatagggaattatttcaccattgcttgtttttgtcaggtttgttgaa

SEQ ID NO: 92234 - DNA, 120 bp, synthetic construct
  source 1..120: mol_type = other DNA
atatagaccatggaatactatgcagccataaaaaggaatcagatcatgtcctttgcagggacacggatgaagctgaaagccattatcctcagtaaactgacaaaggagcagaaaaccaaa

SEQ ID NO: 92235 - DNA, 120 bp, synthetic construct
  source 1..120: mol_type = other DNA
agaccctaaaacaaagatttgcattcaggtagattatttggaagatgatttaaggacgtaccagtgcaggagttgtcgcgggacagtgagaccagggcagtttgacaatcaataaagggt

SEQ ID NO: 92236 - DNA, 120 bp, synthetic construct
  source 1..120: mol_type = other DNA
ggataatcggacaatacaactctccacccttttttatggtaagatatgaataaggggtccacaggagcaacctgagtccctgcaactacatttcccaggggcccctggggtaaccctaat

SEQ ID NO: 92237 - DNA, 120 bp, synthetic construct
  source 1..120: mol_type = other DNA
ccatgcctggctaatttttctatttttagtagagatggggttaatttttgtatttttagtagcgatggggtttcaccgtcttggctaggctcatctcgaactcctgacctcaagtgatcc

SEQ ID NO: 92238 - DNA, 120 bp, synthetic construct
  source 1..120: mol_type = other DNA
ggcgtagatgattttatctcagtccacaattgtacttgtgctgattgtagccttaaggccttacagccctatctcataggcagactacctctgggttaaactgcttttaattcttctatg

SEQ ID NO: 92239 - DNA, 120 bp, synthetic construct
  source 1..120: mol_type = other DNA
gtcttccctcttaggtaccctgagcaggctctattttatgcccttccatacctacggtggaaaccaatagggtttttttttttttcagacagagtctcactctattgctcaggctggagt

SEQ ID NO: 92240 - DNA, 120 bp, synthetic construct
  source 1..120: mol_type = other DNA
attctcctgcctcagcctcctgagtagctgggactacaggcacctgccattgtgcctggctaactttttgtatttttagtagagacagggtttcaccgtgttagccaggatggtctcgat

SEQ ID NO: 92241 - DNA, 120 bp, synthetic construct
  source 1..120: mol_type = other DNA
tattaagcctactacccgttagtaatttttcctgatcctctccctcctcccaccctccaacctgtgaaaggccccagtgtgtgctgtttgcttctttgtattaattaattctcatgattt

SEQ ID NO: 92242 - DNA, 120 bp, synthetic construct
  source 1..120: mol_type = other DNA
ttatttgctgcttgaatctggtgtggctggtgagatgtccagctggggttggtgtagacttgtcaattgaggaaaatgacgagacgagtctcaatcattttaggagatttatttgccaaa

SEQ ID NO: 92243 - DNA, 120 bp, synthetic construct
  source 1..120: mol_type = other DNA
gggagaagataaaagcaaaatttcgtaagaggctaagcagttgacagacagatactgggtatgatgagaatttagaagggtctcaataggatgtggcacaaaaatggtaagggggaactc

SEQ ID NO: 92244 - DNA, 120 bp, synthetic construct
  source 1..120: mol_type = other DNA
tttccaagtaaaagcaaacaaatatggctgtctggatctacaggaatactgaaaaaggcaccgcagagattcacaactgagaaatactggctggtagtgagtatagctgataaaacggca

SEQ ID NO: 92245 - DNA, 120 bp, synthetic construct
  source 1..120: mol_type = other DNA
gacgcagccaccatgttaattctttcattactctgaggaatgggctttctaaatcaggtgggatttatcagagatatagttgtgtctgtgacaattaaggcagttgtaagctcatgattt

SEQ ID NO: 92246 - DNA, 120 bp, synthetic construct
  source 1..120: mol_type = other DNA
ttactaagaaaggtattaagcgcctttctgagagctctcagtgggcttcctaagcacgttcactctgcctcctttaagtcttatatttatgatcaagatgaaagggagggatgtatcact

SEQ ID NO: 92247 - DNA, 120 bp, synthetic construct
  source 1..120: mol_type = other DNA
gtacaaggtcatcctcaggccataccacatacaaaagagttatacctgaggtctgtacagcactgttacaatcatagtctcaaaaggttaaggctctatgatggcaggtttaaaaaacct

SEQ ID NO: 92248 - DNA, 120 bp, synthetic construct
  source 1..120: mol_type = other DNA
ggagctctccctctgtacttactgggtcctttctttactttagttttcccagggcacttactacaatctaacagattgcatgttttatccatgtattcaatttcctatatatgtcactcc

SEQ ID NO: 92249 - DNA, 120 bp, synthetic construct
  source 1..120: mol_type = other DNA
tgagaaccttaacatccattgtggggatgccatggacttaggcttagaggccatttttgatcaagttgtgagaagaaatcggggtggatggtgtctccaggtcaatcatcttctgtactg

SEQ ID NO: 92250 - DNA, 120 bp, synthetic construct
  source 1..120: mol_type = other DNA
atattaaaacattgttggctaatataatttgaaaaaaagtggttttttggaagacttaggatattatggtgctacataatttttcctcgatgctctcttcctctcatctttcttgtctct

SEQ ID NO: 92251 - DNA, 120 bp, synthetic construct
  source 1..120: mol_type = other DNA
tagggtctgaaggatctgcgccctgtgttcaaggacgacgctgaaacattcttttctgcgtgcctgatctgaggcctcacaactcaggtgagcaagactgtgtccctttcacatggagaa

SEQ ID NO: 92252 - DNA, 120 bp, synthetic construct
  source 1..120: mol_type = other DNA
tttctccaaagcgcttggcctcagctccttagcattgtcctggccccgggcctcctgtatttcctcctgcagtcgcagtggttttaatgtatgggggaaagagaaccattgtacaggcct

SEQ ID NO: 92253 - DNA, 120 bp, synthetic construct
  source 1..120: mol_type = other DNA
gacataactaactctaatgcttttctttaaagacacaaacaacatgctttctacgtgtataagtcacagtgaagaaggagcttttctttatggtatcactgttgttgcccagcccatctc

SEQ ID NO: 92254 - DNA, 120 bp, synthetic construct
  source 1..120: mol_type = other DNA
cgcagatcccattcctaatacatatatcccagcgagttctgctaatctgcagaggatgtctagaaacgcattcatcacatcagtgtttataataaccaggagtaggaggcaatcaaatgt

SEQ ID NO: 92255 - DNA, 120 bp, synthetic construct
  source 1..120: mol_type = other DNA
atgtgacacttataccacatgcatagagttatttcagacacattgtgtgttacctttgggtagagaagtgaatgagagtgaggatgagagatgaaaagaggcagaagaaaaagagaggcc

SEQ ID NO: 92256 - DNA, 120 bp, synthetic construct
  source 1..120: mol_type = other DNA
gggaaatttgctggtttctggctctgctctgattgaggagagaataaatgagagtctgacaccttaaaaatctgaaaagagatatttaccatctgttttctctaaggctgctagctggag

SEQ ID NO: 92257 - DNA, 120 bp, synthetic construct
  source 1..120: mol_type = other DNA
gagaatgaagacccaacttcccagtaagttacagaaactcatgtattattccgaggccacagtaaagagtggagactcaaagcatggccagaaacaggtaaattagttttagtggcaaca

SEQ ID NO: 92258 - DNA, 120 bp, synthetic construct
  source 1..120: mol_type = other DNA
cagatacactatagtttttgaaacatagtatttctgcttccagttcttcaattttatgaaagacatagtttcatgcacatccgtgtgaagagaccaccaaacagactctgtgtgagcaac

SEQ ID NO: 92259 - DNA, 120 bp, synthetic construct
  source 1..120: mol_type = other DNA
agacaagctgtgaggccagttttatccacagggctattatcagctttataaagtcccaatatcaatttcttaaaaatagggcattccagtcaaatccttgatttttgtctccacttgtgg

SEQ ID NO: 92260 - DNA, 120 bp, synthetic construct
  source 1..120: mol_type = other DNA
gtcattcatttaggcaaagtgataactcaaagatttcaaaaagtaaaaaccttcactctttgagagagaggactcactttcacaaacaataagacctaataaagacagcatgaggccaac

SEQ ID NO: 92261 - DNA, 120 bp, synthetic construct
  source 1..120: mol_type = other DNA
tacttgggtgaacacctgatattcacaggctataaaatagttagcaaggaaataactttaaatgtgactagttttgtctaatgtctcagttctcaaagcaatctaggtaaactgctaaca

SEQ ID NO: 92262 - DNA, 120 bp, synthetic construct
  source 1..120: mol_type = other DNA
tgaaacttctcagatatctcagaagttcaacttctggtgtatcctgctgcttttagccttttcttcatttgagaatagctgagatcttaactctctctttcaactttttgttggctctgg

SEQ ID NO: 92263 - DNA, 120 bp, synthetic construct
  source 1..120: mol_type = other DNA
ttttaccttggggcactgtcttctgagctacaacgtgtatttaaagtcttcgacgaaaccatgaaacttcctatgctggtactaagagtcacgtattcccctgctcaagttactagtaaa

SEQ ID NO: 92264 - DNA, 120 bp, synthetic construct
  source 1..120: mol_type = other DNA
gtgaggagctttgtgttaggtacagctaaatgggaaatcaagtgggtcatgtaccatgaataccatatactctactgtataattctcctgcttatatcagaaactgtttataagcctatt

SEQ ID NO: 92265 - DNA, 120 bp, synthetic construct
  source 1..120: mol_type = other DNA
ctatgaatacatacctgcagacgtctccaacatcttcatttataaccacatcattttgttccttgcagaccccagaaggggtttactgtttggtgggcttcatcctcacctatagaaaat

SEQ ID NO: 92266 - DNA, 120 bp, synthetic construct
  source 1..120: mol_type = other DNA
atcacatggtgacccccggcagccaatgcagtggacgctaggaccctgcgggccgcgggcgccgcgactgcaccggcgccgccgcattataaatacttctccaaaatgcggcgcagctcc

SEQ ID NO: 92267 - DNA, 120 bp, synthetic construct; identical to SEQ ID NO: 9159
  source 1..120: mol_type = other DNA

SEQ ID NO: 92268 - DNA, 120 bp, synthetic construct; identical to SEQ ID NO: 9160
  source 1..120: mol_type = other DNA

SEQ ID NO: 92269 - DNA, 120 bp, synthetic construct; identical to SEQ ID NO: 9161
  source 1..120: mol_type = other DNA

SEQ ID NO: 92270 - DNA, 120 bp, synthetic construct; identical to SEQ ID NO: 9162
  source 1..120: mol_type = other DNA

SEQ ID NO: 92271 - DNA, 120 bp, synthetic construct; identical to SEQ ID NO: 9163
  source 1..120: mol_type = other DNA

SEQ ID NO: 92272 - DNA, 120 bp, synthetic construct; identical to SEQ ID NO: 11743
  source 1..120: mol_type = other DNA

SEQ ID NO: 92273 - DNA, 120 bp, synthetic construct; identical to SEQ ID NO: 11744
  source 1..120: mol_type = other DNA

SEQ ID NO: 92274 - DNA, 120 bp, synthetic construct
  source 1..120: mol_type = other DNA
agaggcgctccccacatctcagacgatgggtggccgggcagagacgctcctcacttcctagatgggatggcagcctggaagaggcgctcctcacttcctagatgggatggcggctgggca

SEQ ID NO: 92275 - DNA, 120 bp, synthetic construct; identical to SEQ ID NO: 11745
  source 1..120: mol_type = other DNA

SEQ ID NO: 92276 - DNA, 120 bp, synthetic construct; identical to SEQ ID NO: 11746
  source 1..120: mol_type = other DNA

SEQ ID NO: 92277 - DNA, 120 bp, synthetic construct; identical to SEQ ID NO: 11747
  source 1..120: mol_type = other DNA

SEQ ID NO: 92278 - DNA, 120 bp, synthetic construct
  source 1..120: mol_type = other DNA
cttccttacaccttatacaaaaattaattcaagatggattaaagacttaaatgttagacctaaaaccataaaaactctagaagaaaacctaggcaacaccattcaggacataggcatgga

SEQ ID NO: 92279 - DNA, 120 bp, synthetic construct
  source 1..120: mol_type = other DNA
caaaaaaccaaacaccgcatgttctcactcatagttgggaattgaacaatgagaacacatggacacaggaaggggaacatcacacactggggcctgtcatggggttggtggagggggaga

SEQ ID NO: 92280 - DNA, 120 bp, synthetic construct
  source 1..120: mol_type = other DNA
atatacacacacacacacacacacgcgcacacacacacacacacacacacacacactctcttcagaatcaagtaatatactctgattcttccctagttaaggcctatctgaaaatctgaa

SEQ ID NO: 92281 - DNA, 120 bp, synthetic construct; identical to SEQ ID NO: 13070
  source 1..120: mol_type = other DNA

SEQ ID NO: 92282 - DNA, 120 bp, synthetic construct; identical to SEQ ID NO: 13071
  source 1..120: mol_type = other DNA

SEQ ID NO: 92283 - DNA, 120 bp, synthetic construct; identical to SEQ ID NO: 13072
  source 1..120: mol_type = other DNA

SEQ ID NO: 92284 - DNA, 120 bp, synthetic construct; identical to SEQ ID NO: 13073
  source 1..120: mol_type = other DNA

SEQ ID NO: 92285 - DNA, 120 bp, synthetic construct
  source 1..120: mol_type = other DNA
gagatggtatctcactgtggttttgatttgcatttctctgatggccagtgatgatgagtatcttttcttgtgttttttggctgcataaatgtcttcttttgagaagtgtctgttcatgtc

SEQ ID NO: 92286 - DNA, 120 bp, synthetic construct
  source 1..120: mol_type = other DNA
acaaaattaatgaatccaggagctggttttttgaaaggatcaacaaaattgatagaccgctagcaagactaataaagaaaaaaagagagaagaatcaaatagacacaataaaaaatgata

SEQ ID NO: 92287 - DNA, 120 bp, synthetic construct
  source 1..120: mol_type = other DNA
ctaattgccctggccagaacttccaacactatgttgaataggagtggtgagacagggcatccctgtcttgtgccagttttcaaagggaatgcttccagtttttgcccattcagtatgatg

SEQ ID NO: 92288 - DNA, 120 bp, synthetic construct; identical to SEQ ID NO: 20370
  source 1..120: mol_type = other DNA

SEQ ID NO: 92289 - DNA, 120 bp, synthetic construct
  source 1..120: mol_type = other DNA
cccagacggggtcgtggccgggcagaggggctcctcacttcccagtaggggcggccgggcagaagcgcccctcacctcccggatggggcggctggccgggcagagggctcctcacttccc

SEQ ID NO: 92290 - DNA, 120 bp, synthetic construct; identical to SEQ ID NO: 20371
  source 1..120: mol_type = other DNA

SEQ ID NO: 92291 - DNA, 120 bp, synthetic construct
  source 1..120: mol_type = other DNA
atccaactactccgagctacaggaggaaattcaaaccaaaggcaaagaatttgaaaactttgaaaaaaatttagacgaatgtataactagaataaccaatacagagaagtgcttaaagga

SEQ ID NO: 92292 - DNA, 120 bp, synthetic construct
  source 1..120: mol_type = other DNA
catcagtgtgctgtattcaggaaacccatctcatgtgcagagacaaacataggctcaaaataaaaggatggaggaagatctaccaagcaaatggaaaacaaaaaaaggcaggggttgcaa

SEQ ID NO: 92293 - DNA, 120 bp, synthetic construct
  source 1..120: mol_type = other DNA
aaggaaatagagacacaaaaaacccttcaaaaaattaatgaatccaggagctagttttttgaaaggatcaacaaaattgatagaccactagcaagactaataaagaaaaaaagagagaag

SEQ ID NO: 92294 - DNA, 120 bp, synthetic construct
  source 1..120: mol_type = other DNA
aaaactctcaataaattaggtattgatgggacgtatctcaaaataataagagctatctatgacaaacccacagccaatatcatactgaatgggcaaaaactggaagcattccctctgaaa

SEQ ID NO: 92295 - DNA, 120 bp, synthetic construct
  source 1..120: mol_type = other DNA
ccaaaacagagatatagatcaatggaacagaacacagccctcagaaataacgtcgcatatctacaactatctgatctttgataagcctgagaacaacaagcaatggggaaaggattccct

SEQ ID NO: 92296 - DNA, 120 bp, synthetic construct
  source 1..120: mol_type = other DNA
cccagccatcccattactgggtatatacccaaaggactagaaatcatgctgctataaagacacatgcacatgtatgtttattgcggcactattcacaatagcaaagacttggaaccaacc

SEQ ID NO: 92297 - DNA, 120 bp, synthetic construct
  source 1..120: mol_type = other DNA
gttcacatcctgtatagggacatagatgaagctggaaaccatcattctgagcaaactatcacaaggacagaaaaccaaacaccgcatgttctcactcataggtgggaattgaacaatgag

SEQ ID NO: 92298 - DNA, 120 bp, synthetic construct; identical to SEQ ID NO: 4537
  source 1..120: mol_type = other DNA

SEQ ID NO: 92299 - DNA, 120 bp, synthetic construct
  source 1..120: mol_type = other DNA
atggcagttttgtggaatagaaaggggggaaaagtggggaaaagattgagaaatcggatggttgccgtgtctgtgtagaaagaagtagacatgggagacttttcattttgttctgtacta

SEQ ID NO: 92300 - DNA, 120 bp, synthetic construct
  source 1..120: mol_type = other DNA
acaaaagttaattcaagatggattaaagacttaaatgttagacctaaaaccataaaaaccctagaagaaaacttaggcaataccattcacgacataggcatgggcaaggacttcatgtct

SEQ ID NO: 92301 - DNA, 120 bp, synthetic construct; identical to SEQ ID NO: 34008
  source 1..120: mol_type = other DNA

SEQ ID NO: 92302 - DNA, 120 bp, synthetic construct; identical to SEQ ID NO: 34009
  source 1..120: mol_type = other DNA

SEQ ID NO: 92303 - DNA, 120 bp, synthetic construct; identical to SEQ ID NO: 34010
  source 1..120: mol_type = other DNA

SEQ ID NO: 92304 - DNA, 120 bp, synthetic construct; identical to SEQ ID NO: 34011
  source 1..120: mol_type = other DNA

SEQ ID NO: 92305 - DNA, 120 bp, synthetic construct; identical to SEQ ID NO: 34012
  source 1..120: mol_type = other DNA

SEQ ID NO: 92306 - DNA, 120 bp, synthetic construct; identical to SEQ ID NO: 34013
  source 1..120: mol_type = other DNA

SEQ ID NO: 92307 - DNA, 120 bp, synthetic construct; identical to SEQ ID NO: 34014
  source 1..120: mol_type = other DNA

SEQ ID NO: 92308 - DNA, 120 bp, synthetic construct; identical to SEQ ID NO: 34015
  source 1..120: mol_type = other DNA

SEQ ID NO: 92309 - DNA, 120 bp, synthetic construct; identical to SEQ ID NO: 34016
  source 1..120: mol_type = other DNA

SEQ ID NO: 92310 - DNA, 120 bp, synthetic construct; identical to SEQ ID NO: 34017
  source 1..120: mol_type = other DNA

SEQ ID NO: 92311 - DNA, 120 bp, synthetic construct
  source 1..120: mol_type = other DNA
acatgaccatggaacaggagtcaccccctttctgtcacttgtcaacaaatgcggattttttttttttttttttttttttttcctcatatgtaggtagcatgcaccagggtgcgcctctgg

SEQ ID NO: 92312 - DNA, 120 bp, synthetic construct; identical to SEQ ID NO: 34018
  source 1..120: mol_type = other DNA

SEQ ID NO: 92313 - DNA, 120 bp, synthetic construct; identical to SEQ ID NO: 34019
  source 1..120: mol_type = other DNA

SEQ ID NO: 92314 - DNA, 120 bp, synthetic construct; identical to SEQ ID NO: 34020
  source 1..120: mol_type = other DNA

SEQ ID NO: 92315 - DNA, 120 bp, synthetic construct; identical to SEQ ID NO: 34011
  source 1..120: mol_type = other DNA

SEQ ID NO: 92316 - DNA, 120 bp, synthetic construct; identical to SEQ ID NO: 34012
  source 1..120: mol_type = other DNA

SEQ ID NO: 92317 - DNA, 120 bp, synthetic construct; identical to SEQ ID NO: 34021
  source 1..120: mol_type = other DNA

SEQ ID NO: 92318 - DNA, 120 bp, synthetic construct
  source 1..120: mol_type = other DNA
actatcgcaaggagaaaaaaccaaacaccacatattctcactcataggtgggaattgaacaatgagaacacatggacacaggaaggggaacatcacactctggggactgttgtggggtgg

SEQ ID NO: 92319 - DNA, 120 bp, synthetic construct
  source 1..120: mol_type = other DNA
cagcagcttggggaatctaaggcagaaggataagttgagtccgggaatgggaattcaagaccagcctggacaacatagcaagactgggtctctacaaaaaaaaaaaaaaaatatatatat

SEQ ID NO: 92320 - DNA, 120 bp, synthetic construct; identical to SEQ ID NO: 13642
  source 1..120: mol_type = other DNA

SEQ ID NO: 92321 - DNA, 120 bp, synthetic construct
  source 1..120: mol_type = other DNA
atcatcactggccatcagagaaatgcaaatcaaaactgcaatgagataccatctcacaccagttagaatggcaatcattaaaaagtcaggaaacaacaggtgctggagaggatgtggaga

SEQ ID NO: 92322 - DNA, 120 bp, synthetic construct; identical to SEQ ID NO: 13643
  source 1..120: mol_type = other DNA

SEQ ID NO: 92323 - DNA, 120 bp, synthetic construct
  source 1..120: mol_type = other DNA
atctagcattaggtatatctcccaatgctatccctcccccctcccccgaaagaagacatttatgcagccaaaaaacacatgaagaaatgctcatcatctttgacaactcttttaaccaag

SEQ ID NO: 92324 - DNA, 120 bp, synthetic construct
  source 1..120: mol_type = other DNA
tgctccaagtaacagaaaacctctaaagcttttaaagtaaaaactgaacaatatacttgttaaaaaaaaccttaccaaaggattataaatcatgctgctgtaaagacacatgcacacgta

SEQ ID NO: 92325 - DNA, 120 bp, synthetic construct
  source 1..120: mol_type = other DNA
acatacccaaaaaccaaagtggttttgaaaggttgaaagtaaaaggatgagtaaagttttattatataagtacaaagaaagcagaaaggggtggggggaggggggagggatggcattggg

SEQ ID NO: 92326 - DNA, 120 bp, synthetic construct
  source 1..120: mol_type = other DNA
aaagaactcaaacaaatttacaagaaaaaaacaacaccatcaaaaagtgggcgaaggacatcaacagacacttctcaaaagaagacatttatgcagccaaaaacacatgaaaaaatgctc

SEQ ID NO: 92327 - DNA, 120 bp, synthetic construct; identical to SEQ ID NO: 13646
  source 1..120: mol_type = other DNA

SEQ ID NO: 92328 - DNA, 120 bp, synthetic construct
  source 1..120: mol_type = other DNA
gatttataatcctttgggaatatgcccagtaatgggatggctgggtcaaatggtatttctagttctagatccctgaggaatcgccacactgtcttccacaatggttgaactagtttacag

SEQ ID NO: 92329 - DNA, 120 bp, synthetic construct
  source 1..120: mol_type = other DNA
cccatttcttgtttttgtcagatttgtcaaagatcagatagttgtagatgtatggtattatttccaggggctctattctgttccattggtctatgtctctgttttggtaccagtaccatg

SEQ ID NO: 92330 - DNA, 120 bp, synthetic construct
  source 1..120: mol_type = other DNA
catgtgcacaacgtgcaggtttgttacatatgtatacacgtgccatgttggtatgctgcacccattaactcgtcatttagcatcaggtatacctcctaatgctatccttcccccctcccc

SEQ ID NO: 92331 - DNA, 120 bp, synthetic construct
  source 1..120: mol_type = other DNA
atgcctatgttcctgaatggtattgcctaggttttcttttagggattttatggttttaggtctaacatttaagtctttaatccatcttgaattaatttttgtataaggtgtaaggaaggg

SEQ ID NO: 92332 - DNA, 120 bp, synthetic construct
  source 1..120: mol_type = other DNA
gggttttttgtgtctctatttccttcagttctgctctaatcttagttatttcttccttctgctagcttttgaatgtgtttgctcttgcttctctagttcttttaattgtgatgttagggt

SEQ ID NO: 92333 - DNA, 120 bp, synthetic construct
  source 1..120: mol_type = other DNA
ttagttgatgcagtttcttcctagcctcgatgttcgttacaatttggcatgtttttgcagtggctgctgccggttgttcctttccatgtttagtgcttccttcaggagctcttttagggc

SEQ ID NO: 92334 - DNA, 120 bp, synthetic construct
  source 1..120: mol_type = other DNA
ttctagttagccattcatctaattttttttcaaagtctttaacttctttgctattggttagaacttcctcctgtagctcagagtagtttgatcatctgaagccttcttctctcaactcgt

SEQ ID NO: 92335 - DNA, 120 bp, synthetic construct
  source 1..120: mol_type = other DNA
caagcgattctctcacatcagcttcccaaagtgcaggggttacagtcgtgagccactgcacccagcctccattttcttaatagtgtcttttgatgagtagaagttttaaattttgattaa

SEQ ID NO: 92336 - DNA, 120 bp, synthetic construct; identical to SEQ ID NO: 21920
  source 1..120: mol_type = other DNA

SEQ ID NO: 92337 - DNA, 120 bp, synthetic construct; identical to SEQ ID NO: 21921
  source 1..120: mol_type = other DNA

SEQ ID NO: 92338 - DNA, 120 bp, synthetic construct; identical to SEQ ID NO: 21922
  source 1..120: mol_type = other DNA

SEQ ID NO: 92339 - DNA, 120 bp, synthetic construct
  source 1..120: mol_type = other DNA
ccgccccctccgggaggtgaggggcgcctctgcccggccgcccctactgggaagtgaggagcccctctgcccggccaccaccccgtctgggaggtgtgcccaacagctcattgagaacgg

SEQ ID NO: 92340 - DNA, 120 bp, synthetic construct; identical to SEQ ID NO: 7250
  source 1..120: mol_type = other DNA

SEQ ID NO: 92341 - DNA, 120 bp, synthetic construct; identical to SEQ ID NO: 7221
  source 1..120: mol_type = other DNA

SEQ ID NO: 92342 - DNA, 120 bp, synthetic construct
  source 1..120: mol_type = other DNA
gctgcataaatgtcttcttttgagaagtgtctgttcatatcctttgccctctttttgatggggttttttttttttcttgtaaatttgttgaagttctttgtagattctggatattagccc

SEQ ID NO: 92343 - DNA, 120 bp, synthetic construct
  source 1..120: mol_type = other DNA
gatgcctccagctttgttctttttgcttaggattatgttggctatgagggcccttttttggttccatatgaagtttaaagtagttttttttccagttctgtgaagaaagtcagtggtagc

SEQ ID NO: 92344 - DNA, 120 bp, synthetic construct; identical to SEQ ID NO: 8508
  source 1..120: mol_type = other DNA

SEQ ID NO: 92345 - DNA, 120 bp, synthetic construct; identical to SEQ ID NO: 8509
  source 1..120: mol_type = other DNA

SEQ ID NO: 92346 - DNA, 120 bp, synthetic construct
  source 1..120: mol_type = other DNA
aggacctctaatttctgccagttacttcactcatttgttctcttcaccatgagtctccagaggatacttccatggtccgtgcctccccatctcccagtaattctgcatttccaagattgg

SEQ ID NO: 92347 - DNA, 120 bp, synthetic construct
  source 1..120: mol_type = other DNA
tgtgtctattattatatacatatctctacgctgcaaattttgggtctcaatttttactgtgcctttgtttttactagtgtctgctgttgcaaaaagaagaaaacattctctgcctgagtt

SEQ ID NO: 92348 - DNA, 120 bp, synthetic construct
  source 1..120: mol_type = other DNA
aaggagcctagcgggttaacaattgtcaagagcagttggtggttctgaaatacaatcctcagccaaggatccctcctgtgttaaagatggatcagctaaaacaattcaacactgaagata

SEQ ID NO: 92349 - DNA, 120 bp, synthetic construct
  source 1..120: mol_type = other DNA
gagacagagacagagacagagagaaagtgagctagtgaattggccaggtgacatactggtaagggagtcaaaggacactctgacttagtgccctcatgacacacagcaaactgtgatcat

SEQ ID NO: 92350 - DNA, 120 bp, synthetic construct
  source 1..120: mol_type = other DNA
acattggacctgggcagatgtgacaaattcagagaactatgattttgactcgagggtttgtagatttcctttttcactctaatttcagtgtctggagtcctcacaaccatgaacaatctg

SEQ ID NO: 92351 - DNA, 120 bp, synthetic construct
  source 1..120: mol_type = other DNA
tgttggttttcattgcagtagatacttaggtttccatttcttcctccccttatcatttactaacctactgcaggtggaccagacttcaaaaactgtattctcatggtgactgcatggaaa

SEQ ID NO: 92352 - DNA, 120 bp, synthetic construct
  source 1..120: mol_type = other DNA
ttcccacttttccaggctcagcagggagctgctggctgagaaagagcctgaagtcttgcaggactcactggatagatgttattcaactccttcagtttatcttggactgactgactcatg

SEQ ID NO: 92353 - DNA, 120 bp, synthetic construct
  source 1..120: mol_type = other DNA
tcagccctgtctcatcaaatactcagattgttcatggtagtgaggattttagatgctgaaagtagagtgaaggatgaaatctacaagatctacagaattgagacaaaatcagagttgtgt

SEQ ID NO: 92354 - DNA, 120 bp, synthetic construct
  source 1..120: mol_type = other DNA
atgagggagtcaacggtcattctctatttgtgctctcaggacacacagtgaacagtgatcatgaaaagcatggcctcaataattttgcataaaatgtgctcaagtttccctgcagccacc

SEQ ID NO: 92355 - DNA, 120 bp, synthetic construct; identical to SEQ ID NO: 8510
  source 1..120: mol_type = other DNA

SEQ ID NO: 92356 - DNA, 120 bp, synthetic construct
  source 1..120: mol_type = other DNA
ggcgtggatgtcttttttgttgatgttgatgctatccctttctgtgtgttagttttccttctaacagtcaggtccctcagcttcaggtctgttggagtttgctggaagtccactccagac

SEQ ID NO: 92357 - DNA, 120 bp, synthetic construct
  source 1..120: mol_type = other DNA
tcttagggtacacgtgcacaacgtgcagcttagttacatatgtatacatgtccacattggtgtgcttcacccattaactcatcatttaacattaggtatatctcctaatgctacccctcc

SEQ ID NO: 92358 - DNA, 120 bp, synthetic construct
  source 1..120: mol_type = other DNA
aaaacacagaatggcaaattggataaagagtcaagacccatcagtgtgctgtactcagaaaacccatctcacatgcagagacacacataggctcaaaataaagggatggaggaagatcta

SEQ ID NO: 92359 - DNA, 120 bp, synthetic construct
  source 1..120: mol_type = other DNA
ttgacaccctaacatcacaattaaaataactagagaagcaaagcaaacaaattcaaaagctagcagaagacaagaagtaactaagatcagagcagaactaaaggagatagacacacaaaa

SEQ ID NO: 92360 - DNA, 120 bp, synthetic construct
  source 1..120: mol_type = other DNA
agtcaagatggtgccactgcactccagcctaggtgacagagcaggactccatcacaaaaaaaaaaaaaaaaaaaaaaaaaaaaaaaaaaaaaaatctacgacgctacaaagaaacattgg

SEQ ID NO: 92361 - DNA, 120 bp, synthetic construct
  source 1..120: mol_type = other DNA
ggcagccgtgctctgttgcagacagaacaggattgcatgttccctcttaatgggaacgtccattttgctttctgggaccactctcttaatgccgcctgtcaaaaccagctaggactccct

SEQ ID NO: 92362 - DNA, 120 bp, synthetic construct
  source 1..120: mol_type = other DNA
gcacttcctaccacaaaatgcccccacatcaagtgccttctccaacaccacacggagaggggcttcatctcattttggaaagcagttgtaagtgttcccacatttgaatgcttcagacct

SEQ ID NO: 92363 - DNA, 120 bp, synthetic construct
  source 1..120: mol_type = other DNA
atgtcctcaaggagaccttgaaacagaaggtcagcacatgttgaaaggaatgtctgtggccaagagaaagaatagaaaatggtttacaggcttcctctgtatcagagagggctcctgcaa

SEQ ID NO: 92364 - DNA, 120 bp, synthetic construct
  source 1..120: mol_type = other DNA
caaggacaaaactctccacagtaccagggtctagacagggatttccacgtctttactcttcagtctcctgactttctggcatctgatcctccaaaatttagagatgaagaaagagaaact

SEQ ID NO: 92365 - DNA, 120 bp, synthetic construct
  source 1..120: mol_type = other DNA
tttgggaggctgaggcgagtagagcacgaggtcaggagtttgagaccagcctgggcaacatggagaaaccccatctccactaaaaatacaaaaagtagatgggcgtggtggcaggtgact

SEQ ID NO: 92366 - DNA, 120 bp, synthetic construct
  source 1..120: mol_type = other DNA
ttatcccatgagtggccaatgtttctgtgtagcacaaaagatttcattttgctttttaaattttttccttttttggttttttgttttctgtttgagacggagtctcactctgtcgcgcag

SEQ ID NO: 92367 - DNA, 120 bp, synthetic construct; identical to SEQ ID NO: 213
  source 1..120: mol_type = other DNA

SEQ ID NO: 92368 - DNA, 120 bp, synthetic construct
  source 1..120: mol_type = other DNA
actggaggcttgtgcagcctctctctggactttggcagctgtcgcccccatcctgccacatatctgattcccaggaacaggcttggtgtcctgtcacagttcgcatttcaaacctcattc

SEQ ID NO: 92369 - DNA, 120 bp, synthetic construct
  source 1..120: mol_type = other DNA
aaggtgagacggtagagaaaatttaacagtgaaaagcattgagtgatccgttcaaatattgcaacagagatttctgagacaatgttctcaaggagaccttcaagcagaaggtcagcacat

SEQ ID NO: 92370 - DNA, 120 bp, synthetic construct
  source 1..120: mol_type = other DNA
ctgtggtcactgcctacagggcaggagccaggtccatcccaaggacaaaactctccccagtaccagggtctagacagggatttccacatctttactcttcagtcttctgactttctggca

SEQ ID NO: 92371 - DNA, 120 bp, synthetic construct
  source 1..120: mol_type = other DNA
gactcactgcaacatctgcctgctgggttcaaaggattctcctgcctcagcctcccgattagtggtgattacagttgcccgccacgacgcccatctactttttgtatttttagtggagac

SEQ ID NO: 92372 - DNA, 120 bp, synthetic construct
  source 1..120: mol_type = other DNA
gttaaaaactggtgaaatcaaataggtttaatcaggactgagggatgtaagtaactgaaattcttaacttactgttgtcaaaaatgtgatcactccccacagcactttaggatccttcac

SEQ ID NO: 92373 - DNA, 120 bp, synthetic construct; identical to SEQ ID NO: 278
  source 1..120: mol_type = other DNA

SEQ ID NO: 92374 - DNA, 120 bp, synthetic construct
  source 1..120: mol_type = other DNA
tatgtgtgtgtatatatatatatacatgtgtatatataaataatacatatacacgtgtatatatattatatacatatacacacgtgtgccatgttggtttgctgcacccattaactcgtc

SEQ ID NO: 92375 - DNA, 120 bp, synthetic construct
  source 1..120: mol_type = other DNA
gtaatggtgtcagtattcataaatacatcaaagtgaaagaatacagactcaaacaatatgcccacatatgtacagttattgattttttttagtagaaacttttttattcataaaaaatcc

SEQ ID NO: 92376 - DNA, 120 bp, synthetic construct; identical to SEQ ID NO: 8511
  source 1..120: mol_type = other DNA

SEQ ID NO: 92377 - DNA, 120 bp, synthetic construct
  source 1..120: mol_type = other DNA
atattccctatttggagatgataatcttcaaaacggtgaatatatatatatatatacacacacacacacacacacatgtttgtgtgtgtgtgtgtgggggtgtgtatacatatatatatg

SEQ ID NO: 92378 - DNA, 120 bp, synthetic construct
  source 1..120: mol_type = other DNA
aataaagtaagaaaaattaataaagtattgaaagaattgaagctgtctttattcacagataatgactgtgtttgttaacaatgctagaaatctacaaaaatctaccagaactaatcagtg

SEQ ID NO: 92379 - DNA, 120 bp, synthetic construct
  source 1..120: mol_type = other DNA
ccaccaaggaagacccagaggcattctcctcaccaaggcattaagaaatgcatgggtgaggggaacagcggcgtgcctgtaaaggtcctgtggcgcctctcctctacaggctggaggtca

SEQ ID NO: 92380 - DNA, 120 bp, synthetic construct; identical to SEQ ID NO: 8512
  source 1..120: mol_type = other DNA

SEQ ID NO: 92381 - DNA, 120 bp, synthetic construct; identical to SEQ ID NO: 8513
  source 1..120: mol_type = other DNA

SEQ ID NO: 92382 - DNA, 120 bp, synthetic construct; identical to SEQ ID NO: 8514
  source 1..120: mol_type = other DNA

SEQ ID NO: 92383 - DNA, 120 bp, synthetic construct
  source 1..120: mol_type = other DNA
aaggcgtctgtctcctgctcatccctgggcaatggaatgtctcggtgtaaagcccgattgtatattccatctactgagataggagaaaaccgccttaggactggaggtgggacatgctgg

SEQ ID NO: 92384 - DNA, 120 bp, synthetic construct; identical to SEQ ID NO: 8515
  source 1..120: mol_type = other DNA

SEQ ID NO: 92385 - DNA, 120 bp, synthetic construct; identical to SEQ ID NO: 8476
  source 1..120: mol_type = other DNA

SEQ ID NO: 92386 - DNA, 120 bp, synthetic construct
  source 1..120: mol_type = other DNA
gtatattgtattagtgtggtccattcgttacaattgatgaaccactgttgatacatcattatcaactaaagtccatagtttacgttagagttcattctttgagtttcacagattgtgggt

SEQ ID NO: 92387 - DNA, 120 bp, synthetic construct; identical to SEQ ID NO: 8474
  source 1..120: mol_type = other DNA

SEQ ID NO: 92388 - DNA, 120 bp, synthetic construct
  source 1..120: mol_type = other DNA
atggtcgggtgaaagtgattttacttcaggagaggacatgttctcttcaggacttttccttggtagctagatctgcatccctctcctctctcttcccctctcaccccccattctctgccc

SEQ ID NO: 92389 - DNA, 120 bp, synthetic construct
  source 1..120: mol_type = other DNA
ctttgtatgtgtagctgctaagattttggggcttttgttactgcagcataacctagtgaaagctcagtgagacagcctgtagaatatacgggtacagatagaccagatagaccagtagat

SEQ ID NO: 92390 - DNA, 120 bp, synthetic construct
  source 1..120: mol_type = other DNA
gagccgagattacactactgtactccagcctggttgacagagcaagactctgtcttgtaccaaaaaaaaaaaaaaaaaaaagaaagaaaaaagaaatcaatgcctagcctaagaatatga

SEQ ID NO: 92391 - DNA, 120 bp, synthetic construct; identical to SEQ ID NO: 8516
  source 1..120: mol_type = other DNA

SEQ ID NO: 92392 - DNA, 120 bp, synthetic construct; identical to SEQ ID NO: 8517
  source 1..120: mol_type = other DNA

SEQ ID NO: 92393 - DNA, 120 bp, synthetic construct; identical to SEQ ID NO: 8518
  source 1..120: mol_type = other DNA

SEQ ID NO: 92394 - DNA, 120 bp, synthetic construct; identical to SEQ ID NO: 8519
  source 1..120: mol_type = other DNA

SEQ ID NO: 92395 - DNA, 120 bp, synthetic construct; identical to SEQ ID NO: 2149
  source 1..120: mol_type = other DNA

SEQ ID NO: 92396 - DNA, 120 bp, synthetic construct
  source 1..120: mol_type = other DNA
ggctggagtgcagtgacaagatatctccgctcactgcaacctccgcctcccaggttcaagcgagtctcctgcctcagcctcccgagtagctgggactacaggcacctgccaccatgcccg

SEQ ID NO: 92397 - DNA, 120 bp, synthetic construct
  source 1..120: mol_type = other DNA
ggttgcagtgagcggagatatcttgtcactgcactccagcctgggtgacagagcgagactccctctaaaaaaaaaaaaaagccttttcttgcagtggtatcttttctttgagttacagtg

SEQ ID NO: 92398 - DNA, 120 bp, synthetic construct; identical to SEQ ID NO: 2149
  source 1..120: mol_type = other DNA

SEQ ID NO: 92399 - DNA, 120 bp, synthetic construct
  source 1..120: mol_type = other DNA
cttatagcaattttattttagtttttgcattttttttttcagacagggtcttactctgttgcccaggctgaagtgtgttggcataatctcagctcactgccacctccacctcctggctca

SEQ ID NO: 92400 - DNA, 120 bp, synthetic construct
  source 1..120: mol_type = other DNA
tcatagctcactaacctctaactcaaggctcaaggaatcctcctgcctcagcctcccgagtagctgagagtgcaagtgtgcgccaccatgctcggctaatttctcattttttattttcag

SEQ ID NO: 92401 - DNA, 120 bp, synthetic construct; identical to SEQ ID NO: 7221
  source 1..120: mol_type = other DNA

SEQ ID NO: 92402 - DNA, 120 bp, synthetic construct
  source 1..120: mol_type = other DNA
atttcagtgcagtgtggtctatttaaaatagtagaacaaaaaggaaagaaaaagagagagcatgagagagagagaaagaaaaagaagaaaggaaagaatggagggagggagggaaggagg

SEQ ID NO: 92403 - DNA, 120 bp, synthetic construct
  source 1..120: mol_type = other DNA
aaatcaaaagtgtagtcactttggaaaacttaagttcattcaaaatcctgcacgtaagtacttacagcaattttatcataattgtcaaaacttggaagtacccaagacgtctttcaccaa

SEQ ID NO: 92404 - DNA, 120 bp, synthetic construct
  source 1..120: mol_type = other DNA
cacttaaatgatattgacaggttactagaagctgagggtagcctggctagaacattaaaaactccttgaagaccagactaagggggaatcttacacatttccaagttttactacaatgat

SEQ ID NO: 92405 - DNA, 120 bp, synthetic construct
  source 1..120: mol_type = other DNA
ccaggttggtctctaactcttgacctcaagtgatccacctgcttggcctctcaaagtgctaggattacagatatgagccacggcctgacctgaactgtggggaaaagaaagagagatcag

SEQ ID NO: 92406 - DNA, 120 bp, synthetic construct
  source 1..120: mol_type = other DNA
cacttgagtagtgtggctttactgttatcaatcacatttctgaaagaataaaaatggttcagtgaagggatgggttgcccctccacacctgtgggcgtttctcgttaggtggaaggagag

SEQ ID NO: 92407 - DNA, 120 bp, synthetic construct
  source 1..120: mol_type = other DNA
gttagtgacttctttatcccctccatgttccctcattttgaactagaatcactgtagttgttattctatgcctgtcccatcatttcacattagggacagataagctgtttgttcagtttc

SEQ ID NO: 92408 - DNA, 120 bp, synthetic construct
  source 1..120: mol_type = other DNA
tgatcccaactggcagctgcttcttggcattaacattggattcccaactagtaaatcttaccaagatctgactttctgcagatataatattattttgtttgaccatccttatcttcaagg

SEQ ID NO: 92409 - DNA, 120 bp, synthetic construct
  source 1..120: mol_type = other DNA
gctacatggcattggggctggtacagcctcactcaattatgtgttgaagagtacacagagactgccaggctgagggacgatgcaagagaatagaagagatgctcacagacaaccacagac

SEQ ID NO: 92410 - DNA, 120 bp, synthetic construct
  source 1..120: mol_type = other DNA
actggggggagattggatcccttggggaagagtgaagccttcaatgctgccacaagtgtgatccgcccgcctcagcctcccaaagtgctgggattacaggcgtgagccaccatgcccggc

SEQ ID NO: 92411 - DNA, 120 bp, synthetic construct
  source 1..120: mol_type = other DNA
tagaatcagcttgaaaatttctaccaaaatgccacttggaatttttattagaattgcattggatctggagatcaatttacgaagaactgactctttaaacataacaactcttctgatcca

SEQ ID NO: 92412 - DNA, 120 bp, synthetic construct
  source 1..120: mol_type = other DNA
tagattaagtgaatttaactgaggttccagaggaaggtctttaggactcagacttagttatagattaaaagaagttaatcacttatgtatttagatgaatgcacacttccacatacacat

SEQ ID NO: 92413 - DNA, 120 bp, synthetic construct
  source 1..120: mol_type = other DNA
aatgaagcaggtacaaggcccctaaaagcaattggtgagaaaaattaaagaaggctaaataaatatatatcatgttcattgcttggaagactcaattttgttagcatattacatcaacac

SEQ ID NO: 92414 - DNA, 120 bp, synthetic construct
  source 1..120: mol_type = other DNA
acgtgtgtatatataatacgtgtatatacataatatacaatatatataacatgtgtatatatattatatatatatatatttttcttttttaagtggcggagcgagggctactgcacagct

SEQ ID NO: 92415 - DNA, 120 bp, synthetic construct
  source 1..120: mol_type = other DNA
tgtattgttttacatttctatgaaagatgtaggccattttcagttgctctacattcccacacacttaatattttcagtcttttaaactacaccaggtgtgtagtgatatcctaaaatttg

SEQ ID NO: 92416 - DNA, 120 bp, synthetic construct
  source 1..120: mol_type = other DNA
gcactgctcagactctgataagagtgaggtagattgtggccagcgtgccaggtaaccgtctgcagttgcaataacagaattagaaggtaggggtgtcatggaatcttaggagccctgcat

SEQ ID NO: 92417 - DNA, 120 bp, synthetic construct
  source 1..120: mol_type = other DNA
ccgtgcagcatggctcactcctgtaatctcagcactttgggaggctgaggcgggcagagcacgaggtcagcagtttgagactagcctgggcaacatggagaaaccccatctccactaaaa

SEQ ID NO: 92418 - DNA, 120 bp, synthetic construct
  source 1..120: mol_type = other DNA
tcaacttccttgacgcgcccttgagtttctctttcttcgtctttaaattttggaggatcagatgccagaaagtcaggagactgaagagtaaagatgtggaaatccctgtctagaccctgg

SEQ ID NO: 92419 - DNA, 120 bp, synthetic construct; identical to SEQ ID NO: 92369
  source 1..120: mol_type = other DNA

SEQ ID NO: 92420 - DNA, 120 bp, synthetic construct
  source 1..120: mol_type = other DNA
tatctgattcccaggaacaggcttggtgtcctgtcacagttcgcatttcaaacctcattctttctcttaggagaggacaaacttgtcccacagtcctctatgcatcatgagactgcacag

SEQ ID NO: 92421 - DNA, 120 bp, synthetic construct; identical to SEQ ID NO: 213
  source 1..120: mol_type = other DNA

SEQ ID NO: 92422 - DNA, 120 bp, synthetic construct
  source 1..120: mol_type = other DNA
ttttttccttttttggttttttgttttctgtttgagacggagtctcactctgtcgcgcaggctgcagtgcagaggcacaatctcagctcactgccacctctgcctcccgggttcaagcga

SEQ ID NO: 92423 - DNA, 120 bp, synthetic construct
  source 1..120: mol_type = other DNA
actagtgaacttttattcagtccaagtttctgttgaggcccaatacgcaaagctctgttctagtgactctgagggaaacttggtgatagtagccagtacccgctctgaggggcttcaaga

SEQ ID NO: 92424 - DNA, 120 bp, synthetic construct
  source 1..120: mol_type = other DNA
gtaccagggtctagacagggatttccacgtctttactcttcagtctcctgactttctggcatctgatcctccaaaatttagagatgaagaaagagaaactcaagggcacatcaaggaagt

SEQ ID NO: 92425 - DNA, 120 bp, synthetic construct
  source 1..120: mol_type = other DNA
gctcttgcaagatcctcgatgatgttccattcatctttcccttctgtaaacaaaagtaggtgtcttcctaattccgtttcaaaaagacatcctttcagttcctcactctggccatggaca

SEQ ID NO: 92426 - DNA, 120 bp, synthetic construct; identical to SEQ ID NO: 92420
  source 1..120: mol_type = other DNA

SEQ ID NO: 92427 - DNA, 120 bp, synthetic construct
  source 1..120: mol_type = other DNA
atgagccaggtgggacagagatgacagaagattaaacacagagggattggaccccaaggagtcctagctggttttgacaagcggcattaagagagtggtcccagaaaacaaatggaggtt

SEQ ID NO: 92428 - DNA, 120 bp, synthetic construct
  source 1..120: mol_type = other DNA
ggtgcctgtagtctcagctacttgggaggctgaggcaggagaatggcatgaacccaggaaccggatcttgcagtgagccgagattgtgccactgcactccagcctgggagacagagcgag

SEQ ID NO: 92429 - DNA, 120 bp, synthetic construct
  source 1..120: mol_type = other DNA
ttcagaagcctcaaagagaaatgttttgtaactcaagtggcctgcttcctggccaagcagcagaacaaatacagtaagatctatatgctcaccatcatgaaagtgatgaacgaagtcctg

SEQ ID NO: 92430 - DNA, 120 bp, synthetic construct
  source 1..120: mol_type = other DNA
cagagtcttgttcctaaagaggaagaaagatcgcacccgagaatgtgtggaggtagcagtgcagtgtacagagcagggaccatgggcctgtctcctgggctccatccaagttgcttgtct

SEQ ID NO: 92431 - DNA, 120 bp, synthetic construct
  source 1..120: mol_type = other DNA
cctcctaaaatctatgctgaggaatgagctacagttcaaggaggagaagcttgcagagcagctgaagcaagctgaggagctcaggtgaggggaccccatgggggcagacaggggggcagg

SEQ ID NO: 92432 - DNA, 120 bp, synthetic construct
  source 1..120: mol_type = other DNA
ttaggcaatataaagtcctggttcactctcaggaacgagagctgacccagttaagggagaagttacgggaagggagagatgcctcccgctcattgaatgagcatctccaggccctcctca

SEQ ID NO: 92433 - DNA, 120 bp, synthetic construct
  source 1..120: mol_type = other DNA
tcatcgttatcattttctgtaaatacagaagtgttcattcagatatttcccacttcacagtctgcaagcacagtcagcccaatgtgcaacagggacatgaacatctaggcatgggtcacc

SEQ ID NO: 92434 - DNA, 120 bp, synthetic construct
  source 1..120: mol_type = other DNA
ggcatgacattagctgagaaggacaaaaaaactccctgatatctgtttagaaacccatcacagttttttattcaaatgaatttgtgttgatagagcctgtcttcagagtttatcttcctc

SEQ ID NO: 92435 - DNA, 120 bp, synthetic construct; identical to SEQ ID NO: 226
  source 1..120: mol_type = other DNA

SEQ ID NO: 92436 - DNA, 120 bp, synthetic construct
  source 1..120: mol_type = other DNA
tttggaataagtgtgatgtgatgctgagaagaatgtatattctgttgatttggggtggagagttctgtagatgtcttttaggtctgcttggtgcagagctgagttcaagtcctggatatc

SEQ ID NO: 92437 - DNA, 120 bp, synthetic construct
  source 1..120: mol_type = other DNA
ccaaaggattataaatcatgctgctgtaaagacacatgcacacatatgtttattgtggcactattcacaatagcaaagacttggaaccaagccaaatatccagcaatgatagactggatt

SEQ ID NO: 92438 - DNA, 120 bp, synthetic construct
  source 1..120: mol_type = other DNA
gaagcgagaagagaaatttagagaaaaaagagtaaaaagaaatgaacaagcctccaataaatatgggactatgtgaaaagaccaaatctacgtttgattggtgtactgaaagtgacgggg

SEQ ID NO: 92439 - DNA, 120 bp, synthetic construct; identical to SEQ ID NO: 214
  source 1..120: mol_type = other DNA

SEQ ID NO: 92440 - DNA, 120 bp, synthetic construct
  source 1..120: mol_type = other DNA
gttggaatgttatcttccctatgtgctctgtcctaggcttctgtacacaaatgagaaattttttccccaataaattgtaggcaaatagttctaacacctcataggagagacacttcaata

SEQ ID NO: 92441 - DNA, 120 bp, synthetic construct
  source 1..120: mol_type = other DNA
aaagagcctgaagtcttgcaggactcactggatagatgttattcaactccttcagtttatcttggactgactgactcatgccagccctacagaagtgccttttacgtattggagcaacag

SEQ ID NO: 92442 - DNA, 120 bp, synthetic construct
  source 1..120: mol_type = other DNA
ttcaacgaaggttgaattactcctactgccattgctgttggttttcattgcagtagatgtttaggtttccatttcttcctccccttgtcatttactaacttactataggttgaccatacc

SEQ ID NO: 92443 - DNA, 120 bp, synthetic construct
  source 1..120: mol_type = other DNA
tgtctaaaattcttgcatccgtgaacgagctgggcatttgatgagacagggccgaatactgcagttttcctcctagaaatcctctggggcattttctttgaactgatgggaacaataagg

SEQ ID NO: 92444 - DNA, 120 bp, synthetic construct
  source 1..120: mol_type = other DNA
ggatagatgttattcaactccttccagttgtcttgaacagcctgactcctgccagccctacagaagttccttttatgcattggaggaaaaacatgttggcttttctcttgacgtgggagg

SEQ ID NO: 92445 - DNA, 120 bp, synthetic construct
  source 1..120: mol_type = other DNA
ccttcgttgaaaacatgacatcaaacacactctggtttccctgaatctgttgcctccaggtgttaacacagaattaagcatccacaattgctgaaagttacctggggcatggtgggttgt

SEQ ID NO: 92446 - DNA, 120 bp, synthetic construct
  source 1..120: mol_type = other DNA
tactctcaagatgttggatctgggcagatgtgacaaattcacacaactctgattttgtctgaattctgtagatcttgtagatttcatccttcactctaatttcagcgtctaaaatcctcg

SEQ ID NO: 92447 - DNA, 120 bp, synthetic construct; identical to SEQ ID NO: 92352
  source 1..120: mol_type = other DNA

SEQ ID NO: 92448 - DNA, 120 bp, synthetic construct
  source 1..120: mol_type = other DNA
atatttaggtttccatttcttcctccccttatcatttactaacctactgcaggtggaccagacttcaaaaactgtattctcatggtgactgcatggaaacttgagcacattttatggaaa

SEQ ID NO: 92449 - DNA, 120 bp, synthetic construct
  source 1..120: mol_type = other DNA
aaaataaggcataactgtttgcacaaacttgggacaaatgatattgggataacgatctactagaatagggacattttacccagagtttctgggagaaaaaccgaggaatttctatcatga

SEQ ID NO: 92450 - DNA, 120 bp, synthetic construct; identical to SEQ ID NO: 215
  source 1..120: mol_type = other DNA

SEQ ID NO: 92451 - DNA, 120 bp, synthetic construct
  source 1..120: mol_type = other DNA
ggtatcaagtggaggctgaaggactgtggcttctctaaccaaaggagcctagtgggttaacaattgtcaagagcagtcagtggttctgaaatacaatcctcagccatggatccctcctgt

SEQ ID NO: 92452 - DNA, 120 bp, synthetic construct
  source 1..120: mol_type = other DNA
atgtttttattaattcacatcagtacccaccaaaaccaatcagcataacaaaagattataacactgaatgtaaaaaacaatccaacagtccagagtgataggcaaaagcttttaattgta

SEQ ID NO: 92453 - DNA, 120 bp, synthetic construct
  source 1..120: mol_type = other DNA
tttagccaggtctgggagccacacgacggcagagggagcaggaaacactatgcaaatagaggccaggacagcagggagggcctgttcatgatagaacccaggcaaaactctcctcagaaa

SEQ ID NO: 92454 - DNA, 120 bp, synthetic construct; identical to SEQ ID NO: 216
  source 1..120: mol_type = other DNA

SEQ ID NO: 92455 - DNA, 120 bp, synthetic construct
  source 1..120: mol_type = other DNA
tccactacacgcccttcagggattccatttagccctatactagggggtttaaagttttgatgccgatggtctttttatgttttcatgtcatttgttactgtgtgtttgatttatgttagt

SEQ ID NO: 92456 - DNA, 120 bp, synthetic construct
  source 1..120: mol_type = other DNA
cctatatattgaagactaccaagtactgcttagagcagttaaagacctttggaatagaaaatgtttcttcttgcatttcaagattgcttttgttttggggggacacactattttttagga

SEQ ID NO: 92457 - DNA, 120 bp, synthetic construct
  source 1..120: mol_type = other DNA
aatacaatctgaggactacatatacatatacataatgaactaatgcctactaggtgaggggctgccttgtgagcaaacccaaggtccctggcttatgaagcctttgtctagaaggaggga

SEQ ID NO: 92458 - DNA, 120 bp, synthetic construct
  source 1..120: mol_type = other DNA
agtgcactgttggtggaacttaaggtgactgtaggacttatatatacatacatacatataatatatatacatatttatgtgtatatacacacacacacacacacacacacacacagggtc

SEQ ID NO: 92459 - DNA, 120 bp, synthetic construct
  source 1..120: mol_type = other DNA
ccagcctgggtgacagagcgagactctgtctcaaaaataaataaataaataaataaacaaacaaacaaacaaacaaaaactgtgtaatccctatgctggagcaactgctctccaggcctc

SEQ ID NO: 92460 - DNA, 120 bp, synthetic construct
  source 1..120: mol_type = other DNA
tgaaggcggcgcgaagaacgggaagagccatcccgggagccaccgggcgttcagcctccctagggcccccaggcggctcgggccggggtctcaaccgggacgtttccggggggtttctga

SEQ ID NO: 92461 - DNA, 120 bp, synthetic construct
  source 1..120: mol_type = other DNA
catttgaacctgggaggtggaggctgcagtggaggctgcaccagtggaggctgcaccactacactcccgcctgggcaacagagcgagactccatctcaaaaaaaaaataaaaataaaaaa

SEQ ID NO: 92462 - DNA, 120 bp, synthetic construct
  source 1..120: mol_type = other DNA
accaggctcttggtgtcccaaacaaagacaccaagagcctggaactgcaccaaaaaccaaaaccaaggtaggggcaagatgataatcacagaatgtcaacggtatatgtttaggttcaaa

SEQ ID NO: 92463 - DNA, 120 bp, synthetic construct; identical to SEQ ID NO: 70132
  source 1..120: mol_type = other DNA

SEQ ID NO: 92464 - DNA, 120 bp, synthetic construct
  source 1..120: mol_type = other DNA
cctataggtcctgcctgcaggaatgacatctctcggcttagtaagggctgcttactgtgggaatatgactcccatctggaagaccaggtggagacttgttcccatcaaagtaagaaacct

SEQ ID NO: 92465 - DNA, 120 bp, synthetic construct
  source 1..120: mol_type = other DNA
tgttaacacagaattaagcatccacaattgctgaaagttacctggggcatggtgggttgtcatcttccccttcttttcttccccttcttcttttcttctttgatcttcttccccttcttt

SEQ ID NO: 92466 - DNA, 120 bp, synthetic construct
  source 1..120: mol_type = other DNA
cacaacagagccccaactaggtttcatgggtagcatagggaagtggttaaaaaactaaaaggatagatccattaatgaggtaacaaattattgccttcatgttgggacagaacagggcca

SEQ ID NO: 92467 - DNA, 120 bp, synthetic construct
  source 1..120: mol_type = other DNA
tgctcactgacccatttcatgtctaggcttccaactgagactacagtttcattacaacctttatgcgcccataggtcctgcctgcggcaatgacatctctcgggtcagtaagggccactt

SEQ ID NO: 92468 - DNA, 120 bp, synthetic construct
  source 1..120: mol_type = other DNA
tctactgcaatgaaaaccaacagcaatgtcaggaggagtaattcaaccttcgttgaaaacatgaaattgaacacactcttgttttccctggacctggcatctccaggtgtcaacacacaa

SEQ ID NO: 92469 - DNA, 120 bp, synthetic construct
  source 1..120: mol_type = other DNA
acctgaaggagttgaataacatctatccagtgagtcctgcaagacttcaggctctttctcatccagcagctccctgctgagcctggaaaagtgggaaaaagtaaagaataagccaggggg

SEQ ID NO: 92470 - DNA, 120 bp, synthetic construct
  source 1..120: mol_type = other DNA
caaaattcccctgtgttggaatgttattttccctatgtgctctgtcctaggtttatgtacacaaatgagcaattttttccccaataaattgtaggcaaatagttctaacacctcatagga

SEQ ID NO: 92471 - DNA, 120 bp, synthetic construct; identical to SEQ ID NO: 214
  source 1..120: mol_type = other DNA

SEQ ID NO: 92472 - DNA, 120 bp, synthetic construct
  source 1..120: mol_type = other DNA
aaaccatggcacgagaactacgtggtgcatgcacaagcttcagtagccaattcgatcaagtgcaagaaatggtatcagtgattcaagatcaaattaatgaaatgaagcgagaagagaagt

SEQ ID NO: 92473 - DNA, 120 bp, synthetic construct
  source 1..120: mol_type = other DNA
gtctttgctattgtgaatagtgccacaataaacatatgtgtgcatgtgtctttacagcagcatgatttataatcatttgggtacacacccagtaatgggatggctgggtcaaatggtatt

SEQ ID NO: 92474 - DNA, 120 bp, synthetic construct
  source 1..120: mol_type = other DNA
ctcccattatgattgtgtggagtctaaatctctttgtaggtctctcaggacttgctttataaatctgggtgctcctgtatagggtgcatatatatttaggatagttaactcttcttgttg

SEQ ID NO: 92475 - DNA, 120 bp, synthetic construct
  source 1..120: mol_type = other DNA
ttcatacttcacatatgaccaaatcactgtccagtcatagcacaaggacataactattctcagtgcaagaataaggattctgacaggaatattctagggtgccctagattaactttggtg

SEQ ID NO: 92476 - DNA, 120 bp, synthetic construct
  source 1..120: mol_type = other DNA
cacctcctgcactgaggtgactatgagattgtcacacttgcctggggtcgagtaacttgatactggggactggcaaacaaaggcatgacattagctgagaaggacaaaaaaactccctga

SEQ ID NO: 92477 - DNA, 120 bp, synthetic construct
  source 1..120: mol_type = other DNA
ttctgcactttctcagccaactcaacttgaacatcttcatcgtcatcgttgtcattttctgtaaatacagaagtgttcgttcagatatttcccacttcacagtctgcaagcacagtcagc

SEQ ID NO: 92478 - DNA, 120 bp, synthetic construct
  source 1..120: mol_type = other DNA
tcataagcctgggattttgggtcatcagggcctatggccaccttacctgggctgagcttttggacaaggtgctgtgtcagtctacacccctcagccagctgttcttggaggtcctgcccc

SEQ ID NO: 92479 - DNA, 120 bp, synthetic construct
  source 1..120: mol_type = other DNA
tgagctgctgtacttcagagatttacacacctgcccccctgcctgcccccatggggtcccctcacctgagctcctcagcttgcttgagctgctctgcaagcttctcctccttgaactgtc

SEQ ID NO: 92480 - DNA, 120 bp, synthetic construct; identical to SEQ ID NO: 156
  source 1..120: mol_type = other DNA

SEQ ID NO: 92481 - DNA, 120 bp, synthetic construct
  source 1..120: mol_type = other DNA
agagatgaacattctagaaatcaatgagaaattgcacccccagctggcagagaagaaacagcagttcgtaaacctcaaagagaaatgttttctaactcaactggccggcttcctggccaa

SEQ ID NO: 92482 - DNA, 120 bp, synthetic construct
  source 1..120: mol_type = other DNA
tctcctgcctcagactcccaagtagttgggaatacaggcgcccgccaccacgcccggctaatttttctttttctttttttttttgtatttttagtagagacggggtttcactgtgttagc

SEQ ID NO: 92483 - DNA, 120 bp, synthetic construct
  source 1..120: mol_type = other DNA
ttctcattgttcagttcccacccatgagtgagaacatgcttgcaccgccgcttctaaatgttttaaaaacagacaccaatgcccttcattggggaaatgaaagacttttaagtaaaacga

SEQ ID NO: 92484 - DNA, 120 bp, synthetic construct; identical to SEQ ID NO: 8278
  source 1..120: mol_type = other DNA

SEQ ID NO: 92485 - DNA, 120 bp, synthetic construct; identical to SEQ ID NO: 8279
  source 1..120: mol_type = other DNA

SEQ ID NO: 92486 - DNA, 120 bp, synthetic construct
  source 1..120: mol_type = other DNA
atatatattgcaatctgataagataaacagcacattgaaacaatttctcaaaagacttagatacttcagaaaagaagatacatgaatgggcaattagcataggaaaagatgctccactgt

SEQ ID NO: 92487 - DNA, 120 bp, synthetic construct
  source 1..120: mol_type = other DNA
tcactgttaggcatgatggtctccatctcctgacctcatgatctgcccacctcggcctcccaaagtgctgagattacaggtgtgagccacggtgcccagtctgttgaatttatttataag

SEQ ID NO: 92488 - DNA, 120 bp, synthetic construct; identical to SEQ ID NO: 279
  source 1..120: mol_type = other DNA

SEQ ID NO: 92489 - DNA, 120 bp, synthetic construct
  source 1..120: mol_type = other DNA
tcttttcggctactttgtttttggaagcatgtatcctaaggcgtccagttgaaaaacctttgtctactgtgtccagacattcctggtggtatttcagattaagacacccttgggttgctg

SEQ ID NO: 92490 - DNA, 120 bp, synthetic construct; identical to SEQ ID NO: 8280
  source 1..120: mol_type = other DNA

SEQ ID NO: 92491 - DNA, 120 bp, synthetic construct; identical to SEQ ID NO: 8477
  source 1..120: mol_type = other DNA

SEQ ID NO: 92492 - DNA, 120 bp, synthetic construct
  source 1..120: mol_type = other DNA
tattgctgccagcatgtcccacctccagtcctaaggcagttttctcctatctcagtagatgggatatacaatcgggctttacaccgagacattccattgcccagggatgagcaggagaca

SEQ ID NO: 92493 - DNA, 120 bp, synthetic construct; identical to SEQ ID NO: 8281
  source 1..120: mol_type = other DNA

SEQ ID NO: 92494 - DNA, 120 bp, synthetic construct
  source 1..120: mol_type = other DNA
gcttttggttttgtatttaagaagccatcattgaacccaggatccccgagattttctcctatgttatctcctaggattcttatggttttgcacttacatttacgtgtaagatttatttta

SEQ ID NO: 92495 - DNA, 120 bp, synthetic construct
  source 1..120: mol_type = other DNA
aaaagatagaagtagtaaaacgatgagtggttgtcaggggtggaggagaggaggaggcatgaaatggtgaagcacagggaattttcagcagtgaaactattttgcatgatgctgtattga

SEQ ID NO: 92496 - DNA, 120 bp, synthetic construct; identical to SEQ ID NO: 8282
  source 1..120: mol_type = other DNA

SEQ ID NO: 92497 - DNA, 120 bp, synthetic construct; identical to SEQ ID NO: 8283
  source 1..120: mol_type = other DNA

SEQ ID NO: 92498 - DNA, 120 bp, synthetic construct; identical to SEQ ID NO: 8284
  source 1..120: mol_type = other DNA

SEQ ID NO: 92499 - DNA, 120 bp, synthetic construct; identical to SEQ ID NO: 8285
  source 1..120: mol_type = other DNA

SEQ ID NO: 92500 - DNA, 120 bp, synthetic construct
  source 1..120: mol_type = other DNA
cctgagaccaggaattccagaccagcctatgcaatgtggcaaaaccccatctctactaaaaatacagaaaagagctgagtgtggtggtgctcacctgtaggtcccagctacttgggggct

SEQ ID NO: 92501 - DNA, 120 bp, synthetic construct
  source 1..120: mol_type = other DNA
tcccaaagtgctgggattacaggtgtgatctaccgcgcccggaccacctgcacatttaaaattgtgaacctctctgtatacttcagtaacttttcaaagatttctttgacacaaagttct

SEQ ID NO: 92502 - DNA, 120 bp, synthetic construct; identical to SEQ ID NO: 8286
  source 1..120: mol_type = other DNA

SEQ ID NO: 92503 - DNA, 120 bp, synthetic construct
  source 1..120: mol_type = other DNA
cgtccacccagctaacagctttgaaaacttgaaattttatctaaggcaaatgcttgcataactttaggtagtgccattattattattgttattattattattattattattatttgaaac

SEQ ID NO: 92504 - DNA, 120 bp, synthetic construct
  source 1..120: mol_type = other DNA
agcaggtaaaagaaacctaaagcaggccaggcacggtggctcacgccggtaatacgagcactttgggaggccaaggtgggtggatcacctgaggtgaggagtttgaaacgagcctggcca

SEQ ID NO: 92505 - DNA, 120 bp, synthetic construct
  source 1..120: mol_type = other DNA
cccagcactttgggaggccaaggcgggctgatcacgaagtcaggggatcgagaccatcctgactaacacggtgaaaacccgtctctaccaaaaatacaaaaaatcagccgggcgtggtgg

SEQ ID NO: 92506 - DNA, 120 bp, synthetic construct; identical to SEQ ID NO: 8287
  source 1..120: mol_type = other DNA

SEQ ID NO: 92507 - DNA, 120 bp, synthetic construct; identical to SEQ ID NO: 8288
  source 1..120: mol_type = other DNA

SEQ ID NO: 92508 - DNA, 120 bp, synthetic construct; identical to SEQ ID NO: 92458
  source 1..120: mol_type = other DNA

SEQ ID NO: 92509 - DNA, 120 bp, synthetic construct
  source 1..120: mol_type = other DNA
tgagatggcgccactgcactccagcctgggtgacagagcgagactctgtctcaaaaataaataaataaataaataaacaaacaaacaaacaaacaaaaactgtgtaatccctatgctgga

SEQ ID NO: 92510 - DNA, 120 bp, synthetic construct; identical to SEQ ID NO: 92460
  source 1..120: mol_type = other DNA

SEQ ID NO: 92511 - DNA, 120 bp, synthetic construct; identical to SEQ ID NO: 92461
  source 1..120: mol_type = other DNA

SEQ ID NO: 92512 - DNA, 120 bp, synthetic construct; identical to SEQ ID NO: 92462
  source 1..120: mol_type = other DNA

SEQ ID NO: 92513 - DNA, 120 bp, synthetic construct
  source 1..120: mol_type = other DNA
tatcatgataatgctgatggacaaactagaccttctctgcccgcagatgggctaaggttggaaactcacagcattgtctctgcagtgttcccggcaaaacgtttaggctgaatttaatca

SEQ ID NO: 92514 - DNA, 120 bp, synthetic construct
  source 1..120: mol_type = other DNA
gtctgactgatcactcccggcatgttctgcacagttatgtgaacgtgtcacacctaacatgggtccattgtcttcagattgagcacaggttgccaatggcatggtttgagaataggaata

SEQ ID NO: 92515 - DNA, 120 bp, synthetic construct
  source 1..120: mol_type = other DNA
caggtgttaacacagaactaaggatccagaattgctgaaagtcacctggggcatggtgggttttgattttcttccccttcttttcttccccttcttcttttcttctttgatcttcttccc

SEQ ID NO: 92516 - DNA, 120 bp, synthetic construct
  source 1..120: mol_type = other DNA
attaatgaggtaacaaattattgccttcatgttgggacagaacagggccaaatggaaaagaatgaaagagaaagacagatagacacacacacacacacacacacacacacacacacagac

SEQ ID NO: 92517 - DNA, 120 bp, synthetic construct
  source 1..120: mol_type = other DNA
attttagacactgaaattagaatgaaggaggaaatctacaaacccttcagtccaaatcatacttctgtgaattttttacatctgcctgggtccaatgtgctgagagcgggctcagcttgc

SEQ ID NO: 92518 - DNA, 120 bp, synthetic construct
  source 1..120: mol_type = other DNA
cagcaatatcaggaggagtaattcaaccttcgttgaaaacatgaaattgaacacactcttgttttccctggacctggcatctccaggtgtcaacacagaattaagcatccataattgctc

SEQ ID NO: 92519 - DNA, 120 bp, synthetic construct
  source 1..120: mol_type = other DNA
taatgaggtaacaaattattgcctttatgttgggatagaacagggccaggtagaaaacaatgaaagagaaagacagagagagagagagagacagagacagagagagagacagagacagag

SEQ ID NO: 92520 - DNA, 120 bp, synthetic construct
  source 1..120: mol_type = other DNA
ctttagacactgaaattagagtgaaaaaggaaatctacaaacccttgagtcaaaatcatagttctctgaatttgtcacatctgcccaggtccaatgtcatgaggataggatcagggcgcc

SEQ ID NO: 92521 - DNA, 120 bp, synthetic construct
  source 1..120: mol_type = other DNA
aagtagctgttcacaattgctcagttacctggggcatggtgggccttggtcttcttcctcttcttggtcctttttagttcctgcaatacattcagacagggacagacaaaataagccaat

SEQ ID NO: 92522 - DNA, 120 bp, synthetic construct
  source 1..120: mol_type = other DNA
aaaagaaaaaggacagatccattaatgaggtaatgaattattgcctttatgttgggatagaccagggccaggtagaaaagaatgaaagagaaagacagggagagggagggagagagagag

SEQ ID NO: 92523 - DNA, 120 bp, synthetic construct
  source 1..120: mol_type = other DNA
attgagacaaaatcagagttgtgtgaatttgtcacatctgcccaggtccaacgtcatgagagtaggattagggcgccacaggcatggcctgagactaggaagagagccttgctcactgac

SEQ ID NO: 92524 - DNA, 120 bp, synthetic construct
  source 1..120: mol_type = other DNA
aaaacatgacatcaaacacactctggtttccctgaatctgttgcctccaggtgttaacacagaattaagcatccacaattgctgaaagtcacctggggcatggtgggttttgatcttctt

SEQ ID NO: 92525 - DNA, 120 bp, synthetic construct; identical to SEQ ID NO: 92466
  source 1..120: mol_type = other DNA

SEQ ID NO: 92526 - DNA, 120 bp, synthetic construct; identical to SEQ ID NO: 92517
  source 1..120: mol_type = other DNA

SEQ ID NO: 92527 - DNA, 120 bp, synthetic construct; identical to SEQ ID NO: 92524
  source 1..120: mol_type = other DNA

SEQ ID NO: 92528 - DNA, 120 bp, synthetic construct; identical to SEQ ID NO: 92466
  source 1..120: mol_type = other DNA

SEQ ID NO: 92529 - DNA, 120 bp, synthetic construct
  source 1..120: mol_type = other DNA
aaacccttcagtccaaatcatagttctgtgaattttttacatctgcctgggtccaatgtgctgagagcgggctcagcttgccacaggcatggctggagactaggaatagagccttgctca

SEQ ID NO: 92530 - DNA, 120 bp, synthetic construct; identical to SEQ ID NO: 92524
  source 1..120: mol_type = other DNA

SEQ ID NO: 92531 - DNA, 120 bp, synthetic construct
  source 1..120: mol_type = other DNA
cagctccctgctgagcctggaaaaggaggaaaaagtaaagaataagccaggggaaatcagacacaacagagccccaactaggtttcatgggtagcatagggaagtggttaaaaaactaaa

SEQ ID NO: 92532 - DNA, 120 bp, synthetic construct; identical to SEQ ID NO: 92517
  source 1..120: mol_type = other DNA

SEQ ID NO: 92533 - DNA, 120 bp, synthetic construct
  source 1..120: mol_type = other DNA
atatcaggaggagtaattcaaccttcgttgaaaacatgaaattgaacacactcttgttttccctggacctggcatctccaggtgtcaacacagaattaagcatccataattgctcaaagt

SEQ ID NO: 92534 - DNA, 120 bp, synthetic construct
  source 1..120: mol_type = other DNA
cgctgttgctccaatacgtaaaaggcacttctgtagggctggcatgagtcagtcagttcaagacaacctgaaggagttgaataacatctatccagtgagtcctgcaagacttcaggccct

SEQ ID NO: 92535 - DNA, 120 bp, synthetic construct
  source 1..120: mol_type = other DNA
accgtgagagatatatttcaggaggcctgaaggctggtcatgatagaaattcctcggtttttctcccagaaactgtgggtaaaatgtccctattctagtagatcgttatcccaatatcat

SEQ ID NO: 92536 - DNA, 120 bp, synthetic construct
  source 1..120: mol_type = other DNA
aagacagatagacacacacacacacacacacacacacacacacacacacagacacacacacagacaaacacacacacagagagagaacgagctcagtgaattgtccaggtgacacactga

SEQ ID NO: 92537 - DNA, 120 bp, synthetic construct; identical to SEQ ID NO: 92517
  source 1..120: mol_type = other DNA

SEQ ID NO: 92538 - DNA, 120 bp, synthetic construct
  source 1..120: mol_type = other DNA
gcagttgccatacagcctttgaggtatggtcaacctatagtaagttagtaaatgataaggggaggaagaaatggaaacctaaacatctactgcaatgaaaaccaacagcaatatcaggag

SEQ ID NO: 92539 - DNA, 120 bp, synthetic construct
  source 1..120: mol_type = other DNA
catgtcaacagccaagccaacacgctgttgctccaatacgtaaaaggcacttctgtagggctggcatgagtcagtcagttcaagacaacctgaaggagttgaataacatctatccagtga

SEQ ID NO: 92540 - DNA, 120 bp, synthetic construct
  source 1..120: mol_type = other DNA
tcagcataagaataggacaccgtgagagatatatttcaggaggcctgaaggctggtcatgatagaaattcctcggtttttctcccagaaactgtgggtaaaatgtccctattctagtaga

SEQ ID NO: 92541 - DNA, 120 bp, synthetic construct
  source 1..120: mol_type = other DNA
agacagatagacacacacacacacacacacacacacacacacacacagacacacacacagacacacacacacacagagagagaacgagctcagtgaattgtccaggtgacacactgatga

SEQ ID NO: 92542 - DNA, 120 bp, synthetic construct; identical to SEQ ID NO: 92517
  source 1..120: mol_type = other DNA

SEQ ID NO: 92543 - DNA, 120 bp, synthetic construct
  source 1..120: mol_type = other DNA
acatattaagctggttctcctacacacataacaatccactgtctaatcctcacacggggacttcaggctcctcagcatgagaataggacactgtgagaggtagtcttcaggaggcctgaa

SEQ ID NO: 92544 - DNA, 120 bp, synthetic construct
  source 1..120: mol_type = other DNA
cgtaaggaagagtttgaaaagaaaaaggacagatccattaatgaggtaacaaattattgcctttatgttgggatagaacagggccaggtagaaaacaatgaaagagaaagacagagagag

SEQ ID NO: 92545 - DNA, 120 bp, synthetic construct
  source 1..120: mol_type = other DNA
actgaaattagagtgaaaaaggaaatctacaaacccttgagtcaaaatcatagttctctgaatttgtcacatctgcccaggtccaatgtcatgaggataggatcagggcgccacaggtat

SEQ ID NO: 92546 - DNA, 120 bp, synthetic construct; identical to SEQ ID NO: 92521
  source 1..120: mol_type = other DNA

SEQ ID NO: 92547 - DNA, 120 bp, synthetic construct
  source 1..120: mol_type = other DNA
aactgtttaaaaagaaaaaggacagatccattaatgaggtaatgaattattgcctttatgttgggatagaccagggccaggtagaaaagaatgaaagagaaagacagggagagggagaga

SEQ ID NO: 92548 - DNA, 120 bp, synthetic construct; identical to SEQ ID NO: 92523
  source 1..120: mol_type = other DNA

SEQ ID NO: 92549 - DNA, 120 bp, synthetic construct; identical to SEQ ID NO: 92524
  source 1..120: mol_type = other DNA

SEQ ID NO: 92550 - DNA, 120 bp, synthetic construct; identical to SEQ ID NO: 92466
  source 1..120: mol_type = other DNA

SEQ ID NO: 92551 - DNA, 120 bp, synthetic construct; identical to SEQ ID NO: 92529
  source 1..120: mol_type = other DNA

SEQ ID NO: 92552 - DNA, 120 bp, synthetic construct
  source 1..120: mol_type = other DNA
atggacagacatattaagctggttctcctacacacataacaatccactgtctaatcctcacacagggacttcaggctcctcagcatgagaataggacactgtgagagatagtcttcagga

SEQ ID NO: 92553 - DNA, 120 bp, synthetic construct; identical to SEQ ID NO: 92519
  source 1..120: mol_type = other DNA

SEQ ID NO: 92554 - DNA, 120 bp, synthetic construct; identical to SEQ ID NO: 92545
  source 1..120: mol_type = other DNA

SEQ ID NO: 92555 - DNA, 120 bp, synthetic construct; identical to SEQ ID NO: 92521
  source 1..120: mol_type = other DNA

SEQ ID NO: 92556 - DNA, 120 bp, synthetic construct
  source 1..120: mol_type = other DNA
ggaactgtttaaaaagaaaaaggacagatccattaatgaggtaatgaattattgcctttatgttgggatagaccagggccaggtagaaaagaatgaaagagaaagacagggagagggagg

SEQ ID NO: 92557 - DNA, 120 bp, synthetic construct; identical to SEQ ID NO: 92523
  source 1..120: mol_type = other DNA

SEQ ID NO: 92558 - DNA, 120 bp, synthetic construct; identical to SEQ ID NO: 92524
  source 1..120: mol_type = other DNA

SEQ ID NO: 92559 - DNA, 120 bp, synthetic construct; identical to SEQ ID NO: 92466
  source 1..120: mol_type = other DNA

SEQ ID NO: 92560 - DNA, 120 bp, synthetic construct; identical to SEQ ID NO: 92529
  source 1..120: mol_type = other DNA

SEQ ID NO: 92561 - DNA, 120 bp, synthetic construct; identical to SEQ ID NO: 92552
  source 1..120: mol_type = other DNA

SEQ ID NO: 92562 - DNA, 120 bp, synthetic construct
  source 1..120: mol_type = other DNA
atttattgcctatatgttgggatagaacagggccaggtagaaaacaatgaaagagaaagacagagagagagagacagagacagagagagagagaaagtgacctagtgaattgcccaggtg

SEQ ID NO: 92563 - DNA, 120 bp, synthetic construct; identical to SEQ ID NO: 92545
  source 1..120: mol_type = other DNA

SEQ ID NO: 92564 - DNA, 120 bp, synthetic construct; identical to SEQ ID NO: 92521
  source 1..120: mol_type = other DNA

SEQ ID NO: 92565 - DNA, 120 bp, synthetic construct; identical to SEQ ID NO: 92556
  source 1..120: mol_type = other DNA

SEQ ID NO: 92566 - DNA, 120 bp, synthetic construct
  source 1..120: mol_type = other DNA
gattgttcacggtagcgaggattttagacgctgaaattagagtgaaggatgaaatctacaagatctacaaaattgagacaaaatcagagttgtgtgaatttgtcacatctgcccaggtcc

SEQ ID NO: 92567 - DNA, 120 bp, synthetic construct
  source 1..120: mol_type = other DNA
cctatggtacgttaggaaatgataaggggaggaagaaatggaaacctaaacatctactgcaatgaaaaccaacagcaatgacagtaggagtaattcagccttcgttgaaaacatgacatc

SEQ ID NO: 92568 - DNA, 120 bp, synthetic construct
  source 1..120: mol_type = other DNA
gtatggcctgagactaggaagagagtcttgctcactgacccatcccttgcctgggcttccaggtagaactagagtttcattcaacctacatgtgcctataggtcctccctgtggcaatga

SEQ ID NO: 92569 - DNA, 120 bp, synthetic construct
  source 1..120: mol_type = other DNA
cttcttcctcttcttggtcctttttagttcctgcaatacattcagacagggacagacaaaataagccaattcacctacacccataacagtccactgtctaatccccacacagggatctca

SEQ ID NO: 92570 - DNA, 120 bp, synthetic construct; identical to SEQ ID NO: 92556
  source 1..120: mol_type = other DNA

SEQ ID NO: 92571 - DNA, 120 bp, synthetic construct; identical to SEQ ID NO: 92523
  source 1..120: mol_type = other DNA

SEQ ID NO: 92572 - DNA, 120 bp, synthetic construct; identical to SEQ ID NO: 92524
  source 1..120: mol_type = other DNA

SEQ ID NO: 92573 - DNA, 120 bp, synthetic construct; identical to SEQ ID NO: 92466
  source 1..120: mol_type = other DNA

SEQ ID NO: 92574 - DNA, 120 bp, synthetic construct; identical to SEQ ID NO: 92517
  source 1..120: mol_type = other DNA

SEQ ID NO: 92575 - DNA, 120 bp, synthetic construct; identical to SEQ ID NO: 92533
  source 1..120: mol_type = other DNA

SEQ ID NO: 92576 - DNA, 120 bp, synthetic construct; identical to SEQ ID NO: 92539
  source 1..120: mol_type = other DNA

SEQ ID NO: 92577 - DNA, 120 bp, synthetic construct; identical to SEQ ID NO: 92540
  source 1..120: mol_type = other DNA

SEQ ID NO: 92578 - DNA, 120 bp, synthetic construct
  source 1..120: mol_type = other DNA
gaggtaacaaattattgccttcatgttgggacagaacagggccaaatggaaaagaatgaaagagaaagacagatagacacacacacacacacacacacacacacacacacacacacagac

SEQ ID NO: 92579 - DNA, 120 bp, synthetic construct
  source 1..120: mol_type = other DNA
atacttctgtgaattttttacatctgcctgggtccaatgtgctgagagcgggctcagcttgccacaggcatggctggagactaggaatagagccttgctcactgacccatttcatgtcta

SEQ ID NO: 92580 - DNA, 120 bp, synthetic construct; identical to SEQ ID NO: 92552
  source 1..120: mol_type = other DNA

SEQ ID NO: 92581 - DNA, 120 bp, synthetic construct; identical to SEQ ID NO: 92519
  source 1..120: mol_type = other DNA

SEQ ID NO: 92582 - DNA, 120 bp, synthetic construct; identical to SEQ ID NO: 92545
  source 1..120: mol_type = other DNA

SEQ ID NO: 92583 - DNA, 120 bp, synthetic construct; identical to SEQ ID NO: 92521
  source 1..120: mol_type = other DNA

SEQ ID NO: 92584 - DNA, 120 bp, synthetic construct; identical to SEQ ID NO: 92522
  source 1..120: mol_type = other DNA

SEQ ID NO: 92585 - DNA, 120 bp, synthetic construct; identical to SEQ ID NO: 92523
  source 1..120: mol_type = other DNA

SEQ ID NO: 92586 - DNA, 120 bp, synthetic construct
  source 1..120: mol_type = other DNA
caggtgttaacacagaattaagcatccacaattgctgaaagtcacctggggcatggtggggtttgatcttcttccccttcttttcttccccttcttctttccttctttgatcttcttccc

SEQ ID NO: 92587 - DNA, 120 bp, synthetic construct; identical to SEQ ID NO: 92578
  source 1..120: mol_type = other DNA

SEQ ID NO: 92588 - DNA, 120 bp, synthetic construct; identical to SEQ ID NO: 92517
  source 1..120: mol_type = other DNA

SEQ ID NO: 92589 - DNA, 120 bp, synthetic construct
  source 1..120: mol_type = other DNA
ataagttcagacatggacagacatattaagctggttctcctacacacataacaatccactgtctaatcctcacacggggacttcaggctcctcagcatgagaataggacactgtgagagg

SEQ ID NO: 92590 - DNA, 120 bp, synthetic construct; identical to SEQ ID NO: 92519
  source 1..120: mol_type = other DNA

SEQ ID NO: 92591 - DNA, 120 bp, synthetic construct; identical to SEQ ID NO: 92545
  source 1..120: mol_type = other DNA

SEQ ID NO: 92592 - DNA, 120 bp, synthetic construct; identical to SEQ ID NO: 92521
  source 1..120: mol_type = other DNA

SEQ ID NO: 92593 - DNA, 120 bp, synthetic construct; identical to SEQ ID NO: 92556
  source 1..120: mol_type = other DNA

SEQ ID NO: 92594 - DNA, 120 bp, synthetic construct; identical to SEQ ID NO: 92566
  source 1..120: mol_type = other DNA

SEQ ID NO: 92595 - DNA, 120 bp, synthetic construct
  source 1..120: mol_type = other DNA
ggaaatgataaggggaggaagaaatggaaacctaaacatctactgcaatgaaaaccaacagcaatgacagtaggagtaattcagccttcgttgaaaacatgacatcaaacacactctggt

SEQ ID NO: 92596 - DNA, 120 bp, synthetic construct
  source 1..120: mol_type = other DNA
cctgggcttccaggtagaactagagtttcattcaacctacatgtgcctataggtcctccctgtggcaatgacatctctcagctcagtaatggccacttggagcaggaatatgatctttat

SEQ ID NO: 92597 - DNA, 120 bp, synthetic construct; identical to SEQ ID NO: 92569
  source 1..120: mol_type = other DNA

SEQ ID NO: 92598 - DNA, 120 bp, synthetic construct
  source 1..120: mol_type = other DNA
tgcctttatgttggcatagaccagggccaggtagaaaagaatgaaagagaaagacagggagagggagggagagagagagagagagaggagaaagtgagctcagcgagttggccgggtgac

SEQ ID NO: 92599 - DNA, 120 bp, synthetic construct; identical to SEQ ID NO: 92523
  source 1..120: mol_type = other DNA

SEQ ID NO: 92600 - DNA, 120 bp, synthetic construct; identical to SEQ ID NO: 92524
  source 1..120: mol_type = other DNA

SEQ ID NO: 92601 - DNA, 120 bp, synthetic construct; identical to SEQ ID NO: 92466
  source 1..120: mol_type = other DNA

SEQ ID NO: 92602 - DNA, 120 bp, synthetic construct; identical to SEQ ID NO: 92517
  source 1..120: mol_type = other DNA

SEQ ID NO: 92603 - DNA, 120 bp, synthetic construct; identical to SEQ ID NO: 92533
  source 1..120: mol_type = other DNA

SEQ ID NO: 92604 - DNA, 120 bp, synthetic construct
  source 1..120: mol_type = other DNA
cacttctgtagggctggcatgagtcagtcagttcaagacaacctgaaggagttgaataacttctatccagtgagtcctgcaagacttcaggccctttctcatccagcagctccctgctga

SEQ ID NO: 92605 - DNA, 120 bp, synthetic construct; identical to SEQ ID NO: 92535
  source 1..120: mol_type = other DNA

SEQ ID NO: 92606 - DNA, 120 bp, synthetic construct
  source 1..120: mol_type = other DNA
taatgaggtaacaaattattgccttcatgttgggacagaacagggccaaatggaaaagaatgaaagagaaagacagatagacacacacacacacacacacacacagacacacacacagac

SEQ ID NO: 92607 - DNA, 120 bp, synthetic construct; identical to SEQ ID NO: 92517
  source 1..120: mol_type = other DNA

SEQ ID NO: 92608 - DNA, 120 bp, synthetic construct; identical to SEQ ID NO: 92543
  source 1..120: mol_type = other DNA

SEQ ID NO: 92609 - DNA, 120 bp, synthetic construct; identical to SEQ ID NO: 92544
  source 1..120: mol_type = other DNA

SEQ ID NO: 92610 - DNA, 120 bp, synthetic construct
  source 1..120: mol_type = other DNA
attcctcggtttttctcccagaaactgtgggtaaaatgtccctattctagtagatcgttatcccaatatcatttgtcccaagtttgtgcaaacagttatgccatatttttccaatcaact

SEQ ID NO: 92611 - DNA, 120 bp, synthetic construct
  source 1..120: mol_type = other DNA
tgaaagagaaagacagatagacacacacacacacacacacacacacacacagacacacacacagacacacacacacacagagagagaacgagctcagtgaattgtccaggtgacacactg

SEQ ID NO: 92612 - DNA, 120 bp, synthetic construct; identical to SEQ ID NO: 92517
  source 1..120: mol_type = other DNA

SEQ ID NO: 92613 - DNA, 120 bp, synthetic construct; identical to SEQ ID NO: 92552
  source 1..120: mol_type = other DNA

SEQ ID NO: 92614 - DNA, 120 bp, synthetic construct
  source 1..120: mol_type = other DNA
gaaattattgcctttatgttgggatagactagggccaggtagaaaaggatgaaagagagagacacacactcacacacacacacaaacacacacacacacacacacacacacacacacaga

SEQ ID NO: 92615 - DNA, 120 bp, synthetic construct
  source 1..120: mol_type = other DNA
aaacttggttctacacagaagcatcagctattatggcttttgtgggtgaaaagtcagccgtttatctagaaaacgtaccaggaacatgatggacagatgagctaaaacaagcgcacttag

SEQ ID NO: 92616 - DNA, 120 bp, synthetic construct
  source 1..120: mol_type = other DNA
tgtctgcattgggtcaagaactctcttgacttgaatgctgcgtgtaaaattcaacccaatttatgcaaagtagttgaagccctgtgtcagttctctgtgctgcaagtcatgatggtagtt

SEQ ID NO: 92617 - DNA, 120 bp, synthetic construct
  source 1..120: mol_type = other DNA
cgtttgattggtgtactgaaagtgacggggagaatggaaccaagctgggaaacattcttcaggatattatccaggaggacttccccaacctagcaaggaaggccaacattcaaattcagg

SEQ ID NO: 92618 - DNA, 120 bp, synthetic construct
  source 1..120: mol_type = other DNA
ccacaatcgttgaactagtttacactcccaccaacagtgtaaaagtgttcctatttctccacatcctctccagcatcttcaacattcttaaagaaaagaattttcaacccagaatttcat

SEQ ID NO: 92619 - DNA, 120 bp, synthetic construct
  source 1..120: mol_type = other DNA
aacccaggattaagaaactcactcaaaaccgcacaactacatggaaactcaacaacctgctcctgaatgactactgggaaaataacaaaatgaaggcagaaataaagatgttctttgaaa

SEQ ID NO: 92620 - DNA, 120 bp, synthetic construct
  source 1..120: mol_type = other DNA
tttaatgtccatgttacctggtgatataagtccatatcgcagcaacactcttagaaaattgtttgaccaatttttggagatttttttggggaaaaaattttgtttaactttgactcaagc

SEQ ID NO: 92621 - DNA, 120 bp, synthetic construct
  source 1..120: mol_type = other DNA
aaattcatttgaataaaaaactgtgatgggtttctaaacagatatcagggagtttttttgtccttcacagctaatgtcatgactttgtctgccagtccccagtatcaagttactcaaccc

SEQ ID NO: 92622 - DNA, 120 bp, synthetic construct
  source 1..120: mol_type = other DNA
caggcaatgcatttctgatctggagggccaccatcaacatgtggccaaatattgaaaagacctttcgcttcccatatcactggaggcttgtgcagcctctctctggacgttggcagctgt

SEQ ID NO: 92623 - DNA, 120 bp, synthetic construct
  source 1..120: mol_type = other DNA
tgagcgggaggcatctctcccttcccgcaacttctcccttaactgggtcagctctcgttcctgagcgtgaaccaggactttatattgcctaaggtgagatggtagagaaaaattaagagt

SEQ ID NO: 92624 - DNA, 120 bp, synthetic construct
  source 1..120: mol_type = other DNA
tgcttgagctgctctgcaagcttctcctccttgaactgtcgctcattcctcagcatagattttatgaggtctttgcactcttcattttctgagaaaagacagacacgcctgcctcagtgg

SEQ ID NO: 92625 - DNA, 120 bp, synthetic construct
  source 1..120: mol_type = other DNA
agcctttgaacccagcaggcaggtgttgcagtgagccaagattgcactattgcactccagcatgggtgacagggcaagactcgtcaaaaaacaaacaaacaaaaggataaataaatcaaa

SEQ ID NO: 92626 - DNA, 120 bp, synthetic construct
  source 1..120: mol_type = other DNA
tgatggtgagcctatagatcttactgtatttcttctgctggttggccaggaagccggccagttgagttacaaaacatctctctttgaggtttccgaactgctgtttgttctctgccaact

SEQ ID NO: 92627 - DNA, 120 bp, synthetic construct
  source 1..120: mol_type = other DNA
agtactttgggaggccgaggcggcagatcacgaggtcaggagatcgagaccatcgtggctaacacagtgaaaccccgtctctactaaaaatacaaaaaaagaaaaaaaaaaagaaaagaa

SEQ ID NO: 92628 - DNA, 120 bp, synthetic construct
  source 1..120: mol_type = other DNA
ctatccctcccccagccctcaccccatgacaggccctggtgtgtgatgttccccgtcctgtgtccaagtgttctcattgttcagttcccacccatgagtgagaacatgcttgcaccgccg

SEQ ID NO: 92629 - DNA, 120 bp, synthetic construct
  source 1..120: mol_type = other DNA
cccacatatgtacagttattgattttttttagtagaaacttttttattcataaaaaatccatcaaaacaaaaaagttttccagccacacacaggaggggtatgggtgggggaaggtgtct

SEQ ID NO: 92630 - DNA, 120 bp, synthetic construct; identical to SEQ ID NO: 8279
  source 1..120: mol_type = other DNA

SEQ ID NO: 92631 - DNA, 120 bp, synthetic construct
  source 1..120: mol_type = other DNA
gcactgattgatctccctgatgactaaacagtggagcatcttttcctatgctaattgaccattcatgtatcttctttttttttttttttgagacggagtctcgctctgtcgcccaggctg

SEQ ID NO: 92632 - DNA, 120 bp, synthetic construct; identical to SEQ ID NO: 92411
  source 1..120: mol_type = other DNA

SEQ ID NO: 92633 - DNA, 120 bp, synthetic construct
  source 1..120: mol_type = other DNA
ctccttttcaacctacaggggagatagtggaagagaagcagggatgggtctgccttctgtgcccacaattcattggagattgttgtggtgaagaatttcttttatgatgaaggagaaata

SEQ ID NO: 92634 - DNA, 120 bp, synthetic construct
  source 1..120: mol_type = other DNA
accatgaccccagggcccccatgccctgttcacttgagtgccctgtgtggcctgagagaagctcatactggtcacaggattctttatatgattaacctccttcctgaatcccaactttat

SEQ ID NO: 92635 - DNA, 120 bp, synthetic construct
  source 1..120: mol_type = other DNA
atcccatctaaaacatccacaccaggtgtgaatgaggcttccgagagtgtccattaagtgcagatccttgacataattcccttacctctgtcgacctgtgaaactgaacaaacagcttat

SEQ ID NO: 92636 - DNA, 120 bp, synthetic construct
  source 1..120: mol_type = other DNA
gttgcccctccacacctgtgggcgtttctcattaggtggaaggagagacttggaaaagaaagagacacagagacaaagtacagaggaagaaaaatgggcccaggggaccggcgttcagca

SEQ ID NO: 92637 - DNA, 120 bp, synthetic construct
  source 1..120: mol_type = other DNA
ctttttttttggagatggagttatttctcttttccttgggctcaaatgcaacggcgccatctcagctcactgcaacctccacctcctgagttcaagtgattctcctgcctcagcatcctg

SEQ ID NO: 92638 - DNA, 120 bp, synthetic construct
  source 1..120: mol_type = other DNA
gttggaaaggctatctttgctgctttaaattgtctctaaacctccatggaagatcagtggactgtatgtaggcctgcttctgggctccgtattcttttctatgcatctatatgtgtgtgt

SEQ ID NO: 92639 - DNA, 120 bp, synthetic construct
  source 1..120: mol_type = other DNA
agtgtggtccattcattacaattgatgaaccactattgatacatcattatcaactaaagtccatagtttacactagagttcattctttgagtttcacagattatgggttttggcaattat

SEQ ID NO: 92640 - DNA, 120 bp, synthetic construct
  source 1..120: mol_type = other DNA
gaacatccaggggaacttacaccaccagtatttcccattaacaggaacacgctaactagttattggagacagatgcactactgtaaaactatatgctgtttccacggggtacaacccctt

SEQ ID NO: 92641 - DNA, 120 bp, synthetic construct
  source 1..120: mol_type = other DNA
ctgtcctctcctgaagtaaaatcacttccacctgacaacggcactgcaggtcgagggtggcacacgctgtgaatatttgttcattcacttaacaaatattaattcagtatctgtttcatg

SEQ ID NO: 92642 - DNA, 120 bp, synthetic construct; identical to SEQ ID NO: 8284
  source 1..120: mol_type = other DNA

SEQ ID NO: 92643 - DNA, 120 bp, synthetic construct; identical to SEQ ID NO: 180
  source 1..120: mol_type = other DNA

SEQ ID NO: 92644 - DNA, 120 bp, synthetic construct
  source 1..120: mol_type = other DNA
tcttttctatatttttagtagagatggggttttgccacattgcataggctggtctggaattcctaggctcaggtgagacatctgcctcggcctcccaaagtgttgggattacaggcatga

SEQ ID NO: 92645 - DNA, 120 bp, synthetic construct
  source 1..120: mol_type = other DNA
tgtgtcaaagaaatctttgaaaagttactgaagtatacagagaggttcacaattttaaatgtgcaggtggtccgggcgcggtagatcacacctgtaatcccagcactttgggacgccaag

SEQ ID NO: 92646 - DNA, 120 bp, synthetic construct
  source 1..120: mol_type = other DNA
cgggcggcagcggcaagtgaggaatccaacgcatggaacttaagccccggcggggccggaacacacgccccccccaaccccccaccccgcctcgccctccgtcgctcgcaacaaagcttg

SEQ ID NO: 92647 - DNA, 120 bp, synthetic construct
  source 1..120: mol_type = other DNA
cagaatatactaggccgctgctttaatagctggtgcctgcttgtcgcccacccccactcccccaccttagctgccttgtccaaaccaaagagtttagtctagaatggacatttactagcc

SEQ ID NO: 92648 - DNA, 120 bp, synthetic construct; identical to SEQ ID NO: 7217
  source 1..120: mol_type = other DNA

SEQ ID NO: 92649 - DNA, 120 bp, synthetic construct
  source 1..120: mol_type = other DNA
aatctgttagtcttttccttgtgcaggtagagtccactccttgataagtatgcacatggaaccccacatagactttgagagctgcacctttgatcagctgtctcctcactggtgccctgc

SEQ ID NO: 92650 - DNA, 120 bp, synthetic construct
  source 1..120: mol_type = other DNA
aacaagaggaagtactaaatgattcctttttttaatttttttgagatggagtctcactctgtcccccagtctggagtgcagtggcacgatctcggctctgcctcccaggttcaaaaaatt

SEQ ID NO: 92651 - DNA, 120 bp, synthetic construct
  source 1..120: mol_type = other DNA
acctcagtgaagaactgttagcatacaacagagagataacaaacactcaaaaattgaaaattgatggaaagtagataacaaatatttagcctagaaataagagggatccattgagaagaa

SEQ ID NO: 92652 - DNA, 120 bp, synthetic construct; identical to SEQ ID NO: 7262
  source 1..120: mol_type = other DNA

SEQ ID NO: 92653 - DNA, 120 bp, synthetic construct
  source 1..120: mol_type = other DNA
gttgccgtgatctataatcaccagtgcactccagcctgggtgacagaataagaccctgtctcaaaaaaaaaaaaaaaaaaaaaaaagcatctcactttaatagtaagtggccaaaatatg

SEQ ID NO: 92654 - DNA, 120 bp, synthetic construct; identical to SEQ ID NO: 7263
  source 1..120: mol_type = other DNA

SEQ ID NO: 92655 - DNA, 120 bp, synthetic construct; identical to SEQ ID NO: 7264
  source 1..120: mol_type = other DNA

SEQ ID NO: 92656 - DNA, 120 bp, synthetic construct; identical to SEQ ID NO: 7265
  source 1..120: mol_type = other DNA

SEQ ID NO: 92657 - DNA, 120 bp, synthetic construct
  source 1..120: mol_type = other DNA
gtgtgtgtgtgtgtgtgtgtgtgtgtatgtgtatgtctttctctttcatccttttctacctggccctggtctgtcccaacatgaaggcaataatttgttacctcattaatagatctgtcc

SEQ ID NO: 92658 - DNA, 120 bp, synthetic construct
  source 1..120: mol_type = other DNA
tgggataaatgattttgggataactgtctaccagaatagggacatttcacccttggttctgagatgcaaaccaaagaatctctatcatgaccagctttgaggcctcctgaagtatatctc

SEQ ID NO: 92659 - DNA, 120 bp, synthetic construct; identical to SEQ ID NO: 7266
  source 1..120: mol_type = other DNA

SEQ ID NO: 92660 - DNA, 120 bp, synthetic construct; identical to SEQ ID NO: 7267
  source 1..120: mol_type = other DNA

SEQ ID NO: 92661 - DNA, 120 bp, synthetic construct; identical to SEQ ID NO: 7268
  source 1..120: mol_type = other DNA

SEQ ID NO: 92662 - DNA, 120 bp, synthetic construct; identical to SEQ ID NO: 7269
  source 1..120: mol_type = other DNA

SEQ ID NO: 92663 - DNA, 120 bp, synthetic construct; identical to SEQ ID NO: 7270
  source 1..120: mol_type = other DNA

SEQ ID NO: 92664 - DNA, 120 bp, synthetic construct; identical to SEQ ID NO: 7271
  source 1..120: mol_type = other DNA

SEQ ID NO: 92665 - DNA, 120 bp, synthetic construct; identical to SEQ ID NO: 7901
  source 1..120: mol_type = other DNA

SEQ ID NO: 92666 - DNA, 120 bp, synthetic construct; identical to SEQ ID NO: 7902
  source 1..120: mol_type = other DNA

SEQ ID NO: 92667 - DNA, 120 bp, synthetic construct; identical to SEQ ID NO: 7903
  source 1..120: mol_type = other DNA

SEQ ID NO: 92668 - DNA, 120 bp, synthetic construct; identical to SEQ ID NO: 7904
  source 1..120: mol_type = other DNA

SEQ ID NO: 92669 - DNA, 120 bp, synthetic construct; identical to SEQ ID NO: 7905
  source 1..120: mol_type = other DNA

SEQ ID NO: 92670 - DNA, 120 bp, synthetic construct; identical to SEQ ID NO: 7906
  source 1..120: mol_type = other DNA

SEQ ID NO: 92671 - DNA, 120 bp, synthetic construct; identical to SEQ ID NO: 71251
  source 1..120: mol_type = other DNA

SEQ ID NO: 92672 - DNA, 120 bp, synthetic construct
  source 1..120: mol_type = other DNA
ggaaatggaaacaatttgtttaaggggtgccacccgaaccccactggaggagtgggtaatgtgaggatcgtgtcctgtgttgccttcctaaggaaccgcacatgctgatctgtagcactt

SEQ ID NO: 92673 - DNA, 120 bp, synthetic construct
  source 1..120: mol_type = other DNA
tagcctcccaaagtgctggaattacaggcatgaatcaacacacctggcatttttgctaatctcgttacaacataatccaatatactgggggacatcacagagttccttgctcttactaga

SEQ ID NO: 92674 - DNA, 120 bp, synthetic construct
  source 1..120: mol_type = other DNA
gctaattccatgtctttatctcttctctggccatccacatatgttgggagttttgcccaattatttggaggcctgtttcatgattcctgtgtcccaagctagattctcttcttcagggat

SEQ ID NO: 92675 - DNA, 120 bp, synthetic construct
  source 1..120: mol_type = other DNA
gttgaggatacaggaactctgtgaagactcaagagcctgtattcatttggccactgacgctaatttcaacaaaatggatgcaaaagtgccgaatgcactgtgtcctggcagttccccgca

SEQ ID NO: 92676 - DNA, 120 bp, synthetic construct; identical to SEQ ID NO: 7907
  source 1..120: mol_type = other DNA

SEQ ID NO: 92677 - DNA, 120 bp, synthetic construct; identical to SEQ ID NO: 7908
  source 1..120: mol_type = other DNA

SEQ ID NO: 92678 - DNA, 120 bp, synthetic construct; identical to SEQ ID NO: 7909
  source 1..120: mol_type = other DNA

SEQ ID NO: 92679 - DNA, 120 bp, synthetic construct; identical to SEQ ID NO: 7910
  source 1..120: mol_type = other DNA

SEQ ID NO: 92680 - DNA, 120 bp, synthetic construct; identical to SEQ ID NO: 7911
  source 1..120: mol_type = other DNA

SEQ ID NO: 92681 - DNA, 120 bp, synthetic construct; identical to SEQ ID NO: 7912
  source 1..120: mol_type = other DNA

SEQ ID NO: 92682 - DNA, 120 bp, synthetic construct; identical to SEQ ID NO: 7913
  source 1..120: mol_type = other DNA

SEQ ID NO: 92683 - DNA, 120 bp, synthetic construct; identical to SEQ ID NO: 7914
  source 1..120: mol_type = other DNA

SEQ ID NO: 92684 - DNA, 120 bp, synthetic construct
  source 1..120: mol_type = other DNA
atatatacacacacacacacacacacacatacatatatacaaacatacacacacatatatatacaaacacacacacacacagccttctgatatatgagagactgcttctgtaatatcctc

SEQ ID NO: 92685 - DNA, 120 bp, synthetic construct; identical to SEQ ID NO: 71237
  source 1..120: mol_type = other DNA

SEQ ID NO: 92686 - DNA, 120 bp, synthetic construct; identical to SEQ ID NO: 7915
  source 1..120: mol_type = other DNA

SEQ ID NO: 92687 - DNA, 120 bp, synthetic construct; identical to SEQ ID NO: 7916
  source 1..120: mol_type = other DNA

SEQ ID NO: 92688 - DNA, 120 bp, synthetic construct; identical to SEQ ID NO: 7917
  source 1..120: mol_type = other DNA

SEQ ID NO: 92689 - DNA, 120 bp, synthetic construct; identical to SEQ ID NO: 7918
  source 1..120: mol_type = other DNA

SEQ ID NO: 92690 - DNA, 120 bp, synthetic construct; identical to SEQ ID NO: 7919
  source 1..120: mol_type = other DNA

SEQ ID NO: 92691 - DNA, 120 bp, synthetic construct; identical to SEQ ID NO: 7920
  source 1..120: mol_type = other DNA

SEQ ID NO: 92692 - DNA, 120 bp, synthetic construct
  source 1..120: mol_type = other DNA
atatatatatatatatacacacacacacacatatatatattgcagtctgataagataaacagcacaatgaaacaatttctcaaaagacttgaatagatacttcagaaaagaagatacatg

SEQ ID NO: 92693 - DNA, 120 bp, synthetic construct
  source 1..120: mol_type = other DNA
caaccagcagcccctttcctcctgatccccagtgtctggagcagagtaatggcttttcacacccctcagtgaggatgttctcagcatcaaccatgaaagctcagaaacagaaggctgcag

SEQ ID NO: 92694 - DNA, 120 bp, synthetic construct
  source 1..120: mol_type = other DNA
atgatgaaaggaccaatccaccaacccccccccgacaaaagtcataaatatctatgcaaaatttcaagtcataaatatctatgcaacaacaaccttaaatactgaacagatagctagact

SEQ ID NO: 92695 - DNA, 120 bp, synthetic construct
  source 1..120: mol_type = other DNA
tgaacccggagggcggagcttgcagtgagccaaggttgcaccactgcactccagcctgggagacagagcaagactccgcctcaaaaaaaaaaaaaaaaaaagaattgatgttaatttttc

SEQ ID NO: 92696 - DNA, 120 bp, synthetic construct
  source 1..120: mol_type = other DNA
aagcagtggcctagtatattctgttcttccatagtttgcgggcccaagcctaacttcctacaataataattatatacaaaagtttttaaaagggataaaagaaaagaggggatgtctcaa

SEQ ID NO: 92697 - DNA, 120 bp, synthetic construct
  source 1..120: mol_type = other DNA
ccgcccacccagctaacaactttgaaaacttgaaattttatctaaggcaaatgcttgcataactttaggtcgtgccattattattattgttattattattattattatttgaaacggagt

SEQ ID NO: 92698 - DNA, 120 bp, synthetic construct
  source 1..120: mol_type = other DNA
caagttttgttgcgagcgacggagggcgaggcggggtggggggttgggagggcgtgtgttccggccccgccggggcttaagttccatgcgttcgattcctcgcttgccgctgccgcccgc

SEQ ID NO: 92699 - DNA, 120 bp, synthetic construct; identical to SEQ ID NO: 92501
  source 1..120: mol_type = other DNA

SEQ ID NO: 92700 - DNA, 120 bp, synthetic construct
  source 1..120: mol_type = other DNA
ttgtggtcagctgtgattgtgccactgcactccagcctgggcaacagagtgagatcttgtctcaaaaagaaaaaaaaaagttagagaatctccattcatgaataagcaccattaaaagag

SEQ ID NO: 92701 - DNA, 120 bp, synthetic construct
  source 1..120: mol_type = other DNA
gtacgatccataaagttttcctggtaattaagtatacctaagaacaatgaagtataaaagagttactgccttgacaggaagattgtaaaaactgtaaaaagataaataaataaagagtca

SEQ ID NO: 92702 - DNA, 120 bp, synthetic construct
  source 1..120: mol_type = other DNA
ggtacagatagaccagatagaccagtagatgagattccaaagaagcattaactacgcccacacactcttaattccctaacagaaagaatcgaattcttgttcactaagatctacctcaaa

SEQ ID NO: 92703 - DNA, 120 bp, synthetic construct; identical to SEQ ID NO: 92641
  source 1..120: mol_type = other DNA

SEQ ID NO: 92704 - DNA, 120 bp, synthetic construct
  source 1..120: mol_type = other DNA
taatggaaaatactggtggtgtaagttcccctggatgttctcatcttcatgtaagtttgttcatttccttccttccttccttccctacttctctcccctccctacttctctcccactctt

SEQ ID NO: 92705 - DNA, 120 bp, synthetic construct; identical to SEQ ID NO: 92639
  source 1..120: mol_type = other DNA

SEQ ID NO: 92706 - DNA, 120 bp, synthetic construct
  source 1..120: mol_type = other DNA
atgcaaaaaaaataaataaatccaggtatgcatgttatataccctttataaaataaatcttacacgtaaatgtaaggtgcaaaaccataagaatcctaagagataaaataggagaaaatc

SEQ ID NO: 92707 - DNA, 120 bp, synthetic construct
  source 1..120: mol_type = other DNA
atagtagatttttaaaaattctttttcttgtgctcaccagacaaggtttggtaaaaaataccagtcaccagcacagatgaaccaattcaaggagagccataaacaggactactattatgt

SEQ ID NO: 92708 - DNA, 120 bp, synthetic construct
  source 1..120: mol_type = other DNA
tagtaaaagaggaaggaaggcctctttgcagttgagataagaggaaggcatctgtctcctcctcgtccctgggcaatggaatgtctcggtgtaaagcccgattgtatattccatttactg

SEQ ID NO: 92709 - DNA, 120 bp, synthetic construct; identical to SEQ ID NO: 8477
  source 1..120: mol_type = other DNA

SEQ ID NO: 92710 - DNA, 120 bp, synthetic construct
  source 1..120: mol_type = other DNA
cagtttttcctattatgaataaaactgctatgaacattcttgtataaatcattttctggacatatgttttaatttctcttggataaatgcttaggaattagtgagtcatagaatagatag

SEQ ID NO: 92711 - DNA, 120 bp, synthetic construct
  source 1..120: mol_type = other DNA
tgctgcactcacaagcactgaaacaattctatgaccatctgtttcatggccacctgtttgctcattttctatgtacataaagggaggggacagacagcaaatttgcatattataaattgt

SEQ ID NO: 92712 - DNA, 120 bp, synthetic construct
  source 1..120: mol_type = other DNA
gtcagatactcagtgccagagcagggagggagagggaagaaatacggacctcaccttcctctcacttccaggctccatcgggtgcccacattgctaaacctaactagaagtgtgcacaca

SEQ ID NO: 92713 - DNA, 120 bp, synthetic construct; identical to SEQ ID NO: 92378
  source 1..120: mol_type = other DNA

SEQ ID NO: 92714 - DNA, 120 bp, synthetic construct; identical to SEQ ID NO: 107
  source 1..120: mol_type = other DNA

SEQ ID NO: 92715 - DNA, 120 bp, synthetic construct
  source 1..120: mol_type = other DNA
taacacaggcctccctaacaactgtttcagtaccgactgagtggttcaattaaatattaagaggaaaaaaaaaaaaaagaagccagtgcccttatacaaaggctggaatgtaacaaaagc

SEQ ID NO: 92716 - DNA, 120 bp, synthetic construct
  source 1..120: mol_type = other DNA
acagtaattttaaaacagtagtaatggtgtcagtattcataaatacatcaaagtgaaagaatacagactcaaacaatatgcccacatatgtacagttattgattttttttagtagaaact

SEQ ID NO: 92717 - DNA, 120 bp, synthetic construct
  source 1..120: mol_type = other DNA
attatatatacgtgtatacaggtatatatgtatatataatatatatacacgtgtatatatattatatatatatatacgtgtgccatgttggtttgctgcacccattaactcgtcatttac

SEQ ID NO: 92718 - DNA, 120 bp, synthetic construct
  source 1..120: mol_type = other DNA
acgcacagtagccaacaagtaaacctgtctcccgtcagaaaaatggatatcaaattgtgtgataatcatacaaacaataggatattacttggccaaacaaaacgaaacaagggaaaaaca

SEQ ID NO: 92719 - DNA, 120 bp, synthetic construct
  source 1..120: mol_type = other DNA
gtgctgtgggagtgatcacatttttcacaacagtaaggtaagaatttcagttactgacatccctcagtcctgattaaacctatttgatttcaccagtttttaacccatcatatgtttggg

SEQ ID NO: 92720 - DNA, 120 bp, synthetic construct
  source 1..120: mol_type = other DNA
agcacaaggtcagcagtttgagactagcctgggcaacatggagaaaccccatctccactaaaaatacaaaaagtagatgggcatcgtggcgggcaactgtaatcaccactaatcgggagg

SEQ ID NO: 92721 - DNA, 120 bp, synthetic construct
  source 1..120: mol_type = other DNA
actccgcttcgttgtggttgaatcatcttgtcaacttccttgacgcgcccttgagtttctctttcttcgtctttaaattttggaggatcagatgccagaaagtcaggagactgaagagta

SEQ ID NO: 92722 - DNA, 120 bp, synthetic construct
  source 1..120: mol_type = other DNA
atacagggaaagcctgtagaccattttctgttctttctcttggccacagacattcctttcaacatgtgctgaccttctgcttgaaggtctccttgtgaacattgtctcagaaatctctgt

SEQ ID NO: 92723 - DNA, 120 bp, synthetic construct; identical to SEQ ID NO: 92420
  source 1..120: mol_type = other DNA

SEQ ID NO: 92724 - DNA, 120 bp, synthetic construct
  source 1..120: mol_type = other DNA
agtgagtcctcagcgactttgctctcttcagccttctgcacctccctgatgagccaggtgggacagagatgacagaagattaaacacagagggattggaccccagggagtactagctggt

SEQ ID NO: 92725 - DNA, 120 bp, synthetic construct
  source 1..120: mol_type = other DNA
tgcttggcaggctgagggatgagaatcgcttgaacccgggcggcagaggtggcagtgagctgagattgtgcctctgcactgcagcctgcacgacagagtgagactccgtctcaaacaaaa

SEQ ID NO: 92726 - DNA, 120 bp, synthetic construct
  source 1..120: mol_type = other DNA
tccctcagagtcactagaacacagctttgcctgttgggcctcaacagaaacttgaactgaataaaagttcactagtcctagacatttagaacaacagactacatgttatttgtctgcagg

SEQ ID NO: 92727 - DNA, 120 bp, synthetic construct
  source 1..120: mol_type = other DNA
atttaaaaatgaaatatttttaaagtccttgacatatttgtccttgaaatacccagtaaaagggaaaccatcagtcccatagtcctagggaccttcccgactgtacaagaaatcactact

SEQ ID NO: 92728 - DNA, 120 bp, synthetic construct
  source 1..120: mol_type = other DNA
gccttcttgaccctgtcattcttttcttctttcatcttttcaattcgccccatctgcacctggcctcatttctgtacatgactttgtatctagtggccgcaagatgcactatgtgtattt

SEQ ID NO: 92729 - DNA, 120 bp, synthetic construct
  source 1..120: mol_type = other DNA
caggcttctttttggcaatgttcttagtaagtgtcggtgagtgagtgatttatctttccagagtttctctctctccatctgcaaaggcagacaaattgtctctttcaagggtctgaagca

SEQ ID NO: 92730 - DNA, 120 bp, synthetic construct
  source 1..120: mol_type = other DNA
tctttaagggaacctccattttgctttctggaaccactctcttaatgccacctgtcaaaaccagctaggactccctggggtccaatccctctgtgtttaatcttctgtcatctctgtccc

SEQ ID NO: 92731 - DNA, 120 bp, synthetic construct
  source 1..120: mol_type = other DNA
gctggctcacatcttaatcccagcactttgggaggctgaggtgggcagaacacctgaggtcaggagttcgaaaccagcctgtccaagatggcgaaaccccatctctactaaaaatacaaa

SEQ ID NO: 92732 - DNA, 120 bp, synthetic construct
  source 1..120: mol_type = other DNA
tcatccttcctgtacttctaggaaaacagaaatgggtattttaacattttgtcaaagttggaagacagaggtaccaaagtatttagcaactttccatgttttcaatcaggtgggggtggg

SEQ ID NO: 92733 - DNA, 120 bp, synthetic construct
  source 1..120: mol_type = other DNA
ccctcagtttcctcacctgttcagagggtactacaataatacctacctctgtaaattgctacagtgaattacatgagctatttcttgtcaatctcatagaacgtttattggcacagagta

SEQ ID NO: 92734 - DNA, 120 bp, synthetic construct
  source 1..120: mol_type = other DNA
tcgtcttttcaattcgccccatctgcacctggcctcatttctgtacatggctttgtatctagtggccgcaagatgcactatgtgtattttcacatggaattgtccatggccagagtgagg

SEQ ID NO: 92735 - DNA, 120 bp, synthetic construct; identical to SEQ ID NO: 8363
  source 1..120: mol_type = other DNA

SEQ ID NO: 92736 - DNA, 120 bp, synthetic construct; identical to SEQ ID NO: 108
  source 1..120: mol_type = other DNA

SEQ ID NO: 92737 - DNA, 120 bp, synthetic construct
  source 1..120: mol_type = other DNA
tgagagcagtgaaacctggggaaaaatatttccaaatacaaaggcaaggctgccaggttccttaaacaggcatagaaactccatggacattgttcagggacagatgactaaatcacagat

SEQ ID NO: 92738 - DNA, 120 bp, synthetic construct; identical to SEQ ID NO: 231
  source 1..120: mol_type = other DNA

SEQ ID NO: 92739 - DNA, 120 bp, synthetic construct
  source 1..120: mol_type = other DNA
atagttaactcttcttgttgaattgatccctttaccattatgtagtggccttcttgtctcttttgatctttgttgtttgaaagtctgttttatcagagactaggattgcaacccctgcct

SEQ ID NO: 92740 - DNA, 120 bp, synthetic construct
  source 1..120: mol_type = other DNA
taggggcatggatgaagctggaaaccatcattctcagcaaactattgcaaggacaaaaaaccaaataccgcatgttcttactcacaggtgggaattgaacaatgagaacacaaggacaca

SEQ ID NO: 92741 - DNA, 120 bp, synthetic construct
  source 1..120: mol_type = other DNA
actcatctcaaggaagctaaaaaccttgaaaaaagattagacgaatggctaaccagaatgaacagtgtagagaagaccttaaatgacctgatggagctgaaaaccatggcacgagaacta

SEQ ID NO: 92742 - DNA, 120 bp, synthetic construct
  source 1..120: mol_type = other DNA
ccaccctgtatttagaaggatagttttatttctcttgaaggaaaaatgcctttggtttctgtgaccactccattctgtctcccatcagatcatctgggaggttttgttgtctaatgtctg

SEQ ID NO: 92743 - DNA, 120 bp, synthetic construct
  source 1..120: mol_type = other DNA
catcaaatacccagaatttgatagtttatgagattgtggacacagagatttgatgagggggtgcaatgaaccagctcttgagtcaaaatgtaacttggttctacacagtagcatcagcta

SEQ ID NO: 92744 - DNA, 120 bp, synthetic construct
  source 1..120: mol_type = other DNA
tgcgttttacatattggagcaacagcgtgttggcttggctgttgacatggatggtgagtacctttctatgaaggtgataaggatccactgagtcttctggttagggtcatattcctactg

SEQ ID NO: 92745 - DNA, 120 bp, synthetic construct
  source 1..120: mol_type = other DNA
ttgagcaattatggatgcttaattctgtgttgacacctggagatgccaggtccagggaaagcaagagtgtgttcaatttcatgttttcaacgaaggttgaaatactcctcctgacattgc

SEQ ID NO: 92746 - DNA, 120 bp, synthetic construct
  source 1..120: mol_type = other DNA
gaagtatgatttggactcaagggtttgtagatttcctccttcattctaatttcagtgtctcaaattcttgcatccatgaacgagctgggcatttgatgagacagggctgaatactgcagt

SEQ ID NO: 92747 - DNA, 120 bp, synthetic construct
  source 1..120: mol_type = other DNA
tttgttacctcattaatggatctatccttttacttttttaaccacttccttatgctacccatgaaacctatttggggttctgttgtgtctgatttcccctggcgtattctttactttttc

SEQ ID NO: 92748 - DNA, 120 bp, synthetic construct; identical to SEQ ID NO: 92465
  source 1..120: mol_type = other DNA

SEQ ID NO: 92749 - DNA, 120 bp, synthetic construct; identical to SEQ ID NO: 8481
  source 1..120: mol_type = other DNA

SEQ ID NO: 92750 - DNA, 120 bp, synthetic construct; identical to SEQ ID NO: 92513
  source 1..120: mol_type = other DNA

SEQ ID NO: 92751 - DNA, 120 bp, synthetic construct
  source 1..120: mol_type = other DNA
gaagacaatatctcctaaaaactccagaaaaatcattttgggcaagcaccttatatctagtaatgcgatccatgtatcgagaccgtgagaaaagattattaaacatgctaaactcagcga

SEQ ID NO: 92752 - DNA, 120 bp, synthetic construct
  source 1..120: mol_type = other DNA
gatagttacttgtagttgtcactgtgaccgagcaccagggtgccaggacatttggccaaacatgattctggttgtgttccagagagtctttcagatacgattaacattgggatgggcaga

SEQ ID NO: 92753 - DNA, 120 bp, synthetic construct
  source 1..120: mol_type = other DNA
cagtgagctgagatcacaccattgcactccagcctgggcaatgagagcaaaactctatccccccgcaaaaaaaaaaaaaataaaagaatatgaagcagccaaagaagcaggaaaacatga

SEQ ID NO: 92754 - DNA, 120 bp, synthetic construct
  source 1..120: mol_type = other DNA
cagcaaacaatcagttgtgttagcaatgaacaatctgagaagaaaattgacacaatgatttcatttataatagcacttgtaagaataatatgcctgagaataaatttgttcaagaaggtg

SEQ ID NO: 92755 - DNA, 120 bp, synthetic construct
  source 1..120: mol_type = other DNA
gctcactgcaagctccacctcccaggttcacgccattctcctgcctcagccttccaagtacctgggactacaggcgcccgccatcacgccaggctaatttttttttttgtatttttagta

SEQ ID NO: 92756 - DNA, 120 bp, synthetic construct
  source 1..120: mol_type = other DNA
tttaaatccacacccaacaaacatctacccttatgtatcctggtttttagggttttgagtttgttgtttgttttctcagcttctcatatttggaatactggaaattcctaaagtggaaaa

SEQ ID NO: 92757 - DNA, 120 bp, synthetic construct
  source 1..120: mol_type = other DNA
ttatgtctaaatagatattattactttttgattttcaagtttaggcactacctctccttcacatacttgctcatcaccaccacccccaaacacgcctctcaccaccttaccctccaacac

SEQ ID NO: 92758 - DNA, 120 bp, synthetic construct; identical to SEQ ID NO: 8726
  source 1..120: mol_type = other DNA

SEQ ID NO: 92759 - DNA, 120 bp, synthetic construct; identical to SEQ ID NO: 8727
  source 1..120: mol_type = other DNA

SEQ ID NO: 92760 - DNA, 120 bp, synthetic construct; identical to SEQ ID NO: 92755
  source 1..120: mol_type = other DNA

SEQ ID NO: 92761 - DNA, 120 bp, synthetic construct; identical to SEQ ID NO: 92754
  source 1..120: mol_type = other DNA

SEQ ID NO: 92762 - DNA, 120 bp, synthetic construct
  source 1..120: mol_type = other DNA
ttttcctgcttctttggctgcttgatattcttttatttttatttatttttttttgcggggggatagcgttttgctctcgttgcccaggctggagtgcaatggtgtgatctcagctcactg

SEQ ID NO: 92763 - DNA, 120 bp, synthetic construct; identical to SEQ ID NO: 8728
  source 1..120: mol_type = other DNA

SEQ ID NO: 92764 - DNA, 120 bp, synthetic construct; identical to SEQ ID NO: 92346
  source 1..120: mol_type = other DNA

SEQ ID NO: 92765 - DNA, 120 bp, synthetic construct
  source 1..120: mol_type = other DNA
taactttggacaaaaattaaaactcaggcagagaatgttttttttttcaacaacacacactagcaaaaacaaaggcacagtaaacattgaggcagaaagtttccagcgtagagatatgaa

SEQ ID NO: 92766 - DNA, 120 bp, synthetic construct; identical to SEQ ID NO: 92348
  source 1..120: mol_type = other DNA

SEQ ID NO: 92767 - DNA, 120 bp, synthetic construct
  source 1..120: mol_type = other DNA
tttatgttgggatagaacagggccaggtagaaaacaatgaaagagaaagacagagagagaaagacagagacagagacagagagaaagtgagctagtgaattggccaggtgacatactggt

SEQ ID NO: 92768 - DNA, 120 bp, synthetic construct; identical to SEQ ID NO: 89634
  source 1..120: mol_type = other DNA

SEQ ID NO: 92769 - DNA, 120 bp, synthetic construct
  source 1..120: mol_type = other DNA
acacacacagagagagagagagagagagagaacgagctcagtgaattgtccaggtgacacactgatgagggagtaacaggacactctgagttagtgccctcaggacacacagcatacagg

SEQ ID NO: 92770 - DNA, 120 bp, synthetic construct
  source 1..120: mol_type = other DNA
tccaactgagactacagtttcattacaacctatatgcgcccataggtcctgcctgtggcaatgacatctctcaggtcagtaagggccacttggaacaggaatatcacccctatctggaag

SEQ ID NO: 92771 - DNA, 120 bp, synthetic construct
  source 1..120: mol_type = other DNA
tcaatttctgcaataaattcagacatggacagacacattaagctgattcccctacacatataacaatccactgtctaatcctcacacagggacctcaggctcctcagcataagaatacga

SEQ ID NO: 92772 - DNA, 120 bp, synthetic construct
  source 1..120: mol_type = other DNA
acagatagacacacacacacacacacacacacacacacacaaacacacacacacagagaacgagctcagtgaattgtccagatgacacactgatgagggagtaacaggacactctgagtt

SEQ ID NO: 92773 - DNA, 120 bp, synthetic construct; identical to SEQ ID NO: 92770
  source 1..120: mol_type = other DNA

SEQ ID NO: 92774 - DNA, 120 bp, synthetic construct
  source 1..120: mol_type = other DNA
tcagacatggacagtcatattaagctggttctcctacacacataacaatccactgtctaatcctcacacagggacttcaggctcctcagcatgagaataggacactgtgagagatattct

SEQ ID NO: 92775 - DNA, 120 bp, synthetic construct
  source 1..120: mol_type = other DNA
gatagactagggccaggtagaaaaggatgaaagagaaagacacacacacacacacagacacagacacacacacacacacacacagagcgagctgagtgatttggtcaggtgacacactga

SEQ ID NO: 92776 - DNA, 120 bp, synthetic construct
  source 1..120: mol_type = other DNA
aagtcagccgtttatctagaaaacgtaccaggaacatgatggacagatgagctaaaacaagcgcacttagaagacacagaaaatgggaataaattcagtgaaacctgggtcacatctttc

SEQ ID NO: 92777 - DNA, 120 bp, synthetic construct; identical to SEQ ID NO: 8729
  source 1..120: mol_type = other DNA

SEQ ID NO: 92778 - DNA, 120 bp, synthetic construct
  source 1..120: mol_type = other DNA
aaatgacctgatggagctgaaaaccatggcaccagaactacgtgatgcatgcacaagcttcagtagccaattcgatcaagtgcaagaaacggtatcagtgattcaagatcaaattagtga

SEQ ID NO: 92779 - DNA, 120 bp, synthetic construct
  source 1..120: mol_type = other DNA
aaacatatgtgtgcatgtgtctttacagcagcatgatttataatcctttgggtatacacccagtaatgggatggctgggtcaaatggtatttctagttctagatccttgaggaattgcca

SEQ ID NO: 92780 - DNA, 120 bp, synthetic construct
  source 1..120: mol_type = other DNA
gaagctttacaaggatatccaggacttgaactcagctctccaccaagcagacctaaaagacatctacagaactctccaccccaaatcaacagaatatacattcttctcagcaccacatca

SEQ ID NO: 92781 - DNA, 120 bp, synthetic construct; identical to SEQ ID NO: 226
  source 1..120: mol_type = other DNA

SEQ ID NO: 92782 - DNA, 120 bp, synthetic construct
  source 1..120: mol_type = other DNA
catgcctttgtctgccagtccccagtatcaagttactcgaccccaggcaagtgtgacaatctcatagtcacctcagtgcaggaggtgcacaggcagtatctgtcaggcctcctaacttcc

SEQ ID NO: 92783 - DNA, 120 bp, synthetic construct; identical to SEQ ID NO: 92477
  source 1..120: mol_type = other DNA

SEQ ID NO: 92784 - DNA, 120 bp, synthetic construct
  source 1..120: mol_type = other DNA
cttgtcatgtcatggccacataagcttagtggaaaaaaacaccattgatacaactgtcattgtgaaagtatggaggtctggagcctctcataagcctggggttttgggtcaacagggcct

SEQ ID NO: 92785 - DNA, 120 bp, synthetic construct
  source 1..120: mol_type = other DNA
ggaatgagctacagttcaaggaggagaagcttgcagagcagctgaagcaagctgaggagctcaggtgaggggaccccatgggggcagacaggggggcaggtgtgtaaatctctgaagtac

SEQ ID NO: 92786 - DNA, 120 bp, synthetic construct
  source 1..120: mol_type = other DNA
gagtcttgttgctaaagaggaagaaagatcccacccgagaatgtgtggagatagcagtgcagtgtacagagcagggaccgtgggcctgtctcctgggatccatccaagttgcttgtcttg

SEQ ID NO: 92787 - DNA, 120 bp, synthetic construct
  source 1..120: mol_type = other DNA
ttcttctctgccaactgggggcgcaatttctcattgatttctagaatgttcatctctgccttctcgctggacaaagggccggctgataccaccatgctgacgtttgtggcagaagaggtg

SEQ ID NO: 92788 - DNA, 120 bp, synthetic construct
  source 1..120: mol_type = other DNA
ctccggttcctgggttcatgccattctcctgcctcagcctcctgagtagctgggactacaggcgcccaccaccacgcccagctatttttttttttttgcatttttagtaaagacggggtt

SEQ ID NO: 92789 - DNA, 120 bp, synthetic construct
  source 1..120: mol_type = other DNA
gggtggtaacatatgaaaatgtctaggaggcacaccctctctggcatctatggtggaccaaaagcccgcatccccttggccacagtatgtgaaattgaacccagcttagacacagggtgc

SEQ ID NO: 92790 - DNA, 120 bp, synthetic construct
  source 1..120: mol_type = other DNA
cagcctccttcctgtcctttaaaactagatagatgctgcctcttactccaaagacaaccttccatcaagggaggagggacaattgcaatactgtgacctccaaccccatgggtttcccaa

SEQ ID NO: 92791 - DNA, 120 bp, synthetic construct
  source 1..120: mol_type = other DNA
gttgaggtgaaatttacataacacaaaattcaccaaaggagtgggaaccacctagcagcattcagtatactcaaaatggtgtgctattgccaccccacttacccttagtgagaatcacct

SEQ ID NO: 92792 - DNA, 120 bp, synthetic construct
  source 1..120: mol_type = other DNA
catttcctgtcaatctccttgaacattaattggcacagtgtaaacactatctattagttcttcattctgatgtttctaaattaacacaaactaatcttatgctgtttctaaattaacaca

SEQ ID NO: 92793 - DNA, 120 bp, synthetic construct
  source 1..120: mol_type = other DNA
ctgtgagtttaactctagtcccacccccatctgattgcaaacatggaaagttgctaaatactttggtacctctgtcttccaactttaaccaaatgttaaaatacccatttctgttttcct

SEQ ID NO: 92794 - DNA, 120 bp, synthetic construct
  source 1..120: mol_type = other DNA
tgttttgactttttttttttttttttttgtttgagacagagtctcactctgtcgcccaggctggagtgcagtgacgcgatctaggctcactgcaagctctgcctcccaggttcacgctat

SEQ ID NO: 92795 - DNA, 120 bp, synthetic construct; identical to SEQ ID NO: 228
  source 1..120: mol_type = other DNA

SEQ ID NO: 92796 - DNA, 120 bp, synthetic construct
  source 1..120: mol_type = other DNA
cttgaccagtctttgccaaccagggcaccaacctcagctggcgtgatgttgaggaaggttttccctgggacggtggcacagatggaaggtgggtccttgttgcccacaatggccgtgtcc

SEQ ID NO: 92797 - DNA, 120 bp, synthetic construct
  source 1..120: mol_type = other DNA
tgtaattcaatgcacgtttacaaatggatgcactaacggaactactgccacaaccaagatagaggaaattccctatgcccaaaagtttcttgtacccctttgcagttcatcagcctttca

SEQ ID NO: 92798 - DNA, 120 bp, synthetic construct
  source 1..120: mol_type = other DNA
agttcatctgtgtcttgttactgagccacgagaaatagcagcccgcccctcaggttggtctggaaacacacatacagatcattgtgcagacacagtgtgtaaattcctaggaagggaatg

SEQ ID NO: 92799 - DNA, 120 bp, synthetic construct
  source 1..120: mol_type = other DNA
tctttcataatttcccaaagcaattttttgtagtttttgttgtactggccttacataaattttgttgactttccttttttttttttttttttttttgagacagagtcttgctctgttacc

SEQ ID NO: 92800 - DNA, 120 bp, synthetic construct
  source 1..120: mol_type = other DNA
acgcctgtaatcccagcactttgggaggctgaggcaggcggatcacacttgtggcagcattgaaggcttcactcttccccaagggatccaatctcccctcagtcaagaagctccaggtat

SEQ ID NO: 92801 - DNA, 120 bp, synthetic construct
  source 1..120: mol_type = other DNA
aactaaccctttataatacaactgttggaacaacagttgaaaataacaatatcttgactcctggttgagtgctttacactgagctgtcttttccgaatatgaacacagacttggggatat

SEQ ID NO: 92802 - DNA, 120 bp, synthetic construct
  source 1..120: mol_type = other DNA
cttaccaagatctgagtttctccaggtatgatattattttgtttgaccatccttatcttcaagggctaccaagaagaaacaaatcatttatttacctccccagaggaaaaggttttacca

SEQ ID NO: 92803 - DNA, 120 bp, synthetic construct; identical to SEQ ID NO: 92635
  source 1..120: mol_type = other DNA

SEQ ID NO: 92804 - DNA, 120 bp, synthetic construct
  source 1..120: mol_type = other DNA
actattatcaatcacatttctggaagaataaaaatggttcagtgaagggatgggttgcccctccacacctgtgggcatttctcattaggtggaaggagagacttggaaaagaaagagaca

SEQ ID NO: 92805 - DNA, 120 bp, synthetic construct
  source 1..120: mol_type = other DNA
atatgagccacggcctgacctgaactgtggggaaaagaaagagagatcagattgttactgtgtctgtgtaggaagaagtagacataagagactccattttgttctgtactaagaaaaatt

SEQ ID NO: 92806 - DNA, 120 bp, synthetic construct; identical to SEQ ID NO: 8730
  source 1..120: mol_type = other DNA

SEQ ID NO: 92807 - DNA, 120 bp, synthetic construct; identical to SEQ ID NO: 92403
  source 1..120: mol_type = other DNA

SEQ ID NO: 92808 - DNA, 120 bp, synthetic construct
  source 1..120: mol_type = other DNA
aaaaggaaagaaaaagagagagcatgagagacaaagaaaaagaaaagaagaaaggaagaaaggaaagaatggagggagggaaggaaggaggaaggaaggaaggaaggaaggaagggaggg

SEQ ID NO: 92809 - DNA, 120 bp, synthetic construct; identical to SEQ ID NO: 8731
  source 1..120: mol_type = other DNA

SEQ ID NO: 92810 - DNA, 120 bp, synthetic construct; identical to SEQ ID NO: 8372
  source 1..120: mol_type = other DNA

SEQ ID NO: 92811 - DNA, 120 bp, synthetic construct
  source 1..120: mol_type = other DNA
ctaattttctattttttgtagatagggttttcctgtagtgcccagactggtttcaaactcctgggctcaaatgaccctcccaccttggcatctcaaagtgttgggattacaggcataagc

SEQ ID NO: 92812 - DNA, 120 bp, synthetic construct
  source 1..120: mol_type = other DNA
acatccatgtagtaaaaagtgaatcacagccgggtggggtggctcatgcctgtaatccccacactctgggaggcttaagtgggaagattacttgagcccaacagtttgagaccaacctgg

SEQ ID NO: 92813 - DNA, 120 bp, synthetic construct; identical to SEQ ID NO: 8096
  source 1..120: mol_type = other DNA

SEQ ID NO: 92814 - DNA, 120 bp, synthetic construct; identical to SEQ ID NO: 157
  source 1..120: mol_type = other DNA

SEQ ID NO: 92815 - DNA, 120 bp, synthetic construct; identical to SEQ ID NO: 8732
  source 1..120: mol_type = other DNA

SEQ ID NO: 92816 - DNA, 120 bp, synthetic construct; identical to SEQ ID NO: 8733
  source 1..120: mol_type = other DNA

SEQ ID NO: 92817 - DNA, 120 bp, synthetic construct; identical to SEQ ID NO: 8734
  source 1..120: mol_type = other DNA

SEQ ID NO: 92818 - DNA, 120 bp, synthetic construct; identical to SEQ ID NO: 8735
  source 1..120: mol_type = other DNA

SEQ ID NO: 92819 - DNA, 120 bp, synthetic construct
  source 1..120: mol_type = other DNA
agaaagaacggatgtcacaaaaagcattttcatttgatgaatagaactaaaagagcaaagcaattgaaagctcaacacaacacaggagggatccatggctgaggattgtatttcagaacc

SEQ ID NO: 92820 - DNA, 120 bp, synthetic construct; identical to SEQ ID NO: 31697
  source 1..120: mol_type = other DNA

SEQ ID NO: 92821 - DNA, 120 bp, synthetic construct; identical to SEQ ID NO: 12362
  source 1..120: mol_type = other DNA

SEQ ID NO: 92822 - DNA, 120 bp, synthetic construct; identical to SEQ ID NO: 12363
  source 1..120: mol_type = other DNA

SEQ ID NO: 92823 - DNA, 120 bp, synthetic construct
  source 1..120: mol_type = other DNA
gttctttgaaaccaatgagaacaaagatacaacataccagaatctctgggagacatttaaagcagtgtgtagagggaaatttatagcactaaatgcccacaagagaaagcaggaaagatc

SEQ ID NO: 92824 - DNA, 120 bp, synthetic construct
  source 1..120: mol_type = other DNA
ccctctctcactactcctattcaacatagtgttggaagttctggccagggcaatcaggcaagagaaggaaataaaggttattcaagtaggaaaagaggaagtcaaattgtccctgtttgc

SEQ ID NO: 92825 - DNA, 120 bp, synthetic construct
  source 1..120: mol_type = other DNA
gatataattaaactaaagagcttctgcacagccaaagaaactaccatcagagtgaacaggcaacctacagaatgggagaaaatttttgcaatctactcatctgacaaagggctaatatcc

SEQ ID NO: 92826 - DNA, 120 bp, synthetic construct; identical to SEQ ID NO: 23026
  source 1..120: mol_type = other DNA

SEQ ID NO: 92827 - DNA, 120 bp, synthetic construct; identical to SEQ ID NO: 23027
  source 1..120: mol_type = other DNA

SEQ ID NO: 92828 - DNA, 120 bp, synthetic construct; identical to SEQ ID NO: 23028
  source 1..120: mol_type = other DNA

SEQ ID NO: 92829 - DNA, 120 bp, synthetic construct; identical to SEQ ID NO: 23029
  source 1..120: mol_type = other DNA

SEQ ID NO: 92830 - DNA, 120 bp, synthetic construct; identical to SEQ ID NO: 23030
  source 1..120: mol_type = other DNA

SEQ ID NO: 92831 - DNA, 120 bp, synthetic construct; identical to SEQ ID NO: 23031
  source 1..120: mol_type = other DNA

SEQ ID NO: 92832 - DNA, 120 bp, synthetic construct; identical to SEQ ID NO: 23032
  source 1..120: mol_type = other DNA

SEQ ID NO: 92833 - DNA, 120 bp, synthetic construct; identical to SEQ ID NO: 23033
  source 1..120: mol_type = other DNA

SEQ ID NO: 92834 - DNA, 120 bp, synthetic construct
  source 1..120: mol_type = other DNA
atagcaatgtggctatatagcaaagaccattatttttataaatgcacttttaggaataaaaacaattatatggccgggcgcagtggctcactcctgtaatcccagcactttgggaggctg

SEQ ID NO: 92835 - DNA, 120 bp, synthetic construct; identical to SEQ ID NO: 19637
  source 1..120: mol_type = other DNA

SEQ ID NO: 92836 - DNA, 120 bp, synthetic construct; identical to SEQ ID NO: 19638
  source 1..120: mol_type = other DNA

SEQ ID NO: 92837 - DNA, 120 bp, synthetic construct; identical to SEQ ID NO: 19639
  source 1..120: mol_type = other DNA

SEQ ID NO: 92838 - DNA, 120 bp, synthetic construct
  source 1..120: mol_type = other DNA
atgctcacttgtgacacaaacttagggaagctgcacacccacttgtgagatgagcttagaggagctgcacacacttagattagctgagggggagcggcacactcacttgtgaaatgagct

SEQ ID NO: 92839 - DNA, 120 bp, synthetic construct
  source 1..120: mol_type = other DNA
ttaggggagctgcacactcactagtgagatgagcttggagaggcacactcactagtgagatgagcttgggggagcagcacactcacttgtgagatgagcttgggggaggggcacactgag

SEQ ID NO: 92840 - DNA, 120 bp, synthetic construct; identical to SEQ ID NO: 12512
  source 1..120: mol_type = other DNA

SEQ ID NO: 92841 - DNA, 120 bp, synthetic construct
  source 1..120: mol_type = other DNA
agcagcacactcacttgtgagatgagcttgggggagcagcacactcgtgagatgagcttgggggaggtgcacactcacttgtgagatgagcttgggggaggtgcacactcgtgagatgag

SEQ ID NO: 92842 - DNA, 120 bp, synthetic construct; identical to SEQ ID NO: 12514
  source 1..120: mol_type = other DNA

SEQ ID NO: 92843 - DNA, 120 bp, synthetic construct; identical to SEQ ID NO: 12515
  source 1..120: mol_type = other DNA

SEQ ID NO: 92844 - DNA, 120 bp, synthetic construct
  source 1..120: mol_type = other DNA
atctcctgacctcgtgatccacctgccttggcctcccaaagtgctgagagggtttcttcttaaaatataaagttgcaaagtctaacctgattaaaactagcatagtggacactcaatcat

SEQ ID NO: 92845 - DNA, 120 bp, synthetic construct; identical to SEQ ID NO: 30768
  source 1..120: mol_type = other DNA

SEQ ID NO: 92846 - DNA, 120 bp, synthetic construct; identical to SEQ ID NO: 30769
  source 1..120: mol_type = other DNA

SEQ ID NO: 92847 - DNA, 120 bp, synthetic construct; identical to SEQ ID NO: 30770
  source 1..120: mol_type = other DNA

SEQ ID NO: 92848 - DNA, 120 bp, synthetic construct; identical to SEQ ID NO: 30771
  source 1..120: mol_type = other DNA

SEQ ID NO: 92849 - DNA, 120 bp, synthetic construct; identical to SEQ ID NO: 30772
  source 1..120: mol_type = other DNA

SEQ ID NO: 92850 - DNA, 120 bp, synthetic construct; identical to SEQ ID NO: 30773
  source 1..120: mol_type = other DNA

SEQ ID NO: 92851 - DNA, 120 bp, synthetic construct; identical to SEQ ID NO: 30774
  source 1..120: mol_type = other DNA

SEQ ID NO: 92852 - DNA, 120 bp, synthetic construct; identical to SEQ ID NO: 30775
  source 1..120: mol_type = other DNA

SEQ ID NO: 92853 - DNA, 120 bp, synthetic construct; identical to SEQ ID NO: 30776
  source 1..120: mol_type = other DNA

SEQ ID NO: 92854 - DNA, 120 bp, synthetic construct
  source 1..120: mol_type = other DNA
ctgggattacaggtgtgagccactgcactgggcagagatctatacttttaaaagatccccagatgattcttaaaggtagccaggtttgggagctttaatgttctcaaccacaaacttttt

SEQ ID NO: 92855 - DNA, 120 bp, synthetic construct
  source 1..120: mol_type = other DNA
gctttcttagcacagttcttgggcatggtagatacctaataaatatctgattaaccaaggggaaataaaatatggagatggggaactgagggaaattgaaaagctgtcctcgagggccag

SEQ ID NO: 92856 - DNA, 120 bp, synthetic construct; identical to SEQ ID NO: 7438
  source 1..120: mol_type = other DNA

SEQ ID NO: 92857 - DNA, 120 bp, synthetic construct; identical to SEQ ID NO: 5225
  source 1..120: mol_type = other DNA

SEQ ID NO: 92858 - DNA, 120 bp, synthetic construct; identical to SEQ ID NO: 24882
  source 1..120: mol_type = other DNA

SEQ ID NO: 92859 - DNA, 120 bp, synthetic construct
  source 1..120: mol_type = other DNA
ctgaggcaggagaatggtgtgaacccgggaggcggagcttgcagtgagccgagatcgtgccactgcactccagcctgggcgacagagcaagactccgtctcaaaaaaaaaaaaaaaaaaa

SEQ ID NO: 92860 - DNA, 120 bp, synthetic construct
  source 1..120: mol_type = other DNA
tcctgacctcagatgacccacccaccttggcctcccaaagtgctggaattacaggcatgagccactgcacctatctttttttttttaattaaaaaaattatttggtaccttgtttcatcc

SEQ ID NO: 92861 - DNA, 120 bp, synthetic construct
  source 1..120: mol_type = other DNA
gctaatttttgtatttttagtggagactgggtttcaccatgttgggccagctggtcttgaactcctgacctcaggtgatccgcccaccgtagcctcccaaagttctgggattagagctat

SEQ ID NO: 92862 - DNA, 120 bp, synthetic construct; identical to SEQ ID NO: 29390
  source 1..120: mol_type = other DNA

SEQ ID NO: 92863 - DNA, 120 bp, synthetic construct
  source 1..120: mol_type = other DNA
ctataatcccagctacttgggaagctgaggcaggagaatcgcttgaacctggaaggcagaggttgcagtgagccgagattgtgccactgcactccagcctgggcaacaagagcgaaactt

SEQ ID NO: 92864 - DNA, 120 bp, synthetic construct
  source 1..120: mol_type = other DNA
agtgaattacctgaggtcaggagttcaagaccagcctggccaacatggagaaacccagtctctaattaaaaaaaaaaaaaaaaattagccaggtgtggtggcacatgcctgtaatcccag

SEQ ID NO: 92865 - DNA, 120 bp, synthetic construct
  source 1..120: mol_type = other DNA
aagagtccccagaaactgaaagaagaagcaaagccctttctgtaccctccctgccccctgtcccgaccgcgacaaaagcgacttcctctttccagtgcatttaaggcgcagcctggaagt

SEQ ID NO: 92866 - DNA, 120 bp, synthetic construct
  source 1..120: mol_type = other DNA
agtgatccacccacctgggcctcccaaagtgctgggattacaggcatgagccaccgtgcctggcctgtttttttgaaatgaggtctggagtgcagtggtgcgatcatagttcactgcagc

SEQ ID NO: 92867 - DNA, 120 bp, synthetic construct
  source 1..120: mol_type = other DNA
ccattgattctggatcagtcttttttttttttttttatgagatggagtcttactctgtcacccagactggagtgcaatggcacaatctccactcactgcatcctccgcctcccaggttca

SEQ ID NO: 92868 - DNA, 120 bp, synthetic construct
  source 1..120: mol_type = other DNA
atttttgtgtttttagtagatatgggggtctcgctatgttgcccaggctggtctcaaactcttggactcaagcgatcttcccacctcggtactaaaaagtgctgggattccaggtgtgag

SEQ ID NO: 92869 - DNA, 120 bp, synthetic construct
  source 1..120: mol_type = other DNA
aacagacaggatctcccagaaccttcctagaatggaaccattcttgtcgcttttgaaaaacaaagccaagttctagatcccaaataaatgcacctgctggtgaacattctccttgtggtt

SEQ ID NO: 92870 - DNA, 120 bp, synthetic construct
  source 1..120: mol_type = other DNA
gccaccatgctcggccttttaggtggttttgagaggtatttaggtcacttccaatctcgtgcttttccaagtgttgtaaactacaaatattccttcacgtcttcttgtctttttaatgtt

SEQ ID NO: 92871 - DNA, 120 bp, synthetic construct
  source 1..120: mol_type = other DNA
tcactgaagctcgaagtggggagcatgaggacaggacgttaccccttgtcaaggcacccaggctgccaagacagagacaagcagcattgctccggccagcacttattgacgcttgaaggt

SEQ ID NO: 92872 - DNA, 120 bp, synthetic construct
  source 1..120: mol_type = other DNA
gagtttgagaccagcctggccaacatggagaaaccctgtctctactaaaaatccaaattagccaggcgtggtgacaggtgcctgtagtcccagccacttgggaggctgaggcaggagaat

SEQ ID NO: 92873 - DNA, 120 bp, synthetic construct
  source 1..120: mol_type = other DNA
acatgaggcctgttgggttagggcccactctactgacctcattttaacttaattacctcttgaaacgtacttaagagtacctttctcttaatatacccacgctgtaaggtactgggtggt

SEQ ID NO: 92874 - DNA, 120 bp, synthetic construct
  source 1..120: mol_type = other DNA
gagctgtgatcacgtcactgtactctagcctgggcaacagagcaagactctgtctccaaaaaagaaaataaagttgggaaaggctcactaacttcatcagatgagaacaaagacatgttt

SEQ ID NO: 92875 - DNA, 120 bp, synthetic construct
  source 1..120: mol_type = other DNA
ggtgtctgtggatatgtggccaggttcagtgggaagctgaaggatgagcagaccttaggctcaggaaggagggctgcctggaagtgggggcatcatcactgaccagaaagggaaaactgg

SEQ ID NO: 92876 - DNA, 120 bp, synthetic construct
  source 1..120: mol_type = other DNA
cctactcatggctgatctcttgtcatagtgaagtgtctggacagaccttcatcgttatgggatctctggtccccagagtgggtggcaatgaatgggagtggacaagctcacctgggtgta

SEQ ID NO: 92877 - DNA, 120 bp, synthetic construct
  source 1..120: mol_type = other DNA
aaacatgagccgggtgttgtggtgggagcctgtaatcccagctactcgggagtctgagacaagagaatcgcttcaacccgggaggcggaggttacagtgagccaagatcgcgccattgca

SEQ ID NO: 92878 - DNA, 120 bp, synthetic construct
  source 1..120: mol_type = other DNA
ctgccgcaagcttatcttaaagctgggaccacaacatgcatacctgcagccgggcccggggccagagggctttgaggcagcatttctcagccttttagacacacactctgttaaccccca

SEQ ID NO: 92879 - DNA, 120 bp, synthetic construct
  source 1..120: mol_type = other DNA
ttttcgggaggtagagataggggtcttgctatgttacccaggctgatctccaactcctggcctcaagcgatcctcccacctagatccctcaaagtactgggattacaggcgtgagcgacc

SEQ ID NO: 92880 - DNA, 120 bp, synthetic construct
  source 1..120: mol_type = other DNA
acgcctatcgccgcaacagcgtccgttttctgcagcagcgacgccgccaggcgcggccgggaccgcagagccccgggagcccgctcggtgagtgcagcgggagagggcaggaagggcaag

SEQ ID NO: 92881 - DNA, 120 bp, synthetic construct
  source 1..120: mol_type = other DNA
tgtctcatggcaggagacaggctgccgtccagggtgtaggagtgacctcatagctgggataaaaaatatattataacttaggttcgggcgcggtggctcacgcctgtaacccagcgcttt

SEQ ID NO: 92882 - DNA, 120 bp, synthetic construct
  source 1..120: mol_type = other DNA
tagaatcccagctactcgggaggctgaggcaggagaatggcttgaacccaggagtcagaggctgcagtgagtcgagattgttccactgcactccagcctgggtgacagtgcaagactcct

SEQ ID NO: 92883 - DNA, 120 bp, synthetic construct
  source 1..120: mol_type = other DNA
ttattttcatgattgtttcatttttttccaagctgaggtcctgaccaaatgtttccccgtggtttttgtatatttctgatccccttaaagtggcccttgcagcgtgctggggaggaggcc

SEQ ID NO: 92884 - DNA, 120 bp, synthetic construct
  source 1..120: mol_type = other DNA
ctgaaaattgacaaagacccaccaaatctagcccctactcctaggctgggcccctgcccatctccctggaccacaccactctcaagggctctcgtttgcagacaccccattgccctacta

SEQ ID NO: 92885 - DNA, 120 bp, synthetic construct
  source 1..120: mol_type = other DNA
ccactgcactccagcctgggcgacagagcgacactccatctcaaaaacaaaaagtgaagcacatggactttggagtcacatggaccctggtttgaatcctgacaactcctataatggctg

SEQ ID NO: 92886 - DNA, 120 bp, synthetic construct; identical to SEQ ID NO: 23783
  source 1..120: mol_type = other DNA

SEQ ID NO: 92887 - DNA, 120 bp, synthetic construct; identical to SEQ ID NO: 23784
  source 1..120: mol_type = other DNA

SEQ ID NO: 92888 - DNA, 120 bp, synthetic construct
  source 1..120: mol_type = other DNA
ccacatgcgtcggcttcccaaagtgttgggattacaggcgtgagccactgtgcccgtccagtttgcctagtctttaaaattttttttttctcctaaattaccaagtagcaaatgaagtaa

SEQ ID NO: 92889 - DNA, 120 bp, synthetic construct
  source 1..120: mol_type = other DNA
atgtaatggtaaagggatcaattcaacacgaagagctaactatcctaaatatatatgcacccaatacaggagcacccagattcataaagcaagtcctgagtgacctacaaagagacttag

SEQ ID NO: 92890 - DNA, 120 bp, synthetic construct; identical to SEQ ID NO: 24751
  source 1..120: mol_type = other DNA

SEQ ID NO: 92891 - DNA, 120 bp, synthetic construct
  source 1..120: mol_type = other DNA
tacatgagtaagttctttagtggtgatttctgagattggtacaaccatcacccaacagcaatgtacactgtacccaatgtgtagtcttttatccctcacgccaccacccttatcattcat

SEQ ID NO: 92892 - DNA, 120 bp, synthetic construct; identical to SEQ ID NO: 21038
  source 1..120: mol_type = other DNA

SEQ ID NO: 92893 - DNA, 120 bp, synthetic construct
  source 1..120: mol_type = other DNA
tcatgctgctataaagacacatgcacacgtatgtttattgcagcactactcataatagcaaagacttggaaccaacccaaatgtccaacaatgatggactgattaagaaaatgtggcaca

SEQ ID NO: 92894 - DNA, 120 bp, synthetic construct; identical to SEQ ID NO: 21039
  source 1..120: mol_type = other DNA

SEQ ID NO: 92895 - DNA, 120 bp, synthetic construct; identical to SEQ ID NO: 21040
  source 1..120: mol_type = other DNA

SEQ ID NO: 92896 - DNA, 120 bp, synthetic construct; identical to SEQ ID NO: 21041
  source 1..120: mol_type = other DNA

SEQ ID NO: 92897 - DNA, 120 bp, synthetic construct
  source 1..120: mol_type = other DNA
tctagaaaaccccattgtctcagcccaaaatctcaagctgataggcaacttcagcaaagtctcaggatacaaaatcaatgtgcaaaaatcacaagcattcttatacaccaataacagaca

SEQ ID NO: 92898 - DNA, 120 bp, synthetic construct
  source 1..120: mol_type = other DNA
ataccattcaggacataagcatgggcaaagacttcatgtctaaaacaccaaaagcaatagcaacaaaagccaaaattgacaaatgggatctaattaaactaaagagcttctgcacagcaa

SEQ ID NO: 92899 - DNA, 120 bp, synthetic construct; identical to SEQ ID NO: 21577
  source 1..120: mol_type = other DNA

SEQ ID NO: 92900 - DNA, 120 bp, synthetic construct; identical to SEQ ID NO: 21578
  source 1..120: mol_type = other DNA

SEQ ID NO: 92901 - DNA, 120 bp, synthetic construct
  source 1..120: mol_type = other DNA
gcagagaggctgggggaggggcacccgccattgcccagccttgattaggtaaacaaagcagccaggaagctcgaactgggtggagcccaccacagctcaaggaggcctgcctgcctctgt

SEQ ID NO: 92902 - DNA, 120 bp, synthetic construct
  source 1..120: mol_type = other DNA
catctgattggtgtacctgaaagtgatggggagaatggaaccaagttggaaaacactctgcaggatattatccagcagaacttccccaatctagcaaggcaggccaatgttcagattcag

SEQ ID NO: 92903 - DNA, 120 bp, synthetic construct
  source 1..120: mol_type = other DNA
aaagcaagtcctgagtgacctacaaagagacttagactcccacacattaataatggcagactatacattttttttcagcaccacaccacacctattccaaaattgaccacatagttggaa

SEQ ID NO: 92904 - DNA, 120 bp, synthetic construct
  source 1..120: mol_type = other DNA
atagtttaccaaccaaaaagagtccaggaccagatggattcacagctgaattctaccagaggtacaaggaggaactggtaccattccttctgaaactattccaatcaatagaaaaagagg

SEQ ID NO: 92905 - DNA, 120 bp, synthetic construct
  source 1..120: mol_type = other DNA
aaaaactactttaaagttcatatggaaccaaaaaagagcccgcatcaccaagtcactcctaagccaaaagaacaaagctggaggcatcacactacctgacttcaaactatactacaaggc

SEQ ID NO: 92906 - DNA, 120 bp, synthetic construct
  source 1..120: mol_type = other DNA
catgaaaaaatgctcatcatcactggccatcagggaaatgcaaatcaaaaccacaatgagataccatctcacaccagttagaatggcgatcattaaaaagtcaggaaacaacaggtgctg

SEQ ID NO: 92907 - DNA, 120 bp, synthetic construct; identical to SEQ ID NO: 21568
  source 1..120: mol_type = other DNA

SEQ ID NO: 92908 - DNA, 120 bp, synthetic construct; identical to SEQ ID NO: 21569
  source 1..120: mol_type = other DNA

SEQ ID NO: 92909 - DNA, 120 bp, synthetic construct; identical to SEQ ID NO: 21570
  source 1..120: mol_type = other DNA

SEQ ID NO: 92910 - DNA, 120 bp, synthetic construct; identical to SEQ ID NO: 21571
  source 1..120: mol_type = other DNA

SEQ ID NO: 92911 - DNA, 120 bp, synthetic construct
  source 1..120: mol_type = other DNA
agtggtttgtagttctccttgaagaggtccttcacatcccttgtaagttggaatgttataaagaaacagtgatttacaaacataaaatcattattttcaattcaattcaaaaaatacaaa

SEQ ID NO: 92912 - DNA, 120 bp, synthetic construct; identical to SEQ ID NO: 21572
  source 1..120: mol_type = other DNA

SEQ ID NO: 92913 - DNA, 120 bp, synthetic construct
  source 1..120: mol_type = other DNA
ctgccattgcactccagcctgggcaacaagagcaaatctctgtctcagtcaatcaatcaatcaatgactttaggggcttactgagggtgggtgagacaaatgtacttaataaaacaattt

SEQ ID NO: 92914 - DNA, 120 bp, synthetic construct
  source 1..120: mol_type = other DNA
ggatgccctctctcaccgctcctattcaacatagtgttggaagttctggccagcgcaatcaggcaggagaaggaaataaagggtattcaattaggaaaagaggaagtcaaattgtccctg

SEQ ID NO: 92915 - DNA, 120 bp, synthetic construct
  source 1..120: mol_type = other DNA
atttacaagaaaaaaacaaacaaccccatcaaaaagtgggcaaaggacatgaacagacacttctcaaaagaagacatttatgcagccaaaaaacacatgaagaaatgctcatcatcactg

SEQ ID NO: 92916 - DNA, 120 bp, synthetic construct; identical to SEQ ID NO: 21573
  source 1..120: mol_type = other DNA

SEQ ID NO: 92917 - DNA, 120 bp, synthetic construct; identical to SEQ ID NO: 21574
  source 1..120: mol_type = other DNA

SEQ ID NO: 92918 - DNA, 120 bp, synthetic construct; identical to SEQ ID NO: 21575
  source 1..120: mol_type = other DNA

SEQ ID NO: 92919 - DNA, 120 bp, synthetic construct
  source 1..120: mol_type = other DNA
cttgcatcccagggatgaagcccacttgatcatggtggataagctgtcggatgtgctgctggattcggtttgccagtattttattgaggatttttgcattgatgttcatcagggatattg

SEQ ID NO: 92920 - DNA, 120 bp, synthetic construct
  source 1..120: mol_type = other DNA
tcattacgtacccagtaattattcaggagcaggttgttcagtttccatgtagttgagcagttttgattgagtttcttaatcctgagttctagtttgattgcactgtggtctgagagacag

SEQ ID NO: 92921 - DNA, 120 bp, synthetic construct; identical to SEQ ID NO: 21576
  source 1..120: mol_type = other DNA

SEQ ID NO: 92922 - DNA, 120 bp, synthetic construct
  source 1..120: mol_type = other DNA
actggtgtgagatggtacctcattgtggttttgatttgcatttctctgatggccagtgatgatgagcattttttcatgtgtcttttggctgcataaatgtcttcttttgagaagtgtctg

SEQ ID NO: 92923 - DNA, 120 bp, synthetic construct
  source 1..120: mol_type = other DNA
atggaatgttcttccgtttgtttgtatcctcttttatttccttgagcagtggtttgtaattctcctggaagaagtccttcacatcccttgtaagttggattcctaggtattttattctct

SEQ ID NO: 92924 - DNA, 120 bp, synthetic construct
  source 1..120: mol_type = other DNA
tccatttcttctagattttctagtttatttgcgtagaggtgtttgtagtattctctgatggtggtttgtatttctgtgggattggtggtgatatcccctttatcattttttattgtgtct

SEQ ID NO: 92925 - DNA, 120 bp, synthetic construct
  source 1..120: mol_type = other DNA
tttaggatagtcagctgttcttgttgaattgatccctttaccattatgtaatggccatctttgtctcttttgatctttgttggtttaaagtctgttttatcagagagtaggtttgcaacc

SEQ ID NO: 92926 - DNA, 120 bp, synthetic construct
  source 1..120: mol_type = other DNA
gttttccaacttgcttccattctccccatcactttcaggtacacccatcagatgtagatttggtcttttcacatagtcccatatttcttggaggctttgctcatttctttttattctttt

SEQ ID NO: 92927 - DNA, 120 bp, synthetic construct
  source 1..120: mol_type = other DNA
ctcagactgctgtgctagtaatcagcgagactccatgggcgtaggaccctccaagccaggtgcaggatataatctcgtggtgcgccgttttttaagcctgtcggaaaagtacagtattca

SEQ ID NO: 92928 - DNA, 120 bp, synthetic construct; identical to SEQ ID NO: 24290
  source 1..120: mol_type = other DNA

SEQ ID NO: 92929 - DNA, 120 bp, synthetic construct; identical to SEQ ID NO: 7308
  source 1..120: mol_type = other DNA

SEQ ID NO: 92930 - DNA, 120 bp, synthetic construct; identical to SEQ ID NO: 7309
  source 1..120: mol_type = other DNA

SEQ ID NO: 92931 - DNA, 120 bp, synthetic construct
  source 1..120: mol_type = other DNA
gccgaagtgggtggatcacctgaggtcaggagttcgagaccagcctgaccaacatgttgaaaccccatctctactaaaaaatacaaaaattagctgggcatggtgacaggtgcctgtgat

SEQ ID NO: 92932 - DNA, 120 bp, synthetic construct
  source 1..120: mol_type = other DNA
agagcggctgaaatgcctgttcttcaggccgggcgagcgggagtctgacgcgatttgctgagctctgtcctccgacggctgcctcgcggccttgagggcctccgccgcctgttcgctgct

SEQ ID NO: 92933 - DNA, 120 bp, synthetic construct
  source 1..120: mol_type = other DNA
tgtgatggattatgtttatcatttgcgtatgttgaacgagccttgcatcctggggatgaagccaatttgattgtggtggataagctttttgatgtgctgttggattcagtttgccagtat

SEQ ID NO: 92934 - DNA, 120 bp, synthetic construct; identical to SEQ ID NO: 20387
  source 1..120: mol_type = other DNA

SEQ ID NO: 92935 - DNA, 120 bp, synthetic construct; identical to SEQ ID NO: 22545
  source 1..120: mol_type = other DNA

SEQ ID NO: 92936 - DNA, 120 bp, synthetic construct
  source 1..120: mol_type = other DNA
tgggcggaggggctcctcacttctcagacggggcggttgccaggcagagggtctcctcacttctcagacggggtggccgggcagagacgctcctcacatcccggacggggcggcagggca

SEQ ID NO: 92937 - DNA, 120 bp, synthetic construct
  source 1..120: mol_type = other DNA
caggtgatccacctgcctcggcctcccaaagtgctgggattacaggcatgaaccaccacatccagccagttccatattttttaatgagattataaatagtattggattttagatttcaat

SEQ ID NO: 92938 - DNA, 120 bp, synthetic construct
  source 1..120: mol_type = other DNA
tttgggtgaaaaaaaagaggaactccctgtccctaaattccttcaatgtcactcttgccacgttttcaatcagttgtactttgtgagtcattgccgaggtcactttttgtgacttgtagc

SEQ ID NO: 92939 - DNA, 120 bp, synthetic construct
  source 1..120: mol_type = other DNA
ccctccccccctccccccacccacaacagtccccggtgtgtgatgttccccttcctgtgtccatgtgttctcattgttcaattcccacctatgagtgagaacatgcggtgtttggttttt

SEQ ID NO: 92940 - DNA, 120 bp, synthetic construct
  source 1..120: mol_type = other DNA
cttatacaccaataacagacaaacaaagagccaaatcatgagtgaactcccattcataattgcttcaaagagaataaaatacctaggaatccaacttacaagggatgtgaaagacctctt

SEQ ID NO: 92941 - DNA, 120 bp, synthetic construct; identical to SEQ ID NO: 28289
  source 1..120: mol_type = other DNA

SEQ ID NO: 92942 - DNA, 120 bp, synthetic construct
  source 1..120: mol_type = other DNA
gattcccactctgtcgcccaggctggagtgcagtgatgtaatctcggctcactgcaacctccacttcccaggttcaagtgattctcctgcctcagcctccagagtagctgggattacagg

SEQ ID NO: 92943 - DNA, 120 bp, synthetic construct; identical to SEQ ID NO: 17558
  source 1..120: mol_type = other DNA

SEQ ID NO: 92944 - DNA, 120 bp, synthetic construct; identical to SEQ ID NO: 17559
  source 1..120: mol_type = other DNA

SEQ ID NO: 92945 - DNA, 120 bp, synthetic construct; identical to SEQ ID NO: 17560
  source 1..120: mol_type = other DNA

SEQ ID NO: 92946 - DNA, 120 bp, synthetic construct
  source 1..120: mol_type = other DNA
taaatagaaaataactaaagaaaagaacaaggtcattttctggtgcctaaagaaaaattgagagtgttggaggtgttcaaacaagagtgactccggctcccctcccctctcccctctccc

SEQ ID NO: 92947 - DNA, 120 bp, synthetic construct
  source 1..120: mol_type = other DNA
tgagaaattggatggttgctgtgtctgtgtagaaagtagtagacatgggagacttttcattttgttctgtactaagaaaaattcttctgccttgggatcctgttgatctatgaccttacc

SEQ ID NO: 92948 - DNA, 120 bp, synthetic construct; identical to SEQ ID NO: 17561
  source 1..120: mol_type = other DNA

SEQ ID NO: 92949 - DNA, 120 bp, synthetic construct; identical to SEQ ID NO: 13328
  source 1..120: mol_type = other DNA

SEQ ID NO: 92950 - DNA, 120 bp, synthetic construct; identical to SEQ ID NO: 13329
  source 1..120: mol_type = other DNA

SEQ ID NO: 92951 - DNA, 120 bp, synthetic construct; identical to SEQ ID NO: 13330
  source 1..120: mol_type = other DNA

SEQ ID NO: 92952 - DNA, 120 bp, synthetic construct; identical to SEQ ID NO: 13331
  source 1..120: mol_type = other DNA

SEQ ID NO: 92953 - DNA, 120 bp, synthetic construct; identical to SEQ ID NO: 13332
  source 1..120: mol_type = other DNA

SEQ ID NO: 92954 - DNA, 120 bp, synthetic construct; identical to SEQ ID NO: 13333
  source 1..120: mol_type = other DNA

SEQ ID NO: 92955 - DNA, 120 bp, synthetic construct; identical to SEQ ID NO: 13334
  source 1..120: mol_type = other DNA

SEQ ID NO: 92956 - DNA, 120 bp, synthetic construct; identical to SEQ ID NO: 13335
  source 1..120: mol_type = other DNA

SEQ ID NO: 92957 - DNA, 120 bp, synthetic construct; identical to SEQ ID NO: 13336
  source 1..120: mol_type = other DNA

SEQ ID NO: 92958 - DNA, 120 bp, synthetic construct
  source 1..120: mol_type = other DNA
aacacaaaagctgagggtcttaggggccaaggtcacacacacacacacccaaacaccctccggtacacccataagtgagcaaggtgattgcaaagagtggcccctggagtgacggacata

SEQ ID NO: 92959 - DNA, 120 bp, synthetic construct
  source 1..120: mol_type = other DNA
agatggagggggatggggagtagagagctggagggggatctggggtgaagagctagaggaagatggggaatggagatggagggggatggggtggagatgaagggggatggggagtggaga

SEQ ID NO: 92960 - DNA, 120 bp, synthetic construct
  source 1..120: mol_type = other DNA
cacgtgctccagtggaacacataactgagtaggaacagtgtggggcagggccagcgaggacacctttgggtcaatccctgagggctccatggaggcatcgacctcttgccctcccagacc

SEQ ID NO: 92961 - DNA, 120 bp, synthetic construct; identical to SEQ ID NO: 20017
  source 1..120: mol_type = other DNA

SEQ ID NO: 92962 - DNA, 120 bp, synthetic construct; identical to SEQ ID NO: 20018
  source 1..120: mol_type = other DNA

SEQ ID NO: 92963 - DNA, 120 bp, synthetic construct; identical to SEQ ID NO: 33028
  source 1..120: mol_type = other DNA

SEQ ID NO: 92964 - DNA, 120 bp, synthetic construct
  source 1..120: mol_type = other DNA
gtcctctggtggattatgtgtcctattttccaacttttctgcaactatttttttttttgagacagtctcgcttggttgcccaggctggagtgcagtggtacaatcttggctcactgcaac

SEQ ID NO: 92965 - DNA, 120 bp, synthetic construct
  source 1..120: mol_type = other DNA
caggtgatctgcccgcctcggcctcccaaagtgctgggattataggggtgagtcactgtgcctggccctgttatttttaatttataaataaataaatatatatatacacataaatataaa

SEQ ID NO: 92966 - DNA, 120 bp, synthetic construct; identical to SEQ ID NO: 18745
  source 1..120: mol_type = other DNA

SEQ ID NO: 92967 - DNA, 120 bp, synthetic construct
  source 1..120: mol_type = other DNA
tggaaatcatcattctcagtaaactattgcaaggacaaaaaaccaaacaccgcatattctcactcataggtgggaattgaacaatgagaacacatggacacaggaaggggagcatcacac

SEQ ID NO: 92968 - DNA, 120 bp, synthetic construct
  source 1..120: mol_type = other DNA
tgggagttctaatttactgctagcaactatgtaaattgataaaataattttagaaaacaatttggtggctgggcacagtgggtcatgcctgtaatcccagcactttgggaggccaaggct

SEQ ID NO: 92969 - DNA, 120 bp, synthetic construct; identical to SEQ ID NO: 13805
  source 1..120: mol_type = other DNA

SEQ ID NO: 92970 - DNA, 120 bp, synthetic construct; identical to SEQ ID NO: 22478
  source 1..120: mol_type = other DNA

SEQ ID NO: 92971 - DNA, 120 bp, synthetic construct; identical to SEQ ID NO: 22479
  source 1..120: mol_type = other DNA

SEQ ID NO: 92972 - DNA, 120 bp, synthetic construct; identical to SEQ ID NO: 22480
  source 1..120: mol_type = other DNA

SEQ ID NO: 92973 - DNA, 120 bp, synthetic construct; identical to SEQ ID NO: 27127
  source 1..120: mol_type = other DNA

SEQ ID NO: 92974 - DNA, 120 bp, synthetic construct; identical to SEQ ID NO: 10853
  source 1..120: mol_type = other DNA

SEQ ID NO: 92975 - DNA, 120 bp, synthetic construct
  source 1..120: mol_type = other DNA
ctgcatccacctcagtttcagtgcccttattgtattggcctttccccctttggaatttctattctaactaccccaacctaaaaacaacaatggtgttttatctgttcatcccttctgtct

SEQ ID NO: 92976 - DNA, 120 bp, synthetic construct; identical to SEQ ID NO: 25766
  source 1..120: mol_type = other DNA

SEQ ID NO: 92977 - DNA, 120 bp, synthetic construct
  source 1..120: mol_type = other DNA
ccctggccagaacttccaacactatgttgaataggagtggtgaaagagggcatccctgtcttgtgccaatttttaaagggaatgcttccagtttttgcccattcagtatgatattggctg

SEQ ID NO: 92978 - DNA, 120 bp, synthetic construct
  source 1..120: mol_type = other DNA
atttatgcagccaaaaaacacatgaaaaaatgctcaccatcactggccatcagagaaatgcaaatcaaaaccacaatgagataccatctcacaccagttagaatagcaatcattcaaaag

SEQ ID NO: 92979 - DNA, 120 bp, synthetic construct
  source 1..120: mol_type = other DNA
ccttcaataatgaaggaggagcttctgcacaacaacaaaactgtcaacagagtaaatagacagcctacaaaatgggagaaaatatttgcaaactatacatctgacaaaggtccaatagcc

SEQ ID NO: 92980 - DNA, 120 bp, synthetic construct
  source 1..120: mol_type = other DNA
cctactgggggatgcctcccagttaggctgctcgggggtcagggtcagggacccacttgaggaggcagtctacccattctcagatatccagctgtgtgctgggagaaccactgctctctt

SEQ ID NO: 92981 - DNA, 120 bp, synthetic construct
  source 1..120: mol_type = other DNA
ccaaaaaagagccctcattgccaagtcaatcctaagccaaagaacaaagctggaggcatcacgctacctgacttcaaactatactacaaggctacagtaaccaaaacagcatggtactgg

SEQ ID NO: 92982 - DNA, 120 bp, synthetic construct
  source 1..120: mol_type = other DNA
tagaatggcagtcattcaaaagtcaggaaacaacaggtgctggagaggatgtggagaaattggaacacttctacactgttggtgggactgtaaactagttcaaccattgtggaagtcaat

SEQ ID NO: 92983 - DNA, 120 bp, synthetic construct; identical to SEQ ID NO: 25764
  source 1..120: mol_type = other DNA

SEQ ID NO: 92984 - DNA, 120 bp, synthetic construct
  source 1..120: mol_type = other DNA
caaaataataagagctatctatgacaaacccacagccaatatcatactgaatgggcaaaaactggacgcattccctttgaatggcacaagacagggatgccctctctcaccactcctatt

SEQ ID NO: 92985 - DNA, 120 bp, synthetic construct
  source 1..120: mol_type = other DNA
ggattccctatttaacaaatggtgctaggaaaactggctagccatatgtagaaagctgaaactggatcccttccttacaccttatacaaaaattaattcaagatggattaaagacttaaa

SEQ ID NO: 92986 - DNA, 120 bp, synthetic construct
  source 1..120: mol_type = other DNA
ggacatggatgaaatttgaaatcatcattctcagtaagctatcgcaagaacaaaaaaacaaacaccgcatattcttactcataggtgggaattgaacaatgagtacacatggacacagga

SEQ ID NO: 92987 - DNA, 120 bp, synthetic construct
  source 1..120: mol_type = other DNA
accatgatccagcaatcccactattgggtatttacccagaggaaaagaagtcattatacaaaaaaagatattgcatacacatgtttatagcagcacaattcgcagttgcaaatgttgaac

SEQ ID NO: 92988 - DNA, 120 bp, synthetic construct; identical to SEQ ID NO: 25765
  source 1..120: mol_type = other DNA

SEQ ID NO: 92989 - DNA, 120 bp, synthetic construct; identical to SEQ ID NO: 22203
  source 1..120: mol_type = other DNA

SEQ ID NO: 92990 - DNA, 120 bp, synthetic construct; identical to SEQ ID NO: 22204
  source 1..120: mol_type = other DNA

SEQ ID NO: 92991 - DNA, 120 bp, synthetic construct; identical to SEQ ID NO: 19640
  source 1..120: mol_type = other DNA

SEQ ID NO: 92992 - DNA, 120 bp, synthetic construct
  source 1..120: mol_type = other DNA
acatatgttgtcttctcagctaattgatagtttcatttacagcacaaaagtttttaatttcaataaagtccgggctgggcacggtggctcatgcctgtaattccagcactttggggggca

SEQ ID NO: 92993 - DNA, 120 bp, synthetic construct
  source 1..120: mol_type = other DNA
cagggtttccaaagacagtaggaatatttctgttctctgtgtatattgaacagctgtgcacctaagcagggtgcctgagtaggaagttaatttcattttaagggctggagcttgttacaa

SEQ ID NO: 92994 - DNA, 120 bp, synthetic construct
  source 1..120: mol_type = other DNA
atacaggactcataaccaccctaactgcctcttccagctgtaaactggcattcagatgaagtggtaacttctagggatgaggttcaagaagagttcaaactttcctccctatatcttttt

SEQ ID NO: 92995 - DNA, 120 bp, synthetic construct
  source 1..120: mol_type = other DNA
tcaaatcccagcttttgttagctatatgatcccgtgtaagttaactttcttgtgcctgagtgtattttttaaaaaattattttatgggctgggcgcggtggctcacgcctgtaatcccag

SEQ ID NO: 92996 - DNA, 120 bp, synthetic construct
  source 1..120: mol_type = other DNA
cctggccaacatggtgaaaccccgtttctactaaaaatacaaaagttagccaggtgtggtggcacgcaactataatcccagctactcgggaggctgaggcatggggaaatcacttgaacc

SEQ ID NO: 92997 - DNA, 120 bp, synthetic construct
  source 1..120: mol_type = other DNA
tttccaaaagtcagcttgaagacagggactctgtggagcagacacagttctcatatgtcaaagaaccgggttctgcttggaagctgctgctaaggaaagccctataaataacaaaaataa

SEQ ID NO: 92998 - DNA, 120 bp, synthetic construct
  source 1..120: mol_type = other DNA
ccgggtccccacgtaagccgctacctctcaccagtgttcggcacctcccgataccaggcgcggtagagctcgcgcaccctccgcttggcctcgttcatgtcccgactgaaaatgggcttc

SEQ ID NO: 92999 - DNA, 120 bp, synthetic construct; identical to SEQ ID NO: 12614
  source 1..120: mol_type = other DNA

SEQ ID NO: 93000 - DNA, 120 bp, synthetic construct
  source 1..120: mol_type = other DNA
gctgggctggtctccagctcctaaccgcgagtgatctgccagcctcggcctcccgaggtgccgggattgcagatggagtctcgttcactcagtgcacaatgttgcccaggctggagtgca

SEQ ID NO: 93001 - DNA, 120 bp, synthetic construct
  source 1..120: mol_type = other DNA
ctgaaacatgtgctgtgtccactcagggttaaatggattaagggtggtgcaagatgtgctttgttaaacagatacttgaaggcagcatgcttgttaagagtcatcaccactccctaatct

SEQ ID NO: 93002 - DNA, 120 bp, synthetic construct
  source 1..120: mol_type = other DNA
tatcagcccttagcaaatactactaattctcccatagcatactgtaagaggaaatacaagactgcttttctttcctcattcaacttcctcccctctcctcattaggtagtgccacttaag

SEQ ID NO: 93003 - DNA, 120 bp, synthetic construct
  source 1..120: mol_type = other DNA
tcactttgttgcctgaacccgggaggtagaggttgcagtaagccaagatcacaccactgcacttcagcctgggcgatagagctagattctatctcagaaaaaaaagaaaaaagaatttta

SEQ ID NO: 93004 - DNA, 120 bp, synthetic construct
  source 1..120: mol_type = other DNA
gaggctgggaggttggggctacagcgagcccatgctgcactccagcatggacaacagaagagagaccctgtctcaaataagtaaataaattttaatgaacataaataaaaatgaattata

SEQ ID NO: 93005 - DNA, 120 bp, synthetic construct
  source 1..120: mol_type = other DNA
gccactgcactccagcatgggcaacagagccagactctgtctcaaaaaaaaaaaaaatagtattttatctgctgggtatggtggctcatgcctgtaatcccagcactttgggaggccgag

SEQ ID NO: 93006 - DNA, 120 bp, synthetic construct
  source 1..120: mol_type = other DNA
agttctatgaagaaagttataggatggtggtgttgaaataactggattagagggtccaactttagttacaggaatcaggaaaggcctctctgaggcaacttttgagccgagaggtgaatg

SEQ ID NO: 93007 - DNA, 120 bp, synthetic construct
  source 1..120: mol_type = other DNA
tccccagccctgcagaactgtgagtcaattaaacctctttcctttattaattacctagtctcaggtatttcttcatagcagcagcacgagaacagactaatacagcttacatgcttagga

SEQ ID NO: 93008 - DNA, 120 bp, synthetic construct
  source 1..120: mol_type = other DNA
tttttttttgagatggagtctcactctgtcgccaggctggagagcagtggcccatctcggctcactgccacctctgcctcccaggttcaagcgattctcctgcctcagccttctgagtag

SEQ ID NO: 93009 - DNA, 120 bp, synthetic construct
  source 1..120: mol_type = other DNA
acttctaaaaaacaaacaaaccccatctatttggacacagagcagagatgtgcctgtgacttagcatggacctggccacatccatatcaaaaatattcactagttagtatgttaacattt

SEQ ID NO: 93010 - DNA, 120 bp, synthetic construct
  source 1..120: mol_type = other DNA
tatgtttctaaggtaatgttcaacacacaactggcccaggacagtgtttacatggggtaggcactcacctgtgttcaatgaatggaaatgaatgtatttcctttacctggtcgtatggag

SEQ ID NO: 93011 - DNA, 120 bp, synthetic construct
  source 1..120: mol_type = other DNA
aaagccacaggctaaccctacatccactctacaaaacccctggtcattacagaggttgtggtcttttttagaggagatgaaaatctctccaaaaatctttcaaatgtctaacctctcagg

SEQ ID NO: 93012 - DNA, 120 bp, synthetic construct
  source 1..120: mol_type = other DNA
agtttcttcctgggctagcaagggccaccaagaagcttcagcaaatagcccaattctacctataacagaagagacattgaagaattatcagcatagcaatgaatgcatcacaatttcaaa

SEQ ID NO: 93013 - DNA, 120 bp, synthetic construct
  source 1..120: mol_type = other DNA
aaaaaaaaaaaaacagaaagaaagaaaaagaaatagatctccctgtgttgcccatgatggttttgaactcctaggatccagtgattctcccctcggcttcccaaagtgctgggctgtagg

SEQ ID NO: 93014 - DNA, 120 bp, synthetic construct
  source 1..120: mol_type = other DNA
ggtgacaaaagtgaaattccatctcaaaaaaaataaaaaaaccaaaaattgtagcccgccacagtggctcacacctgtaatcccagcactctgggagtcttaggcaggcaaatgacttgt

SEQ ID NO: 93015 - DNA, 120 bp, synthetic construct
  source 1..120: mol_type = other DNA
ggcgacagagcgagactccttctcaaaaaaaaaaaaaaaaaaaaaaaaaatacaaaaattagctgggtgtggtgacgggcacctatagggtggtggcaagcacctataatcccagctact

SEQ ID NO: 93016 - DNA, 120 bp, synthetic construct
  source 1..120: mol_type = other DNA
actgtgattacaggtgtgagccaccatgcccagcctactcctaacactttcatatcaccctgatatatattatctcatgccatccacacacaaatcctatgaaacaagtcagatacgtat

SEQ ID NO: 93017 - DNA, 120 bp, synthetic construct
  source 1..120: mol_type = other DNA
aaacgttaagggaaccaggaaaaattaacagttgatctgaggtcccggaattatggataatatttaaattcccccgcgccggttgcacttaaatgattttacctctacacataccgaaat

SEQ ID NO: 93018 - DNA, 120 bp, synthetic construct
  source 1..120: mol_type = other DNA
ctcacgatcactgattatattagtctgttctcatgctgctgataaagacatacctgagacagggcaattttcaaaagaaagaggtttaatggacttaacagttccacatggctgcagagg

SEQ ID NO: 93019 - DNA, 120 bp, synthetic construct
  source 1..120: mol_type = other DNA
cccacttgttgatggggttgtttgtttttttcttgtaaatttgtttgagttcattgtagattgtggatattagccctttgtcagatgagtgggttgcaaaaattttctcccattcagtag

SEQ ID NO: 93020 - DNA, 120 bp, synthetic construct
  source 1..120: mol_type = other DNA
agcagtggtttgtagttctccttgaagaggtccttcacgtccctttgtaagttggattcctaggtattttattctcttttaagcaattgtgaatgggagttcattcatgatttggctgtt

SEQ ID NO: 93021 - DNA, 120 bp, synthetic construct
  source 1..120: mol_type = other DNA
aacacatggacagaggaaggggaacatcacactctggggactgttgtggggtggggggaggggggagggatagctttaggagatatacctaatgctaattgacgagttaatgggtgcagc

SEQ ID NO: 93022 - DNA, 120 bp, synthetic construct
  source 1..120: mol_type = other DNA
caataccatgctgttttgattactatagctttgtaatagattttcaaatctgatagtgtgatgcctctggcattgttctttttgctcaagattgccttggctatctggggtcttttgtgg

SEQ ID NO: 93023 - DNA, 120 bp, synthetic construct
  source 1..120: mol_type = other DNA
gggtgacgtgatatctcgttgtagttttggtttgcatttctatgatgatcagtgatgttggagcactttttcatatacctgtttgccatttgcatgtcttcttttgggaaatgtctatcc

SEQ ID NO: 93024 - DNA, 120 bp, synthetic construct
  source 1..120: mol_type = other DNA
tatcattgttggacatttgggttggttccaagtctttgctattgtgaatagtgctgcaataaacatacgtgtgcatgtgtctttatagcagcatgatttatagtcctttgggtatatacc

SEQ ID NO: 93025 - DNA, 120 bp, synthetic construct
  source 1..120: mol_type = other DNA
gaatccacctgcctcggcctcccaaagtgctaggattacaggtgtgagccaccgcgcccggtcaatattttattttctattacaccgatccatttaaaaaatttacatattagattcatc

SEQ ID NO: 93026 - DNA, 120 bp, synthetic construct
  source 1..120: mol_type = other DNA
caagactaaaaacagtatcatttgaatctaagtcctcaagggggaaaaattaccccttctgtttatttttggcacatatcaaaaagaatattccccaaatttggccaattgctggtttaa

SEQ ID NO: 93027 - DNA, 120 bp, synthetic construct
  source 1..120: mol_type = other DNA
ctcctgcctcagcctcccaagtagctgggactacaggcatacaccactgcacctggctctcatttaggacttttacttgtgtaaaacatatttagaacctctcacaatgcaaaaacaaat

SEQ ID NO: 93028 - DNA, 120 bp, synthetic construct
  source 1..120: mol_type = other DNA
gcttcactctacagctctggctgctattatagcccatgcctaagaaaccccttcctgaattgatgtttatggtacttaaaagcttttaaatgctgagtttccagaaggtagatgaggagg

SEQ ID NO: 93029 - DNA, 120 bp, synthetic construct
  source 1..120: mol_type = other DNA
tcatacttttttctttcctttttttttttttattttgagacgaagtttcgctcttgttgcctaggccggagtgcaatggcgcaatcttggctcacagcaacctctgcctctcggattcaa

SEQ ID NO: 93030 - DNA, 120 bp, synthetic construct
  source 1..120: mol_type = other DNA
acaagagtgaatctctgtctcaaaaataaaaaagcaaagtaaaagggtaagcacatcatttaggcgcaacggtgtcggctcaagaggatttgcgatttggaagagagcgaggttagcgag

SEQ ID NO: 93031 - DNA, 120 bp, synthetic construct; identical to SEQ ID NO: 33801
  source 1..120: mol_type = other DNA

SEQ ID NO: 93032 - DNA, 120 bp, synthetic construct; identical to SEQ ID NO: 11103
  source 1..120: mol_type = other DNA

SEQ ID NO: 93033 - DNA, 120 bp, synthetic construct; identical to SEQ ID NO: 26563
  source 1..120: mol_type = other DNA

SEQ ID NO: 93034 - DNA, 120 bp, synthetic construct
  source 1..120: mol_type = other DNA
acatgtgcacaacatgcaggtttgctacacatgtatacatgtatacatgtgccatgttggtgtgctgcaccgattaactcttcatttaacattaggtatatctcctaatgctgtccctcc

SEQ ID NO: 93035 - DNA, 120 bp, synthetic construct
  source 1..120: mol_type = other DNA
acttaaatgttagacctaaaaccataaaaaccctagaagaaaacctaggcaataccattcaggacataggcatgggcaaggacttcatgtctaaaacaccaaaagcaatggcaacaaaag

SEQ ID NO: 93036 - DNA, 120 bp, synthetic construct; identical to SEQ ID NO: 26262
  source 1..120: mol_type = other DNA

SEQ ID NO: 93037 - DNA, 120 bp, synthetic construct; identical to SEQ ID NO: 19360
  source 1..120: mol_type = other DNA

SEQ ID NO: 93038 - DNA, 120 bp, synthetic construct
  source 1..120: mol_type = other DNA
acttctccatttagccaagagaggaaatgagggaactttcagggacctggttaacttggtaacttactgacagccgttgagaagccagctgacatgacctgacctgtgaaaaggagaaga

SEQ ID NO: 93039 - DNA, 120 bp, synthetic construct
  source 1..120: mol_type = other DNA
ctgggattaagcgactctcgtgcctcagcctgcagaataatttaaaagtacagatagggaaattcattgacagtctaccattactccttcaagcatctagttcctaacgatttctatcag

SEQ ID NO: 93040 - DNA, 120 bp, synthetic construct
  source 1..120: mol_type = other DNA
tgcagtgagccaagattgagccactgcactccagcctgggagtcagagtgagaccctgtctccaaaaaaaaaaaaaagaaaagaaaaaagaagaaacgtggtattttgtaggttaataaa

SEQ ID NO: 93041 - DNA, 120 bp, synthetic construct
  source 1..120: mol_type = other DNA
ttgaggaagccaggagtttgagaccaacctgggccacgtagccagatctcgtctctataaaaaataaaaaatattagccaggcatggtagtatgtgcctgtagtcctggctatgtcagag

SEQ ID NO: 93042 - DNA, 120 bp, synthetic construct
  source 1..120: mol_type = other DNA
gcctaaatctttaattcttttttttgagatggagtcctgctctgttgcccctgctggagtgcagtggcgcaatctcggctcactacaacctccgcctcctgggttcacaccattctcctg

SEQ ID NO: 93043 - DNA, 120 bp, synthetic construct
  source 1..120: mol_type = other DNA
ctggctaatattttaattttccatacagatgaagtctcactgtattgcctagactggtcttgaattcctgggctcaagcaatctccctgcctcaaactcccatagtattgggattacagg

SEQ ID NO: 93044 - DNA, 120 bp, synthetic construct
  source 1..120: mol_type = other DNA
gccaattttttgtattttttagtagagacagggtttctgcatgttggccaggctggttttgaactcccgacctcagatgatcctcctgcctcaacctcccaaagttgctgggattacagg

SEQ ID NO: 93045 - DNA, 120 bp, synthetic construct
  source 1..120: mol_type = other DNA
taaataatgcttgtaaatggatacgtgcaggcccatattttcccctgaagtgttggtagttggtaagtgtaagatacagaggaacttttcaccctccatggcacattgccagatcaaacc

SEQ ID NO: 93046 - DNA, 120 bp, synthetic construct
  source 1..120: mol_type = other DNA
ggcggaggtttcactgagccgagatttgcaccactgcactccagcctgggtgactgagctagactccatctcaaaaaaaaaaaaaagaaaacgaaattttacgtatcaaattataacaag

SEQ ID NO: 93047 - DNA, 120 bp, synthetic construct
  source 1..120: mol_type = other DNA
cagtatttgtaaacctttattttacatagtttgttatggtctctgagagaagagaaacagtctctgaaagtccccatctcaggctgtgagataggcctacacagctagtcttaggtcggt

SEQ ID NO: 93048 - DNA, 120 bp, synthetic construct
  source 1..120: mol_type = other DNA
aaagggtcccctgctaagccatcagaaggcagggaaaatgcgagaccaaaaaccacaatgcccagatctcaagtagatgaagagtttttgaagcaaagtttaaaggaaaaacaattgcag

SEQ ID NO: 93049 - DNA, 120 bp, synthetic construct
  source 1..120: mol_type = other DNA
cctcccaaagtgctgggattacaggcatgagcaaccccaccctgcttaaccttcatctttttttttttttgagacagagtcttgctccatctccaggctggagtgtaatggtgcaatctt

SEQ ID NO: 93050 - DNA, 120 bp, synthetic construct
  source 1..120: mol_type = other DNA
gccaccgtgcctagcgtgtggaggcttttaaagggcaacagtatttattcctatgatgttaccatttttttttttttttttggagatggaatctcactctgtcacccaggctgcagtaca

SEQ ID NO: 93051 - DNA, 120 bp, synthetic construct
  source 1..120: mol_type = other DNA
gagtggttttagatcagagttttgtaacccacgtcttggtcagttatcaccctccctatagtaactaaaatagtacgttctgctttgaaggtgtccctacaccacaccgaagatactcac

SEQ ID NO: 93052 - DNA, 120 bp, synthetic construct
  source 1..120: mol_type = other DNA
caaagtgctgggattatgggcgtaagccaccatgcccagcccagatttctaatagaggtagattttatcatgcatctctaagttacctgaaagtcctgctataattgttctaggcatttt

SEQ ID NO: 93053 - DNA, 120 bp, synthetic construct
  source 1..120: mol_type = other DNA
ttcataaagagctgtccttgtgttggtctcatgggcatcgtgtttcctccgcagagccagccccagtgcctgctgagccgtttgacaacactacctacaagaacctgcagcatcatgact

SEQ ID NO: 93054 - DNA, 120 bp, synthetic construct
  source 1..120: mol_type = other DNA
gctggcattataggcgtgagccactgcacccagccagtaatagtgacttctaatcctacagccctggtttttgatcattagaaacaggagttttggccaggtgcagtggataattcctgt

SEQ ID NO: 93055 - DNA, 120 bp, synthetic construct
  source 1..120: mol_type = other DNA
agataactttaagtcacacctttgggggcaatgtggggggctcctgtgcatcacatggagcacgctcccccagcactctgcagagacagacccccagtctgacttagagaaagtaaccaa

SEQ ID NO: 93056 - DNA, 120 bp, synthetic construct
  source 1..120: mol_type = other DNA
tattttgatttgcatatatttttaagataaagcatgagacttgtataaagttctttcctggctgggcgcggtggctcatgcctgtaatccctgcactttggaaggctgaggcagatggat

SEQ ID NO: 93057 - DNA, 120 bp, synthetic construct
  source 1..120: mol_type = other DNA
gagaatggcgtgaacccaggaggcggagcttgcagtgaaccgagatagcctcactgcactccagcctgggcgaaagagcaagactccgtctcaaaaaaaaaaaacaaaaaaaaaattagc

SEQ ID NO: 93058 - DNA, 120 bp, synthetic construct; identical to SEQ ID NO: 1175
  source 1..120: mol_type = other DNA

SEQ ID NO: 93059 - DNA, 120 bp, synthetic construct; identical to SEQ ID NO: 21664
  source 1..120: mol_type = other DNA

SEQ ID NO: 93060 - DNA, 120 bp, synthetic construct; identical to SEQ ID NO: 21665
  source 1..120: mol_type = other DNA

SEQ ID NO: 93061 - DNA, 120 bp, synthetic construct; identical to SEQ ID NO: 21666
  source 1..120: mol_type = other DNA

SEQ ID NO: 93062 - DNA, 120 bp, synthetic construct; identical to SEQ ID NO: 21667
  source 1..120: mol_type = other DNA

SEQ ID NO: 93063 - DNA, 120 bp, synthetic construct; identical to SEQ ID NO: 21668
  source 1..120: mol_type = other DNA

SEQ ID NO: 93064 - DNA, 120 bp, synthetic construct; identical to SEQ ID NO: 1178
  source 1..120: mol_type = other DNA

SEQ ID NO: 93065 - DNA, 120 bp, synthetic construct; identical to SEQ ID NO: 1179
  source 1..120: mol_type = other DNA

SEQ ID NO: 93066 - DNA, 120 bp, synthetic construct; identical to SEQ ID NO: 1180
  source 1..120: mol_type = other DNA

SEQ ID NO: 93067 - DNA, 120 bp, synthetic construct
  source 1..120: mol_type = other DNA
acgcagccactccaggtctgccttatacacactctataaagaagatgtcagacaaaaataccatttctgaccaacatggtgaaaccccatctctactaaaaatacaaaaattagccgggc

SEQ ID NO: 93068 - DNA, 120 bp, synthetic construct; identical to SEQ ID NO: 21669
  source 1..120: mol_type = other DNA

SEQ ID NO: 93069 - DNA, 120 bp, synthetic construct
  source 1..120: mol_type = other DNA
gtgggctgagattgcaccactgcactccagcctgggtgacagagcaagactctccgtctcaaaaaaaaaaaaaaaaaaaaagaaagaaactggaaacactgtacacattaacaaatctat

SEQ ID NO: 93070 - DNA, 120 bp, synthetic construct
  source 1..120: mol_type = other DNA
ttattttacttttcttttctttttttttttttttttttgagacagagtctcgctctgctccccaggctagagtgcagtagcacgatctcggctcacttgcaatctccacctcctgggttc

SEQ ID NO: 93071 - DNA, 120 bp, synthetic construct; identical to SEQ ID NO: 21670
  source 1..120: mol_type = other DNA

SEQ ID NO: 93072 - DNA, 120 bp, synthetic construct; identical to SEQ ID NO: 21671
  source 1..120: mol_type = other DNA

SEQ ID NO: 93073 - DNA, 120 bp, synthetic construct; identical to SEQ ID NO: 21672
  source 1..120: mol_type = other DNA

SEQ ID NO: 93074 - DNA, 120 bp, synthetic construct; identical to SEQ ID NO: 21673
  source 1..120: mol_type = other DNA

SEQ ID NO: 93075 - DNA, 120 bp, synthetic construct
  source 1..120: mol_type = other DNA
ccacctcagcctcccaaagtgctgggattacaggggtgagccaccatgcccgacaggtagcataattattttgaccactagtaagttttaaaattagaattaaatgaagttccaaagatt

SEQ ID NO: 93076 - DNA, 120 bp, synthetic construct; identical to SEQ ID NO: 21674
  source 1..120: mol_type = other DNA

SEQ ID NO: 93077 - DNA, 120 bp, synthetic construct
  source 1..120: mol_type = other DNA
ctcaggagccaatttcttaaagtctctctcttctgtgtgtgtgtacaaacacacacacacaaacacacacacacacacagcccctattggttctgtttctctagagaatctggactaata

SEQ ID NO: 93078 - DNA, 120 bp, synthetic construct; identical to SEQ ID NO: 1174
  source 1..120: mol_type = other DNA

SEQ ID NO: 93079 - DNA, 120 bp, synthetic construct; identical to SEQ ID NO: 1175
  source 1..120: mol_type = other DNA

SEQ ID NO: 93080 - DNA, 120 bp, synthetic construct; identical to SEQ ID NO: 1176
  source 1..120: mol_type = other DNA

SEQ ID NO: 93081 - DNA, 120 bp, synthetic construct; identical to SEQ ID NO: 1177
  source 1..120: mol_type = other DNA

SEQ ID NO: 93082 - DNA, 120 bp, synthetic construct; identical to SEQ ID NO: 21675
  source 1..120: mol_type = other DNA

SEQ ID NO: 93083 - DNA, 120 bp, synthetic construct; identical to SEQ ID NO: 21676
  source 1..120: mol_type = other DNA

SEQ ID NO: 93084 - DNA, 120 bp, synthetic construct; identical to SEQ ID NO: 21668
  source 1..120: mol_type = other DNA

SEQ ID NO: 93085 - DNA, 120 bp, synthetic construct; identical to SEQ ID NO: 1178
  source 1..120: mol_type = other DNA

SEQ ID NO: 93086 - DNA, 120 bp, synthetic construct; identical to SEQ ID NO: 1179
  source 1..120: mol_type = other DNA

SEQ ID NO: 93087 - DNA, 120 bp, synthetic construct; identical to SEQ ID NO: 1180
  source 1..120: mol_type = other DNA

SEQ ID NO: 93088 - DNA, 120 bp, synthetic construct; identical to SEQ ID NO: 93067
  source 1..120: mol_type = other DNA

SEQ ID NO: 93089 - DNA, 120 bp, synthetic construct
  source 1..120: mol_type = other DNA
tgacccaaggaaatgctgtttagtgttttggatctagcataatagcagcaattattttaaaaacattcagatgatttttatttgtctgaaaatgtatttgtctgaaaagtgctgggatta

SEQ ID NO: 93090 - DNA, 120 bp, synthetic construct
  source 1..120: mol_type = other DNA
cgagatggcgccattgcactccagcccgggcgacaatgcgagactccgtctcaaaacaaaacaaaacaaaacaaaacaaaacaaaaagaaaaaaacctgacaatcgaacacggaatgtca

SEQ ID NO: 93091 - DNA, 120 bp, synthetic construct
  source 1..120: mol_type = other DNA
gatattccccttcctgtgtccatgtgatctcattgttcagttcccacctatgagtgagaatatgcggtgtttggttttttgttcttgcgatagtttactgagaatgatgatttccagttt

SEQ ID NO: 93092 - DNA, 120 bp, synthetic construct
  source 1..120: mol_type = other DNA
gatgagtaggttgcgaaaattttctcccattttgtaggttgcctgttcactctgatggtagtttctcttgctgtgcagaagctctttagtttaattagatccgatttgtcaattttggct

SEQ ID NO: 93093 - DNA, 120 bp, synthetic construct
  source 1..120: mol_type = other DNA
tagatatacaatcatgtcgtctgcaaacagggacaatttgacttcctcttttcctacttgaataccctttatttccttctcctgcctaattgccctggccagaacttccaacactatgtt

SEQ ID NO: 93094 - DNA, 120 bp, synthetic construct
  source 1..120: mol_type = other DNA
tagtattctttgatggtagtttgtatttctgtgggatcggtggtgatatcccctttatcattttttattgtgtctatttgattcttctctctttttttctttattagtcttgctagcagt

SEQ ID NO: 93095 - DNA, 120 bp, synthetic construct
  source 1..120: mol_type = other DNA
tgcttggtagatcttccaccatccttttattttgagcctatgtgtgtctctgcacgtgagttgggtttcctgaatacagcacactgatgggtcttgactctttatccaatttgccagtct

SEQ ID NO: 93096 - DNA, 120 bp, synthetic construct
  source 1..120: mol_type = other DNA
tctctaaacttcccttcttgcttcatttcattcatttcatcttccattgctgataccctttcttccagttgatcgcatcggctcctgaggcttctgcattcttcacgtagttctcgagcc

SEQ ID NO: 93097 - DNA, 120 bp, synthetic construct
  source 1..120: mol_type = other DNA
ttaagccggtcagaaaagcgcaatattcgggagggagtgacccgattttccaggtgcgtccgtcacccctttctttgagtcggaaaggtaactctctgaccccttgcgcttcccaagtga

SEQ ID NO: 93098 - DNA, 120 bp, synthetic construct; identical to SEQ ID NO: 31647
  source 1..120: mol_type = other DNA

SEQ ID NO: 93099 - DNA, 120 bp, synthetic construct; identical to SEQ ID NO: 12395
  source 1..120: mol_type = other DNA

SEQ ID NO: 93100 - DNA, 120 bp, synthetic construct
  source 1..120: mol_type = other DNA
gagttaatgacttaagtgctgctgatactgaaataagttaatatttattttaaatataatttggaggccaggtgcggtggctcacacctgtaatcccagcactttgggaagctgaggcag

SEQ ID NO: 93101 - DNA, 120 bp, synthetic construct
  source 1..120: mol_type = other DNA
aactgtgcatgtgtctttatagcagcatgatttatagtcctttgggtatatacccagtaatgggatggctgggtcaaatggtatttctagttctagatccctgaggaatcgccacactga

SEQ ID NO: 93102 - DNA, 120 bp, synthetic construct
  source 1..120: mol_type = other DNA
acttggcgatgcgggctcttttttggttccatatgaactttaaagtagttttttccaattctgtgaagaaagtcattgcacacgtatgtttattgcggcactattcacaatagcaaagac

SEQ ID NO: 93103 - DNA, 120 bp, synthetic construct
  source 1..120: mol_type = other DNA
agaaaatgtggcagatatacactgtggaatactactcatccataaaaaaggatgagttaatggccttgtagggacatggatgaagctagaaaccatcattctgagcaaactatcacaggg

SEQ ID NO: 93104 - DNA, 120 bp, synthetic construct
  source 1..120: mol_type = other DNA
acacataggctcatgagaataaagggatggaggaagatctatcaagcaaatggaaaacaaaaaaagcaggggttacaatcctagtctctgataaaacagactttcaaccaacaaagacca

SEQ ID NO: 93105 - DNA, 120 bp, synthetic construct
  source 1..120: mol_type = other DNA
atacaaactacaaactaccatcagagaatactataaacacctctatgcaaataaactagaaaagctagaagaaatggataaattcctcgacacatacaccctcccaagactaaaccagga

SEQ ID NO: 93106 - DNA, 120 bp, synthetic construct; identical to SEQ ID NO: 15332
  source 1..120: mol_type = other DNA

SEQ ID NO: 93107 - DNA, 120 bp, synthetic construct; identical to SEQ ID NO: 19071
  source 1..120: mol_type = other DNA

SEQ ID NO: 93108 - DNA, 120 bp, synthetic construct; identical to SEQ ID NO: 19072
  source 1..120: mol_type = other DNA

SEQ ID NO: 93109 - DNA, 120 bp, synthetic construct
  source 1..120: mol_type = other DNA
cctaaacaaaggggctgcttgggttgacgtattgtggggggtgggggtgaggacagctgcatttcatcctaggttcttttaaaaaatgttttaataacatgattatttgtaaaaactccc

SEQ ID NO: 93110 - DNA, 120 bp, synthetic construct; identical to SEQ ID NO: 19067
  source 1..120: mol_type = other DNA

SEQ ID NO: 93111 - DNA, 120 bp, synthetic construct; identical to SEQ ID NO: 19068
  source 1..120: mol_type = other DNA

SEQ ID NO: 93112 - DNA, 120 bp, synthetic construct; identical to SEQ ID NO: 19069
  source 1..120: mol_type = other DNA

SEQ ID NO: 93113 - DNA, 120 bp, synthetic construct
  source 1..120: mol_type = other DNA
tgagcttaatattctttatttttattttttatttttattttttgagatggagtcttgttcactggcccaggctggagtgcagaggcatgatcctggctcaccgcaacctccatctcctgg

SEQ ID NO: 93114 - DNA, 120 bp, synthetic construct; identical to SEQ ID NO: 19070
  source 1..120: mol_type = other DNA

SEQ ID NO: 93115 - DNA, 120 bp, synthetic construct; identical to SEQ ID NO: 19073
  source 1..120: mol_type = other DNA

SEQ ID NO: 93116 - DNA, 120 bp, synthetic construct
  source 1..120: mol_type = other DNA
aaaaaaactgcctttttttttcttaatgcgttacaattggttgatcagaacagttttaaaactataaaatgttggctgggcgcggtggctcacacctgtgatcccagcactttgggaagc

SEQ ID NO: 93117 - DNA, 120 bp, synthetic construct; identical to SEQ ID NO: 19075
  source 1..120: mol_type = other DNA

SEQ ID NO: 93118 - DNA, 120 bp, synthetic construct; identical to SEQ ID NO: 19076
  source 1..120: mol_type = other DNA

SEQ ID NO: 93119 - DNA, 120 bp, synthetic construct; identical to SEQ ID NO: 4368
  source 1..120: mol_type = other DNA

SEQ ID NO: 93120 - DNA, 120 bp, synthetic construct; identical to SEQ ID NO: 14253
  source 1..120: mol_type = other DNA

SEQ ID NO: 93121 - DNA, 120 bp, synthetic construct; identical to SEQ ID NO: 23730
  source 1..120: mol_type = other DNA

SEQ ID NO: 93122 - DNA, 120 bp, synthetic construct; identical to SEQ ID NO: 7731
  source 1..120: mol_type = other DNA

SEQ ID NO: 93123 - DNA, 120 bp, synthetic construct; identical to SEQ ID NO: 7732
  source 1..120: mol_type = other DNA

SEQ ID NO: 93124 - DNA, 120 bp, synthetic construct; identical to SEQ ID NO: 7733
  source 1..120: mol_type = other DNA

SEQ ID NO: 93125 - DNA, 120 bp, synthetic construct
  source 1..120: mol_type = other DNA
aaccctgtctctactaaaaaatacaaaaaattagctggacgtggtggcaggcacctgtcatcccagctactcaggaggttgaggcaggagaattgcttgaacccgggaggtggagattgc

SEQ ID NO: 93126 - DNA, 120 bp, synthetic construct; identical to SEQ ID NO: 7721
  source 1..120: mol_type = other DNA

SEQ ID NO: 93127 - DNA, 120 bp, synthetic construct
  source 1..120: mol_type = other DNA
gaggctggggaaggggcgcccgccattgcccaggcttgcttaggtaaacaaagcagccgggaagctcgaactgggtggagcccaccacagctcaaggaggcctgcctgcctctgtaggct

SEQ ID NO: 93128 - DNA, 120 bp, synthetic construct
  source 1..120: mol_type = other DNA
atctatgtctgactggtgtacctgaaagtgatgtggagaatggaaccaagttggaaaacactctgcaggatattatccaggagaacttccccaatctagcaaggcaggccaacgttcaga

SEQ ID NO: 93129 - DNA, 120 bp, synthetic construct
  source 1..120: mol_type = other DNA
attcaacaagaggagctaactatcctaaatatatatgcacccaatacaggagcacccagattcataaagcaagtcctgagtgacctacaaagagacttagactcccacacattaataatg

SEQ ID NO: 93130 - DNA, 120 bp, synthetic construct; identical to SEQ ID NO: 54568
  source 1..120: mol_type = other DNA

SEQ ID NO: 93131 - DNA, 120 bp, synthetic construct
  source 1..120: mol_type = other DNA
aattgcttcaaagagaataaaatacctaggaatccaacttacaagggacgtgaaggacctcttcaaggagaactacaaaccactgctcaaggaaataaaagaggacacaaacaaatggaa

SEQ ID NO: 93132 - DNA, 120 bp, synthetic construct
  source 1..120: mol_type = other DNA
cagccaaaaaacacatgaagaaatgctcatcatcactggccgtcagagaaatgcaaatcaaaaccactatgagatatcatctcacaccagttagaatggcaatcattaaaaagtcaggaa

SEQ ID NO: 93133 - DNA, 120 bp, synthetic construct; identical to SEQ ID NO: 7722
  source 1..120: mol_type = other DNA

SEQ ID NO: 93134 - DNA, 120 bp, synthetic construct
  source 1..120: mol_type = other DNA
tttgaaaggacacacacacacacacacacacacacacacacacacacacacacctctagaataaaaagctcatgtctgaatggcttgtgtctgaacggctccataatttattcttcaact

SEQ ID NO: 93135 - DNA, 120 bp, synthetic construct
  source 1..120: mol_type = other DNA
gaccaaaagtagataaaaccacaaagatggggaaaaaacagaacagaaaaactggaaactctaaaacgcagagcgcctctcctcctccaaaggaacgcagttcctcaccagcaacggaac

SEQ ID NO: 93136 - DNA, 120 bp, synthetic construct
  source 1..120: mol_type = other DNA
taccagccgctgcaaaatcatgccaaaatgtaaagaccatccagactaggaagaaactgcatcaactaacgagcaaaatcaccagctaacatcataatgacaggatcaaattcacacata

SEQ ID NO: 93137 - DNA, 120 bp, synthetic construct
  source 1..120: mol_type = other DNA
tgttctttgaaaccaacgagaacaaagacaccacacaccagaatctctgggacgcattcaaagcagtgtgtagagggaaatttatagcactaaatgcctacaagagaaagcaggaaagat

SEQ ID NO: 93138 - DNA, 120 bp, synthetic construct; identical to SEQ ID NO: 68022
  source 1..120: mol_type = other DNA

SEQ ID NO: 93139 - DNA, 120 bp, synthetic construct
  source 1..120: mol_type = other DNA
aaaacaagcaatggggaaaggattccctatttaataaatggtgctgcgaaaactggctagccatatgtagaaagctgaaactggatcccttccttacaccttatacaaaaatcaattcaa

SEQ ID NO: 93140 - DNA, 120 bp, synthetic construct
  source 1..120: mol_type = other DNA
caccatggaatactatgcagccataaaaaatgatgagttcatgtcctttgtagggacatggatgaaattggaaaccatcattctcagtaaactatcgcaagaacaaaaaaccaaacaccg

SEQ ID NO: 93141 - DNA, 120 bp, synthetic construct; identical to SEQ ID NO: 7723
  source 1..120: mol_type = other DNA

SEQ ID NO: 93142 - DNA, 120 bp, synthetic construct; identical to SEQ ID NO: 7724
  source 1..120: mol_type = other DNA

SEQ ID NO: 93143 - DNA, 120 bp, synthetic construct
  source 1..120: mol_type = other DNA
tcctatcacatgagcagtggcaacatattctaataggagtgtgaaccctattgtgaactgtacatgtgaggaatgtaagctgcatgctccttatgagaatctaatgcctgatgatctgag

SEQ ID NO: 93144 - DNA, 120 bp, synthetic construct; identical to SEQ ID NO: 7725
  source 1..120: mol_type = other DNA

SEQ ID NO: 93145 - DNA, 120 bp, synthetic construct; identical to SEQ ID NO: 7726
  source 1..120: mol_type = other DNA

SEQ ID NO: 93146 - DNA, 120 bp, synthetic construct; identical to SEQ ID NO: 7727
  source 1..120: mol_type = other DNA

SEQ ID NO: 93147 - DNA, 120 bp, synthetic construct; identical to SEQ ID NO: 7729
  source 1..120: mol_type = other DNA

SEQ ID NO: 93148 - DNA, 120 bp, synthetic construct; identical to SEQ ID NO: 7730
  source 1..120: mol_type = other DNA

SEQ ID NO: 93149 - DNA, 120 bp, synthetic construct; identical to SEQ ID NO: 25965
  source 1..120: mol_type = other DNA

SEQ ID NO: 93150 - DNA, 120 bp, synthetic construct
  source 1..120: mol_type = other DNA
gtcctttgcccagtttttgatggggttgtttgtttttttcttgtaaatttgtttgagttcattgtagattctggatattaggcctttgtcagatgagtaggttgcgaaaattttctccca

SEQ ID NO: 93151 - DNA, 120 bp, synthetic construct; identical to SEQ ID NO: 67776
  source 1..120: mol_type = other DNA

SEQ ID NO: 93152 - DNA, 120 bp, synthetic construct
  source 1..120: mol_type = other DNA
gtagtattctctgatggtagtttgtatttctgtgggatcggtggtgatatcccctttatcattttttattgtgtctatttgattcttctctctttttttctttattagtcttaatagcgg

SEQ ID NO: 93153 - DNA, 120 bp, synthetic construct
  source 1..120: mol_type = other DNA
ggcttggtagatcttcctccatccttttattttgagcctatgtgtgtctctgcacgtgagatgggtttcctgaatacagcacactgatgggtcttgactctttatccaacttgccagtct

SEQ ID NO: 93154 - DNA, 120 bp, synthetic construct
  source 1..120: mol_type = other DNA
aaactctaaaacgcagagcgcctctcctcctccaaaggaacgcagttcctcaccagcaacagaacaaagctggatggagaatgattttgacgagctgagagaagaaggcttcagacgatc

SEQ ID NO: 93155 - DNA, 120 bp, synthetic construct; identical to SEQ ID NO: 25966
  source 1..120: mol_type = other DNA

SEQ ID NO: 93156 - DNA, 120 bp, synthetic construct; identical to SEQ ID NO: 25964
  source 1..120: mol_type = other DNA

SEQ ID NO: 93157 - DNA, 120 bp, synthetic construct
  source 1..120: mol_type = other DNA
cctctgctttggtaccagtaccatgctgttttggttactgtagccttgtagtatagtttgaagtcaggtagtgtgatgcctccagctttgttcttttggcttaggattgacttggcaatg

SEQ ID NO: 93158 - DNA, 120 bp, synthetic construct
  source 1..120: mol_type = other DNA
tacataatttattgagagtttttagcatgaagggctgttgaattttgtcaaaggccttttctgcatctattgagataatcatgtggtttttgcctttggttctgtttatatgctggatta

SEQ ID NO: 93159 - DNA, 120 bp, synthetic construct
  source 1..120: mol_type = other DNA
tgttagggtgtcaattttagatctttcctgctttctcttgtgggcacttagtgctataaatttccttctacgcactgctttgagtgtgtcccagagattctggtatgttgtgtctttgtt

SEQ ID NO: 93160 - DNA, 120 bp, synthetic construct
  source 1..120: mol_type = other DNA
gtacatgtgcacattgtgcaggttagttacatatgtatacatgtgccatgctggtgcgctgcacccactaactcgtcatctagccttagatatatctcccaatgctatccctcccccctc

SEQ ID NO: 93161 - DNA, 120 bp, synthetic construct
  source 1..120: mol_type = other DNA
acgttgtgtctttgttctcattggtttcaaagaatttatttatttctgccttaatttctttatttacccagtagtcattcaggagcaggttgttcagtttccatggagttgtgcgatttt

SEQ ID NO: 93162 - DNA, 120 bp, synthetic construct; identical to SEQ ID NO: 25967
  source 1..120: mol_type = other DNA

SEQ ID NO: 93163 - DNA, 120 bp, synthetic construct
  source 1..120: mol_type = other DNA
gcccagcagccaccccgtctgggaagtgaggagcgtctccgcccggcagccaccccgtccgggagggaggtgggggtcagcccccgccaggccagctgcccagtccgagagggaggttgg

SEQ ID NO: 93164 - DNA, 120 bp, synthetic construct
  source 1..120: mol_type = other DNA
ataaataaataaaaagaataaaagcttagcctggttgcggtggctcatacctgtaatcccagaactttgggaggccaaggtaggtggattacttgaggccaggaactatttgccaggaac

SEQ ID NO: 93165 - DNA, 120 bp, synthetic construct; identical to SEQ ID NO: 24161
  source 1..120: mol_type = other DNA

SEQ ID NO: 93166 - DNA, 120 bp, synthetic construct
  source 1..120: mol_type = other DNA
ggtgtgagatggtatctcatagtggttttgatttgcatttctctgatggctagtgatgatgagcattttttcatgtgtttttaggctgcataaatgtcttcttttgagaagtgtctgttc

SEQ ID NO: 93167 - DNA, 120 bp, synthetic construct; identical to SEQ ID NO: 24162
  source 1..120: mol_type = other DNA

SEQ ID NO: 93168 - DNA, 120 bp, synthetic construct
  source 1..120: mol_type = other DNA
tgtgctgcacccagtaactcgtcatttaacattaggtatatctccaaatgctatccctcccccctccccctaccccacaacaggccctggtgtgtgatgttccccttcctgagtccatgt

SEQ ID NO: 93169 - DNA, 120 bp, synthetic construct
  source 1..120: mol_type = other DNA
ttgcctgttgactctgatggtagtttcttttgctgtgcagaagctctttagcttaattagatttcacttgtcaattttggcttttgttgccattgcttttggtgttttagacatgaagtc

SEQ ID NO: 93170 - DNA, 120 bp, synthetic construct; identical to SEQ ID NO: 24163
  source 1..120: mol_type = other DNA

SEQ ID NO: 93171 - DNA, 120 bp, synthetic construct
  source 1..120: mol_type = other DNA
atccagtctatcattgttggacgtttaggttggttccaagtctttgctattgtgaataatgccgcagtaaacatacgtgtgcatgtgtctttatagcagcatgatttgtagacctttggg

SEQ ID NO: 93172 - DNA, 120 bp, synthetic construct
  source 1..120: mol_type = other DNA
tgcggcgttatttctgagggctctgttctgttccattgatctatgtctctgttttggtaccagtaccatgctgttttggttactgtagccttgtagtatagtttgaagtcaggtagcatg

SEQ ID NO: 93173 - DNA, 120 bp, synthetic construct
  source 1..120: mol_type = other DNA
tattgtcatctgattgtctcactgaaatctgcaattcttgtatttttctgtaatattcaaaatacaaacctggtgggactgtaaactagttcaaccattgtggaagtcagtgtggcgatt

SEQ ID NO: 93174 - DNA, 120 bp, synthetic construct
  source 1..120: mol_type = other DNA
ggcctccagcttcatccatgttgctgtagaggacatgatttcattccgtttttatggctgtggagtattccgtggtgtatatgtatcatattttctttatccaatcaatgattggtgggc

SEQ ID NO: 93175 - DNA, 120 bp, synthetic construct
  source 1..120: mol_type = other DNA
aataaacatacgtgtgcatgtgtctttatagcagcatgatttatagtcctttgggtatatacccagtaatgggatggctgggtcaaatgctatttctagttctagatccctgaggaatca

SEQ ID NO: 93176 - DNA, 120 bp, synthetic construct
  source 1..120: mol_type = other DNA
tattcacaatagcaaacacttggaatcaacccaaatgtccatcaatgatagactggattaagaaaatgtggcacatatacaccatggaatactatgcagccataaaaaatgatgagttca

SEQ ID NO: 93177 - DNA, 120 bp, synthetic construct
  source 1..120: mol_type = other DNA
ctaggttttcttctaggatttttatggttttaggtctaacatttaagtctttaacccatcttgaattaatttttgtataaggtgtaaggaagggatccagtttcatctttctgcatatgg

SEQ ID NO: 93178 - DNA, 120 bp, synthetic construct; identical to SEQ ID NO: 24701
  source 1..120: mol_type = other DNA

SEQ ID NO: 93179 - DNA, 120 bp, synthetic construct
  source 1..120: mol_type = other DNA
agtgctgggattacaggcgtgagccaccgcgcccggccgtttcctgactttttaatgattgccattctaactggtgtgagatggtatctcattgtggttttgatttgcatttctctgatg

SEQ ID NO: 93180 - DNA, 120 bp, synthetic construct
  source 1..120: mol_type = other DNA
gatgatgagcattttttcatgtgttttttggctgcataaatgtcttcttttgagaagtgtctgttcatgtccttcacccactttttgatggggttgtttgatttttttcttgtaaatttg

SEQ ID NO: 93181 - DNA, 120 bp, synthetic construct; identical to SEQ ID NO: 24702
  source 1..120: mol_type = other DNA

SEQ ID NO: 93182 - DNA, 120 bp, synthetic construct; identical to SEQ ID NO: 24703
  source 1..120: mol_type = other DNA

SEQ ID NO: 93183 - DNA, 120 bp, synthetic construct
  source 1..120: mol_type = other DNA
ctcctcaagtgggtcccagacccctgacccctgagcaacctaactgggaggcaccccccagtaggggcacactgacacctcacatggccaggtactcctctgagacaaaacttccagagg

SEQ ID NO: 93184 - DNA, 120 bp, synthetic construct
  source 1..120: mol_type = other DNA
tattatccaagagaacttccccaatctagcaaggcaggccaaccttcagattcaggaaatacagagaacaccacaaagatactcctcaagaagagcaactccaagacacataattgtcag

SEQ ID NO: 93185 - DNA, 120 bp, synthetic construct
  source 1..120: mol_type = other DNA
gtatatgcatccaatacaggagcacccagattcataaagcaagtcctgagtgacctacagagagacttagactcccacacaataataatgggagactttaacaccccactgtcaacatta

SEQ ID NO: 93186 - DNA, 120 bp, synthetic construct
  source 1..120: mol_type = other DNA
caaaatgataaaggggatatcaccactgatcccacagaaatacaaattaccatcagagaatactacaaacacctctacgcaaataaactagaaaatctagaagaaatggataaattcctt

SEQ ID NO: 93187 - DNA, 120 bp, synthetic construct
  source 1..120: mol_type = other DNA
ttcaacatagtgttggacgttctggccagggcaattaggcagcagaaggaaataaagggtattcaattaggaaaagaagaagtcaaattgtccctgtttgcagatgacatgattgtatat

SEQ ID NO: 93188 - DNA, 120 bp, synthetic construct
  source 1..120: mol_type = other DNA
aggtattaccattcaggacataggcgtgggcaaggacttcatgtctaaaacaccaaaagcaatggcaacaaaagccaaaattgacaaatgggatctcattaaactaaagagcttctgcac

SEQ ID NO: 93189 - DNA, 120 bp, synthetic construct; identical to SEQ ID NO: 24704
  source 1..120: mol_type = other DNA

SEQ ID NO: 93190 - DNA, 120 bp, synthetic construct; identical to SEQ ID NO: 13737
  source 1..120: mol_type = other DNA

SEQ ID NO: 93191 - DNA, 120 bp, synthetic construct
  source 1..120: mol_type = other DNA
caaatgaatgaaatgaagcaagaagggaagtttagagaaaaaagaataaaaagaaacgagcaaagcctccaagaaatatgggactatgtgaaaagaccaaatctacgtctgattggtgta

SEQ ID NO: 93192 - DNA, 120 bp, synthetic construct
  source 1..120: mol_type = other DNA
ggatggaggaagatctaccaagcaaatggaaaacaaaaaaaggcagggttgcaatcctagtctctgataaaacagactttaaaccaacaaagatcaaaagagacaaagaaggccattaca

SEQ ID NO: 93193 - DNA, 120 bp, synthetic construct
  source 1..120: mol_type = other DNA
cagagaatactacaaacatctctacgcaaataaactagaaaatctagaagacatggataaattcctcgacacatacactctcccaagactaaaccaggaagaagttgaatctctgaatag

SEQ ID NO: 93194 - DNA, 120 bp, synthetic construct
  source 1..120: mol_type = other DNA
aactacaaaccactgctcaaggaaataaaagaggatacaaacaaatggaagaacattctatgctcatgggtaggaagaatcaatatcgtgaaaatggccatactgcccaaggtaatttac

SEQ ID NO: 93195 - DNA, 120 bp, synthetic construct
  source 1..120: mol_type = other DNA
tcaaacaaatttacaagaaaaaaacaaacaaccccatcaaaaagtgggcaaaggacatgaacagacacttctcaaaagaagacatttatgcagccaaaaaacacatgaaaaaatgctcac

SEQ ID NO: 93196 - DNA, 120 bp, synthetic construct; identical to SEQ ID NO: 13738
  source 1..120: mol_type = other DNA

SEQ ID NO: 93197 - DNA, 120 bp, synthetic construct; identical to SEQ ID NO: 13739
  source 1..120: mol_type = other DNA

SEQ ID NO: 93198 - DNA, 120 bp, synthetic construct
  source 1..120: mol_type = other DNA
agccccttcgcccggcagccaccctgtctgggaagtgaggagcgtctccgcccggcagcctccccatccgggaaggaggtgggggtcagcccctgccaggccagccgccccgtccgggag

SEQ ID NO: 93199 - DNA, 120 bp, synthetic construct; identical to SEQ ID NO: 13740
  source 1..120: mol_type = other DNA

SEQ ID NO: 93200 - DNA, 120 bp, synthetic construct; identical to SEQ ID NO: 13741
  source 1..120: mol_type = other DNA

SEQ ID NO: 93201 - DNA, 120 bp, synthetic construct
  source 1..120: mol_type = other DNA
tgaggagcgtctctgcccggccgcccatcgtctgagatgtggggagcgcctttgccccgccgccccgtctgggatgtgaggagcgcctctacccggccgcgaccctgtctgggaggtgag

SEQ ID NO: 93202 - DNA, 120 bp, synthetic construct; identical to SEQ ID NO: 13742
  source 1..120: mol_type = other DNA

SEQ ID NO: 93203 - DNA, 120 bp, synthetic construct; identical to SEQ ID NO: 32992
  source 1..120: mol_type = other DNA

SEQ ID NO: 93204 - DNA, 120 bp, synthetic construct; identical to SEQ ID NO: 9145
  source 1..120: mol_type = other DNA

SEQ ID NO: 93205 - DNA, 120 bp, synthetic construct
  source 1..120: mol_type = other DNA
gctcttttttggttccatgtgaactttaaagtagttttttccaattatgtgaagaaagtcattggtagcttgatggggatggcattgaatctataaattaccttgggcagtatggccatt

SEQ ID NO: 93206 - DNA, 120 bp, synthetic construct
  source 1..120: mol_type = other DNA
gtttggttttttgttcttgcgatagtttactgagaatgatgatttccagtttcatccatgtccctacaaaggacatgaactcatcattttttatggctacatagtattccatggcgtata

SEQ ID NO: 93207 - DNA, 120 bp, synthetic construct
  source 1..120: mol_type = other DNA
tctctgttttggtaccagtaccatgctgttttggttactgtagccttgtagtatagtttgaagtcaggtagtgtgatgcctccagctttgttcttttggcttagaattgacttggcgatg

SEQ ID NO: 93208 - DNA, 120 bp, synthetic construct
  source 1..120: mol_type = other DNA
tctctctttttctgttgattggaatagtttcagaaggaatggtaccagttcctccttatacctctggtagaattcggctgtaaatccatctggtcctggactctttttggttggtaagct

SEQ ID NO: 93209 - DNA, 120 bp, synthetic construct; identical to SEQ ID NO: 9146
  source 1..120: mol_type = other DNA

SEQ ID NO: 93210 - DNA, 120 bp, synthetic construct
  source 1..120: mol_type = other DNA
gacatgaattcatcattttttatggctgcatagtattccatggtgtatatgtgccacattatcttaatccagtctatcattgttggacatttgggttggttccaagtctttgctattgtg

SEQ ID NO: 93211 - DNA, 120 bp, synthetic construct
  source 1..120: mol_type = other DNA
tagggaatcctttccccattgcttgtttttctcaggtttgtcaaagatcagatgtagatacgtggcattatttctgagggctctgttctgttccattgatctatatctctgttttggacc

SEQ ID NO: 93212 - DNA, 120 bp, synthetic construct
  source 1..120: mol_type = other DNA
tttctgcatctattgagataatcatgtggtttttctgtttggttctgtttatatgctggattacattgattgatttgtgtatgttgaaccagccttgcatcccagggatgaagcccactt

SEQ ID NO: 93213 - DNA, 120 bp, synthetic construct
  source 1..120: mol_type = other DNA
tgatgttagggtgtcagttttggatctttcctggtttctcttgtgggcatttagtgctataaattgccctctacacactgctttaaatgagtcccagagattcttgtatgttgtgtcttt

SEQ ID NO: 93214 - DNA, 120 bp, synthetic construct
  source 1..120: mol_type = other DNA
ataacaatattaactttaaatgtaaatggactaaatgctccaattaaaagacacagactggcaaattggataaagagtcaagacccatcagtgtgctgtattcaggaaacccatctcaca

SEQ ID NO: 93215 - DNA, 120 bp, synthetic construct
  source 1..120: mol_type = other DNA
tcagctccatcagctcctttaagcacttctctgtaatggttattctagttatacattcttctaaatttttttcaaagttttcaacttctttgcctttggtttgaatgtcctcccgtagct

SEQ ID NO: 93216 - DNA, 120 bp, synthetic construct; identical to SEQ ID NO: 17841
  source 1..120: mol_type = other DNA

SEQ ID NO: 93217 - DNA, 120 bp, synthetic construct
  source 1..120: mol_type = other DNA
tttgatttgcatttcttgatggccagtgatgatgagcattttttcatgtgtcttttggctgcataaatgtcttcttttgagaagtgtctgttcatatccttcgcccacttgttgatgggg

SEQ ID NO: 93218 - DNA, 120 bp, synthetic construct; identical to SEQ ID NO: 17842
  source 1..120: mol_type = other DNA

SEQ ID NO: 93219 - DNA, 120 bp, synthetic construct
  source 1..120: mol_type = other DNA
tgaggacctgggggtcgtagcgagaacccggggcccggcggggaggagattgaggatcccaggggaggtgaaaacttgggtaggggtgaggacgaaaagtagggaggtgaggaccctagt

SEQ ID NO: 93220 - DNA, 120 bp, synthetic construct
  source 1..120: mol_type = other DNA
tagaaaaccccatcgtctcaacccaaaatctccttaagctgataggcaacttcagcaaagtctcaggatacaaaatcaatgtgcaaaaatcacaagcattcttatacaccaataacagac

SEQ ID NO: 93221 - DNA, 120 bp, synthetic construct
  source 1..120: mol_type = other DNA
aatctacaagaaaaaaacaaacagccccatcaaaaagtgggtgaaggatatgaacagacacttctcaaaagaagacatttatgcagccaaaagacacatgaaaaaatgctcatcatcact

SEQ ID NO: 93222 - DNA, 120 bp, synthetic construct; identical to SEQ ID NO: 11759
  source 1..120: mol_type = other DNA

SEQ ID NO: 93223 - DNA, 120 bp, synthetic construct; identical to SEQ ID NO: 11760
  source 1..120: mol_type = other DNA

SEQ ID NO: 93224 - DNA, 120 bp, synthetic construct; identical to SEQ ID NO: 11761
  source 1..120: mol_type = other DNA

SEQ ID NO: 93225 - DNA, 120 bp, synthetic construct; identical to SEQ ID NO: 11762
  source 1..120: mol_type = other DNA

SEQ ID NO: 93226 - DNA, 120 bp, synthetic construct; identical to SEQ ID NO: 11763
  source 1..120: mol_type = other DNA

SEQ ID NO: 93227 - DNA, 120 bp, synthetic construct; identical to SEQ ID NO: 11764
  source 1..120: mol_type = other DNA

SEQ ID NO: 93228 - DNA, 120 bp, synthetic construct
  source 1..120: mol_type = other DNA
atagattggattaagaaaatgtggcacatatacaccatggaatactatatagccataaaaaatgatgagttcatgtcctttgtagggacatggatgaaattggaaatcatcattctcagt

SEQ ID NO: 93229 - DNA, 120 bp, synthetic construct; identical to SEQ ID NO: 11765
  source 1..120: mol_type = other DNA

SEQ ID NO: 93230 - DNA, 120 bp, synthetic construct
  source 1..120: mol_type = other DNA
agtatggccattttcacgatattgattcttcctacccatgagcatggaatgttcttccatttgtttgtatcctcttttatttcattgagcagtggtttgtagttctccctgaaaaggtcc

SEQ ID NO: 93231 - DNA, 120 bp, synthetic construct
  source 1..120: mol_type = other DNA
acattgtgcacatgtaccctaaaacttaaagtataataataataataataaaagaagttggctaagcccataatagacatttctcaaaagaagacatacaaatggccaagagatgtatga

SEQ ID NO: 93232 - DNA, 120 bp, synthetic construct
  source 1..120: mol_type = other DNA
acctaggttttcttctagggtttttatgcttttaggtctaatgtttaagtctttaatccatcttgaattcatttttgtataaggtgtaaggaagggatccagtttcagctttctacatat

SEQ ID NO: 93233 - DNA, 120 bp, synthetic construct
  source 1..120: mol_type = other DNA
tatgatattggctgtaaggacatgaacagacacttctcaaaagaagacatttatgcagccaaaaaacacatgaaaaaatgctcaccatcactggccatcagagaaatgcaaatcaaaacc

SEQ ID NO: 93234 - DNA, 120 bp, synthetic construct; identical to SEQ ID NO: 11766
  source 1..120: mol_type = other DNA

SEQ ID NO: 93235 - DNA, 120 bp, synthetic construct
  source 1..120: mol_type = other DNA
tccagactggctgcactcattcacattcccaccaacagtgtataagtgtttccttttctctgcagcctcacgaacatctggtgtattttgactcttttgaacatccattgtattttgact

SEQ ID NO: 93236 - DNA, 120 bp, synthetic construct
  source 1..120: mol_type = other DNA
atttgggttggttccaagtctttgctattgtgaatagtgccgcaataaacatacgtgtgcgtgtgtctttatagcagcatgatttatagtcctttgggtatatactcagtaatgggatgg

SEQ ID NO: 93237 - DNA, 120 bp, synthetic construct
  source 1..120: mol_type = other DNA
tagggaatcctttccccattgcttgtttttctcaggtttgtcaaagatcagatagttgtagatatgtggcgttctttctgagggctctgttctgttccattgatctatatctctgttttg

SEQ ID NO: 93238 - DNA, 120 bp, synthetic construct
  source 1..120: mol_type = other DNA
aggccttttttgcatttattgagataatcgtgtggtttttgtctttggttctgtttgtatgctggattacatttattgatttgcatatattgaaccagccttgcatcccagggatgaagc

SEQ ID NO: 93239 - DNA, 120 bp, synthetic construct
  source 1..120: mol_type = other DNA
gtctttcctgctttctcttgtgggcatttagtgctataaatttccctctccacactgctttgaatgtgtcccagagattctggtatgttgtgtctttgttctcgttggtttcaaagaaca

SEQ ID NO: 93240 - DNA, 120 bp, synthetic construct
  source 1..120: mol_type = other DNA
tgccagtctgtgtcttttaactggagcatttagtccatttacatttaaagctaatattgtcgtatgtgaatttgatcctgtcattatgatgttagctggttattttgcttgttagttgat

SEQ ID NO: 93241 - DNA, 120 bp, synthetic construct; identical to SEQ ID NO: 11753
  source 1..120: mol_type = other DNA

SEQ ID NO: 93242 - DNA, 120 bp, synthetic construct
  source 1..120: mol_type = other DNA
ctacctgacttcaaactatatgctacaaggctacagtaaccaaaacagcatggtactggtaccaaaacagagatatagaccaatggaacagaacagagccctcagaaataatgccgcata

SEQ ID NO: 93243 - DNA, 120 bp, synthetic construct
  source 1..120: mol_type = other DNA
gataccgtctcacaccagttagaatggcgattattaaaaagtcaagaaacaacaggtgctgcagaggatgtggagaaataggaacacttttacactgttggtggggctgtaaactagttc

SEQ ID NO: 93244 - DNA, 120 bp, synthetic construct
  source 1..120: mol_type = other DNA
tgtgaaattggattttttttttcttttttttttttaagatggagtctggctctctgtcacccaggctggagtgcagtggcgccaccttggcttattacaacttcctcctcccaggttcaa

SEQ ID NO: 93245 - DNA, 120 bp, synthetic construct; identical to SEQ ID NO: 3238
  source 1..120: mol_type = other DNA

SEQ ID NO: 93246 - DNA, 120 bp, synthetic construct; identical to SEQ ID NO: 11755
  source 1..120: mol_type = other DNA

SEQ ID NO: 93247 - DNA, 120 bp, synthetic construct
  source 1..120: mol_type = other DNA
tctcccatgtctacttctttctacacagacacagcaacaatctgatttctcttttgcccacctttcccccttttctatttcacaaaaaccgccatcgtcatcatggcccgttctcagtga

SEQ ID NO: 93248 - DNA, 120 bp, synthetic construct; identical to SEQ ID NO: 3240
  source 1..120: mol_type = other DNA

SEQ ID NO: 93249 - DNA, 120 bp, synthetic construct; identical to SEQ ID NO: 11757
  source 1..120: mol_type = other DNA

SEQ ID NO: 93250 - DNA, 120 bp, synthetic construct; identical to SEQ ID NO: 11758
  source 1..120: mol_type = other DNA

SEQ ID NO: 93251 - DNA, 120 bp, synthetic construct
  source 1..120: mol_type = other DNA
ggtcaaggatgccacagctatctgaatatatataacccatatcactacatggcaggcagatacgcagaggttagattctgaaccctatgaaagtgggctatatggaaaattaaactgctg

SEQ ID NO: 93252 - DNA, 120 bp, synthetic construct; identical to SEQ ID NO: 12902
  source 1..120: mol_type = other DNA

SEQ ID NO: 93253 - DNA, 120 bp, synthetic construct; identical to SEQ ID NO: 12903
  source 1..120: mol_type = other DNA

SEQ ID NO: 93254 - DNA, 120 bp, synthetic construct; identical to SEQ ID NO: 12898
  source 1..120: mol_type = other DNA

SEQ ID NO: 93255 - DNA, 120 bp, synthetic construct
  source 1..120: mol_type = other DNA
gcaggttagttacatatgtatacatgtgccatgctggtgcgctgcacccactaacttgtcatctagcattaggtatatctcccaatgctattcctccccccaccaccccacaacagtccc

SEQ ID NO: 93256 - DNA, 120 bp, synthetic construct
  source 1..120: mol_type = other DNA
tgagtagtttttttttttttttttttttttttttgagatggagtcttgctctgtctcccaggctggagtgcagtggcacgatgatctcggctcactgcaagccccgcctcccgggttcac

SEQ ID NO: 93257 - DNA, 120 bp, synthetic construct; identical to SEQ ID NO: 12899
  source 1..120: mol_type = other DNA

SEQ ID NO: 93258 - DNA, 120 bp, synthetic construct; identical to SEQ ID NO: 12900
  source 1..120: mol_type = other DNA

SEQ ID NO: 93259 - DNA, 120 bp, synthetic construct
  source 1..120: mol_type = other DNA
ctccatttgtttgtatcctcttttatttcattgagtagtggtttgtagttctccttgaagaggtccttcacgtcccttgtaagctggattcctaggtattttattctctttgaagcaatt

SEQ ID NO: 93260 - DNA, 120 bp, synthetic construct
  source 1..120: mol_type = other DNA
tctctggtagaattcagctgtgaatccatctggtcctggactctttggttggtaagctattgattattgccacaatttcagagcctgttattggtctattcagagattcaacttcttcct

SEQ ID NO: 93261 - DNA, 120 bp, synthetic construct
  source 1..120: mol_type = other DNA
ttaaagtctgttttatcagagactaggattgcaacccctgcctttttttgttttccatttgcttggtagatcttcctccatccttttattttgagcctatgtgtgtctctgcacgtgaga

SEQ ID NO: 93262 - DNA, 120 bp, synthetic construct
  source 1..120: mol_type = other DNA
aagttctcctggataatatcctgcagagtgttttccaacttggttccattctctccattactttcaggtacaccaatcagacatagatttggtcttttcacatagtcccatatttcttgg

SEQ ID NO: 93263 - DNA, 120 bp, synthetic construct
  source 1..120: mol_type = other DNA
cagtctgtccgttctcagatctccagctgcgtgctgggagcgccactgctctcttcaaagctgtcagaaggggacatttaagtctgcagaggttactgctgtctttttgtttgtctgtgc

SEQ ID NO: 93264 - DNA, 120 bp, synthetic construct; identical to SEQ ID NO: 12901
  source 1..120: mol_type = other DNA

SEQ ID NO: 93265 - DNA, 120 bp, synthetic construct
  source 1..120: mol_type = other DNA
acacataacaatattaactttaaatgttaatgggctaaatgccccaattaaaagacacagactagcaaattggatagagtcaagacccatcagtgtgctgtattcaggaaacccatctca

SEQ ID NO: 93266 - DNA, 120 bp, synthetic construct
  source 1..120: mol_type = other DNA
ttgaaaagatcaacaaaattgatagactgctagcaagactaataaagaagaaaagagagaagaatcaaagagacgcaataaaaaatgataaaggggatatcaccactgatcccacagaaa

SEQ ID NO: 93267 - DNA, 120 bp, synthetic construct
  source 1..120: mol_type = other DNA
tggccagaaactccaacactatgttgaataggagtggtgagagagggcatccctgtcttgtgccagttttcaaagggaatgcttccagtttttgcccattcagtatgatattggctgtgg

SEQ ID NO: 93268 - DNA, 120 bp, synthetic construct
  source 1..120: mol_type = other DNA
atcccttccttataccttatacaaaaattaactcaagatggattaaagacttacatgttagacctaaaaccataaaaaccctagaagaaaacctaggcaataccattcaggacataggca

SEQ ID NO: 93269 - DNA, 120 bp, synthetic construct
  source 1..120: mol_type = other DNA
tggatgaaactggaaaccatcattctcagcgaactatcgcaaggacaaaaaaccaaacaccacatgttctcactcatatgtgggaattgaacaatgagaacacatggacacaggaagggg

SEQ ID NO: 93270 - DNA, 120 bp, synthetic construct
  source 1..120: mol_type = other DNA
tctgctgccttcaggagactcatctaagacataaggactcacataaacttcaagtaaaggcatggaaaaaggcatttcatgcaaatggacacaaaaagccagcaagggtagctattcttc

SEQ ID NO: 93271 - DNA, 120 bp, synthetic construct
  source 1..120: mol_type = other DNA
tctcaaaatttggcacacagtagctcttagtaaattaagaaaaaggacaagagcccttattacctgatgatggtacacccaccaagcactagtgataactcgtgcatcccaagcagcact

SEQ ID NO: 93272 - DNA, 120 bp, synthetic construct
  source 1..120: mol_type = other DNA
cactgcatgacttcgctgaagttccttaccctctccgtttcagattctgaaagtattgtatcaagagctaataatcggctgggcgcggtggctcatgcctataatcccggcactttggaa

SEQ ID NO: 93273 - DNA, 120 bp, synthetic construct; identical to SEQ ID NO: 92947
  source 1..120: mol_type = other DNA

SEQ ID NO: 93274 - DNA, 120 bp, synthetic construct
  source 1..120: mol_type = other DNA
agttacccctaccaattcttttttttttttttttttttttttttttctttaagagagtctttgccaggagcggtggctcaggcctgtaatcccaacactttgggaggccgaggtaggtgg

SEQ ID NO: 93275 - DNA, 120 bp, synthetic construct; identical to SEQ ID NO: 15464
  source 1..120: mol_type = other DNA

SEQ ID NO: 93276 - DNA, 120 bp, synthetic construct
  source 1..120: mol_type = other DNA
ttctaatttcatccgtgtccctacaaaagacatgaactcatcattttttatggctgcatagtattccatggtgtatatgtgccacattttcttaatccagtctatcattgttggacattt

SEQ ID NO: 93277 - DNA, 120 bp, synthetic construct
  source 1..120: mol_type = other DNA
gtttttctcaggtttgtcaaagatcagatagttgtagatatgcagtgttatttctgagggctctgttctgttccattgatctatatctctgttttggtaccagtaccatgctgttttggt

SEQ ID NO: 93278 - DNA, 120 bp, synthetic construct
  source 1..120: mol_type = other DNA
atgatagtggctgtgggtttgtcatagatagcttttattattttagatacgtcccatcaatacctaatttattgagagtttttagcatgaacggctgttgaattttgtcaaaggcctttt

SEQ ID NO: 93279 - DNA, 120 bp, synthetic construct
  source 1..120: mol_type = other DNA
tttgtatctctatctccttcagttctgctctgattttagttatttcttgccttctgctagcttttgaatgtgtttgctcttgcttctctagttcttttaattgtgatgttagggtgtcaa

SEQ ID NO: 93280 - DNA, 120 bp, synthetic construct
  source 1..120: mol_type = other DNA
agtctgtgtcttgtaattggagcatttagtccatttacatttaaagttaatattgttatgtgtgaatttgatcctgtcagtatgaggttagctggttattttgctcgttagttgatgcag

SEQ ID NO: 93281 - DNA, 120 bp, synthetic construct
  source 1..120: mol_type = other DNA
tttcaacttctttgcctttggtttgaatttcctcctgtagcttggagtagtttgatcgtctgaagccttcttctctcaactcatcaaagtcattctctatccagctttgttccattgctg

SEQ ID NO: 93282 - DNA, 120 bp, synthetic construct; identical to SEQ ID NO: 10032
  source 1..120: mol_type = other DNA

SEQ ID NO: 93283 - DNA, 120 bp, synthetic construct
  source 1..120: mol_type = other DNA
tatatatttttttttttttttttttttttttttaatgtggagttttgctcttgttgcccaggctggagtgcaatggctcaatctcggttcactgctcactgcagcctctgcctcccaggt

SEQ ID NO: 93284 - DNA, 120 bp, synthetic construct; identical to SEQ ID NO: 11124
  source 1..120: mol_type = other DNA

SEQ ID NO: 93285 - DNA, 120 bp, synthetic construct
  source 1..120: mol_type = other DNA
gctcactgcaacctccgcctcctggggttcaagcaattctcctacctcagcctcccaagtagctgggactacagcatgcgccaccaagcccagctaattttttttgtatttttagtagag

SEQ ID NO: 93286 - DNA, 120 bp, synthetic construct
  source 1..120: mol_type = other DNA
taccatgtctctgctctaaaccttcaataaggtctcattgcattcagagtaaaatggttaaagaaaaatcaaacaataggatctccccaccccccaccccagctctgatctcatttctac

SEQ ID NO: 93287 - DNA, 120 bp, synthetic construct
  source 1..120: mol_type = other DNA
catgacaatggccatactgcccaaggtaatttacagattcaatgccatccccatcaagctaccaatgactttcttcacagaattggaaaaaactactttaaagttcatatggaaccaaaa

SEQ ID NO: 93288 - DNA, 120 bp, synthetic construct
  source 1..120: mol_type = other DNA
tggaagtcggtgtggtgattcctcagggatctagaactagaaacaccattgacccagccatcccattactgggtatatacccaaaggattataaatcatgctgctataaagacacatgca

SEQ ID NO: 93289 - DNA, 120 bp, synthetic construct
  source 1..120: mol_type = other DNA
acccagtaatgggatggctgggtcaaatggtatttctagttctagatccctgaggaatcgccacactgacttccacaagggttgaactagtttacagtcccagcaacagtgtaaaagtgt

SEQ ID NO: 93290 - DNA, 120 bp, synthetic construct
  source 1..120: mol_type = other DNA
atttgaaattttggggggagaatagagggactagggataccatgacaagtacaaaagtttctttattttttattttttgagatggagtctcgctctgtcgcccaggctggagtgcagtgg

SEQ ID NO: 93291 - DNA, 120 bp, synthetic construct; identical to SEQ ID NO: 6655
  source 1..120: mol_type = other DNA

SEQ ID NO: 93292 - DNA, 120 bp, synthetic construct; identical to SEQ ID NO: 34232
  source 1..120: mol_type = other DNA

SEQ ID NO: 93293 - DNA, 120 bp, synthetic construct; identical to SEQ ID NO: 34233
  source 1..120: mol_type = other DNA

SEQ ID NO: 93294 - DNA, 120 bp, synthetic construct; identical to SEQ ID NO: 34234
  source 1..120: mol_type = other DNA

SEQ ID NO: 93295 - DNA, 120 bp, synthetic construct
  source 1..120: mol_type = other DNA
tgtgagatggtatctcattgtggttttgatttacatttctctgatggccagtgatgatgagcattttttcatgtgttttttggctgcataaatgtcttcttttgagaagtgtctgttcat

SEQ ID NO: 93296 - DNA, 120 bp, synthetic construct
  source 1..120: mol_type = other DNA
tgagcatggaatgttcttccatttgtttgtatcctcttttatttcattgagcagtagtttgtagttctccttgaagaggtccttcacatcccttgtaagttggattcctaggtattttat

SEQ ID NO: 93297 - DNA, 120 bp, synthetic construct
  source 1..120: mol_type = other DNA
ccagctaatccttgtacctctggtagaattcggctgtgaatccatctggtcctggactctttttggttggtaagctattgattattgccacaatttcagatcctgttattggtctattca

SEQ ID NO: 93298 - DNA, 120 bp, synthetic construct
  source 1..120: mol_type = other DNA
ttaggtctgcttggtgcacagctgagttcaattcctgggtatccttgttgactttctgtctcgttgatctgtctaatgttgacagtggggtgttaaagtctcccattattaatgtgtggg

SEQ ID NO: 93299 - DNA, 120 bp, synthetic construct
  source 1..120: mol_type = other DNA
tgaacgttggcctgccttgctagattggggaagttctcctggagaatatcctgcagagtgttttccaacttggttccattctccccgtcactttcaggtacaccaatcagacgtagattt

SEQ ID NO: 93300 - DNA, 120 bp, synthetic construct
  source 1..120: mol_type = other DNA
ccttgcagtttgatctcggactgctgtgctagcaatcagcgagactctgtgggcataggaccctccaagccaggtgcgggatataatctcgtggtgcgcctttttttaagcccgtcggaa

SEQ ID NO: 93301 - DNA, 120 bp, synthetic construct; identical to SEQ ID NO: 34235
  source 1..120: mol_type = other DNA

SEQ ID NO: 93302 - DNA, 120 bp, synthetic construct
  source 1..120: mol_type = other DNA
catctgcaaacaaggatactttgacttcttcctttccaatttgaatgcctttaatacctttctctagctaggacttccactagtatgttaaataatagtggagacagtcagcatccttgt

SEQ ID NO: 93303 - DNA, 120 bp, synthetic construct; identical to SEQ ID NO: 34236
  source 1..120: mol_type = other DNA

SEQ ID NO: 93304 - DNA, 120 bp, synthetic construct
  source 1..120: mol_type = other DNA
tctagttctagatccctgaggaaacaccacactgacttccacaatggttgaactagtttacagtcccaccaacagtgtaaaagtgttcctatttctccacatcctctccagcacctgttg

SEQ ID NO: 93305 - DNA, 120 bp, synthetic construct
  source 1..120: mol_type = other DNA
ggcattgaatctgtaaattaccttgggcagtatggccattttcacgatattgattcttcctacccatgagcatggaatgttcttccatttgtttgtgtcctcttttatttccttgagcag

SEQ ID NO: 93306 - DNA, 120 bp, synthetic construct
  source 1..120: mol_type = other DNA
tctggtcctggactctttttggttggtaagctattgattattgctacaatttccgagcgtgttattggtctattcagagattcaacttcttcctggtttagtcttgggagagtgtatgtg

SEQ ID NO: 93307 - DNA, 120 bp, synthetic construct
  source 1..120: mol_type = other DNA
ctgtggatttggggtggagagttctgtagatgtctattaggttcgcttggtgcagagctgagttcaattcctgggtatccttgttgactttctgtctcgttgatctgtctaatgttgaca

SEQ ID NO: 93308 - DNA, 120 bp, synthetic construct
  source 1..120: mol_type = other DNA
gggcttccctttgagagtaaccgacctttctctctggctgcccttagcattttttccttaatttcaactttggtgaatctgacaattatgtgtcttggagttgctcttctcgaggagtat

SEQ ID NO: 93309 - DNA, 120 bp, synthetic construct
  source 1..120: mol_type = other DNA
ctgagattgcaccactgcactccagcctgggtgacagagcaagactctgtctaattaaaaaaaaaaaaatttagaaaagagagaagaatcaaatagatgcaataaaaaatgataaagggg

SEQ ID NO: 93310 - DNA, 120 bp, synthetic construct
  source 1..120: mol_type = other DNA
gcacaagacagggatgccctctctcaccactcctattcaacatagtgttggaagttctggccagggcaattaggcaggagaaggaaataaagggtattcaattaggaaaagagaaagtca

SEQ ID NO: 93311 - DNA, 120 bp, synthetic construct
  source 1..120: mol_type = other DNA
ctggctagccatatgtagaaagctgaaactggatcccttccttataccttgtagaaaaattaattcaagatggattaaatacttaaatgttagacctaaaagcataaaaaccctagaaga

SEQ ID NO: 93312 - DNA, 120 bp, synthetic construct
  source 1..120: mol_type = other DNA
ggaattgaacaatgagaacacatggacacagaaaggggaacatcacactccggggacggttgcgggatgcggggagaggggagggatagcatttggagatatacctaatgctaaatgacg

SEQ ID NO: 93313 - DNA, 120 bp, synthetic construct; identical to SEQ ID NO: 17858
  source 1..120: mol_type = other DNA

SEQ ID NO: 93314 - DNA, 120 bp, synthetic construct
  source 1..120: mol_type = other DNA
gaaaagaatgggaccctgcaacttggaaagggcatgtgtgggaggaccctgatgaagctggggactctgagtttgtaaactctgatgaaccttttttgccagaagaaacagcttccccat

SEQ ID NO: 93315 - DNA, 120 bp, synthetic construct
  source 1..120: mol_type = other DNA
gttttcctgtttttagtgagtgcgtatgtatgtttaatttctgtgctttgatctcattcataactgtgtgtgtgtgtgtgtgtgtgtgtgtgtgtgtgtgacacagggtgtggctttgtc

SEQ ID NO: 93316 - DNA, 120 bp, synthetic construct; identical to SEQ ID NO: 17859
  source 1..120: mol_type = other DNA

SEQ ID NO: 93317 - DNA, 120 bp, synthetic construct
  source 1..120: mol_type = other DNA
aacacaagtgaagataattaaaaactaggaaatacacttggagcaaatatgagaaatgattaatatccttaatcggccagacgcggtggctcacgcctgtaatcccagcactttgggagg

SEQ ID NO: 93318 - DNA, 120 bp, synthetic construct
  source 1..120: mol_type = other DNA
ccacctgctcaggaggatcgctaagcccaggagtttgagaccagcctggacaacatagtgaggcccccatctcaaaaagaatatttatattttaagaaattcactaataaaagccaattg

SEQ ID NO: 93319 - DNA, 120 bp, synthetic construct; identical to SEQ ID NO: 4171
  source 1..120: mol_type = other DNA

SEQ ID NO: 93320 - DNA, 120 bp, synthetic construct; identical to SEQ ID NO: 17861
  source 1..120: mol_type = other DNA

SEQ ID NO: 93321 - DNA, 120 bp, synthetic construct; identical to SEQ ID NO: 17862
  source 1..120: mol_type = other DNA

SEQ ID NO: 93322 - DNA, 120 bp, synthetic construct; identical to SEQ ID NO: 17863
  source 1..120: mol_type = other DNA

SEQ ID NO: 93323 - DNA, 120 bp, synthetic construct; identical to SEQ ID NO: 17864
  source 1..120: mol_type = other DNA

SEQ ID NO: 93324 - DNA, 120 bp, synthetic construct; identical to SEQ ID NO: 17865
  source 1..120: mol_type = other DNA

SEQ ID NO: 93325 - DNA, 120 bp, synthetic construct
  source 1..120: mol_type = other DNA
ggggccatcgcttcccgcatgagcttcagctctctcaagaggaagcaacccaagacgttcaccgtgaggatcgtcaccatggacgccgagatggagttcaattgcgaggtaaccggccgg

SEQ ID NO: 93326 - DNA, 120 bp, synthetic construct
  source 1..120: mol_type = other DNA
tggctaattttttttttttttttttttttgagacggagtctcgctctgtcacccagagtgcaccgggctagagtgcaatggcgcgatcttgtctcactgccacctccacttccaggttca

SEQ ID NO: 93327 - DNA, 120 bp, synthetic construct
  source 1..120: mol_type = other DNA
cccgggttcaagcgattctcccacatcagcctcccaagtagctgggattgcaggcttgcgccaccatgtctggctaattttgtatttttagtagaggcagggtttctccatgttggtcag

SEQ ID NO: 93328 - DNA, 120 bp, synthetic construct
  source 1..120: mol_type = other DNA
ctgtcctgtcacaaaacaaaacattgaccacagacctctgaggtggtggatgtccctcctgtcctggttgtatcattatacattgtatattaatgtatcgaaatactacaggtaccccca

SEQ ID NO: 93329 - DNA, 120 bp, synthetic construct
  source 1..120: mol_type = other DNA
ccagcctgaccaacatggtaaaaccccgtctctgctaaaaatacaaaaattagccaggcgtggtggccggcacctgtagtcccagctacgcgggaggctgaggcaggagaattccttgaa

SEQ ID NO: 93330 - DNA, 120 bp, synthetic construct
  source 1..120: mol_type = other DNA
tatctccaccggaatgtaatggatgaacatgcatgtgatggtgtccaagccagaacagtgggtaaagccaatggctataagaggagccaatcagtacatctttcatctcgaggaaactga

SEQ ID NO: 93331 - DNA, 120 bp, synthetic construct
  source 1..120: mol_type = other DNA
atataagtttgggtaggatagtatacccttaaaaaataaataaataattagagagagagagagagagagagacctgggcacagtggctgttgcctgtaatctcagcactttgggaggtca

SEQ ID NO: 93332 - DNA, 120 bp, synthetic construct
  source 1..120: mol_type = other DNA
cctcaacaaaaatactagcaaactgaatccagtaacatataaaaataattatataccataaacaagcaggatttattccaggagtgcaaggttggtttaacatccaaaaatgaattagtg

SEQ ID NO: 93333 - DNA, 120 bp, synthetic construct
  source 1..120: mol_type = other DNA
tctaaaagctgtaaaacatttttggttttgttttttaaattaattttttttgaaacggagtctcactctgtcgtccaggctggaatgcggtggcgcgatctcggctcactgcaacctctg

SEQ ID NO: 93334 - DNA, 120 bp, synthetic construct
  source 1..120: mol_type = other DNA
aatcgcttgaacctgggaggcggagcttgcggtgagctgagatcacgcgccactgcactccagcttgggcaacaagagcgaaactccatctcaaaaaaaaaaaagaaattgacaagtcaa

SEQ ID NO: 93335 - DNA, 120 bp, synthetic construct
  source 1..120: mol_type = other DNA
ccgcacccggccggaatagtcctttcaacaaatggagctgagacaactggatagccacatgcaaaaaaaagaagaaattaaacccttacctcacactacatacaaaaattaactcatggc

SEQ ID NO: 93336 - DNA, 120 bp, synthetic construct
  source 1..120: mol_type = other DNA
actaccttggccaacatagcaaaaccccatctctactaaaaatacaaaaattagccagccgtggtggcatgctcttgtagtgccatctactctggaggctgagacatgagaatcacttga

SEQ ID NO: 93337 - DNA, 120 bp, synthetic construct
  source 1..120: mol_type = other DNA
aatgtggtctatccttactatggaattacttggcaataaaatagaatgaagtaccagcacgtgcttcaacatggatggaccttgaaaacactatgctatgtgaaagaaaccagccgcaaa

SEQ ID NO: 93338 - DNA, 120 bp, synthetic construct
  source 1..120: mol_type = other DNA
atagatgttagatgttgtgagagggtaagagagactagcctataaggaaagggattttagttttttgggggtttttttttttgagacggagtctcgctctgtcgcccaggttggaaagca

SEQ ID NO: 93339 - DNA, 120 bp, synthetic construct
  source 1..120: mol_type = other DNA
ttggaaaaatgtaggttctgattcagtagttctgggatggaagtgagaattttgtattaataacaaactctcaggtgatgatacctgtgccaccggcccaaggaccacactttgaatagc

SEQ ID NO: 93340 - DNA, 120 bp, synthetic construct
  source 1..120: mol_type = other DNA
acattgcagatcattccagcatacaagtggacgtaagttgtccataacagaaggaactttctaaaggggaagacagatagaacaattctggcattttcagtaaaatcttaaatcctaggc

SEQ ID NO: 93341 - DNA, 120 bp, synthetic construct
  source 1..120: mol_type = other DNA
ttctgcctttgtgtgggacaaagggctagggactagcagttactttgtgctaggtaccatgctaaatgctttaaatgcacactacctcatttgatataacagggactcatttattcattc

SEQ ID NO: 93342 - DNA, 120 bp, synthetic construct
  source 1..120: mol_type = other DNA
aaggactactttggacctaggttctgtaactgacttcatctttaagtggggaaacagaggctcagacaggatacatagcatgcttaaaggcttagtgcagccactatctattctgaaaga

SEQ ID NO: 93343 - DNA, 120 bp, synthetic construct
  source 1..120: mol_type = other DNA
ttcaggccagccctctttccactaccctatgctacccaaataggaagcgtaaaagagaagtaggagagaaaaagttagaaacctggagagaacttaggtatttggtaaacaggaaaaaga

SEQ ID NO: 93344 - DNA, 120 bp, synthetic construct
  source 1..120: mol_type = other DNA
tttttttttttttttttttttcgagatggggtctcactcagactggagtgcagtggtgctatcacagctcactacagacttgacctgctgggctcaagtgattctcctgcctaagcctcc

SEQ ID NO: 93345 - DNA, 120 bp, synthetic construct
  source 1..120: mol_type = other DNA
cagctttagcgtcttattttaggtgatctgggcagaagagtctcactgtgctcctctccctttcatatttcctgctttggtaggaagtcatctcaagacttgagtgtataggcatgagga

SEQ ID NO: 93346 - DNA, 120 bp, synthetic construct
  source 1..120: mol_type = other DNA
ctctcctctttctgtctctctcttctttctctctctctctctctctctttctttctttctttctttctttttctttctttctcttttcttgctctattgccaggctggagtgcagtggtg

SEQ ID NO: 93347 - DNA, 120 bp, synthetic construct
  source 1..120: mol_type = other DNA
tgtatctcgactgatctgtggttttaaattcaccaacagtgcatctccctacttgcttaatcatattgattttgagattaaatcagtctcataaatatgttagtcttcagcccacggtag

SEQ ID NO: 93348 - DNA, 120 bp, synthetic construct
  source 1..120: mol_type = other DNA
cagagagttcatcattatacagtcaactcatgattattaggagtaaggaacgtaatagcagaccctgaatgagggaaaagaatgtgaaaccacacataaactaaaggtgaagtcatttac

SEQ ID NO: 93349 - DNA, 120 bp, synthetic construct
  source 1..120: mol_type = other DNA
agcctcatctagttatcatgattatcatcaacatcgtcaaccaaccacaagcatcaagcatttatggagtatccacagattatgcagcacttgccagggttctgggagacttaatctgtg

SEQ ID NO: 93350 - DNA, 120 bp, synthetic construct
  source 1..120: mol_type = other DNA
ctccccactcccctctttttgctgtgatctattttttttcccacacttttcacaggtgttgtcctgtgatctatttctatttggtggatctcttttcccctcatgttgagaataatggct

SEQ ID NO: 93351 - DNA, 120 bp, synthetic construct
  source 1..120: mol_type = other DNA
ggtactaggatttgattgctgatgactgtatgtcccaaagaaaacagtgggagaaatgcagctgtcaaagcaaaaaacaaatagcagttttaaggttgagtctcaacctggccagttgca

SEQ ID NO: 93352 - DNA, 120 bp, synthetic construct
  source 1..120: mol_type = other DNA
cctgaaagcgttacgtgccatcagttatccaaaaagaacattttttaaccagaaaataaacatgagactcatcccactagtcctaggttcttggagccccacaggtattgttgcaggatg

SEQ ID NO: 93353 - DNA, 120 bp, synthetic construct
  source 1..120: mol_type = other DNA
caaggtcacacagtgacagtgcagagattcataccaatggagacaaccatcacttatctatattccttttagactagttcctggaaagattaagccctcatgtcctgaggcatccatctt

SEQ ID NO: 93354 - DNA, 120 bp, synthetic construct
  source 1..120: mol_type = other DNA
aaagaagtagaaacccaaattaggaagactgagcaaacctcatgcatttggggaagggcttgttggaaagtggaacctgatgtaggtagcaacatgttgaggttagatttaaccaaacag

SEQ ID NO: 93355 - DNA, 120 bp, synthetic construct
  source 1..120: mol_type = other DNA
atcaccgtgaaaaaggccagtgtatgctttggcagctggcaaagaatcctgtgactcagtttccttatttgcacaaaaagggtatgagtctacattaggtaattactcatgctcatttcc

SEQ ID NO: 93356 - DNA, 120 bp, synthetic construct
  source 1..120: mol_type = other DNA
cattttcttttattcttctcaaaataatccctaaagacctcaatctttatagtgttccagtggccccactatagtcagagaggagacagggcagaagttgaaggacagataggagaaacg

SEQ ID NO: 93357 - DNA, 120 bp, synthetic construct
  source 1..120: mol_type = other DNA
cactaggtggcaacatttactaagttgccagccattctcttcccttaagacattgaacttgcttttccacatagcagatggaatagctgagaaaagagattgccattgcttcaggttctt

SEQ ID NO: 93358 - DNA, 120 bp, synthetic construct
  source 1..120: mol_type = other DNA
tgtagctgtatagtagagaagggggcacattcctgaattaagtcatgcagaaagcaggacgtagagatgctaccagtttccttctcctcacaggctctcctgggcaagcagaagttacca

SEQ ID NO: 93359 - DNA, 120 bp, synthetic construct
  source 1..120: mol_type = other DNA
tcatgattcttagcaaagtgaattttaatgatagctgagtgtaggccaaatggatattagactgggggcatcaggagccgtggaacttgctgctcaagggaaatacatcatgacacatgt

SEQ ID NO: 93360 - DNA, 120 bp, synthetic construct
  source 1..120: mol_type = other DNA
cctaccataaaggacagtgtccaagactgctgagtgatacatttctagtttttaactattctgtggccctgagaacatttatgccttaatcctagctctgctcacttcttggggctattg

SEQ ID NO: 93361 - DNA, 120 bp, synthetic construct
  source 1..120: mol_type = other DNA
tgagccaagatcgcgccactgcactccagcttgggcaacagagtgaggttccgtctcaaaaaaaaaaaaaaaaaaaaaaaaaaggacttcagccgggcgggttggctcacccctgtaatc

SEQ ID NO: 93362 - DNA, 120 bp, synthetic construct
  source 1..120: mol_type = other DNA
gtgtgtgtgtgtgtgtgcacgcgcaaaagaggtgacaaatttatttctgatgtttgcagatcaaagggacactcttaggctgggcgtggtggctcatgcctgtaatcccagcaatttggg

SEQ ID NO: 93363 - DNA, 120 bp, synthetic construct
  source 1..120: mol_type = other DNA
agcacgttgagagtgatggttttttctgcaatcataactcagtggccttggtgacttttgtcttgtgttaatacttaaaagtagatccatttcctctggggccatgcatattcaaagggg

SEQ ID NO: 93364 - DNA, 120 bp, synthetic construct; identical to SEQ ID NO: 23732
  source 1..120: mol_type = other DNA

SEQ ID NO: 93365 - DNA, 120 bp, synthetic construct
  source 1..120: mol_type = other DNA
aggatcccaaggcagaagaatttttcttagtacagaacaaaatgaaaagtctcccgtgtctacttctttctacacagacacggcaaccatccgatttctcaatcttttccccacctttcc

SEQ ID NO: 93366 - DNA, 120 bp, synthetic construct
  source 1..120: mol_type = other DNA
ctccagcctgggcaccattgagcactgagtgaacgagactccgtctgcaatcccggcacctcgggaggccgaggctggcggatcactcgcggttaggagctggagaccggcccggccaac

SEQ ID NO: 93367 - DNA, 120 bp, synthetic construct; identical to SEQ ID NO: 23733
  source 1..120: mol_type = other DNA

SEQ ID NO: 93368 - DNA, 120 bp, synthetic construct
  source 1..120: mol_type = other DNA
taaatacaatactaatcacatggttcagttaacaagaaccatatatgagttatacttgaatcaaaagtgtaggcagggactgggcacagtggctcacacctgtaatcctagcactttggg

SEQ ID NO: 93369 - DNA, 120 bp, synthetic construct
  source 1..120: mol_type = other DNA
ggggctgactgatttaaaaatatccaggagataaaaagttgattagatggtgctatactctgcatatccctttttttcatatccttttacagaatggtatttttcttcccactcagcatc

SEQ ID NO: 93370 - DNA, 120 bp, synthetic construct
  source 1..120: mol_type = other DNA
cagaggaatctctgcacacacatccttttcacttaaaactgtcacaacagatagacccacttcattttctttttctttttgagacagcagtctctctctgtcacccaggtggcacaatct

SEQ ID NO: 93371 - DNA, 120 bp, synthetic construct
  source 1..120: mol_type = other DNA
gaggttgcagtgagctgagattgcacccctgcactctagcctggggtgacagagtgagactctgtctgaaaaataaaataaaaataaaaaaggagccactggtacaaaaaaaaaaaagaa

SEQ ID NO: 93372 - DNA, 120 bp, synthetic construct
  source 1..120: mol_type = other DNA
tgtttctttctttttctttctttctctttctctttctttctctctctctctccttcctccctccccttccttttctttcctttttcttttctttctcccttcccttcccttctctcccct

SEQ ID NO: 93373 - DNA, 120 bp, synthetic construct
  source 1..120: mol_type = other DNA
cagggtctttgccacctctgcattgctcaaatgtgatgtatttgatcagtggactagctgagaacttggtataataatgggggttgttaatcttgcatgcctttggaacctgaatttaca

SEQ ID NO: 93374 - DNA, 120 bp, synthetic construct
  source 1..120: mol_type = other DNA
gcctcccaaaagtgctgggattacaggtgtgagccaccacgcccagccaagcatagttttaaaaactttgctggtcttatttaattaaatccctgtaagagtcctgcaagataaatacta

SEQ ID NO: 93375 - DNA, 120 bp, synthetic construct
  source 1..120: mol_type = other DNA
ctttcactcctgtgtctgtagttttaggccgcttcatttggagaacacaccagaagtcttaacttgaggctctttgagaatgagagaacataacgaaataatgagatttggtggtatata

SEQ ID NO: 93376 - DNA, 120 bp, synthetic construct
  source 1..120: mol_type = other DNA
agctttgtattttcattcaaggataacaaactagcaaggttgaaatcttgacttgtcatcggaattgaattgctccctggagctgggagggaatgagattggtccagctctgttcagaaa

SEQ ID NO: 93377 - DNA, 120 bp, synthetic construct
  source 1..120: mol_type = other DNA
tctgagttatcatgcagctttctgagttgctcctccaatagaatggtgccttatttacacgccctctctctgtgtgactatctccctgggtgtagctttttaaaaatagctttactgttt

SEQ ID NO: 93378 - DNA, 120 bp, synthetic construct; identical to SEQ ID NO: 23734
  source 1..120: mol_type = other DNA

SEQ ID NO: 93379 - DNA, 120 bp, synthetic construct; identical to SEQ ID NO: 23735
  source 1..120: mol_type = other DNA

SEQ ID NO: 93380 - DNA, 120 bp, synthetic construct
  source 1..120: mol_type = other DNA
tagtagacagagactgagtgagggccagactgctaaaatggttacttcttcattccaaggcgatagactcttttatggttctgtggtaaagaaggaaagaggaaggaaagagaggtctta

SEQ ID NO: 93381 - DNA, 120 bp, synthetic construct
  source 1..120: mol_type = other DNA
gcttggtttctttaaggtcaaactaatgtaacacatttctgtggttttgtcaactcaactcctcttgccccatgttctggccacctagattctagaaaactaaagttttataatcctcag

SEQ ID NO: 93382 - DNA, 120 bp, synthetic construct
  source 1..120: mol_type = other DNA
tctcagtttgcagacctgtttttctgcccttgagtcttggttcagtttccattatcgtcaaggggtcaggagctgtagtatccttgtgcagcgagtttccttccactccaaatgagggct

SEQ ID NO: 93383 - DNA, 120 bp, synthetic construct
  source 1..120: mol_type = other DNA
ccccaattcagaaagctgaaatcttcttggtttataagacagctgtgacttctgttgggacctgctgaaacttgtcacatgtgacagtgtgtgccagattctttggaaggttgaataaaa

SEQ ID NO: 93384 - DNA, 120 bp, synthetic construct
  source 1..120: mol_type = other DNA
cttagataaatgctcttagaatttaaatatttccatatagggtggtgacttttaccaaaaaggtcccataatgtataatcttatgtttactcatccatccattcattcattcactcatcc

SEQ ID NO: 93385 - DNA, 120 bp, synthetic construct
  source 1..120: mol_type = other DNA
ccctggtttccagtatatggttgggatctactcagccatgcttgataagacagactgagccccttaattcaaaacattctgactttgaagtttttgttagtagttagcccaggagataag

SEQ ID NO: 93386 - DNA, 120 bp, synthetic construct
  source 1..120: mol_type = other DNA
ggtctaaccctaggttctcctaccaagccaccaccctgtctttatcattcatctttctctccattttgatttcagcatcaagaactgttttcccttctactatagtccattttttcccca

SEQ ID NO: 93387 - DNA, 120 bp, synthetic construct
  source 1..120: mol_type = other DNA
tgtggttgcgcatttgtggaatttccaattgctggtaacattccaggctgtcggactgaaactgtgttctgcttcattcttccagtttactattaaaccactggataagaaaattgatgt

SEQ ID NO: 93388 - DNA, 120 bp, synthetic construct
  source 1..120: mol_type = other DNA
ctcacctctgtagcactctgttatatatttttctgattcttctgttaatggataattaagtgctttttacttctatacttttttttttgaaatggggtctcactctgttgcccaggcaca

SEQ ID NO: 93389 - DNA, 120 bp, synthetic construct
  source 1..120: mol_type = other DNA
ggtatctcattatcaaatgaactttttttttttgagattttgagatagggtctcactctgttgcccaggctgaaatgtaatgacacgatcatgtctcactgcagcatggacctgcccagg

SEQ ID NO: 93390 - DNA, 120 bp, synthetic construct
  source 1..120: mol_type = other DNA
ttggtgtttcactctatgcattcatcttcacgtttactgctacctgcaagagctcaaactgctatggcactagtgggccagtaggcagtgaagtaaatttgtggatattaacctttttgt

SEQ ID NO: 93391 - DNA, 120 bp, synthetic construct
  source 1..120: mol_type = other DNA
aagtgtaataattagtctgtgtgcacctttctgatttggatacattggagaggctggtcccagccctaggatttagaatgaaatgcccagtgtgctttcagctctctatctctttgcttt

SEQ ID NO: 93392 - DNA, 120 bp, synthetic construct
  source 1..120: mol_type = other DNA
agtagctgggactacaagtgcatgctaccacacctagttaattttaattgtttcgtagagatcaggtcttgctatgttacccaggctgatctcaaactcctgggctcaaacattcctcct

SEQ ID NO: 93393 - DNA, 120 bp, synthetic construct
  source 1..120: mol_type = other DNA
ttgatgaaatcagagatgtgagaggggtccatgtggattagaaatggtgagatggcttgcctgcccagatgagaaagctgcttatttctggggctctatctgagggaggaggtcctgcat

SEQ ID NO: 93394 - DNA, 120 bp, synthetic construct
  source 1..120: mol_type = other DNA
ggaggctacttggggacttccttggcttttctggagcttggtctcctgaaaaccatgagttagcagcgtttgctttgaaatacttaatttcagctttgaaaaaatcagtgccttttcttt

SEQ ID NO: 93395 - DNA, 120 bp, synthetic construct
  source 1..120: mol_type = other DNA
aaaaactcctctggttctaaccactgatttaaagggaaagaacagagtttaagttgtttttctccacgtgaagcataagcctgagctgaggtgggtactcagagaaggtgctcttgttac

SEQ ID NO: 93396 - DNA, 120 bp, synthetic construct
  source 1..120: mol_type = other DNA
gatgatctctgtgactgggatgtcccactcatggccaggttgaaggatggaactgttgtctgtacttttgaaagactattctaggcctgcaaccttcagataaacactgacacattcccc

SEQ ID NO: 93397 - DNA, 120 bp, synthetic construct
  source 1..120: mol_type = other DNA
ggtgtcttttcctgctacctgccctcttctgtgaagctgacatctcatcctttccttgcagggccaaagaggcagatcagctgaagcaggacctgcaggaagcacgcgaggcggagcgaa

SEQ ID NO: 93398 - DNA, 120 bp, synthetic construct
  source 1..120: mol_type = other DNA
cagtcatctacatggcacagacacacacacgtacccatacatacattgatgcacatagcacatccacacacacagcacggacacacacgcacccatacttacattcatgcacatggcaca

SEQ ID NO: 93399 - DNA, 120 bp, synthetic construct
  source 1..120: mol_type = other DNA
aactgtggggtcaaattttcgattttgatactctccaaagaagtcataccagttcatgctctcactagtggtgcagcaactagtacgcgtttttgctgaaaatttttatgatgtgtaaca

SEQ ID NO: 93400 - DNA, 120 bp, synthetic construct
  source 1..120: mol_type = other DNA
tgccttggatcccagcaaaagcagcatctcttctagcctctgttcgctccctggctacagtgtttaccttttttaacagtgatgatctgtgaacacatctatttcctgaacaagactttc

SEQ ID NO: 93401 - DNA, 120 bp, synthetic construct
  source 1..120: mol_type = other DNA
gttagcatctctgagtcagttcaactgctgttatactactggactgtagtcacctcctagttgtgttctccagcaactgggatctgtggtggttcccatgtctagaacaaacaaaggtga

SEQ ID NO: 93402 - DNA, 120 bp, synthetic construct
  source 1..120: mol_type = other DNA
agtttgttttggctactgtaacaaaataccagaggctgggtagcttataaacaacagaaatttatttcttggccaggcacagtggctcatgcctgtaattccagcactttgggagtccaa

SEQ ID NO: 93403 - DNA, 120 bp, synthetic construct
  source 1..120: mol_type = other DNA
cttcttacccttgcacatattggcagagtctctatactaaccatggcaatccctatggagtgtttttggtatttgtattgcatggtttttctggccatgccttgtagttggacactttgt

SEQ ID NO: 93404 - DNA, 120 bp, synthetic construct
  source 1..120: mol_type = other DNA
atacatggaaaagagcaagcatctgcaggagcagctcaatgaactcaagacagaaatcgaggccttgaaactgaaagagagggagacagctctggatattctgcacaatgagaactccga

SEQ ID NO: 93405 - DNA, 120 bp, synthetic construct
  source 1..120: mol_type = other DNA
ctttacctcagtctttaaaataggcttccagttttatggactgtctctgtttttagtggttaagctgtatctgaaaactccaggggatctgtttctgcctgccttcgttgttgggtacag

SEQ ID NO: 93406 - DNA, 120 bp, synthetic construct
  source 1..120: mol_type = other DNA
tgtccagtcaggtgtgtctaaaagtcctttgtcttggtggcatactcctagcatggaaatggggtcaatctgggcactttggagactggtgtgtttaactcaagatcaagaccttttatg

SEQ ID NO: 93407 - DNA, 120 bp, synthetic construct
  source 1..120: mol_type = other DNA
tgaaccctgttttgtatgcgacactttcatttagcgggctcctgtttcttcagctttcatatccttgttggcattgataccctgatacagaacagtccgcgctctgagcagggcagttat

SEQ ID NO: 93408 - DNA, 120 bp, synthetic construct
  source 1..120: mol_type = other DNA
aatggaacagtttccaatgtccaaaagcttgctaatctgggatcaaaccagcctgtgttgatgttagttttgctttgttttgagacacggtctccctctgtcacccaggctggtacattc

SEQ ID NO: 93409 - DNA, 120 bp, synthetic construct
  source 1..120: mol_type = other DNA
tggataaaaatagtctttgcccccaggagtgttgtgaggaataaatgagagaatgtgtgtgcaacactcagtgcacagtcagagctcagtaaggggttaaaactctgaaaagggaaaatc

SEQ ID NO: 93410 - DNA, 120 bp, synthetic construct
  source 1..120: mol_type = other DNA
aaacaaagtcatcacttttgtgcctgtggtctcccaaggagcacaggatttccaaggaaattgacggatgagaaatcatgggggtggtggagcttagaaagcttatttcattagtaaatg

SEQ ID NO: 93411 - DNA, 120 bp, synthetic construct
  source 1..120: mol_type = other DNA
tgagttcctggtgtctcgtaactgttgagagcttagttttcttgcttgtttctggtagctctagatagaagactgtatcggcctcttctaaaagtcaacaagccaatcctgtttttggtt

SEQ ID NO: 93412 - DNA, 120 bp, synthetic construct
  source 1..120: mol_type = other DNA
ctcccactgtgcacatcaccatatggcatttgggtgcagctgtccctagccagactgcagaaaagcttgatctgggccggacgcggtggcttatgcctgtaatcccagcactttgggagg

SEQ ID NO: 93413 - DNA, 120 bp, synthetic construct
  source 1..120: mol_type = other DNA
ggaacaagatgatcacaatgcagccttgtgaatcaattttctgtctgtgctgatgaaagtgtaattcattcttaatcaagcagccttgctgctgcaggctccgtgccggaatacatttag

SEQ ID NO: 93414 - DNA, 120 bp, synthetic construct
  source 1..120: mol_type = other DNA
aattggattagtgacagacttgagcagccggttcagtcgagagagaacttaattcctcctgtgttattcacacggctgattctaatcagatgtgaagagacagctggaggagagcagcgg

SEQ ID NO: 93415 - DNA, 120 bp, synthetic construct
  source 1..120: mol_type = other DNA
ttttgccatttcttctgagcttttgccttttcctttatgaatacttcctgcctatgggtgtactgtaaatgtaacagccagtgagctttctagaagcagcagatggtgaaagatccacag

SEQ ID NO: 93416 - DNA, 120 bp, synthetic construct
  source 1..120: mol_type = other DNA
ataagcacatgctcgagtcactggaatctggtgctgctggcagtgccagaaccctcccctagcacctcgaggggacagccagcatgctcctcgggtggaggatccaggaattcttggagc

SEQ ID NO: 93417 - DNA, 120 bp, synthetic construct
  source 1..120: mol_type = other DNA
aaagagttgctctcaagctgtctcattctgagcacactaatgctgtctgtcttctgatggtgaagtggtgggtttggagtctccctcccctgccctttatggagccgccgatagtaccga

SEQ ID NO: 93418 - DNA, 120 bp, synthetic construct
  source 1..120: mol_type = other DNA
atcctcatttgtcacctcctaatttgaattattgggcaaatctggccgcttatttgggactgacagccaacttcttgagcatctatttgaacagccttccctttcgctcccagccacctt

SEQ ID NO: 93419 - DNA, 120 bp, synthetic construct
  source 1..120: mol_type = other DNA
gcaggagccactcatgtcttccccattgcccgacgcccatagacgctccttcctgtgtggggctggggtactccctggtcgtactgcagtcagcacccgtaacccggctatgaccaggga

SEQ ID NO: 93420 - DNA, 120 bp, synthetic construct
  source 1..120: mol_type = other DNA
ttgtcttaatcagataaaagatagaggctatgggggcctcaagatttttggagagcagaggtggtctctggcaattccatctggttttgagaaacttagcagctcacagagcacagagat

SEQ ID NO: 93421 - DNA, 120 bp, synthetic construct
  source 1..120: mol_type = other DNA
tcaagccccagtagcaggagaaagaaagaaagagatgcctggttttcacagactggttcctgtggctgggatgactgcatccttttttttttttttttgagacggagtttttgcctttgt

SEQ ID NO: 93422 - DNA, 120 bp, synthetic construct
  source 1..120: mol_type = other DNA
ttttcaaagatgtcaaacgtcacttcttcctgtagggcccgagtcctgcctcctatcagggccagatcatagaaggctattttctattctggggaacgattataacttaaatgattgttt

SEQ ID NO: 93423 - DNA, 120 bp, synthetic construct; identical to SEQ ID NO: 23847
  source 1..120: mol_type = other DNA

SEQ ID NO: 93424 - DNA, 120 bp, synthetic construct
  source 1..120: mol_type = other DNA
gatgtgaaggacctcttcaaggagaactacaagccactgctcaatgaaataaaagaggatacaaacaaatggaagaacattccatgctcatgggtaggaagaatcaatatcgtgaaaatg

SEQ ID NO: 93425 - DNA, 120 bp, synthetic construct
  source 1..120: mol_type = other DNA
gggatctagaactagaaataccatttgacccagccatcccattactgggtatatacccaaaggactataaatcatgctgctataaagatacatgcacacatatgtttattgcagcactat

SEQ ID NO: 93426 - DNA, 120 bp, synthetic construct; identical to SEQ ID NO: 19225
  source 1..120: mol_type = other DNA

SEQ ID NO: 93427 - DNA, 120 bp, synthetic construct; identical to SEQ ID NO: 19226
  source 1..120: mol_type = other DNA

SEQ ID NO: 93428 - DNA, 120 bp, synthetic construct; identical to SEQ ID NO: 19227
  source 1..120: mol_type = other DNA

SEQ ID NO: 93429 - DNA, 120 bp, synthetic construct; identical to SEQ ID NO: 19228
  source 1..120: mol_type = other DNA

SEQ ID NO: 93430 - DNA, 120 bp, synthetic construct; identical to SEQ ID NO: 19229
  source 1..120: mol_type = other DNA

SEQ ID NO: 93431 - DNA, 120 bp, synthetic construct; identical to SEQ ID NO: 19230
  source 1..120: mol_type = other DNA

SEQ ID NO: 93432 - DNA, 120 bp, synthetic construct; identical to SEQ ID NO: 19231
  source 1..120: mol_type = other DNA

SEQ ID NO: 93433 - DNA, 120 bp, synthetic construct
  source 1..120: mol_type = other DNA
cgacccgccatgacggggctggaggaccaggagttcgacttcgagttcctcttcgagtttaaccagcgcgacgagggcgccgccgcggccgccccaggtgggtcagtcccggagggcgcg

SEQ ID NO: 93434 - DNA, 120 bp, synthetic construct; identical to SEQ ID NO: 19208
  source 1..120: mol_type = other DNA

SEQ ID NO: 93435 - DNA, 120 bp, synthetic construct; identical to SEQ ID NO: 19209
  source 1..120: mol_type = other DNA

SEQ ID NO: 93436 - DNA, 120 bp, synthetic construct; identical to SEQ ID NO: 19210
  source 1..120: mol_type = other DNA

SEQ ID NO: 93437 - DNA, 120 bp, synthetic construct; identical to SEQ ID NO: 19211
  source 1..120: mol_type = other DNA

SEQ ID NO: 93438 - DNA, 120 bp, synthetic construct; identical to SEQ ID NO: 19212
  source 1..120: mol_type = other DNA

SEQ ID NO: 93439 - DNA, 120 bp, synthetic construct; identical to SEQ ID NO: 19213
  source 1..120: mol_type = other DNA

SEQ ID NO: 93440 - DNA, 120 bp, synthetic construct; identical to SEQ ID NO: 19214
  source 1..120: mol_type = other DNA

SEQ ID NO: 93441 - DNA, 120 bp, synthetic construct; identical to SEQ ID NO: 19215
  source 1..120: mol_type = other DNA

SEQ ID NO: 93442 - DNA, 120 bp, synthetic construct; identical to SEQ ID NO: 19216
  source 1..120: mol_type = other DNA

SEQ ID NO: 93443 - DNA, 120 bp, synthetic construct; identical to SEQ ID NO: 19217
  source 1..120: mol_type = other DNA

SEQ ID NO: 93444 - DNA, 120 bp, synthetic construct; identical to SEQ ID NO: 19218
  source 1..120: mol_type = other DNA

SEQ ID NO: 93445 - DNA, 120 bp, synthetic construct; identical to SEQ ID NO: 19219
  source 1..120: mol_type = other DNA

SEQ ID NO: 93446 - DNA, 120 bp, synthetic construct; identical to SEQ ID NO: 19220
  source 1..120: mol_type = other DNA

SEQ ID NO: 93447 - DNA, 120 bp, synthetic construct; identical to SEQ ID NO: 19221
  source 1..120: mol_type = other DNA

SEQ ID NO: 93448 - DNA, 120 bp, synthetic construct; identical to SEQ ID NO: 19222
  source 1..120: mol_type = other DNA

SEQ ID NO: 93449 - DNA, 120 bp, synthetic construct; identical to SEQ ID NO: 19223
  source 1..120: mol_type = other DNA

SEQ ID NO: 93450 - DNA, 120 bp, synthetic construct; identical to SEQ ID NO: 19224
  source 1..120: mol_type = other DNA

SEQ ID NO: 93451 - DNA, 120 bp, synthetic construct; identical to SEQ ID NO: 22561
  source 1..120: mol_type = other DNA

SEQ ID NO: 93452 - DNA, 120 bp, synthetic construct
  source 1..120: mol_type = other DNA
gtacccagcccggtccctctctctcattctctgtcacctttgctttctctgtcctactttgcttttctccatagagcttttcactttcagatacattatatgtagcttgtattggtttat

SEQ ID NO: 93453 - DNA, 120 bp, synthetic construct; identical to SEQ ID NO: 22562
  source 1..120: mol_type = other DNA

SEQ ID NO: 93454 - DNA, 120 bp, synthetic construct; identical to SEQ ID NO: 4855
  source 1..120: mol_type = other DNA

SEQ ID NO: 93455 - DNA, 120 bp, synthetic construct
  source 1..120: mol_type = other DNA
cccacctcaaagtgaacaaaactaaacataggcacttctacttgggtgatacctattactctgagtcatagaattaagtaagtttagaggtaggagggaacttacagagccctacccact

SEQ ID NO: 93456 - DNA, 120 bp, synthetic construct; identical to SEQ ID NO: 4045
  source 1..120: mol_type = other DNA

SEQ ID NO: 93457 - DNA, 120 bp, synthetic construct
  source 1..120: mol_type = other DNA
aagcatctgtttaacaaagcacatcttgcaccgcccttaatccatttaaccctgagtggacacagcacatgtttcagagagcacagggttgggggtaaggtcacagatcaacagaatgag

SEQ ID NO: 93458 - DNA, 120 bp, synthetic construct
  source 1..120: mol_type = other DNA
ggcggccgggcagaggctgcaatctcggcactttgggaggccaaggcaggcggctgggaggtggaggttgtagcgagccgagatcacgccactgcactccagcctaggcaccattgagca

SEQ ID NO: 93459 - DNA, 120 bp, synthetic construct
  source 1..120: mol_type = other DNA
gtaggttgcctgttcactctgatggtagtttcttttgctgtgcagaagctctttagttcaattagatcccatttgtcaattctggcttttgagccattgcttttggtgttttagacatga

SEQ ID NO: 93460 - DNA, 120 bp, synthetic construct
  source 1..120: mol_type = other DNA
ctgttattggtatataagaatgcttgtgatttttgcacattgattttgtatcccgaggctttgctcaagttgcttatcagcttaaggagatcttgggctgagacgatgggattttctaga

SEQ ID NO: 93461 - DNA, 120 bp, synthetic construct
  source 1..120: mol_type = other DNA
agtagtatacactgaacccaatttgtagtcttttatccctcacccccctctctcccttcctgcctccccccaagtccttgaaatccattgtgtcattcttgtctttttttttcttttttt

SEQ ID NO: 93462 - DNA, 120 bp, synthetic construct
  source 1..120: mol_type = other DNA
tgtgtctacttctttctacacagacacagtaacaatctgatctctcgttcttttccccacatttcccccttttctttttgacaaaaccgccatcgtcatcatggcccattctcgatggtc

SEQ ID NO: 93463 - DNA, 120 bp, synthetic construct
  source 1..120: mol_type = other DNA
ggtggccaggcagagacgctcctcacttcctagacagggtggcggctgggcagaagctgtaattttagcactttgggaggccaaggcaggcagctgggaggtggaggttgtagcgagccg

SEQ ID NO: 93464 - DNA, 120 bp, synthetic construct; identical to SEQ ID NO: 7660
  source 1..120: mol_type = other DNA

SEQ ID NO: 93465 - DNA, 120 bp, synthetic construct; identical to SEQ ID NO: 7661
  source 1..120: mol_type = other DNA

SEQ ID NO: 93466 - DNA, 120 bp, synthetic construct; identical to SEQ ID NO: 6325
  source 1..120: mol_type = other DNA

SEQ ID NO: 93467 - DNA, 120 bp, synthetic construct; identical to SEQ ID NO: 6326
  source 1..120: mol_type = other DNA

SEQ ID NO: 93468 - DNA, 120 bp, synthetic construct
  source 1..120: mol_type = other DNA
ttttccctcgtttctttgaaagttgggtgttgagaagtgggaggttcggggtgggagggggagggtgtcagagggtagagagagagacagagagacagagacgggggagagaggaagaga

SEQ ID NO: 93469 - DNA, 120 bp, synthetic construct
  source 1..120: mol_type = other DNA
aacatcaaggcacagagggaagtaggggacccagggttcattttgctgactcactgccttggcagagagtttgaaccctgtggactcagtttacccaaattcctcactgtggcccacaag

SEQ ID NO: 93470 - DNA, 120 bp, synthetic construct
  source 1..120: mol_type = other DNA
gttcaagcagttctcctgcctcagcctcccgagtagctgcctcagcttcccgagtagtaacattaaaatgtttaattttaacattactttatttaacccagggcatctggaatgatacta

SEQ ID NO: 93471 - DNA, 120 bp, synthetic construct
  source 1..120: mol_type = other DNA
gactaatgtctaatgtctagtttcatcccagaaccatctccccactcaccccgtccctggaaaaattgtcttccatgaaatcggtccctggggccaagaaggttggaggctgctgttcca

SEQ ID NO: 93472 - DNA, 120 bp, synthetic construct; identical to SEQ ID NO: 19410
  source 1..120: mol_type = other DNA

SEQ ID NO: 93473 - DNA, 120 bp, synthetic construct; identical to SEQ ID NO: 19411
  source 1..120: mol_type = other DNA

SEQ ID NO: 93474 - DNA, 120 bp, synthetic construct; identical to SEQ ID NO: 19412
  source 1..120: mol_type = other DNA

SEQ ID NO: 93475 - DNA, 120 bp, synthetic construct; identical to SEQ ID NO: 19525
  source 1..120: mol_type = other DNA

SEQ ID NO: 93476 - DNA, 120 bp, synthetic construct; identical to SEQ ID NO: 19526
  source 1..120: mol_type = other DNA

SEQ ID NO: 93477 - DNA, 120 bp, synthetic construct
  source 1..120: mol_type = other DNA
tccttccttccttccctccttccttctctccttccctcttccctccctcccttacttttttttttttttaagatggagttttgctcttgttgcccaggttggagttcgatggtgcagtct

SEQ ID NO: 93478 - DNA, 120 bp, synthetic construct; identical to SEQ ID NO: 19528
  source 1..120: mol_type = other DNA

SEQ ID NO: 93479 - DNA, 120 bp, synthetic construct; identical to SEQ ID NO: 19571
  source 1..120: mol_type = other DNA

SEQ ID NO: 93480 - DNA, 120 bp, synthetic construct
  source 1..120: mol_type = other DNA
aggacagaaaaccaaacactgcatgttctcactcataggtggaaattgaacaatgagaacacttggacacagggtggggaatatcacacccctgggcctgtggtggggtggggggaggga

SEQ ID NO: 93481 - DNA, 120 bp, synthetic construct
  source 1..120: mol_type = other DNA
ctgggcgacagagagagactccattaaaaaaaaaaaaaaaaaaaaaaaaaggcccatccatacagtctctttttcaggccccaggaatctggaccctcagttccttcctctctaggacct

SEQ ID NO: 93482 - DNA, 120 bp, synthetic construct
  source 1..120: mol_type = other DNA
attgcgggcccccagggccgcggcctcggcgctgcgccagcctcgctgtttcccccgcggagccgccgccgggtccccgatcttgggtccggtacccgcgagtttttaaactaggggtta

SEQ ID NO: 93483 - DNA, 120 bp, synthetic construct; identical to SEQ ID NO: 12459
  source 1..120: mol_type = other DNA

SEQ ID NO: 93484 - DNA, 120 bp, synthetic construct; identical to SEQ ID NO: 12460
  source 1..120: mol_type = other DNA

SEQ ID NO: 93485 - DNA, 120 bp, synthetic construct; identical to SEQ ID NO: 20581
  source 1..120: mol_type = other DNA

SEQ ID NO: 93486 - DNA, 120 bp, synthetic construct; identical to SEQ ID NO: 7496
  source 1..120: mol_type = other DNA

SEQ ID NO: 93487 - DNA, 120 bp, synthetic construct
  source 1..120: mol_type = other DNA
ggtaggaggattgcttgagcccaggaggtagaggctgcagtgagccaagatcacaccattgcactccagcctgggcaacagagcgaaaccctggctttgagaaaaaaaaaatagagagaa

SEQ ID NO: 93488 - DNA, 120 bp, synthetic construct; identical to SEQ ID NO: 14505
  source 1..120: mol_type = other DNA

SEQ ID NO: 93489 - DNA, 120 bp, synthetic construct; identical to SEQ ID NO: 22087
  source 1..120: mol_type = other DNA

SEQ ID NO: 93490 - DNA, 120 bp, synthetic construct; identical to SEQ ID NO: 22088
  source 1..120: mol_type = other DNA

SEQ ID NO: 93491 - DNA, 120 bp, synthetic construct; identical to SEQ ID NO: 22089
  source 1..120: mol_type = other DNA

SEQ ID NO: 93492 - DNA, 120 bp, synthetic construct; identical to SEQ ID NO: 22090
  source 1..120: mol_type = other DNA

SEQ ID NO: 93493 - DNA, 120 bp, synthetic construct; identical to SEQ ID NO: 22091
  source 1..120: mol_type = other DNA

SEQ ID NO: 93494 - DNA, 120 bp, synthetic construct
  source 1..120: mol_type = other DNA
acctctcacctctcctctcccctttccacggtctccctctcatgccgagccaaagctggactgtcctgctgccatctcggctcactgcaacctccctgcctgattgtcctgcctcagcct

SEQ ID NO: 93495 - DNA, 120 bp, synthetic construct
  source 1..120: mol_type = other DNA
cctccctccggccacccctactgggaagtgaggagcccctctgcccggccacccctactgggaagtgaggagcccctctgcccggccaccaccccatctgggaggtgtacccaacagctc

SEQ ID NO: 93496 - DNA, 120 bp, synthetic construct; identical to SEQ ID NO: 22092
  source 1..120: mol_type = other DNA

SEQ ID NO: 93497 - DNA, 120 bp, synthetic construct
  source 1..120: mol_type = other DNA
aaatgattcttctgcctcagtttcccaagtagctgggattataggtgcctatcaccgtgcctggctacgtttttctttttaaatagaggcagggtttcaccatgttggccaagctggtct

SEQ ID NO: 93498 - DNA, 120 bp, synthetic construct
  source 1..120: mol_type = other DNA
acttcaatccctatgattccatctccaacctgatcaatcagtactccccacttcccgagaccctacctgccaaattatccttaaaaactccaatccccgaatgcttggggagactgattt

SEQ ID NO: 93499 - DNA, 120 bp, synthetic construct; identical to SEQ ID NO: 22093
  source 1..120: mol_type = other DNA

SEQ ID NO: 93500 - DNA, 120 bp, synthetic construct; identical to SEQ ID NO: 22094
  source 1..120: mol_type = other DNA

SEQ ID NO: 93501 - DNA, 120 bp, synthetic construct; identical to SEQ ID NO: 15648
  source 1..120: mol_type = other DNA

SEQ ID NO: 93502 - DNA, 120 bp, synthetic construct; identical to SEQ ID NO: 11165
  source 1..120: mol_type = other DNA

SEQ ID NO: 93503 - DNA, 120 bp, synthetic construct; identical to SEQ ID NO: 11166
  source 1..120: mol_type = other DNA

SEQ ID NO: 93504 - DNA, 120 bp, synthetic construct
  source 1..120: mol_type = other DNA
gggggagggatagcattgggagatataccaaatgctagatgatgagttagtgggtgcagcgcaccagcatggcacatgtatacaaatgtaactaacctgcacgttgtgcacatgtaccct

SEQ ID NO: 93505 - DNA, 120 bp, synthetic construct; identical to SEQ ID NO: 33519
  source 1..120: mol_type = other DNA

SEQ ID NO: 93506 - DNA, 120 bp, synthetic construct; identical to SEQ ID NO: 33520
  source 1..120: mol_type = other DNA

SEQ ID NO: 93507 - DNA, 120 bp, synthetic construct; identical to SEQ ID NO: 33521
  source 1..120: mol_type = other DNA

SEQ ID NO: 93508 - DNA, 120 bp, synthetic construct; identical to SEQ ID NO: 33522
  source 1..120: mol_type = other DNA

SEQ ID NO: 93509 - DNA, 120 bp, synthetic construct; identical to SEQ ID NO: 33523
  source 1..120: mol_type = other DNA

SEQ ID NO: 93510 - DNA, 120 bp, synthetic construct; identical to SEQ ID NO: 28354
  source 1..120: mol_type = other DNA

SEQ ID NO: 93511 - DNA, 120 bp, synthetic construct
  source 1..120: mol_type = other DNA
gatacaaatagattgaaagtaaaaggatggaaaaagatatgtcatgcaaacagcaacctcaagaaaggtggaatggaccaggtgcagtggctcacacttgcaattccagcactttgggag

SEQ ID NO: 93512 - DNA, 120 bp, synthetic construct
  source 1..120: mol_type = other DNA
tccacaatggttgaactagtttacagtcccaccaacagtgtaaaagtgttcctatttctccacgtcctctccagcacctgttgtctcctgactttttaatgatcgccattctaactggtg

SEQ ID NO: 93513 - DNA, 120 bp, synthetic construct; identical to SEQ ID NO: 34137
  source 1..120: mol_type = other DNA

SEQ ID NO: 93514 - DNA, 120 bp, synthetic construct; identical to SEQ ID NO: 34138
  source 1..120: mol_type = other DNA

SEQ ID NO: 93515 - DNA, 120 bp, synthetic construct; identical to SEQ ID NO: 34139
  source 1..120: mol_type = other DNA

SEQ ID NO: 93516 - DNA, 120 bp, synthetic construct; identical to SEQ ID NO: 34140
  source 1..120: mol_type = other DNA

SEQ ID NO: 93517 - DNA, 120 bp, synthetic construct; identical to SEQ ID NO: 34141
  source 1..120: mol_type = other DNA

SEQ ID NO: 93518 - DNA, 120 bp, synthetic construct; identical to SEQ ID NO: 9103
  source 1..120: mol_type = other DNA

SEQ ID NO: 93519 - DNA, 120 bp, synthetic construct
  source 1..120: mol_type = other DNA
cacactgacttccacaatggttgaactagtttacagtcccaccaacaaagtaaaagtgttcctatttctccacatcctctccagcacctgttgtttcctgactttttaatgattgccatt

SEQ ID NO: 93520 - DNA, 120 bp, synthetic construct
  source 1..120: mol_type = other DNA
cctttccccattgcttgtttttctcaggtttgtcaaagatcagatagttgtagatatatggcgcaactatatctacgccatataataatcataaatataactgctgtgaacattcttgta

SEQ ID NO: 93521 - DNA, 120 bp, synthetic construct; identical to SEQ ID NO: 9104
  source 1..120: mol_type = other DNA

SEQ ID NO: 93522 - DNA, 120 bp, synthetic construct
  source 1..120: mol_type = other DNA
cgcttttcagaccagcttaagaaacggcgcaccacgagactatatcccacacctggctcagagggtcctacgcccacggaatctcgctgattgctagcacagcagtctgagatcaaactg

SEQ ID NO: 93523 - DNA, 120 bp, synthetic construct
  source 1..120: mol_type = other DNA
tgatgcgatcaactggaagaaagggtatcagcaatggaagatgaaatgaatgaaatgaggcgagaagggaagtttagagaaaaaagaataaaaagaaatgagcaaagcctccaagaaata

SEQ ID NO: 93524 - DNA, 120 bp, synthetic construct
  source 1..120: mol_type = other DNA
gactggcaagttggataaagagtcaagacccatcagtgtgctgtattcaggaaacccatctcacgtgcagagacacacataggctcaaaataaaaggatggaggaagatctaccaagcaa

SEQ ID NO: 93525 - DNA, 120 bp, synthetic construct
  source 1..120: mol_type = other DNA
aatgcctacaagagaaagtaggaaagatccaaaattgacaccctaacatcacaattaaaagaactagaaaagcaagagcaaacacattcaaaagctagcagaaggcaagaaataactaaa

SEQ ID NO: 93526 - DNA, 120 bp, synthetic construct
  source 1..120: mol_type = other DNA
ctctcaccactcctattcaacatagtgttggaagttctggccagggcaatcaggcaggagaaggaaataaagggtattcaattaggaaaagaggaagtcaaattgtccctgtttgcagac

SEQ ID NO: 93527 - DNA, 120 bp, synthetic construct
  source 1..120: mol_type = other DNA
attaccattcaggacataggcatgggcaaggacttcatgtccaaaacaccaaaagcaatggcaacaaaagccaaaattgacaaatgggatctaattaaactaaagagcttctgcacagca

SEQ ID NO: 93528 - DNA, 120 bp, synthetic construct
  source 1..120: mol_type = other DNA
atcacatggacacaggaaggggaatatcacacttggggactgtggtggggtcgggggaggggggagggatagcattggagatatacctaatgctagatgacacgttagtgggtgcagcgc

SEQ ID NO: 93529 - DNA, 120 bp, synthetic construct; identical to SEQ ID NO: 9105
  source 1..120: mol_type = other DNA

SEQ ID NO: 93530 - DNA, 120 bp, synthetic construct; identical to SEQ ID NO: 6432
  source 1..120: mol_type = other DNA

SEQ ID NO: 93531 - DNA, 120 bp, synthetic construct; identical to SEQ ID NO: 14341
  source 1..120: mol_type = other DNA

SEQ ID NO: 93532 - DNA, 120 bp, synthetic construct; identical to SEQ ID NO: 14342
  source 1..120: mol_type = other DNA

SEQ ID NO: 93533 - DNA, 120 bp, synthetic construct; identical to SEQ ID NO: 26544
  source 1..120: mol_type = other DNA

SEQ ID NO: 93534 - DNA, 120 bp, synthetic construct
  source 1..120: mol_type = other DNA
gtgagcatttaatgctataaatttccctctacacactgctttacatgtatcccagagattctggtacgttgtgtctgtgttcttattggtttcaaaggacatctttatttctgccttcat

SEQ ID NO: 93535 - DNA, 120 bp, synthetic construct; identical to SEQ ID NO: 14337
  source 1..120: mol_type = other DNA

SEQ ID NO: 93536 - DNA, 120 bp, synthetic construct
  source 1..120: mol_type = other DNA
ggtgactcatgcctgtaatcccagtattttgggagactgaggctgttggatcacttgagctcaaaaattcgactgggcaacatggcgtaacctcatctctacaaaaaatacaaaaattag

SEQ ID NO: 93537 - DNA, 120 bp, synthetic construct; identical to SEQ ID NO: 12552
  source 1..120: mol_type = other DNA

SEQ ID NO: 93538 - DNA, 120 bp, synthetic construct; identical to SEQ ID NO: 12553
  source 1..120: mol_type = other DNA

SEQ ID NO: 93539 - DNA, 120 bp, synthetic construct; identical to SEQ ID NO: 12554
  source 1..120: mol_type = other DNA

SEQ ID NO: 93540 - DNA, 120 bp, synthetic construct; identical to SEQ ID NO: 12555
  source 1..120: mol_type = other DNA

SEQ ID NO: 93541 - DNA, 120 bp, synthetic construct; identical to SEQ ID NO: 22432
  source 1..120: mol_type = other DNA

SEQ ID NO: 93542 - DNA, 120 bp, synthetic construct; identical to SEQ ID NO: 22433
  source 1..120: mol_type = other DNA

SEQ ID NO: 93543 - DNA, 120 bp, synthetic construct
  source 1..120: mol_type = other DNA
actggcaccatgcttcctgcacagcctgcagaatcgtgagttaattaaacctcttttctttataaattgcccagtctcaagtattcctttagcaatgcgagaacagactaacacagaaac

SEQ ID NO: 93544 - DNA, 120 bp, synthetic construct; identical to SEQ ID NO: 22434
  source 1..120: mol_type = other DNA

SEQ ID NO: 93545 - DNA, 120 bp, synthetic construct; identical to SEQ ID NO: 22435
  source 1..120: mol_type = other DNA

SEQ ID NO: 93546 - DNA, 120 bp, synthetic construct; identical to SEQ ID NO: 22436
  source 1..120: mol_type = other DNA

SEQ ID NO: 93547 - DNA, 120 bp, synthetic construct; identical to SEQ ID NO: 22437
  source 1..120: mol_type = other DNA

SEQ ID NO: 93548 - DNA, 120 bp, synthetic construct; identical to SEQ ID NO: 22438
  source 1..120: mol_type = other DNA

SEQ ID NO: 93549 - DNA, 120 bp, synthetic construct; identical to SEQ ID NO: 22439
  source 1..120: mol_type = other DNA

SEQ ID NO: 93550 - DNA, 120 bp, synthetic construct
  source 1..120: mol_type = other DNA
gccgcgaccccgtctgggaggttaggagcgtctctgcccagccgccccgtctgagaagtgaggagaccctccgcctggcaaccgccccatctgagaagtgaggagcccctccgcccggct

SEQ ID NO: 93551 - DNA, 120 bp, synthetic construct; identical to SEQ ID NO: 22440
  source 1..120: mol_type = other DNA

SEQ ID NO: 93552 - DNA, 120 bp, synthetic construct; identical to SEQ ID NO: 14768
  source 1..120: mol_type = other DNA

SEQ ID NO: 93553 - DNA, 120 bp, synthetic construct; identical to SEQ ID NO: 31676
  source 1..120: mol_type = other DNA

SEQ ID NO: 93554 - DNA, 120 bp, synthetic construct
  source 1..120: mol_type = other DNA
ggacattcaaaccaaaggcaaagaagttgaaaactttgaaaaaaatttagaagaatgtataactagaataaccaatacagagaagtgcttaaaggagctgatggagctgaaaaacaaggc

SEQ ID NO: 93555 - DNA, 120 bp, synthetic construct
  source 1..120: mol_type = other DNA
acgacaggatcaaattcacacataacagtattaactttaaatgtaaatggactaaatgctccaattaaaagacacagactggcaaattggataaagagtcaagacccatcagtgtgctgt

SEQ ID NO: 93556 - DNA, 120 bp, synthetic construct
  source 1..120: mol_type = other DNA
ctaaaatcagagcagaactgaaggaaatagagacacaaaagacccttcaaaaaattaatgaatccaggagctggttttttgaaaggatcaacaaaattgatagaccgctagcaagactaa

SEQ ID NO: 93557 - DNA, 120 bp, synthetic construct; identical to SEQ ID NO: 54542
  source 1..120: mol_type = other DNA

SEQ ID NO: 93558 - DNA, 120 bp, synthetic construct
  source 1..120: mol_type = other DNA
acaccaaaagcaatggcaacaaaagccaaaattgacaaataggatctaattaaactaaagagcttctgcacagcaaaagaaactaccatcagagtgaacaggcaacctacagaatgggag

SEQ ID NO: 93559 - DNA, 120 bp, synthetic construct
  source 1..120: mol_type = other DNA
gtggggtggggggaggggggagggatagcattgggagatatgcctaatgctagatggcaacttagtgggtgcagtgcaccagcatggcacatgtatacatatgtaactaacctgcacaat

SEQ ID NO: 93560 - DNA, 120 bp, synthetic construct; identical to SEQ ID NO: 31677
  source 1..120: mol_type = other DNA

SEQ ID NO: 93561 - DNA, 120 bp, synthetic construct; identical to SEQ ID NO: 31678
  source 1..120: mol_type = other DNA

SEQ ID NO: 93562 - DNA, 120 bp, synthetic construct
  source 1..120: mol_type = other DNA
ctgtcacgtactaggcatgtttttaatgctataaatccgtgtagtagtcagtagcgtgtccgtgatttgtattggtcagggagcagtttgaattttaaaaagcctgaagctcctgctgag

SEQ ID NO: 93563 - DNA, 120 bp, synthetic construct
  source 1..120: mol_type = other DNA
agactcagtgagccgagattgtgccactgcaccctggcctggatgacagaatgagaacctgtctaaaaatgaatgaatgaaagaaagaaagtcaaatactctctgaaaagttcagatcct

SEQ ID NO: 93564 - DNA, 120 bp, synthetic construct
  source 1..120: mol_type = other DNA
gagttttcatatattgaatattagattctttctccaatttttttttttttttttttttttttattcattcttgggtgtttctcgcagagggggatttggcagggtcacaggacaatagtg

SEQ ID NO: 93565 - DNA, 120 bp, synthetic construct
  source 1..120: mol_type = other DNA
acggggcggttgccaggcagagggtctcctcacttctcagacggggcggtcgggcagagacgctcctcacataccggacggggtggcagggcagaggtgctccccacatctcagacgatg

SEQ ID NO: 93566 - DNA, 120 bp, synthetic construct
  source 1..120: mol_type = other DNA
aggtaggaggattgcttaagctcaggaggttaaggctgtgtgagctgtgatcacaccactgcactccccactgggtaacaagacctggtttcaaaaataaataaataaatgaaaatttaa

SEQ ID NO: 93567 - DNA, 120 bp, synthetic construct
  source 1..120: mol_type = other DNA
tgaatagtgctgcaataaacatatgtgtgcatgtgtctttatagcagcatgatttatagtcctttgggtatatacccagctaccaatgactttcttcacagaattggaaaaaactaaagt

SEQ ID NO: 93568 - DNA, 120 bp, synthetic construct
  source 1..120: mol_type = other DNA
tgtggaagtcagtgtggtgattcctcagggatctagaactagaaataccatttgagtaaggtaactttttaaagagaaggttccatggctctggcttccttctacatctgagttagcctg

SEQ ID NO: 93569 - DNA, 120 bp, synthetic construct; identical to SEQ ID NO: 7422
  source 1..120: mol_type = other DNA

SEQ ID NO: 93570 - DNA, 120 bp, synthetic construct
  source 1..120: mol_type = other DNA
ttgaacccaggagtttgagtccagcctgggcaacaacgtaaagagacctgactctacattttttttttttaatagctgggcatggtggtgcaaacctctggtaccagctacttatgaggc

SEQ ID NO: 93571 - DNA, 120 bp, synthetic construct
  source 1..120: mol_type = other DNA
gtatatctcctaatgctatccctcccccctccccacatgccacaaccatcccctgtgtgtgatattccccttcctgtgtccttgtgttctcattgttcaattcccacctatgagtgagaa

SEQ ID NO: 93572 - DNA, 120 bp, synthetic construct
  source 1..120: mol_type = other DNA
ttcccagcaccatttattaaatagggaatcctttccccattgtttgtttttgtcaggtttgtcaaagatcagatagttgtagatatgcggcattatttctgagggctctgttctgttcca

SEQ ID NO: 93573 - DNA, 120 bp, synthetic construct
  source 1..120: mol_type = other DNA
tgtgggtttgtcatagatagctcttattattttgagatacgtcccatcaataactaatttattgagagtttttagcatgaagggttgttgaattttgtcaaaggccttttctgcatctat

SEQ ID NO: 93574 - DNA, 120 bp, synthetic construct
  source 1..120: mol_type = other DNA
tgctgaaaagaatgtatattctattgatttggggtggagagttctgtagatgtctattaggtccgcttggtgcagagctgagttcaattcctggatatccttgttaactttctgtctcga

SEQ ID NO: 93575 - DNA, 120 bp, synthetic construct
  source 1..120: mol_type = other DNA
ctgagagatcagctgttagtctgatgggcttccttttgtgggtaacctgacctttctctctggctgcccttaacattttttccttcatttcaactttggtgaatctgacaattatgtgtc

SEQ ID NO: 93576 - DNA, 120 bp, synthetic construct; identical to SEQ ID NO: 28279
  source 1..120: mol_type = other DNA

SEQ ID NO: 93577 - DNA, 120 bp, synthetic construct
  source 1..120: mol_type = other DNA
ccaagttcttcaggtttgaggctggaattggctcttcttgctcctcaagcatgcagacagcctattgtgggaccttgtgaacatgtaagttaatacttaataagctcccttaaatatata

SEQ ID NO: 93578 - DNA, 120 bp, synthetic construct
  source 1..120: mol_type = other DNA
aaagtatgcaatactggagagaggaatcatgggggccctcctagagtctgtctgccacaggatctgatagaacttccatttatttaaacatcctgcctttttatcactgattaattcttc

SEQ ID NO: 93579 - DNA, 120 bp, synthetic construct; identical to SEQ ID NO: 28281
  source 1..120: mol_type = other DNA

SEQ ID NO: 93580 - DNA, 120 bp, synthetic construct
  source 1..120: mol_type = other DNA
atgtccttggcccactttttgatggggttgtttgtttttttcttgtaaatttgtttgagtccattgtagattctggatattagccctttgtcagatgagtaggttgcaaaaattttctcc

SEQ ID NO: 93581 - DNA, 120 bp, synthetic construct
  source 1..120: mol_type = other DNA
cagcttaagaagagtttgggctgagacaatggggttttctagatatacaatcatgtcgtctgcaaacagggacaatttgacttcctcttttcctaattgaataccctttatttccttctc

SEQ ID NO: 93582 - DNA, 120 bp, synthetic construct
  source 1..120: mol_type = other DNA
tgccagcagtctatcaattttattgatcctttcaaaaaaccagctcctggattcattaattttttgaagggttttttgtgtctctatttccttcagttctgctctgattttagttatttc

SEQ ID NO: 93583 - DNA, 120 bp, synthetic construct
  source 1..120: mol_type = other DNA
ttagctgcttattttgctcgttagttgatgcagtttcttcctagtctcgatggtctttacgttttggcatgattttgcagtggctggtacgggttgttcctttccatgtttagcgcttcc

SEQ ID NO: 93584 - DNA, 120 bp, synthetic construct
  source 1..120: mol_type = other DNA
gcagcctaactgggaggcaccccccagcaggggcacactgacacctcacacggcagggtattccaacagacctgcagctgagggtcctgctgttagaaggaaaactaacaaacagaaagg

SEQ ID NO: 93585 - DNA, 120 bp, synthetic construct; identical to SEQ ID NO: 28282
  source 1..120: mol_type = other DNA

SEQ ID NO: 93586 - DNA, 120 bp, synthetic construct
  source 1..120: mol_type = other DNA
ggggcgcccaccattgcccaggcttgattaggtaaacaaagcagccagaaagctccaactgggcggagcccaccacagctcaaggaggcctgcctgcctctgtaggctccacctctgggg

SEQ ID NO: 93587 - DNA, 120 bp, synthetic construct
  source 1..120: mol_type = other DNA
ctatgtgaaaagaccaaatctacgtctgattggtgtacctgaaagtgaagtggagaatggaacccagttggaaaacattctgcaggagattatccaggagaacttccccaatctagcaag

SEQ ID NO: 93588 - DNA, 120 bp, synthetic construct
  source 1..120: mol_type = other DNA
agacaaagaaggccattacataatggtaaagggatcaattcaacaagaagagctaactatcctaaatatatatgcacccaacacaggagcacccggattaataaagcaagtcctgagtga

SEQ ID NO: 93589 - DNA, 120 bp, synthetic construct
  source 1..120: mol_type = other DNA
gagagaagaatctaatagacgcaataaaaaatgataaaggggatatcaccaccgatcccacagaaatacaaactaccatcagagaatactacaaacacctctacgcaaataaactagaaa

SEQ ID NO: 93590 - DNA, 120 bp, synthetic construct
  source 1..120: mol_type = other DNA
ttatacaccagcaacagacaaacagagagccaaatcatgagtgaactcccattcacaattgcttcaaagagaataaaatacctaggaatccaacttacaaggcatgtgaaggacctcttc

SEQ ID NO: 93591 - DNA, 120 bp, synthetic construct
  source 1..120: mol_type = other DNA
aatttttgcaacctactcatctgacaaagggctaatatccagaatctacaatggactcaaacaaatttacaagaaaaaaacaaacaaccccatcaaaaagtgggcgaaggacatgaacag

SEQ ID NO: 93592 - DNA, 120 bp, synthetic construct; identical to SEQ ID NO: 28283
  source 1..120: mol_type = other DNA

SEQ ID NO: 93593 - DNA, 120 bp, synthetic construct; identical to SEQ ID NO: 28284
  source 1..120: mol_type = other DNA

SEQ ID NO: 93594 - DNA, 120 bp, synthetic construct
  source 1..120: mol_type = other DNA
aggaataccttaggctgggtaatttataaagaaaagaggtctatttggctcataattctgatggccagaatgttcagaattaagtatttacatccggtgagggccacaggctgcttccac

SEQ ID NO: 93595 - DNA, 120 bp, synthetic construct; identical to SEQ ID NO: 28280
  source 1..120: mol_type = other DNA

SEQ ID NO: 93596 - DNA, 120 bp, synthetic construct
  source 1..120: mol_type = other DNA
agtgggtgcagcgcactgtgcgtgagccgaagcagggcgaggcattgcctcactcgggaagcgcaagggatcagggagttccctttcctagtcaaagaaaggggtgacagacggcacctg

SEQ ID NO: 93597 - DNA, 120 bp, synthetic construct
  source 1..120: mol_type = other DNA
tgaaaaaaatttagacgaatgtataactagaataaccaatacagagaagtgcttaaaggagctgatggagctgaaagccaaggcatgagaactacgtgaagaatgcagaagcctcaggag

SEQ ID NO: 93598 - DNA, 120 bp, synthetic construct
  source 1..120: mol_type = other DNA
agatcaaaagagacaaagaaggccattacataatggtaaggggatcaattcaacaagaagagctaactatcctaaatatatatgcatccaatacaggaggacccagattcataaagcaag

SEQ ID NO: 93599 - DNA, 120 bp, synthetic construct
  source 1..120: mol_type = other DNA
atgaattcctcgacacatacactctcccaagactaaaccaggaagaagttgaatctccgaatagaccaataacaggatctgaaattgtggcaataatcaatagcttaccaaccaaaaaga

SEQ ID NO: 93600 - DNA, 120 bp, synthetic construct
  source 1..120: mol_type = other DNA
caaacagagagccaaatcatgagtgaactcccattcacaattgcttcaaagagaataaaatacctgggaatctaccttacaagggacgtgaaggacctcttcaaggagaactacaaccca

SEQ ID NO: 93601 - DNA, 120 bp, synthetic construct
  source 1..120: mol_type = other DNA
aaacaaatttacaagaaaaaaacaaacaaccccatcaaaaagtgggcgaaggacatgaacaaacacttctcaaaagaagacatttatacaaccaaaaaacacatgaaaaaatgctcacca

SEQ ID NO: 93602 - DNA, 120 bp, synthetic construct; identical to SEQ ID NO: 28272
  source 1..120: mol_type = other DNA

SEQ ID NO: 93603 - DNA, 120 bp, synthetic construct; identical to SEQ ID NO: 28273
  source 1..120: mol_type = other DNA

SEQ ID NO: 93604 - DNA, 120 bp, synthetic construct; identical to SEQ ID NO: 28274
  source 1..120: mol_type = other DNA

SEQ ID NO: 93605 - DNA, 120 bp, synthetic construct
  source 1..120: mol_type = other DNA
cctttgtagggacacagatgaagctggaaaccatcattctgagcaaagtatcacaaggacagaaaaccaaaccacatgttctcactcataggtgggaattgaacaatgagaacacttgga

SEQ ID NO: 93606 - DNA, 120 bp, synthetic construct; identical to SEQ ID NO: 28276
  source 1..120: mol_type = other DNA

SEQ ID NO: 93607 - DNA, 120 bp, synthetic construct
  source 1..120: mol_type = other DNA
ggctgcataaatgtcttcttttgagaagtgtctgttcatttccttcgcccacttgttgatggggttgtttgtttttttcttgtaaattggttggagttcattgtagattctagatattag

SEQ ID NO: 93608 - DNA, 120 bp, synthetic construct
  source 1..120: mol_type = other DNA
tggggttttttagatatacaatgatgtcatctgcaaacagggacaatttgacttcctcttttcctaattgaataccctttatttccttctcctgcctgaatgccctggccagaacttcca

SEQ ID NO: 93609 - DNA, 120 bp, synthetic construct; identical to SEQ ID NO: 28277
  source 1..120: mol_type = other DNA

SEQ ID NO: 93610 - DNA, 120 bp, synthetic construct
  source 1..120: mol_type = other DNA
ttataacttggtgtgaatccaacaaagtgctaaggtgagaaactttactgaggagaaaatcagctttgaaatacccaaaggactgtaaatcatgctgctataaagacacatgcacacgta

SEQ ID NO: 93611 - DNA, 120 bp, synthetic construct
  source 1..120: mol_type = other DNA
tcttgcttaaacaagtctttttttgttgttttttcttttattttcaatacagggtcttgctctgtcacccaggctgaagcacagtgggatgatcttggctcactgcaacctccaactcca

SEQ ID NO: 93612 - DNA, 120 bp, synthetic construct
  source 1..120: mol_type = other DNA
ttctaactggtgtgagatggtatctcattgtggttttgatttgtatttctctgatggtcagtgatgatgagcatgttttcatgtgtcttttggctgcataaatgtcttcttttgagaagt

SEQ ID NO: 93613 - DNA, 120 bp, synthetic construct
  source 1..120: mol_type = other DNA
gcagtatggccattttcacgatattgattcttcctacccatgagcatggaatgttcttccatttgtttgtatcctcttttatttcattgagcagtggtttttagttctccttgaagaggt

SEQ ID NO: 93614 - DNA, 120 bp, synthetic construct
  source 1..120: mol_type = other DNA
atgagttagggaggattccctctttttctgttgtttggaattgtttcagaaggaattagtacgagttcctccttatacctctggtagaatttggctgtgaatccatctggtcctggactc

SEQ ID NO: 93615 - DNA, 120 bp, synthetic construct
  source 1..120: mol_type = other DNA
ctgtagatgtctattaggtccgcttggtgcagagctgagttcaattcctgggtatccctgtcaactttccgtctcattgatctgtctaatgttgacagtggggtgttaaagtctcccatt

SEQ ID NO: 93616 - DNA, 120 bp, synthetic construct
  source 1..120: mol_type = other DNA
gtagagtttctgctgagagatcagctgttagtctgatgggcttccctttgtgggtaacccgacctttctctctggctgcctttaacattttttccttcatttcaactttggtgaatctga

SEQ ID NO: 93617 - DNA, 120 bp, synthetic construct
  source 1..120: mol_type = other DNA
agaaccgtggattttcgtgatccgcgaatgctgctgtctgcttgttcctctggaagttttgtctcagagttgtacccggctgtgtgaggtgtcagtctgcccccactggggggtgcctct

SEQ ID NO: 93618 - DNA, 120 bp, synthetic construct
  source 1..120: mol_type = other DNA
ttgaaccagccttgcatcccagggatgaagcccacttgatcatggtggataagctttttgatgtgctgctggattcagtttgccagtattttattgaggatttttcatcgatgttcatca

SEQ ID NO: 93619 - DNA, 120 bp, synthetic construct; identical to SEQ ID NO: 31559
  source 1..120: mol_type = other DNA

SEQ ID NO: 93620 - DNA, 120 bp, synthetic construct
  source 1..120: mol_type = other DNA
cagatgagtagattgcaaaaattttctcccattctgtaggttgcctgttcactctgatggtggtttcttttgctgtgcagaggccgtttagtttaattagattccgtttgtcaattttgg

SEQ ID NO: 93621 - DNA, 120 bp, synthetic construct; identical to SEQ ID NO: 31554
  source 1..120: mol_type = other DNA

SEQ ID NO: 93622 - DNA, 120 bp, synthetic construct
  source 1..120: mol_type = other DNA
tgatttgcatttctctgatggccagtgatgatgagcatttcttgatttcttaagttaaatttccttttaaggtatttgttatttgatgttccattttgattagaaaaagtggagaaagaa

SEQ ID NO: 93623 - DNA, 120 bp, synthetic construct
  source 1..120: mol_type = other DNA
aaaatgggagaaaattttcgcaacctactcatctgacaaagggctaatattcagaatctacaatgaactcaaacaaatttacaagaaaaaaacaaacaaccccatcaaaaagtgggcgaa

SEQ ID NO: 93624 - DNA, 120 bp, synthetic construct; identical to SEQ ID NO: 31555
  source 1..120: mol_type = other DNA

SEQ ID NO: 93625 - DNA, 120 bp, synthetic construct
  source 1..120: mol_type = other DNA
ttcctgaatacagcgcactgatggggcctgactctttatccaatttgccagtctgtgtcatctgattggagcatttagcccatttacatttaaggataatattgttatgtgtgtatttga

SEQ ID NO: 93626 - DNA, 120 bp, synthetic construct; identical to SEQ ID NO: 6224
  source 1..120: mol_type = other DNA

SEQ ID NO: 93627 - DNA, 120 bp, synthetic construct
  source 1..120: mol_type = other DNA
accgacttccacaaaggttgaactagtttacagtctcaccaacagtgtaaaagtgttcctatttctccacatcgtctccagcacctgttgtttcctgactttttaatgatcgccattcta

SEQ ID NO: 93628 - DNA, 120 bp, synthetic construct
  source 1..120: mol_type = other DNA
ttaggattgacttggcaatgcgggctcttttttggttccatatgaactttaaagtagttttttccaattctgtgaagaaagtcattggtagcttgatggggatggcattgaatctctaaa

SEQ ID NO: 93629 - DNA, 120 bp, synthetic construct; identical to SEQ ID NO: 31557
  source 1..120: mol_type = other DNA

SEQ ID NO: 93630 - DNA, 120 bp, synthetic construct; identical to SEQ ID NO: 31558
  source 1..120: mol_type = other DNA

SEQ ID NO: 93631 - DNA, 120 bp, synthetic construct
  source 1..120: mol_type = other DNA
tttctctactataaattcactacggagaatttcggtaaagccatgtttttctttaaaaacaatatcagtggcagccaagatggccaaataggaagagctccggtctacagctcccagcgt

SEQ ID NO: 93632 - DNA, 120 bp, synthetic construct
  source 1..120: mol_type = other DNA
ggtccctgacccctgacccccaagcagcctaactgggaggcaccccccgataggggcagactgacacctcacacagccaggtactcttctgagacaaaacttccagaggaatgatcagac

SEQ ID NO: 93633 - DNA, 120 bp, synthetic construct
  source 1..120: mol_type = other DNA
catcatcctgataccaaagccaggcagagacacaaccaaaaaagagaataccaaagcctggcagagacacaaccaaaaaagagaattttagaccaatatccttgatgaacattgatgcaa

SEQ ID NO: 93634 - DNA, 120 bp, synthetic construct
  source 1..120: mol_type = other DNA
gaaatggggaaaggattccctatttaataaatggtgctgggaaaactggctagccatatgtagaaagctgaaactggatcccttccttacaccttatacaaaaattaattcacgatggat

SEQ ID NO: 93635 - DNA, 120 bp, synthetic construct
  source 1..120: mol_type = other DNA
ttttagacatgaagtccttgcccatgcctatgtcctgaatggtattgactaggttttcttctagggtttttatggttttaggtctaacatttaagtctataatccatcttgaattaattt

SEQ ID NO: 93636 - DNA, 120 bp, synthetic construct
  source 1..120: mol_type = other DNA
ttcaacatagtgttggaagttctggccagggcaattaggcaggagaaggaaataaagggtattcaattaggaaaagaggaagtcaaattgtccctgtttgcagaggacatgattgtatat

SEQ ID NO: 93637 - DNA, 120 bp, synthetic construct
  source 1..120: mol_type = other DNA
aaagatcatttattaatattttagctgcctgacacgtcctttttttttgttttgttttgagatggagtcttgctctgttgcctaggttggaatgcagtggcacgatctcggctcactgca

SEQ ID NO: 93638 - DNA, 120 bp, synthetic construct
  source 1..120: mol_type = other DNA
ctgcgacctctgcctcctgggctcaagtgattcccctgcctcagcctcccgagtagccgggagtacaggtgtgtgccaccacgcccgactaatttttgtatttttagtagagatggggtt

SEQ ID NO: 93639 - DNA, 120 bp, synthetic construct
  source 1..120: mol_type = other DNA
ccctggaggtggaggttgcagtgagccaaggtcacgccactgcacatgacagcctgggtgatagagtgagactcttatctcaaaataaaaaaccaaaaaaaaaaaaaaaaaaactatact

SEQ ID NO: 93640 - DNA, 120 bp, synthetic construct; identical to SEQ ID NO: 16461
  source 1..120: mol_type = other DNA

SEQ ID NO: 93641 - DNA, 120 bp, synthetic construct; identical to SEQ ID NO: 16462
  source 1..120: mol_type = other DNA

SEQ ID NO: 93642 - DNA, 120 bp, synthetic construct; identical to SEQ ID NO: 16463
  source 1..120: mol_type = other DNA

SEQ ID NO: 93643 - DNA, 120 bp, synthetic construct; identical to SEQ ID NO: 16464
  source 1..120: mol_type = other DNA

SEQ ID NO: 93644 - DNA, 120 bp, synthetic construct; identical to SEQ ID NO: 16465
  source 1..120: mol_type = other DNA

SEQ ID NO: 93645 - DNA, 120 bp, synthetic construct; identical to SEQ ID NO: 16466
  source 1..120: mol_type = other DNA

SEQ ID NO: 93646 - DNA, 120 bp, synthetic construct; identical to SEQ ID NO: 16467
  source 1..120: mol_type = other DNA

SEQ ID NO: 93647 - DNA, 120 bp, synthetic construct; identical to SEQ ID NO: 26217
  source 1..120: mol_type = other DNA

SEQ ID NO: 93648 - DNA, 120 bp, synthetic construct; identical to SEQ ID NO: 26218
  source 1..120: mol_type = other DNA

SEQ ID NO: 93649 - DNA, 120 bp, synthetic construct
  source 1..120: mol_type = other DNA
tcttcccaccctctgtgggcgtctcagcccgttgtccctgctcttcccaccctctgtgggcgtctcagcccgttgtccctgctcttcccacccgctgtgggcatcccagcccattgtccc

SEQ ID NO: 93650 - DNA, 120 bp, synthetic construct
  source 1..120: mol_type = other DNA
ccaccctctgtgggcgtctcagcccattgcccctgctcttcccaccctctgtgggcgtctcagcccattgtccctgctcttcccactctctgtgggcgtcccagcccattgtccctgctc

SEQ ID NO: 93651 - DNA, 120 bp, synthetic construct
  source 1..120: mol_type = other DNA
ggcgtctcagcccgttgtccctgctcttcccacccgctgtgggcgtcccagccctttgtccctgctcttcccactctctgtgggcgtctcagcccattgtccctgctcttcccaccctct

SEQ ID NO: 93652 - DNA, 120 bp, synthetic construct
  source 1..120: mol_type = other DNA
ctcagcccattgtccctgctcttcccacctgctagtgggcgtctcagcccattgtccctgctcttcccacccgctgtgggcgtcccagccctttgtccctgctcttcccacccgctgtgg

SEQ ID NO: 93653 - DNA, 120 bp, synthetic construct
  source 1..120: mol_type = other DNA
catgtgatttttgtctttggttctgtttatatgctggattacgtttattgattttcatatgttgaaccagccttgcatccgagggatgaagcccacttgatcatggtggataagcttttt

SEQ ID NO: 93654 - DNA, 120 bp, synthetic construct
  source 1..120: mol_type = other DNA
acgcagtagtcattcaggagcaggttgttcagtttccatgtagttgagcggttttgagtgagtttcttaatcctgagttctagtttgattgcactgtggtctgagagacagtttgttata

SEQ ID NO: 93655 - DNA, 120 bp, synthetic construct
  source 1..120: mol_type = other DNA
tttccatgtttagtgcttccttcaggagctcttttagggcaggcctggtggtgacaaaatctctcagcatttgcttgtctgtaaagtattttatttctccttcacttatgaagcttagtt

SEQ ID NO: 93656 - DNA, 120 bp, synthetic construct
  source 1..120: mol_type = other DNA
cattgcttttggtgttttagacatgaagtccttgcccatgcctatgtcctaaatggtatttttttattgcctaggttttcttctagggtttttatggttttaggtctaacatttaagcct

SEQ ID NO: 93657 - DNA, 120 bp, synthetic construct
  source 1..120: mol_type = other DNA
ttcctaactgaataccctttatttctttctcctgcctgattgccgtggccagaacttccaacactatgttgaataggagtggtgagagagggcatccctgtcttgtgccagttttcaaag

SEQ ID NO: 93658 - DNA, 120 bp, synthetic construct
  source 1..120: mol_type = other DNA
aatagtgccgcaataaacatacgtgtgcatgtggctttatagtagcatgttttataatcctctgggtatatacccagtaatgggatgactgggtcaaatggtatttctagttctagatcc

SEQ ID NO: 93659 - DNA, 120 bp, synthetic construct
  source 1..120: mol_type = other DNA
attggtctatatctctgttttggtaccagtaccatgctgttttggttactgtagccttgtagtatagtttgaagtcaggtagcgtgatgcctccagctttgttcttttgcgttaggattg

SEQ ID NO: 93660 - DNA, 120 bp, synthetic construct; identical to SEQ ID NO: 24885
  source 1..120: mol_type = other DNA

SEQ ID NO: 93661 - DNA, 120 bp, synthetic construct; identical to SEQ ID NO: 24886
  source 1..120: mol_type = other DNA

SEQ ID NO: 93662 - DNA, 120 bp, synthetic construct; identical to SEQ ID NO: 24887
  source 1..120: mol_type = other DNA

SEQ ID NO: 93663 - DNA, 120 bp, synthetic construct; identical to SEQ ID NO: 24888
  source 1..120: mol_type = other DNA

SEQ ID NO: 93664 - DNA, 120 bp, synthetic construct; identical to SEQ ID NO: 24889
  source 1..120: mol_type = other DNA

SEQ ID NO: 93665 - DNA, 120 bp, synthetic construct
  source 1..120: mol_type = other DNA
tgagtgttacagctcataaaagcagcgtgaacccaaagagtgagaagtagcaagatttactgcaaagagcgaaagaacaaagcttccgcagtgtggaaggggaccccagcgggttgccaa

SEQ ID NO: 93666 - DNA, 120 bp, synthetic construct
  source 1..120: mol_type = other DNA
tggtttcaattctaagaaactacctacagtgaatacaaacatgtttcttacccttagtagaattccttttttttttaattatactttaggttttagggtacatgtgcacattgtgcaggt

SEQ ID NO: 93667 - DNA, 120 bp, synthetic construct
  source 1..120: mol_type = other DNA
cttcttttgagaagtgtctgttcatgaccttcacccactttttgatggggttgtttgtttttttcttgtaaatttgtttgagttcattgtagattctggatattagccctttgtcagatg

SEQ ID NO: 93668 - DNA, 120 bp, synthetic construct
  source 1..120: mol_type = other DNA
ggaagcaattgtgaatgggagttcactcatgatttggctctctgtttgtctgtttttggtgtataagaatgcttgtgatttttgtacattgattttgtatcctgagactttgctgaagtt

SEQ ID NO: 93669 - DNA, 120 bp, synthetic construct
  source 1..120: mol_type = other DNA
tcggtggtgatatcccctttatcattttttattgtgtctatttgattcttctctctttttttctttattagtcttgctagcggtctatcaattttgttgatcctttcaaaaaccagctcc

SEQ ID NO: 93670 - DNA, 120 bp, synthetic construct
  source 1..120: mol_type = other DNA
atccttttatattgagcctatgtgtgtctctgcacgtgagatgggattcctgaatacagcacactgatgggtcttgactctttatccaatttgccagtctgtgtcttttaattggagcat

SEQ ID NO: 93671 - DNA, 120 bp, synthetic construct
  source 1..120: mol_type = other DNA
ttctctgtattggttattctagttatacattcttctaaatttttttcaaagttttcaacttctttgcctttggtttgaatgtcctcccgcagctcagagtaatttgatcgtctgaagcct

SEQ ID NO: 93672 - DNA, 120 bp, synthetic construct
  source 1..120: mol_type = other DNA
tttccaggtgcgtccgtcacccctttctttgactcggaaagggaactccctgacgccttgcgcttcccaagtgaggcaatgcctcgccctgtttcggctcgcacacggtgcgcgcaccca

SEQ ID NO: 93673 - DNA, 120 bp, synthetic construct
  source 1..120: mol_type = other DNA
cagaaacacaaacaaatattccccttccctacacacatatactcttacctgtttgtccacactgtcccaccccacacatacacagatactacacacacaccatatccacatctatataca

SEQ ID NO: 93674 - DNA, 120 bp, synthetic construct; identical to SEQ ID NO: 33404
  source 1..120: mol_type = other DNA

SEQ ID NO: 93675 - DNA, 120 bp, synthetic construct
  source 1..120: mol_type = other DNA
gtataatcatattactcttatttttaatagctgaggacactaaatatttaaaggttaaatggcttggctaggccaggcacggtggctcacacctgtaatcccagcactttgggaggccaa

SEQ ID NO: 93676 - DNA, 120 bp, synthetic construct
  source 1..120: mol_type = other DNA
acaattattaaattactccagttttcatctgtcagtttgatgtttgacattgtgtagacatagcttgccagtaaagataattatgaaagattattaaataaagatctccctgacatggat

SEQ ID NO: 93677 - DNA, 120 bp, synthetic construct
  source 1..120: mol_type = other DNA
cccgccttggcctcccagagtgctgggattacaggcgtgagccaacgcgcctggccaaaaataaattttaatatattatacgtatagatatcttcaaactaacctgctatatatagagag

SEQ ID NO: 93678 - DNA, 120 bp, synthetic construct
  source 1..120: mol_type = other DNA
aaaactgcacaaattctctgccccatactacctcccagacacataatacatgcaggagtaggtgtttttgtgcctgttatagtgcatttgagcctgttgttctttactttgctcttgtgt

SEQ ID NO: 93679 - DNA, 120 bp, synthetic construct; identical to SEQ ID NO: 33406
  source 1..120: mol_type = other DNA

SEQ ID NO: 93680 - DNA, 120 bp, synthetic construct; identical to SEQ ID NO: 33407
  source 1..120: mol_type = other DNA

SEQ ID NO: 93681 - DNA, 120 bp, synthetic construct; identical to SEQ ID NO: 33408
  source 1..120: mol_type = other DNA

SEQ ID NO: 93682 - DNA, 120 bp, synthetic construct
  source 1..120: mol_type = other DNA
agcgaatctagttggggggttcccgaaggggaaggcgcctgggctttcaatacatcctcctgaatcatactgcgtttcaggttccttagaaaaatttggatgtgtaaaaagaactcttaa

SEQ ID NO: 93683 - DNA, 120 bp, synthetic construct; identical to SEQ ID NO: 33394
  source 1..120: mol_type = other DNA

SEQ ID NO: 93684 - DNA, 120 bp, synthetic construct; identical to SEQ ID NO: 33395
  source 1..120: mol_type = other DNA

SEQ ID NO: 93685 - DNA, 120 bp, synthetic construct; identical to SEQ ID NO: 33396
  source 1..120: mol_type = other DNA

SEQ ID NO: 93686 - DNA, 120 bp, synthetic construct; identical to SEQ ID NO: 33397
  source 1..120: mol_type = other DNA

SEQ ID NO: 93687 - DNA, 120 bp, synthetic construct
  source 1..120: mol_type = other DNA
ttgaacctgggaggaggaggttgcagtgagccgagatcatgccactgcacaccagcctgggcgacagagggaggcaccatctcaaataaataaataaataaaataaaaaaataaaaaatt

SEQ ID NO: 93688 - DNA, 120 bp, synthetic construct; identical to SEQ ID NO: 33398
  source 1..120: mol_type = other DNA

SEQ ID NO: 93689 - DNA, 120 bp, synthetic construct
  source 1..120: mol_type = other DNA
agctacaagggacaattagaacatctgtaagaataatatgtgtactggatttaaaatgataaagacattaaaatgcatatattcatcatgatacccagaataaaactcactgttaatatt

SEQ ID NO: 93690 - DNA, 120 bp, synthetic construct; identical to SEQ ID NO: 33399
  source 1..120: mol_type = other DNA

SEQ ID NO: 93691 - DNA, 120 bp, synthetic construct
  source 1..120: mol_type = other DNA
actgcatagtctatgaaaatgtgactacaagattcttgtcaattaccatgtctacacaaggtcaggcctgctggtttacaactataatcccaacactttgggaagacaaggtggggggcg

SEQ ID NO: 93692 - DNA, 120 bp, synthetic construct; identical to SEQ ID NO: 33400
  source 1..120: mol_type = other DNA

SEQ ID NO: 93693 - DNA, 120 bp, synthetic construct; identical to SEQ ID NO: 33401
  source 1..120: mol_type = other DNA

SEQ ID NO: 93694 - DNA, 120 bp, synthetic construct; identical to SEQ ID NO: 33402
  source 1..120: mol_type = other DNA

SEQ ID NO: 93695 - DNA, 120 bp, synthetic construct; identical to SEQ ID NO: 33403
  source 1..120: mol_type = other DNA

SEQ ID NO: 93696 - DNA, 120 bp, synthetic construct
  source 1..120: mol_type = other DNA
cggcgatgcaggtcttccacagctaaggtaggtgcagttttaagacgtgtctttcgcatattattatccttattttaaaaagccgtttaaacaatttgacttgcagtggctctccagcaa

SEQ ID NO: 93697 - DNA, 120 bp, synthetic construct
  source 1..120: mol_type = other DNA
taaagcttggttggggttgcattatgagatttttttttcccttccttcatctcctggcctcggataagataaggcttgggggatgcacgaaataatccaagtgattgattagacctggca

SEQ ID NO: 93698 - DNA, 120 bp, synthetic construct
  source 1..120: mol_type = other DNA
tgcggttttccaggaggccgatctaccccagggacactctcatccttcaggcggtctcctggacgccctttcctccccttgcctcccagcctgacctggctctttcgcccctcggagaac

SEQ ID NO: 93699 - DNA, 120 bp, synthetic construct
  source 1..120: mol_type = other DNA
tgggggatgtttttttctctgtgtactccaatcttatgctttttgaaggcatccattgcccgtagggtttacataagaccgcgttgcattatattttcttaaaagtggggtggtgtgcat

SEQ ID NO: 93700 - DNA, 120 bp, synthetic construct
  source 1..120: mol_type = other DNA
atgcttcatatacagtaggccctaaaaccagtaacctagctgatttttacccaaacctaagaatataacagatacttggtaagggactagtggctgcataaggtagataattatgttatc

SEQ ID NO: 93701 - DNA, 120 bp, synthetic construct
  source 1..120: mol_type = other DNA
gcagtgtaggaaacccttcctcatttttcttggggcagagtggcacacatgaatgagaaaaaaagaaggcgatacctcctagcagtttgtcattgtgacattcataggctttgaataaat

SEQ ID NO: 93702 - DNA, 120 bp, synthetic construct
  source 1..120: mol_type = other DNA
tctggaaatgtggagaagtggcccaggatcttgtttgggttgttctatttaaaatgtacattacataaagaaatcatgatttgtcaaagtaacagagtggtatttttggcttacaatggg

SEQ ID NO: 93703 - DNA, 120 bp, synthetic construct
  source 1..120: mol_type = other DNA
cctgaagctacactgtaagaatggcagtatgtatgagcaggtgtatacacatacatgtgcacatatgccaacacactaactaggaactagtccttgcagaaaatgtttttctcagccatt

SEQ ID NO: 93704 - DNA, 120 bp, synthetic construct
  source 1..120: mol_type = other DNA
cttttacagtgatcaaactgggcactctttactaaggctaaattcataacccttttatctgactttgtagaagattctcacctttatttctctcggtgcccaaaggctggcctgagagac

SEQ ID NO: 93705 - DNA, 120 bp, synthetic construct
  source 1..120: mol_type = other DNA
gcataagagctataaatgactgtaatatgatagcaagcacatcatggcactctgtgaatcctgagaaatcgacctttcgtgtgttttgtgaaccagtcaggaaagctcatttgagtggga

SEQ ID NO: 93706 - DNA, 120 bp, synthetic construct
  source 1..120: mol_type = other DNA
actttgtcaaaccctacatttataaaaccttagttttcattttagtaagttatatggatgaatgcacacataaagcagattaccttgattcaacaaaaacattcaaatattagtgatcct

SEQ ID NO: 93707 - DNA, 120 bp, synthetic construct
  source 1..120: mol_type = other DNA
ctttaggtatatacgcagtaatgggatggctgagtcatatggtatttatggttctagatccctgaggaatctccacacactcttctgcaatggttgaactgattcatagccaacaaacat

SEQ ID NO: 93708 - DNA, 120 bp, synthetic construct
  source 1..120: mol_type = other DNA
aggtttgtcctaggcttgaggtagcaggcttgctcttttggctgaagaagccctaacatgcataccagtattgcaaatttacccacatgccaattgtatgctgtggaaagaaatgaataa

SEQ ID NO: 93709 - DNA, 120 bp, synthetic construct
  source 1..120: mol_type = other DNA
cctaccttaaatgaataaccagaatatgacaattgaaaattaatgtaaaattacacaaatagttatgtgtctagatatttcacaatcaaatgtatgtgggcatttaatctagtcagatcc

SEQ ID NO: 93710 - DNA, 120 bp, synthetic construct
  source 1..120: mol_type = other DNA
tgtggacagatttgactggtgtcattctgttgctgaatcattccaaggtatgcacttaccttttctctcttgaaacagcttatgcaaaaacaaacaactaaatagagaagcagtttgcaa

SEQ ID NO: 93711 - DNA, 120 bp, synthetic construct
  source 1..120: mol_type = other DNA
gaggttacagtgggctaatatcatgccactggactccagcctaggcaacagagtgagtctctgaaaaaaagaaaaaaatatagaaaaatgttcaagtatttactgtccacatctttcagc

SEQ ID NO: 93712 - DNA, 120 bp, synthetic construct
  source 1..120: mol_type = other DNA
aacattgggattacaggcgtgagccaccgcacttggctctatctttctgcaaaaacctagcaattctaattctctctccatctatgtctagaccagggagatataatcaagagaaaagaa

SEQ ID NO: 93713 - DNA, 120 bp, synthetic construct
  source 1..120: mol_type = other DNA
ctttagtatttaacctcatttatgtttccattcttattatggcatgatgcaatttatttaaagatagtttggtgagaaccattcactcccctggaaaggaggctgaagcccaaaagtcaa

SEQ ID NO: 93714 - DNA, 120 bp, synthetic construct
  source 1..120: mol_type = other DNA
gaatagcacatccactcagaggccccatctgaaggtcaccaacatcaaaaaacaaaggtagatgaatccatgaagatggagagaaaccagtgtaaaaggctgaaaattccaaaaaccaga

SEQ ID NO: 93715 - DNA, 120 bp, synthetic construct
  source 1..120: mol_type = other DNA
aaatacaatcctttacagacaagcaaatgctgagagattttgtcactatcaggcctgcgttactggtgctcctgaaggaatcagtaaatatggaaagaacaactggtaccagtcactgca

SEQ ID NO: 93716 - DNA, 120 bp, synthetic construct
  source 1..120: mol_type = other DNA
tgtacaccatagaatactacacagccataaaaaggatgagttcatgtcctttgcagggacttgggtgaagccggaagccatcattcttagcaaactaacaaagggacagaaaaccaaaca

SEQ ID NO: 93717 - DNA, 120 bp, synthetic construct
  source 1..120: mol_type = other DNA
cacacatgcgcacacacacgtgcatgcatacacacatgtgtacgcacacacaatcaactgcaattttttcctctttaccaacccacagttagctgaaattatcattagggtatttctagg

SEQ ID NO: 93718 - DNA, 120 bp, synthetic construct
  source 1..120: mol_type = other DNA
aacagtccccagagtgtgatattccccttcctgtgtacatgtgatctcactgttcaattcccacctatgagtgagaatatgcggtgtttggttttttgttcttgcgatagtttactgaga

SEQ ID NO: 93719 - DNA, 120 bp, synthetic construct
  source 1..120: mol_type = other DNA
aacatttaggtctttaatccatcttgaattaatttttgtataaggtataaggaagggatctaatttcagctttctacatatggctagccagttttcccagcaccatttattaaataggga

SEQ ID NO: 93720 - DNA, 120 bp, synthetic construct
  source 1..120: mol_type = other DNA
tcttcagggattcaggagcaatgtagctggccagttctagctcaggatctctcatcattttgtaatgaaattgtagacagggcttgcagttttatgatggtgtgagagaatctcacttat

SEQ ID NO: 93721 - DNA, 120 bp, synthetic construct
  source 1..120: mol_type = other DNA
ggaggcattttttttaacctgaaattggcatttccttttttacctgaaacatatccattatccagacagtttcagtgaggcacggtggccaaagtaggaggatgacttgagttcaggagt

SEQ ID NO: 93722 - DNA, 120 bp, synthetic construct
  source 1..120: mol_type = other DNA
cctgctcatagcatctcctctcagtcccttatcttgggtttgaatcccctctctttcccatccccaatgtaaatcactttcagaaataacagttacttccatttcttcttctgtgataca

SEQ ID NO: 93723 - DNA, 120 bp, synthetic construct
  source 1..120: mol_type = other DNA
gcttcctggcatgtaagtgcatgtgcacatgtggcatttactgagcatgcatgcattgatgtgagaatgtattttcttcctttccacgatgaactgccacagaatggttaaagtttttca

SEQ ID NO: 93724 - DNA, 120 bp, synthetic construct
  source 1..120: mol_type = other DNA
gggagttctcctggataatatcctgaagagtgttttccagcttggttccattcttcctataactttcagatataccagtcaaacataggtttgctctttttacatagtcctgtctcacgt

SEQ ID NO: 93725 - DNA, 120 bp, synthetic construct
  source 1..120: mol_type = other DNA
tagatctctgggacccagccaaagcagtgtttaggtggaaatttataacactaaatgcccacaggagaaaatgggagaagatctaaaaccgacacactaacatcacagttgaaagaactg

SEQ ID NO: 93726 - DNA, 120 bp, synthetic construct
  source 1..120: mol_type = other DNA
tccttcaagctaaaaatcctcaataaactaggtattaatggaacgtatctctaataagagctatttatgacaaagccatagtcaatatcatactcagtgggcaaaagctggaagcattcc

SEQ ID NO: 93727 - DNA, 120 bp, synthetic construct
  source 1..120: mol_type = other DNA
agtaacactatactaaatttttacctactatcattaaaaaataatgacttactcaaagctctgacactcattagagcaggttgatatggtagaaaattctagccctatgcaactggagtg

SEQ ID NO: 93728 - DNA, 120 bp, synthetic construct
  source 1..120: mol_type = other DNA
ggaaacttctttttatattcatagttgtatttcattctgccagcagattaggcagattcatcctctcccactttccagtggtagaaacaggtgtcctgaggcagtgaagtagttgttgga

SEQ ID NO: 93729 - DNA, 120 bp, synthetic construct
  source 1..120: mol_type = other DNA
aaataaatacacctgtcaagatatactataatgcttttgtagtcaaaacaatgatggggctagcattgtgactcatgcttgtaatcccagcactttgggaggccgagggaggtggatgac

SEQ ID NO: 93730 - DNA, 120 bp, synthetic construct
  source 1..120: mol_type = other DNA
ctttttgtttgtccctctttttcccttttctatgggcacagtggataacctggaatgatctcccaatttcaaggtctgctgactgggaatcttaattccacctgcctctttcattcaaat

SEQ ID NO: 93731 - DNA, 120 bp, synthetic construct
  source 1..120: mol_type = other DNA
gtcgataaggatataacaggaaggggttaaaaacaattattatccttgtgggagtctgtgtcttaggcaaataaagaaacttcagctactttgggagaggtagtgggagagggggaggtt

SEQ ID NO: 93732 - DNA, 120 bp, synthetic construct
  source 1..120: mol_type = other DNA
aaaccctagttaccactgagacgtcccattgtttagtcatttcagcaccactgcatagacttccgtaatatgagaaagagacttaatatcctagtcatgaggagcacagggtttagggaa

SEQ ID NO: 93733 - DNA, 120 bp, synthetic construct
  source 1..120: mol_type = other DNA
acaatgccctaaatgtcttgagtttgattaattatcccaggtctctttcttctgacaattcaggtaaagagtagaatgcagctcttccttataaaaggcagctttgtgaggccatttcaa

SEQ ID NO: 93734 - DNA, 120 bp, synthetic construct
  source 1..120: mol_type = other DNA
gatccctctgaagacaatggcaatgtgtttgccaaggggattaattagacgtattttgcaatactgtttatagaatggaaaacaagaaattgagaggaggtagttggaagtgtgcacttc

SEQ ID NO: 93735 - DNA, 120 bp, synthetic construct
  source 1..120: mol_type = other DNA
ccagcttcatccatgtccttgcaaaggacataaactcatccttttttatgtattccatggtgtatatgtgccatattttcttaattcagtctatcattgatggacatttgggttgtttcc

SEQ ID NO: 93736 - DNA, 120 bp, synthetic construct
  source 1..120: mol_type = other DNA
accacttgtgtgtgacagctttgtcaaagatcagatggttgtacctgaggcctccattcttttccattggtctatatatctgttttggtacccataccatgctgatttgtttactgtagc

SEQ ID NO: 93737 - DNA, 120 bp, synthetic construct
  source 1..120: mol_type = other DNA
ctgtttaccagtattttattgaggagtttcacattgatgttcatcagggatattggtctgaaagtttatttgtctgaagtgtctgtgccaggttttggtatcaagatgatgctggcctca

SEQ ID NO: 93738 - DNA, 120 bp, synthetic construct
  source 1..120: mol_type = other DNA
accattgcttgagtaggtggttttatggccacagtataaacaaagctgccaggaagttcaaacttggtggaacccactgcaactcagcaagttggctgtgcccagacttccagatttctc

SEQ ID NO: 93739 - DNA, 120 bp, synthetic construct
  source 1..120: mol_type = other DNA
aagaccaaatctatgcttgattggtgtacctgataatgacagggagaatagaaccaagctggaaaacacccttcaaatattatccagtagaacttccccaatctagcaagatagtccaag

SEQ ID NO: 93740 - DNA, 120 bp, synthetic construct
  source 1..120: mol_type = other DNA
agggatctatgcagcaagaagcactgactatcctacatagatatgcatccaatacaggagcatccagattcataaagtaagttcttagagaccgacaaagagacttgcactcccacacaa

SEQ ID NO: 93741 - DNA, 120 bp, synthetic construct
  source 1..120: mol_type = other DNA
caaagtgctcggattacaagtgtgagccaccacgcccagattttttttttttttttttattgtaacagggtctcattctgtcacccagactgaagtgcagttgtgccatctcagctcact

SEQ ID NO: 93742 - DNA, 120 bp, synthetic construct
  source 1..120: mol_type = other DNA
tgagcccttcaggagaatgagatacagcagagtcactgcttgtgttcttgagatgattggatgacaaagagggaaatgataatgttaactgaggaaagtctagaactgcaggttaccata

SEQ ID NO: 93743 - DNA, 120 bp, synthetic construct
  source 1..120: mol_type = other DNA
catgtttctgcaaaggacctgattttgttcgttttcatggttgcatagtattccacagtgcatgtataccacattttctttattccaccactgataagcatccaggttgactcatgcctg

SEQ ID NO: 93744 - DNA, 120 bp, synthetic construct
  source 1..120: mol_type = other DNA
tctgaaccccaacaacacacattgttttaacttcatacaaaacacttagatcagttgggtccaaacatgggtttatacactgtgtggcaaaagtatggtccttccctctactccaaaggg

SEQ ID NO: 93745 - DNA, 120 bp, synthetic construct
  source 1..120: mol_type = other DNA
atttgcatttctctgatggccagtgatgatgagcattttttcacgtttctgttggtggcataaatatcttcttttgagaagtgtctgttcatattctttgcctactttctgatggggttg

SEQ ID NO: 93746 - DNA, 120 bp, synthetic construct
  source 1..120: mol_type = other DNA
gttggattcctaggtattttattctctttgaagctattgtgaatgggagttcattcatgatttggctctctgtttgtctgttattggtataagaatgcttttgatttttgcacagtgatt

SEQ ID NO: 93747 - DNA, 120 bp, synthetic construct
  source 1..120: mol_type = other DNA
ttagtcttgggaggttgtatgtgtctaggaatttatccatttcttctagattttctaatttatttgcgtagagttgtttatggtattctctgatggtagtttgtatttctgtgggatcgg

SEQ ID NO: 93748 - DNA, 120 bp, synthetic construct
  source 1..120: mol_type = other DNA
acttggtacagaggtgtgttcagttcctggatatcctgtttagtttctgtgtggctgatctgtgtaatgttgacagtggggtgttaaactctctcattattattgtgtgggagtgtaagt

SEQ ID NO: 93749 - DNA, 120 bp, synthetic construct
  source 1..120: mol_type = other DNA
gtgggtaacccaacctttctctctggctgcccttaacatttttctttcatttcaaccttggtgaatctgaaaattatgtgtcttggagttgctcttcttggggagtatctttgtggcgtt

SEQ ID NO: 93750 - DNA, 120 bp, synthetic construct
  source 1..120: mol_type = other DNA
ctcttccaagctgtcagacagggatatttaagtctgcagagttttgtgctgccttttgtttggctatgcccttcccccaggggtggagtctgcagagacaggcaggccttcttgaagtgt

SEQ ID NO: 93751 - DNA, 120 bp, synthetic construct
  source 1..120: mol_type = other DNA
agtgagggtgagggcctaggctccttgtttgtaagggaattgtctacactgtgcatactaatgatcatcagctttcttgtccttccttcaaagttgaaagtcaccgtactccttcaagtc

SEQ ID NO: 93752 - DNA, 120 bp, synthetic construct
  source 1..120: mol_type = other DNA
tggcatgagattgtatctcattgtggttttgatttgcatttatctaatacaccatgaaatatatgcagccatgaaaaaggatgagttcgtgtcctttgcagggacatagatgaagctgga

SEQ ID NO: 93753 - DNA, 120 bp, synthetic construct
  source 1..120: mol_type = other DNA
tcacctcccgccaggcaccatctccaacactggggattagaattcaatatgagatttgggtgaggatacagatgcaaaccgtctcaagaatttgtaatttcatagaatgcttcatgtttt

SEQ ID NO: 93754 - DNA, 120 bp, synthetic construct
  source 1..120: mol_type = other DNA
gcactgcagcctgggcaacagagcaagaccctgtctctaaaaacaacaacaaacaaacaaacaaacacggggcaaatagagtgggggttgcccataggtaattaataggtaatatctaaa

SEQ ID NO: 93755 - DNA, 120 bp, synthetic construct
  source 1..120: mol_type = other DNA
gaatatgatagttaaaagcattatttctcaaatgtaccttcccattggaatcagctggagaatgtaataagtattaatgcctgtgctatggtcctccagagatactgacttgcttggtct

SEQ ID NO: 93756 - DNA, 120 bp, synthetic construct
  source 1..120: mol_type = other DNA
ctgactgcacatgaggttaaattaaatataattttctcagtttgcatttcccaggcagtcatcctaagtggcttcttgaaggcggtctgtgcattccgctatctaattctgtgatgtcct

SEQ ID NO: 93757 - DNA, 120 bp, synthetic construct
  source 1..120: mol_type = other DNA
catgtaatcccagtactttgaggggctgaggcaggaggattgctttaggccagagttctagaccagcctgcaacatagggagatccatctcttcaaaacataaaaaattaattagacatg

SEQ ID NO: 93758 - DNA, 120 bp, synthetic construct
  source 1..120: mol_type = other DNA
gagaggcaagtgatagttcccctcttcttgggtttcaggaagggggaagatttggccacttgtgaaataattttggagcttctataaccttgagcctttcttcttattttttcctggact

SEQ ID NO: 93759 - DNA, 120 bp, synthetic construct
  source 1..120: mol_type = other DNA
gtaccactctgtccaggtaatttttaaaatctttttagaaacaaggtattgccatgttgcccaggctggtctggaactcctaggctccactcccgcattggcctccaaaagtgctggtat

SEQ ID NO: 93760 - DNA, 120 bp, synthetic construct
  source 1..120: mol_type = other DNA
gaacccatagaatgtatctaaagacacctaggtggcaaaaggtaaatgcttgagggtatgataccccattctccatgatgtgattgcatacctgtatcaaaatatctcatgtacctcata

SEQ ID NO: 93761 - DNA, 120 bp, synthetic construct
  source 1..120: mol_type = other DNA
ctgtcagagagagcgtcacactgaagtaggcacttcttacatacagctgtctgcctaaaatagagtaactttagcaaataggatctgtgatatagaaattggaaactctagccagggttg

SEQ ID NO: 93762 - DNA, 120 bp, synthetic construct
  source 1..120: mol_type = other DNA
gacgttggctgaaactaagactctagaactttactgctacatcaatgaatgacaagtctctctattcagcatgaaatccctgcagacaaaaaccacagggactacatcatgaaggctatg

SEQ ID NO: 93763 - DNA, 120 bp, synthetic construct
  source 1..120: mol_type = other DNA
tcttacatggcaacaggcaaaaagagagagcttgtgcaggggaactcctctttaaaaaaccatcagatcttgtgacctcatagttcacatgagaacatgacaatgaataagtcatgggtg

SEQ ID NO: 93764 - DNA, 120 bp, synthetic construct
  source 1..120: mol_type = other DNA
ctccatgtccccatcagattagttagatacagagtttcgacacacaggttctccaaggccccaccagagcagctagatacagagtgtcgattggttcattcacaaaccttgagctaaaca

SEQ ID NO: 93765 - DNA, 120 bp, synthetic construct
  source 1..120: mol_type = other DNA
tcactcctctccctccacacctccctgcaagctgaaggagtgggctccagccttggccagcccagaaaagggctcccacagtgcagtggaggggctgaagggcccctcaaatgccaccaa

SEQ ID NO: 93766 - DNA, 120 bp, synthetic construct
  source 1..120: mol_type = other DNA
ttagaaagactaaggtgcatgtgcctgtccagttagtggggaggcagatataggttgacattccacataagaagaatatgccttggctgggtagacagaactggttatgtatgttaaaaa

SEQ ID NO: 93767 - DNA, 120 bp, synthetic construct
  source 1..120: mol_type = other DNA
caacagtcatttgccagggaagtattggactggtttaacagagtgtgagttaagttgagagtcttgtagaggtaattaggagctagtgaaaggggaggggtgattgtatgaggtttccaa

SEQ ID NO: 93768 - DNA, 120 bp, synthetic construct
  source 1..120: mol_type = other DNA
tccctagtgccttggagattccctgagttatcgtggctttaaaagctggaacattctcactctgtaagctttggggaagcctgaatctaggaattattaggactttaatcacttcctgag

SEQ ID NO: 93769 - DNA, 120 bp, synthetic construct
  source 1..120: mol_type = other DNA
aattacaactgaggagatgggagaaatacctgattacaggctgccccaggattcctcagatggtaactgaccttgaggacagtcgtccaggacaggagattaacactgagaaggctgtgc

SEQ ID NO: 93770 - DNA, 120 bp, synthetic construct
  source 1..120: mol_type = other DNA
ctttcttcagctgtcattctatcatttacttgactaagacaccaggtatctccaaactcctaggctgcagctaaagccgcattcttttcattaaaggccagggtttgaactatcagtagc

SEQ ID NO: 93771 - DNA, 120 bp, synthetic construct
  source 1..120: mol_type = other DNA
atcggaatagttgcactcactgacgcagcaacagaaacactagttttcctcccagaccacatggaggaccgaggaaggtcggatttagtggtccttactgacgcaatgttgaaaacctgc

SEQ ID NO: 93772 - DNA, 120 bp, synthetic construct
  source 1..120: mol_type = other DNA
ctcaccgcttggcaataggcgatggtctcactgcttggcgataggcaaaagtcccttcgtggtcaccaaaatgtgtctggaattgctgggttcttggtctcactgacttcaagaatgaag

SEQ ID NO: 93773 - DNA, 120 bp, synthetic construct
  source 1..120: mol_type = other DNA
aagactctccacgtcctcaccggagcagctagatacagagtttcgattggtgcactcaaatcttgagctaaacacagggtgctgactggtgtatttacaatccctgagctagatataaag

SEQ ID NO: 93774 - DNA, 120 bp, synthetic construct
  source 1..120: mol_type = other DNA
taatatccctgaattacatctgctactccgctgctctacccatctaacaagtaagtgatggagacattgatggttctattagtcagggttctctggagggacagaactaataggagatgt

SEQ ID NO: 93775 - DNA, 120 bp, synthetic construct
  source 1..120: mol_type = other DNA
gcattaaccatcacaatggtgtacaactgactggagttaaagtgagagtcaggctttgaatcatagtcgtaaaactgcacaaattctctgccccatactacctcccagacacataataca

SEQ ID NO: 93776 - DNA, 120 bp, synthetic construct
  source 1..120: mol_type = other DNA
agtgaattctggggaaaaagtaaatactcatttcaaatcctcatgtacaattcaaataaacaaaaatctggtggcatgtttacagcctgctaatatagattatgtggtgttggaaaacat

SEQ ID NO: 93777 - DNA, 120 bp, synthetic construct
  source 1..120: mol_type = other DNA
tgactttcgctgtttctggctcactaaatcctgctattttctgcagtagggattgctacacttacgttatgctttcctactgcagagaaggacattctgttcccactgggctcctatact

SEQ ID NO: 93778 - DNA, 120 bp, synthetic construct
  source 1..120: mol_type = other DNA
ttgtatatcagtgtgagtttgcttcctgtctcctacctcgcagagaaatgtacttcctcaggattcggttttcagaatgcccttgctatgttatttcaggacaaacatagttctgagcaa

SEQ ID NO: 93779 - DNA, 120 bp, synthetic construct
  source 1..120: mol_type = other DNA
gtgtgtgtgtgtgtgtgtgtctactttcaccataggattctgtatcttctactttctaatgtgatttaaaattgttttgcagtggggttgcacagaggctcagcatcattgcatgggagt

SEQ ID NO: 93780 - DNA, 120 bp, synthetic construct
  source 1..120: mol_type = other DNA
ttactaagcgcagtgatctttatgggatacttctatgatctgaagacttgtgtccttccagaatccacatgttgacattgtaaacccaaagtgatggtgctaggaggtaggggctttgga

SEQ ID NO: 93781 - DNA, 120 bp, synthetic construct
  source 1..120: mol_type = other DNA
aaaatcaaactcctgggcaagtgatgcttgtggctcagcctcccaattacctggcattacagacatgtaccaccatgcctggccacgtttttactctccaattacttaatatatagtaaa

SEQ ID NO: 93782 - DNA, 120 bp, synthetic construct
  source 1..120: mol_type = other DNA
cacattctcaccaacagtatatgtagccttctcttctctgcagcctcaaagacacctgttgtttttgatgttttatgaacagcctttctgactggtgtgagtttttgatttgcatttctc

SEQ ID NO: 93783 - DNA, 120 bp, synthetic construct
  source 1..120: mol_type = other DNA
attccaagcctttgaaagacaaggccataaacacccaggatatctgattttattcatgataagacccaaataccaaaatacctatgatcagggctcaccttaattaagtatgtatcttaa

SEQ ID NO: 93784 - DNA, 120 bp, synthetic construct
  source 1..120: mol_type = other DNA
aagccccggtgtgtgatgttccacttctccatgttcatgtgttctcattgttcaactcccatttatgagtgagaacatgtggtttttgcttttctgatcctctgtttgctgagaataatc

SEQ ID NO: 93785 - DNA, 120 bp, synthetic construct
  source 1..120: mol_type = other DNA
catgaagtctttgcccatgcctatgtcctgaatggtattgcctacattttcttctagttttatgattttttctcttatggttaggtctttaatccatcttgagttaatttttgtataagg

SEQ ID NO: 93786 - DNA, 120 bp, synthetic construct
  source 1..120: mol_type = other DNA
ctggccagaactttcaatactatgttgaataagagtggtgagagagggcatccttgtttgtgctgattttccaagggaatgcttccagcttttaccaattcagtatgatgttggctatgg

SEQ ID NO: 93787 - DNA, 120 bp, synthetic construct
  source 1..120: mol_type = other DNA
aattgcaatgttagggggttgattttacatctttcttgctttctcttgtggtcatttagtgctctaaatttccatttgaacactgctttaaatgtgtcttagagattctggtacattgta

SEQ ID NO: 93788 - DNA, 120 bp, synthetic construct
  source 1..120: mol_type = other DNA
tctgagcctatgttttactttgcctgtcagattggtctcctaaatacaatacaccaaagggtcttgacccattattcaatttgccagtctgtgtcttttaattggggcatttagcccatt

SEQ ID NO: 93789 - DNA, 120 bp, synthetic construct
  source 1..120: mol_type = other DNA
ttcttagcttccttacatggggttagaacatgctcccttagctcagaggagtttgttatttcacaccatctgaagcctacttcagtcagtttgtcaaactcattctctgttcggttttgt

SEQ ID NO: 93790 - DNA, 120 bp, synthetic construct
  source 1..120: mol_type = other DNA
tgcggttccaggcagaactggggcatggaagaaacaaaaacaaaaacaaaaacaaaaaaaactcctgctgctagctcagtgtctgcccaaatggctgcccagtttgtttgtttgtttgtt

SEQ ID NO: 93791 - DNA, 120 bp, synthetic construct
  source 1..120: mol_type = other DNA
gtctgttcatatcctttgcccactttttgttggggttgtttgctttttcttgtaaatttgactttgagttgtttgtagattctggatattaaccctttgtcagatgggtagattgcaaca

SEQ ID NO: 93792 - DNA, 120 bp, synthetic construct
  source 1..120: mol_type = other DNA
gaatgggagttcacgcatgatttggctctctgtttgtctgtgaatggtgtatgtaattgattttgtatcctgagactttgctgaaattgcttatcagcttaaggagacttggctttgaga

SEQ ID NO: 93793 - DNA, 120 bp, synthetic construct
  source 1..120: mol_type = other DNA
atttgtgtggaggtgtttacagtattctctgatggtagtttgtatttctgtgggatcagtggtgacgtcctttttatctttttttattgcatctatttgattcttctctctttttttctt

SEQ ID NO: 93794 - DNA, 120 bp, synthetic construct
  source 1..120: mol_type = other DNA
ttttttttttgctttctatttgcttggtagatcttcctccatctttttattttgagtctatttgagtctttgcacgtgagatgggtctcctggatccactccagacgctgtgtgcctgag

SEQ ID NO: 93795 - DNA, 120 bp, synthetic construct
  source 1..120: mol_type = other DNA
tcctacttctgctcaccctccatgggacacatccactctctaaccagttccaatgagatgaactgagtacctcagttggaaatgcagaaatcacctgccttctgatttgtctcactagaa

SEQ ID NO: 93796 - DNA, 120 bp, synthetic construct
  source 1..120: mol_type = other DNA
taaggcatgggctggaattcctcatggaactgacattataaacctgggaagaaatctacccactgaattccacttgagctgtctgtttcagcaactgttcaatactttgaggttacatac

SEQ ID NO: 93797 - DNA, 120 bp, synthetic construct
  source 1..120: mol_type = other DNA
gtacaactaatgcctgtgacataagtttacctgtatggcaaacttgcacacctacccctgaagccaaaataaaagttataaaaaaggtgatggtctcacctattctcttggggaaggctc

SEQ ID NO: 93798 - DNA, 120 bp, synthetic construct
  source 1..120: mol_type = other DNA
gtgcacttgagtagaacaaggaaaattcgtgtccaaagtctacactcttttcatttgatgattttccccttgtggcctgataaatatccacatcacaatgacaggatggcctggatgcat

SEQ ID NO: 93799 - DNA, 120 bp, synthetic construct
  source 1..120: mol_type = other DNA
ttcattattcttgtctgctttctccctcctttaggttgcattggagttttcgaaagacttatctttctgcaggctcgcctctgagctttgtctccttggagccacctcacttagacagct

SEQ ID NO: 93800 - DNA, 120 bp, synthetic construct
  source 1..120: mol_type = other DNA
ttgggacatctactggatggacaaaactataaataatgactttattttcatatattacctaattaatgttttataattttatttgcagatgaaaattaacatgagcatatagtgttgcat

SEQ ID NO: 93801 - DNA, 120 bp, synthetic construct
  source 1..120: mol_type = other DNA
ttagtggtttctagaatattgcccttgtcattagggtgacagatctcccaatcatctcataaaatccaggtctgaatgtgactgaaggagtcaaactgacgtttggatgctgtacttcca

SEQ ID NO: 93802 - DNA, 120 bp, synthetic construct
  source 1..120: mol_type = other DNA
agtgaatgaactctgcattcataacaacctactgaaatgttggcatcacgctgattctctccaaaggccttctcttaggcagtatctgaattcatatcagtgcttttgtttagcaggata

SEQ ID NO: 93803 - DNA, 120 bp, synthetic construct
  source 1..120: mol_type = other DNA
aagatattgtattaaatataaagcttggaagagaaaaagccgtaagttgagtccagggtgtcttggggaatggacagagccaaggaaccacttccggagtgatttacacctgtgctttct

SEQ ID NO: 93804 - DNA, 120 bp, synthetic construct
  source 1..120: mol_type = other DNA
attagctagatatagagtgccgattgctgcacatacaatcctccagctagacgtaaaagttctccaattcccagtcagcctggtgtctcagcctgtgatcccagcactttgggaagcgag

SEQ ID NO: 93805 - DNA, 120 bp, synthetic construct
  source 1..120: mol_type = other DNA
tgctagcacgttgtcacctctcaatgggactgaaaaccctgggaaatataaagaaaaaatataaatggaagtcattattgcccaggtgcggtggctcatacctctaatctttagtaggcg

SEQ ID NO: 93806 - DNA, 120 bp, synthetic construct
  source 1..120: mol_type = other DNA
gctcactgcagcctcgactttctgggttcaaagaattctttcatctcagatttctgagtagctgggactacaggtgcactccaccacacctggctaatattttgattttttattttgtat

SEQ ID NO: 93807 - DNA, 120 bp, synthetic construct
  source 1..120: mol_type = other DNA
gttatatgccaggcaagctttagaggctgagatttcaagtttacaagcatttctaattttgagtgataggtacttgtaggcagaagaatcatggtccttgagagatgtgcatggccttcc

SEQ ID NO: 93808 - DNA, 120 bp, synthetic construct
  source 1..120: mol_type = other DNA
gtgattctaccacctcagcctcatgagtgtctgggactacaggctgatactgtattaagcttcagagaagaagcatgtccaggttcctgcaaattagaaaatggtagcagatatatatat

SEQ ID NO: 93809 - DNA, 120 bp, synthetic construct
  source 1..120: mol_type = other DNA
atttcttattttcctacttacaaacactgctgacaaaatcttctgagctctccattccttccagctacaacttaacctgtggtctctgctgggcaaagtgactcaccttttgaatgtacg

SEQ ID NO: 93810 - DNA, 120 bp, synthetic construct
  source 1..120: mol_type = other DNA
actatgttaacagagtgagaccgatgttttaaccaatcaacatcgacatgcaactaggtgacaattattaaattactccagttttcatctgtcagtttgatgtttgacattgtgtagaca

SEQ ID NO: 93811 - DNA, 120 bp, synthetic construct
  source 1..120: mol_type = other DNA
gccaagctatttactatttattcattttttattttggagacatagtcttgctctgttgcccaagttggagtgcagtgtggtgcagtatccacaacctctgtctcccaggttcaagagatt

SEQ ID NO: 93812 - DNA, 120 bp, synthetic construct
  source 1..120: mol_type = other DNA
ccttattatttcaatctaatgttctgtattgaggttcagagaagcaggtccaggtttccacaaattaaaaagtggaggattgctcctgtaatcccagtactttgggagcctaggttgggg

SEQ ID NO: 93813 - DNA, 120 bp, synthetic construct
  source 1..120: mol_type = other DNA
tagacaaggacttaggtgagtgttaagtgggtatgcagagagatctaaccccactgctggaaaaagtgagtgggaaagtcccattgatatgtgacccaactaaaccaacattctataaaa

SEQ ID NO: 93814 - DNA, 120 bp, synthetic construct
  source 1..120: mol_type = other DNA
aacatgaggttttgttcttaccaaattcaaaaatactttttatcacctgttgtttaaatcattaacacaaaagatttcagtctcccacaaatttctaatgtagtaaaatcctttcataat

SEQ ID NO: 93815 - DNA, 120 bp, synthetic construct
  source 1..120: mol_type = other DNA
atataattaggagaaatacctaatgtaggtgaaggattcatgggtgcagcaaaccaccagggcacatatatacctatgcagcaaaactgcacgttctgcacatgtaacccagaattaaaa

SEQ ID NO: 93816 - DNA, 120 bp, synthetic construct
  source 1..120: mol_type = other DNA
caccaacaggcctcagtgtgggatgttcctctccctgtgtccatgtgttctcattgttcagttcctacttatgagtgagaacatgcagtgtttggttttctgttcttgtgttagtttgct

SEQ ID NO: 93817 - DNA, 120 bp, synthetic construct
  source 1..120: mol_type = other DNA
agccctgcaaatctctagaaggtgacgatattctttaaaacacttcgaaatcattggaagaaaattacaactgggctctgcctcctggcctggggatgtaattagctgtatagaaaacac

SEQ ID NO: 93818 - DNA, 120 bp, synthetic construct
  source 1..120: mol_type = other DNA
aagaagattttatgaacatctgaattgaacgaacaccatcagcaaaggagactttataactacaggaactcgaaaggtttgaaaccgcaagctgcacatcgaaggcacagtgtctccaag

SEQ ID NO: 93819 - DNA, 120 bp, synthetic construct
  source 1..120: mol_type = other DNA
tccacaccaaatctaataactcattttggggataaggcccaggaatctgcattttttaaaagttggccaccctttccaggtgattctgtaagttgtccctcaatgcacttggagaaatag

SEQ ID NO: 93820 - DNA, 120 bp, synthetic construct
  source 1..120: mol_type = other DNA
ctgcctttgtgcaactccctcccctttgagtgtagggaggaaataggatttccttctgtctcatggaatatgatagaggtaatggaacaccacttccatgattacgttatataagcatat

SEQ ID NO: 93821 - DNA, 120 bp, synthetic construct
  source 1..120: mol_type = other DNA
cctccctttactagcagtacatttaatttagaaaatagtgtcctcaggtttaatcattgccgttaggaacctggcactttggtgccatgtttcttcttttggctttctcagagacgctgt

SEQ ID NO: 93822 - DNA, 120 bp, synthetic construct
  source 1..120: mol_type = other DNA
gttaaagtttggaaagagtttcattgtagagcgttaggcaattggctgacaaaagagcatccagttttttctcaaggaattctgcaaaaagcaaaggaggtcctactcagccatcctcct

SEQ ID NO: 93823 - DNA, 120 bp, synthetic construct
  source 1..120: mol_type = other DNA
ttatctaaaagggggtctgacctccttttagaaatgggaagcaagtgtggacagcataacccatagaccaaatcattcacactttctgtcggtttttaccaaagggtttaatggaacaca

SEQ ID NO: 93824 - DNA, 120 bp, synthetic construct
  source 1..120: mol_type = other DNA
ataaaagcctgtttttaagaccattgtccatatggcttacacaagataacttcctgaagtgacctctaagacgaaatagttgcaaagtatttctgtgttcaattaaattaaagcgtgggc

SEQ ID NO: 93825 - DNA, 120 bp, synthetic construct
  source 1..120: mol_type = other DNA
acaggacagcctccaacccacacaatgatctggcccctaatgtgaacattactgaggtagagataacatgaggtagactatagaagtctatagaaaaagagaatctgagcaaattgtgct

SEQ ID NO: 93826 - DNA, 120 bp, synthetic construct
  source 1..120: mol_type = other DNA
tcatcttatgtagaacaacgtctgtttactactgcttggaatacaaagaggaatttagctgtggccattagaaagtgacaaacagtgtttcttccactatgccataattatagtgagagg

SEQ ID NO: 93827 - DNA, 120 bp, synthetic construct
  source 1..120: mol_type = other DNA
tatgagggagtgatggaaaatcccatcaacgttggcattttttagaaagaaaagaagcttagggaatattttaatgatttggggctaggtctgggggggttcatgcctgtaattccagtg

SEQ ID NO: 93828 - DNA, 120 bp, synthetic construct
  source 1..120: mol_type = other DNA
gggtgacttgctgaccttctatgcatgggtaatagtactctgttgacaggcaagagttgtgtcttccacttgggtcttctaatctgctaaagaaagcaacacacaaaatatagcttacaa

SEQ ID NO: 93829 - DNA, 120 bp, synthetic construct
  source 1..120: mol_type = other DNA
ttttcctgcagtaaggaagcattgcttttgacacatgaaagaaacaaggtattttttcccagtatttgttgtgtcagccagggtcctgataggaaaagatggaatgcaacttgagaaata

SEQ ID NO: 93830 - DNA, 120 bp, synthetic construct
  source 1..120: mol_type = other DNA
tctgcaaataatgaccattttctctctttccttttaatacttgtaaattttaaatcctttctaacttctaccattgtatgacccattgacatctggtgtgaggatgaatgctattggtac

SEQ ID NO: 93831 - DNA, 120 bp, synthetic construct
  source 1..120: mol_type = other DNA
tgtctcccttccttggtcagtcttggcagaagtttgtttatattataaagcttttcaataaactagttttcattttggtaattatatcaactcttttttctctatttcactaatttctgc

SEQ ID NO: 93832 - DNA, 120 bp, synthetic construct
  source 1..120: mol_type = other DNA
gttcaagttattctcatgcctcagccttccaagtagctaggattacaggtgcacaccaccatacctggctaaactttttttattattatttttgagacagagtcttgctctgttgcccag

SEQ ID NO: 93833 - DNA, 120 bp, synthetic construct
  source 1..120: mol_type = other DNA
tatcaatcatgctttttaaactttaactttttttttttcctgacttccagtgtataattttaaaagtttctcttactgacctcattattatactccttttttgctgacctcattattata

SEQ ID NO: 93834 - DNA, 120 bp, synthetic construct
  source 1..120: mol_type = other DNA
cccggatccattttgggaaagtgtctctctgtcttttgccaccaatatgcattgtttgtaggtatctttccatttcagcctgttctttgtgctctccacttcaacaatttcatttctcct

SEQ ID NO: 93835 - DNA, 120 bp, synthetic construct
  source 1..120: mol_type = other DNA
tgaatctaggggtctgagtttgcagtgccccgagatcacagcaatgcacttccagcctggtgcaacagagtgagactccatcacaaaaaaaacaaaaaacaaaatgacaacaacaacaaa

SEQ ID NO: 93836 - DNA, 120 bp, synthetic construct
  source 1..120: mol_type = other DNA
tttccatattgtactctgtgaaaagatgtcactttgtgcagcccacgcttaagaaatggggacctgctattccccccggagggcagagtatctacagaaattacttgaaattattttaca

SEQ ID NO: 93837 - DNA, 120 bp, synthetic construct
  source 1..120: mol_type = other DNA
aatagacatttattattattattttcattgagacagggtctctctctgttgcccagactagagtgcagtggcttgatcatggctcactgcagtcttgactttgtgggctcaagtgatcct

SEQ ID NO: 93838 - DNA, 120 bp, synthetic construct
  source 1..120: mol_type = other DNA
cctgagaggagacactcataaacttgttagccaggattccaaggtacatagaagctgtttctcctgggtgaatattacaaatgcctccaagggcaattgaatttctttctgtctttcatg

SEQ ID NO: 93839 - DNA, 120 bp, synthetic construct
  source 1..120: mol_type = other DNA
ccaaaacctgagagatgagcagggattgaccaactaatgagcagacccacacaccaaattctgcagtcagttccttgcatgacatggaaaattgatttctacaactatgcattacttttc

SEQ ID NO: 93840 - DNA, 120 bp, synthetic construct
  source 1..120: mol_type = other DNA
atcacctatgggtacagtgtttactcttgtgtgattggtaccctagaagcccatatgtaaccagtgtacaatatacccgtgtaagaaacctgtacatgcacccctgaacctaaactaaaa

SEQ ID NO: 93841 - DNA, 120 bp, synthetic construct
  source 1..120: mol_type = other DNA
gagtgcttaagttttttcctagatgttcacagcttttcaaatcatcttcctcagaacactgaatcctgctaattgagtgattttctgattgtcatgtactcacacaattgactaaatgtc

SEQ ID NO: 93842 - DNA, 120 bp, synthetic construct
  source 1..120: mol_type = other DNA
agctcccacaaataagtgagaacatggtataacggtctttctgtgcctcgcttatttctcttaacataataaccaccagttttatccatgttgttgtaaatgacaggatctaattctttg

SEQ ID NO: 93843 - DNA, 120 bp, synthetic construct
  source 1..120: mol_type = other DNA
aggagttgatcagagatctatattcatggtatacttgtttgccatgtctgcttttcctcttcagaatgtaaactccaagactgtgggtctttgttttcttcggtactaccttgcagagtc

SEQ ID NO: 93844 - DNA, 120 bp, synthetic construct
  source 1..120: mol_type = other DNA
acttatagaagaaaataagcattctttgttgttacatatacttcagagccattttagtgctcaaagtttgatagaaattgatacacaggacttgcgcctctgaattggctatcccggaat

SEQ ID NO: 93845 - DNA, 120 bp, synthetic construct
  source 1..120: mol_type = other DNA
gttgtcttctgtagcccaaaggttgaccttggagacacaaaggcaactatgacaatggtttctgcaatagggagatcacattctcactcagaagacatttgcagggtgtgattagtgatt

SEQ ID NO: 93846 - DNA, 120 bp, synthetic construct
  source 1..120: mol_type = other DNA
tttctctactctccatcttattaaaccaggtgtttcaggtttgaggttctgcacatttttctctggggttacacagagggactaaataggtggagtttagggtaaggggatattcacagt

SEQ ID NO: 93847 - DNA, 120 bp, synthetic construct
  source 1..120: mol_type = other DNA
aggtaaatttgtgcataggattccagttggcacagattttttagtgcagaaacaggaagtggaagagggacagggttgaggatgtataattcaacagatcattcaggtccctgttggaga

SEQ ID NO: 93848 - DNA, 120 bp, synthetic construct
  source 1..120: mol_type = other DNA
aagcctgggtaatttatgaagaaaagaggcttaattgacatgcagttcttcatgctgtataggaagcatggctgggaggcctcaggaaacttacagtaatgattaaaggtgaaggggtaa

SEQ ID NO: 93849 - DNA, 120 bp, synthetic construct
  source 1..120: mol_type = other DNA
ttacaaagtgctgttactcaataaatgtggtgaagagcaagctctccagagcagtgccatgcctgtgtctgatgctttccagtatggaaaactgctcagatactaatggtttgtttcagg

SEQ ID NO: 93850 - DNA, 120 bp, synthetic construct
  source 1..120: mol_type = other DNA
aaaaagagacccactttactcctctggaagcacttttgcttccaggaacctatcccacagatatatgcagaaagatgtatgtacatagatgatcattgcaactgaaatttatctcatcag

SEQ ID NO: 93851 - DNA, 120 bp, synthetic construct
  source 1..120: mol_type = other DNA
acctataatcccagcacattgagaggccaaggtgcgtggatcacttgaggttgggagtttgagaccaatctgaccaacatggagaaaccccatctctactaaaaatacaaaattagccag

SEQ ID NO: 93852 - DNA, 120 bp, synthetic construct
  source 1..120: mol_type = other DNA
agttcatatggaaccaaaaaagagcccgcatcgccaaggcaatcctaagacaaaagaacaaagctggaggcatcacactacctgacttcaaactatactacaaggctacagtaaccaaaa

SEQ ID NO: 93853 - DNA, 120 bp, synthetic construct
  source 1..120: mol_type = other DNA
ttataaatcatgctgctataaagacacatgcacacgtatgtttattgcggcattattcacaatagcaaagacttggaaccaacccagatgtccaacaatggtagactggattaagaaaat

SEQ ID NO: 93854 - DNA, 120 bp, synthetic construct
  source 1..120: mol_type = other DNA
cataagctctgtccagacatggaatacagtcggagtttgctaggataatcccaaataccaatacataccagaaaacttactatagcatgagtattgaaggcaaagatgcttttggtatgt

SEQ ID NO: 93855 - DNA, 120 bp, synthetic construct
  source 1..120: mol_type = other DNA
ccatcatctggcaagaccttcttgcacatcatcaaatggcacaggggtaaagagctgaagagagagaacccactcctgcaagccctttttgataatgatattcatctattcatgaattta

SEQ ID NO: 93856 - DNA, 120 bp, synthetic construct
  source 1..120: mol_type = other DNA
cactttgcaccctcctgttggctaaaggtgccccacatcccagagtgtccaagataaaaactgattttacttctcttttctcaccacttatgtaaatagatatctgcctctcatcatttc

SEQ ID NO: 93857 - DNA, 120 bp, synthetic construct
  source 1..120: mol_type = other DNA
ctgggaatacaggtgcataccaccatgcccagctaatttttatatttttttgtggagacagagtcccattgtattacacagtatggtatcaaatttctgggctcaagcaatcctcctgca

SEQ ID NO: 93858 - DNA, 120 bp, synthetic construct
  source 1..120: mol_type = other DNA
catgcgtttataacaaaaaagagagattgacttttttcatttaaattccatgtttctgcttggcatagtggcttatgcctgtaatcccagcactttgggaagctggggtgggagaatcgc

SEQ ID NO: 93859 - DNA, 120 bp, synthetic construct
  source 1..120: mol_type = other DNA
gggtaatgatagtaagagataaaaccagttctcttgagctgttacttagattccataactgaggctgattttgcatccttggcactagatgttattcagctgacagccatggattcccag

SEQ ID NO: 93860 - DNA, 120 bp, synthetic construct
  source 1..120: mol_type = other DNA
tgcagctgtcattagcattgacaccttcccagtatcatggtgcccatgtctccatgtgggttaatctaaagataggctcaggcatattaaattgggaaggttgtcttaggataattcaag

SEQ ID NO: 93861 - DNA, 120 bp, synthetic construct
  source 1..120: mol_type = other DNA
atgacatttgggacaggacatagagccagaccacatcacctaccatttaattagcttactcaactatcctgcaaacattccttagggagcaaaagggacacactcataaatggttttaac

SEQ ID NO: 93862 - DNA, 120 bp, synthetic construct
  source 1..120: mol_type = other DNA
caaagaacagtccctggtatctggcaaaagagaagtatcttcctctgaatcctggtgttggccataagccaaagttctatattaattttcctttttggttgagttgggaagcagttggat

SEQ ID NO: 93863 - DNA, 120 bp, synthetic construct
  source 1..120: mol_type = other DNA
tatggtctgagcacagatgatgctaaacatgggttgtcaacttcagttggcatccatttaaaatgaacacactaaacaccttgagaagaaactgcatgaaaagtaaagagcattatccaa

SEQ ID NO: 93864 - DNA, 120 bp, synthetic construct
  source 1..120: mol_type = other DNA
gagatcaccctgtgtcttagcccatttagttttgcaattaaggaatctctgagactgggcaacatacagagaaaagaggtttatttggcttatggttctgcaggctgtacatcaatcatg

SEQ ID NO: 93865 - DNA, 120 bp, synthetic construct
  source 1..120: mol_type = other DNA
ttcttagttcctacggcagtatttaataaagtgtaactagtgcctgttccaccttgtcattagtcgtttctgggactatcttgcctatatgagtatgggctactgtgggcaagtacaatg

SEQ ID NO: 93866 - DNA, 120 bp, synthetic construct
  source 1..120: mol_type = other DNA
tcctgtggatatggaccttatagagatctttgcatctcagctaacctttgtggagtagatggttcccacatgccagctgcagccttcctgatgagctgagggtcttgtctatattgtttt

SEQ ID NO: 93867 - DNA, 120 bp, synthetic construct
  source 1..120: mol_type = other DNA
ggttcaagcaaccctccctccttgacctctcaaagtattaggatcacagatatgagccaccatacatggccaaagtttcatattattttagaaggtgatgagtgttctgaagtgaactag

SEQ ID NO: 93868 - DNA, 120 bp, synthetic construct
  source 1..120: mol_type = other DNA
aagtccagagtttttggcctaaacactggagaaggtagaggtgatcacaggtgacattggaggatgagctggcagagatattcttcagacattattagatttgaatgtttgagtttgaaa

SEQ ID NO: 93869 - DNA, 120 bp, synthetic construct
  source 1..120: mol_type = other DNA
cgcttttaaggtggggaatctaaccacatgtctgtgtgctgtagggttgtaaagtttatttctcactcatgttcaaggttcactaagggttgactgtggctgtttctgtgtcttcttaat

SEQ ID NO: 93870 - DNA, 120 bp, synthetic construct
  source 1..120: mol_type = other DNA
cagtgccaccatccccatcatggaaatgacaaatgaatcaaacaaaatcatttatcactttgtacaagattcggagggcttgtgtgtctatgatctcaggcctcagaaagagtaaattgg

SEQ ID NO: 93871 - DNA, 120 bp, synthetic construct
  source 1..120: mol_type = other DNA
gctctaccccataaatctgcagacacacctggatcttgaatttccattttactctggaagatgtacagctgcaaacaaaatcaaatcacatttagcgcctttctggaacttccccaagta

SEQ ID NO: 93872 - DNA, 120 bp, synthetic construct
  source 1..120: mol_type = other DNA
tggtgtagttctgtatcaccttcccttagattatattgtacaatgaacaggcagaagatactaagatcttattaaaactagaactttgaacctaaatggggatttatgaagctaaattag

SEQ ID NO: 93873 - DNA, 120 bp, synthetic construct
  source 1..120: mol_type = other DNA
ggccatccatctcttgccattgatatttgtcaattgatgctttttttccttctttcctggtgacttaggaaaggttctgatgctatatctgctacagatgccaccatggccagctaattt

SEQ ID NO: 93874 - DNA, 120 bp, synthetic construct
  source 1..120: mol_type = other DNA
caccttgttggctatgtttcatctgtaatttcatttggaggtagccattgcttcttaactcatgctaaccgtgctttagagctattgatttttagcagctactatgctttcatgcttgca

SEQ ID NO: 93875 - DNA, 120 bp, synthetic construct
  source 1..120: mol_type = other DNA
ttccagccattataatttcacatgtaatatggagggtattgttccaagaaagtgtggtgcctcagtagggttggaggaggcacatgcagctgatatagctaaagaagagtgtgttaaaag

SEQ ID NO: 93876 - DNA, 120 bp, synthetic construct
  source 1..120: mol_type = other DNA
atatgttcatgcatgcatgcctgcatcttcatgtccagcaggggaatctcttgctccagtctgctaagaaaaggaaaaatcttagataacataaccaaggcaatagcatcgcattccatt

SEQ ID NO: 93877 - DNA, 120 bp, synthetic construct
  source 1..120: mol_type = other DNA
ggaatatttccttacaactctctttctgactccttgactcccaattcagatcatctaaaactaagagtaatatttagggattatcttgctgaccattagagaagatggggtcactaacag

SEQ ID NO: 93878 - DNA, 120 bp, synthetic construct
  source 1..120: mol_type = other DNA
catgtgaatactatgtgctaggtgaatgtgtgaaaaatgtcattggctggaagggcttttctcaaattgtccaactttgcagccgtggactaataaccatttttcatgaaccaactctgt

SEQ ID NO: 93879 - DNA, 120 bp, synthetic construct
  source 1..120: mol_type = other DNA
cttcccagtatagtatctaggtagcatccctcagcctgcagactccatgaggccaagaatgcttttagtgtggcccaacacaaatttgcaacctttcttaaaacattgtgagtttttttg

SEQ ID NO: 93880 - DNA, 120 bp, synthetic construct
  source 1..120: mol_type = other DNA
gctctgaatccttgagagcaacaacttggaatacttaaaattatctgtattattaacaatggaggactgtgttcaaaacacaagatatcttaagaagaatttgcatcaagtttggcatca

SEQ ID NO: 93881 - DNA, 120 bp, synthetic construct
  source 1..120: mol_type = other DNA
atgcagataccaagtaaaaggaactagggcttcttggagaaatggctgatttgagaactggggcaggaaatataaaaggtaagcttgtagtgtgtgttgtagtgccagaaaggaggacaa

SEQ ID NO: 93882 - DNA, 120 bp, synthetic construct
  source 1..120: mol_type = other DNA
ctttgaattcatttttacattttggagatgaagtcactcaatattgcccagactgttctcaaactcctggcctctggcaatccttctgcttcagcctcccagtgttttgggattataggt

SEQ ID NO: 93883 - DNA, 120 bp, synthetic construct
  source 1..120: mol_type = other DNA
ttttctcttgtaaacttgtttaagttacttgtagattcggatatcagccctttgtcagatgggtcgattgcaaaaattttctcccattctgtaggttgcctgttcactctgatggtagtt

SEQ ID NO: 93884 - DNA, 120 bp, synthetic construct
  source 1..120: mol_type = other DNA
ctttgaagcaattgtgaatgggagttcactcatgatttggctctctgtctcttattggtatataagaatgcttgtgacttttgcacattgattttgtatcctgagactttgctgaagttg

SEQ ID NO: 93885 - DNA, 120 bp, synthetic construct
  source 1..120: mol_type = other DNA
cttgggcgggtgtatgtgtcgaggaatttatccatttcttgtagattttctagtttgtttgtgtagaggtgtttatagtattctctgatggcagtttgtatttctttgggatcggtggtg

SEQ ID NO: 93886 - DNA, 120 bp, synthetic construct
  source 1..120: mol_type = other DNA
tgcaagtgattaccttggtgtcttcctgggtaagatctttctgtgataagtggttggagtcatagagtaaatagtcaacacactcttgttttcttgagtagcatgattatatggccaaat

SEQ ID NO: 93887 - DNA, 120 bp, synthetic construct
  source 1..120: mol_type = other DNA
acacacatatatacatatacacatatgtgtatatatatatacctgttcaaagttattcggttttgaatacaacattttgagaggtatcttagggcaattaaaagtcaattttatgtgtat

SEQ ID NO: 93888 - DNA, 120 bp, synthetic construct
  source 1..120: mol_type = other DNA
acaatgctctaggactctaatagtaagcacaggaatatgtcaggaagccatacagtctttagattcattttgattcctacctgaaaaagtgtcaattcttgctaaatgtagcaaagcaac

SEQ ID NO: 93889 - DNA, 120 bp, synthetic construct
  source 1..120: mol_type = other DNA
aggctgaccaataaaaatttgtcttacaggagaaaatgtgccttgcaagtagggggaacagcagaattcccaaaagtcctaaaggcaacctgatgatgaaatgagttaagccatgttcac

SEQ ID NO: 93890 - DNA, 120 bp, synthetic construct
  source 1..120: mol_type = other DNA
aatcacttgaatcagaaggcagagctttcagtgagccaaaactgcaccatttcactccagcctgggtgacagagcaagactccatcttaaaaaaaaaaaagacagaacagaacagaggaa

SEQ ID NO: 93891 - DNA, 120 bp, synthetic construct
  source 1..120: mol_type = other DNA
cactgatttgcactgttaaatgtttgcctttacatcctcaaaaagagaccatcatccatgaatgtaaagatttcctgcaaaccaataacagatgttcagccaatcaaaaattggcttgct

SEQ ID NO: 93892 - DNA, 120 bp, synthetic construct
  source 1..120: mol_type = other DNA
tccatatgttgtcttttctaagccttcctggtcaccaaaatctcttcccatatcacaaaaggatgaccttcagtacacaagatgcgttggtactgacctgccagggcttgtaataaaaga

SEQ ID NO: 93893 - DNA, 120 bp, synthetic construct
  source 1..120: mol_type = other DNA
ttctatccccagactggcctaccagaaacagcagagtatcctcaattcgtgcatgcattttcctgccacgttggaatgatctgtatgcatgtctgtctctgatgttcatttcctttttca

SEQ ID NO: 93894 - DNA, 120 bp, synthetic construct
  source 1..120: mol_type = other DNA
cagttcactgcaatgaggttcaaatgattctcccatctcaatctcttgaatagctgggactacaggatgtaccaccatgtctggctaattttttgtgaattttgtagagacgagctttcc

SEQ ID NO: 93895 - DNA, 120 bp, synthetic construct
  source 1..120: mol_type = other DNA
aggacctagaacaagcaaaaagaccttggaataggggaagaaagttggagggctttcatttaccatatgcagaaacctgaaaccggaccctttccttacaccttacacaaaaattaactc

SEQ ID NO: 93896 - DNA, 120 bp, synthetic construct
  source 1..120: mol_type = other DNA
aatgtggtacatatctaccgcggaatactatgcagccataaaaaaggacgtcctttgcaggcacatggatgaagttggaaaccatcattctcagcaaactaacacaagaacagaaaacca

SEQ ID NO: 93897 - DNA, 120 bp, synthetic construct
  source 1..120: mol_type = other DNA
tcaacaagtttttttaaatgctgcgaaaacaattaaaggaggcaaggatagtcttctcaataaatggcactgagacaattggttattcatatgtaaaaagatggatttcaacccttaaca

SEQ ID NO: 93898 - DNA, 120 bp, synthetic construct
  source 1..120: mol_type = other DNA
tggatggaggttgtagtgagccgagatcacaccactgcccaccagtctggctaacaaagtgagactctatctcaaaaaataaaaacaaacaaacaaaaaaaccctacagtgagacacaat

SEQ ID NO: 93899 - DNA, 120 bp, synthetic construct
  source 1..120: mol_type = other DNA
gttcacaccttttaaatctggaagctataaaaagcaaaatggtgctctgtacacaaagagcatagcctagtttttgctatccttaagcctcttcctgcattttgcctatattaaatttcc

SEQ ID NO: 93900 - DNA, 120 bp, synthetic construct
  source 1..120: mol_type = other DNA
caatatcaccccaggaaccaacataaagagaaatgcagacgatataaccagtaatgaccatggtgaagataaaggtattttttgttttttcaaagctcaaccctgatgcatgattttatg

SEQ ID NO: 93901 - DNA, 120 bp, synthetic construct
  source 1..120: mol_type = other DNA
tctgggtagcaaaatgtatggaattctatttatttttcataaacaataaggccctggctggacctttgggtctctgtctgaaaggccaagcccaaaagtgagtgttgcattatccttgct

SEQ ID NO: 93902 - DNA, 120 bp, synthetic construct
  source 1..120: mol_type = other DNA
catatagcagaggacatttcccatagagtatgatgaataagtgatgaatgaagatttttactttatatttgaattttatatgagaaaataaaagacacttttctgccgtggattaaatat

SEQ ID NO: 93903 - DNA, 120 bp, synthetic construct
  source 1..120: mol_type = other DNA
atttgcttggacatcttttcttttttcccccatttttgttctgttaataatttttaactatagcttttcctttcttgtccttatctgtcccttatcgatcatagatagtttcactactat

SEQ ID NO: 93904 - DNA, 120 bp, synthetic construct
  source 1..120: mol_type = other DNA
tactgcgtttccttacttggctttttttccagatattcatgaacagaacagtaagaagcctgttatggtctatatccatgggggatcttacatggagggaaccggtaacatgattgatgg

SEQ ID NO: 93905 - DNA, 120 bp, synthetic construct
  source 1..120: mol_type = other DNA
aggccaagtacatggaaattcaagtttagctcctccttgtttagatgtttcattcattgtcttctaattgtgggttggaaaattaagttacaacttcagggtaaaggttttaataccttc

SEQ ID NO: 93906 - DNA, 120 bp, synthetic construct
  source 1..120: mol_type = other DNA
ggcgaccttgccaggcctcctttccttgtaaggataccagtcattggatttagggtttatcctaaattcaggataattatatctgaagacccttaactaattacatctgcaaagaccctg

SEQ ID NO: 93907 - DNA, 120 bp, synthetic construct
  source 1..120: mol_type = other DNA
tgcaaacaagttgggtgttttagagaaggtggtgttaatggtgtctgattcacagatgctggcttgaaccttactggtgttaggacctatattctggtaagatccaactttaggccatgg

SEQ ID NO: 93908 - DNA, 120 bp, synthetic construct
  source 1..120: mol_type = other DNA
tggctcatatctgttatcttagcacattggaaagctaaggcaggaggacaacttgaagccaggagtttgagaccagcctagacaatatgacaaaactccatctctgctaagaatacaaaa

SEQ ID NO: 93909 - DNA, 120 bp, synthetic construct
  source 1..120: mol_type = other DNA
aaatgccaaacagagagttattatttagatgtgttcattctgtgaacagagagcagtttctattggatctggctgaaataggggcccctggtgtcgtgaaagtggtgtatgtcttcatac

SEQ ID NO: 93910 - DNA, 120 bp, synthetic construct
  source 1..120: mol_type = other DNA
agctataagctagtcacaaaaggacaaatgctgtattattttaccaatatggggttccacctagagttgtcaaattcatagagacaaaaagttgtatggtgtttgtgtggggctgggaga

SEQ ID NO: 93911 - DNA, 120 bp, synthetic construct
  source 1..120: mol_type = other DNA
ctaaactaaactgttctcagggctccttcttccttatgtgttactttcagaggcactttagcttaggacttaatttgactattcacaaccccagggtgtccatttgatctcacagcaaac

SEQ ID NO: 93912 - DNA, 120 bp, synthetic construct
  source 1..120: mol_type = other DNA
tgatctctgggcttatattgcacccgtcacctgaatagtggaacctgtatccagtaggtattatttcatcattcattctccttccatgtcctcatattttgtagcctccagtgtctattc

SEQ ID NO: 93913 - DNA, 120 bp, synthetic construct
  source 1..120: mol_type = other DNA
atgacttttaacaaagagaagggaaacatacagttggtaatttttttaagtgctgtataatttctagttagaaagccacagataagccccgtgctgaagcgaggtggtaaaatagcacaa

SEQ ID NO: 93914 - DNA, 120 bp, synthetic construct
  source 1..120: mol_type = other DNA
tcccttgtggtttcaacggttggttgacatgaccttaaaggccaaagctatgtattcattggtccatttttttgaggaatgcattttatttccacaatgcagcaaagctgctaaccattc

SEQ ID NO: 93915 - DNA, 120 bp, synthetic construct
  source 1..120: mol_type = other DNA
tgacttgtagcatttttgggaatagatgatgcgcttaacatattgctgttcatttatgtgaaaagatatttctgctattgtccaaagagagtgtccatttgcaaaatatctagtgtatga

SEQ ID NO: 93916 - DNA, 120 bp, synthetic construct
  source 1..120: mol_type = other DNA
catcacgatgtacttctgaagtcaagccacttctctctgatgtccaaccattgtctctaatgtccagttggtatttccctctgctgtttatgcctagagtttttatgggcaccaaatgag

SEQ ID NO: 93917 - DNA, 120 bp, synthetic construct
  source 1..120: mol_type = other DNA
ttacatagacacttttgtatgtctaagcatgcctgagcattatactacatggcatggtaatgtggtttggctgtgtcgctactcagatctcatcttgaattgcacttcccataatcccca

SEQ ID NO: 93918 - DNA, 120 bp, synthetic construct
  source 1..120: mol_type = other DNA
gagcttcctaaagccatgggagcccaacttttgcattattgtaacttggatgtgagacatggagtcaaagaagattattttagagctttacaatttggctgccccacaggattttagacc

SEQ ID NO: 93919 - DNA, 120 bp, synthetic construct
  source 1..120: mol_type = other DNA
ggtaggttttgagacagaattcacatgtcagatgagtcacataaatttgcagaatgtctgtgaaggggcatggatatctttggttagtaactacccaaccattttccaaagtggacttga

SEQ ID NO: 93920 - DNA, 120 bp, synthetic construct
  source 1..120: mol_type = other DNA
tgacagactggcctttttgtgatggcttttgcttgcttggcgtatggtaaaattatttatgaaactttaggaaaaaggtttttatattttcttttttctttagtattgtggagtacagtt

SEQ ID NO: 93921 - DNA, 120 bp, synthetic construct
  source 1..120: mol_type = other DNA
tctattagtattattattattcattacagataggatcttgctgcgttgcccactctggtgtgcagctgtgtgatcataactcattacagcctccaactcctgggctcaaacaatcctccc

SEQ ID NO: 93922 - DNA, 120 bp, synthetic construct
  source 1..120: mol_type = other DNA
agagttaattttaatgaggttctttttcagaattcaagaaagctggagaaaagaggcgttgtgtaactcacataccaggaggcatcttctgtagctagtcagcagatgcctcttccactg

SEQ ID NO: 93923 - DNA, 120 bp, synthetic construct
  source 1..120: mol_type = other DNA
gcgatctcagctcattgcaagctctgcctcccagtctcacactattctcctacctcagcctctggagtagctatattatacttatttttaaaatgacagtacggctgaggtattcaaaat

SEQ ID NO: 93924 - DNA, 120 bp, synthetic construct
  source 1..120: mol_type = other DNA
agtgctgaaaaaggtgtttgaataaaattgttttcttaaagcaactatagaggatgagataaaaggatgcacaattacatttcataaattgagagagtttcctaaacaagagagcattcc

SEQ ID NO: 93925 - DNA, 120 bp, synthetic construct
  source 1..120: mol_type = other DNA
ctaacctccctcaaccccaccccaaaaaaagtagaaactaaaaatagaggaattttaagttccacatgatttatgtataagcaaaaaatgggactactgactacagatcacgttagctaa

SEQ ID NO: 93926 - DNA, 120 bp, synthetic construct
  source 1..120: mol_type = other DNA
ttcattggtggaggcagtgctttgaatgactaagctggatatcactttccagggaatccttttagggaatgtgaccatccagctatctctggatgtctttggtgccataaatacttttca

SEQ ID NO: 93927 - DNA, 120 bp, synthetic construct
  source 1..120: mol_type = other DNA
aagaagaggacaatgccttcatgggaagctcctttctgttaaatcggatttgcatacctaaccaaagcatttgcttcagttaaccaagtgagggtggagaaagtcttgcaaaactatagc

SEQ ID NO: 93928 - DNA, 120 bp, synthetic construct
  source 1..120: mol_type = other DNA
atcggtaaccttctttatcctcacccatggctgactactatgcataaagaataggaattctgaccactcaagaatcttaaccatacattcagtctgttgcagtttctcctccattacaca

SEQ ID NO: 93929 - DNA, 120 bp, synthetic construct
  source 1..120: mol_type = other DNA
agggttgctgttcaatatcctacaatgcacaggacacttgcccatagcaatgatctgattccaaatgtcaacggtgctgacatcagtaaaccctgctctaagtcaatgctttttttgtat

SEQ ID NO: 93930 - DNA, 120 bp, synthetic construct
  source 1..120: mol_type = other DNA
tctttttattcttctaattagagacaggatcttgccttgttagaaaggagtacagtggtgcaatcattgctcactggagcatcaaactcctaggctcaagccatcctctgacttcaactt

SEQ ID NO: 93931 - DNA, 120 bp, synthetic construct
  source 1..120: mol_type = other DNA
acgttgacatcattctcacatgttcactgttattagcactgatggatgtaatcttcatgttttcctctgaacactgcatgccaagaaaggggccctctatcctcacggattttctaggca

SEQ ID NO: 93932 - DNA, 120 bp, synthetic construct
  source 1..120: mol_type = other DNA
gaatgcattgagctaagtttcagacatatgcctttccaaatagactatcatgaaggatgctattctggcgcagctatgcattctcttctgtgtaagaatgctcattgtgtagtctctcct

SEQ ID NO: 93933 - DNA, 120 bp, synthetic construct
  source 1..120: mol_type = other DNA
gttagccttccagggtgctgggagtaagacatgagccaccgtgctgaactgcaatatctttttaattagcgggaagtagaaaacagaaattctgcagcatgtttttcttgttaacatgaa

SEQ ID NO: 93934 - DNA, 120 bp, synthetic construct
  source 1..120: mol_type = other DNA
cttttgcagtacacaaatgcctgttttcaccagcagtatgcatcgttcaacatgtagcagtataagaattctgttttcttcttctgatctaatgggtgtatgtggaaactcactgtgtgt

SEQ ID NO: 93935 - DNA, 120 bp, synthetic construct
  source 1..120: mol_type = other DNA
tatctagtatagcaaatattctttccttgttcttttgcaagagagtcttggctatctttggtgtgttgacttttgtatgaattttggcatacccaccttgaaaaataaataagcatctga

SEQ ID NO: 93936 - DNA, 120 bp, synthetic construct
  source 1..120: mol_type = other DNA
gcaatccacccacctcggcctcccaaagtgctgggattacaggcatgagacaccgcacctggccaatttttttttctcttcaatgtcactgtaatgattttattatatatatattacatt

SEQ ID NO: 93937 - DNA, 120 bp, synthetic construct
  source 1..120: mol_type = other DNA
cagaggttgctgtgagccaagatcacgctgctgcactccagcctgggtgacagagcaagaatccatctcaaataaataaataaacaaacaaacaaacaaataaatgatagaaggcttatt

SEQ ID NO: 93938 - DNA, 120 bp, synthetic construct
  source 1..120: mol_type = other DNA
tcgaattgtgtattgtttctatgtgtttacttcaggcctttctgctggctcaggctttgagtgttttctatgtagcatctatttgggtctcattatatttgacttttaactgcagattca

SEQ ID NO: 93939 - DNA, 120 bp, synthetic construct
  source 1..120: mol_type = other DNA
ttctcttacaaaatctattggtgatttaaaatatattttcagagctagtgagctgttggaagctctcagtttgcatggctaagtatgtctttatccacttcttgaacaattttctcgttg

SEQ ID NO: 93940 - DNA, 120 bp, synthetic construct
  source 1..120: mol_type = other DNA
tgttctgaaaatagtcacacctcttcaaatattgctactgtttcttctgttttcagtgtgtttgtacataatttagattttctccctctggctccttttttagtttttgtgtgtgtgtgt

SEQ ID NO: 93941 - DNA, 120 bp, synthetic construct
  source 1..120: mol_type = other DNA
atttccaccagcttttgctggtgactttttgtttctttcttcatgggtttggtaatctttgtgaattggctgctgtatttgcaaatggattaagggcatcttctgaacctgtggacactg

SEQ ID NO: 93942 - DNA, 120 bp, synthetic construct
  source 1..120: mol_type = other DNA
ctagatgtagacttctgatttccgctgatatccacagaaatgactaggtagaacatgaatttatagagataattcaaatatcttattagcactccattatctcaagagcagttctgagtt

SEQ ID NO: 93943 - DNA, 120 bp, synthetic construct
  source 1..120: mol_type = other DNA
aacactaggtactatgcagagttactgtgaataataaataagacacgatgtatataattcacctagcagacttatttgtatactataattattcaataaataatggcccttgtggttatt

SEQ ID NO: 93944 - DNA, 120 bp, synthetic construct
  source 1..120: mol_type = other DNA
acaaaggatgtgcagtagccaaacatctttgtaggagtagaacatattgggaggactcctgctacttgacctcaagacttagtgtggagctatactgattgaaacagggtattattcata

SEQ ID NO: 93945 - DNA, 120 bp, synthetic construct
  source 1..120: mol_type = other DNA
attagcctgggattttgataccagcctgtgtcatatagttagatttgcctctaaaaaaacataaaaaattagctgctgggcatggtggtacatgcctatagtcccagctacacaggagac

SEQ ID NO: 93946 - DNA, 120 bp, synthetic construct
  source 1..120: mol_type = other DNA
ctatatttttcttgtgtttattcatttggctggaagattcccttccctagccttctggaagtttcagtcttctaatctgatttagtgacctttgttcactaggaagaacatagtccattt

SEQ ID NO: 93947 - DNA, 120 bp, synthetic construct
  source 1..120: mol_type = other DNA
gtaaggctgcctgatctttagtcatttagtagtcttctcagtgaccagatctgtcatgttactgctgtgtttgtgctcaagtaacccttatttcacttaacaatggtcccaaagtgcaag

SEQ ID NO: 93948 - DNA, 120 bp, synthetic construct
  source 1..120: mol_type = other DNA
gagatctcttctttaagggcactaagctcattcatgagcactccatactcaggatctaatgacctctcaaatacacatcctcctaataccatctcctgggaaagggagtttaggatttta

SEQ ID NO: 93949 - DNA, 120 bp, synthetic construct
  source 1..120: mol_type = other DNA
tgctcctacatgcagtagaaacaaaaacatcccttaacactctgtttgagcagttcaaaatcatattttttatgttgtgcgagtttcaggtgataaatcctcttcaagatacatcagggg

SEQ ID NO: 93950 - DNA, 120 bp, synthetic construct
  source 1..120: mol_type = other DNA
ccatatgactatccacctgcgcttctaaaactttttcctgttacgttctgctattttacttagaatttttgtccattacactattattttaggttaaggaacaatgtgtttagacagttg

SEQ ID NO: 93951 - DNA, 120 bp, synthetic construct
  source 1..120: mol_type = other DNA
accttatgtccacattcctggagtggttccttacccctacctaagaaaatccacctcttacttcttcaactgttcagatctcaatcaacacagctttttgtcattagcatgctggaaatg

SEQ ID NO: 93952 - DNA, 120 bp, synthetic construct
  source 1..120: mol_type = other DNA
atttcaggtggtctgcaaaagccgtatagcccatggtcttagcctacctcgtcaaacatcaggcagaaacactttctaaacccattaaaaagagtcaagcaggaaattgtgagtatatag

SEQ ID NO: 93953 - DNA, 120 bp, synthetic construct
  source 1..120: mol_type = other DNA
taggtttcaagcaaaaaactgggcagccatttgggcagacaccaagctagcagcaggattttttttttcatacccaggtggcacctaggaccccattgagacagaaccatttactctcct

SEQ ID NO: 93954 - DNA, 120 bp, synthetic construct
  source 1..120: mol_type = other DNA
gataaattcctgaatttgaggaaaaaccagcgcaaaaagcctgaaaattccaaaaccagaatgcctcttcttctccaaaggatcacaacttctcaccagcaagagaacaaaaccggatgg

SEQ ID NO: 93955 - DNA, 120 bp, synthetic construct
  source 1..120: mol_type = other DNA
gagcacctgaaggaagcactaaataaggagaggaaaaaccagtactagccactgcagaaacataccaaaatataaagtcctgagacactgtgaagaaacagcatgaactagcaaaataag

SEQ ID NO: 93956 - DNA, 120 bp, synthetic construct
  source 1..120: mol_type = other DNA
gaagttgaatccctgaatagaccaataaaaagttctgaagttgaggcagtaattactagcctaccaaccaaaaacggcacagaatcaggcagattcacagtcgaattctaccagaggtac

SEQ ID NO: 93957 - DNA, 120 bp, synthetic construct
  source 1..120: mol_type = other DNA
cccatgctcatggataggaagaatcaatattgtggaattggccatactgcacaaagtaattcctagattcagtcctctccccgtcaagctaccactgactttcttcacagaattagaaaa

SEQ ID NO: 93958 - DNA, 120 bp, synthetic construct
  source 1..120: mol_type = other DNA
aaaagtcaggaaacaacaagttctggagaggatgtggagaagtaggaatgcttttacactgtttgtgggagtgtaaattagttcatccattgtggaagacaatgtggtgattcctcaagg

SEQ ID NO: 93959 - DNA, 120 bp, synthetic construct
  source 1..120: mol_type = other DNA
tctgacactctctgcctctcactgattgcttctctctgtctttacatacacacacacacacacaccatacacagaatatttcagaaattctcaacacacaccaccagtaagtaatgccaa

SEQ ID NO: 93960 - DNA, 120 bp, synthetic construct
  source 1..120: mol_type = other DNA
atataatttcattagttgtatcattttctccagtttgatttccagtggtgcagaacattttattcatattcctgataccaggaaagggtgcatattgacagtgcaactcaagtaaaatat

SEQ ID NO: 93961 - DNA, 120 bp, synthetic construct
  source 1..120: mol_type = other DNA
tttaccttgataaacactttcatcaattttgagagcatatacaagctatattctgctcttaaattttcaaggtttgggggtgtgggggagagtgggaaggggaaggaggagagggtgagt

SEQ ID NO: 93962 - DNA, 120 bp, synthetic construct
  source 1..120: mol_type = other DNA
ggtcaaatactctaacatccttttgctcattatatgaacattatgcatattgcagtttgaaactaggaagagagaagagcaatattacaggcgaacatgaatgcatcagaatatgataac

SEQ ID NO: 93963 - DNA, 120 bp, synthetic construct
  source 1..120: mol_type = other DNA
ccagacttgccagttcccagattgcgtgagtcaattccttaaaatagatcgatctaataaatttatcctatattggtgaacaaatttagcacagaactttgatatatattagtaccactt

SEQ ID NO: 93964 - DNA, 120 bp, synthetic construct
  source 1..120: mol_type = other DNA
tgcagaggacaactacatgaattcatactacttgctctggcaatattcccagatccttatcctggagcatttgtggtagttgggaggatggattttctagcagtatatagactgaatgtg

SEQ ID NO: 93965 - DNA, 120 bp, synthetic construct
  source 1..120: mol_type = other DNA
caagtttattccgatttgtagctacagcaatctaagagaaaagcaatacagcaaccacaaccaatatgaggcttcttataatcatgttggggtggggatgcttcttctctgtcctacatc

SEQ ID NO: 93966 - DNA, 120 bp, synthetic construct
  source 1..120: mol_type = other DNA
gatggattataaggaactattaagcttccatttaggacatttggagtgctgattcttgtgacatttccttttggaacccatacctcatgctgcaagtgttcaagccccatggagaagcta

SEQ ID NO: 93967 - DNA, 120 bp, synthetic construct
  source 1..120: mol_type = other DNA
aacgtgagattttaactaggttttcttcttctctgttactatgcatatgtctttttattctttggatcaatatattcccacatcccctggaacattttttggaaagttggcagtgctcct

SEQ ID NO: 93968 - DNA, 120 bp, synthetic construct
  source 1..120: mol_type = other DNA
gataattccttaaagagctaaaagcagaaataccatttaacccagcaatcccataactgtgtatatacccaaacaattagaaattgtatcaaaaagacacatgcggccgggcgcggtggc

SEQ ID NO: 93969 - DNA, 120 bp, synthetic construct
  source 1..120: mol_type = other DNA
ctgtacaaaatatttgaattgtgtaatggtatccagtatggataataaaggataagtaaatttttgagaagtcagttaagtccgggcgcggtggctcacgcctgtaatcccagcagtttg

SEQ ID NO: 93970 - DNA, 120 bp, synthetic construct
  source 1..120: mol_type = other DNA
gtctcagtgtgtgttactctcctctatgtgtcgttgtgttctcgtcctttagctcccacttataagtaaagacattcagtatttgctccagatagttgctggaggctattatccttacaa

SEQ ID NO: 93971 - DNA, 120 bp, synthetic construct
  source 1..120: mol_type = other DNA
ccagtagaggggctgcaactgtttggagggttttagaatactaccatttgtgagttatgtatgaagttagggaagcctgctactcctgattagactggcaacaactttttgcattataag

SEQ ID NO: 93972 - DNA, 120 bp, synthetic construct
  source 1..120: mol_type = other DNA
taaaacacacacatttattatatcgccattgtgaagttctgtagtctgagtagcttggatggtttctcttcattgtcgaccaaggctgaattcagtgtgttggcagcagggtagtgtttc

SEQ ID NO: 93973 - DNA, 120 bp, synthetic construct
  source 1..120: mol_type = other DNA
cagcctctcctgatcttttgaagtccaagtaataatcctcaggtggcagtgcacataactgtggagaattaaccactcctctctgatgttgcttgtacccaccgcaaataatttgtctat

SEQ ID NO: 93974 - DNA, 120 bp, synthetic construct
  source 1..120: mol_type = other DNA
taaaattcaaatgtcatgtcctctttgtacctatgagtgcacattaacagtaaccataaaaaagaatacttggagctacagatatgtgtgtgtgtgtgtgcatctgcacctgtgtctttg

SEQ ID NO: 93975 - DNA, 120 bp, synthetic construct
  source 1..120: mol_type = other DNA
acaagggtctcagcagtgttttacctctaaacctaatactgaccctaacagaaattgaaaccttaaaactaacctgtggcctttgaccattgcttcttgatcattgagctgacccatgac

SEQ ID NO: 93976 - DNA, 120 bp, synthetic construct
  source 1..120: mol_type = other DNA
ccataagcaaaacttcccagatccctacctatggaatctctgcctatggaatggacattgtcataatggatgtagataagaaatatcctggactcaaatctgaacttcagtcacgctgga

SEQ ID NO: 93977 - DNA, 120 bp, synthetic construct
  source 1..120: mol_type = other DNA
ttcttagctgtgcatgcaatttgaataattactacatagcaattccagtaacatagccaatacatcagaaccctcaggggaggcagccaggaactttcttgcaaaatatcccccacatct

SEQ ID NO: 93978 - DNA, 120 bp, synthetic construct
  source 1..120: mol_type = other DNA
gtacagcttgaatttaaattagaacatgatggagatttttggattccctttaattcctgttataaattgtatttctttaaacctgcccaaagggtaaccatctttctgaaaccaattcat

SEQ ID NO: 93979 - DNA, 120 bp, synthetic construct
  source 1..120: mol_type = other DNA
cctgaggtgatctgcctacttcagcctccaaaagttctgggatcacaggtatgagccactgcatccagccagacagaagtcttctaatgttttatcattatgtataatatttggagtagg

SEQ ID NO: 93980 - DNA, 120 bp, synthetic construct
  source 1..120: mol_type = other DNA
aggtcttccatgggtgaaatcaagagactggcagggctgtattcctctctgggggctggagggatgaatctgttacaacatgtagatttttaaaatctaagtatttgcactaacttctga

SEQ ID NO: 93981 - DNA, 120 bp, synthetic construct
  source 1..120: mol_type = other DNA
gcttagtttgccatcttgtttgacatgttcaatttagttacttcagaataagcataatataactgtatattttgtctttgaaaacatcagtttccacctgtcatttaatagatatacttc

SEQ ID NO: 93982 - DNA, 120 bp, synthetic construct
  source 1..120: mol_type = other DNA
tttcttccaactttcaaatatcactactgtatctgcagatgttctgtgctatcactggaaagtttaatgtcagtctgattcttactcattcatgactcagctatttttttctccgaaggc

SEQ ID NO: 93983 - DNA, 120 bp, synthetic construct
  source 1..120: mol_type = other DNA
ccctaggcttaccgaaatcctactacctgatggctgctgtagggttctatgttgtatggagaagagaagatggaagggagattagataatgattaactcaagacatttttgctaagagac

SEQ ID NO: 93984 - DNA, 120 bp, synthetic construct
  source 1..120: mol_type = other DNA
tgagttccagagagcaaacccactacattttccctgccctgacttccagcccatcactatgtagatccattgtggagctttgttactcctttgtagtgtattaaattcgaggatataata

SEQ ID NO: 93985 - DNA, 120 bp, synthetic construct
  source 1..120: mol_type = other DNA
agtggaagaaaactctaatcagctacaagggacaattagaacatctgtaagaataatatgtgtactggatttaaaatgataaagacattaaaatgcatatattcatcatgatacccagaa

SEQ ID NO: 93986 - DNA, 120 bp, synthetic construct
  source 1..120: mol_type = other DNA
agaataacacagcaaagcctgactgcctccctaaagacagatacttccattacgtgtggcggtacccttcactcctgaatctagaaaatactacttgggccatgttaagtttattcttaa

SEQ ID NO: 93987 - DNA, 120 bp, synthetic construct
  source 1..120: mol_type = other DNA
catatatgatcttgtttgacatgtctttttgtatagaaaagcacttaaattacccctacttcagcaatgaggatgttgtgtttaggccaaaaggcaatataaacacaacttgctattaaa

SEQ ID NO: 93988 - DNA, 120 bp, synthetic construct
  source 1..120: mol_type = other DNA
caagtgtgaagtcatttatgcctaccactgtaataccattctttcacatttccttagtcatgatgagtcagttacactgggaatccttctgttctcctcaccctttaaagttccttttgg

SEQ ID NO: 93989 - DNA, 120 bp, synthetic construct
  source 1..120: mol_type = other DNA
ctgtagaggacagaataacaaacccctatgtatgttcacatcctacgttttgtggcaagaaggtcttaagtgatgtgataaaagactttaagatggggacagcatcctcaagtatctagg

SEQ ID NO: 93990 - DNA, 120 bp, synthetic construct
  source 1..120: mol_type = other DNA
gaggtgcagtgagctgagctcatgccactgcactgcagcctgggcaaccatgcgagactctgcctcaaaaacaaaaacaaaaacaaaaaacaaacagaaatattaacaaaaacaaacaac

SEQ ID NO: 93991 - DNA, 120 bp, synthetic construct
  source 1..120: mol_type = other DNA
caggtcttgtaagaaaagttgctgtcttctggcttagaaaaggcatcccaggtagtggctgaccattaaaaggaagatgagcgttatgaggtagccatcttcaaaaagaaaaatggcaaa

SEQ ID NO: 93992 - DNA, 120 bp, synthetic construct
  source 1..120: mol_type = other DNA
cagctattttttgtttgctttttgagatggagtttttttttcttgtcactcaggctggaatgcaatggcatgatctccgcacactacaatttctcctcccaggtccaagtgattctcatg

SEQ ID NO: 93993 - DNA, 120 bp, synthetic construct
  source 1..120: mol_type = other DNA
tgagataatcactctccactgtttgaattccttccacattttattttttaataaaataaatgggccacgcaaagtggctcatgctggtaatcccagcacttcaggagacagaggcaggtg

SEQ ID NO: 93994 - DNA, 120 bp, synthetic construct
  source 1..120: mol_type = other DNA
caaatctggagatatatttaaggagaaactgctcagttaaaaagattcaaagttgtctgggtgtgatggctcatgcctgtaatcccagcagatcacttgagctcaggagtttgagaccaa

SEQ ID NO: 93995 - DNA, 120 bp, synthetic construct
  source 1..120: mol_type = other DNA
ctgccttcattctcaccagatttctctttgaccacagttgtgtgacctaaaacaaattctgtttgttctcactgaataatttttatttaaacttttcctgtttggtgtcacttctttagt

SEQ ID NO: 93996 - DNA, 120 bp, synthetic construct
  source 1..120: mol_type = other DNA
gcaggggaactgtccttcataaaatcatcaaatcttgactatgaaaatagcatgggaaaaattcacgcccaagattaagttacctcctggtgggtccctaccactatgggatctacaatt

SEQ ID NO: 93997 - DNA, 120 bp, synthetic construct
  source 1..120: mol_type = other DNA
ccaccttccctctccctgctccatcacataatatagctataatgtgctgccttttcctctcctccagtgttattgataggaaaaactggccaggtactgatgaataaagaaaaagacaaa

SEQ ID NO: 93998 - DNA, 120 bp, synthetic construct
  source 1..120: mol_type = other DNA
aaaggtttttaaaggccaattttagtttctagtgattggggaagttgcagatcttgtcacctatggaattgtgtctggagtttgttccttctggtgggttcatggtctcactgacttcag

SEQ ID NO: 93999 - DNA, 120 bp, synthetic construct
  source 1..120: mol_type = other DNA
ctgtccaggtggggaggcagacgtaggttcaagttccacataagaagaacatgccttggctgagtagacagaactggttgtatatgttaaaaaggcttgtgataataataataactcata

SEQ ID NO: 94000 - DNA, 120 bp, synthetic construct
  source 1..120: mol_type = other DNA
gccttatgatagaccatggggttttttctttggcacacatcacaggctttgactacttgtcagatgatctagaggagacatgtccttgtaaatagggatttggctatttgatgagtgttc

SEQ ID NO: 94001 - DNA, 120 bp, synthetic construct
  source 1..120: mol_type = other DNA
ggccagccttttgctactacataaatttccttacttaggtatgctgctggttgtggggacacttagtgcgtctgaataaggactccaagagctatttccactctttctgtgatgtataaa

SEQ ID NO: 94002 - DNA, 120 bp, synthetic construct
  source 1..120: mol_type = other DNA
taattgtttatgagcttcagaccttaagggatattgcctttgataaggaaaattggtggggtctttcagcctgatttggacagggccaacattttttgcccttccgaactgtccttacaa

SEQ ID NO: 94003 - DNA, 120 bp, synthetic construct
  source 1..120: mol_type = other DNA
agtctagatcccagtggggatccatatgggttacagcttgctgaccagtagggaatttgtccctttcttcggctgttattctatcatttacttaactaaaataccagatctccaaacact

SEQ ID NO: 94004 - DNA, 120 bp, synthetic construct
  source 1..120: mol_type = other DNA
tgttccgaatagttgtgctcgccaaagcagcagcagaaacactagttttcctcctagatcataaggaggaccaataaatgtcggatttagtagcccttaccaacacattcttgaaaatca

SEQ ID NO: 94005 - DNA, 120 bp, synthetic construct
  source 1..120: mol_type = other DNA
aaagcctgacacctgagtctttagtccagcagccacgctagttgcttttaactggtcaacaggtgcctggtatttagtccccgaattctaaagaaaaataggacagaatagcaagtgaaa

SEQ ID NO: 94006 - DNA, 120 bp, synthetic construct
  source 1..120: mol_type = other DNA
ttctcacagttacaagttttgcaaaggtggtttcaagatgaaaggagtatactcttgtaaagagcgtaaaattatttcagtcattctgtacctgaaacaggcactccccctttttgatag

SEQ ID NO: 94007 - DNA, 120 bp, synthetic construct
  source 1..120: mol_type = other DNA
taaagaaatcacattggtaggatgtgtcttaagtaagaccaacctcacagttgcaatactgcctctccttgaagctgcaggcaatggtgactcctgatttaggcttggaatttattgtca

SEQ ID NO: 94008 - DNA, 120 bp, synthetic construct
  source 1..120: mol_type = other DNA
tttctctagttttttctttaatttcctgtaatttccactaacactgtagatgcatttttccttctacattagccacatatatacccaaagatgacatggtatcataaggtgaatgtaaac

SEQ ID NO: 94009 - DNA, 120 bp, synthetic construct
  source 1..120: mol_type = other DNA
gctgaggtgacagaattgagccaccatgcttggttagcaatatctcctcatttaagtgtgtgacaattaggtgtcggttacaatgataggaaaaaaataactgctttagaagggcggaca

SEQ ID NO: 94010 - DNA, 120 bp, synthetic construct
  source 1..120: mol_type = other DNA
tgcaaacatgactttcagcaaaggaccaccttactggtcagttcagcatgaggcacttggaagtgtccacagtttcctttatctctctctctctaacacacttttaggaagaacctccct

SEQ ID NO: 94011 - DNA, 120 bp, synthetic construct
  source 1..120: mol_type = other DNA
tttaccatattggccaagctggtctcaaacttcttgacctgatgtgatccgcctgcctcagcctctggaattgttatttattaaagttatcagctgggtaaggtggctcatgcctgttat

SEQ ID NO: 94012 - DNA, 120 bp, synthetic construct
  source 1..120: mol_type = other DNA
caaaaatacctttttgttggtcatttatgcaaggcagtgcttctaaacagcccatcagtattatcaagaattttgaaaaatatgagcccggcactgtggctcctgcctatcctcccagta

SEQ ID NO: 94013 - DNA, 120 bp, synthetic construct
  source 1..120: mol_type = other DNA
acacaaaaatatgctgctacctagattattgccagtagttataagaagggtaggaaaggaacatctcagagcatttttatctaattctgaatgttttaactaatgaaagtatccaacaga

SEQ ID NO: 94014 - DNA, 120 bp, synthetic construct
  source 1..120: mol_type = other DNA
gaagagacacctggatttgtttgtgagacaagatagcctttgatcttttactagtttaaggcctgtttttttgtttgtttattttcccctttggaaatgggaatgtagttgctgttgcat

SEQ ID NO: 94015 - DNA, 120 bp, synthetic construct
  source 1..120: mol_type = other DNA
ggtggcccccgccgtggccaccgccgacctgcacgcgcagtacggctcccccacctacttctatgccttctatcatcactgccaaagcgaaatgaagcccagctgggcagattcggccca

SEQ ID NO: 94016 - DNA, 120 bp, synthetic construct
  source 1..120: mol_type = other DNA
ttctgaaactcctggtctcaacggatcctccctcctcacccttctgaatagctgggactacaggtgaatgccaccatacccagctaattttaaaatttattttgttagaaacaggatttt

SEQ ID NO: 94017 - DNA, 120 bp, synthetic construct
  source 1..120: mol_type = other DNA
atttggtctgagaatggctaccaggaggagaacagaggagggaccaacagttgttggagatgctcgtctatcactgaaaggttctttcctgcatgaagaaatgatttaaatcaaattcat

SEQ ID NO: 94018 - DNA, 120 bp, synthetic construct
  source 1..120: mol_type = other DNA
tgttcttttttcaaggtgcccagatttcatattgtttaaacgcacatgttctacaatttgtgcagttaatgcaattattacatggtcttgaggcaacatacatcctcatcagctgacagg

SEQ ID NO: 94019 - DNA, 120 bp, synthetic construct
  source 1..120: mol_type = other DNA
ggaaggaaaaaccactagaaccaccagagcagagattctctgatgctactcaaattaaaaacttcagatagagagttcactgaggtaatgagagcctgaatgtcagtctgtctgaagtct

SEQ ID NO: 94020 - DNA, 120 bp, synthetic construct
  source 1..120: mol_type = other DNA
tggtatgcatatacctttggaatttggatgatcacagaaaaatgatgttggaatgtgcatgtcaggaaaaattaggaagggaggatgaagggactgaaggaaggagagttgtgatgaagg

SEQ ID NO: 94021 - DNA, 120 bp, synthetic construct
  source 1..120: mol_type = other DNA
ttgatcaagacaggatgttgaaatcagtgaatgtcagggcctcaaataatccttgctattttttaattattattttgaatagggaagcaagtgcccaggcctgtgcctgagggggattct

SEQ ID NO: 94022 - DNA, 120 bp, synthetic construct
  source 1..120: mol_type = other DNA
tggttacagagagttgcagcataattctagttgtaaaggtgacctttagtaccaaaaagggattttaagctgaatgaatgaacatcctcccctggtgtggtggaggagtcactgaatgta

SEQ ID NO: 94023 - DNA, 120 bp, synthetic construct
  source 1..120: mol_type = other DNA
tatgagatctcatggtattcaaacttatgtgattttatatatatatttgttttcaccctcttagtaacgtgaaagcacggcagttagtgtgcattcaagtaaaaggtagaggtcaacatt

SEQ ID NO: 94024 - DNA, 120 bp, synthetic construct
  source 1..120: mol_type = other DNA
tccaaatttttatgattctccttctacctctgcccacttgtgcaaataataataagataattcttcagtgtatagcttccaagcacaatttagcatctgcagcagccctcagcttgtttc

SEQ ID NO: 94025 - DNA, 120 bp, synthetic construct
  source 1..120: mol_type = other DNA
aatcgctttgaagaagtggcctggtccaagtataatcccaaagaccagctctatctgcatattggcttgaaacccagagtgagagatcactaccgggcaacgaaagtggctttctggttg

SEQ ID NO: 94026 - DNA, 120 bp, synthetic construct
  source 1..120: mol_type = other DNA
aaaccaggaatgtttttgtgccactgactttagataaaaatgcaaaagggcagtcatcctgtcccagcagacccttctcattggcattttccagtattgtgagatcaatttctgaccata

SEQ ID NO: 94027 - DNA, 120 bp, synthetic construct
  source 1..120: mol_type = other DNA
cacacagacacacacaaagaatcagcagagaaaacaaaatacaagtcctgttctgtagttcttgccctttgaatatatttgggaagagttgcttcctatttcaggaccctgccaaaaaag

SEQ ID NO: 94028 - DNA, 120 bp, synthetic construct
  source 1..120: mol_type = other DNA
cacagaggtgtcttggaaagatttcattcccaattcatttttcatagatctataatcaggcaatttctgcaagcaatgtatgaccccacctgagcaaccacaaataggctctccatgaaa

SEQ ID NO: 94029 - DNA, 120 bp, synthetic construct
  source 1..120: mol_type = other DNA
ccttaggtgagtaaaccttctagtgacagtaagaaattctactgaatgaaactccagaggcagaaaatcattgtcattccaatgggagctcaattgtcaattccttcctgtgcattcagc

SEQ ID NO: 94030 - DNA, 120 bp, synthetic construct
  source 1..120: mol_type = other DNA
cacacacagactcatatatacacacaaatctataacacatttgtgctcacatatacattcctctgtgtgtgtgtgtgtattacattactgctttttatctgtgaaatcacattctgcagt

SEQ ID NO: 94031 - DNA, 120 bp, synthetic construct
  source 1..120: mol_type = other DNA
acctcagcctcccaaagtgctacgattacaggcatgagccaccacacccagcatctacattttcttctagtacttttatgtttcatttttcacacttaaaccctttatctatcatgaggg

SEQ ID NO: 94032 - DNA, 120 bp, synthetic construct
  source 1..120: mol_type = other DNA
tttgtggccttgaaccaatcacacaagcaaggctgaaaggactgagcctaaaatggagctgcccctgaatgatctgagtcttcatcaggcagcaccttgcacacagaccatcatctgatg

SEQ ID NO: 94033 - DNA, 120 bp, synthetic construct; identical to SEQ ID NO: 16503
  source 1..120: mol_type = other DNA

SEQ ID NO: 94034 - DNA, 120 bp, synthetic construct; identical to SEQ ID NO: 16504
  source 1..120: mol_type = other DNA

SEQ ID NO: 94035 - DNA, 120 bp, synthetic construct; identical to SEQ ID NO: 16505
  source 1..120: mol_type = other DNA

SEQ ID NO: 94036 - DNA, 120 bp, synthetic construct; identical to SEQ ID NO: 16506
  source 1..120: mol_type = other DNA

SEQ ID NO: 94037 - DNA, 120 bp, synthetic construct
  source 1..120: mol_type = other DNA
gcccgcactgccaagacaatcctaagccaaaagaacaaagctggaggcatcatgctatctgacttcaaactatactacaaggctacagtaaccaaaacagcatggtactggtaccaaaac

SEQ ID NO: 94038 - DNA, 120 bp, synthetic construct; identical to SEQ ID NO: 20070
  source 1..120: mol_type = other DNA

SEQ ID NO: 94039 - DNA, 120 bp, synthetic construct
  source 1..120: mol_type = other DNA
ggatgcgcgcaccgtgcgcgagccgaagcagggcgaggcattgcctcacctgggaagcgcgaggggtcagggagttccctttccgagtcaaagaaaggggtgacggacgcacctggaaaa

SEQ ID NO: 94040 - DNA, 120 bp, synthetic construct
  source 1..120: mol_type = other DNA
gaagaaagggtatcagcaatggaagacgaaatgaatgaaatgaagcgagaagggaagtttagagaaaaacaaataaaaagaaatgagcaaagcctccaagaaatatgggactatgtgaaa

SEQ ID NO: 94041 - DNA, 120 bp, synthetic construct
  source 1..120: mol_type = other DNA
ggaaggggttgcaatcctagtctctgataaaacagactttaaaccaacaaagatcaagagacaaagaaggccattacataatggtaaagggatcaattcaacaagaagagctaactatcc

SEQ ID NO: 94042 - DNA, 120 bp, synthetic construct
  source 1..120: mol_type = other DNA
aaattgatagactgctagcaagactaataaagaaaaaaagagagaagaatcaaatagacacaataaaaaatgataaaggggatatcaccaccgatcccacagaaatacaaactaccatca

SEQ ID NO: 94043 - DNA, 120 bp, synthetic construct
  source 1..120: mol_type = other DNA
acgacatgattgtatatctagaaaaccccattgtctcagcccaaaagctccttaagctgataagcaacttcagcaaagtctcaggatacaaaatcaatgtacaaaaatcacaagcattct

SEQ ID NO: 94044 - DNA, 120 bp, synthetic construct
  source 1..120: mol_type = other DNA
tcaggacataggcatggccaaggacttcatgtctaaaacaccaaaagcaatggcaacaaaagccaaaattgacaaatgggatctaattaaactaaagagcttctgcacagcaaaagaaac

SEQ ID NO: 94045 - DNA, 120 bp, synthetic construct; identical to SEQ ID NO: 20071
  source 1..120: mol_type = other DNA

SEQ ID NO: 94046 - DNA, 120 bp, synthetic construct
  source 1..120: mol_type = other DNA
accttttgtacactcatctgaccacactgcaatgctttttaagttggttgctggaatttgctgttgactgaactataaggtgccaactgaactatgaggtgatctccaacacctgcaaaa

SEQ ID NO: 94047 - DNA, 120 bp, synthetic construct
  source 1..120: mol_type = other DNA
aatatgacaagtaagtaaattgatacttttttctttcttttctttttttgagatggagtctcgcttttgtcatccaggctggagtgcagtggcgtgatctcggctcactgcaacctccgc

SEQ ID NO: 94048 - DNA, 120 bp, synthetic construct
  source 1..120: mol_type = other DNA
ccaaatgtccaacaatgatagactggattaagaaaatgtggcacatatacaccatggggggtagggggaggggggagggatagctttaggagatatacctaatgctaaatggtgagttaa

SEQ ID NO: 94049 - DNA, 120 bp, synthetic construct; identical to SEQ ID NO: 11661
  source 1..120: mol_type = other DNA

SEQ ID NO: 94050 - DNA, 120 bp, synthetic construct
  source 1..120: mol_type = other DNA
aagcaaaacaaacaaagaaacatgaaaaaaagctataaaacccaacttttttctttttttttttgagacggagtctcactctgtcgcccagggtggagtgcagtggtgcggtctcggctc

SEQ ID NO: 94051 - DNA, 120 bp, synthetic construct
  source 1..120: mol_type = other DNA
gcggggagccgagatcgtgccgttgcactccagcctggggaacagagcaagactccattaaaaataaaataataataatactgtgaatgtgaaactgatgaacttggtgcttttcatgcg

SEQ ID NO: 94052 - DNA, 120 bp, synthetic construct
  source 1..120: mol_type = other DNA
gagatcgtgccgttgcactccagcctggggaacagagcaagactccattaaaaataaaataataataatactgtgaatgtgaaactgatgaacttggtgcttttcatgcgtctcatagtt

SEQ ID NO: 94053 - DNA, 120 bp, synthetic construct; identical to SEQ ID NO: 20019
  source 1..120: mol_type = other DNA

SEQ ID NO: 94054 - DNA, 120 bp, synthetic construct; identical to SEQ ID NO: 20020
  source 1..120: mol_type = other DNA

SEQ ID NO: 94055 - DNA, 120 bp, synthetic construct
  source 1..120: mol_type = other DNA
tgtctgttcatgtcgttcgcccactttttgatggggttgtttgtttttttcttgtaaattattttctacctatttctatcgctttcaggtatcgtacagttggcctaacatatctgtgga

SEQ ID NO: 94056 - DNA, 120 bp, synthetic construct; identical to SEQ ID NO: 20021
  source 1..120: mol_type = other DNA

SEQ ID NO: 94057 - DNA, 120 bp, synthetic construct; identical to SEQ ID NO: 9770
  source 1..120: mol_type = other DNA

SEQ ID NO: 94058 - DNA, 120 bp, synthetic construct; identical to SEQ ID NO: 9771
  source 1..120: mol_type = other DNA

SEQ ID NO: 94059 - DNA, 120 bp, synthetic construct; identical to SEQ ID NO: 20072
  source 1..120: mol_type = other DNA

SEQ ID NO: 94060 - DNA, 120 bp, synthetic construct
  source 1..120: mol_type = other DNA
tttcttttgctgtgcagaagctctttagtttaattagatcccatttgtcaattttgtcttttgttgccattgcttggtgttttagacatgaagtccttggccatgcctatgtcctgaatg

SEQ ID NO: 94061 - DNA, 120 bp, synthetic construct; identical to SEQ ID NO: 20073
  source 1..120: mol_type = other DNA

SEQ ID NO: 94062 - DNA, 120 bp, synthetic construct; identical to SEQ ID NO: 20074
  source 1..120: mol_type = other DNA

SEQ ID NO: 94063 - DNA, 120 bp, synthetic construct; identical to SEQ ID NO: 20075
  source 1..120: mol_type = other DNA

SEQ ID NO: 94064 - DNA, 120 bp, synthetic construct; identical to SEQ ID NO: 20076
  source 1..120: mol_type = other DNA

SEQ ID NO: 94065 - DNA, 120 bp, synthetic construct; identical to SEQ ID NO: 20077
  source 1..120: mol_type = other DNA

SEQ ID NO: 94066 - DNA, 120 bp, synthetic construct
  source 1..120: mol_type = other DNA
tccaaagttcaagttactctcctgcttcagcctcctgagtagctgggattacaggcacgtgccaccatccctggctaactttttgtattttttagtagagatggggtttcatcatattgg

SEQ ID NO: 94067 - DNA, 120 bp, synthetic construct
  source 1..120: mol_type = other DNA
ggctcagtgcaacctctgcctcccaggttcaagcgattcttctgtctcagcctcccgagtagctgggattacaggcctgccaccatgcccgactaatttttgtatttttagtagagatgg

SEQ ID NO: 94068 - DNA, 120 bp, synthetic construct; identical to SEQ ID NO: 94067
  source 1..120: mol_type = other DNA

SEQ ID NO: 94069 - DNA, 120 bp, synthetic construct
  source 1..120: mol_type = other DNA
atgtccttacaggaatcggaagtaaggaaacagcccatcaacctggggaggtggaagacacacaaatacgtacacttatgaggtcaatcataacagcccaccttattttcatttattcat

SEQ ID NO: 94070 - DNA, 120 bp, synthetic construct
  source 1..120: mol_type = other DNA
ctgactattttgtatatcatgtgtccaatccctctccaggccccaagctggtgattccttacagtacttattactccctaatacagatagacagaaaaatggtagatagaggacagagga

SEQ ID NO: 94071 - DNA, 120 bp, synthetic construct
  source 1..120: mol_type = other DNA
ctgtcatttatcaagagtgtatgacaagccaggcattgatcatagtccttcatgtgtgtgattccaactggccatctcgattctttaaggaggaggctctagctatcctctcattacctg

SEQ ID NO: 94072 - DNA, 120 bp, synthetic construct; identical to SEQ ID NO: 28362
  source 1..120: mol_type = other DNA

SEQ ID NO: 94073 - DNA, 120 bp, synthetic construct
  source 1..120: mol_type = other DNA
aaatggtaattctagttctagatccctgaggaattgccacactgacttccataatggttgaactagtttacagtcccaccaacagtgtaaaagcattcctatttttccacatcctctccg

SEQ ID NO: 94074 - DNA, 120 bp, synthetic construct
  source 1..120: mol_type = other DNA
ctggattcggtttgctagtatttcattgaggatttttgcattgatgttcctcagggatattggtctaaaattctcttttttcttgtgtctctgccaggctttggtatcaggatgatgctg

SEQ ID NO: 94075 - DNA, 120 bp, synthetic construct
  source 1..120: mol_type = other DNA
tagttgttcagtttccatgtagttgagtggttttgagtgagtttcttaatcctgagttctagtttgattgcactgtggtctgagagacagtttgttataatttctgttcttttacatttg

SEQ ID NO: 94076 - DNA, 120 bp, synthetic construct; identical to SEQ ID NO: 28363
  source 1..120: mol_type = other DNA

SEQ ID NO: 94077 - DNA, 120 bp, synthetic construct; identical to SEQ ID NO: 28364
  source 1..120: mol_type = other DNA

SEQ ID NO: 94078 - DNA, 120 bp, synthetic construct
  source 1..120: mol_type = other DNA
gagggagtcggggggtgggggtgggggtgtgggggggtgagggagtcggggggtgggggtggggggagccgctccgctggggcgttcgctgaaggccaagttaggccagaatctgactgg

SEQ ID NO: 94079 - DNA, 120 bp, synthetic construct; identical to SEQ ID NO: 8987
  source 1..120: mol_type = other DNA

SEQ ID NO: 94080 - DNA, 120 bp, synthetic construct
  source 1..120: mol_type = other DNA
tcttaatccagtctatcattgttggacatttgggttggttccaagtctttgctatggtgaataatgccgcaataaacatacgtgtgcatgtgtctttatagcagcatgatttatagtcct

SEQ ID NO: 94081 - DNA, 120 bp, synthetic construct
  source 1..120: mol_type = other DNA
cgggctcttttttggttccatatgaactttaaagtagatttttccaattctgtgaagaaaggcattggtagcttgatggggatggcattgattctataaattaccttgggcagtatggcc

SEQ ID NO: 94082 - DNA, 120 bp, synthetic construct
  source 1..120: mol_type = other DNA
agtttcagaaggaatggtaccagttcctccttgtacctctggtagaattcagctgtgaatccatctggtcctggactctttttggttggtaagctattgattcttgccacaatttcagat

SEQ ID NO: 94083 - DNA, 120 bp, synthetic construct
  source 1..120: mol_type = other DNA
agttgagcggttttgagtgagattcttaatcctgagttctagtttgattgcactgtggtgtgagagatagtttgttataatttctgttcttttacatttgctgaggagagctttacttcc

SEQ ID NO: 94084 - DNA, 120 bp, synthetic construct
  source 1..120: mol_type = other DNA
accttcatttcaactttggtgaatctgaccattatgtgtcttggagttgctcttctcgaggagtatctttgtggcattctctgtatttcctgaatctgaatgttggcctgccttgctaga

SEQ ID NO: 94085 - DNA, 120 bp, synthetic construct
  source 1..120: mol_type = other DNA
cagctgcatgctgggagaaccactgctctcttcaaagctgtcagacagcgacatttaagtctgcagaggttactgctgtctttttgtttgtctgtgccctgcccccagaggtggagccta

SEQ ID NO: 94086 - DNA, 120 bp, synthetic construct
  source 1..120: mol_type = other DNA
tgtgatagtttgctgagaatgacagtttccagcttcatccatgtccaatcaaaggaaatgaagtcatcactttttaaggctgcatagtattccatggcgtatatgcaccacactttcttt

SEQ ID NO: 94087 - DNA, 120 bp, synthetic construct
  source 1..120: mol_type = other DNA
gttgcgaaaattttctcccattttgtaggttgcctgttcactctgatggtagtttcttttgctgtgcagaagctctttagtttaattagatcccatctgtcaattttggcttttgttgcc

SEQ ID NO: 94088 - DNA, 120 bp, synthetic construct
  source 1..120: mol_type = other DNA
actcatgatttggctctctgtttgtctgttattggtgtataagaacacggtgaaaccccgtctctactaaaaaaaatacaaaaattagccgggcatggtggcgcgtgcctgtagtcccag

SEQ ID NO: 94089 - DNA, 120 bp, synthetic construct
  source 1..120: mol_type = other DNA
ttcctgctttctcttgtggccatttagtgctataaatttccctctacacactgctttgaatgtgtcccagagattctggtatgttgtctctttgttctcgttggtttcaaagaacatctt

SEQ ID NO: 94090 - DNA, 120 bp, synthetic construct
  source 1..120: mol_type = other DNA
ttaattggagcatttagtccatttacatttaaagttaatattgttatatgtgaatttgatcctgtcattatgatgttagctggttattttgctcgttagttgatgcagtttcttcctagt

SEQ ID NO: 94091 - DNA, 120 bp, synthetic construct
  source 1..120: mol_type = other DNA
caaagttttcaccttctttgcctttgatttgaatttcctcctatagcttgcagtagtttgatcatgtgaagccttctctcaactcgtcaaagtcattctccatccagctttgttccattg

SEQ ID NO: 94092 - DNA, 120 bp, synthetic construct
  source 1..120: mol_type = other DNA
cctcatgagatctaatggttttaaaagtggaagcttcccctgcacattctctctctcctgccaccttgtgaaaaagatgcctgcttcccctttgccttctggcatgattgtaagtttcct

SEQ ID NO: 94093 - DNA, 120 bp, synthetic construct
  source 1..120: mol_type = other DNA
aactagaagagtgtaacttgattgtttgttaacacaaagaataaatacttgaggaaatggataccaaattttccacaatatgtttattatgcattgcatgcctgtaccaaaatatctggt

SEQ ID NO: 94094 - DNA, 120 bp, synthetic construct
  source 1..120: mol_type = other DNA
gcctgggcgacagagcgagactccgtctgaaaaaaaaaaaaaaataacagctaccattcattttaacactgtgccaggcaatatgctaagccccttgccatgtttatcctcagaattaat

SEQ ID NO: 94095 - DNA, 120 bp, synthetic construct; identical to SEQ ID NO: 9098
  source 1..120: mol_type = other DNA

SEQ ID NO: 94096 - DNA, 120 bp, synthetic construct; identical to SEQ ID NO: 24755
  source 1..120: mol_type = other DNA

SEQ ID NO: 94097 - DNA, 120 bp, synthetic construct
  source 1..120: mol_type = other DNA
gtttttttcttgtaaatttgtttgagttcattgtagattctggatattagccctttgtcagatgagtaggttgcaaaaattttctcccattctgtaagttacctgttcactctgatggta

SEQ ID NO: 94098 - DNA, 120 bp, synthetic construct
  source 1..120: mol_type = other DNA
taactgaataccctttatttccttctcctgcctgattgccctgaccagaacttccaacactatgttgaataggagtggtgagagagggcatccctgtcttgtgcccgttttcaaagggaa

SEQ ID NO: 94099 - DNA, 120 bp, synthetic construct
  source 1..120: mol_type = other DNA
ttgaagggtgtttttgtgtctctatttccttcagttctgctctgattttagttatttcttgccttctgctagcttttgaatgtgtttgctcttgcttttctagttcttttaattgtgatg

SEQ ID NO: 94100 - DNA, 120 bp, synthetic construct
  source 1..120: mol_type = other DNA
tgactctttatccaatttaccagtctgtgtcttttaattggagcatttagccaatttacatttaaagttaatattgttatgtgtgaatttgatcctgtcattatgatgttagctggttat

SEQ ID NO: 94101 - DNA, 120 bp, synthetic construct; identical to SEQ ID NO: 24756
  source 1..120: mol_type = other DNA

SEQ ID NO: 94102 - DNA, 120 bp, synthetic construct
  source 1..120: mol_type = other DNA
acttttaatagctgcataatgatatagattaaaaatatataaaaaaagaatttactcagaggaggagccaagatggccgaataggaacagctccggtctacagctcccagtgagagcgac

SEQ ID NO: 94103 - DNA, 120 bp, synthetic construct
  source 1..120: mol_type = other DNA
gaatgactttgacgagctgagagaagaaggcttcagacaatcaaattactccaagctacgggaggaaattcaaaccaaaggcaaagaagttgaaaactttgaaaaaaatttagaagaatg

SEQ ID NO: 94104 - DNA, 120 bp, synthetic construct
  source 1..120: mol_type = other DNA
caaaatataaagaccattgagactaggaggaaactgcatcaactaacgagcaaaataaccagctaacatcataatgacaggatcaaattcacacataacaatattaactttaaatgtaaa

SEQ ID NO: 94105 - DNA, 120 bp, synthetic construct
  source 1..120: mol_type = other DNA
ctactgggtacataacgaaatgaaggcagaaataaagatgttctttgaaaccaatgagaacaaagacacaacataccagaatctctgggacacattcaaagcagtgtgtagagggaaatt

SEQ ID NO: 94106 - DNA, 120 bp, synthetic construct
  source 1..120: mol_type = other DNA
ttaggtattgatgagacgtatctcaaaataataagagctatctatgacaaacccacagccgatatcatactgaatgggcaaaaactggaagcatttcctttgaaaacgggcacaagacag

SEQ ID NO: 94107 - DNA, 120 bp, synthetic construct
  source 1..120: mol_type = other DNA
acaccttatacaaatatcaattcaagatggattaaagagttaaacgttagagctaaaaccataaaaaccctagaagaaaacctaggcattaccattcaggacataggcatgggcaaggac

SEQ ID NO: 94108 - DNA, 120 bp, synthetic construct; identical to SEQ ID NO: 32636
  source 1..120: mol_type = other DNA

SEQ ID NO: 94109 - DNA, 120 bp, synthetic construct; identical to SEQ ID NO: 32637
  source 1..120: mol_type = other DNA

SEQ ID NO: 94110 - DNA, 120 bp, synthetic construct
  source 1..120: mol_type = other DNA
accctttattcctctccacctcccctttcccatctgcaaaatagactctgagcccagctcgctgtgtgggtgtgggtgggggtgagggctaatgagatgattgatggtctggggaaaatc

SEQ ID NO: 94111 - DNA, 120 bp, synthetic construct
  source 1..120: mol_type = other DNA
cactgttcccccggggtccaccctcctgcaatgcccgctccccgtccactgttcccccggggtccaccctcctgcaatacccgctccccgtccactgtccccccggggtccaccctcctg

SEQ ID NO: 94112 - DNA, 120 bp, synthetic construct
  source 1..120: mol_type = other DNA
ttttttttttgagacaagagttttgctcttgttgcccaggctggagtgcagtggtgagatcctgactcactgcaacctctgcctcccagtccaagcaattttcctgcctcagcctcccaa

SEQ ID NO: 94113 - DNA, 120 bp, synthetic construct
  source 1..120: mol_type = other DNA
agggagagagggaggaaaggaggaaggaaggacagatggaaggaaggaaggaaggaagggaaatctgaactcagtgctgaactgggatgaaaatgatcaagaaaagaaatctctaaccat

SEQ ID NO: 94114 - DNA, 120 bp, synthetic construct; identical to SEQ ID NO: 10091
  source 1..120: mol_type = other DNA

SEQ ID NO: 94115 - DNA, 120 bp, synthetic construct; identical to SEQ ID NO: 10092
  source 1..120: mol_type = other DNA

SEQ ID NO: 94116 - DNA, 120 bp, synthetic construct
  source 1..120: mol_type = other DNA
tctctctctttctttcttctctctctctttctttctttctctctttctttttttttttttgtctggctgtcacccagattgcagtgcagtggtacaataagggctcactgcagccttgac

SEQ ID NO: 94117 - DNA, 120 bp, synthetic construct
  source 1..120: mol_type = other DNA
agactgcctcctcaagtgggtccctgacccctgacccccgagcagcctaactgggaggcaccccccagcaggggcacactgacacctcacaaggcagggtattccaacagacctgcagct

SEQ ID NO: 94118 - DNA, 120 bp, synthetic construct
  source 1..120: mol_type = other DNA
gaaggagaaataaaatactttatagacaagcaaatgctgagagattttgtcaccaccaggcctgccctaaaagagctcctgaaggaagcgctaaacatggaaaggaacaaccagtaccag

SEQ ID NO: 94119 - DNA, 120 bp, synthetic construct
  source 1..120: mol_type = other DNA
cctacaagagaaagcaggaaagatccaaaattcacaccctaacatcacaattaaaagaactagaaaagcaagagcaaacacattcaaaagctagcagaaggcaagaaataactaaaatca

SEQ ID NO: 94120 - DNA, 120 bp, synthetic construct
  source 1..120: mol_type = other DNA
cagagccaaagacaaaaaccacatgattatctcaatagatgcagaaaaggcctttgacaaaattcaacaacccttcatgctaaaaactctcaataaattaggtattgatgggacgtatct

SEQ ID NO: 94121 - DNA, 120 bp, synthetic construct
  source 1..120: mol_type = other DNA
ctaggcattaccattcaggacataggcatgggcaagaacttcatgactaaacaccaaaagcaatggcaacaaaagccaaaattgacaaatgggatctaattaaactaaagagcttctgca

SEQ ID NO: 94122 - DNA, 120 bp, synthetic construct; identical to SEQ ID NO: 25454
  source 1..120: mol_type = other DNA

SEQ ID NO: 94123 - DNA, 120 bp, synthetic construct; identical to SEQ ID NO: 12369
  source 1..120: mol_type = other DNA

SEQ ID NO: 94124 - DNA, 120 bp, synthetic construct
  source 1..120: mol_type = other DNA
tttcctgactttttaatgatcaccattctaagtggtgtgagatggtgtctcattgtggttttgatttgcatttctctgatgaccagtgatgatgagcattttttcatgtgtctgttggct

SEQ ID NO: 94125 - DNA, 120 bp, synthetic construct
  source 1..120: mol_type = other DNA
gaagaaagtcattggtaacttgatggggatggcattgaatctataaattaccttgggcagaatgaccattttcacgatattgattcttcctatccatgagcatggaatgttcttccattt

SEQ ID NO: 94126 - DNA, 120 bp, synthetic construct
  source 1..120: mol_type = other DNA
ttcagcttcttcctggtttagtcttgggagggtgtatgtgtccaggaatttatccatttcttctagattttctggcttatttgcatagaggtgtttatagtattctctgatggtagtttg

SEQ ID NO: 94127 - DNA, 120 bp, synthetic construct; identical to SEQ ID NO: 26548
  source 1..120: mol_type = other DNA

SEQ ID NO: 94128 - DNA, 120 bp, synthetic construct; identical to SEQ ID NO: 26549
  source 1..120: mol_type = other DNA

SEQ ID NO: 94129 - DNA, 120 bp, synthetic construct
  source 1..120: mol_type = other DNA
ttggccatggtcttgccaaagctgctttcttggctgttctgagactccagcctcgagggcaaggcgtacctgacttgaatggggacaggaagaaggaaggcagggtcagaaaagtggaga

SEQ ID NO: 94130 - DNA, 120 bp, synthetic construct
  source 1..120: mol_type = other DNA
gccgcctcgctcacaccacacccctaatcccctcggtgagtgccgccgcctcgctcacaccacacccctaatcccctcggtgagtgccgccgcctcgctcacaccacacccctaatcccc

SEQ ID NO: 94131 - DNA, 120 bp, synthetic construct; identical to SEQ ID NO: 94130
  source 1..120: mol_type = other DNA

SEQ ID NO: 94132 - DNA, 120 bp, synthetic construct
  source 1..120: mol_type = other DNA
ctggtcttgaattcctgacctcaggtgatctgctcgcctcagcctcccaaagtgttggaattacaggtgtgagccaccatccctggccttttttttttcttttttttttttttttttttt

SEQ ID NO: 94133 - DNA, 120 bp, synthetic construct; identical to SEQ ID NO: 28992
  source 1..120: mol_type = other DNA

SEQ ID NO: 94134 - DNA, 120 bp, synthetic construct
  source 1..120: mol_type = other DNA
gtgggtccctgacccctgacccccgagcagcctaactgggaggcaccccccagcagaggcacactgacacctcacacggcagggtattccaacagacctgcagctgagggtcctgtctgt

SEQ ID NO: 94135 - DNA, 120 bp, synthetic construct
  source 1..120: mol_type = other DNA
tcatatccagccaaactaagcttcataagtgaaggagaaataaaatactttatagacaagcaaatgctgagagattttgtcaccaccaggcctgccctaaaagagctcctgaaggaagcg

SEQ ID NO: 94136 - DNA, 120 bp, synthetic construct
  source 1..120: mol_type = other DNA
accaacgagaacaaagacaccacataccagaatctctgggacgcattcaaagcagtgtgtagagggaaatttatagcactaaatgcctacaagagaaagcaggaaagatccaaaattgac

SEQ ID NO: 94137 - DNA, 120 bp, synthetic construct
  source 1..120: mol_type = other DNA
gctggttcaatatacgcaaatcaataaatgtaatccagcatataaacagagccaaagacaaaaaccacatgattatctcaatagatgcagaaaaagcctttgacaaaattcaacaaccct

SEQ ID NO: 94138 - DNA, 120 bp, synthetic construct
  source 1..120: mol_type = other DNA
agtaaccaaaacagcatggtactggtaccaaaacagagatatagatcaatggaacagaacagagccctcagaaataatgccgcatatctacaactatctgatctttgacaaacctgagaa

SEQ ID NO: 94139 - DNA, 120 bp, synthetic construct
  source 1..120: mol_type = other DNA
atgcacacgtatgtttattgtggcactattcacaatagcaaagacttggaaccaacccaaatgtccaacaatgatagactggattaagaaaatgtggcacatatacaccatggaatacta

SEQ ID NO: 94140 - DNA, 120 bp, synthetic construct; identical to SEQ ID NO: 20355
  source 1..120: mol_type = other DNA

SEQ ID NO: 94141 - DNA, 120 bp, synthetic construct; identical to SEQ ID NO: 20356
  source 1..120: mol_type = other DNA

SEQ ID NO: 94142 - DNA, 120 bp, synthetic construct; identical to SEQ ID NO: 4531
  source 1..120: mol_type = other DNA

SEQ ID NO: 94143 - DNA, 120 bp, synthetic construct
  source 1..120: mol_type = other DNA
agaaatatattttttacaaggaataaaaccagataaataactgaccaaatagctgatacttggccaggcatggtggctcacgcctataatcccagcattttgggaggccgattgagacca

SEQ ID NO: 94144 - DNA, 120 bp, synthetic construct; identical to SEQ ID NO: 18478
  source 1..120: mol_type = other DNA

SEQ ID NO: 94145 - DNA, 120 bp, synthetic construct
  source 1..120: mol_type = other DNA
tcacatcctttttacatttcaaaaccaatcatgcctccctgacagtctcccaaaaccttaactcattccagcattaacccaaaagtccaagtcctaagtctcatctgagacaaggcaatg

SEQ ID NO: 94146 - DNA, 120 bp, synthetic construct
  source 1..120: mol_type = other DNA
gtctattcagagattcaacttcttcctggtttagtcttgggagagtgtatgcgtcaaggaatttatccatttcttctggattttcaagtttatttgtgtagaggtgtttgtagtattctc

SEQ ID NO: 94147 - DNA, 120 bp, synthetic construct
  source 1..120: mol_type = other DNA
acttaaacgttagacctaaaaccataaaaaccctagaagaaaacacaggcattaccattcaggacataggcacgggcaaggatttcatgtctaaaacaccaaaagcaatggcaacagaag

SEQ ID NO: 94148 - DNA, 120 bp, synthetic construct
  source 1..120: mol_type = other DNA
cagttttcaaagggaatgcttccagtttttgcccattcagtatgatattggctgtggatgtgaaggacctcttcaaggagaactacaaaccactgctcaaggaaataaaagaggatacaa

SEQ ID NO: 94149 - DNA, 120 bp, synthetic construct
  source 1..120: mol_type = other DNA
acaaaagccaaagttgacaaatgggatctaattaaactaaagagcttctgcacagcaaaagaaactaccatcagagtgaacaggcagcctacaaaatgggagaaaatttttgcaacctac

SEQ ID NO: 94150 - DNA, 120 bp, synthetic construct
  source 1..120: mol_type = other DNA
tatccctaatgctagatgatgagttagtgggtgcagcgcaccagcatggcacatgtatacatatgtaactaacctgcgcaatgtgcacatgtaccctaaaacttaaagtataataattaa

SEQ ID NO: 94151 - DNA, 120 bp, synthetic construct; identical to SEQ ID NO: 18951
  source 1..120: mol_type = other DNA

SEQ ID NO: 94152 - DNA, 120 bp, synthetic construct; identical to SEQ ID NO: 18952
  source 1..120: mol_type = other DNA

SEQ ID NO: 94153 - DNA, 120 bp, synthetic construct
  source 1..120: mol_type = other DNA
cttgtagggcaggcctcatggtgacaaaatctctcagcatttgcttgtctaacaatgactgtatatctagaaaaccccattgtctcagcccaaaatctccttaagcgcataagcaacttc

SEQ ID NO: 94154 - DNA, 120 bp, synthetic construct
  source 1..120: mol_type = other DNA
catgggcaaggacttcatgtctaaaacaccaaaagcaatggcaacaaaagccagaattgacaaatgggatctaattaaactaaagagcttctgcacagcaaaagaaactaccatcagagt

SEQ ID NO: 94155 - DNA, 120 bp, synthetic construct
  source 1..120: mol_type = other DNA
agcttatccaccatgatcaagtgggcttcatccctgggatgcaaggctgcttcaacatacgcaaatcaataaatgtaatccagcatataaacagaacctaagactaaaatcacgtgatta

SEQ ID NO: 94156 - DNA, 120 bp, synthetic construct
  source 1..120: mol_type = other DNA
ctccagctttgttcttttggcttaggattgacttggcgatgcgggctcttttttggttccaaatgaactttgaagtagttttttccaattctgtgaagaaagtcattggtagcttgatgg

SEQ ID NO: 94157 - DNA, 120 bp, synthetic construct
  source 1..120: mol_type = other DNA
catgctgctataaagacacatgcacacgtatgtttattgcggcactattcacaatagcaaagacttggaaccaacccaaatgtccaacaatgatagagtggattaagaaaatgtggcaca

SEQ ID NO: 94158 - DNA, 120 bp, synthetic construct
  source 1..120: mol_type = other DNA
tgagagtaaccatggcaacccaccagaggaagtgtattctgcaggagacgttaatcccctctccccggagctgggacagcctgactttccattctcacacagtaattagataccagctgt

SEQ ID NO: 94159 - DNA, 120 bp, synthetic construct
  source 1..120: mol_type = other DNA
tttaaatgacacttccatgcctctgcacaggctgtctcctctacctgggacacccaccctctgcttagccccttggtgagcctcagccctagggtatactctgccagaaaatctccccag

SEQ ID NO: 94160 - DNA, 120 bp, synthetic construct
  source 1..120: mol_type = other DNA
acctttactgaatacctgccctgggtcaggccctattctaggcacatggccaaccagtatctcgatgactccatttcatagaggaccgaaaggagattagggttggagagatgaaggctc

SEQ ID NO: 94161 - DNA, 120 bp, synthetic construct
  source 1..120: mol_type = other DNA
ccgcggccgccgcgcgcgcactcaccgagcccgtcttgaccggcacatacaccacttggcccatcttgggttcccggccgctgcccaggcggaagcccttggagcgcacccagaactgga

SEQ ID NO: 94162 - DNA, 120 bp, synthetic construct
  source 1..120: mol_type = other DNA
aaaaaattaagcgaaaattcccaggagtttgagaccagactgggcaacatagcaagacctcatctctacaaaaataaaaaaattagccaggcatggtggcccatggctgtagtctcagct

SEQ ID NO: 94163 - DNA, 120 bp, synthetic construct
  source 1..120: mol_type = other DNA
tcacagtgggtgtacaccctgaggagatattacttcctctgatatcacagtgggtgtacaccctctcatattattcgttatgtgctaagtagatattattacccctaatatcacagtggg

SEQ ID NO: 94164 - DNA, 120 bp, synthetic construct
  source 1..120: mol_type = other DNA
agaagacttagcttttattactaccgttataattgaggccatgggttactaaccagtggtttaaaatgccattgcagctgggcacggtggctcatgcctgtaatcccagcactttgggag

SEQ ID NO: 94165 - DNA, 120 bp, synthetic construct
  source 1..120: mol_type = other DNA
aaggcagcatggagagtgcagaggattttaattcttctcccaaactgagcacctgtgcttgtctgtctaaaagagccgaatatttcattcctatcttgaaacaagtacttgctcactgca

SEQ ID NO: 94166 - DNA, 120 bp, synthetic construct; identical to SEQ ID NO: 675
  source 1..120: mol_type = other DNA

SEQ ID NO: 94167 - DNA, 120 bp, synthetic construct
  source 1..120: mol_type = other DNA
atcctagctctaataacatatgcctagaaacaaattttgatgagttttcttcccctaagcaagaagtgcatgcagtcagtatactttgaattagctctgcaagatgaaacatgatttgcc

SEQ ID NO: 94168 - DNA, 120 bp, synthetic construct
  source 1..120: mol_type = other DNA
aggctatgctgtccgcgggctccctgcagcccctccccagtcgcgctggaggggaggttcttatcatggggtcgtctaaggactgaggggtgccagacctcaggttcttcaaaaccccga

SEQ ID NO: 94169 - DNA, 120 bp, synthetic construct; identical to SEQ ID NO: 16149
  source 1..120: mol_type = other DNA

SEQ ID NO: 94170 - DNA, 120 bp, synthetic construct; identical to SEQ ID NO: 676
  source 1..120: mol_type = other DNA

SEQ ID NO: 94171 - DNA, 120 bp, synthetic construct
  source 1..120: mol_type = other DNA
tggctatgttgtccaggctggtctcctgggctcaagtgatcctccttctttggcctcccaaaatgctgggattacaggcatgagccaccatgcctggccgcaaactgatttttctttgaa

SEQ ID NO: 94172 - DNA, 120 bp, synthetic construct; identical to SEQ ID NO: 677
  source 1..120: mol_type = other DNA

SEQ ID NO: 94173 - DNA, 120 bp, synthetic construct; identical to SEQ ID NO: 16240
  source 1..120: mol_type = other DNA

SEQ ID NO: 94174 - DNA, 120 bp, synthetic construct
  source 1..120: mol_type = other DNA
gcatgggcagcggagggagatcctgtctctaaacaatacattaactcattaattcaataaataaaactagattttacttatcaaccctggtttctttgtttctgttttagtttttttttt

SEQ ID NO: 94175 - DNA, 120 bp, synthetic construct
  source 1..120: mol_type = other DNA
caagtccccactcttgatttctatactgttccacggccacgtaatgagtgaaactgcaagggaagagtttccagaaaggtagaagaaaagatgtctatttttcaaaggtgacagaaagtc

SEQ ID NO: 94176 - DNA, 120 bp, synthetic construct
  source 1..120: mol_type = other DNA
ggtggtggtcacctggagggtggggcgggatggctaatgagcacccaggatggggacttctggggtgctggtgaagtgctatcttatcatctggatggtggatacatgggtgtgttcact

SEQ ID NO: 94177 - DNA, 120 bp, synthetic construct
  source 1..120: mol_type = other DNA
tgagatgagattttcagttaagatgaattacacacgtgcttgcacgcgtacatgcacacacacacacacacacacacacacaaagactccaataaaaaatgggcaaaagacttgaacagg

SEQ ID NO: 94178 - DNA, 120 bp, synthetic construct; identical to SEQ ID NO: 678
  source 1..120: mol_type = other DNA

SEQ ID NO: 94179 - DNA, 120 bp, synthetic construct
  source 1..120: mol_type = other DNA
tcaccattattttgcaaaccatcgataaagaaaaaactacccaagatccccatctctaacaagaagcccacacatacagctgggatggaagggcctccccgtcaccgcaaaggtagagga

SEQ ID NO: 94180 - DNA, 120 bp, synthetic construct; identical to SEQ ID NO: 679
  source 1..120: mol_type = other DNA

SEQ ID NO: 94181 - DNA, 120 bp, synthetic construct
  source 1..120: mol_type = other DNA
tcataatagcccagtgctacatgtttcattgtttcagttagtgcagatgaaaggtattcagaaggctcaagacactatttttttctagtaaggtcaacaccaaattactagcccagaaaa

SEQ ID NO: 94182 - DNA, 120 bp, synthetic construct
  source 1..120: mol_type = other DNA
atgtcttaggtttgcattttttaaagttctgcctggagattatgaaatcctcgcaactcatccaacctgggcgttgaaagaggtgagtgacagctacgtctatagccatgccaataatat

SEQ ID NO: 94183 - DNA, 120 bp, synthetic construct
  source 1..120: mol_type = other DNA
gtggtgggattacaggtataaaccagtgcactcggccagatacagtctttttttttttttttttttttgcaacagggtcttgctctgttgcccaggctagagtacagtgacatattcatg

SEQ ID NO: 94184 - DNA, 120 bp, synthetic construct
  source 1..120: mol_type = other DNA
cttgaacctgggaggtggaggtagcagtgagccaagattgcaccactgcacttcagcttgggtgacagagtgagactccatctcaaaaaaaaaaaaaaaaaatttattcgaaatgaaaga

SEQ ID NO: 94185 - DNA, 120 bp, synthetic construct
  source 1..120: mol_type = other DNA
ggctgaggcgggcggatcacctgaggtcaggagttcgagaccagcctggccaacacggtgaaaccctgtctctactaaaaatacaaaaattagccgggcgtggtggcgagcacttgtaat

SEQ ID NO: 94186 - DNA, 120 bp, synthetic construct
  source 1..120: mol_type = other DNA
accactgcactccagcctgggtgacagagtgagactctcaaaaaaaaaaaaaaaaaattcaagaatatcatgtgtctctgttgactcacaagacattgcacatctacactgggaggcagt

SEQ ID NO: 94187 - DNA, 120 bp, synthetic construct; identical to SEQ ID NO: 680
  source 1..120: mol_type = other DNA

SEQ ID NO: 94188 - DNA, 120 bp, synthetic construct
  source 1..120: mol_type = other DNA
ttgggatgccccaaacccttcagcacactcctgcctcaggacctttgcacgtgccgttccctcagtcttacacactcttcctgcaggagtgaagtatggttctcttgttctttcccttca

SEQ ID NO: 94189 - DNA, 120 bp, synthetic construct
  source 1..120: mol_type = other DNA
acctcagggaacttacagggccccattccctgaaattccattcatcattttcaaaatatgtatttggctgtaatctgggaatagctgtctctgctcacctgcccccatccttctctgcaa

SEQ ID NO: 94190 - DNA, 120 bp, synthetic construct
  source 1..120: mol_type = other DNA
tgccaccacacctggctaatttttgtatttttagtggagacagggcttcaccatgttggctaggctggtcttggactcctgacctcaagtgatctgcctgcctcggcctcccaaagtgct

SEQ ID NO: 94191 - DNA, 120 bp, synthetic construct; identical to SEQ ID NO: 681
  source 1..120: mol_type = other DNA

SEQ ID NO: 94192 - DNA, 120 bp, synthetic construct
  source 1..120: mol_type = other DNA
ctgcctgactttgctcatgccgcgcttctcccaagcagaccctgcagtctccttctaagctactgttttgtgagcacctgttatgtctaaagctgttctgcaggttacatacaggtggat

SEQ ID NO: 94193 - DNA, 120 bp, synthetic construct
  source 1..120: mol_type = other DNA
agaggtgggcggatcgattgagcccaggagtttgagaccagcctgggcaacttggcaaaacaccatctctaccaaaaatgcaaaaattagctagtttcataacctggtctaaaaataaat

SEQ ID NO: 94194 - DNA, 120 bp, synthetic construct
  source 1..120: mol_type = other DNA
gaccctgtctcaaaaaaaaataaaaaggaaaagaaatagtaagaagtatcagtgtgctaaaaaggcaaatgtactacgtcggccaataaaaaaaagagattttccaaaaatgttcaacaa

SEQ ID NO: 94195 - DNA, 120 bp, synthetic construct
  source 1..120: mol_type = other DNA
atacacaaacgggaggggggtccttgggtggtagtttgctgacccatgctggagatagtgagctcatatggctgggcagtcccttcactctgaagaaatggctgtgtttttcatgattcc

SEQ ID NO: 94196 - DNA, 120 bp, synthetic construct
  source 1..120: mol_type = other DNA
tcaattataacaggaaaggctcttatcgaccaaaaaagatgcagccctctcccagcccttgttcctgagaatagtctaatcttaatgaagagacagaatgcagtccagatgattctggtt

SEQ ID NO: 94197 - DNA, 120 bp, synthetic construct
  source 1..120: mol_type = other DNA
ttccgtgggctgtcacccatcaaatcagcagctgcccttcctccctgtggaagagcaaataacacaaagggagagggccgagaaggttccctgttagactctgctgtcctctagggcaaa

SEQ ID NO: 94198 - DNA, 120 bp, synthetic construct
  source 1..120: mol_type = other DNA
cggaggcagacggagtgcttctttcaagctaacatgcacccacttgactccaagaagcctccctcgcacgcaggtgatcagtagcaaacaacaaaggcaaaaggaaaagtttcccaaatc

SEQ ID NO: 94199 - DNA, 120 bp, synthetic construct; identical to SEQ ID NO: 682
  source 1..120: mol_type = other DNA

SEQ ID NO: 94200 - DNA, 120 bp, synthetic construct; identical to SEQ ID NO: 683
  source 1..120: mol_type = other DNA

SEQ ID NO: 94201 - DNA, 120 bp, synthetic construct; identical to SEQ ID NO: 684
  source 1..120: mol_type = other DNA

SEQ ID NO: 94202 - DNA, 120 bp, synthetic construct
  source 1..120: mol_type = other DNA
agatcaagccactacactccagcctgggtgacagagcaagactccatctcaaaaaaaaaaaagagaaaaaaaaatgagaaagagcgagaagccactgaaagattttaagcaaagtgggaa

SEQ ID NO: 94203 - DNA, 120 bp, synthetic construct
  source 1..120: mol_type = other DNA
ggaaccaaacagaggagccactgaattattcattaggaaaatgcaaaacaaaaccaccatgagacacaacttcacatctaccaagatgactataataaaacagacaataacaaatgttgg

SEQ ID NO: 94204 - DNA, 120 bp, synthetic construct
  source 1..120: mol_type = other DNA
ggccacacttcctacaaaaacctgaaattagctaaaaccaccctgctgttttcattgcactcaacaagccccagagtagttaccatcaaaaaaaaaaaaaaatcaggtttctctgtttgt

SEQ ID NO: 94205 - DNA, 120 bp, synthetic construct
  source 1..120: mol_type = other DNA
ttttaagacacttggattagttactgaggaaccggagacaggatccctttcccaagaattctgtaaccccaggatagagggctgtgtttttgaagtgccttaaatagaagctttgtcaaa

SEQ ID NO: 94206 - DNA, 120 bp, synthetic construct
  source 1..120: mol_type = other DNA
ccagtgcctaaacactgaagactctcagtttttcagtcatcatgtactctgcagggatgacggatggataaacagatggtggacagaaagatggaaacatagctggaaaggtgacttcaa

SEQ ID NO: 94207 - DNA, 120 bp, synthetic construct
  source 1..120: mol_type = other DNA
ttttgattgtaaagccaaggctttgttggggaattggctgggcctagggttcaagggaaataagaatcaagaaacaaggagaaagcgggagctgccatatctgaatcagaaaagaccaca

SEQ ID NO: 94208 - DNA, 120 bp, synthetic construct
  source 1..120: mol_type = other DNA
gaaactactagtttatttaaaacagaagactccgccactgtggtgtcatgataagatgtccagtttgtaactcgcaagtccatactcgtagaaaggtcaaattcccactgaccacaagga

SEQ ID NO: 94209 - DNA, 120 bp, synthetic construct
  source 1..120: mol_type = other DNA
aaccacataacacccacaacttaacgaagccagagtgctgggaaaaaaataataagtggcaaaagacaaatactccacaagtgatcacttcagtcatccattccccaaaaaaagaccctc

SEQ ID NO: 94210 - DNA, 120 bp, synthetic construct
  source 1..120: mol_type = other DNA
cagtttattatatgttaattatacctcagtataactgccttttgaaaatacagtgttagttacctcaaagcttacgcctgccagggcataggccttgaagtctccgatggttccttccac

SEQ ID NO: 94211 - DNA, 120 bp, synthetic construct
  source 1..120: mol_type = other DNA
agattgtcttaattacagcaaatctaatccctgcaaaacagtgtttcgactgtaacttccttagcacatttcctcagtaactacagaggctttgtgtttctgtgtttattagtcacctgc

SEQ ID NO: 94212 - DNA, 120 bp, synthetic construct
  source 1..120: mol_type = other DNA
gaggggctggtcatcctcagcttttatctggggatgagaaggtgagaccagagcaaggttaaactcctactaactatgaaaataacagttccacaagtcaagaggtcattttttcaaggt

SEQ ID NO: 94213 - DNA, 120 bp, synthetic construct
  source 1..120: mol_type = other DNA
agtttctttattcattaaattcaaatatgagccaggtatggtggcccacgcctgtaatcccaccgctttgggagggtgaggcagtaggatcgcttgagcttgggagtttgagaccagcaa

SEQ ID NO: 94214 - DNA, 120 bp, synthetic construct
  source 1..120: mol_type = other DNA
catggctaatttttctatttttagtagagacaagatttcactttgttggccaggttggtctcggactcctgatctcagatgatctgcctgcctcggtctcccaaagtgttgggattacag

SEQ ID NO: 94215 - DNA, 120 bp, synthetic construct; identical to SEQ ID NO: 685
  source 1..120: mol_type = other DNA

SEQ ID NO: 94216 - DNA, 120 bp, synthetic construct
  source 1..120: mol_type = other DNA
ttaaggttaacaggccacagattaggaaatgaggggagagaaatgctcctgtcttaatgatctcgtgcagccaaaccaggcttggaccaggcacgatacgacaagccccctttctagaga

SEQ ID NO: 94217 - DNA, 120 bp, synthetic construct
  source 1..120: mol_type = other DNA
gattttcccacctcagcctgtagctgggactacaggcacacaccatcacacccggctaatttttgtatttttagtagagacggggtttcaccatgttggccagattggtcttgaactcct

SEQ ID NO: 94218 - DNA, 120 bp, synthetic construct
  source 1..120: mol_type = other DNA
ctggacttacccataacgtaggaaggtattcagaggaagtgatcacatttccacttaaatcaaattgattaatctgccggaaaactatgatgtttacatcatcgatgtcattattcccaa

SEQ ID NO: 94219 - DNA, 120 bp, synthetic construct
  source 1..120: mol_type = other DNA
cctagattttggactcagagacctcttataatcttgttcagctctaacaaaatctccatgttaccattaatgaagaaatgtttataaaataccctgcagaccctctacggatgttagtga

SEQ ID NO: 94220 - DNA, 120 bp, synthetic construct
  source 1..120: mol_type = other DNA
tctctgggtctccatagggataataacaatacctgttttgtagtcaggattggcgataatgtagataaaatatctggcgcctgcctggcatattacagatgttcaacacgtgttagaagc

SEQ ID NO: 94221 - DNA, 120 bp, synthetic construct
  source 1..120: mol_type = other DNA
ttcacaccattctcctgcctcagcctccgaagtagctgggactacaggcgtgtgccaccacacccggctaattcttttttttttttatttttagtagagacggggtttcaccatgttagc

SEQ ID NO: 94222 - DNA, 120 bp, synthetic construct
  source 1..120: mol_type = other DNA
tgtgtggcagccttcttagctgagtgaccttgggcaagttactcttagtctcttcgtgcttgactttcctcgtctataagacggggtgatgatcccgaccttgccagtggtagaaagcaa

SEQ ID NO: 94223 - DNA, 120 bp, synthetic construct
  source 1..120: mol_type = other DNA
taacagagtgagaccctttctccagaagaaaaaaaacaaaacaaaacaaaaccaaacaatccatggggtggcgaaagaaggcatgtccatacaacctgtgctccagatcgcaggttgcag

SEQ ID NO: 94224 - DNA, 120 bp, synthetic construct
  source 1..120: mol_type = other DNA
gtttataagttacccagtctaagatacaaaatagcagcccaaatggcctaagacacacggtatatccacacagaggaatgctgtgtcgttatcaaaaaaggaaaaaggaggatcggagga

SEQ ID NO: 94225 - DNA, 120 bp, synthetic construct
  source 1..120: mol_type = other DNA
agtaaatctttgcagaaaccaagtgaaaagataaatgacaaattgggaaaaatatgtacaacaaacattacaaagggttaatattcctagtatacaaagagctgaaaatggttgaaaaag

SEQ ID NO: 94226 - DNA, 120 bp, synthetic construct
  source 1..120: mol_type = other DNA
ctgtgaaggccgttgatagctgcaggcagtgacattctcaggggcccctagcagacaactcatccgggctcagggacacacctgggagccagtggcaggaatgtggagacactgcttggt

SEQ ID NO: 94227 - DNA, 120 bp, synthetic construct
  source 1..120: mol_type = other DNA
cccacctcagcctcccaaagtgctgggattacaggcgtgagccactgcacctggcctgaattaaacttttaagtaagtgtttacttcagtggaaaaatgggttgggttctaagagatgtc

SEQ ID NO: 94228 - DNA, 120 bp, synthetic construct
  source 1..120: mol_type = other DNA
ttccctgcagcaggcgcagccctggaactaaattttggccaatggtacaggaacagaagcggtaagtgccacaccctggctggaccctagggaagtggtgtgccctcccttttgctgggt

SEQ ID NO: 94229 - DNA, 120 bp, synthetic construct
  source 1..120: mol_type = other DNA
aggtctcctttcaaggctgtaaacttctgtaacatctcctaatccttaaacctggaacacctctagggacatattaggcccggagagaggccagcccatccctggggactcattagtaag

SEQ ID NO: 94230 - DNA, 120 bp, synthetic construct
  source 1..120: mol_type = other DNA
agggaagcttagggactcagctctggctcacccctgctgtgcagaaatgtgcgttcatttttctagagaagccagaaaaacaaagatttacgtgaaattttcccaattttaaatgttagc

SEQ ID NO: 94231 - DNA, 120 bp, synthetic construct; identical to SEQ ID NO: 16219
  source 1..120: mol_type = other DNA

SEQ ID NO: 94232 - DNA, 120 bp, synthetic construct
  source 1..120: mol_type = other DNA
ttctgcttaactctaatggcctaaatgtgagaaacaaagattcaggaaataaggaaaaagcaaatgagtgattgcctctctggatcaagcacaccagcaggcacaaccagcctttcttga

SEQ ID NO: 94233 - DNA, 120 bp, synthetic construct
  source 1..120: mol_type = other DNA
agaccccaggtcagtgctgcccagctgagctcttcccaggttctttatgtcccccgaaaatgagctgttttaagtttagaaaacttaaaaacacagtgacaatgaagcacagatatgcat

SEQ ID NO: 94234 - DNA, 120 bp, synthetic construct
  source 1..120: mol_type = other DNA
agcagaaggacagcttccatcccaccacatcaatatgccagtcctggggcgggggaaggacttatgggcaacctttgcagaatcactggggcctggccgcacatgagccatgcccacgct

SEQ ID NO: 94235 - DNA, 120 bp, synthetic construct
  source 1..120: mol_type = other DNA
actccctggatcaagtgattctcctgtcagcctatcgagtggctgggactacaggcgcccaccaccacacctagctaatttttgtagttttagtagagacagggtttcaccatattggcc

SEQ ID NO: 94236 - DNA, 120 bp, synthetic construct
  source 1..120: mol_type = other DNA
aagctgtgtcctctctttccaagaaagacaaagcagagaacaaagttcaacctacagtgtcttcccaaattcttgacccacgggatctgtgaatatcttatacgactgaattaagcctct

SEQ ID NO: 94237 - DNA, 120 bp, synthetic construct
  source 1..120: mol_type = other DNA
atgaaatgagatgatgtagtcacatgccagcttgtctagggatgactcagaggtttagagatggatgtcacgtggatgttgtacaggagaggcaggtataagctgtagtaaagttaggaa

SEQ ID NO: 94238 - DNA, 120 bp, synthetic construct
  source 1..120: mol_type = other DNA
gattacaggcgtgagccaccgcacccgggctgttattagacttggaatgggacaaaagtcatatgagacagacttgtttgctgaggtatttaaaaaacaaaatggtctaagatggcagat

SEQ ID NO: 94239 - DNA, 120 bp, synthetic construct
  source 1..120: mol_type = other DNA
attacccctgtctacttactgacttgccttctacccagtgatgggccatgtgctgtgagggcacacactgtgtgcccatctattcattcctctgtgcgtgcgttcattcattccttactg

SEQ ID NO: 94240 - DNA, 120 bp, synthetic construct; identical to SEQ ID NO: 16081
  source 1..120: mol_type = other DNA

SEQ ID NO: 94241 - DNA, 120 bp, synthetic construct
  source 1..120: mol_type = other DNA
aagcttcactatttgcttctgaaactcagggacaaagagattccaatgacaaggcattcctcagcctctggaccctcctcccaactgaggaaatgaagagatgcagctatcagagagtct

SEQ ID NO: 94242 - DNA, 120 bp, synthetic construct
  source 1..120: mol_type = other DNA
ccacagtcactctctagcccagcagttctcggatgggttggttgcaggacccctttatactgttaaaaattattgaggattttaaagagtttgagtttgcatggattatctctgtgtata

SEQ ID NO: 94243 - DNA, 120 bp, synthetic construct
  source 1..120: mol_type = other DNA
actttaagttttaggatatatgtgcacaatgtgcaggttagttacataggtatacaggaaggggaacatcacacaccagggcacagtttcttacattctcagaagtgacaggcagcagct

SEQ ID NO: 94244 - DNA, 120 bp, synthetic construct
  source 1..120: mol_type = other DNA
tatccatttggagtttttcctggtatagatgtgaagtatggctccagattgtctttttccacatgctatccagttaccatttcatgcttttcaaacgccatcctgcatggaaggtggaca

SEQ ID NO: 94245 - DNA, 120 bp, synthetic construct
  source 1..120: mol_type = other DNA
tgccaatgccttgatcttggacttcccagcctctagtactgtaagaaataaatgtttgttgtttataagttacccagtctaagatacaaaatagcagcccaaatggcctaagacacacgg

SEQ ID NO: 94246 - DNA, 120 bp, synthetic construct
  source 1..120: mol_type = other DNA
acctggagcacaggttgtatggacatgccttctttcgccaccccatggattgttttgttttgttttgttttgttttgttttgtttcttctggagaaagggtctcactctgttacccaagc

SEQ ID NO: 94247 - DNA, 120 bp, synthetic construct
  source 1..120: mol_type = other DNA
cccgttgtggatcctcagttgtatcacgtacctccctcatcagaattggctcataataattttttgtgtttcataaagtcagatcctcagaggaccgtaattgtcaaggttgggtactca

SEQ ID NO: 94248 - DNA, 120 bp, synthetic construct; identical to SEQ ID NO: 16194
  source 1..120: mol_type = other DNA

SEQ ID NO: 94249 - DNA, 120 bp, synthetic construct
  source 1..120: mol_type = other DNA
gctatgaaatattgattgtgtttcagtttcaaagcatgtctgactttgtttctccctccaggtcaagctttacaaaagcgaaaacctcgacaatccaatccagacagtttcccttggcca

SEQ ID NO: 94250 - DNA, 120 bp, synthetic construct
  source 1..120: mol_type = other DNA
gccactctcttgctcctgagtgttgctgtgctagaattgaggctcagggttggtgtcacttcccagttttccggagaagctggaaattagaattatttgaaatcacctgatttttaaata

SEQ ID NO: 94251 - DNA, 120 bp, synthetic construct
  source 1..120: mol_type = other DNA
atgttcttgcattggtttaaagaaatgcctgaggctagataatttataacaaaagaggtttcattggctcctcgttctgtaggttgtacaggaagcatagtggtgtctgcttctggggag

SEQ ID NO: 94252 - DNA, 120 bp, synthetic construct
  source 1..120: mol_type = other DNA
ggggccggccctctgggatctcgcaaactccatgtacagacctcacgcagagggggtgctgtgactctgcccctgctctaacaggcaagagcatccttctccttttttttttaagagaag

SEQ ID NO: 94253 - DNA, 120 bp, synthetic construct; identical to SEQ ID NO: 716
  source 1..120: mol_type = other DNA

SEQ ID NO: 94254 - DNA, 120 bp, synthetic construct
  source 1..120: mol_type = other DNA
tgctagggaaaagccctaccaaacccatggttttccaactccattgtgccacagatccttgatctgacctgttggctagaaaaaaggcaaactctaccaattaaaggtaagaactgggag

SEQ ID NO: 94255 - DNA, 120 bp, synthetic construct
  source 1..120: mol_type = other DNA
gagaaaatgtgctcagttgaataaaacttcaaaatgctgaaaagagtatagtgtaaaatttcccctctgtctcgtctcctagccacccaagttcctcttctgggagacaaccagtacttc

SEQ ID NO: 94256 - DNA, 120 bp, synthetic construct
  source 1..120: mol_type = other DNA
aaaagaaaaattaaatatgacttctacctctctgagtcattgcaggcaggtgataccatcagctgccgttgttagagttgtgattgccactacctgactgtgagtggtgattatagagag

SEQ ID NO: 94257 - DNA, 120 bp, synthetic construct; identical to SEQ ID NO: 717
  source 1..120: mol_type = other DNA

SEQ ID NO: 94258 - DNA, 120 bp, synthetic construct
  source 1..120: mol_type = other DNA
tgcctagagatacatatttggggatattccaattgtctcttgtgtaccacaagagtaggtgctgtggtttgtcaaaccctgccttagaatgctatgcagtagttaagaaacaggcagatt

SEQ ID NO: 94259 - DNA, 120 bp, synthetic construct; identical to SEQ ID NO: 94210
  source 1..120: mol_type = other DNA

SEQ ID NO: 94260 - DNA, 120 bp, synthetic construct
  source 1..120: mol_type = other DNA
gcagagcatgatgggagggtctttttttggggaatggatgactgaagtgatcacttgtggagtatttgtcttttgccacttattatttttttcccagcactctggcttcgttaagttgtg

SEQ ID NO: 94261 - DNA, 120 bp, synthetic construct; identical to SEQ ID NO: 94208
  source 1..120: mol_type = other DNA

SEQ ID NO: 94262 - DNA, 120 bp, synthetic construct
  source 1..120: mol_type = other DNA
caaagcccagctgggaagctgctgcagtgatcccggagggggtcagaccagggctgagggccacgtggtaagaagggaaggccagctgggaagctgctacagtgaccccagaggggggtc

SEQ ID NO: 94263 - DNA, 120 bp, synthetic construct; identical to SEQ ID NO: 94206
  source 1..120: mol_type = other DNA

SEQ ID NO: 94264 - DNA, 120 bp, synthetic construct; identical to SEQ ID NO: 94205
  source 1..120: mol_type = other DNA

SEQ ID NO: 94265 - DNA, 120 bp, synthetic construct
  source 1..120: mol_type = other DNA
caggtattatgctaggtactggtacacagtggggaatgacagagcagtggtccctgtcttcatggagtttaccatccacagagagggggagcatttgacagccacaaacatatcaattgt

SEQ ID NO: 94266 - DNA, 120 bp, synthetic construct; identical to SEQ ID NO: 718
  source 1..120: mol_type = other DNA

SEQ ID NO: 94267 - DNA, 120 bp, synthetic construct; identical to SEQ ID NO: 719
  source 1..120: mol_type = other DNA

SEQ ID NO: 94268 - DNA, 120 bp, synthetic construct; identical to SEQ ID NO: 720
  source 1..120: mol_type = other DNA

SEQ ID NO: 94269 - DNA, 120 bp, synthetic construct; identical to SEQ ID NO: 683
  source 1..120: mol_type = other DNA

SEQ ID NO: 94270 - DNA, 120 bp, synthetic construct; identical to SEQ ID NO: 682
  source 1..120: mol_type = other DNA

SEQ ID NO: 94271 - DNA, 120 bp, synthetic construct
  source 1..120: mol_type = other DNA
ctttcaagctaacatgcacccacttgactccaagaagcctccctcgcacgcaggtgatcagtagcaaacaacaaaggcaaaaggaaaagtttcccaaatcccactcctactggctgactt

SEQ ID NO: 94272 - DNA, 120 bp, synthetic construct; identical to SEQ ID NO: 94197
  source 1..120: mol_type = other DNA

SEQ ID NO: 94273 - DNA, 120 bp, synthetic construct
  source 1..120: mol_type = other DNA
cccggaacacacaaacagccccactacgggcccctgttctgtagaaagatgcccagtcttgcttctgaaggttgctttttaaaaccagaatgaaggttgctttttaaaaccagaatcatc

SEQ ID NO: 94274 - DNA, 120 bp, synthetic construct
  source 1..120: mol_type = other DNA
tacatgaaatgcaaactgtggtgtccaaaaatgtagttgtgttgcgctctgcccattcatttacaaatgtctatctcagctgttgtcctagagaccgtatggctcacgcagcctaaaata

SEQ ID NO: 94275 - DNA, 120 bp, synthetic construct; identical to SEQ ID NO: 721
  source 1..120: mol_type = other DNA

SEQ ID NO: 94276 - DNA, 120 bp, synthetic construct
  source 1..120: mol_type = other DNA
ataaaaattaaaaaataaaataacaagattttaaaaaaagacaagacaaatacatttatgctgctaaattatggcaagtgttgtgcagagaagagatcagggtgctgcaagaagagctaa

SEQ ID NO: 94277 - DNA, 120 bp, synthetic construct
  source 1..120: mol_type = other DNA
tgaaagcagagacgacaagggcttgccttgtagggaagtcagggacagactggtgagatatttagggtgcccagcttgagaggtgtgatggctggggacagaaagagaagccagttaggt

SEQ ID NO: 94278 - DNA, 120 bp, synthetic construct
  source 1..120: mol_type = other DNA
ttttttttttttgagagacagagtcttgccctgttgcccaggctgtagtgcagtggtgccatctcgactcactgcaacctctgcctcccaggttcaagtgattctcctgcctcagcttcc

SEQ ID NO: 94279 - DNA, 120 bp, synthetic construct; identical to SEQ ID NO: 16058
  source 1..120: mol_type = other DNA

SEQ ID NO: 94280 - DNA, 120 bp, synthetic construct
  source 1..120: mol_type = other DNA
agaagggctccctgcataaaaaggaagtcatttaattatttaaagcttcatctcaaatgctgttgcacacgtgcgtgcacacattcattcattcaggagtcagttattgagtgcctgctg

SEQ ID NO: 94281 - DNA, 120 bp, synthetic construct
  source 1..120: mol_type = other DNA
actttgcctataactctgggtgagaattggtgccactggaaggttcctagcagaggagtggcgtgatccttctggcagctgcattgaggagagtttgcagggtgtcagggtggaagtggg

SEQ ID NO: 94282 - DNA, 120 bp, synthetic construct; identical to SEQ ID NO: 722
  source 1..120: mol_type = other DNA

SEQ ID NO: 94283 - DNA, 120 bp, synthetic construct; identical to SEQ ID NO: 94186
  source 1..120: mol_type = other DNA

SEQ ID NO: 94284 - DNA, 120 bp, synthetic construct
  source 1..120: mol_type = other DNA
agcctcccaaagtgctgggattacaggtgtgagccaccgtgcctggcttatcattattttttaatgcccaaaatgaagtgaaaggaaatgtggcaaaatgtaaacaataatgattttgtc

SEQ ID NO: 94285 - DNA, 120 bp, synthetic construct
  source 1..120: mol_type = other DNA
tcttctatttataaatgtgtaagctctttcatttcgaataaattttttttttttttttgagatggagtctcactctgtcacccaagctgaagtgcagtggtgcaatcttggctcactgct

SEQ ID NO: 94286 - DNA, 120 bp, synthetic construct
  source 1..120: mol_type = other DNA
tacagtctttttttttttttttttttttgcaacagggtcttgctctgttgcccaggctagagtacagtgacatattcatggctcattgcagcctctggttcctggccttaagcgatcctt

SEQ ID NO: 94287 - DNA, 120 bp, synthetic construct; identical to SEQ ID NO: 94182
  source 1..120: mol_type = other DNA

SEQ ID NO: 94288 - DNA, 120 bp, synthetic construct; identical to SEQ ID NO: 94181
  source 1..120: mol_type = other DNA

SEQ ID NO: 94289 - DNA, 120 bp, synthetic construct
  source 1..120: mol_type = other DNA
gattaaatatgagttcatactggccaggcatattggcttgcgcctataatgccagcactttgggaggccaggatgggaggatcacttgagttcaggagttcgagaccagcctggacaact

SEQ ID NO: 94290 - DNA, 120 bp, synthetic construct
  source 1..120: mol_type = other DNA
aaaaaaaaaaaaagtaaatgtacataaaaataaaaatataaaaattagctgggtcaggtggcacacgcctgtaatcccagctactggggaggctgaggcaggagaattgctcgaacccag

SEQ ID NO: 94291 - DNA, 120 bp, synthetic construct
  source 1..120: mol_type = other DNA
ctacacggatgaagtacagagttcacaggctcacttgccacttatccatgggtcccttgtgggatcaaagtccccaggttaaaatatcctgcatttttttaaaaaaggatttagtataca

SEQ ID NO: 94292 - DNA, 120 bp, synthetic construct
  source 1..120: mol_type = other DNA
gtctgccaaccactaccatgctttgccagagcttccaacttctccgaaaaactggaaatctggattttatataccatctcttgatttttcaatatcagcaattaactccattttttaact

SEQ ID NO: 94293 - DNA, 120 bp, synthetic construct
  source 1..120: mol_type = other DNA
tttgctgttgagaattctgatgcataaatataaaattatttatattttataaaatatttatattttattttattttttcttttttttgagactgagtctcgctctgttgcccaggctgga

SEQ ID NO: 94294 - DNA, 120 bp, synthetic construct
  source 1..120: mol_type = other DNA
tcataaaaatccagatttatgtcccatgagatgagaagactgtcagccttataccttaccagttaaataactttgggcaagttacttcccccgtgtcagcctggctcctcactgtcgagc

SEQ ID NO: 94295 - DNA, 120 bp, synthetic construct
  source 1..120: mol_type = other DNA
gtcaccccctaaaactagatttggccaggcacagtacctcacacctataatcccaacactgtgggaggccaaggcaggagggtcacttgaggccaggagttcaagaccagcctaagcaac

SEQ ID NO: 94296 - DNA, 120 bp, synthetic construct
  source 1..120: mol_type = other DNA
catggtgaaacaccatctctactaaaaatacaaaaaaagttagctgggcatggtggtgggtgcctgtaatcccagctacttgggaggctgaggcagaaacccaggaggcagaggttgcag

SEQ ID NO: 94297 - DNA, 120 bp, synthetic construct
  source 1..120: mol_type = other DNA
catttagctccacgcctggccactactcactgggtgactgtagcgcacagccacagatgtcacaacaaaaacgtctctagacattgccaaatggccctaaacacagagagagccactgta

SEQ ID NO: 94298 - DNA, 120 bp, synthetic construct
  source 1..120: mol_type = other DNA
aggctgaggcaggaaaattgtttgaactcaggaggcggaggttgcagtgagccaagatcatgccacagcactccagcctgggagacagagcaagactccgtctcaaaaataataataaaa

SEQ ID NO: 94299 - DNA, 120 bp, synthetic construct; identical to SEQ ID NO: 723
  source 1..120: mol_type = other DNA

SEQ ID NO: 94300 - DNA, 120 bp, synthetic construct; identical to SEQ ID NO: 16048
  source 1..120: mol_type = other DNA

SEQ ID NO: 94301 - DNA, 120 bp, synthetic construct
  source 1..120: mol_type = other DNA
ggttctgggctgtggagtttgggggataagacatgtggtctctaggttctggaatgtgggtttggggaaatctgagtttcagggggtctgattcgaggagatctcaggtctaagttttaa

SEQ ID NO: 94302 - DNA, 120 bp, synthetic construct
  source 1..120: mol_type = other DNA
acaaaaagctttagggccgggtgtgtggctcacgcctgtaatcccagcactttgggaggctgaggtgggtggatcgcttgagcccacgagttcgagaccagcctgggcaatatggcgaaa

SEQ ID NO: 94303 - DNA, 120 bp, synthetic construct
  source 1..120: mol_type = other DNA
aattgcagcgggaaattcagtcttactttgtcatttggaaacaaaatacaaaacctatcaaaataaagcactagctttttttttttgagacaaaatggaagaaatcctaatattaggtaa

SEQ ID NO: 94304 - DNA, 120 bp, synthetic construct; identical to SEQ ID NO: 724
  source 1..120: mol_type = other DNA

SEQ ID NO: 94305 - DNA, 120 bp, synthetic construct
  source 1..120: mol_type = other DNA
tattcaatcatcatttagcaaccaccttttcatattcatatatgtcttcaatggcattttgtttgcttgttctgagacagagtctcgctctgtcacccaggctggagtgcagtggcacaa

SEQ ID NO: 94306 - DNA, 120 bp, synthetic construct
  source 1..120: mol_type = other DNA
tgtgctaagtagatattattacccctaatatcacagtgggtgtacaccctgtgatgttattccttatatcccaagaagatattattataactaatatcacagtgggtgtacaccctatga

SEQ ID NO: 94307 - DNA, 120 bp, synthetic construct
  source 1..120: mol_type = other DNA
ccttttttttttttttttttttaaataaagaccgagtcttgctatgttgcccaggctggtctcaaactcctggggtcaagccatcttcctgcctcagcctcccaaagtgctgagattaca

SEQ ID NO: 94308 - DNA, 120 bp, synthetic construct; identical to SEQ ID NO: 25189
  source 1..120: mol_type = other DNA

SEQ ID NO: 94309 - DNA, 120 bp, synthetic construct; identical to SEQ ID NO: 25190
  source 1..120: mol_type = other DNA

SEQ ID NO: 94310 - DNA, 120 bp, synthetic construct; identical to SEQ ID NO: 25191
  source 1..120: mol_type = other DNA

SEQ ID NO: 94311 - DNA, 120 bp, synthetic construct; identical to SEQ ID NO: 25192
  source 1..120: mol_type = other DNA

SEQ ID NO: 94312 - DNA, 120 bp, synthetic construct; identical to SEQ ID NO: 25193
  source 1..120: mol_type = other DNA

SEQ ID NO: 94313 - DNA, 120 bp, synthetic construct
  source 1..120: mol_type = other DNA
gagccctgtgagcaatttgtcctccatatcacctccaaattaatctccaaacactgcttaatggaaaagcaagagtctcatcagaccaaaaccactcatcctgactttcattcaaggttt

SEQ ID NO: 94314 - DNA, 120 bp, synthetic construct
  source 1..120: mol_type = other DNA
ttgcgccactgcactccagcctgggcgacagggcgagactccgtctcaaataataataataataataataataataataataataataataaaataaaataaaataaaataaaaatacaa

SEQ ID NO: 94315 - DNA, 120 bp, synthetic construct
  source 1..120: mol_type = other DNA
cgattcaaatttactgctgcttaacaactcacccttacatttagtggctgaaaaccgcaatgtactatttgtcacaatcagggtagacaagatgcagatggtggttctgctggtcttgtt

SEQ ID NO: 94316 - DNA, 120 bp, synthetic construct
  source 1..120: mol_type = other DNA
tatttctattcgctttaatcctttttcttttttttttttttttttttttttttgacagagccttgctctgttgcccaggctagagtgcagcctctgcctcccgggttcaagcgattctcc

SEQ ID NO: 94317 - DNA, 120 bp, synthetic construct
  source 1..120: mol_type = other DNA
cctgctacagtcatttaaaaaaaaaaaaccaaaaacaaaaaaaagaaataaattaatagtacgaagaaaactgcgcgagctacattcccagcagggtctgcgccagagcgcgccaggcac

SEQ ID NO: 94318 - DNA, 120 bp, synthetic construct
  source 1..120: mol_type = other DNA
acgggcctggaaagctctagatccgggggtctttaccttgacccatgggtagaatcgctctagcaattagaaataagcctcccggacgccgcccccgaacgattaaagcagaagctggga

SEQ ID NO: 94319 - DNA, 120 bp, synthetic construct
  source 1..120: mol_type = other DNA
ctgagaaaaaaaggtttggttccagaaggcaaattctacgaaatactcgagggtgtgttacaagctattatttattgcccacttgtgctatcagacctgaatgcagttgttcccatggct

SEQ ID NO: 94320 - DNA, 120 bp, synthetic construct
  source 1..120: mol_type = other DNA
tagaaagaggaggtagagtaaacctaccccatatacacctcagctcaggccctgtgcctggtctgtattgtgaatgggggaacatagaattgaggaagatttggatctttgtcccatttc

SEQ ID NO: 94321 - DNA, 120 bp, synthetic construct
  source 1..120: mol_type = other DNA
aagtatccagcatccacagtgcagatccttggggctgaaaaggccctgttcaggtaccagtgagggcacctgcccacaatcaggtgccacttctggtgcccactgcttgttgggggatca

SEQ ID NO: 94322 - DNA, 120 bp, synthetic construct
  source 1..120: mol_type = other DNA
ctgaccttgtagaatggaggcaaaaaaactgatttaatgagcctgatccaataaagccagaaaggagtcctcagagcaccagaagtcttcaggcccttttagcacttttctttgaccagg

SEQ ID NO: 94323 - DNA, 120 bp, synthetic construct; identical to SEQ ID NO: 13251
  source 1..120: mol_type = other DNA

SEQ ID NO: 94324 - DNA, 120 bp, synthetic construct
  source 1..120: mol_type = other DNA
tacagtcccaccaacggtgtaaaagtgttcctatttctccacatcctctccagcacttgttgtttcctgactttttaatgattgacattctaactggtgtgagacggtatctcattgtgg

SEQ ID NO: 94325 - DNA, 120 bp, synthetic construct; identical to SEQ ID NO: 13252
  source 1..120: mol_type = other DNA

SEQ ID NO: 94326 - DNA, 120 bp, synthetic construct
  source 1..120: mol_type = other DNA
cttcctttcttccttccttccttccctccttctttcctttcatctctccttccctctttcctcccttccctccccacttccttccctccttccttccctctctccttcctttcttccttc

SEQ ID NO: 94327 - DNA, 120 bp, synthetic construct
  source 1..120: mol_type = other DNA
cccagtaatgggattgctgggtcaaatgtatttctgtctttaggtctttgaggaattgccacactgttttccacaatggctgaactaatttatactcccaccaacagtctataagggttc

SEQ ID NO: 94328 - DNA, 120 bp, synthetic construct
  source 1..120: mol_type = other DNA
tcagtgatgttgagcttttttattttcatatgattattggctgcatgtatgttttcttttttttaaattttattatcatactttaagttttagggtacatgtgcacaacgtgcaggtttg

SEQ ID NO: 94329 - DNA, 120 bp, synthetic construct
  source 1..120: mol_type = other DNA
atatccctcacccactttttgatggggttgtttgtttttttcttgtaaatttgtttgagttcattgtagattctggatattagccctttgtcagatgagtaggttgcaaaaattttctcc

SEQ ID NO: 94330 - DNA, 120 bp, synthetic construct; identical to SEQ ID NO: 8949
  source 1..120: mol_type = other DNA

SEQ ID NO: 94331 - DNA, 120 bp, synthetic construct; identical to SEQ ID NO: 8950
  source 1..120: mol_type = other DNA

SEQ ID NO: 94332 - DNA, 120 bp, synthetic construct; identical to SEQ ID NO: 8951
  source 1..120: mol_type = other DNA

SEQ ID NO: 94333 - DNA, 120 bp, synthetic construct
  source 1..120: mol_type = other DNA
ttctaactggtgtgagatggtatctcattgtggttttgatttgcatttctctgatagccagtgatgatgagcattttttcatgtgttttttggctgcataaatgtcttcttttgagaagt

SEQ ID NO: 94334 - DNA, 120 bp, synthetic construct; identical to SEQ ID NO: 8952
  source 1..120: mol_type = other DNA

SEQ ID NO: 94335 - DNA, 120 bp, synthetic construct; identical to SEQ ID NO: 8953
  source 1..120: mol_type = other DNA

SEQ ID NO: 94336 - DNA, 120 bp, synthetic construct; identical to SEQ ID NO: 8954
  source 1..120: mol_type = other DNA

SEQ ID NO: 94337 - DNA, 120 bp, synthetic construct; identical to SEQ ID NO: 17835
  source 1..120: mol_type = other DNA

SEQ ID NO: 94338 - DNA, 120 bp, synthetic construct; identical to SEQ ID NO: 17836
  source 1..120: mol_type = other DNA

SEQ ID NO: 94339 - DNA, 120 bp, synthetic construct; identical to SEQ ID NO: 17837
  source 1..120: mol_type = other DNA

SEQ ID NO: 94340 - DNA, 120 bp, synthetic construct
  source 1..120: mol_type = other DNA
agggaagctcaacccttctttgaattggtcccttgtttccaaaaagaggagaggactgggaagaaccagaggagttgagggacatgcacgggacttgggtgaccctcagcctccagcctt

SEQ ID NO: 94341 - DNA, 120 bp, synthetic construct
  source 1..120: mol_type = other DNA
ctggtatttccacggaaactacagggccggccctcccccggccccccggcccctgagcagctgctgagtcaggcccgggacttcatcaaccagtactacagctccattaagaggtgacag

SEQ ID NO: 94342 - DNA, 120 bp, synthetic construct; identical to SEQ ID NO: 33161
  source 1..120: mol_type = other DNA

SEQ ID NO: 94343 - DNA, 120 bp, synthetic construct; identical to SEQ ID NO: 33162
  source 1..120: mol_type = other DNA

SEQ ID NO: 94344 - DNA, 120 bp, synthetic construct
  source 1..120: mol_type = other DNA
catttacccagctttaaacaaccaattcaagcccttcagagatgcacaatggactccgaggccaggggactgcgtagacagggtcgacatctgatgacaaattctcatctgccaattaga

SEQ ID NO: 94345 - DNA, 120 bp, synthetic construct
  source 1..120: mol_type = other DNA
ggcccctgagcctgtgagtggggggttcagaggtgaggcctctacagaagtctccctcccaggggcaatgggtgcagggtaggcggggagcactcaggatccctcccaggggcaatgggt

SEQ ID NO: 94346 - DNA, 120 bp, synthetic construct
  source 1..120: mol_type = other DNA
acacgggcctggatctaggccagggcatagccagtcactctaagctgaccctgagggtccagggggagaagcagcctggagccaatcacacagagctctgtccagggaagggaaggcccc

SEQ ID NO: 94347 - DNA, 120 bp, synthetic construct; identical to SEQ ID NO: 7994
  source 1..120: mol_type = other DNA

SEQ ID NO: 94348 - DNA, 120 bp, synthetic construct; identical to SEQ ID NO: 7995
  source 1..120: mol_type = other DNA

SEQ ID NO: 94349 - DNA, 120 bp, synthetic construct; identical to SEQ ID NO: 7996
  source 1..120: mol_type = other DNA

SEQ ID NO: 94350 - DNA, 120 bp, synthetic construct
  source 1..120: mol_type = other DNA
cctgggagaaagagcgatgctccgtctcaaaaaaaaaaaaaaaaagaaaagaaaagaaaagaaaatgacgcatgcccccaagtgtgagaatgcaagagggaatccctgacctatccctat

SEQ ID NO: 94351 - DNA, 120 bp, synthetic construct; identical to SEQ ID NO: 7997
  source 1..120: mol_type = other DNA

SEQ ID NO: 94352 - DNA, 120 bp, synthetic construct; identical to SEQ ID NO: 7998
  source 1..120: mol_type = other DNA

SEQ ID NO: 94353 - DNA, 120 bp, synthetic construct; identical to SEQ ID NO: 7999
  source 1..120: mol_type = other DNA

SEQ ID NO: 94354 - DNA, 120 bp, synthetic construct; identical to SEQ ID NO: 8000
  source 1..120: mol_type = other DNA

SEQ ID NO: 94355 - DNA, 120 bp, synthetic construct; identical to SEQ ID NO: 8001
  source 1..120: mol_type = other DNA

SEQ ID NO: 94356 - DNA, 120 bp, synthetic construct
  source 1..120: mol_type = other DNA
ctgtgatcccagctacttggaaggctgaggcagaagaatcacttgaacccaggaggcggaggttgcagtgagccgagattgtaccactgcactccagcctgggcgacacagcaagactct

SEQ ID NO: 94357 - DNA, 120 bp, synthetic construct
  source 1..120: mol_type = other DNA
tgaatttttattattattattattattatactttaagttctagggtacacgtgcacaacatgcaggtttgttacatatgtatatatgtgccatgttggtgtgctgcacccattaactcgt

SEQ ID NO: 94358 - DNA, 120 bp, synthetic construct
  source 1..120: mol_type = other DNA
gttaggagtttgagaccagcctggccaacatggtgaaatgccatcttttctaaaaatacaaaaattagccgggctttatggcgcatgcctgtaatcccagctacctgggaggctgaggca

SEQ ID NO: 94359 - DNA, 120 bp, synthetic construct; identical to SEQ ID NO: 8002
  source 1..120: mol_type = other DNA

SEQ ID NO: 94360 - DNA, 120 bp, synthetic construct
  source 1..120: mol_type = other DNA
cagccagctacttggtggcaggttgattatgttggacttcttccattgtgaaaagggcagatgtttgtccttactggaatagacacttactctggatatgggtttgcctatcctgcatgc

SEQ ID NO: 94361 - DNA, 120 bp, synthetic construct; identical to SEQ ID NO: 8003
  source 1..120: mol_type = other DNA

SEQ ID NO: 94362 - DNA, 120 bp, synthetic construct; identical to SEQ ID NO: 8004
  source 1..120: mol_type = other DNA

SEQ ID NO: 94363 - DNA, 120 bp, synthetic construct; identical to SEQ ID NO: 8005
  source 1..120: mol_type = other DNA

SEQ ID NO: 94364 - DNA, 120 bp, synthetic construct; identical to SEQ ID NO: 8006
  source 1..120: mol_type = other DNA

SEQ ID NO: 94365 - DNA, 120 bp, synthetic construct; identical to SEQ ID NO: 8007
  source 1..120: mol_type = other DNA

SEQ ID NO: 94366 - DNA, 120 bp, synthetic construct
  source 1..120: mol_type = other DNA
acctgtaatgccagcactttgggaggctgaggtgtgaggaccatctgaggtcaggagtttgagaatagcccggccaacatggtgaaaccctggctctactaaaaatacaaaaattagcca

SEQ ID NO: 94367 - DNA, 120 bp, synthetic construct; identical to SEQ ID NO: 8008
  source 1..120: mol_type = other DNA

SEQ ID NO: 94368 - DNA, 120 bp, synthetic construct; identical to SEQ ID NO: 8009
  source 1..120: mol_type = other DNA

SEQ ID NO: 94369 - DNA, 120 bp, synthetic construct; identical to SEQ ID NO: 8010
  source 1..120: mol_type = other DNA

SEQ ID NO: 94370 - DNA, 120 bp, synthetic construct; identical to SEQ ID NO: 8011
  source 1..120: mol_type = other DNA

SEQ ID NO: 94371 - DNA, 120 bp, synthetic construct; identical to SEQ ID NO: 8012
  source 1..120: mol_type = other DNA

SEQ ID NO: 94372 - DNA, 120 bp, synthetic construct; identical to SEQ ID NO: 8013
  source 1..120: mol_type = other DNA

SEQ ID NO: 94373 - DNA, 120 bp, synthetic construct; identical to SEQ ID NO: 8014
  source 1..120: mol_type = other DNA

SEQ ID NO: 94374 - DNA, 120 bp, synthetic construct; identical to SEQ ID NO: 8015
  source 1..120: mol_type = other DNA

SEQ ID NO: 94375 - DNA, 120 bp, synthetic construct; identical to SEQ ID NO: 8016
  source 1..120: mol_type = other DNA

SEQ ID NO: 94376 - DNA, 120 bp, synthetic construct; identical to SEQ ID NO: 8017
  source 1..120: mol_type = other DNA

SEQ ID NO: 94377 - DNA, 120 bp, synthetic construct; identical to SEQ ID NO: 8018
  source 1..120: mol_type = other DNA

SEQ ID NO: 94378 - DNA, 120 bp, synthetic construct; identical to SEQ ID NO: 8019
  source 1..120: mol_type = other DNA

SEQ ID NO: 94379 - DNA, 120 bp, synthetic construct; identical to SEQ ID NO: 8020
  source 1..120: mol_type = other DNA

SEQ ID NO: 94380 - DNA, 120 bp, synthetic construct; identical to SEQ ID NO: 8021
  source 1..120: mol_type = other DNA

SEQ ID NO: 94381 - DNA, 120 bp, synthetic construct; identical to SEQ ID NO: 8022
  source 1..120: mol_type = other DNA

SEQ ID NO: 94382 - DNA, 120 bp, synthetic construct; identical to SEQ ID NO: 8023
  source 1..120: mol_type = other DNA

SEQ ID NO: 94383 - DNA, 120 bp, synthetic construct
  source 1..120: mol_type = other DNA
tggtggcgggcgcttgtagtcccggctacttgagaggctgaggcaggagaatggcaagaacccgggaggcggagcttacagtgagccaagaaagcgccactgcactccagcctgggccac

SEQ ID NO: 94384 - DNA, 120 bp, synthetic construct; identical to SEQ ID NO: 8024
  source 1..120: mol_type = other DNA

SEQ ID NO: 94385 - DNA, 120 bp, synthetic construct; identical to SEQ ID NO: 8025
  source 1..120: mol_type = other DNA

SEQ ID NO: 94386 - DNA, 120 bp, synthetic construct; identical to SEQ ID NO: 8026
  source 1..120: mol_type = other DNA

SEQ ID NO: 94387 - DNA, 120 bp, synthetic construct
  source 1..120: mol_type = other DNA
tcaggccattctcctgcctcagcctcccgagtaactgggattacaggtgcgtgccaccacgcccagctaatttttttgcatttttagtagagatgggatttcaccgtgttagccaggatg

SEQ ID NO: 94388 - DNA, 120 bp, synthetic construct
  source 1..120: mol_type = other DNA
tagtgctgcagtaaacacacatgtgcatgtgtccttatagtagaatgatttataatcctttgggtatatactcagtaatgggattgctgggccaaatggtatttctggttctagatcctt

SEQ ID NO: 94389 - DNA, 120 bp, synthetic construct; identical to SEQ ID NO: 8027
  source 1..120: mol_type = other DNA

SEQ ID NO: 94390 - DNA, 120 bp, synthetic construct; identical to SEQ ID NO: 8028
  source 1..120: mol_type = other DNA

SEQ ID NO: 94391 - DNA, 120 bp, synthetic construct; identical to SEQ ID NO: 8029
  source 1..120: mol_type = other DNA

SEQ ID NO: 94392 - DNA, 120 bp, synthetic construct; identical to SEQ ID NO: 8030
  source 1..120: mol_type = other DNA

SEQ ID NO: 94393 - DNA, 120 bp, synthetic construct; identical to SEQ ID NO: 8031
  source 1..120: mol_type = other DNA

SEQ ID NO: 94394 - DNA, 120 bp, synthetic construct
  source 1..120: mol_type = other DNA
gagtggtgaatatagttaataatagggtattgtacatttcaaaattgctaagagagtaaatttcaaaaaatgttaaatatttgagatgaaggatacactaactaccttttaattgttcta

SEQ ID NO: 94395 - DNA, 120 bp, synthetic construct; identical to SEQ ID NO: 8032
  source 1..120: mol_type = other DNA

SEQ ID NO: 94396 - DNA, 120 bp, synthetic construct; identical to SEQ ID NO: 8033
  source 1..120: mol_type = other DNA

SEQ ID NO: 94397 - DNA, 120 bp, synthetic construct; identical to SEQ ID NO: 8034
  source 1..120: mol_type = other DNA

SEQ ID NO: 94398 - DNA, 120 bp, synthetic construct; identical to SEQ ID NO: 8035
  source 1..120: mol_type = other DNA

SEQ ID NO: 94399 - DNA, 120 bp, synthetic construct; identical to SEQ ID NO: 8036
  source 1..120: mol_type = other DNA

SEQ ID NO: 94400 - DNA, 120 bp, synthetic construct; identical to SEQ ID NO: 8037
  source 1..120: mol_type = other DNA

SEQ ID NO: 94401 - DNA, 120 bp, synthetic construct
  source 1..120: mol_type = other DNA
tgaacccgggaggcggagcttgcaatgagccgagattgtgccactgcactccagcctgggcgacagagcaagactctgcctgcaaaaaaaaaaaaaaaaaaaaaaaaaaaaaaatatata

SEQ ID NO: 94402 - DNA, 120 bp, synthetic construct; identical to SEQ ID NO: 8038
  source 1..120: mol_type = other DNA

SEQ ID NO: 94403 - DNA, 120 bp, synthetic construct; identical to SEQ ID NO: 8039
  source 1..120: mol_type = other DNA

SEQ ID NO: 94404 - DNA, 120 bp, synthetic construct; identical to SEQ ID NO: 8040
  source 1..120: mol_type = other DNA

SEQ ID NO: 94405 - DNA, 120 bp, synthetic construct; identical to SEQ ID NO: 8041
  source 1..120: mol_type = other DNA

SEQ ID NO: 94406 - DNA, 120 bp, synthetic construct; identical to SEQ ID NO: 8042
  source 1..120: mol_type = other DNA

SEQ ID NO: 94407 - DNA, 120 bp, synthetic construct; identical to SEQ ID NO: 8043
  source 1..120: mol_type = other DNA

SEQ ID NO: 94408 - DNA, 120 bp, synthetic construct
  source 1..120: mol_type = other DNA
taatttttgcatttttttccgtagagacggggttttgccacattggccaggctggtcttgaactcctgatctcgtgatccgcctgccttggcctcccaaagttctgggattaacaggcat

SEQ ID NO: 94409 - DNA, 120 bp, synthetic construct; identical to SEQ ID NO: 8044
  source 1..120: mol_type = other DNA

SEQ ID NO: 94410 - DNA, 120 bp, synthetic construct; identical to SEQ ID NO: 8045
  source 1..120: mol_type = other DNA

SEQ ID NO: 94411 - DNA, 120 bp, synthetic construct; identical to SEQ ID NO: 8046
  source 1..120: mol_type = other DNA

SEQ ID NO: 94412 - DNA, 120 bp, synthetic construct; identical to SEQ ID NO: 8047
  source 1..120: mol_type = other DNA

SEQ ID NO: 94413 - DNA, 120 bp, synthetic construct; identical to SEQ ID NO: 8048
  source 1..120: mol_type = other DNA

SEQ ID NO: 94414 - DNA, 120 bp, synthetic construct; identical to SEQ ID NO: 8049
  source 1..120: mol_type = other DNA

SEQ ID NO: 94415 - DNA, 120 bp, synthetic construct; identical to SEQ ID NO: 8050
  source 1..120: mol_type = other DNA

SEQ ID NO: 94416 - DNA, 120 bp, synthetic construct; identical to SEQ ID NO: 8051
  source 1..120: mol_type = other DNA

SEQ ID NO: 94417 - DNA, 120 bp, synthetic construct; identical to SEQ ID NO: 8052
  source 1..120: mol_type = other DNA

SEQ ID NO: 94418 - DNA, 120 bp, synthetic construct; identical to SEQ ID NO: 8053
  source 1..120: mol_type = other DNA

SEQ ID NO: 94419 - DNA, 120 bp, synthetic construct
  source 1..120: mol_type = other DNA
tgcgccattgcactccagcctgggcaacaagagcaaaactccaactcaaaaaaaaagaaaaatcaagccacaagtttaagtaccagctctgtcacttattatgtaggggtaaacaatgta

SEQ ID NO: 94420 - DNA, 120 bp, synthetic construct; identical to SEQ ID NO: 8054
  source 1..120: mol_type = other DNA

SEQ ID NO: 94421 - DNA, 120 bp, synthetic construct; identical to SEQ ID NO: 8055
  source 1..120: mol_type = other DNA

SEQ ID NO: 94422 - DNA, 120 bp, synthetic construct; identical to SEQ ID NO: 8056
  source 1..120: mol_type = other DNA

SEQ ID NO: 94423 - DNA, 120 bp, synthetic construct; identical to SEQ ID NO: 8057
  source 1..120: mol_type = other DNA

SEQ ID NO: 94424 - DNA, 120 bp, synthetic construct; identical to SEQ ID NO: 8058
  source 1..120: mol_type = other DNA

SEQ ID NO: 94425 - DNA, 120 bp, synthetic construct; identical to SEQ ID NO: 8059
  source 1..120: mol_type = other DNA

SEQ ID NO: 94426 - DNA, 120 bp, synthetic construct; identical to SEQ ID NO: 8060
  source 1..120: mol_type = other DNA

SEQ ID NO: 94427 - DNA, 120 bp, synthetic construct; identical to SEQ ID NO: 8061
  source 1..120: mol_type = other DNA

SEQ ID NO: 94428 - DNA, 120 bp, synthetic construct; identical to SEQ ID NO: 8062
  source 1..120: mol_type = other DNA

SEQ ID NO: 94429 - DNA, 120 bp, synthetic construct; identical to SEQ ID NO: 8063
  source 1..120: mol_type = other DNA

SEQ ID NO: 94430 - DNA, 120 bp, synthetic construct; identical to SEQ ID NO: 8064
  source 1..120: mol_type = other DNA

SEQ ID NO: 94431 - DNA, 120 bp, synthetic construct; identical to SEQ ID NO: 8065
  source 1..120: mol_type = other DNA

SEQ ID NO: 94432 - DNA, 120 bp, synthetic construct; identical to SEQ ID NO: 8066
  source 1..120: mol_type = other DNA

SEQ ID NO: 94433 - DNA, 120 bp, synthetic construct; identical to SEQ ID NO: 8067
  source 1..120: mol_type = other DNA

SEQ ID NO: 94434 - DNA, 120 bp, synthetic construct; identical to SEQ ID NO: 8068
  source 1..120: mol_type = other DNA

SEQ ID NO: 94435 - DNA, 120 bp, synthetic construct; identical to SEQ ID NO: 8069
  source 1..120: mol_type = other DNA

SEQ ID NO: 94436 - DNA, 120 bp, synthetic construct
  source 1..120: mol_type = other DNA
caattttattgatgttaaggaaggacacagtggcccacacctgtaatcccaacactttgggagtccaaggcagaaggatggcttgagcccaggagttcaagaccagcctgggccacaaag

SEQ ID NO: 94437 - DNA, 120 bp, synthetic construct; identical to SEQ ID NO: 7992
  source 1..120: mol_type = other DNA

SEQ ID NO: 94438 - DNA, 120 bp, synthetic construct; identical to SEQ ID NO: 7993
  source 1..120: mol_type = other DNA

SEQ ID NO: 94439 - DNA, 120 bp, synthetic construct
  source 1..120: mol_type = other DNA
cacccctctcaggtctctgccttctcctcaacaatagctacacctcccttctggtacctctaccaggccactagcaggatacttctatattttttctttttctttttttttttttttgag

SEQ ID NO: 94440 - DNA, 120 bp, synthetic construct
  source 1..120: mol_type = other DNA
aggctagatttgaattcctgggctcaagtgatcctccaagtagctgggactacaagaatatattgtgcccggctttatcttctatgtctttaagaagaagaaaattagcccggtgtggtg

SEQ ID NO: 94441 - DNA, 120 bp, synthetic construct; identical to SEQ ID NO: 19598
  source 1..120: mol_type = other DNA

SEQ ID NO: 94442 - DNA, 120 bp, synthetic construct; identical to SEQ ID NO: 19599
  source 1..120: mol_type = other DNA

SEQ ID NO: 94443 - DNA, 120 bp, synthetic construct
  source 1..120: mol_type = other DNA
ctcacgtctgtgaacttgagctacacacttcgctctgagcctgcgtgcatgcaatgctcttaagtagtgcttaagggccaggcacttaaatctcatgagaaagtaattgtaaggttgggc

SEQ ID NO: 94444 - DNA, 120 bp, synthetic construct
  source 1..120: mol_type = other DNA
atcacgaggtcaggagatcaagaccatcctggctaacatggtgaaaccccgtctctactaaaaatacacaaaaaaaaaaattagccgggtgtggtggcgcacgcctgtagtcccagctac

SEQ ID NO: 94445 - DNA, 120 bp, synthetic construct
  source 1..120: mol_type = other DNA
ggaaattgcttgagccccggagttcaaggctgcagtgagctgtgattgtgccactgcactccagtctgggcaacacgatgagatcctgtctctaaataaatgaataagtaaaaagaaacg

SEQ ID NO: 94446 - DNA, 120 bp, synthetic construct; identical to SEQ ID NO: 18642
  source 1..120: mol_type = other DNA

SEQ ID NO: 94447 - DNA, 120 bp, synthetic construct
  source 1..120: mol_type = other DNA
cccaaagtgctgggattataggtgtgagtcactgcgcccggcctacaagacctctatttttttttgttctggtttttcttcttttgttttctcaggacctctatttttaaataaggaggg

SEQ ID NO: 94448 - DNA, 120 bp, synthetic construct; identical to SEQ ID NO: 14256
  source 1..120: mol_type = other DNA

SEQ ID NO: 94449 - DNA, 120 bp, synthetic construct
  source 1..120: mol_type = other DNA
agtgttcctatttctccacatcctctccagcacctgttgtttcctgactttttaatgattgccattctaactggtgtgagatgatatctcattgtggttttgatttgcatttctctgacg

SEQ ID NO: 94450 - DNA, 120 bp, synthetic construct
  source 1..120: mol_type = other DNA
tcaatgtacaaaaatcacaagcattcttatacaccaataacagacaaacagagagccaaatcatgagtgaactcccattcacaattgcttctaagagaataaaatacctaggaatccacc

SEQ ID NO: 94451 - DNA, 120 bp, synthetic construct
  source 1..120: mol_type = other DNA
atcttctgcgccccccaaggacacttatcaccccctcccccccacccctctcctcgcagacaaagctcccagccccgggcctcagcgagaggaggagggggtccagccccctcctcaact

SEQ ID NO: 94452 - DNA, 120 bp, synthetic construct; identical to SEQ ID NO: 34938
  source 1..120: mol_type = other DNA

SEQ ID NO: 94453 - DNA, 120 bp, synthetic construct; identical to SEQ ID NO: 34939
  source 1..120: mol_type = other DNA

SEQ ID NO: 94454 - DNA, 120 bp, synthetic construct; identical to SEQ ID NO: 34940
  source 1..120: mol_type = other DNA

SEQ ID NO: 94455 - DNA, 120 bp, synthetic construct
  source 1..120: mol_type = other DNA
tgatttctgtacattgattttgtatcctgagactttgctgaagttgcttattagcttaaggagattttgggctgagacgatggggttttctagatatacaatcatgtcatctgcaaacag

SEQ ID NO: 94456 - DNA, 120 bp, synthetic construct; identical to SEQ ID NO: 34941
  source 1..120: mol_type = other DNA

SEQ ID NO: 94457 - DNA, 120 bp, synthetic construct; identical to SEQ ID NO: 5864
  source 1..120: mol_type = other DNA

SEQ ID NO: 94458 - DNA, 120 bp, synthetic construct
  source 1..120: mol_type = other DNA
atgaattcactgtaaaccaaaaaatacattggttgatacgtaaagttttctttttctgtactttttgttctcacccaattcttcaggcctaaatgaaaacatgttttcaatgagcaaagt

SEQ ID NO: 94459 - DNA, 120 bp, synthetic construct
  source 1..120: mol_type = other DNA
attctacctatctgacaaagggctaatatccagaatctacgatgaactcaaacaaatttacaagaaaaaaacaaccccatcaaaaagtgggcgaaggatatgaacagacacttctcaaaa

SEQ ID NO: 94460 - DNA, 120 bp, synthetic construct
  source 1..120: mol_type = other DNA
tttatttatttaaatatttatttatttatttagctgtgtcacccaggctggaatgcagtggcccaatcatagctcactgctgcctccaaactcctgggctcaagcaatcctcctgcctca

SEQ ID NO: 94461 - DNA, 120 bp, synthetic construct; identical to SEQ ID NO: 15417
  source 1..120: mol_type = other DNA

SEQ ID NO: 94462 - DNA, 120 bp, synthetic construct; identical to SEQ ID NO: 33206
  source 1..120: mol_type = other DNA

SEQ ID NO: 94463 - DNA, 120 bp, synthetic construct; identical to SEQ ID NO: 33207
  source 1..120: mol_type = other DNA

SEQ ID NO: 94464 - DNA, 120 bp, synthetic construct; identical to SEQ ID NO: 14508
  source 1..120: mol_type = other DNA

SEQ ID NO: 94465 - DNA, 120 bp, synthetic construct; identical to SEQ ID NO: 14509
  source 1..120: mol_type = other DNA

SEQ ID NO: 94466 - DNA, 120 bp, synthetic construct; identical to SEQ ID NO: 19841
  source 1..120: mol_type = other DNA

SEQ ID NO: 94467 - DNA, 120 bp, synthetic construct; identical to SEQ ID NO: 19842
  source 1..120: mol_type = other DNA

SEQ ID NO: 94468 - DNA, 120 bp, synthetic construct; identical to SEQ ID NO: 19843
  source 1..120: mol_type = other DNA

SEQ ID NO: 94469 - DNA, 120 bp, synthetic construct; identical to SEQ ID NO: 21017
  source 1..120: mol_type = other DNA

SEQ ID NO: 94470 - DNA, 120 bp, synthetic construct
  source 1..120: mol_type = other DNA
tttaaaaattattttttatctaacatgaagatgaatactttttgaaatctgaggtttataattggttttcttccccctcccctcccctccccttccctcctccctccctcccttcccctc

SEQ ID NO: 94471 - DNA, 120 bp, synthetic construct; identical to SEQ ID NO: 14280
  source 1..120: mol_type = other DNA

SEQ ID NO: 94472 - DNA, 120 bp, synthetic construct
  source 1..120: mol_type = other DNA
ctgttcactctgatggtagtttcttttgctgtgcagaagctctttagtttaattagatcccatttgtcaatttttccttttgttgccattgcttttagtgttttagacatgaagtccttg

SEQ ID NO: 94473 - DNA, 120 bp, synthetic construct
  source 1..120: mol_type = other DNA
ttgtgccagctttcaaagggaatgcttccagtttttgcccattcagtgtgatattggctgtgggtttgtcataaatagctcttattattttgagatacgtcccatcaatacctaatttat

SEQ ID NO: 94474 - DNA, 120 bp, synthetic construct
  source 1..120: mol_type = other DNA
cagctttctacgtatggctaaccagttttctcagcaccatttattaaatagggaatcctttctccattgcttgtttttctcaggtttgtcaaagatcagatagttgtagatgtgtggcat

SEQ ID NO: 94475 - DNA, 120 bp, synthetic construct; identical to SEQ ID NO: 14281
  source 1..120: mol_type = other DNA

SEQ ID NO: 94476 - DNA, 120 bp, synthetic construct; identical to SEQ ID NO: 14282
  source 1..120: mol_type = other DNA

SEQ ID NO: 94477 - DNA, 120 bp, synthetic construct; identical to SEQ ID NO: 14283
  source 1..120: mol_type = other DNA

SEQ ID NO: 94478 - DNA, 120 bp, synthetic construct
  source 1..120: mol_type = other DNA
gtaagaataaacagtaggtgaaaaaacatatatttctttttttattattattatactttaagttttagggtacatgtgcacattgtgcaggttagttacatatgtatacatgtgccatgc

SEQ ID NO: 94479 - DNA, 120 bp, synthetic construct
  source 1..120: mol_type = other DNA
gcaaacttgtactgatttgttttgatttactaccagaattatgttcctgccacagacactggcttcctttatgtcctttcagtcgtcagtctgtgtctgtggacaaagttttcccaagga

SEQ ID NO: 94480 - DNA, 120 bp, synthetic construct
  source 1..120: mol_type = other DNA
ggctgaggcaggagaatggcgtgaacccgggaggcggagcttgcagtgagccgagatcccgccactgcactccagcctgggcgacagagcgagactccgtctcaaaaaaaaaaaaaaaaa

SEQ ID NO: 94481 - DNA, 120 bp, synthetic construct; identical to SEQ ID NO: 22754
  source 1..120: mol_type = other DNA

SEQ ID NO: 94482 - DNA, 120 bp, synthetic construct; identical to SEQ ID NO: 22755
  source 1..120: mol_type = other DNA

SEQ ID NO: 94483 - DNA, 120 bp, synthetic construct
  source 1..120: mol_type = other DNA
aagatttattgcaaagagcgaaagaacaacgcttccacagcatggaagaggacccgggcgggttgctaatgctggcttgggcagcctgcttttattcttttatctggccccacccacatc

SEQ ID NO: 94484 - DNA, 120 bp, synthetic construct
  source 1..120: mol_type = other DNA
ggaggctctggcatggcgggctgcaggtcccgagccctgccccgtgggaaggcagccaaggcccagcgagaaatcgagcgcagcgccggtgggccggcactgctggggggacccagtaca

SEQ ID NO: 94485 - DNA, 120 bp, synthetic construct
  source 1..120: mol_type = other DNA
ctcagcgtggtctgtgacttcaggattctgttgtatacaggcagtgtttgttgagcacgtaatcagtgccaggaacgtccatgctgttttccaaataaccctgcccgtttatgtgagctc

SEQ ID NO: 94486 - DNA, 120 bp, synthetic construct
  source 1..120: mol_type = other DNA
ttagccaggatggtctccatcttctgacctcgtgatctgcccgcctcggcctcccaaattgctgggattacaggtgtgagccacagtatctttttttttttttgagatggagtttcactc

SEQ ID NO: 94487 - DNA, 120 bp, synthetic construct; identical to SEQ ID NO: 18238
  source 1..120: mol_type = other DNA

SEQ ID NO: 94488 - DNA, 120 bp, synthetic construct; identical to SEQ ID NO: 18239
  source 1..120: mol_type = other DNA

SEQ ID NO: 94489 - DNA, 120 bp, synthetic construct
  source 1..120: mol_type = other DNA
cccgcctccctccgggacggggcggctcaagcaattctcttgcctctgcctcccaagtagctgggactacagatgtaggccaccacgcccggctaatttttgtatttttagtagagatgg

SEQ ID NO: 94490 - DNA, 120 bp, synthetic construct; identical to SEQ ID NO: 18240
  source 1..120: mol_type = other DNA

SEQ ID NO: 94491 - DNA, 120 bp, synthetic construct; identical to SEQ ID NO: 18241
  source 1..120: mol_type = other DNA

SEQ ID NO: 94492 - DNA, 120 bp, synthetic construct
  source 1..120: mol_type = other DNA
aacagagagaccttgctaggtttcaccactcagtctgttagcattaggtcctacttttgtccaatcatatttctacacggttgtccatgcttcagtcgtgactgtccagtgaaatcctgg

SEQ ID NO: 94493 - DNA, 120 bp, synthetic construct
  source 1..120: mol_type = other DNA
cttatggtcattttataatgccatggtttttttgttgtttgtttgttttgttttttttttgagatggagtctcgctctctcagccaggctggagtgcagtggcgtgatctcaattcactg

SEQ ID NO: 94494 - DNA, 120 bp, synthetic construct
  source 1..120: mol_type = other DNA
gaccctcccacctcggtctcccaaagtgttgggattacaggtgtgagacactgtgcctggccctcaatctttaattaagaagcaagtgccaggcacaatggtatactcctataatctcag

SEQ ID NO: 94495 - DNA, 120 bp, synthetic construct
  source 1..120: mol_type = other DNA
gtggcttacacctgtaatcccaacactttgggaggccgaggctggtggatcatgaggtcaagagactgagaccatcctggccaacgtgctgaaactctatctctactaaaaatacaaaaa

SEQ ID NO: 94496 - DNA, 120 bp, synthetic construct
  source 1..120: mol_type = other DNA
tgtgtcaccacgtatgactaatttttttttatttttcctgtgttgcccaggttgattttgaactcctgggttcaagtgatcctcctgccttggcctcccaaagtgctggaattccaggca

SEQ ID NO: 94497 - DNA, 120 bp, synthetic construct; identical to SEQ ID NO: 18245
  source 1..120: mol_type = other DNA

SEQ ID NO: 94498 - DNA, 120 bp, synthetic construct
  source 1..120: mol_type = other DNA
gttttcatgtaacaacaaataatttttttttttttgagacagagtttctctgttgttgtttaggctggagtgcaatgatgtgatcttggctcactgcaacctccgcctcccgggttcaag

SEQ ID NO: 94499 - DNA, 120 bp, synthetic construct; identical to SEQ ID NO: 18246
  source 1..120: mol_type = other DNA

SEQ ID NO: 94500 - DNA, 120 bp, synthetic construct; identical to SEQ ID NO: 18247
  source 1..120: mol_type = other DNA

SEQ ID NO: 94501 - DNA, 120 bp, synthetic construct
  source 1..120: mol_type = other DNA
ctatatatattctgcgtttacactgtgaaaaaattagaagtcaatagaaaaagaaatgaaaaacctttttatatatttggaaaaattacacctctgaataattgagtcaaagaagacttg

SEQ ID NO: 94502 - DNA, 120 bp, synthetic construct
  source 1..120: mol_type = other DNA
ttaaatttttttgtagagacagggtctcgttatgttgcctaggctggtctcaaatgcctggcctcaggtgatcctcctacctcagagagaggatcttgccatcctcccaaatgttgagat

SEQ ID NO: 94503 - DNA, 120 bp, synthetic construct
  source 1..120: mol_type = other DNA
gcctcccaaagtgctggaattacaggtgtgagccaccacgccccaccgacaatattgaattatttaatatctgtttgaaatcattggctttcacattttcccaaggtttgctttaagaat

SEQ ID NO: 94504 - DNA, 120 bp, synthetic construct
  source 1..120: mol_type = other DNA
gacaatttggcaatccgttcattaatatggtgtaaatttgataaatgaaatttattaaaaagtcattttttctcctacttgccctaaaattctactatatgaatagtaagtaaatacttt

SEQ ID NO: 94505 - DNA, 120 bp, synthetic construct
  source 1..120: mol_type = other DNA
aagcaaattcaattttataagatgaagatttgactttgagatcattcaaaagaatgtcagaggggccaggcacagtggctcatgcctgtaatcccagcacttagggaggccaaggtgggt

SEQ ID NO: 94506 - DNA, 120 bp, synthetic construct
  source 1..120: mol_type = other DNA
atgtataattggcagacagcatgaattctggacttaaacattttatcccattctcactacttactaattgtatgacactggacaagttatttagcttctcagcctcagtttcctcatctg

SEQ ID NO: 94507 - DNA, 120 bp, synthetic construct
  source 1..120: mol_type = other DNA
ttgacatcttttgtttatcttactgtagtatctgtgctgtctttgattttttttttctccgtgtgtgtgtgtgtgtgtgtgtgtgtgtgtgtgtatacacatatatatacacacacatat

SEQ ID NO: 94508 - DNA, 120 bp, synthetic construct
  source 1..120: mol_type = other DNA
gcagcactcaatctagagtgaatccctgtttacttagaccctcttccaaatcatgtaaaccaaatcccaaatcgtatagtgggttctttcttacattcttatggagacaccagtggttcc

SEQ ID NO: 94509 - DNA, 120 bp, synthetic construct
  source 1..120: mol_type = other DNA
gtctctaactcctgacctcaggtgatcgcccacctcggcctcccaaagtgctggaattacaagcatgagccactgcacccagcctgttgtttctttttataatacagaatcttgtcattg

SEQ ID NO: 94510 - DNA, 120 bp, synthetic construct
  source 1..120: mol_type = other DNA
cacagtgctggtatattataggaacataaatattagttttctttattttcaataagcctctttttctttcttttttttttttttttctgtagagttggggtctcattatgttgcccaggc

SEQ ID NO: 94511 - DNA, 120 bp, synthetic construct
  source 1..120: mol_type = other DNA
acagggagccgtgattgtgccactgtattccagcctgggtgacagaacaagaccccatctcttaaaaaaaaaaaaataggccaggcatggtggctcatgcctgtaatcccagcacttcag

SEQ ID NO: 94512 - DNA, 120 bp, synthetic construct
  source 1..120: mol_type = other DNA
gtttgtatcctttgaaatgggagattctacaattatattatatttatttatttttgagaaggagtctcgctgtgtcgcccaggctggagtgcagtggtgtgatcccagctcactgcaagc

SEQ ID NO: 94513 - DNA, 120 bp, synthetic construct; identical to SEQ ID NO: 18258
  source 1..120: mol_type = other DNA

SEQ ID NO: 94514 - DNA, 120 bp, synthetic construct; identical to SEQ ID NO: 18259
  source 1..120: mol_type = other DNA

SEQ ID NO: 94515 - DNA, 120 bp, synthetic construct
  source 1..120: mol_type = other DNA
tgttgcgaaaccccatctccactaaaaaaaatagaaaattagctgggcgtggtggtgtgcgcctgtaatcctagctactctggaggttgaggcagaagaatcacttgaacctgggaggca

SEQ ID NO: 94516 - DNA, 120 bp, synthetic construct
  source 1..120: mol_type = other DNA
cttcatcttcctgggcttatgtaatcctcttgcctcagcctcccaagtagctgggaccacaggtgtgtgtcaccatgaccagctaatttttttttactttttaatttttttagagatgga

SEQ ID NO: 94517 - DNA, 120 bp, synthetic construct; identical to SEQ ID NO: 18260
  source 1..120: mol_type = other DNA

SEQ ID NO: 94518 - DNA, 120 bp, synthetic construct; identical to SEQ ID NO: 18261
  source 1..120: mol_type = other DNA

SEQ ID NO: 94519 - DNA, 120 bp, synthetic construct
  source 1..120: mol_type = other DNA
gcctcaagtcagggcttttcgctgacctggaggcagaatccagtttggggttttgcttgtaactggtattttatgcatgcgaccctggctgaactgaccaactgcgtaggcttcaatttc

SEQ ID NO: 94520 - DNA, 120 bp, synthetic construct
  source 1..120: mol_type = other DNA
ttgcgcccctccccggcgagcacacctgtgtggggctttcccccccgccccggacccttctgggcttgatagtgttccgggggaggctggagggtgttgggggaggacggagaggtcatg

SEQ ID NO: 94521 - DNA, 120 bp, synthetic construct
  source 1..120: mol_type = other DNA
ttatgatactatgtaataggaagcctgtaataaaaatgggaactgtttgatagttatctgtaaatagaatgttagtaaatatattttgtttcatttctcttcctactgcagtctggggtc

SEQ ID NO: 94522 - DNA, 120 bp, synthetic construct
  source 1..120: mol_type = other DNA
taaataaaaaataaataaattttttaagtagcatgaacttttcaaaacactttttttccagaaattcttttcaggctagatggcaacacaaagatgacacaatagtgaattccaacaggt

SEQ ID NO: 94523 - DNA, 120 bp, synthetic construct
  source 1..120: mol_type = other DNA
agggctgggattataggcatgagccaccatgcccggccaacttagtggatttttaacctggcctggggtgtggactgctgcagaaggtgaagaaattagtccatgttcagtgatttaaaa

SEQ ID NO: 94524 - DNA, 120 bp, synthetic construct; identical to SEQ ID NO: 18230
  source 1..120: mol_type = other DNA

SEQ ID NO: 94525 - DNA, 120 bp, synthetic construct
  source 1..120: mol_type = other DNA
gacccagaagtcttttgtaataaaaatagtagcaatacctagagctctatgtcttgtcttctttttttttttttgagatggagtttcactcttgtcacccaggctggaacgcagtggcgc

SEQ ID NO: 94526 - DNA, 120 bp, synthetic construct
  source 1..120: mol_type = other DNA
tctcattgaccccaaactatgtactataatttatcagtttcatatctgtttttttttttcttttttttttctttttgagacggagtttcgctctgttgcccaggctggagtgcagtggca

SEQ ID NO: 94527 - DNA, 120 bp, synthetic construct; identical to SEQ ID NO: 18231
  source 1..120: mol_type = other DNA

SEQ ID NO: 94528 - DNA, 120 bp, synthetic construct; identical to SEQ ID NO: 18232
  source 1..120: mol_type = other DNA

SEQ ID NO: 94529 - DNA, 120 bp, synthetic construct; identical to SEQ ID NO: 18233
  source 1..120: mol_type = other DNA

SEQ ID NO: 94530 - DNA, 120 bp, synthetic construct
  source 1..120: mol_type = other DNA
attctcctgcttcagccttccaagtagctgggattacaggcgcgcaccacaggcctggctaatttttttttttttttttttttttagtagaaatggggtttcaccatgttggtcaggctg

SEQ ID NO: 94531 - DNA, 120 bp, synthetic construct
  source 1..120: mol_type = other DNA
aagtgatctgcctgcctgaccctccagaagtgctaggattacaggtgtgagccaccacactcggcggtaagagttattgtataaagttttgacataatttatagtgtcagccttcttcct

SEQ ID NO: 94532 - DNA, 120 bp, synthetic construct; identical to SEQ ID NO: 18234
  source 1..120: mol_type = other DNA

SEQ ID NO: 94533 - DNA, 120 bp, synthetic construct; identical to SEQ ID NO: 18235
  source 1..120: mol_type = other DNA

SEQ ID NO: 94534 - DNA, 120 bp, synthetic construct
  source 1..120: mol_type = other DNA
tcaaaatggttattggttactctgagacttctttaatataaaataatttacggccgggcgcggtggctcacgcctgtaattccagcactttgggaggccgaggcgggtggatcacaaggt

SEQ ID NO: 94535 - DNA, 120 bp, synthetic construct
  source 1..120: mol_type = other DNA
gatagaattcaggtgactgaaaagttctttttttttttttttttttttgagatggagtctcgctctgtcgccaaacgatctcggcttgctgcaacctccgcctctggggttcaagcaatt

SEQ ID NO: 94536 - DNA, 120 bp, synthetic construct
  source 1..120: mol_type = other DNA
ctatgggcatgtgtgtgttttttttttttttttgagatggagtcttgctgtatcgcccaggctggagtacagtggcgcaatgtcggctcactgcaactagtagaacttactttttttttt

SEQ ID NO: 94537 - DNA, 120 bp, synthetic construct
  source 1..120: mol_type = other DNA
caaagagtttttattaaatattattattattatttgagatagagtctcactcttattgcccaggctggagtgcagtggcactatctcggctcactacagcctccgtctcctgggttgaag

SEQ ID NO: 94538 - DNA, 120 bp, synthetic construct; identical to SEQ ID NO: 18237
  source 1..120: mol_type = other DNA

SEQ ID NO: 94539 - DNA, 120 bp, synthetic construct; identical to SEQ ID NO: 10817
  source 1..120: mol_type = other DNA

SEQ ID NO: 94540 - DNA, 120 bp, synthetic construct; identical to SEQ ID NO: 25507
  source 1..120: mol_type = other DNA

SEQ ID NO: 94541 - DNA, 120 bp, synthetic construct
  source 1..120: mol_type = other DNA
aacgaaatggaggcagaaataaagatgttctttgaaaccaatgagagcaaagacacaacataccagaatctctgggacacattcaaagcagtgtgtagagggaaatttatagcactaaat

SEQ ID NO: 94542 - DNA, 120 bp, synthetic construct
  source 1..120: mol_type = other DNA
agcttgtccactatgatcaagtgggcttcatccctgggatgcaaggctggttcaatatatgcaaatcaataaatgtaatccagcatataaacagaaccaaagacaaaaaccacatgatta

SEQ ID NO: 94543 - DNA, 120 bp, synthetic construct
  source 1..120: mol_type = other DNA
aatcatcagattcactgaggttgaaatgaaggaaaaaatcttaagggcaaccagagagaaaggttgcattacccacaaagggaagccagtcagattaacagccaatctctctgcagaaac

SEQ ID NO: 94544 - DNA, 120 bp, synthetic construct
  source 1..120: mol_type = other DNA
gcctgggtgacagagctagactccatctcaaaaaaaaaaaaaaaaaaaaaaaaaaaagtcatacagattctaaataatttcttttctttttttttttttttttttttgagacggagtctc

SEQ ID NO: 94545 - DNA, 120 bp, synthetic construct
  source 1..120: mol_type = other DNA
aaacagaaagtggaggctgctatttttatagagtattcactggaggtcatgagaaaataagatttattatgtgtaggggtgggttgcccctacacacctgtgggtgtttctcgtaaggtg

SEQ ID NO: 94546 - DNA, 120 bp, synthetic construct
  source 1..120: mol_type = other DNA
cctcaagcatctgtttaacaaagcacatcctgcaccgcccttaatccattcaactctgagttgacacagcacatgtttcagagagcacggggttgggggtaaggtcatagattaacagaa

SEQ ID NO: 94547 - DNA, 120 bp, synthetic construct
  source 1..120: mol_type = other DNA
aatagatgcaataaaaaatgataaaggggatatcaccaccgatcccacagaaataccaactaccatcagagaatactataaacacctctatgcaaataaactagaaaatctagaagaaat

SEQ ID NO: 94548 - DNA, 120 bp, synthetic construct
  source 1..120: mol_type = other DNA
acaaccctttatgctaaaaactctcaagaaattaggtattgatgggacgtatctcaaaataataacagctatctaagacaaacccacagccaatatcatactgaatgggcaaaaactgga

SEQ ID NO: 94549 - DNA, 120 bp, synthetic construct; identical to SEQ ID NO: 6996
  source 1..120: mol_type = other DNA

SEQ ID NO: 94550 - DNA, 120 bp, synthetic construct; identical to SEQ ID NO: 6997
  source 1..120: mol_type = other DNA

SEQ ID NO: 94551 - DNA, 120 bp, synthetic construct; identical to SEQ ID NO: 6998
  source 1..120: mol_type = other DNA

SEQ ID NO: 94552 - DNA, 120 bp, synthetic construct; identical to SEQ ID NO: 6999
  source 1..120: mol_type = other DNA

SEQ ID NO: 94553 - DNA, 120 bp, synthetic construct; identical to SEQ ID NO: 7000
  source 1..120: mol_type = other DNA

SEQ ID NO: 94554 - DNA, 120 bp, synthetic construct; identical to SEQ ID NO: 7001
  source 1..120: mol_type = other DNA

SEQ ID NO: 94555 - DNA, 120 bp, synthetic construct
  source 1..120: mol_type = other DNA
ggaggcagagtttgcagtgagccaagattgtgccactacactccagcctgaagaagagccagaccctgtctcaaaaaaaaaaaaaaaaagaattagagaagaatctggctgtcattacat

SEQ ID NO: 94556 - DNA, 120 bp, synthetic construct
  source 1..120: mol_type = other DNA
tccacgttctcctattggtctccacgttctcctatcggtctcctcctgagaatttaacacaacttgcaattactctgttacctgctcagtgcgtctccgaaacagtctgcagttctgtta

SEQ ID NO: 94557 - DNA, 120 bp, synthetic construct; identical to SEQ ID NO: 16084
  source 1..120: mol_type = other DNA

SEQ ID NO: 94558 - DNA, 120 bp, synthetic construct; identical to SEQ ID NO: 713
  source 1..120: mol_type = other DNA

SEQ ID NO: 94559 - DNA, 120 bp, synthetic construct
  source 1..120: mol_type = other DNA
ggaaccagaggccacatgtggctgctcgtatttaagttaattaaaatggaacgatggccgggtgtggtggctcacacctgtactcccagcactttgggaggcggaggcgggcagatcact

SEQ ID NO: 94560 - DNA, 120 bp, synthetic construct
  source 1..120: mol_type = other DNA
ctgggtgacagaatggaatgagactctgtctcaaaaaaaaaaaaaaaaaaaaagaagccctagatttcggttgtgttggttgtaaaaggagagacccagtaagtgggggttgtgccgcag

SEQ ID NO: 94561 - DNA, 120 bp, synthetic construct
  source 1..120: mol_type = other DNA
cagagtgtgcccaaactcactcaggcctctggcagctgaaaaccactgctttaaatccctttaccatttactatgacataaggttattgtaaacaggaaatattctattgatgctacaaa

SEQ ID NO: 94562 - DNA, 120 bp, synthetic construct
  source 1..120: mol_type = other DNA
gtagtgcccgcatcatcccaatgacccctcccccatctcagtcccccacgctcctcccaaggccaggtcctctctggaaccttcacaaacctgatttctggtcctccccaaccagctccc

SEQ ID NO: 94563 - DNA, 120 bp, synthetic construct
  source 1..120: mol_type = other DNA
ggcccaggagctggacgttgcagtgagccgagatggccccgctgcactcttgtctctaacaaacaaaacggaccaaaacaaagtgaaatgtcatttgatttgtgtcatctggtttgatga

SEQ ID NO: 94564 - DNA, 120 bp, synthetic construct
  source 1..120: mol_type = other DNA
cttttgtgtctgctttattctgctcaacaccatgtttctgaaatcattaccattgttgtacggttctctaactccatcatttccatttcagactcagcatatgctgagttcaacctgttg

SEQ ID NO: 94565 - DNA, 120 bp, synthetic construct
  source 1..120: mol_type = other DNA
atacatcaatttaaaaaacaaataactaaagaaaagataactactggccaggtgcagtggctcacacctgtattgccagcactttgggaggccgaggcaggtggatcatgaggtcaggag

SEQ ID NO: 94566 - DNA, 120 bp, synthetic construct
  source 1..120: mol_type = other DNA
aacaatagctgatgatctaaaaaaaaacctcttttttttttttttttttgagacagagttccgctccactcagtcgcccaggctggagtgaagtggtgcaatcttggctcactacaacct

SEQ ID NO: 94567 - DNA, 120 bp, synthetic construct; identical to SEQ ID NO: 71174
  source 1..120: mol_type = other DNA

SEQ ID NO: 94568 - DNA, 120 bp, synthetic construct
  source 1..120: mol_type = other DNA
tcatgacacccatgatgtccctgcttaggaggtaatgactagatgacaaggacaaagatgagaggtacaaagttgtccaagtccaacagctcaactgaactttcctaaatggaattgtta

SEQ ID NO: 94569 - DNA, 120 bp, synthetic construct
  source 1..120: mol_type = other DNA
tttttttttttttgagacggagtctcactctgtcaccaggctggagtgcagtggtgggatcttggctcactgcaacctctgcctcttgggttcaagcagttctcctgcctcagcctccgg

SEQ ID NO: 94570 - DNA, 120 bp, synthetic construct
  source 1..120: mol_type = other DNA
cactatggggactccaacagagccataccttcctgtctacggcggttggacctcctggctctctgctgtacatctgtggatacatcatgtccattttcagactggaagatagtcttcagg

SEQ ID NO: 94571 - DNA, 120 bp, synthetic construct
  source 1..120: mol_type = other DNA
cctcccagtttgaagcaattctgccttggcttcccgagtagcttggattacaggtgtgtgccaccacattcggccaattttttttttttttttttttttttgagacagagtctcactctg

SEQ ID NO: 94572 - DNA, 120 bp, synthetic construct
  source 1..120: mol_type = other DNA
atgggttttatattctgtttggtgtcccccattgttctcatctgagatcagaagcttcagatgcacttatgtcaactcaagagtagaatgcttccttagcctccctccagagtcaggttt

SEQ ID NO: 94573 - DNA, 120 bp, synthetic construct
  source 1..120: mol_type = other DNA
cctttgcttgtgagaatcagttggttcatttgtgggaaggttgcaggggggatctttgaatcagccttcagatgccagaagggcagagggaatcccacacgggctggtggatcatgtgtg

SEQ ID NO: 94574 - DNA, 120 bp, synthetic construct
  source 1..120: mol_type = other DNA
atctcctgacctcgtgatccatccgccccgccctcccagagtgctgggattacaggcgtcagccaccgtgaccggctcagactgtactcttctagccatctgaaatacgttttctaggta

SEQ ID NO: 94575 - DNA, 120 bp, synthetic construct
  source 1..120: mol_type = other DNA
gacagaacaatctcacctcaagaagtcagttaggcatggctgtaatatttcttttcactcccaggtaataccaaattgtaagtgcactaggacataaagaatacttttgtccatggaaaa

SEQ ID NO: 94576 - DNA, 120 bp, synthetic construct
  source 1..120: mol_type = other DNA
ctctatccccttccaccctcagcggatgataatctcaagacacctcccgagtgtctgctcactccccttccaccctcagctccaccctcagtggatgataatctcaagacacctcccgag

SEQ ID NO: 94577 - DNA, 120 bp, synthetic construct
  source 1..120: mol_type = other DNA
ctgggcaccctggcatagccagatgacttccgtgcccctgttgcaataaccactgcctccaagtctccatagaccaccccttgggtatatctaatgtaagtgatatttattttatttatt

SEQ ID NO: 94578 - DNA, 120 bp, synthetic construct
  source 1..120: mol_type = other DNA
tcctgtgacacatgactcctctctcttcctagtgatccaagccctgccacttcctgactttgcccacactgtaccctctgcctggggcaacttcatgtctgcccattgacccttaggcct

SEQ ID NO: 94579 - DNA, 120 bp, synthetic construct; identical to SEQ ID NO: 16085
  source 1..120: mol_type = other DNA

SEQ ID NO: 94580 - DNA, 120 bp, synthetic construct
  source 1..120: mol_type = other DNA
tattcctgataaacaattcaatgtccttaagtccaccaatatcaccatacattctgtgcaatcaagaaatttactcagctgggtgcagtggctcacacctgtaattccagcacttcggga

SEQ ID NO: 94581 - DNA, 120 bp, synthetic construct
  source 1..120: mol_type = other DNA
gtgccactgctaccccattcatcaccaatttttgttgatgtctcttcctgactactttttttttttttttttttggagatagagtctcactctgatgtccagcctggagtgcagtggtgt

SEQ ID NO: 94582 - DNA, 120 bp, synthetic construct
  source 1..120: mol_type = other DNA
cctgagatcccagcactttaggaggcctaggtaggtggatcacctgaggtcaggaatttgagaccagcctggccagtatggtgaaaccctgtctctagtaaaaatgcaaaaaattagctg

SEQ ID NO: 94583 - DNA, 120 bp, synthetic construct
  source 1..120: mol_type = other DNA
tactaaaaacagaaaaattagctgggcatgatggtgcacgcctgtaatcccagctaccctggaagctgaggcaggagaatcacttgaacccgggagtcaaatgttgcggtgaacccaaga

SEQ ID NO: 94584 - DNA, 120 bp, synthetic construct
  source 1..120: mol_type = other DNA
cccggctaatttttgtttttgttttttcggagatggagtctcgctctgtcacccaggctggagcgcagtggtgtgatctcagctcactgcaagctccacctcccgggttcacgccattct

SEQ ID NO: 94585 - DNA, 120 bp, synthetic construct
  source 1..120: mol_type = other DNA
acagacagcgcagttcacaccccggggcggcggaggcaggtgcagtgcgagcggcgacccctgtaggctggtgtgggcgctgcctggaggctgctgcggtgccgcctgtaggctggtgag

SEQ ID NO: 94586 - DNA, 120 bp, synthetic construct
  source 1..120: mol_type = other DNA
tgcaatcccagcactttgggaggcccaggcgggggggtgatcacctgaaatcagcagttggagaccagcctggccaacatggtgaaacccggtctccactacaaatacaaaaactagctg

SEQ ID NO: 94587 - DNA, 120 bp, synthetic construct; identical to SEQ ID NO: 674
  source 1..120: mol_type = other DNA

SEQ ID NO: 94588 - DNA, 120 bp, synthetic construct
  source 1..120: mol_type = other DNA
ggttcaagcaattctcctatctcagcctcccgagttgctgagatgacaggcctgtgctaccaagcctggctaatttttgtatttttcatggagacagtattttcgtgtaattttcaccct

SEQ ID NO: 94589 - DNA, 120 bp, synthetic construct
  source 1..120: mol_type = other DNA
tgggctggagaacacataacatggcctttagaatgagatgggcattgattggatgcaaggtgtccacacttactagccgtgtgacattggacaaagtgcttcatcattctgagactcagt

SEQ ID NO: 94590 - DNA, 120 bp, synthetic construct
  source 1..120: mol_type = other DNA
ttttgtattttcctcctcacatccccacagaaggggttcaggctgccgaacacagctgggtgatgccagggcagtggccacctgtgccagccctgtgaggtagctggaggatcattgctc

SEQ ID NO: 94591 - DNA, 120 bp, synthetic construct; identical to SEQ ID NO: 687
  source 1..120: mol_type = other DNA

SEQ ID NO: 94592 - DNA, 120 bp, synthetic construct
  source 1..120: mol_type = other DNA
gtgtgtgtctgtgtgtgtgtgtgtgtgtgtgtgtgtatctctataaatctcaaaaataaaagatcatttttgagattatcattttaaaagacaagataatgttcaacttaatgaataatt

SEQ ID NO: 94593 - DNA, 120 bp, synthetic construct
  source 1..120: mol_type = other DNA
agggcttctgcccgatcacacagagtgtgcccaaactcactcaggcctctggcagctgaaaaccactgctttaaatccctttaccatttactatgacataaggttattgtaaacaggaaa

SEQ ID NO: 94594 - DNA, 120 bp, synthetic construct
  source 1..120: mol_type = other DNA
cttttggcgacaaaacataaaaaacaaatgatggcaggatggcaggaagaacctcatacccaagcagagtgccaggttttacagcctccgctcagccattcatatcctaagcaacaaaac

SEQ ID NO: 94595 - DNA, 120 bp, synthetic construct
  source 1..120: mol_type = other DNA
tttcactttgttttggtccgttttgtttgttggagacaagagtgcagcggggccatctcggctcactgcaacgtccagctcctgggcccaagcgatcctcccacctcagcctctccagta

SEQ ID NO: 94596 - DNA, 120 bp, synthetic construct
  source 1..120: mol_type = other DNA
gaaagtgaactcccactcttcccagccagtctctttcttatcataggttagcttgcttattctggaatttcgcgtatacagatgcatgccatgccataggtactcttttgtgtctgcttt

SEQ ID NO: 94597 - DNA, 120 bp, synthetic construct
  source 1..120: mol_type = other DNA
atccaatgttatacatcaatttaaaaaacaaataattaaagaaaagataactactggccaagtgcagtggctcacacctgtattcccagcactttgggaggccgaggcaggtggatcatg

SEQ ID NO: 94598 - DNA, 120 bp, synthetic construct
  source 1..120: mol_type = other DNA
gcactccagcctgggcgactgagtggagcggaactctgtctcaaaaaaaaaaaagaaaaaaagtttttttttttagatcatcagctattgttagtgtatgttatgtgtggctcaagacaa

SEQ ID NO: 94599 - DNA, 120 bp, synthetic construct
  source 1..120: mol_type = other DNA
gaacagacataaacatgggaaccagctgaaaaatgagactgctagaagggctggatggttgatgcttaaagagcaccctcttctgaggggagagggagatagatggagatgtaggccatt

SEQ ID NO: 94600 - DNA, 120 bp, synthetic construct
  source 1..120: mol_type = other DNA
gaaagttcagttgagctattggacttggacaactttgcacctctcatctttgtccttgtcatctagtcatctataccattacctcctaagcagggacatcatgggtgccatgaagcattc

SEQ ID NO: 94601 - DNA, 120 bp, synthetic construct
  source 1..120: mol_type = other DNA
gcactccagcctggtgacagagtgagactctgtctcaaaaaaaaaaaaaaaaaaaaatgacatgaatatacttcacacaactgaactgtacacttcaacacggttagatggtaattatca

SEQ ID NO: 94602 - DNA, 120 bp, synthetic construct
  source 1..120: mol_type = other DNA
ataatataagaatgacggctgggcacggtggctcatgcgtataatcccagtacttcgggaagctgaggcaggtggatcacggggtcaggagcaagaccagcctggccaagatggtgaaac

SEQ ID NO: 94603 - DNA, 120 bp, synthetic construct
  source 1..120: mol_type = other DNA
tcccagtttgaagcaattctgcctcagcttcccgagtagcttggattacaggagtgtgccaccacatttggccaatttttttttttttttttttttttttttgagacagagtctcactct

SEQ ID NO: 94604 - DNA, 120 bp, synthetic construct
  source 1..120: mol_type = other DNA
tgggtttccttcttctccatcttcacctcatgtctgtttactgccatgtgagcaatttgatgtattcagtcatgggttttatattctgtttggtgtcccccattgttctcatcggagatc

SEQ ID NO: 94605 - DNA, 120 bp, synthetic construct
  source 1..120: mol_type = other DNA
gttagttgtgatgaattggtgaggtctggtttttcacactgaactaaaatgagctttcgctgtgtcaagcacaagactgaccccagagacacacatagtgcacctcatagaagcttttaa

SEQ ID NO: 94606 - DNA, 120 bp, synthetic construct
  source 1..120: mol_type = other DNA
gggaatcatttgaacctgggaggcagaggttgcaatgagccaagatcacgtcattgcactccagcctgggtgacacagcgagactccatctcagaaaaacaaaaacaaaaacaaaaacaa

SEQ ID NO: 94607 - DNA, 120 bp, synthetic construct
  source 1..120: mol_type = other DNA
ttaaaacttgctttgtttagaattcccacctcatttttccatggacaaaagtattctttaggtcctagtgcacttacaatttggtattacctgggagtgaaaagaaatattacagccatg

SEQ ID NO: 94608 - DNA, 120 bp, synthetic construct
  source 1..120: mol_type = other DNA
gattgccctactggccctacctcacagctgaaactttaaaaaacaggatgggccaccagccacctcctccaactcaacaacattctataattgataactccctgagcctcaagacacctt

SEQ ID NO: 94609 - DNA, 120 bp, synthetic construct
  source 1..120: mol_type = other DNA
agtggctaggactacaggcatgcaccatcacgcccagctaatttttgtattttttcagtagaggtggggtttcaccaagttggccgggctggtctcaaactccccacctcaagtgctctg

SEQ ID NO: 94610 - DNA, 120 bp, synthetic construct
  source 1..120: mol_type = other DNA
aattttttatggatatggggtctcactatgttgcctaggctggtctcgaactcccaggctcaagcagtcctcctacctcagcctccacaaatgctgggattacaggtgggagctactgta

SEQ ID NO: 94611 - DNA, 120 bp, synthetic construct
  source 1..120: mol_type = other DNA
attttgggtcactgcaacctccacctcccaggttcaagtgattcccctgcctcagcctcttgagtacctgggactacaggcatgtgccaccacgcctgggtaatttttgtatttttagta

SEQ ID NO: 94612 - DNA, 120 bp, synthetic construct
  source 1..120: mol_type = other DNA
tgtatgtgtgtgtgtgtgtgtgtgtgcgtgtgtgtgtgtgtttaatatagagacagggtctcactctgttgcctaggctcgtttcaaactcctgggctccagtgatcctcctgcctcgac

SEQ ID NO: 94613 - DNA, 120 bp, synthetic construct; identical to SEQ ID NO: 16207
  source 1..120: mol_type = other DNA

SEQ ID NO: 94614 - DNA, 120 bp, synthetic construct
  source 1..120: mol_type = other DNA
atgtgactggaacccctgcattggacatgaaggaaacgaggccagctgggaaaggtaaccccacattcccacagccagcaggaacccaagcagaggcttcaacccaggcttctgacttgc

SEQ ID NO: 94615 - DNA, 120 bp, synthetic construct
  source 1..120: mol_type = other DNA
aggctgatcttgaactgctgacctcaggtgatctgcccgcctgggcctcccaaaatcttgggattacaggtgtaagccactgagcccagccggattataatagccttttcatgcaccagg

SEQ ID NO: 94616 - DNA, 120 bp, synthetic construct
  source 1..120: mol_type = other DNA
aactcactgcaaactctgcctcccgggttcaagcaattctcctgcctcagtctcccgagtagctgagattacagatgcctgccaccacacacagctaatttttgcatttttagtagagat

SEQ ID NO: 94617 - DNA, 120 bp, synthetic construct
  source 1..120: mol_type = other DNA
ttgtttgttcctttttcttttttttgagacagggtcttgctctgtcatcccggctggagcgcagtggtgcgatgtcagctcactgcaaattctgcctccaagatgcaaatgattctcgtg

SEQ ID NO: 94618 - DNA, 120 bp, synthetic construct
  source 1..120: mol_type = other DNA
ccaccatgccctctgccttcctggctgtgcccaagcttggtccctgcctgcctgcctgcctccctctctgggtctcgagctcctgtgacacatgactcctctctcttcctagtgatccaa

SEQ ID NO: 94619 - DNA, 120 bp, synthetic construct
  source 1..120: mol_type = other DNA
gcaccctgacatagccagatgacttccgtgcccctgttgcaataaccactgcttccaagtctctatagaccaccccttgggtatatctaatgtaagtgatatttattttatttatttttt

SEQ ID NO: 94620 - DNA, 120 bp, synthetic construct
  source 1..120: mol_type = other DNA
gggtggaaggggagtgagcagacacactcgggaggtgtcttgagattatcatccgctgagggtggagctgagggtggaaggggagtgagcagacactcggcaggtgtcttgagattatca

SEQ ID NO: 94621 - DNA, 120 bp, synthetic construct
  source 1..120: mol_type = other DNA
ttttatgttctgtctctgattctcagaactctgcaaggtcagtgtgaccaccctgctccaaatctaagaaaacagaggtttccagaggaaggagaaattgtgcccagggtcacacagctt

SEQ ID NO: 94622 - DNA, 120 bp, synthetic construct
  source 1..120: mol_type = other DNA
gaagctccttactttgcatctgtagtagtcctctgcccgccgccgcaacgcttgcgcacgttgaaacatttccctatggattacaatcactttcatcagataaagcaccactttcaggat

SEQ ID NO: 94623 - DNA, 120 bp, synthetic construct
  source 1..120: mol_type = other DNA
gtttagacccagtaaatgcagaaatagaaacaaatggtcagaagacctatcgtgagagagagagagagttcacaaaacagaaaacaaagtacctgaatatttaccagtgaccaaaagatg

SEQ ID NO: 94624 - DNA, 120 bp, synthetic construct
  source 1..120: mol_type = other DNA
ctttaaagatcctgaaaaggcaatctgaatgctgggcgcatctattgaattagaaatgatgggaatggctcctaagtcagggtgttatgtcctgaaaataggtgacaacggcaaaccatc

SEQ ID NO: 94625 - DNA, 120 bp, synthetic construct
  source 1..120: mol_type = other DNA
attgtattttgctgccatatgactgatctttttttgttaaatgtgagatactttttaaaaaatatttaacaatgcattgaggcctagtagcatgttatcttgctgcagaagagatgggag

SEQ ID NO: 94626 - DNA, 120 bp, synthetic construct
  source 1..120: mol_type = other DNA
cagtgagctgagattgtgccattgcactacggcctgggcaacaagagcaaagctccgtctcaggaaaaaaaaaaaaagagagagagaaaggaaaaccaatgccagtactagcaactcctc

SEQ ID NO: 94627 - DNA, 120 bp, synthetic construct
  source 1..120: mol_type = other DNA
ctgcactccagcctgagtgacagaatgagactctgtcacacacacacacacacacacacacacaaacacacaagaatgacatgaggctggcatggtggctcactcctgtaatcccagtac

SEQ ID NO: 94628 - DNA, 120 bp, synthetic construct
  source 1..120: mol_type = other DNA
tgtccctgctctactcagagttcactttcccttccctcacatcagcttcgttgaggctggtttgaacttaatgcaaaacattctcactaatgattgaattcccaccaagatttccatatt

SEQ ID NO: 94629 - DNA, 120 bp, synthetic construct
  source 1..120: mol_type = other DNA
gaattttcggtataaattggaggaagcttttttttttttcttttctcacccccaagaggagtctccctctgttgcccaggctggagtataatggtgtgatctcggctcactgcaacctcc

SEQ ID NO: 94630 - DNA, 120 bp, synthetic construct
  source 1..120: mol_type = other DNA
gtttcgtcacttaaatgggaaagtctttctaaactcttctgctttatagttctatcgtatgggtggaaggaaagcttccaatctcctctctgaagattcactgcagaaatgagctgacaa

SEQ ID NO: 94631 - DNA, 120 bp, synthetic construct
  source 1..120: mol_type = other DNA
acactaacactaacaatagctgatgatctaaaaaaaaaattttttttttttttttgagacagagttctgctccactcagtcgcccaggctggagtgcagtggtgcaatctcggctcactg

SEQ ID NO: 94632 - DNA, 120 bp, synthetic construct
  source 1..120: mol_type = other DNA
gggaatacaggtgtgagccactgcacctggccagtagttatcttttctttagttatttacttgttttttaaattgatgtataacattggatgcatttattatatatcacatggtaaaaga

SEQ ID NO: 94633 - DNA, 120 bp, synthetic construct
  source 1..120: mol_type = other DNA
ggtggttcacgcctgtaatcccaacactttgggaggccgaggcgggcggatcacctgaggtcgggagttcaaaaccagcctgaccaacatggagaaaccctatctctactaaaaatagaa

SEQ ID NO: 94634 - DNA, 120 bp, synthetic construct
  source 1..120: mol_type = other DNA
ggtacgcaccaccaggcccgactaatcttttttggaattttttgtagagatggggtttcgctatgatgccctggctagtcttcaactcctggactcaagtgatctgcccacctcagcccc

SEQ ID NO: 94635 - DNA, 120 bp, synthetic construct; identical to SEQ ID NO: 94594
  source 1..120: mol_type = other DNA

SEQ ID NO: 94636 - DNA, 120 bp, synthetic construct
  source 1..120: mol_type = other DNA
gtcctcagctaaacttcccacaggccttctgcccgatcacacagagtgtgcccaaactctctcaggcctctggcagctgaaaagcactgctttaaatccctttaccatttactatgacat

SEQ ID NO: 94637 - DNA, 120 bp, synthetic construct
  source 1..120: mol_type = other DNA
aaccacatcatatttattttacaacatgtaatacatattttttattctccttcatttgttttgaatgctctgtgcagtctacaaaaagtccagtagtaataattaaattattcattaagt

SEQ ID NO: 94638 - DNA, 120 bp, synthetic construct; identical to SEQ ID NO: 687
  source 1..120: mol_type = other DNA

SEQ ID NO: 94639 - DNA, 120 bp, synthetic construct; identical to SEQ ID NO: 94590
  source 1..120: mol_type = other DNA

SEQ ID NO: 94640 - DNA, 120 bp, synthetic construct; identical to SEQ ID NO: 94589
  source 1..120: mol_type = other DNA

SEQ ID NO: 94641 - DNA, 120 bp, synthetic construct
  source 1..120: mol_type = other DNA
aaagttattatttctgaagattgtatgaaattcataaaagtctgctggccctgatatgatgctgtcagtcatgattctgattactgtcttaaaatgctgcacataagtaattaaatttcc

SEQ ID NO: 94642 - DNA, 120 bp, synthetic construct
  source 1..120: mol_type = other DNA
ccgggctcacgccattctcctgcctcagtctcccgaggagctgggactacaggtgcctgccaccacgccgggctaatttttttgtattttttagtagagacagggtttcaccgttagcca

SEQ ID NO: 94643 - DNA, 120 bp, synthetic construct
  source 1..120: mol_type = other DNA
tggctgagctgcagcgtggcttctttgacaagcacatctggctctccatatgggaccggccgcctcgtagctatttcactcacatccagagggccacctgctgcgttctcctcatctgtc

SEQ ID NO: 94644 - DNA, 120 bp, synthetic construct
  source 1..120: mol_type = other DNA
gacagggtttcattgtgttggccaggctggtctcgaactcctgacctcaactgatctgcccgcctcggcctcccaaagtgttgggattacaggcgtgagccaccgtgcctggcccttttt

SEQ ID NO: 94645 - DNA, 120 bp, synthetic construct; identical to SEQ ID NO: 16206
  source 1..120: mol_type = other DNA

SEQ ID NO: 94646 - DNA, 120 bp, synthetic construct
  source 1..120: mol_type = other DNA
gtgagccgagattacaccactgcactccagcctagacgacagagcgagactctgtctcaaaaacagcaacaactacaaacaaacaaaaaacaggattaacaaaactatggaattcaattc

SEQ ID NO: 94647 - DNA, 120 bp, synthetic construct
  source 1..120: mol_type = other DNA
tcactcagtttcggatgttaaaatgtctaggtgggttaggggtgatttgagatcacacaaccttgtgccacaaagaggaattcccaggccagagggagacattttattgccatgttatga

SEQ ID NO: 94648 - DNA, 120 bp, synthetic construct
  source 1..120: mol_type = other DNA
ccttcccctccccctcccctccccctccccctcccctccccctccccctcccctccccctccccaactcagatccggcccattccccgtccccttccctcccccctgccctaagccacct

SEQ ID NO: 94649 - DNA, 120 bp, synthetic construct
  source 1..120: mol_type = other DNA
tatttatttatttgagacagtttctcccttgttgctgaggctggagtgcaatggggcaatatcagctcaccgcaacctctgcttcccaggttcgagcgattctcctgcctcagcctcccg

SEQ ID NO: 94650 - DNA, 120 bp, synthetic construct
  source 1..120: mol_type = other DNA
tcacaaataagtatcgaattttagttcttaaaaagtaacaaggtgggccgggcgtggtggctcacgcctgcaatcccagcactttgggaagccgaggtgggtggaccacgagatcaggag

SEQ ID NO: 94651 - DNA, 120 bp, synthetic construct
  source 1..120: mol_type = other DNA
gttcgagaccaccctggccaacatggcaaaaccccatctccacaaaaaatacaaaaatttgctgagtgcactgtcaggcacctgtactcccagctactcaggaggctgaggcaggagagt

SEQ ID NO: 94652 - DNA, 120 bp, synthetic construct
  source 1..120: mol_type = other DNA
atcattattgggtttctgagacgtgacacatttaccattctcttctgcacaagttacctttgtgtgagtatactaactttctgtagaggtatacttgtaatcacaaataagaataaatta

SEQ ID NO: 94653 - DNA, 120 bp, synthetic construct
  source 1..120: mol_type = other DNA
tttgagccttttatcctttgcgtaagttgagctctacattttgtcttgccattcatgacaataaaaatgtggttgtgtgggggctgaacctccttctgaacaatgatccaagataaaagt

SEQ ID NO: 94654 - DNA, 120 bp, synthetic construct
  source 1..120: mol_type = other DNA
gagatggggtttcactatgttggcccatctggtcttgaactcctgacctcaagtgatccacctgcctcagcctcccaaagtgctgggattacaggcatgagccaccacacctggcctgaa

SEQ ID NO: 94655 - DNA, 120 bp, synthetic construct
  source 1..120: mol_type = other DNA
attacaggcgtgagctacagcacctggcctatttttttttttttttttgagacagagtttgaattttgttgcccaggttggagtgcaatggcacaatctcagctcaccacaaccttttcc

SEQ ID NO: 94656 - DNA, 120 bp, synthetic construct
  source 1..120: mol_type = other DNA
aatccgtaagatgaaggtgacaacaaaagtcaaccgtcatgacaaaatcaatggaaagaggaagaccgccaaagaacagtaagatgtgccttgacacaaatactgttgtatgaaccatgt

SEQ ID NO: 94657 - DNA, 120 bp, synthetic construct
  source 1..120: mol_type = other DNA
ctcacgcctgtaatcccagcacactgggaggccgaggtgtgcggatcatgatgtcaggagttctagaccagcttggccaatatggtgaaaccccgcctctactaaaaatacaaaaattat

SEQ ID NO: 94658 - DNA, 120 bp, synthetic construct
  source 1..120: mol_type = other DNA
gtagtgatgtcctcactggcttctcatttgcattaaactgtgagcttctttagcgtggggacaggaccctgctcccattgcattgtcagcacctcaccacacactccttgtttgaggcca

SEQ ID NO: 94659 - DNA, 120 bp, synthetic construct
  source 1..120: mol_type = other DNA
cttcccacaaatgaaccaactgattctcacaactgaagggagaatggacacctcccattgagggataaaaaaaatcacactctggcctgctggcaagtcacctgtcatttccagctcatc

SEQ ID NO: 94660 - DNA, 120 bp, synthetic construct
  source 1..120: mol_type = other DNA
agtgattcccctgcctcagcctcccgagtagctgggattacaggtgcctgccaccacccccgcctaattttttgtatttttagtagagacggggtttcaccgtattagccaggatggtct

SEQ ID NO: 94661 - DNA, 120 bp, synthetic construct
  source 1..120: mol_type = other DNA
acacgcgatgggacttgtacacttgaagtgaaacacagttttaaaacttgctttgtttagaattcccacctcatttttccatggacaaaagtattctttaggtcctagtgcacttacaat

SEQ ID NO: 94662 - DNA, 120 bp, synthetic construct
  source 1..120: mol_type = other DNA
cacacactcggaaggtgtcttgaggctcagggagttatcaattatagaatgttgttgagttggaggaggtggctggtggcccatcctgttttttaaagtttcagctgtgaggtagggcca

SEQ ID NO: 94663 - DNA, 120 bp, synthetic construct; identical to SEQ ID NO: 94609
  source 1..120: mol_type = other DNA

SEQ ID NO: 94664 - DNA, 120 bp, synthetic construct
  source 1..120: mol_type = other DNA
gtgtacagtagctcccacctgtaatcccagcatttggggaggctgaggtaggaggactgcttgagcctgggagttcgagaccagcctaggcaacatagtaagaccccatatccataaaaa

SEQ ID NO: 94665 - DNA, 120 bp, synthetic construct
  source 1..120: mol_type = other DNA
aatctctactaaccccatctctacaaaaaacagctgggcgtggtagtgcacacctgtaattctagctacttgggaggctgaggcacgagaatcatttgcatcttggaggcagaatttgca

SEQ ID NO: 94666 - DNA, 120 bp, synthetic construct
  source 1..120: mol_type = other DNA
tagtgcatagtctggctgcctttgtatgtgtgtgtgtgtgtgtgtgtgtgcacgcgtgtgtgtgtgtgtgtttaatatagagacagggtttcactctgttgcctaggctcgtttcaaact

SEQ ID NO: 94667 - DNA, 120 bp, synthetic construct; identical to SEQ ID NO: 16207
  source 1..120: mol_type = other DNA

SEQ ID NO: 94668 - DNA, 120 bp, synthetic construct
  source 1..120: mol_type = other DNA
cctgggttgaagcctctgcttgggttcctgctggctgtgggaatgtggggttacctttcccagctggcctcgtttccttcatgtccaatgcaggggttccagtcacatgcgttgggcacc

SEQ ID NO: 94669 - DNA, 120 bp, synthetic construct
  source 1..120: mol_type = other DNA
tccaagatatatgttaagtgattaaaaaaaaaaaaaaaaaaagggccagcctggcatgctggctcatgcctgtaatcccagcactttgggaggccgaggaaggcagatcacctgacgtca

SEQ ID NO: 94670 - DNA, 120 bp, synthetic construct
  source 1..120: mol_type = other DNA
atggtgaaaccctgtctctactaaaaatacaaaaattagctggatgtggtggcaggttcctgtaattccagctactcaggaagctgaggcaggagaattgcttgaacccgggaggtggag

SEQ ID NO: 94671 - DNA, 120 bp, synthetic construct
  source 1..120: mol_type = other DNA
ttttgcccaggttagagtgcagtggcacaatcacagtggctcactgcagcctcaaactcctgggctgaagggaatcctcccacctcagcctcccaagtagttaggactataggcatgtgc

SEQ ID NO: 94672 - DNA, 120 bp, synthetic construct
  source 1..120: mol_type = other DNA
gcatacagtagctcccacctgtaatcccagcatttggggaggctgaggtaggaggactgcttgagcctgggagttcaagaccagcctaggcaacatagaccccatatccacaaaaaattt

SEQ ID NO: 94673 - DNA, 120 bp, synthetic construct
  source 1..120: mol_type = other DNA
gctcactacaacctctgtctcctgggttcaagcgattctcatgcctcagcctcccaagtggctaggactacagacatgcaccatcacgcccagctaatttttgtatgtttttcagtagag

SEQ ID NO: 94674 - DNA, 120 bp, synthetic construct
  source 1..120: mol_type = other DNA
gttcgggaggtggttccatctcagccgccctctgcctcttgggtttgcgtggtttttctgcctcagcctcctgagtagctaagggaggtgtcttgagattatcatcggctgagggtggaa

SEQ ID NO: 94675 - DNA, 120 bp, synthetic construct
  source 1..120: mol_type = other DNA
cggaaggtgtcttgagattatcatcggctgagggtggaagcggcccccgcagacgctcggcaggtgtcttgatattatcatctgctgagggtggagctgagggtggaaggggagtgagct

SEQ ID NO: 94676 - DNA, 120 bp, synthetic construct
  source 1..120: mol_type = other DNA
attatcatctgctgagggtggagctgagggtggaaggggagtgagctgacgctcagaaggtgtcttgagattatcatccgctgagggtggaagcggcccccgcagacgctcggcagttgt

SEQ ID NO: 94677 - DNA, 120 bp, synthetic construct
  source 1..120: mol_type = other DNA
aacagctggagggtaaaggaaagtcattgggacacactgttgtctccacatgccactgtgtctgtctgcaaatgtaggcaggctggggtcctgccccagggaagacagagtcataacaga

SEQ ID NO: 94678 - DNA, 120 bp, synthetic construct
  source 1..120: mol_type = other DNA
gcaacacggttaccaacagggatgggactgtgatgcttgtaggcagcctttctctctgccatctccctctgcagggcttgagcacagagctgtagggagaaaaatgtatccatgtcctga

SEQ ID NO: 94679 - DNA, 120 bp, synthetic construct
  source 1..120: mol_type = other DNA
tgacaacaactcaccccacccctagaatggctggtatgaaccgagtttccacatagtctagctggcaatggggtcaggagacgttttgctacttcacatcttttggtcactggtaaatat

SEQ ID NO: 94680 - DNA, 120 bp, synthetic construct
  source 1..120: mol_type = other DNA
accatcagccatagagagatccttccagaataaccccgcagttcactactgcactttgccatgattcaggactggaactcttgtcatcaactttaaagatcctggttgagagaaaaggca

SEQ ID NO: 94681 - DNA, 120 bp, synthetic construct
  source 1..120: mol_type = other DNA
ccatacaggctgcaattgaagtcgtcggtgcaggctcagtccctacaaaggccagggtatttcctgtccacctttattctgatgcatgactcttctgggtctcaaccagagccagtggac

SEQ ID NO: 94682 - DNA, 120 bp, synthetic construct
  source 1..120: mol_type = other DNA
gtactggcattggttttcctttctcttttttttttttttttttttttttttcctgagatggagctttgctgttgttgcccaggctgtagtgcaatggcacaatctcagctcactgccttt

SEQ ID NO: 94683 - DNA, 120 bp, synthetic construct
  source 1..120: mol_type = other DNA
gagactctgtcacatacacacacacacacacaagaatgacatgaggctggcacagtggctcactcctgtaatcccagcactttgggaggctgaggcaggcggatcacctgaggtcgggag

SEQ ID NO: 94684 - DNA, 120 bp, synthetic construct
  source 1..120: mol_type = other DNA
ttgagatggagtgtcactctcaaccatgctgaagtgcagtggcgctaccttggctcacggcagcctccacctcccagattcaagcgattcttgtgcctcggcctcccaagtagctgggat

SEQ ID NO: 94685 - DNA, 120 bp, synthetic construct
  source 1..120: mol_type = other DNA
gtgagccgaggtcacaccattatactccagcctgggcaacagaaggagactcgtcttcggggtgagaaaagaaaaaaaaaaaagaaaaaagcttcctccaatttataccgaaaattctct

SEQ ID NO: 94686 - DNA, 120 bp, synthetic construct
  source 1..120: mol_type = other DNA
aactacaaagcagaagagtttagaaagaatttcctatttaagtgacgaaacctcatactccatttgtgataaatagcacaaaggttaaaaaaacttatttttgaccaaaagctctgttga

SEQ ID NO: 94687 - DNA, 120 bp, synthetic construct
  source 1..120: mol_type = other DNA
catgcccgactcatttttgtatttttagtagagatgaggtttcaccatgttggccagtctggccttgaactcctgacaggcgatctgcctgcctcagcctcccaaagtgctgggattaca

SEQ ID NO: 94688 - DNA, 120 bp, synthetic construct
  source 1..120: mol_type = other DNA
caatgaagagattatttcattcacaaataagtatcgaattttagttcttaaaaagtaacaaggtgggccgggcgtggtggctcacgcctgcaatcccagcactttgggaagccgaggtgg

SEQ ID NO: 94689 - DNA, 120 bp, synthetic construct
  source 1..120: mol_type = other DNA
caaacctgggaagcagaggttgcggtgagctgatattgccccattgcactccagcctgggcaacaagggagaaactgtctcaaaaaaataaataaataaataaaataatgtagatcttga

SEQ ID NO: 94690 - DNA, 120 bp, synthetic construct
  source 1..120: mol_type = other DNA
gaaaccccgagggtccagcgtctactcacacggatgcactgatggctgataaattccagcaggagcccaaagaggagccaaaagagcatccaccgcccccgcatgtcctggtcctttcag

SEQ ID NO: 94691 - DNA, 120 bp, synthetic construct
  source 1..120: mol_type = other DNA
ccattcatatcctaagcaacaaaacatcagcagggtgcggaaggtcccgatagtaaaccatctccatcacatccatgtagccatccgtccatcaacctgtatctcgggaacaaatgtaga

SEQ ID NO: 94692 - DNA, 120 bp, synthetic construct
  source 1..120: mol_type = other DNA
cacccacctcggcctcccaaagtgctgggattacaggcgtgagccaccacacccagcccctgttttgtttttgttttgcttgtttcttagggttgtttttctatttatggtaaaggcatt

SEQ ID NO: 94693 - DNA, 120 bp, synthetic construct
  source 1..120: mol_type = other DNA
cgaaagatgcccttgggaggtgatgacactcaggtacacgggtgctcaacagattgcttcctcctatcctcagacggtctttgcattcatgcagccattggcactcccattgtatggaag

SEQ ID NO: 94694 - DNA, 120 bp, synthetic construct; identical to SEQ ID NO: 16402
  source 1..120: mol_type = other DNA

SEQ ID NO: 94695 - DNA, 120 bp, synthetic construct; identical to SEQ ID NO: 758
  source 1..120: mol_type = other DNA

SEQ ID NO: 94696 - DNA, 120 bp, synthetic construct
  source 1..120: mol_type = other DNA
tcccagcattttgggaggctgaggctggtggatcacctgaggccaggacttcaagaccagcctgaccaatatggcaaaatctcgtccctactaaaaatacaaaaattagccgggcatggt

SEQ ID NO: 94697 - DNA, 120 bp, synthetic construct
  source 1..120: mol_type = other DNA
aacagtgtagaatctaaacagaatagaatctaaacatgcattgatttgacaagtgtttattgagcacctgccatgaacaaggccttgtgtgattaaatagggttataattagtaatataa

SEQ ID NO: 94698 - DNA, 120 bp, synthetic construct
  source 1..120: mol_type = other DNA
gtcctacaatatcgatttttcttgcatatttaggaaattgagggttttttcctaaaacatgcggacatatgggaaatatgatccaacatttgcactaatgtttcagacacagttagaggt

SEQ ID NO: 94699 - DNA, 120 bp, synthetic construct; identical to SEQ ID NO: 16403
  source 1..120: mol_type = other DNA

SEQ ID NO: 94700 - DNA, 120 bp, synthetic construct
  source 1..120: mol_type = other DNA
agacacagtctggctctgttgcctaagctggagtgcagtggtgggatctcggctcactgcaagctccgcctcccgggttcacaccattctcctgcctcagcctcccaagtagctgggact

SEQ ID NO: 94701 - DNA, 120 bp, synthetic construct; identical to SEQ ID NO: 16421
  source 1..120: mol_type = other DNA

SEQ ID NO: 94702 - DNA, 120 bp, synthetic construct; identical to SEQ ID NO: 94612
  source 1..120: mol_type = other DNA

SEQ ID NO: 94703 - DNA, 120 bp, synthetic construct
  source 1..120: mol_type = other DNA
agggtcttgctctgtcatcccagctggagtgcagtggtgcgatgtcagctcactgcaaactctgcctccaagatgcaaatgattctcgtgcctcagcctcccaagtagctggaattacag

SEQ ID NO: 94704 - DNA, 120 bp, synthetic construct
  source 1..120: mol_type = other DNA
cctccctgcctcactctctgggtctcgagctcctgtgacacatgactcctctctcttcctggagtgatccaagccctgccacttcctgactttgcccacactgtaccctctgcctggggc

SEQ ID NO: 94705 - DNA, 120 bp, synthetic construct
  source 1..120: mol_type = other DNA
tctaatgtaagtgatatttattttatttatattttttgagtcagagtctcactctgtcacccaggctagagtgtgctgacgtgatcttggctcactacaacctctgcctcctgggttcaa

SEQ ID NO: 94706 - DNA, 120 bp, synthetic construct; identical to SEQ ID NO: 16422
  source 1..120: mol_type = other DNA

SEQ ID NO: 94707 - DNA, 120 bp, synthetic construct
  source 1..120: mol_type = other DNA
ttgatattatcatctgctgagggtggagctgagggtggaaggggagtgagctgacgctcggaaggtgtcttgagattatcatccgctgagggtggaagcggcccccgcagacgctcggca

SEQ ID NO: 94708 - DNA, 120 bp, synthetic construct
  source 1..120: mol_type = other DNA
cgggaggtgtcttgagattatcatccgctgagggtggaaggggagtgagcagacactcaggaggtgtcttgagattatcatccgctgagggtggaaggggagtgagcacacactcgggag

SEQ ID NO: 94709 - DNA, 120 bp, synthetic construct
  source 1..120: mol_type = other DNA
tacaatttggtattacctgggagtgaaaagaaatattacagccatgcctaagtgacttcttgaggtgagattgttctgtcagaaaaccctctcccagttcccctgcagctcttcaggaat

SEQ ID NO: 94710 - DNA, 120 bp, synthetic construct
  source 1..120: mol_type = other DNA
ttcagatggctataagagtacagtctgagccggtcacggtggctgacgcctgtaatcccagcactctgggagggcggggcagatggatcacgaggtcaggagattgagaccattgtggct

SEQ ID NO: 94711 - DNA, 120 bp, synthetic construct
  source 1..120: mol_type = other DNA
gacacctcccattgagggacaaaaaaaagtcacactctggcctgctggcaagtcacctgtcatttccagctcatcttcatagttccatagttagtcctattctttagtaaatataaagac

SEQ ID NO: 94712 - DNA, 120 bp, synthetic construct
  source 1..120: mol_type = other DNA
catcttcacctcatgtctgtttactgccatgttagcaatttgatgtattcaatcatgggttttatattctgtttggtgtcccccattgttctcatcggagatcagaagcttcagatgcac

SEQ ID NO: 94713 - DNA, 120 bp, synthetic construct
  source 1..120: mol_type = other DNA
aatcgcttgaacctgggaggtggaggttgcagtgagccaagatcatgccactgcactctagcctgggtgacagagtgagactctgtctcaaaaaaaaaaaaaaaaaaaaaaattggtcaa

SEQ ID NO: 94714 - DNA, 120 bp, synthetic construct
  source 1..120: mol_type = other DNA
caagaagctgttctttccctttccagggcaaactcatttccacactatgcggattccaacagagccataccttcctgtctacggcggttggacctccaggctctctgctgtacatccgtg

SEQ ID NO: 94715 - DNA, 120 bp, synthetic construct
  source 1..120: mol_type = other DNA
gaacccaggaggcagaggttgcagtgagccaagatcccaccactgcactccagcctggtgacagagtgagactccgtctcaaaaaaaaaaaaaaaaaaaatgacatgaatatacttcaca

SEQ ID NO: 94716 - DNA, 120 bp, synthetic construct
  source 1..120: mol_type = other DNA
cataggaaaggtagctggcccagtttggagctaggggaaatgtcaaacacatgaagaaatgagaagccaagaaatgccatcacgcatgaatgcttcatggcacccatgatgtccctgcta

SEQ ID NO: 94717 - DNA, 120 bp, synthetic construct
  source 1..120: mol_type = other DNA
aacttagcagccaaattcttaccaagtacagacttttgacatactgatctctctccagttccaagtcggaacatgcactttgaatgatgtcattcaaaattaccctgcccagacacactt

SEQ ID NO: 94718 - DNA, 120 bp, synthetic construct
  source 1..120: mol_type = other DNA
atttgcaatgcctgaaaacactaccagccatctgaaaaacatgtgacttctaacttctgttcttttttgtagcagtggaatcccacggtgatatctgagggatgtggttaccttttggag

SEQ ID NO: 94719 - DNA, 120 bp, synthetic construct
  source 1..120: mol_type = other DNA
ctgtttctactaaaaatacaaaaattagccgagcgtggtggcaggcgcctgtaatcccagttactcagtagctgaggcaggagaatcgcttgaacccgggaggcggaggttgcagtgagt

SEQ ID NO: 94720 - DNA, 120 bp, synthetic construct
  source 1..120: mol_type = other DNA
gcacttcagcctgggtgacagagcgagactctgtctcaaaaaaaaaaaaaaaaaaattaccaaggtggagatcatgaaaatggcatgaatagcgtgggatttctctaagattgttgatat

SEQ ID NO: 94721 - DNA, 120 bp, synthetic construct
  source 1..120: mol_type = other DNA
gcctggctaatttttgtatttttagtagaccaccacgcctggctaatttttttttttttttttttttttttttttttttgagacggagtctcgctctgtcgcccaggctggagtgcagtg

SEQ ID NO: 94722 - DNA, 120 bp, synthetic construct
  source 1..120: mol_type = other DNA
ccaaccctggggctttatactccctctccaccaatccctgatgaccccggtggtgcctcacaatggacgtgcctcacaatggacatgccaagtagcgcccgcatcattccaatgacccct

SEQ ID NO: 94723 - DNA, 120 bp, synthetic construct
  source 1..120: mol_type = other DNA
acccaaatgagggggagaaaaccaagttgaccttcatgaatggcctctcagggacgtccaaggaatctgtgcatttcaagaaacaaagttcatcagcttctctcctaaggtatttgccca

SEQ ID NO: 94724 - DNA, 120 bp, synthetic construct
  source 1..120: mol_type = other DNA
gcggaggttgcagtgagccgagattgtaccattgcactccagcctgggtgacagaatggaatgagactctgtctcaaaaaaaaaaaaaaaaaaaagcagccctagatttcggttgtggtg

SEQ ID NO: 94725 - DNA, 120 bp, synthetic construct
  source 1..120: mol_type = other DNA
atgctccttgaggccccaggtgcgagcctgtaccctgccggagcatgaggcaagggacagggcatcgtctgtggggatagtgggggtagtgggggtagtggtcagccagatttggtgact

SEQ ID NO: 94726 - DNA, 120 bp, synthetic construct; identical to SEQ ID NO: 765
  source 1..120: mol_type = other DNA

SEQ ID NO: 94727 - DNA, 120 bp, synthetic construct
  source 1..120: mol_type = other DNA
tgcacagagcattcaaaacaaatgaaggagaataaaaaatatgtattacatgttataaaataaatgtgatgtggttaactcttttattcaaagttatagaacatacatatgtactataga

SEQ ID NO: 94728 - DNA, 120 bp, synthetic construct
  source 1..120: mol_type = other DNA
ctggtcatgcgacaggaactgtggggtcaggacaatagagagcttcaccatttgcagaatgagaacaggggctcatcatgagtgccaacctattagataatttaaaaaaatagtgttgaa

SEQ ID NO: 94729 - DNA, 120 bp, synthetic construct
  source 1..120: mol_type = other DNA
ttctcagtgctcacctaagggcttttgtattttcctcctcgcatccccacagatggggttcaggctgccggacacagctgggtgatgccagggcagtggtcacctgtgccagccctgtga

SEQ ID NO: 94730 - DNA, 120 bp, synthetic construct
  source 1..120: mol_type = other DNA
actgagtctcggaatgatgaagcactctgtccaatgtcacacggctagtaagtgtggagaccttgcatccaatcaatgcccgtctcattctaaaggccatgttatgtgttctccagccca

SEQ ID NO: 94731 - DNA, 120 bp, synthetic construct
  source 1..120: mol_type = other DNA
cttgaacccaggatgcggaggttgtagtgagccgagatcatgccactgcactcccgcctgggtgacaaaggtagaatctatccaaaaaaaaaaaaaaaagttattatttctgaagattgt

SEQ ID NO: 94732 - DNA, 120 bp, synthetic construct
  source 1..120: mol_type = other DNA
tgaaatgccgtctctactaagaatacaaaaatgagccgggcacggtggcacgcacctgtaatcccaggtactccgaaggatgaggcaggataattgtttgaactcaggaggtggaggttg

SEQ ID NO: 94733 - DNA, 120 bp, synthetic construct
  source 1..120: mol_type = other DNA
cgacagagcgacactccatctcaaaaaaaaaaaaaaaaaaagtttcggcaaattccatctaagaattccaccagagttctgttgtctccaatgtcatcttccacagatttcaagttgtga

SEQ ID NO: 94734 - DNA, 120 bp, synthetic construct
  source 1..120: mol_type = other DNA
cggtggctcacgcttgtaatcccagaactttgggaggccaaggcaggcggatcggttgaggtcaggagttcaagaccagcatggccaacacggtgaaaccctgtctctattaaaaataca

SEQ ID NO: 94735 - DNA, 120 bp, synthetic construct; identical to SEQ ID NO: 16421
  source 1..120: mol_type = other DNA

SEQ ID NO: 94736 - DNA, 120 bp, synthetic construct
  source 1..120: mol_type = other DNA
tgagaacacaaagggattcccagggcagttcctagtgcatagtctggctgcctttgtgtgtgtgtgtgtgtgtgtgtgtgtgtgtgtgtgtgtttgtgtttaatatagagacagggtctc

SEQ ID NO: 94737 - DNA, 120 bp, synthetic construct; identical to SEQ ID NO: 94703
  source 1..120: mol_type = other DNA

SEQ ID NO: 94738 - DNA, 120 bp, synthetic construct; identical to SEQ ID NO: 94704
  source 1..120: mol_type = other DNA

SEQ ID NO: 94739 - DNA, 120 bp, synthetic construct; identical to SEQ ID NO: 94705
  source 1..120: mol_type = other DNA

SEQ ID NO: 94740 - DNA, 120 bp, synthetic construct
  source 1..120: mol_type = other DNA
gcttgagtgcaatggcctgttctcagcttactcaacctccgcctcttgggctcgggtgatgatggttccacctcagcggccctccgcctcttgggttcgggtggtgattccacctcagcg

SEQ ID NO: 94741 - DNA, 120 bp, synthetic construct
  source 1..120: mol_type = other DNA
aaggggagtgagctgacgctcggaaggtgtcttgagattatcatccgctgagggtggaagcggcccccgcagacgctcggcaggtgtcttgatattatcatctgctgagggtggagctga

SEQ ID NO: 94742 - DNA, 120 bp, synthetic construct; identical to SEQ ID NO: 94707
  source 1..120: mol_type = other DNA

SEQ ID NO: 94743 - DNA, 120 bp, synthetic construct; identical to SEQ ID NO: 94677
  source 1..120: mol_type = other DNA

SEQ ID NO: 94744 - DNA, 120 bp, synthetic construct; identical to SEQ ID NO: 94678
  source 1..120: mol_type = other DNA

SEQ ID NO: 94745 - DNA, 120 bp, synthetic construct
  source 1..120: mol_type = other DNA
acctgaatatttaccagtgaccaaaagatgtgaagtagcaaaacgtctcctgaccccattgccagctagactgtgtggaaactcggttcataccagccattctaggggtggggtgagttg

SEQ ID NO: 94746 - DNA, 120 bp, synthetic construct
  source 1..120: mol_type = other DNA
ccatccaccctggtgttgactgactttaacaaggttcagttcacagagattgagggcagaaaaaggaaacggcctaaaaagggtaagtttgctgtgttgccctcactccacttgattcat

SEQ ID NO: 94747 - DNA, 120 bp, synthetic construct
  source 1..120: mol_type = other DNA
agcttgtatggaggacccctgaccatcccccagaagtagactcccatctcttctgcagcaagataacatgctactaggcctcaattcattgctaaacattttttaacaagtatctcacat

SEQ ID NO: 94748 - DNA, 120 bp, synthetic construct
  source 1..120: mol_type = other DNA
aggaaaaaaaaaaaaaaaaaaaagagaaaggaaaaccaatgccagtactagcaactcctcttcctccgaaaaaatgaaaacaagaatgtaggaagggaaaggaattatacagcttaaact

SEQ ID NO: 94749 - DNA, 120 bp, synthetic construct
  source 1..120: mol_type = other DNA
gaggttgcactgagccgagatcacaccactgcactccagcctgagcgacagaatgagactctgtcacatacacacacacacacacaagaatgacatgaggctggcacggtggctcactcc

SEQ ID NO: 94750 - DNA, 120 bp, synthetic construct
  source 1..120: mol_type = other DNA
ttaaatatttcttctcatcatagctaaaatgcaatgcaaatcccatctcagatgtgggtcagatacctatgaatctcctgaggtggtcattgaaatgactttttcttgagacagagtgtc

SEQ ID NO: 94751 - DNA, 120 bp, synthetic construct
  source 1..120: mol_type = other DNA
tgcaatcccagctacttgagaggctgaggcaggggaatcacttgaagccaggaggtggaggttgcagtgagccgaggtcacaccattatactccagcctgggcaacagaaggagactcgt

SEQ ID NO: 94752 - DNA, 120 bp, synthetic construct; identical to SEQ ID NO: 94686
  source 1..120: mol_type = other DNA

SEQ ID NO: 94753 - DNA, 120 bp, synthetic construct
  source 1..120: mol_type = other DNA
gcctcggcctcccaaagtgctgggattacaggtgtgagccaccgtgcccagccatttttttgtttttgtttttgtttgttatttttgagatggggtctcactctgtcacccaggctggag

SEQ ID NO: 94754 - DNA, 120 bp, synthetic construct
  source 1..120: mol_type = other DNA
atgaagtaatctcttcattgtatttttttttttttttacttatgctgagatttaaatgacaaagattcatataatccaagagagaagtattatttagagggattcttttaccatgtgata

SEQ ID NO: 94755 - DNA, 120 bp, synthetic construct
  source 1..120: mol_type = other DNA
gggcggatcacctgaggtcgggagttcaaaaccagcctgaccaacatggagaaaccctatctctactaaaaatacaaaattagctgggagtggtgccacatgtctgtaatcccagccact

SEQ ID NO: 94756 - DNA, 120 bp, synthetic construct
  source 1..120: mol_type = other DNA
attacaggcctgagctgtgtaatttcatgccacgtgatacagcccagtaaaaaggaagaaaccccacgggtccagcgtctactcacagagatgcactgatggctgataaattccagtagg

SEQ ID NO: 94757 - DNA, 120 bp, synthetic construct
  source 1..120: mol_type = other DNA
catgctgtgtgatttgattgctctcaaatatattgagatttgctggaacaaaataagtcaggttaatttttgtaaatgtaccaggcatgcttaaaatgaatgtatctacatttgttcctg

SEQ ID NO: 94758 - DNA, 120 bp, synthetic construct
  source 1..120: mol_type = other DNA
aatgcctttaccataaatagaaaaacaaccctaagaagcaagcaaaacaaaagaaaacaggggctgggtgtggtggctcacacctgtaatcccaccactttgggaggccgaggtgggcgg

SEQ ID NO: 94759 - DNA, 120 bp, synthetic construct; identical to SEQ ID NO: 16426
  source 1..120: mol_type = other DNA

SEQ ID NO: 94760 - DNA, 120 bp, synthetic construct; identical to SEQ ID NO: 16427
  source 1..120: mol_type = other DNA

SEQ ID NO: 94761 - DNA, 120 bp, synthetic construct
  source 1..120: mol_type = other DNA
cctatagtcccagcactttgggaggccgcggtgggcagatcacgaggtcaggagttgacacgagcctggccaatatggtgaaaccccatctctactaagaatacaaaaattagctgggca

SEQ ID NO: 94762 - DNA, 120 bp, synthetic construct
  source 1..120: mol_type = other DNA
tgatccaccagcctcagcctcccaaaatgctgggattagaggcatgagtcaccatgcccagcctaaacttggcaagataataaatcacctttttaagtgtcgttgggcacttgtctggtt

SEQ ID NO: 94763 - DNA, 120 bp, synthetic construct; identical to SEQ ID NO: 94697
  source 1..120: mol_type = other DNA

SEQ ID NO: 94764 - DNA, 120 bp, synthetic construct; identical to SEQ ID NO: 16428
  source 1..120: mol_type = other DNA

SEQ ID NO: 94765 - DNA, 120 bp, synthetic construct; identical to SEQ ID NO: 16403
  source 1..120: mol_type = other DNA

SEQ ID NO: 94766 - DNA, 120 bp, synthetic construct
  source 1..120: mol_type = other DNA
cctcccgggttcacgccattctcctgcctcagccacccaagtagctgggactacaagtgctgccaccacatccagctaattttttgtatttttagtagagacagggtttcactgtgttag

SEQ ID NO: 94767 - DNA, 120 bp, synthetic construct; identical to SEQ ID NO: 2388
  source 1..120: mol_type = other DNA

SEQ ID NO: 94768 - DNA, 120 bp, synthetic construct; identical to SEQ ID NO: 2389
  source 1..120: mol_type = other DNA

SEQ ID NO: 94769 - DNA, 120 bp, synthetic construct
  source 1..120: mol_type = other DNA
atcacttgagctcaggagttcgagaccaaattgggcaacatggtgaaaccctatctctacgaaaaatacaaaaattagctgagtgccgtggcttgcgcctgtcctcccagctacttgggg

SEQ ID NO: 94770 - DNA, 120 bp, synthetic construct
  source 1..120: mol_type = other DNA
ctggtcttgaacttctgacctcaggtgatcccaccttggcctcccaaagtgctgggattacaggcatgagccactgtgcccagcttaagatctctgttttaatgttaatgctggtcagtt

SEQ ID NO: 94771 - DNA, 120 bp, synthetic construct
  source 1..120: mol_type = other DNA
cccaaagtgctgggattacaggcttgagccgtggcacccggcccaggaacttctcttatatctagaagccaggcttggtgactctacttgctcaccagatgatcctacacctgccacctc

SEQ ID NO: 94772 - DNA, 120 bp, synthetic construct
  source 1..120: mol_type = other DNA
gcaacctccacctcctgggttcaagggattgtcctgcctcagcctcctgagtagctgggattacaggcgggtgccaccgtgcctggctaatttttgtatttttagtagagacggggtttc

SEQ ID NO: 94773 - DNA, 120 bp, synthetic construct
  source 1..120: mol_type = other DNA
agggccaggaaaggtgatagacagtgggggtctgtcctggtcaccagacccctgggtcctgcccacctgcttggagctccccacccatcacacatgatgctgccaagccctctgggtatt

SEQ ID NO: 94774 - DNA, 120 bp, synthetic construct
  source 1..120: mol_type = other DNA
acaaaaaggttctgctatccaccaaaccttcttcggtctgggccctcccttaccaaccctggggctttatactccctctccaccaatccctgatgaccccggtggtgcctcacaatggac

SEQ ID NO: 94775 - DNA, 120 bp, synthetic construct
  source 1..120: mol_type = other DNA
ctctaacaaacaaaatggaccaaaacaaagtgaaatgtcatttgatttgtgtcacctggtttgatgcctttttttttttttttttttttttgacagagtctcactctgtcgcccaggctg

SEQ ID NO: 94776 - DNA, 120 bp, synthetic construct
  source 1..120: mol_type = other DNA
tatatattcttgaaaacatctcaattttaaatgtttctttcaagatggtgaattaaacagagatagcccttcaacaggtggaactcagcatatgctgagtctgaaatggaaatgatgaag

SEQ ID NO: 94777 - DNA, 120 bp, synthetic construct
  source 1..120: mol_type = other DNA
gacagagcaagactttgtctccaaacaaaaagaaaagataattactttatacttagcttgtcttagccatgagtgacgggctgcatgtggcccaggacagttttgaatgcagttcaacac

SEQ ID NO: 94778 - DNA, 120 bp, synthetic construct
  source 1..120: mol_type = other DNA
agcagtggaatcccacggtgatatctgagggatgtggttaccttttggaggaggttgacggtttctaaggatgattctttctgagtgaaatattgtcggtgtcattgaccttttcattct

SEQ ID NO: 94779 - DNA, 120 bp, synthetic construct
  source 1..120: mol_type = other DNA
agagattctctggggctttctctgcatcatgagacgcagtgcagttgtgcccttcaccttctggcagtttgtcacctcgtccctatgacctcagaggaactttgtctcaggccaattgtt

SEQ ID NO: 94780 - DNA, 120 bp, synthetic construct
  source 1..120: mol_type = other DNA
gataaaaaaaaaaatcatgtactaggatttcgagagaagcaatgggtaatctaaaaagatgaaaagagcaaccacgtcaatcccacagctactactagatttcataggaaaggtagctgg

SEQ ID NO: 94781 - DNA, 120 bp, synthetic construct
  source 1..120: mol_type = other DNA
aaaaaaaaaataggccaggtgcggtagctcacgcctgtaatcccagcactttgggaggctgaggtgggtgaatcacaaggtcaagagatggacaccatcttgggcaacatggtgaaaccc

SEQ ID NO: 94782 - DNA, 120 bp, synthetic construct
  source 1..120: mol_type = other DNA
agtagacagaaaggtatggctctgttggagtccccatagtgtggaaatgagtttgccctggaaagggaaagaacagcttcttgacctcaggtttctcaccttctcctctcctcactctca

SEQ ID NO: 94783 - DNA, 120 bp, synthetic construct
  source 1..120: mol_type = other DNA
caattctgcctcagcttcctgagtagcttggattacaggtgtgtgccaccacattcggccaatttttttttttttttttttgagacagagtctcactctgtcacccaggctagagtgcag

SEQ ID NO: 94784 - DNA, 120 bp, synthetic construct
  source 1..120: mol_type = other DNA
gtggcctccaacaaggagtgtgtggtgtggtgctgagaatgcaatgggagcagggtcctgtccccacggtaaagaagctcacagcttaatgcaaatgagaagccagtgaggacatcacta

SEQ ID NO: 94785 - DNA, 120 bp, synthetic construct
  source 1..120: mol_type = other DNA
gcaggggggatctttgaatcacagccttcagatgccagaagggcagagggaatcccacatggactggtggatcatgtgtgtgcatttctctcccttctaacctgaggaaactaagcatga

SEQ ID NO: 94786 - DNA, 120 bp, synthetic construct
  source 1..120: mol_type = other DNA
caaaagattagccgggcgtggtggcaggcacctgtaatcccagctactcgggaggctgaggcaggggaatcacttgaacctgggaggcggaggttgcagtgagccaagatcacatcattg

SEQ ID NO: 94787 - DNA, 120 bp, synthetic construct; identical to SEQ ID NO: 94575
  source 1..120: mol_type = other DNA

SEQ ID NO: 94788 - DNA, 120 bp, synthetic construct
  source 1..120: mol_type = other DNA
tatgtgtgaaaacattccctcctttggccctacaggtcagaatggcggcagcggagcatcgtcattcttcaggattgccctgctggccctacctcacagctgaagctttaaaaaacagga

SEQ ID NO: 94789 - DNA, 120 bp, synthetic construct
  source 1..120: mol_type = other DNA
gaggctggtggtcgggaccagtaggaggatcgcttgagtccaggagtgcatctctacaaaaaagttaaaggattttttaacattggccaggcgtggtggcacacatacatctgtgatccc

SEQ ID NO: 94790 - DNA, 120 bp, synthetic construct
  source 1..120: mol_type = other DNA
tttttttttttaatttaagagacagacagggtctttctctgtcgcccaggctggagtgcagaggcacaatcatagctcacggcagccttgaactcctgggctcaagcaatcctcccactt

SEQ ID NO: 94791 - DNA, 120 bp, synthetic construct
  source 1..120: mol_type = other DNA
gagactcttgtctctcctgtctctataacaaatttaaaaattagctccccaggccaggctcagtggctcctgcctgtaatcccaacactttgagaggccgaggcaggtggatcacgaggt

SEQ ID NO: 94792 - DNA, 120 bp, synthetic construct
  source 1..120: mol_type = other DNA
aacaacaaaaaaaacctgtgtcaatcacagccttcgagctaggggagaggcggccgaattctgccctctgctaacgagctatagctttgtggaaatgggtgagtggcgtgcccttgtgag

SEQ ID NO: 94793 - DNA, 120 bp, synthetic construct
  source 1..120: mol_type = other DNA
tctgcctgcctcggcctctcaaagtgttgggattacaggcatgaaccactgagcctggtctggtgagccaatttttatatttgttatagagacaagagagacaagagtctccttatgttg

SEQ ID NO: 94794 - DNA, 120 bp, synthetic construct
  source 1..120: mol_type = other DNA
gactgcttgagcctgggagttcgagaccagcctaggcaacatagtgagaccccatatccacaaaaaatttaaaaaaggagtttgtgttcctgtagtagcagacttgggaggttgaggtgg

SEQ ID NO: 94795 - DNA, 120 bp, synthetic construct
  source 1..120: mol_type = other DNA
gtggccctaatgtgagtgatctttaacactgagcacttgaaaaagaaaaccctgaagaaacctaattctttgatgtctggacgacaaggaagaagatagaaatggcatcagataataaac

SEQ ID NO: 94796 - DNA, 120 bp, synthetic construct
  source 1..120: mol_type = other DNA
tttctgcctcagcctcctgagtagctaagggaggtgtcttgagattatcatccgctgagggtggagctgagggtggaaggggagtgagcagacactcgggaggtgtcttgagattatcat

SEQ ID NO: 94797 - DNA, 120 bp, synthetic construct
  source 1..120: mol_type = other DNA
agggttttctgacagaacaatctcacctcaagaagtcagttaggcatggctgtaatatttcttttcactcccaggtaataccaaattgtaagtgcactaggacataaagaatacttttgt

SEQ ID NO: 94798 - DNA, 120 bp, synthetic construct; identical to SEQ ID NO: 94710
  source 1..120: mol_type = other DNA

SEQ ID NO: 94799 - DNA, 120 bp, synthetic construct
  source 1..120: mol_type = other DNA
tttcatatccaatttcccattttcctctgcctctgacacctgcctctccttttctgcatgctcacattctttcacgcttagtttcctcagattagaagggagagaaatgcacacacatga

SEQ ID NO: 94800 - DNA, 120 bp, synthetic construct
  source 1..120: mol_type = other DNA
attcccagaacgctaggaaacaggggcgaaaacacttcaaagagaaagttaatgaacttgtttctgaccacaaggcatccttcagcacatgctgtctggagtggcctcaaacaaggagtg

SEQ ID NO: 94801 - DNA, 120 bp, synthetic construct
  source 1..120: mol_type = other DNA
catggtgaacccctgtctctactaaaaatgcaaaaattgggctgggaacggtggctcatgcctgtaatctcagcacattgggaggccgaggtgtgcggatcatgatgtcaggagttctag

SEQ ID NO: 94802 - DNA, 120 bp, synthetic construct
  source 1..120: mol_type = other DNA
cacatcttactgttttttggcggtcttcctctttccattgattttgtcatgatggttgattttcgttgtcaccttcatcttacggattttagctctaccttttgtttccacatgtctccg

SEQ ID NO: 94803 - DNA, 120 bp, synthetic construct
  source 1..120: mol_type = other DNA
aggataatcacttgaacccagcaggaaaaggttgtggtgagctgagattgtgccattgcactccaacctgggcaacaaaattgaaactgtctcaaaaaaaaaaaaaaaaaaaaaaatagg

SEQ ID NO: 94804 - DNA, 120 bp, synthetic construct
  source 1..120: mol_type = other DNA
cagatgatccatctgcttcagcctcccaaagtgctgggattacaggcatgagccaccacatctggcctgaaataatatctttcaaattctttgtagaatttgttttttcctgatttctgc

SEQ ID NO: 94805 - DNA, 120 bp, synthetic construct
  source 1..120: mol_type = other DNA
tctgggggctgaacctccttctgaacaatgatccaagataaaagtactaataccacaatgctttttgatattcaagggaagaggaagtatgtttcagttttaccgcctagataattacac

SEQ ID NO: 94806 - DNA, 120 bp, synthetic construct
  source 1..120: mol_type = other DNA
tttttgaccaaaagctctgttgacattctattaaacaaacagtgacctatttaattttcataacgcaaatggcagatattttcataattcttatgctaataaatcatttccctgattttt

SEQ ID NO: 94807 - DNA, 120 bp, synthetic construct
  source 1..120: mol_type = other DNA
ttagtagagatgaggtttcaccatgttggccagtctggccttgaactcctgacaggtgatctgcctgcctcagcctcccaaagtgctgggattacaggtgtgagccaccgtgcccggcca

SEQ ID NO: 94808 - DNA, 120 bp, synthetic construct
  source 1..120: mol_type = other DNA
taagtaaaaaaaaaaatacaatgaagagattacttcattcacaaataagtatcaaattttagtgcttaaaaattaacaaggtgggccgggcgtggtggctcacgcctgcaatcccagcac

SEQ ID NO: 94809 - DNA, 120 bp, synthetic construct
  source 1..120: mol_type = other DNA
gtgagagttcactttctggggtgacataatagtgtagatcttggctgggcacggtggttcacgcctgtaatcccaacgctttgggaggccgaggcaggcggatcacctgaggtcgggagt

SEQ ID NO: 94810 - DNA, 120 bp, synthetic construct
  source 1..120: mol_type = other DNA
tgccgcgtgacacagcccagtaaaaaggaagaaaccccgagggtccagcgtctactcacacggatgcactgatggctgataaattccagcaggagcccaaagaggagccaaaagagcatc

SEQ ID NO: 94811 - DNA, 120 bp, synthetic construct
  source 1..120: mol_type = other DNA
catctccatcacatccatgtagccatctgtccatcaacctgtatctcaggaacaaatgtacgtacattcattttaagcatgcatggtacatttacaaaaattaacctgacttattttgtt

SEQ ID NO: 94812 - DNA, 120 bp, synthetic construct
  source 1..120: mol_type = other DNA
ccttccaagtaggtgggactacaggcgcccaccaccacacccagctaatttttgtattttattagagacagggtttcaccatattggccaggctggtctggaactcctgaccttgtgatc

SEQ ID NO: 94813 - DNA, 120 bp, synthetic construct; identical to SEQ ID NO: 94669
  source 1..120: mol_type = other DNA

SEQ ID NO: 94814 - DNA, 120 bp, synthetic construct; identical to SEQ ID NO: 94670
  source 1..120: mol_type = other DNA

SEQ ID NO: 94815 - DNA, 120 bp, synthetic construct; identical to SEQ ID NO: 94671
  source 1..120: mol_type = other DNA

SEQ ID NO: 94816 - DNA, 120 bp, synthetic construct
  source 1..120: mol_type = other DNA
aggaacacaaactccttttttaaattttttatggatatggggtctcactatgttgcctaggctggtctcgagctcccaggctcagcagtcctacctcagcctccccaaatgctgggatta

SEQ ID NO: 94817 - DNA, 120 bp, synthetic construct
  source 1..120: mol_type = other DNA
aagtgctttgcccgcctcgggctcccaaagtgctgggattacaggcatgagccgtggtgtgtggccctaatgtgagtgatctttaacactgagcacttgaaaaagaaaaccctgaagaaa

SEQ ID NO: 94818 - DNA, 120 bp, synthetic construct
  source 1..120: mol_type = other DNA
gggtggtgattccatctcagccgctctccacctcttgggtttgggtggtttttctgcctcagcctcctgagtagctaagggaggtgtcttgagattatcatccgctgagggtggagctga

SEQ ID NO: 94819 - DNA, 120 bp, synthetic construct
  source 1..120: mol_type = other DNA
agcagatgataatatcaagacacctgccgagcgtctgcgggggccgcttccaccctcagcagatgataatctcaagacaccttccgagcgtcagctcactccccttccaccctcagctcc

SEQ ID NO: 94820 - DNA, 120 bp, synthetic construct; identical to SEQ ID NO: 94707
  source 1..120: mol_type = other DNA

SEQ ID NO: 94821 - DNA, 120 bp, synthetic construct; identical to SEQ ID NO: 94677
  source 1..120: mol_type = other DNA

SEQ ID NO: 94822 - DNA, 120 bp, synthetic construct; identical to SEQ ID NO: 94678
  source 1..120: mol_type = other DNA

SEQ ID NO: 94823 - DNA, 120 bp, synthetic construct; identical to SEQ ID NO: 94745
  source 1..120: mol_type = other DNA

SEQ ID NO: 94824 - DNA, 120 bp, synthetic construct
  source 1..120: mol_type = other DNA
attttacacatccttcctataaagccaagtatcaggtgagatccttaggatcaggaccatgaatcaagtggtatgagggcaacacagcaaacttacccttttgaggccgtttcctttttc

SEQ ID NO: 94825 - DNA, 120 bp, synthetic construct
  source 1..120: mol_type = other DNA
ttttagtagaggcggggtttcaccatattggccaagctggtctagaactcctgacatgatccgcacacctcggcctcccaatgtgctgggattacaggcgtgagccaccgtgcccggccc

SEQ ID NO: 94826 - DNA, 120 bp, synthetic construct
  source 1..120: mol_type = other DNA
ttgtctactttgattggcacatggttcatacaacaatatttgtgtcaaggcacatcttactgttttttggcggtcttcctctttccattgattttgtcatgatggttgattttcgttgtc

SEQ ID NO: 94827 - DNA, 120 bp, synthetic construct
  source 1..120: mol_type = other DNA
aacctgggcaacaaaattgaaactctgtctcaaaaaaaaaaaaaaaaaaaaaaaaaaaataggccagatgcggtagctcacgcctgtaatcccagcactttgggaggccgaggcgggtga

SEQ ID NO: 94828 - DNA, 120 bp, synthetic construct
  source 1..120: mol_type = other DNA
ttttaccatgttggcccatctggtcttgaactcctgacctcagatgatccatctgcttcagcctcccaaagtgctgggattacaggcatgagccaccacatctggcctgaaataatatct

SEQ ID NO: 94829 - DNA, 120 bp, synthetic construct
  source 1..120: mol_type = other DNA
aaaggctcaaaagacaaattatggtacaacttagcagccaaattcttaccaagtacagacttttgacatactgatctctctccagttccaagtcggaacatgcactttgaatgatgtcat

SEQ ID NO: 94830 - DNA, 120 bp, synthetic construct
  source 1..120: mol_type = other DNA
accgtcaacctcctccaaaaggtaaccacatccctcagatatcaccgtgggattccactgttacaaaaaagaacagaagttagaagtcacatgtttttcagatggctggtagtgttttta

SEQ ID NO: 94831 - DNA, 120 bp, synthetic construct
  source 1..120: mol_type = other DNA
gtcactcatgggtaagacaagctaagtataaagtaattatcttatcttttcttttctttttgttttgagacaaagttttgctctgtcacccaggctagattgcagtggcatgatctcaac

SEQ ID NO: 94832 - DNA, 120 bp, synthetic construct
  source 1..120: mol_type = other DNA
actattcatgccattttcatgatctccaccttgataattttttttttttttttttttttttttttttttttttttgagacagagtctcgctctgtcacccaggctgaagtgcagtggtgc

SEQ ID NO: 94833 - DNA, 120 bp, synthetic construct
  source 1..120: mol_type = other DNA
ccagcactgggaggctgaggcaggcagatcacgaggtcaagagatggagactatcctggcgaacatggtgaaaccccatctctactaaaaacacaaaaattagccaggcgtggtggtcta

SEQ ID NO: 94834 - DNA, 120 bp, synthetic construct
  source 1..120: mol_type = other DNA
cagggcgccctgaggcggccaggacagaggtggaggtggcttagggcagggggagggaaggggacagggaccgggccggatctgagttggggagggggaggggagggggaggggaagggg

SEQ ID NO: 94835 - DNA, 120 bp, synthetic construct; identical to SEQ ID NO: 94757
  source 1..120: mol_type = other DNA

SEQ ID NO: 94836 - DNA, 120 bp, synthetic construct; identical to SEQ ID NO: 94758
  source 1..120: mol_type = other DNA

SEQ ID NO: 94837 - DNA, 120 bp, synthetic construct; identical to SEQ ID NO: 16426
  source 1..120: mol_type = other DNA

SEQ ID NO: 94838 - DNA, 120 bp, synthetic construct; identical to SEQ ID NO: 16427
  source 1..120: mol_type = other DNA

SEQ ID NO: 94839 - DNA, 120 bp, synthetic construct; identical to SEQ ID NO: 94761
  source 1..120: mol_type = other DNA

SEQ ID NO: 94840 - DNA, 120 bp, synthetic construct
  source 1..120: mol_type = other DNA
tggtcaggctggtctcaaagtcctggcctccggtgatccaccagcctcagcctcccaaaatgctgggattagaggcatgagtcaccatgcccagcctaaacttggcaagctaataaatca

SEQ ID NO: 94841 - DNA, 120 bp, synthetic construct
  source 1..120: mol_type = other DNA
tacaaaaaaacaaaatgttaagtctaaaaagcattagtgatttctcatttttatattactaattataaccctatttaatcacacaaggccttgtccgcggcaggtgctcaataaacactt

SEQ ID NO: 94842 - DNA, 120 bp, synthetic construct
  source 1..120: mol_type = other DNA
tcggtattgtaggacaatgtgactttttaaagaatgttatttaaaaatcttccccacctccttttctgccctccaagactgccaaatacttgttgaacatatattattaaatgcctacta

SEQ ID NO: 94843 - DNA, 120 bp, synthetic construct
  source 1..120: mol_type = other DNA
tatacaaatttaatatgatttgtaattttgatagttatgctaaatatttgctaaagttatatttgtataaacatgtcacgaatggctgggcactgtcactcatgcctgtaatcccagcac

SEQ ID NO: 94844 - DNA, 120 bp, synthetic construct
  source 1..120: mol_type = other DNA
atgttggccagggtggtctcgatctcctgaccttgtaatccgcctgcctcagcctcccaaagtgctgggattacaggcgtgagccactgcaactgactttttttctttttcttttttttt

SEQ ID NO: 94845 - DNA, 120 bp, synthetic construct
  source 1..120: mol_type = other DNA
aaggtcaagagatcgagaccatcctggctaacatagtaaaaccccatctctactaaaaatataaaaaattagccgggcgtggcggtgggcgcctgtagtcccagctactcgggaggctga

SEQ ID NO: 94846 - DNA, 120 bp, synthetic construct; identical to SEQ ID NO: 94734
  source 1..120: mol_type = other DNA

SEQ ID NO: 94847 - DNA, 120 bp, synthetic construct
  source 1..120: mol_type = other DNA
gcctggcatgctggctcatgcctgtaatcccagcactttgggaggccaaggaaggcagatcacctgacatcaggagttcgagactagcctgaccaacatggggaaaccccgtctctacta

SEQ ID NO: 94848 - DNA, 120 bp, synthetic construct
  source 1..120: mol_type = other DNA
tctactaaaaatacaaaaattagctggatgtggtggcaggtgcctgtaattccagctactcaggaagctgaggcaggagaattgcttgaacccaggaggcggaggttgcagtgagccgag

SEQ ID NO: 94849 - DNA, 120 bp, synthetic construct
  source 1..120: mol_type = other DNA
ggggtttcaccatggtctctactaaaccctgtctctactaaaaatacaaaaattacccagacgtggtggcacatgcctgtagtcccagctactcaagaggctgaggcaggagaatcactt

SEQ ID NO: 94850 - DNA, 120 bp, synthetic construct; identical to SEQ ID NO: 94704
  source 1..120: mol_type = other DNA

SEQ ID NO: 94851 - DNA, 120 bp, synthetic construct
  source 1..120: mol_type = other DNA
gtggtgctggggactcaccgcacaggacgctctgattgacgcactgccaggagtagcgctctgtcttggggctgcagccggcctcctcagctcgagtgtaacatcagtcgtggccatggc

SEQ ID NO: 94852 - DNA, 120 bp, synthetic construct
  source 1..120: mol_type = other DNA
ctgtgatcgagccactgcactccagcctgggtgacacagcaaaatccagtctcaaaaaaaaaaaaaaaaataatattttacataaccaaccacttctaaagattaaaaaaaccccctatg

SEQ ID NO: 94853 - DNA, 120 bp, synthetic construct; identical to SEQ ID NO: 94707
  source 1..120: mol_type = other DNA

SEQ ID NO: 94854 - DNA, 120 bp, synthetic construct
  source 1..120: mol_type = other DNA
gagctgacgctcggaaggtgtcttgagattatcatccgctgagggtggaaggcaggtgtcttgatgttatcatctgctgagggtggagctgagggtggaaggggagtgagctgacgctcg

SEQ ID NO: 94855 - DNA, 120 bp, synthetic construct
  source 1..120: mol_type = other DNA
ggagtgagcagacactcgggaggtgtcttgagtttatcatccgctgagggtggaaggggagtgaggagacactcaggaggtgtcttgagattatcatccgctgagggtggaaggggagtg

SEQ ID NO: 94856 - DNA, 120 bp, synthetic construct
  source 1..120: mol_type = other DNA
aatattacagccatgcctaagtgacttcttgaggtgagattgttctgtcagaaaaccctctcccagttcccctgcagctcttcaggaatccacatctctccagagctctttgttctcatg

SEQ ID NO: 94857 - DNA, 120 bp, synthetic construct
  source 1..120: mol_type = other DNA
agatggatcacgaggtcaggagattgagaccattgtggctaatatggtgaaaccccttctctactaaaaatacaaaaaattagccaggcgtggtggcaggcacctgtaatcccagctact

SEQ ID NO: 94858 - DNA, 120 bp, synthetic construct; identical to SEQ ID NO: 94711
  source 1..120: mol_type = other DNA

SEQ ID NO: 94859 - DNA, 120 bp, synthetic construct
  source 1..120: mol_type = other DNA
gtcgctttcattggcagaccctcaatccacttgttttccatctaatcccacgcatgtgtgcaaaagctgctgtgcttctttgcatctcagtagttccttctggaattcagcaatgaaacg

SEQ ID NO: 94860 - DNA, 120 bp, synthetic construct
  source 1..120: mol_type = other DNA
agagcgagactctatcgcaaaattaaaaaaaaaaaaaaaaaaaaaaaaggctggctgtggtggctcacgcctctaatcccagcactttgggaggctgaggcaggtggattacctgaggtc

SEQ ID NO: 94861 - DNA, 120 bp, synthetic construct
  source 1..120: mol_type = other DNA
ttgaactcctgaccccgtgatccacctgcctcggcctcccgaagtactgggattatacgcatgagccaccgtgcccagccgtcattcttatattattatttcctaggtgtctctcctgaa

SEQ ID NO: 94862 - DNA, 120 bp, synthetic construct
  source 1..120: mol_type = other DNA
cttcaacacggttagatggtaattatcatcttataagtattttaccacaggttaacatgtttcacaacttgaaaaggaagtaattaccttcagctctctgagttctagaatttgtaacat

SEQ ID NO: 94863 - DNA, 120 bp, synthetic construct
  source 1..120: mol_type = other DNA
tcaaatgatccacccacctcagcctcccaaagtgctgggattacaagcgtgagccaccacgtgagccaggggaagtttttaaatttaccactttttaacaattccacttaggaaagttca

SEQ ID NO: 94864 - DNA, 120 bp, synthetic construct
  source 1..120: mol_type = other DNA
tttaagcatcagccatccggcccttctagcagtctcatttttcagctggttcccatgtttatgcctgttctatgtttttcttttcctgttaagctgtctgttgtcagctcatttctgcag

SEQ ID NO: 94865 - DNA, 120 bp, synthetic construct; identical to SEQ ID NO: 94687
  source 1..120: mol_type = other DNA

SEQ ID NO: 94866 - DNA, 120 bp, synthetic construct; identical to SEQ ID NO: 94754
  source 1..120: mol_type = other DNA

SEQ ID NO: 94867 - DNA, 120 bp, synthetic construct
  source 1..120: mol_type = other DNA
caacgctttgggaggccgaggcgggcggatcacctgaggtcgggagttcaaaaccagcctgaccaacatggagaaaccctatctctactaaaaatacaaaattagctgggagtggtgcca

SEQ ID NO: 94868 - DNA, 120 bp, synthetic construct; identical to SEQ ID NO: 94756
  source 1..120: mol_type = other DNA

SEQ ID NO: 94869 - DNA, 120 bp, synthetic construct; identical to SEQ ID NO: 94757
  source 1..120: mol_type = other DNA

SEQ ID NO: 94870 - DNA, 120 bp, synthetic construct; identical to SEQ ID NO: 94758
  source 1..120: mol_type = other DNA

SEQ ID NO: 94871 - DNA, 120 bp, synthetic construct; identical to SEQ ID NO: 16426
  source 1..120: mol_type = other DNA

SEQ ID NO: 94872 - DNA, 120 bp, synthetic construct; identical to SEQ ID NO: 16427
  source 1..120: mol_type = other DNA

SEQ ID NO: 94873 - DNA, 120 bp, synthetic construct; identical to SEQ ID NO: 94761
  source 1..120: mol_type = other DNA

SEQ ID NO: 94874 - DNA, 120 bp, synthetic construct; identical to SEQ ID NO: 94840
  source 1..120: mol_type = other DNA

SEQ ID NO: 94875 - DNA, 120 bp, synthetic construct; identical to SEQ ID NO: 94841
  source 1..120: mol_type = other DNA

SEQ ID NO: 94876 - DNA, 120 bp, synthetic construct; identical to SEQ ID NO: 94842
  source 1..120: mol_type = other DNA

SEQ ID NO: 94877 - DNA, 120 bp, synthetic construct; identical to SEQ ID NO: 94843
  source 1..120: mol_type = other DNA

SEQ ID NO: 94878 - DNA, 120 bp, synthetic construct
  source 1..120: mol_type = other DNA
ctgcaactgacttttttttttttttttttttttttttgagacagagactcactctgtcacccaggctggagtgcagtggcatgattttggctcactgcaacctccacctcctgagttcaa

SEQ ID NO: 94879 - DNA, 120 bp, synthetic construct; identical to SEQ ID NO: 94845
  source 1..120: mol_type = other DNA

SEQ ID NO: 94880 - DNA, 120 bp, synthetic construct; identical to SEQ ID NO: 94734
  source 1..120: mol_type = other DNA

SEQ ID NO: 94881 - DNA, 120 bp, synthetic construct; identical to SEQ ID NO: 16346
  source 1..120: mol_type = other DNA

SEQ ID NO: 94882 - DNA, 120 bp, synthetic construct
  source 1..120: mol_type = other DNA
tgctgtgatagtttgtttgtttgtttgtttgtttatttatttatttatttaagacagagtttcgctcttgttgcccaggctggagtgcagtggcacgatctcagctcaccacaacctccg

SEQ ID NO: 94883 - DNA, 120 bp, synthetic construct; identical to SEQ ID NO: 16346
  source 1..120: mol_type = other DNA

SEQ ID NO: 94884 - DNA, 120 bp, synthetic construct; identical to SEQ ID NO: 94734
  source 1..120: mol_type = other DNA

SEQ ID NO: 94885 - DNA, 120 bp, synthetic construct
  source 1..120: mol_type = other DNA
aggctggagtgcagtggcgcaatctcagctcactgcaagctctgcctcccgggttcacgccattcttctgcctcagcctcccgagtagctgggactacaggcgcccaccgccacgcccgg

SEQ ID NO: 94886 - DNA, 120 bp, synthetic construct
  source 1..120: mol_type = other DNA
tgaggcaggataattgtttgaactcaggaggtggaggttgcagtgagccaaaatcatgccactgcactccagcctgggtgacagagtgagtctctgtctcaaaaaaaaaaaaaaaagaaa

SEQ ID NO: 94887 - DNA, 120 bp, synthetic construct; identical to SEQ ID NO: 94731
  source 1..120: mol_type = other DNA

SEQ ID NO: 94888 - DNA, 120 bp, synthetic construct
  source 1..120: mol_type = other DNA
acacttaaacctgccagcaagcttgcaaggtagttgtttttcctttaaaaactgagtctcggaatgatgaagcactctgtccaatgtcacacagctagtaagtgtggagaccttgcatcc

SEQ ID NO: 94889 - DNA, 120 bp, synthetic construct
  source 1..120: mol_type = other DNA
actgggtagttccggcctggaggtttctgctgcatctgccttctcagtgctcacctaagggcttttgtattttcctcctcgcatccccacagatggggttcaggctgccggacacagctg

SEQ ID NO: 94890 - DNA, 120 bp, synthetic construct; identical to SEQ ID NO: 16399
  source 1..120: mol_type = other DNA

SEQ ID NO: 94891 - DNA, 120 bp, synthetic construct
  source 1..120: mol_type = other DNA
ctgggggacagagtgaaactctgtctcaaaaaatatgtgtgtgtgtgtgtgtgtgtgtgtgtgtgtgtgtgtgtgtgtgtgtgtgtgtgtgtgtatctatataaatctcaaaaataaaag

SEQ ID NO: 94892 - DNA, 120 bp, synthetic construct
  source 1..120: mol_type = other DNA
atgtgcgtggaagtgaagcgtgtcacctcgaggcagaagagttgggagccattgagacgggccactctctccttcatctcttagagcagctgacagctcccatatggaggctgctccttt

SEQ ID NO: 94893 - DNA, 120 bp, synthetic construct
  source 1..120: mol_type = other DNA
ggcacagaggcagtggatccatcggaggtggcaggtgtaggatcgtctggtgagcaagtagagtcaccaaatctggctgaccactacccccactacccccactatccccacagacgatgc

SEQ ID NO: 94894 - DNA, 120 bp, synthetic construct
  source 1..120: mol_type = other DNA
gatcacgaggttaggagttcgagaccagcctgaccaacatggtgaaaccccgtctctactaaaaatacaaaaattagccaggcatggtggcacacgcctgtaatcccagctactcaggag

SEQ ID NO: 94895 - DNA, 120 bp, synthetic construct
  source 1..120: mol_type = other DNA
tgaaagtcaacttggttttctccccctcatttgggttcagaatttaaagtccacacacacaggcagtaagatgatatagataaggacgtcatcactcggtttcggatgttaaaatgtcta

SEQ ID NO: 94896 - DNA, 120 bp, synthetic construct; identical to SEQ ID NO: 94722
  source 1..120: mol_type = other DNA

SEQ ID NO: 94897 - DNA, 120 bp, synthetic construct
  source 1..120: mol_type = other DNA
gaagcggaggttgcagtgagccgagatcttgccactgcactccagcctgggcgacagagtgagactctgtctaaaaaaaaaaaaaaaaaaaaaaaaagtcatcaaaccagatgacacaaa

SEQ ID NO: 94898 - DNA, 120 bp, synthetic construct
  source 1..120: mol_type = other DNA
ggttgaactcagcatatgctgagtctgaaatggaaatgatgaagttagagaaccatacaacaatggtaatgatttcagaaacatggtgttgagcagaacaaagcagacacaaaagagtac

SEQ ID NO: 94899 - DNA, 120 bp, synthetic construct; identical to SEQ ID NO: 94719
  source 1..120: mol_type = other DNA

SEQ ID NO: 94900 - DNA, 120 bp, synthetic construct
  source 1..120: mol_type = other DNA
ggtaaccacatccctcagatatcaccgtgggattccactgttacaaaaaagaacagaagttagaagtcacatgtttttcagatggctggtagtgtttttaggcattgcaaatgtggggtg

SEQ ID NO: 94901 - DNA, 120 bp, synthetic construct
  source 1..120: mol_type = other DNA
acgcagtgcagttctgcccttcaccttccggcagtttgtcacctcgtccctatgacctcacaggaactttgtctcaggccaattgtttgttccttggcctctttcatttcccctaaaaat

SEQ ID NO: 94902 - DNA, 120 bp, synthetic construct; identical to SEQ ID NO: 94716
  source 1..120: mol_type = other DNA

SEQ ID NO: 94903 - DNA, 120 bp, synthetic construct
  source 1..120: mol_type = other DNA
ggcagaggttgcagtgagccaagatcccaccactgcactccagcctggtgacagagtgagacttcgtctcaaaaaaaaaaaaaaaaaaaaaatgacatgaatatacttcacacaactgaa

SEQ ID NO: 94904 - DNA, 120 bp, synthetic construct; identical to SEQ ID NO: 94714
  source 1..120: mol_type = other DNA

SEQ ID NO: 94905 - DNA, 120 bp, synthetic construct
  source 1..120: mol_type = other DNA
ctgtctcaaaaaaaaaaaaaaaaaaaaaaattggtcaaatgtggtggcacacacctgtaatccaagctactcgggaagctgaggcagaattgcttcaaactgggaggcagaggttgcagt

SEQ ID NO: 94906 - DNA, 120 bp, synthetic construct
  source 1..120: mol_type = other DNA
tcactactcctgctgtgcacttgggaactagaaacacaaaacctgactctggagggaagctaaggaagcattctactcttgagttgacataagtgcatctgaagcttctgatctccgatg

SEQ ID NO: 94907 - DNA, 120 bp, synthetic construct; identical to SEQ ID NO: 94799
  source 1..120: mol_type = other DNA

SEQ ID NO: 94908 - DNA, 120 bp, synthetic construct
  source 1..120: mol_type = other DNA
tgctcgccgccgcaactcttgcgcacgttgaaacattttcctatggattacaatcactttcatcagataaagcaccactttcaggatgattttaaataatctgccatgtttctgttatcc

SEQ ID NO: 94909 - DNA, 120 bp, synthetic construct
  source 1..120: mol_type = other DNA
atgtttcttgcaccaggtcaacagacagtaagagacagtaagagaggcatgaaaagcccactgtccacacatgttgcagcttctttttggagaatgttttccaggccttttatgttctgt

SEQ ID NO: 94910 - DNA, 120 bp, synthetic construct
  source 1..120: mol_type = other DNA
ccgctgagggtggaagcggcccccgcagacgctcagcaggtgtcttgatattatcatctgctgagggtggagctgagggtggaaggggagtgagctgacgctcggaaggtgtcttgagat

SEQ ID NO: 94911 - DNA, 120 bp, synthetic construct; identical to SEQ ID NO: 94819
  source 1..120: mol_type = other DNA

SEQ ID NO: 94912 - DNA, 120 bp, synthetic construct
  source 1..120: mol_type = other DNA
tattgctcaggcttgagtgcaatggcctgttctcagcttactcaacctccgcctcttgggctcgggtgatgatggttccacctcagcggccctccgcctcttgggttcgggtggtgattc

SEQ ID NO: 94913 - DNA, 120 bp, synthetic construct
  source 1..120: mol_type = other DNA
cacccaccccgagtatctcctgggcatcctggcatagccagatgacttccgtgcccctgttgcaataaccactgcttccaagtctctatagaccaccccttgggtatatctaatgtaagt

SEQ ID NO: 94914 - DNA, 120 bp, synthetic construct
  source 1..120: mol_type = other DNA
gtaatcccagcactttgggaggctgaggtgggaggatcacttgaggccagggggtcgagaccagcctgggcaacataagagagactcttgtctctcctgtctctataacaaatttaaaaa

SEQ ID NO: 94915 - DNA, 120 bp, synthetic construct
  source 1..120: mol_type = other DNA
gttgtttgttcttttttctttttttttttttttttgagacagggtcttgctctgtcatcccggctggagtgcagtggtgcgatctcagctcactgcaaactctgcctccaagatgcaaat

SEQ ID NO: 94916 - DNA, 120 bp, synthetic construct
  source 1..120: mol_type = other DNA
tcccaaagtactgggattataggcatgagccaccacacctggacacgttacttaatatttctgtgccttggtttcttcatctgtgaaatgggattgttgtgagaatgcaaagggattccc

SEQ ID NO: 94917 - DNA, 120 bp, synthetic construct
  source 1..120: mol_type = other DNA
gggtttccccatgttggtcaggctagtcttgaactcctgacatcaagtgatctgcccacctcggcttcccaaagtactgggattacaggcatgagccaccacgccaggctggtagcagtc

SEQ ID NO: 94918 - DNA, 120 bp, synthetic construct
  source 1..120: mol_type = other DNA
aaatgacttctgaagagactgaatcatctttatgtcctctatggtagttggcacttggtagatattaaataaacaacaggctgggcaagacggctcatgcctgtaatcccagtactttgg

SEQ ID NO: 94919 - DNA, 120 bp, synthetic construct
  source 1..120: mol_type = other DNA
gccagctactcaagaggctgatgcaggagaatcacttgaacccgggaggcggagtttgcagtgagttgagattgcaccactgcattccaacctgggcaacagtgcgagaccctgtctcaa

SEQ ID NO: 94920 - DNA, 120 bp, synthetic construct
  source 1..120: mol_type = other DNA
cgaaggctgtgattgacacagaggtttttttgttgttgttgctgttgtttgttcctttttcttttttttttttgagacagggtcttgctctgtcatcccggctggagtgcagtggtgcga

SEQ ID NO: 94921 - DNA, 120 bp, synthetic construct
  source 1..120: mol_type = other DNA
acaacctctcgtaaaattggattccctcccttcagggcaggtttataatgaaatcctcctcagaggccaggtgcggtgacacgcatctgtaatcccagcactttgggaggctgaggtggg

SEQ ID NO: 94922 - DNA, 120 bp, synthetic construct
  source 1..120: mol_type = other DNA
cttaaaaaaaaaaaaaaaaaaacttagataagaggatgctgtgcctccctgggggtcttcagtcacccatggtcctggcaagagaggagggccaggagagagcttcacccacctgctgtc

SEQ ID NO: 94923 - DNA, 120 bp, synthetic construct
  source 1..120: mol_type = other DNA
atattattatttttttttttttgagactgggttttgctctgtcacccaggctggagtgcagtggctcgatcacagctcactgcagcctcaacctcctgggcttcaagcaatcctcctgcc

SEQ ID NO: 94924 - DNA, 120 bp, synthetic construct
  source 1..120: mol_type = other DNA
acctgtagggccaaaggagggaatgttttcacacatattcatttgatggacaaaattaccaccaccaacacagtctgcaccttctgttgctggtgatagatttttgcacctttccatcct

SEQ ID NO: 94925 - DNA, 120 bp, synthetic construct
  source 1..120: mol_type = other DNA
agttttaaaactgtgtttcacttcaagtgtacaagtcccatcacgtgtaatcataggacttggcagcttttgaaggtacagaggccacacaagaaccagcttagctgagcatcatttaag

SEQ ID NO: 94926 - DNA, 120 bp, synthetic construct
  source 1..120: mol_type = other DNA
agcaagaggaggaatcaatatagcaacagtttggatcagaccgtacagtttttttgtttttgtttttgtttttctgagatggagtctcactgtgtcacccaggctggagtgcaatgacgt

SEQ ID NO: 94927 - DNA, 120 bp, synthetic construct
  source 1..120: mol_type = other DNA
cactatgtgtgtctctggggtcaatcttgtgcttgacacagcgaaagatcattttagttcagtgtgaaaaaccagacctcaccaactcatcacaactaactccataggaagcagaggatt

SEQ ID NO: 94928 - DNA, 120 bp, synthetic construct; identical to SEQ ID NO: 94712
  source 1..120: mol_type = other DNA

SEQ ID NO: 94929 - DNA, 120 bp, synthetic construct
  source 1..120: mol_type = other DNA
atgatcttggctcactgcaacctccgcctcccaggttcaagtgattcttatccctcagcctcttgagtagctgggactacaggcatatgccaccatgcccggataatttttgtattctta

SEQ ID NO: 94930 - DNA, 120 bp, synthetic construct; identical to SEQ ID NO: 94782
  source 1..120: mol_type = other DNA

SEQ ID NO: 94931 - DNA, 120 bp, synthetic construct
  source 1..120: mol_type = other DNA
gaaactctgtctcaaaaaaaaaaaaaaaaaaaaaaaaatagcccaggtgcggtagctcacgcctgtaatcccagcactttgggaggctgaggcgggtgaatcacaaggtcaagagatgga

SEQ ID NO: 94932 - DNA, 120 bp, synthetic construct
  source 1..120: mol_type = other DNA
ttgaactcctgacctcaagtcatccacctgcctcagcctcccaaagtgctgggattacaggcatgagccaccacacctggcctgaaataatctttcaaattctttgtagaatttgttttt

SEQ ID NO: 94933 - DNA, 120 bp, synthetic construct
  source 1..120: mol_type = other DNA
aagcattgtggtattagtacttttatcttggatcattgttcaggaggttcagcccccagaaaaccacatttttactgtcatgaatggcaagacaaaatgtagagctcaacttacccaaag

SEQ ID NO: 94934 - DNA, 120 bp, synthetic construct
  source 1..120: mol_type = other DNA
tctccacaaaaattggataatttgataattatcattattgggtttctgagacgtgacacatttaccattctcttctgcacaagttacctttgtgtgagtatactaactttctgtagaggt

SEQ ID NO: 94935 - DNA, 120 bp, synthetic construct
  source 1..120: mol_type = other DNA
ggcctctcaggttcaagtgattctcctgcctcagcctcctgagtagctgggagtacaggtgcctgacaatgcactcagcaaatttttgtattttttgtggagatggggttttgccatgtt

SEQ ID NO: 94936 - DNA, 120 bp, synthetic construct
  source 1..120: mol_type = other DNA
gcctcctgggttcaagtgattcttctgcctcagcctcccaagtagctggaactataggcacgtgccaccatgccctgctaattttttgtaattttagtagagatgggtttcaccgtgtta

SEQ ID NO: 94937 - DNA, 120 bp, synthetic construct
  source 1..120: mol_type = other DNA
aagggtatatattttggccaggcgcggtggctcacgcctgtaatcccagcactgggaggccgaggcaggcagatcacgaggtcaagagatggagactatcctggcgaacatggtgaaacc

SEQ ID NO: 94938 - DNA, 120 bp, synthetic construct; identical to SEQ ID NO: 16374
  source 1..120: mol_type = other DNA

SEQ ID NO: 94939 - DNA, 120 bp, synthetic construct
  source 1..120: mol_type = other DNA
gcttggaaattcaaagtgcccttataagacataaacataagaaagaatccaaaatgaaacaagattgcctttcaactcaatgataagatcataacatggcaataaaatgtctccctctgg

SEQ ID NO: 94940 - DNA, 120 bp, synthetic construct
  source 1..120: mol_type = other DNA
gcagagtctgcagtgagccgagattgcaccactgcactccagactaggcgacagagagagactcttgtctcaaaaacagcaacaactacaaacaaacaaaaaacagggttaacaaaacta

SEQ ID NO: 94941 - DNA, 120 bp, synthetic construct; identical to SEQ ID NO: 94693
  source 1..120: mol_type = other DNA

SEQ ID NO: 94942 - DNA, 120 bp, synthetic construct
  source 1..120: mol_type = other DNA
aactatcatctggggtaactgaggcagtcagagatttactgactcaatgtcactcagttgattctgagttcactgctgattacatctgaccaaactgctttttctgaagtctactctgtt

SEQ ID NO: 94943 - DNA, 120 bp, synthetic construct; identical to SEQ ID NO: 758
  source 1..120: mol_type = other DNA

SEQ ID NO: 94944 - DNA, 120 bp, synthetic construct
  source 1..120: mol_type = other DNA
aggagaattgcttagattcaggaggtggaggttttagtgggccgagatcatgccattgcactccagactgtgcgacagagcgagactctgtcaaaaaaaaaaaaaaattatcctgcaaaa

SEQ ID NO: 94945 - DNA, 120 bp, synthetic construct; identical to SEQ ID NO: 94697
  source 1..120: mol_type = other DNA

SEQ ID NO: 94946 - DNA, 120 bp, synthetic construct; identical to SEQ ID NO: 16375
  source 1..120: mol_type = other DNA

SEQ ID NO: 94947 - DNA, 120 bp, synthetic construct; identical to SEQ ID NO: 16376
  source 1..120: mol_type = other DNA

SEQ ID NO: 94948 - DNA, 120 bp, synthetic construct; identical to SEQ ID NO: 16377
  source 1..120: mol_type = other DNA

SEQ ID NO: 94949 - DNA, 120 bp, synthetic construct
  source 1..120: mol_type = other DNA
gaattacatcaagctaaaaagcttctgcacagaaaaaaaatttgtttaattaaaattaaaaataaacaaagtagaccaggcacggtagctcatgcctgtaatcccagcactttgggaggc

SEQ ID NO: 94950 - DNA, 120 bp, synthetic construct
  source 1..120: mol_type = other DNA
ttattgcgtgagcacggtgggagcagcgggaagccggagggccaagtattgcacttagaataacaatcctcatcagacggcgggctacctagagggcagggggcgggcagggctccacag

SEQ ID NO: 94951 - DNA, 120 bp, synthetic construct
  source 1..120: mol_type = other DNA
agaccatgcttttgtgtgtaagttccttaataaatcacccaaaactgacaaactggatttgtctgcttcctttttttttttggctcctttggcatgagggtcacttggcatatacggccc

SEQ ID NO: 94952 - DNA, 120 bp, synthetic construct
  source 1..120: mol_type = other DNA
gttcaaaggtcaccattggtagattggaaactgaaaaaggtatataccctggcattggacaacacaatggctgtgcctcctgcctaagaatgctgaactggccaagtgaggtacttggca

SEQ ID NO: 94953 - DNA, 120 bp, synthetic construct
  source 1..120: mol_type = other DNA
ttctgaacacaaagaatattccagctatttcttgaaaacagtcatatttgtttatcctccagtcaggagaatgtgtcattcttgactccttcaactcccgaatccactggtcacagtagc

SEQ ID NO: 94954 - DNA, 120 bp, synthetic construct
  source 1..120: mol_type = other DNA
ctcaatggtgcccaggctggagtgcagtggcatgatctcggctcgctacaacctccacctctcaaccgcctgccttggcctcccaaagtgccgagattgcagcctctgcccggccgccac

SEQ ID NO: 94955 - DNA, 120 bp, synthetic construct
  source 1..120: mol_type = other DNA
accccaaccctgtgctctctgaaacatgtgctgtgtccactcagggttaaacggattaagggtggtgcaagatgtgctttgttaaacagatgcttgaaggcagcatgctcgttaagagtc

SEQ ID NO: 94956 - DNA, 120 bp, synthetic construct
  source 1..120: mol_type = other DNA
cctcccaaagtgctgggattataggcgtgagccactgcgctcatcctgatcatctcgtctctctttttttttttagagacagggtctcactctgtcacccacactggagtgcagtggcac

SEQ ID NO: 94957 - DNA, 120 bp, synthetic construct
  source 1..120: mol_type = other DNA
ctttttttctttttctttttttgagactcttgctctgtcgtccaggttggaatgcagtggcaaaatcttggctcactgcaatcttcacctctcaggttcaagtgactctccttcctcagc

SEQ ID NO: 94958 - DNA, 120 bp, synthetic construct
  source 1..120: mol_type = other DNA
acagatgcctgccaccacacacagctaatttttgcatttttagtagagatggggtttcaccatattggccaggctggtcttgaactcctgacctcaagtgatctgcccgcctcggcctcc

SEQ ID NO: 94959 - DNA, 120 bp, synthetic construct
  source 1..120: mol_type = other DNA
aacctgggtgacagagcaaaactccttctgaaaaaaaaaaaaaaaagaaatattaagtaacttgtctgaggccacttagttaccaagacgtgggagctgggacttgaacccaggcagtct

SEQ ID NO: 94960 - DNA, 120 bp, synthetic construct
  source 1..120: mol_type = other DNA
ctccacctcctgggttcaagcaattctcctacctcagcctcccgagtaactgggattacaggtgcgtgccaccatgcctggctaattttgtatttttagtagagacagggtttcgccgtg

SEQ ID NO: 94961 - DNA, 120 bp, synthetic construct
  source 1..120: mol_type = other DNA
tatctaagattttttttttttttttttttttttttttttttttaagagacagggtctttctctgtcgcccaggctggactgcagaggcacaatcatagctcacggcagccttgaactcct

SEQ ID NO: 94962 - DNA, 120 bp, synthetic construct; identical to SEQ ID NO: 94789
  source 1..120: mol_type = other DNA

SEQ ID NO: 94963 - DNA, 120 bp, synthetic construct
  source 1..120: mol_type = other DNA
gaatgacaatgctccgctgccgccattctgacctgtagggccaaaggagggaatgttttcacacatattcatttgatggacaaaattaccaccaccaacacagtctgcaccttctgttgc

SEQ ID NO: 94964 - DNA, 120 bp, synthetic construct
  source 1..120: mol_type = other DNA
cccagtggggcccctgatctaaattcaaagtgtcagaggttccatatttgtaatagcaaatgggccctgactgtaaattagtgaagagtgaatgtaacttattacccacagggacaattc

SEQ ID NO: 94965 - DNA, 120 bp, synthetic construct
  source 1..120: mol_type = other DNA
tcttgcttactgcctgttgacttctgagatgatagtttccttccccattctcagtatatccctaattcatccttcattgagcatcttttatcataaagctgtattctctttgcattaata

SEQ ID NO: 94966 - DNA, 120 bp, synthetic construct
  source 1..120: mol_type = other DNA
gatggtctcagttctggcatcagcctctgactgagaagcaggtctcacacaggaagagtcagatgaggagcaatcctctgcttccgatggagttagttgtgatgagttggtgaggtctgg

SEQ ID NO: 94967 - DNA, 120 bp, synthetic construct
  source 1..120: mol_type = other DNA
cagagccagtggacttcagtacgggtcgctttcattggcagaccctcaatccacttgttttccatctaatcccacgcatgtgtgcaaaagctgctgtgcttctttgcatctcagtagttc

SEQ ID NO: 94968 - DNA, 120 bp, synthetic construct
  source 1..120: mol_type = other DNA
ctcaggtaatccacctgcctcagcctcccaaagtgctgggattagaggtgtgagccaccacacccagccttttttttttttttttttttaaattttgagatagaatctcgctctgtcgcc

SEQ ID NO: 94969 - DNA, 120 bp, synthetic construct
  source 1..120: mol_type = other DNA
ttgtgtgtgtgtgtgtgtgtgtgtgtgtgtgtgtgtgtgtgtgagagacagagtctcattctgtcgctcaggctggagtacagtggtgtgatctcggctcactgcaacctccgcctccca

SEQ ID NO: 94970 - DNA, 120 bp, synthetic construct
  source 1..120: mol_type = other DNA
gcattttcgctatgatgagaacaaatatttaatatcttagaagattaaaagcatactgtgataatatggaaatcttggtgggaattcagtcattagtgagaatgttttgcgttaagttca

SEQ ID NO: 94971 - DNA, 120 bp, synthetic construct
  source 1..120: mol_type = other DNA
aaaatacaaaaatttgctgggcatggtggtgggcacctgtaatcccagctacttgagaggctgaggcaggggaatcgcttgaagccaggaggtggaggttgcagtgagccgaggtcacac

SEQ ID NO: 94972 - DNA, 120 bp, synthetic construct
  source 1..120: mol_type = other DNA
caacagacagcttaacaggaaaagaaacacatagaacaggcataaacatgggaaccagctgaaaaatgagactgctagaagggccggatggttgatgcttaaagagcaccctcttctgag

SEQ ID NO: 94973 - DNA, 120 bp, synthetic construct
  source 1..120: mol_type = other DNA
aactctgtctccaaaaaaaaaaaaaaaaagagtttttttttagatcatcagctattgttagtgttagtgtatgttatgtgtggctcaagacaactttgtttcttttaatataggcaggga

SEQ ID NO: 94974 - DNA, 120 bp, synthetic construct
  source 1..120: mol_type = other DNA
acaggtgcctgccaccgcactcggctaatttttgtattttgagtagaaacagggtttcaccatcttggccaggctggtctccaactcgtgacctcttgatccacctgcctcggcctccca

SEQ ID NO: 94975 - DNA, 120 bp, synthetic construct
  source 1..120: mol_type = other DNA
tggtgttgagcagaacaaagcagacacaaaagagtacctatggcatggcacgcatctgtatacgcgaaattccagaataagcaagctaacctatgataagaaagagactggctgggaaga

SEQ ID NO: 94976 - DNA, 120 bp, synthetic construct
  source 1..120: mol_type = other DNA
ccctgtgagtagacgctggacccgcggggtttcttcctttttactgggctgtgtcacgcggcatgaaattacacagctcaggccttgtaatcccagcactttagggggccgaggtgggca

SEQ ID NO: 94977 - DNA, 120 bp, synthetic construct; identical to SEQ ID NO: 94594
  source 1..120: mol_type = other DNA

SEQ ID NO: 94978 - DNA, 120 bp, synthetic construct
  source 1..120: mol_type = other DNA
gaggagcccaggagttcaaggttacggtgagctatgatcacgccacttcactccatcctgggtgacaaaaaccctgtctctaaacaaaataaaaaataaaagtaaaaataaagttagcag

SEQ ID NO: 94979 - DNA, 120 bp, synthetic construct
  source 1..120: mol_type = other DNA
aacaaatattattaaaagcctactacgtgccagccatgattcatggtcttggggacacagcagagaacaaactgacaggattcctctcttatgcaactcacattcttatacgataatgat

SEQ ID NO: 94980 - DNA, 120 bp, synthetic construct
  source 1..120: mol_type = other DNA
tcttacccagatcacacagctgataagtggtggaggcagaatagaatctaaacagtgtagaatctaaacagaatagaatctaaacatgcattgatttgacaagtgtttattgagcacctg

SEQ ID NO: 94981 - DNA, 120 bp, synthetic construct; identical to SEQ ID NO: 94696
  source 1..120: mol_type = other DNA

SEQ ID NO: 94982 - DNA, 120 bp, synthetic construct; identical to SEQ ID NO: 758
  source 1..120: mol_type = other DNA

SEQ ID NO: 94983 - DNA, 120 bp, synthetic construct
  source 1..120: mol_type = other DNA
tcttgaacctgtgcaatctgaaaggaacaggagacttgcaggaaaaatagtgcctggatttaacttaaaggaactaaaatgttggaatttttactcttgatatccttccagatcaactct

SEQ ID NO: 94984 - DNA, 120 bp, synthetic construct
  source 1..120: mol_type = other DNA
cctgggctgcacgagtaacctccaatgtttgaggccccaaactctgctcacatcttcctttccctgtctctgcttgggctatgatcacggtgactctagcaacccttcatggacattata

SEQ ID NO: 94985 - DNA, 120 bp, synthetic construct; identical to SEQ ID NO: 94692
  source 1..120: mol_type = other DNA

SEQ ID NO: 94986 - DNA, 120 bp, synthetic construct
  source 1..120: mol_type = other DNA
aaccatctccatcacatccatgtagccatccgtccatcaacccgtatctcaggaacaaatgtagatacattcattttaagcaagcatggtacatttacaaaaattaacctgacttatttt

SEQ ID NO: 94987 - DNA, 120 bp, synthetic construct; identical to SEQ ID NO: 94976
  source 1..120: mol_type = other DNA

SEQ ID NO: 94988 - DNA, 120 bp, synthetic construct
  source 1..120: mol_type = other DNA
gttgcccaggctggagtgcaatggggcaatatcagctcaccgcaacctctgcttcccaggttcgagcgattctcctgcctcagcctcccgggtggctgggattacagacatgtgccacca

SEQ ID NO: 94989 - DNA, 120 bp, synthetic construct
  source 1..120: mol_type = other DNA
atgaagtaatctcttcattgtatttttttttttttacttatgctgagcttcaaatgacaaagattcatataatccaagagagaagtattatttagagggattcttttaccatgtgatata

SEQ ID NO: 94990 - DNA, 120 bp, synthetic construct
  source 1..120: mol_type = other DNA
tattaaaaatacaaaaatgagtcaggcatggtggcagagacctgtaatctcagctactcgggaggctgagggaggagaatggcttgagcccaggagctggaggttgcagtgagccgagat

SEQ ID NO: 94991 - DNA, 120 bp, synthetic construct; identical to SEQ ID NO: 94972
  source 1..120: mol_type = other DNA

SEQ ID NO: 94992 - DNA, 120 bp, synthetic construct
  source 1..120: mol_type = other DNA
tttttaaacttaccactttttaacagttccatttaggaaagttcagttgagctgctggacttggacaacttcgcacctctcatctttgtccttgtcatctagtcatctataccattacct

SEQ ID NO: 94993 - DNA, 120 bp, synthetic construct
  source 1..120: mol_type = other DNA
gaagatgctccagtgcagatcaggaaggagcagggggtgaaatgttacaaattctagaactcagagagctgaaggtaattacttccttttcaagttgtgaaacatgttaacctgtggtaa

SEQ ID NO: 94994 - DNA, 120 bp, synthetic construct; identical to SEQ ID NO: 94969
  source 1..120: mol_type = other DNA

SEQ ID NO: 94995 - DNA, 120 bp, synthetic construct
  source 1..120: mol_type = other DNA
aaaaaaaaaaaaaaagagagaaaggaaaaccaatgccagtactagcaactcctcttcccccgaaaaaattacaaacaagaatgtaggaagggaaaggaattatacagcttaaactaatga

SEQ ID NO: 94996 - DNA, 120 bp, synthetic construct
  source 1..120: mol_type = other DNA
tgaggtcatcggtgcaggctcagtccctacaaaggccagggtatttcctgtccacctctattctgatgcatgactcttctgggtctcaaccagagccagtggacttcagtacgggtcgct

SEQ ID NO: 94997 - DNA, 120 bp, synthetic construct
  source 1..120: mol_type = other DNA
aaggatctctctatggctgatggtctcagttctggcatcagcctctgactgagaagcaggtctcacacaggaagagtcagatgaggagcaatcctctgcttccgatggagttagttgtga

SEQ ID NO: 94998 - DNA, 120 bp, synthetic construct
  source 1..120: mol_type = other DNA
gttgttgtcatccttaggaaagtgtgttgttgtaggatcaaccacatccttcaaaaggactatgcctgtttataagcccagctgtttctgccctgtgaaacacggtgaggatattaatac

SEQ ID NO: 94999 - DNA, 120 bp, synthetic construct; identical to SEQ ID NO: 94964
  source 1..120: mol_type = other DNA

SEQ ID NO: 95000 - DNA, 120 bp, synthetic construct; identical to SEQ ID NO: 94963
  source 1..120: mol_type = other DNA

SEQ ID NO: 95001 - DNA, 120 bp, synthetic construct; identical to SEQ ID NO: 94789
  source 1..120: mol_type = other DNA

SEQ ID NO: 95002 - DNA, 120 bp, synthetic construct
  source 1..120: mol_type = other DNA
aaaaaccagccgggcatgctggcgtgtgcctgtagtctcagctacttgggacactgaagtaggaggatcgcttgagcccaggagttcaaggctgccgtgagctatgattgtgcctctgca

SEQ ID NO: 95003 - DNA, 120 bp, synthetic construct; identical to SEQ ID NO: 94960
  source 1..120: mol_type = other DNA

SEQ ID NO: 95004 - DNA, 120 bp, synthetic construct; identical to SEQ ID NO: 94959
  source 1..120: mol_type = other DNA

SEQ ID NO: 95005 - DNA, 120 bp, synthetic construct
  source 1..120: mol_type = other DNA
caaagtgctgggattacaggagttagccaccgctcctggccaattttttaaggcaacgttttcagcccatggccagggtaaggggcagctggtaccaagatctggcttcactggccatgt

SEQ ID NO: 95006 - DNA, 120 bp, synthetic construct
  source 1..120: mol_type = other DNA
catgcacgactcttttttcccttcttggctaccttgaggaccttgattataatagttatcctttttttctttttctttttttgagactcttgctctgtcgtccaggttggaatgcagtgg

SEQ ID NO: 95007 - DNA, 120 bp, synthetic construct
  source 1..120: mol_type = other DNA
gtggacggcggctgggcaggttattgcgtgagcacggtgggagcagcgggaagccggagggccaagtattgcacttagaataacaatcctcatcagacggcgggctacctagagggcagg

SEQ ID NO: 95008 - DNA, 120 bp, synthetic construct
  source 1..120: mol_type = other DNA
gcttctgcacagaaaaaaaatttgtttaattaaaattaaaaataaacaaagtagaccaggcacggtagctcatgcctgtaatcccagcactttgggaggccaaggcgggcagatcacttg

SEQ ID NO: 95009 - DNA, 120 bp, synthetic construct; identical to SEQ ID NO: 16377
  source 1..120: mol_type = other DNA

SEQ ID NO: 95010 - DNA, 120 bp, synthetic construct; identical to SEQ ID NO: 16376
  source 1..120: mol_type = other DNA

SEQ ID NO: 95011 - DNA, 120 bp, synthetic construct; identical to SEQ ID NO: 16375
  source 1..120: mol_type = other DNA

SEQ ID NO: 95012 - DNA, 120 bp, synthetic construct
  source 1..120: mol_type = other DNA
aatctaaacagaatagaatctaaacatgcattgatttgacaagtgtttattgagcacctgccatgaacaaggccttgtgtgattaaatagggttataattagtaatataaaaatgagaaa

SEQ ID NO: 95013 - DNA, 120 bp, synthetic construct; identical to SEQ ID NO: 94696
  source 1..120: mol_type = other DNA

SEQ ID NO: 95014 - DNA, 120 bp, synthetic construct; identical to SEQ ID NO: 758
  source 1..120: mol_type = other DNA

SEQ ID NO: 95015 - DNA, 120 bp, synthetic construct
  source 1..120: mol_type = other DNA
gggagcaatagtttacaacctccagccctaatctgagcactcttgaacctgtgcaatctgaaaggaacaggagacttgcaggaaaaatagtgcctggatttaacttaaaggaactaaaat

SEQ ID NO: 95016 - DNA, 120 bp, synthetic construct
  source 1..120: mol_type = other DNA
agcctgggtaacagaatggaatgagactctgtctcaaaaagaaaaaaaaaaaaaaaagccctagatttcggttgtgttggttgtaaaaggagagaccaagtaagtgggggttgaagtcag

SEQ ID NO: 95017 - DNA, 120 bp, synthetic construct
  source 1..120: mol_type = other DNA
tcatagtaaatggtaaagggatttaaagcagtggttttcagctcccagaggcctgagtgagtttgggcacactctgtgtgatcaggcagaaggcctgtgggaagtttagctgaggacagg

SEQ ID NO: 95018 - DNA, 120 bp, synthetic construct
  source 1..120: mol_type = other DNA
agcggaggctgtaaaacctggcactctgcttgggtatgaggttcttcctgccatcctgccatcatttgttttttatgttttgtcaccaaaagtgaccttgaggaaccctgggagctcagg

SEQ ID NO: 95019 - DNA, 120 bp, synthetic construct
  source 1..120: mol_type = other DNA
caaaaaattccaaaaaagattagtcgggcctggtggtgcgtacctgttatcccagttactggagaggctgaggtgggaggatcgcttgggccgaggagctggacgttgcagtgagccgag

SEQ ID NO: 95020 - DNA, 120 bp, synthetic construct; identical to SEQ ID NO: 94975
  source 1..120: mol_type = other DNA

SEQ ID NO: 95021 - DNA, 120 bp, synthetic construct; identical to SEQ ID NO: 94974
  source 1..120: mol_type = other DNA

SEQ ID NO: 95022 - DNA, 120 bp, synthetic construct
  source 1..120: mol_type = other DNA
acacataacatacactaacactaacaatagctgatgatctaaaaaaaaactcttttttttttttttttggagacagagttccgctccactcagtcgcccaggctggagtgcagtggtgca

SEQ ID NO: 95023 - DNA, 120 bp, synthetic construct; identical to SEQ ID NO: 94972
  source 1..120: mol_type = other DNA

SEQ ID NO: 95024 - DNA, 120 bp, synthetic construct; identical to SEQ ID NO: 94992
  source 1..120: mol_type = other DNA

SEQ ID NO: 95025 - DNA, 120 bp, synthetic construct; identical to SEQ ID NO: 94993
  source 1..120: mol_type = other DNA

SEQ ID NO: 95026 - DNA, 120 bp, synthetic construct
  source 1..120: mol_type = other DNA
gcctcagcctcccgagtagcttggattacaggcgcccgctgccatgcctggttaatttttgtatttttagtagagacagggtttcaccatcttggccaggctggtcttgaactcctgacc

SEQ ID NO: 95027 - DNA, 120 bp, synthetic construct
  source 1..120: mol_type = other DNA
caggagaattgcttgaagtcaaaaggcagtgagctgagattgtgccattgcactacagcctgggcaacaacagcaaagctccatctcaggaaaaaaaaaaaaaaagagagaaaggaaaac

SEQ ID NO: 95028 - DNA, 120 bp, synthetic construct
  source 1..120: mol_type = other DNA
ggtagacaggaaataccctggcctttgtagggactgagcctgcaccgacgacctcaattgcagcctgtatggaggacccgtgaccatcccccagaagtagactcccatctcttctgcagc

SEQ ID NO: 95029 - DNA, 120 bp, synthetic construct
  source 1..120: mol_type = other DNA
ctcatcacaactaactccatcggaagcagaggattgctcctcatctgactcttcctgtgtgagacctgcttctcagtcagaggctgatgccggaactgagaccatcagccatagagagat

SEQ ID NO: 95030 - DNA, 120 bp, synthetic construct; identical to SEQ ID NO: 94965
  source 1..120: mol_type = other DNA

SEQ ID NO: 95031 - DNA, 120 bp, synthetic construct; identical to SEQ ID NO: 94964
  source 1..120: mol_type = other DNA

SEQ ID NO: 95032 - DNA, 120 bp, synthetic construct; identical to SEQ ID NO: 94963
  source 1..120: mol_type = other DNA

SEQ ID NO: 95033 - DNA, 120 bp, synthetic construct; identical to SEQ ID NO: 94789
  source 1..120: mol_type = other DNA

SEQ ID NO: 95034 - DNA, 120 bp, synthetic construct; identical to SEQ ID NO: 95002
  source 1..120: mol_type = other DNA

SEQ ID NO: 95035 - DNA, 120 bp, synthetic construct
  source 1..120: mol_type = other DNA
gggattacaggtgcgtgccaccatgcctggctaattttgtatttttagtagagacagggtttcgccatgttggtcagactgctctcgaactcctgacctcgtgatccacctgcctcggcc

SEQ ID NO: 95036 - DNA, 120 bp, synthetic construct
  source 1..120: mol_type = other DNA
acaaccttccacagaacaggcgcttctcacacagtaagtagcaggagtgcagaggctgcaggcatgaatccagccagactgcctgggttcaagtcccagctcccacttcttggtaactaa

SEQ ID NO: 95037 - DNA, 120 bp, synthetic construct; identical to SEQ ID NO: 94958
  source 1..120: mol_type = other DNA

SEQ ID NO: 95038 - DNA, 120 bp, synthetic construct; identical to SEQ ID NO: 94957
  source 1..120: mol_type = other DNA

SEQ ID NO: 95039 - DNA, 120 bp, synthetic construct; identical to SEQ ID NO: 94956
  source 1..120: mol_type = other DNA

SEQ ID NO: 95040 - DNA, 120 bp, synthetic construct
  source 1..120: mol_type = other DNA
gattacgtatttatttatatacttttgagacagggtcttgctctgttgcccagctgcagtgcagtggcacaatcacagttcacaacagtgtggacaaagaccctgtctctaaagaaaaaa

SEQ ID NO: 95041 - DNA, 120 bp, synthetic construct
  source 1..120: mol_type = other DNA
agtgaggagcgtctctgcccggccgccatcccatctaggaagtgaggagcgcctctttccggccgccatcccatctaggaagtgaggagcgtctctgcccggccgcccatcgtctgagat

SEQ ID NO: 95042 - DNA, 120 bp, synthetic construct
  source 1..120: mol_type = other DNA
gaaatcgcgccactggactctagcctgggcaacacagtgagactccgtctcaaaaaacaaaaacaaaaacaaaattagccgggcgtggtggcacatgcctgtaatcccagctactcggga

SEQ ID NO: 95043 - DNA, 120 bp, synthetic construct; identical to SEQ ID NO: 27196
  source 1..120: mol_type = other DNA

SEQ ID NO: 95044 - DNA, 120 bp, synthetic construct
  source 1..120: mol_type = other DNA
ctcctagccatgcttcctatacagcctacagcactgtaagtcaattaaacctcttttcttcataaattacccaatctcaggtagttcttttttttttttttcattttatttatttattta

SEQ ID NO: 95045 - DNA, 120 bp, synthetic construct
  source 1..120: mol_type = other DNA
gttgccaggcagagggtctcctcacttctcagacggggcggccaggcagagacgctcctcacctcccagacggggtctcggccgggcagaggcgctcctcacatcccagatggggcggcg

SEQ ID NO: 95046 - DNA, 120 bp, synthetic construct
  source 1..120: mol_type = other DNA
aaaccactttcagtaacaggtgaggttctaccttaaaatttaatgcatggggtgggagaggcgaggaagtcaccatcaaaccactttatctacagttagcataagatgtgagaagtgttg

SEQ ID NO: 95047 - DNA, 120 bp, synthetic construct
  source 1..120: mol_type = other DNA
ccaaagcgctgggattacaggcgtgagccaccgtgcctggccttttttttttttttttgagacagtctcgctctatcacctaggctggactgcagtggcgtgatctctgctcactgcaac

SEQ ID NO: 95048 - DNA, 120 bp, synthetic construct
  source 1..120: mol_type = other DNA
acttgtgggggcacgacctcatcttctaaaggcatcttttcttccaaatggtccagcaaattctttagaaaaggaaaatacagggaaagggataaacctcactgacttggaggaaatcaa

SEQ ID NO: 95049 - DNA, 120 bp, synthetic construct
  source 1..120: mol_type = other DNA
ttagtccaagcaggagctccgggagaatccttcacagggagatttacccctgccttcccctgccctccggcccaggcctcgcttcgctccccgcctgcccatgatcccagtccttccgcg

SEQ ID NO: 95050 - DNA, 120 bp, synthetic construct; identical to SEQ ID NO: 32199
  source 1..120: mol_type = other DNA

SEQ ID NO: 95051 - DNA, 120 bp, synthetic construct
  source 1..120: mol_type = other DNA
ttctcccatcttagcctcctgagtagctgggaccacagcgtgtgctgcagtgcccggctcatttttatatttttggtagaggtggggtttcgccatgttgctgaggctggtcttgaactg

SEQ ID NO: 95052 - DNA, 120 bp, synthetic construct; identical to SEQ ID NO: 32200
  source 1..120: mol_type = other DNA

SEQ ID NO: 95053 - DNA, 120 bp, synthetic construct; identical to SEQ ID NO: 15706
  source 1..120: mol_type = other DNA

SEQ ID NO: 95054 - DNA, 120 bp, synthetic construct; identical to SEQ ID NO: 15707
  source 1..120: mol_type = other DNA

SEQ ID NO: 95055 - DNA, 120 bp, synthetic construct
  source 1..120: mol_type = other DNA
tgtggtgaacaatgcatgattttaattttttttttcctttttctacttttcaaatactctacaacgagcagatctcgaatgcccagcaaaagctaagctccgcgaggcggccctggaatg

SEQ ID NO: 95056 - DNA, 120 bp, synthetic construct
  source 1..120: mol_type = other DNA
aggtcaggagatcgagaccatcctagctaacatagtgaaaccccatctctactaaaaattagaagaaattatccgggcgtggtggcaggcgcccgtaatcctagaggagaatcgcttgaa

SEQ ID NO: 95057 - DNA, 120 bp, synthetic construct
  source 1..120: mol_type = other DNA
tataacaatattaaccttaaatgtaaatgggctaaatgctccaattaaaagacacacactggcaaattggataaagagtcaggacccatcagtgtgctgtattcaggagactcatctcat

SEQ ID NO: 95058 - DNA, 120 bp, synthetic construct
  source 1..120: mol_type = other DNA
gcaagaaataactaagatcagagcagaactgaaggagatagagacacaaaaacccttcgaaaagtcaatgaatccaggagctggttttctgaaaagatcaacaaaattgatagactgcta

SEQ ID NO: 95059 - DNA, 120 bp, synthetic construct
  source 1..120: mol_type = other DNA
aataaactaggtattgattgaacatatctcaaaataataagagctatttatgacaaactcacatccaatatcatactgaatgggcaaaaactggaagcattccctttgaaaaccggcaca

SEQ ID NO: 95060 - DNA, 120 bp, synthetic construct; identical to SEQ ID NO: 29042
  source 1..120: mol_type = other DNA

SEQ ID NO: 95061 - DNA, 120 bp, synthetic construct
  source 1..120: mol_type = other DNA
acaacaggtgctggagaggatgtggagaaataggaacacttttacactgttggcagaactgtaaactagatcaaccattgtggaagtcagtgtggcgattcctcagggatctagaactag

SEQ ID NO: 95062 - DNA, 120 bp, synthetic construct; identical to SEQ ID NO: 29043
  source 1..120: mol_type = other DNA

SEQ ID NO: 95063 - DNA, 120 bp, synthetic construct
  source 1..120: mol_type = other DNA
tgtttctttaaaaagataataaaattgataaatttctagccaggctaatcaagaaaagaagaggattcaacattcttaaagaaaacaattttcaacccagaatttcatatccagccaaac

SEQ ID NO: 95064 - DNA, 120 bp, synthetic construct
  source 1..120: mol_type = other DNA
aaagcactcctcagcaagtgtaaaagaacagcaatcacaacaaactgtctctcagaccacagtgctatcaaattagacctcaggattaagaaactcactcaaaaccgcacaactacatgg

SEQ ID NO: 95065 - DNA, 120 bp, synthetic construct
  source 1..120: mol_type = other DNA
attttagaccaatatccttgatgaacatcgatgtgaaaatcctcaataaagtactggcaaactgaatcctgcagcacatcaaaaagcttatccaccatgatcaagtcggcttcatccccg

SEQ ID NO: 95066 - DNA, 120 bp, synthetic construct
  source 1..120: mol_type = other DNA
tatctacaactatctgatctttgacaaacctgagaaaaacaagcaatggggaaaggattccctatttaataaacggtgctgggaaaactggatagccatatgtagaaagctgaaactgga

SEQ ID NO: 95067 - DNA, 120 bp, synthetic construct
  source 1..120: mol_type = other DNA
catgtcctttgtagggacatggatgaaattggaaatcatcattctcagtaaactatcgcaaggacaaaaaatcaaacaccgcaggttcgcactcataggtgggaattggacaatgagaac

SEQ ID NO: 95068 - DNA, 120 bp, synthetic construct
  source 1..120: mol_type = other DNA
gcgcattagaggggcaacctctggttaacttcaaagactcccgtgtctgcaagttggaccattttaaggtgctcttccggattgcttcaggggaagggacctcattcccttctctctctc

SEQ ID NO: 95069 - DNA, 120 bp, synthetic construct
  source 1..120: mol_type = other DNA
gtgagcaaaatagtcgacacatagaatcatcaatagcaagagtattccagagctacagattaaaaggaagcccgaggaactgctccacacctagacaggtactgcaaaatttcaaaacac

SEQ ID NO: 95070 - DNA, 120 bp, synthetic construct; identical to SEQ ID NO: 10505
  source 1..120: mol_type = other DNA

SEQ ID NO: 95071 - DNA, 120 bp, synthetic construct; identical to SEQ ID NO: 10506
  source 1..120: mol_type = other DNA

SEQ ID NO: 95072 - DNA, 120 bp, synthetic construct
  source 1..120: mol_type = other DNA
gatcatcccatctcacaggcgagaaaactgagcctcaaagaagtagagtgtcttgtctcagccagccaacttgtagatggtagggctggactttcaatccaaagtccaagctcttccttc

SEQ ID NO: 95073 - DNA, 120 bp, synthetic construct; identical to SEQ ID NO: 10507
  source 1..120: mol_type = other DNA

SEQ ID NO: 95074 - DNA, 120 bp, synthetic construct; identical to SEQ ID NO: 10508
  source 1..120: mol_type = other DNA

SEQ ID NO: 95075 - DNA, 120 bp, synthetic construct; identical to SEQ ID NO: 10509
  source 1..120: mol_type = other DNA

SEQ ID NO: 95076 - DNA, 120 bp, synthetic construct; identical to SEQ ID NO: 10343
  source 1..120: mol_type = other DNA

SEQ ID NO: 95077 - DNA, 120 bp, synthetic construct; identical to SEQ ID NO: 10342
  source 1..120: mol_type = other DNA

SEQ ID NO: 95078 - DNA, 120 bp, synthetic construct
  source 1..120: mol_type = other DNA
aagtcagcaccagggccttgatctccttcttgaagttggtgttgagaaagccatagatgaatgggttgacacaggtggaggccatggcaagcaagtggcacactaagaagatgaggttcc

SEQ ID NO: 95079 - DNA, 120 bp, synthetic construct
  source 1..120: mol_type = other DNA
gaagctttgaaagatacgtggcacattatctggggcaagtcagctcagtggtcagagcacagagtgaaggaggctgcagccatagccttgagttctggaggcctctgtagtgggtcaaca

SEQ ID NO: 95080 - DNA, 120 bp, synthetic construct
  source 1..120: mol_type = other DNA
ctcctgactcctactttatttactgtcccgagtgtaagaatatgtactcctgcttttagatcaaagcaagcttgatgttatcatgcaaattctgggctatgatgcacatggcgttcttgc

SEQ ID NO: 95081 - DNA, 120 bp, synthetic construct
  source 1..120: mol_type = other DNA
gcaggagaattgcttgaatccaggaggcagaagctgcagtgagccaagatcgtgccattgcactccagcctgggcagcatgagtgaaactccttctcaaaaaaaaaaaaaaaaaaagata

SEQ ID NO: 95082 - DNA, 120 bp, synthetic construct
  source 1..120: mol_type = other DNA
ctagagacagctcagaatgccacaacagatgatattaaggacataggatatatctatcaatggactctaagttccatagaacagggacaatgtctgattacaaccactgtatccccacag

SEQ ID NO: 95083 - DNA, 120 bp, synthetic construct; identical to SEQ ID NO: 10510
  source 1..120: mol_type = other DNA

SEQ ID NO: 95084 - DNA, 120 bp, synthetic construct
  source 1..120: mol_type = other DNA
ccaacagtggaatgagatgacttccagaagtagaaattgactattatgccaaaactgttcaccaaagttgataaaactctaggtttacaattgtaccccaaggtcatgggactggacccc

SEQ ID NO: 95085 - DNA, 120 bp, synthetic construct
  source 1..120: mol_type = other DNA
acatctttccctaagtggcctcttgagcccagtcggattttggttatatgccatgatagtaatcataagaatcagttaaaaatgatccaaaaatgcacgaatacagtcgattccctctca

SEQ ID NO: 95086 - DNA, 120 bp, synthetic construct
  source 1..120: mol_type = other DNA
tccatataactagatgagtcctttttttctttttctttttttttttttttttgaggcagagtctcgctcggtcgtccaggctggagtgccatggcacgatctcggctcattgcggcttcc

SEQ ID NO: 95087 - DNA, 120 bp, synthetic construct
  source 1..120: mol_type = other DNA
ggaggctcccatcattctgaattatgaccatgctttcatcttcacaactcaagatctattttcagatgctatcttgaggttttgaaccccacgaaggctcaatgaatgaattcccctgaa

SEQ ID NO: 95088 - DNA, 120 bp, synthetic construct
  source 1..120: mol_type = other DNA
cctttttctctggagcgttttattttattttattatttcattttttttttcctgtgagacagagtctggctctgttgcccaggctggggtgcagtagcaccatctcaaccaactgcaaac

SEQ ID NO: 95089 - DNA, 120 bp, synthetic construct
  source 1..120: mol_type = other DNA
gatcccgccactgcactccagcctgggcaacaagagggaagctccatctcaaacaaacaaacaaacaaacacccctgcatcaggacagaccacccagaagctggctgtcagagcattcag

SEQ ID NO: 95090 - DNA, 120 bp, synthetic construct
  source 1..120: mol_type = other DNA
tatcacttagaataaacaaaatcactcaaaaatgcaaactaataatcagtgtgatggctgagtgtggttgctcatgcctataatcccagtattttgggaggccaaggtgggaggaccact

SEQ ID NO: 95091 - DNA, 120 bp, synthetic construct
  source 1..120: mol_type = other DNA
acttgagcccaagagtttgagaccagcctgggcaacatggtgagaccctatttgtacaaaaaaattaaaaaattagcagggcatggtggtgtgcactgatagtcccagctattcgggaga

SEQ ID NO: 95092 - DNA, 120 bp, synthetic construct
  source 1..120: mol_type = other DNA
gactgtacatcatctctgcagctgcatttctttctttcttttttttttttttttgagacagaatctcgctctgtcgccatgtcaccaggatggggtgcagtggcgcaatcttggttcact

SEQ ID NO: 95093 - DNA, 120 bp, synthetic construct
  source 1..120: mol_type = other DNA
tcagctacaggggagttgcagtctgtaaaggagggggcggctttgtttgacattaggttattgcattccatctcctgtagccagaaatgtattttccccttaaaagcactgaagattaaa

SEQ ID NO: 95094 - DNA, 120 bp, synthetic construct
  source 1..120: mol_type = other DNA
aacctgattgtctatggggaacattttaagaaattatgggtacatccacactacaggatattttgctgttaacaagaatgagttggccaggcacggtggttcgagcctgtaatcccagca

SEQ ID NO: 95095 - DNA, 120 bp, synthetic construct
  source 1..120: mol_type = other DNA
tatgtagacttgcagcaccttggtatgagggggaaaaatgtgcagtgatcacattaaacttttttttttttttgacagtctcactctgttgcccaggctggagtgcagtggcatgaactt

SEQ ID NO: 95096 - DNA, 120 bp, synthetic construct
  source 1..120: mol_type = other DNA
cctgccagcaccttgatcttcgacttcccagcttccagaactgtgagaaatcaatttctcttttttattaactacctagtcccaagtattatgtatggcagcacaaaatagactgagaca

SEQ ID NO: 95097 - DNA, 120 bp, synthetic construct
  source 1..120: mol_type = other DNA
aactagaaaggcacatttaaaccttaagctctcttcctgcttttattattgaccacatctagcaaggcaagtgcctcttgggctaaattcagcgaagtgtaactttcagggcccaatatg

SEQ ID NO: 95098 - DNA, 120 bp, synthetic construct
  source 1..120: mol_type = other DNA
caagcattttctaagtagtaagacagtcaaggcacttctcagaaaatgagcaaatcaggatatccatctcttgctctttcaaggagctcagactctaatagctataagcaggcctgtgac

SEQ ID NO: 95099 - DNA, 120 bp, synthetic construct
  source 1..120: mol_type = other DNA
caagaatcgtttgaacctgggaagtggagattgcaatgagccaagatcacgccactgcactacagcctgggcaacagagtgagtgagactccatctcaaaaagttcaacagaggaaaact

SEQ ID NO: 95100 - DNA, 120 bp, synthetic construct
  source 1..120: mol_type = other DNA
gaaggaaattacaaaacacaggattctgccccagatgaggcaacagctttctaaatcttagtactgtccaatctcagagtgagattatttgggaaacagctctcaatccctgcagttgtc

SEQ ID NO: 95101 - DNA, 120 bp, synthetic construct
  source 1..120: mol_type = other DNA
aggaaggatccgcgacaccggatacaaacagaagctctccttctcccggagtccgatcaaggctcatcccaggtccctaatctcttccctttgtgggttttgagtcaaggaacaaaattc

SEQ ID NO: 95102 - DNA, 120 bp, synthetic construct; identical to SEQ ID NO: 27442
  source 1..120: mol_type = other DNA

SEQ ID NO: 95103 - DNA, 120 bp, synthetic construct; identical to SEQ ID NO: 27443
  source 1..120: mol_type = other DNA

SEQ ID NO: 95104 - DNA, 120 bp, synthetic construct
  source 1..120: mol_type = other DNA
tataccttctgtttgaggtcagcatcatagtgggtcgtgaatcatgttggccttgctgctgtctcctcatttctagggtggaaaaaaaaaagcatgaaaacaatcacttaatgttgagcc

SEQ ID NO: 95105 - DNA, 120 bp, synthetic construct
  source 1..120: mol_type = other DNA
catgtgggagaggaatagtgcctgctatagctgattcattgagtcagcaaaattgaccaattgcgaaagagacagtatggcccacaaagcctaaaatattaactatctggcctttaacag

SEQ ID NO: 95106 - DNA, 120 bp, synthetic construct
  source 1..120: mol_type = other DNA
cctccacagtacccgaaccgactgtactcccaccagcagagaaggatagttactgttcctccacactccaaacaatgcttgctgtttattcagtattttattattttttccattgaatta

SEQ ID NO: 95107 - DNA, 120 bp, synthetic construct
  source 1..120: mol_type = other DNA
gcataatgctgagtagtagccatgaaagtagatagtctcagaagtgatgcatacagttgtgtgggttctatactgcacaattctaggagatactctttacaaacacttagatgtcctagg

SEQ ID NO: 95108 - DNA, 120 bp, synthetic construct
  source 1..120: mol_type = other DNA
gctcatcccaagggtgatagaagcagagatgatccaatagccactaggacccttggaatgcagacccatgatttttccattaaaaagaacaataaattcagggaacgtggacaacattaa

SEQ ID NO: 95109 - DNA, 120 bp, synthetic construct
  source 1..120: mol_type = other DNA
gtgaaaaaacaacttgcatcatgtatctatttacatgacaggaagaatcagaataagggaaaagaaaagatgttctggccaggcatggtggatcatgcctgtaatcccagcaccttggga

SEQ ID NO: 95110 - DNA, 120 bp, synthetic construct
  source 1..120: mol_type = other DNA
gttgcttcaaattcaagttgcccactcttctcttcccataatctcagtgacctggttccaaagcttgtgctttgactcatttgaagactaaatttatctgtatgtcctccccacatcctt

SEQ ID NO: 95111 - DNA, 120 bp, synthetic construct
  source 1..120: mol_type = other DNA
cctagcaccataaagttgtttttattgacaagatcatcttctccatgccagtctgtttgtgtactgccaattttctgtctggttagttggatttccctgctactactgcaagtgtggact

SEQ ID NO: 95112 - DNA, 120 bp, synthetic construct
  source 1..120: mol_type = other DNA
cctgtcctgccttctctctgagtgcactgtggctgccatgcacagggcaggactgaggcaccccaaccagtctactattttggcttccttttcaatttaaattcaatttaaatattattt

SEQ ID NO: 95113 - DNA, 120 bp, synthetic construct
  source 1..120: mol_type = other DNA
aggcatgtttaagtgttcacataataaaacagtacatttcttccttgcaaacagccctacaccacatatttttccatttctggctctgtctgccaacttcaatgggctgtcctcagggtt

SEQ ID NO: 95114 - DNA, 120 bp, synthetic construct
  source 1..120: mol_type = other DNA
ccccatctctactaaaaatacaaaaattagatgtggagttcagagtggaaacaggtgtgagagggttcaacagaagaaaacatagctgccaagtgtttgagtccatcggcaagtttggac

SEQ ID NO: 95115 - DNA, 120 bp, synthetic construct
  source 1..120: mol_type = other DNA
cagatctcaaaaaagaaaaaaaaaatttagctggacgtggtggcatgtacctgtaatcccagctactcgggaagctgaggtaggagaatcacttgaacccaggaggcagaggatatagtg

SEQ ID NO: 95116 - DNA, 120 bp, synthetic construct
  source 1..120: mol_type = other DNA
agcatctgaccctttttccacattacgtctctttctctgatcaaacccaggaaagcttttctaattttaagattcatgtgattagactaggcctgcctggataattcagcacactcccca

SEQ ID NO: 95117 - DNA, 120 bp, synthetic construct
  source 1..120: mol_type = other DNA
gcctttttttttttttttttaagagatagggtcttgctatattgtccaggctggtctcatactcctcacaattgatccttccacctcagcctcccaaagtgctgacattagaggcatgag

SEQ ID NO: 95118 - DNA, 120 bp, synthetic construct
  source 1..120: mol_type = other DNA
ttcctcatctcctaatgctgcctcctccctcccattgccggtgcctggaaatagtcaaggctgggttctgttcttttgcttgaatttctttcacttggcttcttgactctttctaaacta

SEQ ID NO: 95119 - DNA, 120 bp, synthetic construct
  source 1..120: mol_type = other DNA
ttgctccttctgtagcagaaacttcacacacattttctttcaaattctcctccattgctatctccagttgcaccgctcttcttcatttctttccctccacattcaaacttgtcttctctg

SEQ ID NO: 95120 - DNA, 120 bp, synthetic construct
  source 1..120: mol_type = other DNA
caatattgttttatatgcacccacatatttaccctttttagttctccatattccctcctgaagttccatgctccccactggcttttgccaggataactttctttggtattacttgtaatg

SEQ ID NO: 95121 - DNA, 120 bp, synthetic construct
  source 1..120: mol_type = other DNA
agatcgcgccactgcactccagcctgggcgacaaagagagactccgtctcaaaaaaaaaaaaaaagaaaaagaaagaaagaaaaagaaacctcatgttcatttgcagccactctctattc

SEQ ID NO: 95122 - DNA, 120 bp, synthetic construct
  source 1..120: mol_type = other DNA
agtcttccgaatgtaatatgacaatctgtcttaccaaccaccagtaatatgctttataaggaaaactaggctgggtgtggtggttcatgcctctaattccagcattttgggaggctgagg

SEQ ID NO: 95123 - DNA, 120 bp, synthetic construct
  source 1..120: mol_type = other DNA
ggtcagagtggcagtaaggttcctcggtccattcttctatagctggaattgaaatggcaagaaaaggagtgagggtcttagggaatcacttcctgcctgggaacagagagctacattaaa

SEQ ID NO: 95124 - DNA, 120 bp, synthetic construct
  source 1..120: mol_type = other DNA
ctccctcttcacatggcctctccgcatggtctctttgggtggtcactgagcagggtagccagactttgttgcatggtggcttagggctctccaaagacaaaagcagaagctaccaggctt

SEQ ID NO: 95125 - DNA, 120 bp, synthetic construct
  source 1..120: mol_type = other DNA
gattgttatgaggaataaatgagtgccatgttctgaatgtttatgtttcccccaaattcgtatgttaaaatcctcatccccagtgtgatggctttagaagatggggactttggggggtga

SEQ ID NO: 95126 - DNA, 120 bp, synthetic construct
  source 1..120: mol_type = other DNA
agcctcccaaagtgctgggattacaggcgtgagccaccacatccagtcccacagtgtcttttaatatatttacatttaatggccaggcacggtggctcacgcctgtaatcccagcacttt

SEQ ID NO: 95127 - DNA, 120 bp, synthetic construct; identical to SEQ ID NO: 24578
  source 1..120: mol_type = other DNA

SEQ ID NO: 95128 - DNA, 120 bp, synthetic construct; identical to SEQ ID NO: 24579
  source 1..120: mol_type = other DNA

SEQ ID NO: 95129 - DNA, 120 bp, synthetic construct
  source 1..120: mol_type = other DNA
ttcttcctccctcttacccttatctttcccatgctcctgttcacatgttctactccagggctctatttttgtgtacaaaatgtcatgattacagctctctttataacaattccaaccccc

SEQ ID NO: 95130 - DNA, 120 bp, synthetic construct
  source 1..120: mol_type = other DNA
gttcacatccgccttctggggtggttgttacataaagaatggcataaaataaatgcttagaccatgggaagagaaacagaccgaagggaggggaagggcggggaggggagaaagccatgt

SEQ ID NO: 95131 - DNA, 120 bp, synthetic construct
  source 1..120: mol_type = other DNA
ggatccatcgtctccaagcctcagtctccctcatctgtgctaggcagatgagattatgagtttcacagggttttagaactaaatttacaaaactgcaaaatacctagcctagcatctgat

SEQ ID NO: 95132 - DNA, 120 bp, synthetic construct
  source 1..120: mol_type = other DNA
ctctggtttcttaccctcctggggtcaggtttcctcagctccctcccttaaggaggggaaatcgaggaagaggcccatctccatggaaactttctggtaacaaggctgtgaaagagaagg

SEQ ID NO: 95133 - DNA, 120 bp, synthetic construct
  source 1..120: mol_type = other DNA
agacctggatctttataggggaactgtttgcagacaggtgacatgaggtgttctcattctacctatttaactttgatatatttgtgctcctaggtcactatgagattaaggctcatgcgg

SEQ ID NO: 95134 - DNA, 120 bp, synthetic construct
  source 1..120: mol_type = other DNA
actcagccactgggagtgcaggggctgacagaggagcagcggatgatgatcagggagctgatggacgctcagatgaaaacctttgacactaccttctcccatttcaagaatttccgggta

SEQ ID NO: 95135 - DNA, 120 bp, synthetic construct
  source 1..120: mol_type = other DNA
tgcatcctctcgagctgcaactgtggctgtgcatgtttggctggggcctgagttgggacctgtctatgaaagcacatgctgtctctcctctgtccacctcctggcatgtgtcctagctgc

SEQ ID NO: 95136 - DNA, 120 bp, synthetic construct
  source 1..120: mol_type = other DNA
acttatttaatggggtgatgctgacagcaggtttggaatggggttcagatggtagcaaataagcttaaaggggcagggagagaagaatacttataaatgtggacattgggagatctttgg

SEQ ID NO: 95137 - DNA, 120 bp, synthetic construct
  source 1..120: mol_type = other DNA
ctagcaggatatactaaaggggaagtcattccaagggggaaactgaggcagaaaggaggaggccagggaccagaagccaaagcactagctgtaggtcaggatttgtataggagctgaagg

SEQ ID NO: 95138 - DNA, 120 bp, synthetic construct
  source 1..120: mol_type = other DNA
gcgtggtggaccagctgcaggagcaattcgccattactctgaagtcctacattgaatgcaatcggccccagcctgctcataggtgagcacagcagggggtgaggacccgtgagggtgatg

SEQ ID NO: 95139 - DNA, 120 bp, synthetic construct
  source 1..120: mol_type = other DNA
aggtctcttgagtccaggagtttgacactgcagtgagtccatgatcgtgccatcatgctctagcctgggtgacagaacgagatcctgtccctttaaagaaaaaaaaaaaaaaaagacaca

SEQ ID NO: 95140 - DNA, 120 bp, synthetic construct
  source 1..120: mol_type = other DNA
cggccacatcattctgtgtctctgcatccatttgaacacattattaagcaccgataataggtagcctgctgtggggtatacagcattgactcagatatagatcctgagctcacagagttt

SEQ ID NO: 95141 - DNA, 120 bp, synthetic construct; identical to SEQ ID NO: 24115
  source 1..120: mol_type = other DNA

SEQ ID NO: 95142 - DNA, 120 bp, synthetic construct
  source 1..120: mol_type = other DNA
aaactagttcaaccattgtggaagacagtgtggcgattcctcagggatctagaactagaaataccatttgacccagccatcccattactgggtatatacccaaaggactataaatcatgc

SEQ ID NO: 95143 - DNA, 120 bp, synthetic construct; identical to SEQ ID NO: 26898
  source 1..120: mol_type = other DNA

SEQ ID NO: 95144 - DNA, 120 bp, synthetic construct
  source 1..120: mol_type = other DNA
ggcagccatactcggccgagtcgacctgcaggcggcccagcttgtccacctgctcctggaaggcgcgcacctggtccatgaaagccacggcgcgctcggcggccataggcgcggcgtgga

SEQ ID NO: 95145 - DNA, 120 bp, synthetic construct
  source 1..120: mol_type = other DNA
gaggagcatctaataaaccttttggagcctcctaacagatagtcatggggttcccagagctgaggatgggccatggaggacttggggaccctggccagcttggtccccaaagcaacagat

SEQ ID NO: 95146 - DNA, 120 bp, synthetic construct
  source 1..120: mol_type = other DNA
tcgcctaaagaaaatttttagtggtatctttgtaaaagttaccccctagaatctaaaaatgctgcatatagtggaaccttatgtgacctggggatttccaaatctgaagtctgtccgaga

SEQ ID NO: 95147 - DNA, 120 bp, synthetic construct
  source 1..120: mol_type = other DNA
cagagcgagactccatctcaaaaaacaaacaaacaaacaaacaaacaaacaaaaaactattgctgcagtcattcagatggaaatggggaaagaataatattaataactgatttcaaaaag

SEQ ID NO: 95148 - DNA, 120 bp, synthetic construct
  source 1..120: mol_type = other DNA
ttgcagacgacatgattgtatatctagaaaaccccactgtctcagcccaaaatctctttaagctgataagcaacttcagcaaagtctcaggatacaaaatcaatgtgcaaaaatcacaag

SEQ ID NO: 95149 - DNA, 120 bp, synthetic construct
  source 1..120: mol_type = other DNA
acagcaaaagatactaccatcagagtgaacaggcaacctacaaaatgggagaaaatttttgcaacctactcatctgacaaagggctaatatccagaatctacaatgaactcaaacaaatt

SEQ ID NO: 95150 - DNA, 120 bp, synthetic construct
  source 1..120: mol_type = other DNA
taacctgcacattgtgcacatgtaccctaaaacttaaagtataattaaaaaaaccccaaaaatggctaaaatttattgaatgcttactaatgccaggcactgttctaaatgctctatata

SEQ ID NO: 95151 - DNA, 120 bp, synthetic construct; identical to SEQ ID NO: 25857
  source 1..120: mol_type = other DNA

SEQ ID NO: 95152 - DNA, 120 bp, synthetic construct
  source 1..120: mol_type = other DNA
gttcgttccaagtctttgctattgtgaataatgccgcaataaacatatgtgtccatgtgtctttatagcagcatgatttatagtcctttgggtatatacccagtaatgggatggctgggt

SEQ ID NO: 95153 - DNA, 120 bp, synthetic construct
  source 1..120: mol_type = other DNA
actagtaccatgctgttttggttactgtagccttgtagtatagttcgaagtcaggtagtgtgattcctccagctttgttcttttggcttaggattgacttggcgatgtgggctcttttct

SEQ ID NO: 95154 - DNA, 120 bp, synthetic construct
  source 1..120: mol_type = other DNA
gtggataagtttttgatgtgctgctggattcgttttgccagtattttattgagtatttttgcatcaatgttcatcaaggatattggtctaaaattctcttttttggttgtgtctctgcct

SEQ ID NO: 95155 - DNA, 120 bp, synthetic construct
  source 1..120: mol_type = other DNA
ggagagctttacttccaactatgtggtcaattttggaataggtgtggtgtggtgctgaaaaaaatgtatattctgttgctttggggtggagagttctgtagatgtctattaggtccgctt

SEQ ID NO: 95156 - DNA, 120 bp, synthetic construct
  source 1..120: mol_type = other DNA
tatctttgtggcgttctctgtatttcctgaatctgaacgttggcctgccttgctagattggggaagttctcctggataatatcctgcagagtgctttccaacttggttccattctcccca

SEQ ID NO: 95157 - DNA, 120 bp, synthetic construct
  source 1..120: mol_type = other DNA
cctggctgctttgtttacctaatcaagcctgtgcaatggcgggcgcccctcccccagcctggctgcagccttgcagtttgatctcagactgctgtgctagcaatcagcgagactccgtga

SEQ ID NO: 95158 - DNA, 120 bp, synthetic construct; identical to SEQ ID NO: 25858
  source 1..120: mol_type = other DNA

SEQ ID NO: 95159 - DNA, 120 bp, synthetic construct
  source 1..120: mol_type = other DNA
gaggaggagggtgacgtagcgtcccatggcgtcacattgacgtctcgcattccaggcactctatggagaggccgctagggctcctgtggcataaatgacgtgccgagagagcgagcgaac

SEQ ID NO: 95160 - DNA, 120 bp, synthetic construct; identical to SEQ ID NO: 32869
  source 1..120: mol_type = other DNA

SEQ ID NO: 95161 - DNA, 120 bp, synthetic construct
  source 1..120: mol_type = other DNA
gcatcctctccagcacctgttgtttcctgactttttaatgattgccattctaactggtgtgagatgatatctcatagtggttttgatttgcatttctctgatggccagtgatgatgagca

SEQ ID NO: 95162 - DNA, 120 bp, synthetic construct
  source 1..120: mol_type = other DNA
gcatggaatgttcttccatttgtttgtgtcctcttttagttccttgagcagtggtttgtagttctccttgaagaggtccttcacatcccttgtaagttggattcctaggtattttattct

SEQ ID NO: 95163 - DNA, 120 bp, synthetic construct; identical to SEQ ID NO: 32993
  source 1..120: mol_type = other DNA

SEQ ID NO: 95164 - DNA, 120 bp, synthetic construct; identical to SEQ ID NO: 9147
  source 1..120: mol_type = other DNA

SEQ ID NO: 95165 - DNA, 120 bp, synthetic construct
  source 1..120: mol_type = other DNA
taactctcttcaattctatgatggttgagagaggtgaggaagctgcagaagaaaggtttgaagctagcagaggttggctcacgaggttgaaggaaataagctgtctccattacttaaaag

SEQ ID NO: 95166 - DNA, 120 bp, synthetic construct; identical to SEQ ID NO: 32994
  source 1..120: mol_type = other DNA

SEQ ID NO: 95167 - DNA, 120 bp, synthetic construct
  source 1..120: mol_type = other DNA
tccgaaaaaggaaacgactgggggatgtctagcgaacgggggttcggcagaggtggggggctcgtagtattcaaggaagaacgctcgaggctgcagaagaggaaaacgctctagaaagct

SEQ ID NO: 95168 - DNA, 120 bp, synthetic construct; identical to SEQ ID NO: 11162
  source 1..120: mol_type = other DNA

SEQ ID NO: 95169 - DNA, 120 bp, synthetic construct
  source 1..120: mol_type = other DNA
tcactgctagtggcttggcaagctaaggaaagcttcgagaagagtcgacattaggggctgggtactgaaggctgaataggagctttcaccgcggagagaacaacttgaacaaagagggaa

SEQ ID NO: 95170 - DNA, 120 bp, synthetic construct; identical to SEQ ID NO: 29927
  source 1..120: mol_type = other DNA

SEQ ID NO: 95171 - DNA, 120 bp, synthetic construct; identical to SEQ ID NO: 29928
  source 1..120: mol_type = other DNA

SEQ ID NO: 95172 - DNA, 120 bp, synthetic construct; identical to SEQ ID NO: 29929
  source 1..120: mol_type = other DNA

SEQ ID NO: 95173 - DNA, 120 bp, synthetic construct; identical to SEQ ID NO: 29930
  source 1..120: mol_type = other DNA

SEQ ID NO: 95174 - DNA, 120 bp, synthetic construct
  source 1..120: mol_type = other DNA
acggtggtggttttgttgaatagaaaagggggaaatgtggggaaaagaaagagagatcagattgttactgtgtctgtgtagaaagaagtagacataggagactccattttgttctgtact

SEQ ID NO: 95175 - DNA, 120 bp, synthetic construct
  source 1..120: mol_type = other DNA
aacttaaaatcacactagaaatagatgctaacagaaagctgttgagtttccttgcaaacaggaaaagaagcagtggatgttccaaaactggggatcctgtcaatggctgggtctgcttag

SEQ ID NO: 95176 - DNA, 120 bp, synthetic construct; identical to SEQ ID NO: 29931
  source 1..120: mol_type = other DNA

SEQ ID NO: 95177 - DNA, 120 bp, synthetic construct
  source 1..120: mol_type = other DNA
atgtaatggccttcttggtctcttttgatctgtgttggtttaaagtctgttttatcagagaccaggattgcaacccctgctttttttttgttttccatttgcttggtagatcttcctcca

SEQ ID NO: 95178 - DNA, 120 bp, synthetic construct; identical to SEQ ID NO: 7619
  source 1..120: mol_type = other DNA

SEQ ID NO: 95179 - DNA, 120 bp, synthetic construct
  source 1..120: mol_type = other DNA
ggcaatgctcgcttgtcatctaaaggattaacccttccccaataaggatcactgttgacaaggtatctctgtgtaatttcatttgcaactctagcgaagattgtgggtacttagaaggtt

SEQ ID NO: 95180 - DNA, 120 bp, synthetic construct
  source 1..120: mol_type = other DNA
tcccagacggggcggccgggcagaggcgctccccacctcccagacggggtggccgggcagagggctgctcacatcccagacgatgggcggccaggcagagacgctcctcacttcctagac

SEQ ID NO: 95181 - DNA, 120 bp, synthetic construct
  source 1..120: mol_type = other DNA
atctgccggtcttggccttccaaagttttaggattacaggtgtgagccactgcacccagccaacatttactttttaaaagaattttttacttgccccaaaactctcaaacttgtctccta

SEQ ID NO: 95182 - DNA, 120 bp, synthetic construct; identical to SEQ ID NO: 27058
  source 1..120: mol_type = other DNA

SEQ ID NO: 95183 - DNA, 120 bp, synthetic construct
  source 1..120: mol_type = other DNA
gtgagactctttttatattgcggcactatgtttactgtggcactatcgcagccacaatattgcagcactatgtttattgcggcactattcacaatagcaaagacttggaaccaacccaaa

SEQ ID NO: 95184 - DNA, 120 bp, synthetic construct
  source 1..120: mol_type = other DNA
gatatatctcctaatgctatccctccccactcccccgaccccacaacagtccccagagtgtgatgttccccttcctgtgtccatgtgttctcattgttcaattcccacctatgagtgaga

SEQ ID NO: 95185 - DNA, 120 bp, synthetic construct
  source 1..120: mol_type = other DNA
agggatccagtttcagctttctacatatggctagccagttttcccagcaccatttattaaatagggaatcgtttccccattgcttgtttttgtcaggtttgtcaaagatcagatagttgt

SEQ ID NO: 95186 - DNA, 120 bp, synthetic construct
  source 1..120: mol_type = other DNA
tccttctgaaactattccgatcaatagaaaaagagggaatcctccgtaactcattttgtgaggccagcatcatcctgataccaaagacgggcagagacaaaaccaaaaaagagaatttta

SEQ ID NO: 95187 - DNA, 120 bp, synthetic construct
  source 1..120: mol_type = other DNA
tcaatgccatccctatcaagctaccaatgactttcttcacagaattggaaaaaaccactttaaagttcatatggaaccaaaaaagagcccgcatcgccaagtcaatcctaagccaaaaga

SEQ ID NO: 95188 - DNA, 120 bp, synthetic construct
  source 1..120: mol_type = other DNA
agacatatgaaaaaatgctcatcatcactggccatcagagaaatgcaaatcaaaaccacaatgagataccatctcacaccagttagaatggcaatcattaaaaagtcaggaaacaacagg

SEQ ID NO: 95189 - DNA, 120 bp, synthetic construct; identical to SEQ ID NO: 10904
  source 1..120: mol_type = other DNA

SEQ ID NO: 95190 - DNA, 120 bp, synthetic construct
  source 1..120: mol_type = other DNA
tgttggtgtgctgcatccattaactcgtaatttacattaggtatatctcctaatgctatccctctcccctctccccaccccacaacaggccccggtgtgtgatgttccccttcctgtgtc

SEQ ID NO: 95191 - DNA, 120 bp, synthetic construct
  source 1..120: mol_type = other DNA
gtgtaaggaagggatccagtttccgctttctacctatggctagccagatttcccagcaccatttattaaatagggaatcctttccccattgcttgtttttgtcaggtttgtcaaagatca

SEQ ID NO: 95192 - DNA, 120 bp, synthetic construct
  source 1..120: mol_type = other DNA
cacatagacagcgaccccagctggaaatcagtgtttttcccccattaacatcataacgaaataattttttttaatttttattttattattattatactttaagttttagggtacatgtgc

SEQ ID NO: 95193 - DNA, 120 bp, synthetic construct
  source 1..120: mol_type = other DNA
gtgtcttttggctgcataaatgtcttcttttgagaagtgtctgttcatatccttcgcccactttttgatggggttgtttgtttttttcttgtaaatttgtttgagttctttgtagattct

SEQ ID NO: 95194 - DNA, 120 bp, synthetic construct
  source 1..120: mol_type = other DNA
gctctctatttgtctgttattggtgtgtaagaatgcttgtgatttttgtacattgattttgtatcctgagactttgctgaagttgcttatcagcttaaggagattttgggctgagacgat

SEQ ID NO: 95195 - DNA, 120 bp, synthetic construct
  source 1..120: mol_type = other DNA
aaagggaagcccatcagactaacagcggatctctaggcagaacctctacaagccagaagagagtgggggacaatattcaacattcttaaaggaaagaattttcaacccagaatttcatat

SEQ ID NO: 95196 - DNA, 120 bp, synthetic construct
  source 1..120: mol_type = other DNA
cagaaattataacaaactgtctctcagaccacagtgcaatcaaactagaactcaggattaagagactcactcaaaaccgcacaactacgtggaaactgaacaacctgctcctgaatgact

SEQ ID NO: 95197 - DNA, 120 bp, synthetic construct; identical to SEQ ID NO: 10905
  source 1..120: mol_type = other DNA

SEQ ID NO: 95198 - DNA, 120 bp, synthetic construct; identical to SEQ ID NO: 10906
  source 1..120: mol_type = other DNA

SEQ ID NO: 95199 - DNA, 120 bp, synthetic construct; identical to SEQ ID NO: 10907
  source 1..120: mol_type = other DNA

SEQ ID NO: 95200 - DNA, 120 bp, synthetic construct
  source 1..120: mol_type = other DNA
agcatttttcatgtgttttttggctgcataaatgtcttcttttgagaagtgtccgttcatgtccttcgcccactttttgatggggttgtttgtttttttcttgtaaatttgtttgagttc

SEQ ID NO: 95201 - DNA, 120 bp, synthetic construct
  source 1..120: mol_type = other DNA
atttctttgtatcctcttttatttccttgagcagtggtttgtagttatccttgaagaggtccttcacatcccttgtaagttggattcctaggtattttattctctttgaagcaattgtga

SEQ ID NO: 95202 - DNA, 120 bp, synthetic construct
  source 1..120: mol_type = other DNA
attttctagtttatttgtgtagaggtgtttgtagtattctgtgatggtagtttgtatttctgtgggatcggtggtgatatcccctttatcattttttattgcgtctatttgattcttctc

SEQ ID NO: 95203 - DNA, 120 bp, synthetic construct
  source 1..120: mol_type = other DNA
taggatagttagctcttcttgttgaattgatccctttaccattatgtaatggccttctttgtctcttttgatctttgctggtttaaagtctgttttatcagagactaggattgcaacccc

SEQ ID NO: 95204 - DNA, 120 bp, synthetic construct
  source 1..120: mol_type = other DNA
tccccatcactttcaggtacaccaatcagacgtagatttggtcttttcacatagtcccatatttcttggaggctttgctcatttctttttattcttttttctctaaacttcccatctcac

SEQ ID NO: 95205 - DNA, 120 bp, synthetic construct
  source 1..120: mol_type = other DNA
acccctttctttgactcagaaacggaactccctgaccccttgcgcttcccaagtgaggcaatgcctcgccctgcttcggctcgcgcacggtgcgcgcacccactgacctgcgcccactgt

SEQ ID NO: 95206 - DNA, 120 bp, synthetic construct
  source 1..120: mol_type = other DNA
cgaatccctttactaccatggatactaagctctttaatagggcacaagaacctctgttaactgggtgagatttaggagttcagcaatcacaagacagctccagctatttgagattatgct

SEQ ID NO: 95207 - DNA, 120 bp, synthetic construct
  source 1..120: mol_type = other DNA
gaaaagtctcccatgtctacttctttctacacagacacggcaaccatcggaaaggtggggaaaagattgagaaatccgatggcttgtgtcactcttgaaaattactttgaagtcttttag

SEQ ID NO: 95208 - DNA, 120 bp, synthetic construct; identical to SEQ ID NO: 10910
  source 1..120: mol_type = other DNA

SEQ ID NO: 95209 - DNA, 120 bp, synthetic construct; identical to SEQ ID NO: 10911
  source 1..120: mol_type = other DNA

SEQ ID NO: 95210 - DNA, 120 bp, synthetic construct; identical to SEQ ID NO: 10912
  source 1..120: mol_type = other DNA

SEQ ID NO: 95211 - DNA, 120 bp, synthetic construct; identical to SEQ ID NO: 23013
  source 1..120: mol_type = other DNA

SEQ ID NO: 95212 - DNA, 120 bp, synthetic construct; identical to SEQ ID NO: 23014
  source 1..120: mol_type = other DNA

SEQ ID NO: 95213 - DNA, 120 bp, synthetic construct; identical to SEQ ID NO: 35097
  source 1..120: mol_type = other DNA

SEQ ID NO: 95214 - DNA, 120 bp, synthetic construct
  source 1..120: mol_type = other DNA
catcccttgtaagttggatttacaagataaaaacaaacaaccccatcaaaaagtgggcgaaggacatgaacagacacttctcaaaagaagacatttatgcagccaaaaaacacatgaaaa

SEQ ID NO: 95215 - DNA, 120 bp, synthetic construct; identical to SEQ ID NO: 35098
  source 1..120: mol_type = other DNA

SEQ ID NO: 95216 - DNA, 120 bp, synthetic construct
  source 1..120: mol_type = other DNA
ccttttgctgttgaattgtaaacattctttaagtattccatatactagagtctttttttcttttgaggcagagtctcgctctgttgctcaggctggagtgcagtggagtgatctcagatc

SEQ ID NO: 95217 - DNA, 120 bp, synthetic construct
  source 1..120: mol_type = other DNA
tctgatcaaaagattcagcattttaaaagcagatactcctcaactcttaaatgcttatattttgtgaaatacggtgcaacacgcctgtaatcccagcactttgggaggccgaggcgggcg

SEQ ID NO: 95218 - DNA, 120 bp, synthetic construct; identical to SEQ ID NO: 14250
  source 1..120: mol_type = other DNA

SEQ ID NO: 95219 - DNA, 120 bp, synthetic construct; identical to SEQ ID NO: 14251
  source 1..120: mol_type = other DNA

SEQ ID NO: 95220 - DNA, 120 bp, synthetic construct
  source 1..120: mol_type = other DNA
tgtgtctctgcccggctttggtatcagaatgatgctggcctcataaaatgagttagggaggatgacaaatgggatctaattaaactaaagagcttctgcacagcaaaagaaactaccatc

SEQ ID NO: 95221 - DNA, 120 bp, synthetic construct; identical to SEQ ID NO: 14252
  source 1..120: mol_type = other DNA

SEQ ID NO: 95222 - DNA, 120 bp, synthetic construct; identical to SEQ ID NO: 10207
  source 1..120: mol_type = other DNA

SEQ ID NO: 95223 - DNA, 120 bp, synthetic construct; identical to SEQ ID NO: 20530
  source 1..120: mol_type = other DNA

SEQ ID NO: 95224 - DNA, 120 bp, synthetic construct; identical to SEQ ID NO: 20531
  source 1..120: mol_type = other DNA

SEQ ID NO: 95225 - DNA, 120 bp, synthetic construct
  source 1..120: mol_type = other DNA
aaatgttaaaaaatggagtataacactctactctgctgcttgctggctttcctaacaatgtgagcagttgacattgcttggccaagaggaactcaaaaaggtccgtccttccttccttcc

SEQ ID NO: 95226 - DNA, 120 bp, synthetic construct; identical to SEQ ID NO: 20532
  source 1..120: mol_type = other DNA

SEQ ID NO: 95227 - DNA, 120 bp, synthetic construct; identical to SEQ ID NO: 20533
  source 1..120: mol_type = other DNA

SEQ ID NO: 95228 - DNA, 120 bp, synthetic construct
  source 1..120: mol_type = other DNA
atggatgaagggcggtgcaagatgtgctttgttaaacagatgcttgaaggcagcatactcattaagtcatcaccactccctaatctcaagtacccagggacacaaacactgcagaaggcg

SEQ ID NO: 95229 - DNA, 120 bp, synthetic construct; identical to SEQ ID NO: 4572
  source 1..120: mol_type = other DNA

SEQ ID NO: 95230 - DNA, 120 bp, synthetic construct; identical to SEQ ID NO: 20536
  source 1..120: mol_type = other DNA

SEQ ID NO: 95231 - DNA, 120 bp, synthetic construct; identical to SEQ ID NO: 20537
  source 1..120: mol_type = other DNA

SEQ ID NO: 95232 - DNA, 120 bp, synthetic construct; identical to SEQ ID NO: 20538
  source 1..120: mol_type = other DNA

SEQ ID NO: 95233 - DNA, 120 bp, synthetic construct
  source 1..120: mol_type = other DNA
tgatttccacatctaaaattaatgtttttatttatttatttatttagttttttaattgatcgttcttggatgtttctcacagagggggacttggcagggtcataggacaacagtggaggg

SEQ ID NO: 95234 - DNA, 120 bp, synthetic construct
  source 1..120: mol_type = other DNA
tgggcagagacgctcctcacctcccagacggggtcgcggccgggcagaggcgctccttacatcccagacagggcggtggggcaaaggcgctccccacatctcagaagatgggtggccggg

SEQ ID NO: 95235 - DNA, 120 bp, synthetic construct; identical to SEQ ID NO: 20539
  source 1..120: mol_type = other DNA

SEQ ID NO: 95236 - DNA, 120 bp, synthetic construct; identical to SEQ ID NO: 12005
  source 1..120: mol_type = other DNA

SEQ ID NO: 95237 - DNA, 120 bp, synthetic construct; identical to SEQ ID NO: 12006
  source 1..120: mol_type = other DNA

SEQ ID NO: 95238 - DNA, 120 bp, synthetic construct
  source 1..120: mol_type = other DNA
aaagaaaaataaataaattagccagacatggtggtgtgcgcctgtagtcccagctactcaggaggttgaaatagaggatcatttgagcccaggagtttgaggttacagtgagctatgatc

SEQ ID NO: 95239 - DNA, 120 bp, synthetic construct
  source 1..120: mol_type = other DNA
ggctcagggcctcaatatctcttgtgtgacctatctcccaattgatttcttcactacataactctataatccctctgcacttcactcccagctccctaagtacagcacttttatatatat

SEQ ID NO: 95240 - DNA, 120 bp, synthetic construct; identical to SEQ ID NO: 14524
  source 1..120: mol_type = other DNA

SEQ ID NO: 95241 - DNA, 120 bp, synthetic construct; identical to SEQ ID NO: 14525
  source 1..120: mol_type = other DNA

SEQ ID NO: 95242 - DNA, 120 bp, synthetic construct; identical to SEQ ID NO: 14527
  source 1..120: mol_type = other DNA

SEQ ID NO: 95243 - DNA, 120 bp, synthetic construct
  source 1..120: mol_type = other DNA
ccacgaccgtccccagagtgtgatgttccccttcctgtgtccatgtgttctcattgttcaattcccacctatgagtgagaatatgcggtgtttggttttttgttcttgcgatagtttact

SEQ ID NO: 95244 - DNA, 120 bp, synthetic construct
  source 1..120: mol_type = other DNA
ttgcttgtttttctcaggtttgtcaaaaatcagatagttgtagatatgcggcgttatttctgagggctctgttctgttccattgatctataactctgttttggtaccagtaccatgctgt

SEQ ID NO: 95245 - DNA, 120 bp, synthetic construct
  source 1..120: mol_type = other DNA
atttgtgtatattgaaccagccttgtatcccagggatgaagcccacttgatcatggtggataagctttttgatgtgctgctggattcggtttgccagtattttattgaggatttttgcat

SEQ ID NO: 95246 - DNA, 120 bp, synthetic construct
  source 1..120: mol_type = other DNA
atgtttatttctgccttcatttcgttatgtacccagtagtcattcaggagcagattgttcagtttccatgtagttgagcggttttgagtgagattcttaatcctgagttctagtttgatt

SEQ ID NO: 95247 - DNA, 120 bp, synthetic construct
  source 1..120: mol_type = other DNA
tggtgacaaaatctctcagcatttgcttgtctgtaacgtattttatttctccttcacttatgaagcttagtttggctggatatgaaattctgggttgaaaattcttttctttaagaatgt

SEQ ID NO: 95248 - DNA, 120 bp, synthetic construct
  source 1..120: mol_type = other DNA
tgcttgggggtcaggggtcagggacccatttgagggggcagtctgcccgttttcagatctctagctgcatgctgggagaaccactgctctcttccaagctgtcagacagggtcatttaag

SEQ ID NO: 95249 - DNA, 120 bp, synthetic construct; identical to SEQ ID NO: 14528
  source 1..120: mol_type = other DNA

SEQ ID NO: 95250 - DNA, 120 bp, synthetic construct; identical to SEQ ID NO: 14529
  source 1..120: mol_type = other DNA

SEQ ID NO: 95251 - DNA, 120 bp, synthetic construct; identical to SEQ ID NO: 14530
  source 1..120: mol_type = other DNA

SEQ ID NO: 95252 - DNA, 120 bp, synthetic construct; identical to SEQ ID NO: 14531
  source 1..120: mol_type = other DNA

SEQ ID NO: 95253 - DNA, 120 bp, synthetic construct
  source 1..120: mol_type = other DNA
taaatcacgctgctataaagacacacgcacacatatgtttattgcggcactattcacaatagcaaagacttggaaccaacccaaatgtccaacaatgatagactggattaagaaaatgtg

SEQ ID NO: 95254 - DNA, 120 bp, synthetic construct; identical to SEQ ID NO: 14534
  source 1..120: mol_type = other DNA

SEQ ID NO: 95255 - DNA, 120 bp, synthetic construct; identical to SEQ ID NO: 14535
  source 1..120: mol_type = other DNA

SEQ ID NO: 95256 - DNA, 120 bp, synthetic construct; identical to SEQ ID NO: 14536
  source 1..120: mol_type = other DNA

SEQ ID NO: 95257 - DNA, 120 bp, synthetic construct; identical to SEQ ID NO: 14537
  source 1..120: mol_type = other DNA

SEQ ID NO: 95258 - DNA, 120 bp, synthetic construct
  source 1..120: mol_type = other DNA
agcacctgttgtttcctgactttttaatgattgccattctaactggtgtgagatgatatctcatagtggttttgatttgcatttctctgatggccattgatgatgagcatttcttcatgt

SEQ ID NO: 95259 - DNA, 120 bp, synthetic construct; identical to SEQ ID NO: 93305
  source 1..120: mol_type = other DNA

SEQ ID NO: 95260 - DNA, 120 bp, synthetic construct
  source 1..120: mol_type = other DNA
gactctttttggttggtaaactattgattattgccacaatttcagagcctgatattggtctcttcagaaattcaacttcttcctggtttagtcttgggagagtgtatgtgtcgaggaatg

SEQ ID NO: 95261 - DNA, 120 bp, synthetic construct
  source 1..120: mol_type = other DNA
ctttctgtctcgttgatctgtctaatgttgacagtggggtgttaaagtctcccattattaatgtgtgggagtctaagtctctttgttggtcactcaggacttgctttatgaatctgggtg

SEQ ID NO: 95262 - DNA, 120 bp, synthetic construct
  source 1..120: mol_type = other DNA
agtgttttccaacttggttccattctccacatcactttcaggtacaccaatcagatgtagatttggtcttttcacatagtcccatatttcttggaggctttgctcatttctttttattct

SEQ ID NO: 95263 - DNA, 120 bp, synthetic construct
  source 1..120: mol_type = other DNA
ccggcttaagaaacggcgcaccacgagactatatcccacacctggctcagagggtcctacgcccacggaatctcgctgattgctagcacagcagtctgagatcaaactgcaaggcggcaa

SEQ ID NO: 95264 - DNA, 120 bp, synthetic construct; identical to SEQ ID NO: 14526
  source 1..120: mol_type = other DNA

SEQ ID NO: 95265 - DNA, 120 bp, synthetic construct; identical to SEQ ID NO: 14538
  source 1..120: mol_type = other DNA

SEQ ID NO: 95266 - DNA, 120 bp, synthetic construct; identical to SEQ ID NO: 14539
  source 1..120: mol_type = other DNA

SEQ ID NO: 95267 - DNA, 120 bp, synthetic construct
  source 1..120: mol_type = other DNA
gactgaaccactcacaattgcttcaaagagaataaaatacctaggaatccaacttacaagggatgtgaaggacctcttcaaggagaactacaaaccactgctcaatgaaataaaagagga

SEQ ID NO: 95268 - DNA, 120 bp, synthetic construct
  source 1..120: mol_type = other DNA
cacttctcaaaagaagacatttatgcagccaaaagaaacatgaaaaaatgctcatcatcactggccatcagagaaatgcaaatcaaaaccacaatgagataccatctcacaccagttaga

SEQ ID NO: 95269 - DNA, 120 bp, synthetic construct; identical to SEQ ID NO: 14540
  source 1..120: mol_type = other DNA

SEQ ID NO: 95270 - DNA, 120 bp, synthetic construct
  source 1..120: mol_type = other DNA
ttcctaattgaataccctttatttccttctcctgcctaattgccctggctagaacttccaacactatgttgaataggagtggtgagagagggcatccctgtcttgtgccagttttcaaag

SEQ ID NO: 95271 - DNA, 120 bp, synthetic construct
  source 1..120: mol_type = other DNA
gtgctgggaaaactggctagccatatgcagaaagcagaaactggatcccttccttacaccttatacaaaaattaattcaagatggattaaagacttaaatgttagacctaaaaccataaa

SEQ ID NO: 95272 - DNA, 120 bp, synthetic construct
  source 1..120: mol_type = other DNA
atcgcaaggacaaaaaacaaaacaccgcatgttctcactcatagatgggaattgaacaatgaaaacacatggacacaggaaggggaacatcacactctggggactgttgtggggtggggg

SEQ ID NO: 95273 - DNA, 120 bp, synthetic construct
  source 1..120: mol_type = other DNA
acacacaaacaaaaagacagcagtaacctctgcagacttaagtatccctgtctgacagctttgaagagagcagtggttctcccagcacgcagctggagatctgagaacgggcagactgcc

SEQ ID NO: 95274 - DNA, 120 bp, synthetic construct
  source 1..120: mol_type = other DNA
gaaaagaccaaatctacgtctgattggtgtacctgaaagtgaccgggagaatggaaccaagttggaaaacactctgcaggatattatccaggagaacttccccaatctagcaaggcaggc

SEQ ID NO: 95275 - DNA, 120 bp, synthetic construct
  source 1..120: mol_type = other DNA
gaagagctaactatcctaaatatatatgcacccaatacaggagcacccagattcataaagcaagtcctgagtgacctacaaagagacttagactcccacacattaataatgggagatttt

SEQ ID NO: 95276 - DNA, 120 bp, synthetic construct
  source 1..120: mol_type = other DNA
tgaaacatacactctcccaagactaaaccaggaagaaattgagtctctgaatagacgaataagaggagctgaaattgtggcaataatcaatagcttgccaaccaaaaagagtccaggacc

SEQ ID NO: 95277 - DNA, 120 bp, synthetic construct
  source 1..120: mol_type = other DNA
ggattcctaagtattttattctctttgaagcaattgtgactgggagttcactcatgatttggctctctgtttgtctgttgttggtgtataagaatgcttgtgatttttgtacattgattt

SEQ ID NO: 95278 - DNA, 120 bp, synthetic construct
  source 1..120: mol_type = other DNA
aaccaaagccaaaattgacaaatgggatctaattaaactaaagagcttctgcacagcagaagaaactaccatcagagtgaacaggcaacctacaaaatgggagaaaattttcacaaccta

SEQ ID NO: 95279 - DNA, 120 bp, synthetic construct; identical to SEQ ID NO: 14541
  source 1..120: mol_type = other DNA

SEQ ID NO: 95280 - DNA, 120 bp, synthetic construct
  source 1..120: mol_type = other DNA
ggcctatttcagctttcaacatgccttcctcactaagctcaatcatttctagctttaaagtgagaggtgggtgactctttctttcacttgaacacttagaggccactgcagtgttattaa

SEQ ID NO: 95281 - DNA, 120 bp, synthetic construct; identical to SEQ ID NO: 14515
  source 1..120: mol_type = other DNA

SEQ ID NO: 95282 - DNA, 120 bp, synthetic construct; identical to SEQ ID NO: 14516
  source 1..120: mol_type = other DNA

SEQ ID NO: 95283 - DNA, 120 bp, synthetic construct; identical to SEQ ID NO: 14517
  source 1..120: mol_type = other DNA

SEQ ID NO: 95284 - DNA, 120 bp, synthetic construct; identical to SEQ ID NO: 14518
  source 1..120: mol_type = other DNA

SEQ ID NO: 95285 - DNA, 120 bp, synthetic construct; identical to SEQ ID NO: 14519
  source 1..120: mol_type = other DNA

SEQ ID NO: 95286 - DNA, 120 bp, synthetic construct; identical to SEQ ID NO: 14520
  source 1..120: mol_type = other DNA

SEQ ID NO: 95287 - DNA, 120 bp, synthetic construct; identical to SEQ ID NO: 14521
  source 1..120: mol_type = other DNA

SEQ ID NO: 95288 - DNA, 120 bp, synthetic construct; identical to SEQ ID NO: 14522
  source 1..120: mol_type = other DNA

SEQ ID NO: 95289 - DNA, 120 bp, synthetic construct; identical to SEQ ID NO: 14523
  source 1..120: mol_type = other DNA

SEQ ID NO: 95290 - DNA, 120 bp, synthetic construct
  source 1..120: mol_type = other DNA
cagtgaataaatactgtaattagtgttcattgataacataattttggccaagtgcagtggctcacacctgtaatgccagcactttgagaggccaaggtaggttcatcacttgagcccaag

SEQ ID NO: 95291 - DNA, 120 bp, synthetic construct; identical to SEQ ID NO: 27293
  source 1..120: mol_type = other DNA

SEQ ID NO: 95292 - DNA, 120 bp, synthetic construct; identical to SEQ ID NO: 31470
  source 1..120: mol_type = other DNA

SEQ ID NO: 95293 - DNA, 120 bp, synthetic construct; identical to SEQ ID NO: 31471
  source 1..120: mol_type = other DNA

SEQ ID NO: 95294 - DNA, 120 bp, synthetic construct; identical to SEQ ID NO: 31472
  source 1..120: mol_type = other DNA

SEQ ID NO: 95295 - DNA, 120 bp, synthetic construct
  source 1..120: mol_type = other DNA
tagctttatccatcattttagaaaacaggtttctctgacagaaaacaaacagatggcaactccatcatcctaaaactggctgtgacggggctctaaaattaagtgttcatggggctccca

SEQ ID NO: 95296 - DNA, 120 bp, synthetic construct
  source 1..120: mol_type = other DNA
ctatagatgttggttacctatcagggagcaacaggtgatgctaaggatcactttgtaaaaaccaggaatcacatccctgtaactgacaggaaactgactatattcatcagggttctccag

SEQ ID NO: 95297 - DNA, 120 bp, synthetic construct
  source 1..120: mol_type = other DNA
cagggatcgacgaagagctgagggaggtatttttctaggaagagaaagtgactaacagaaatcaagacaaagggggacaatcagatttttcagatgacagaaagcaggtaaactctagag

SEQ ID NO: 95298 - DNA, 120 bp, synthetic construct
  source 1..120: mol_type = other DNA
aaaaaaaaaggatacaactgttaagcttatttaattatacctctcactgtacaaataaggaaactaggccaggcgtggtggctcacttctgtaatcccagcactttgggaggacaaggcc

SEQ ID NO: 95299 - DNA, 120 bp, synthetic construct
  source 1..120: mol_type = other DNA
acccaaagtgcttggattacaggcatgagccaccgcgcctggctggcatgaattttttcttctgtccctagttcatcttcaggtcactgtctgattttattagttctcaaatttaaatca

SEQ ID NO: 95300 - DNA, 120 bp, synthetic construct
  source 1..120: mol_type = other DNA
tttgccgagcgcagagctgcagccgccgagccggacgtgtccgcgaagatggcgggccgggtgagtgccggtctgggagcccaggcttgaggcaggggcgccgggctcgcgggcactctg

SEQ ID NO: 95301 - DNA, 120 bp, synthetic construct
  source 1..120: mol_type = other DNA
taatcaagcttctctatcttaaacccttcccccacccccacagctgtcaccttttcccgtcccagtttacagcaggaaatttgatagagttgtctatatttattgtcttccatttgctta

SEQ ID NO: 95302 - DNA, 120 bp, synthetic construct; identical to SEQ ID NO: 935
  source 1..120: mol_type = other DNA

SEQ ID NO: 95303 - DNA, 120 bp, synthetic construct; identical to SEQ ID NO: 936
  source 1..120: mol_type = other DNA

SEQ ID NO: 95304 - DNA, 120 bp, synthetic construct
  source 1..120: mol_type = other DNA
agtaaatcacattcttggctcatactgagcttgtagtcagtgaaaactcatgttcttttaaaatcagctccctagctccattctaggtttagagcagttttattgaacctaaatcaagac

SEQ ID NO: 95305 - DNA, 120 bp, synthetic construct
  source 1..120: mol_type = other DNA
atgtattaagtatagtcatctactcagctatcaaacattgaatttattcctcctatcactggatcttttttttttttttttgagacggagtcttgctccgtcacccaggctggagtgcag

SEQ ID NO: 95306 - DNA, 120 bp, synthetic construct
  source 1..120: mol_type = other DNA
gttgtactagtttacattcccaccgacagtgtatgtgagagttcccttttctctgcatccttactaacatctgttactttttgtctttttaataatagccattctgactggggtaagatg

SEQ ID NO: 95307 - DNA, 120 bp, synthetic construct; identical to SEQ ID NO: 937
  source 1..120: mol_type = other DNA

SEQ ID NO: 95308 - DNA, 120 bp, synthetic construct; identical to SEQ ID NO: 938
  source 1..120: mol_type = other DNA

SEQ ID NO: 95309 - DNA, 120 bp, synthetic construct; identical to SEQ ID NO: 939
  source 1..120: mol_type = other DNA

SEQ ID NO: 95310 - DNA, 120 bp, synthetic construct
  source 1..120: mol_type = other DNA
ttttttttttttttagttttatttaaaaattttttttagaggctgagtctcacttggtggcctgggctggagtgcagtggcgcagtcatagctcactgcagcttcacactcctgagctcg

SEQ ID NO: 95311 - DNA, 120 bp, synthetic construct
  source 1..120: mol_type = other DNA
tgacacatttctcagaatgtatccctattgttaagcaacacatgagtgtgtgtctccatgcatatatgtgtaagagttagcatgtgtgtccagaggtagaattgctgggcgataagtcat

SEQ ID NO: 95312 - DNA, 120 bp, synthetic construct; identical to SEQ ID NO: 940
  source 1..120: mol_type = other DNA

SEQ ID NO: 95313 - DNA, 120 bp, synthetic construct; identical to SEQ ID NO: 941
  source 1..120: mol_type = other DNA

SEQ ID NO: 95314 - DNA, 120 bp, synthetic construct
  source 1..120: mol_type = other DNA
caaggttatcgtcttcttcccattaataccttcatctatatccaattttcaaacttttaagaaagcatggctattttgctgcagtatggtgaattaggtactctgactgaccttcccaga

SEQ ID NO: 95315 - DNA, 120 bp, synthetic construct; identical to SEQ ID NO: 942
  source 1..120: mol_type = other DNA

SEQ ID NO: 95316 - DNA, 120 bp, synthetic construct; identical to SEQ ID NO: 943
  source 1..120: mol_type = other DNA

SEQ ID NO: 95317 - DNA, 120 bp, synthetic construct
  source 1..120: mol_type = other DNA
aaggtgaggcaggagaatcacttgaacccaggaggcggagattgccgtaagccaagatcatgccaccgtactccagcctgggcaacagggtgagactctgtttcaaaaataaataaataa

SEQ ID NO: 95318 - DNA, 120 bp, synthetic construct; identical to SEQ ID NO: 944
  source 1..120: mol_type = other DNA

SEQ ID NO: 95319 - DNA, 120 bp, synthetic construct
  source 1..120: mol_type = other DNA
ctaatttttgtattttagtagagatggggttttgccatgttggccaggctagtcttgaactcctgatctcaagcgatccacctgccttggcctcccaaagtgctgggattacaggcatga

SEQ ID NO: 95320 - DNA, 120 bp, synthetic construct
  source 1..120: mol_type = other DNA
agtatcaacaatttagataagtatagtgtggccttacggatgtaagtccgtaagatcatgcagcattgaagatgtgcagtttactagatcttctaatattctcgggtgtctcactgtttc

SEQ ID NO: 95321 - DNA, 120 bp, synthetic construct
  source 1..120: mol_type = other DNA
acaggaaaactcacagctaacatcatacttaatggttgaagactgaaagctttcccccttaagatcagaacaagacaaggatgctcttgccactcctattcaacactctattggtggttc

SEQ ID NO: 95322 - DNA, 120 bp, synthetic construct
  source 1..120: mol_type = other DNA
aaacacaagcagtgaaagaaaaaggtagataaactggactttgttaaagttaaaaactttcatgcatcaaaggacactgtagaatgaagacaactcacagaatgggggaaaatatttgca

SEQ ID NO: 95323 - DNA, 120 bp, synthetic construct; identical to SEQ ID NO: 945
  source 1..120: mol_type = other DNA

SEQ ID NO: 95324 - DNA, 120 bp, synthetic construct; identical to SEQ ID NO: 946
  source 1..120: mol_type = other DNA

SEQ ID NO: 95325 - DNA, 120 bp, synthetic construct
  source 1..120: mol_type = other DNA
aattgtttgaacctgggaggtggaggttgcagtgagccaagatcgagccactgcactaactccagcatgggtgacagagtgagactccatctcaaaaaagagaaaacaaaaaacaaaaaa

SEQ ID NO: 95326 - DNA, 120 bp, synthetic construct; identical to SEQ ID NO: 947
  source 1..120: mol_type = other DNA

SEQ ID NO: 95327 - DNA, 120 bp, synthetic construct; identical to SEQ ID NO: 948
  source 1..120: mol_type = other DNA

SEQ ID NO: 95328 - DNA, 120 bp, synthetic construct
  source 1..120: mol_type = other DNA
ctcagaactgcatattaataaaaagctgaatcaaacagtgtccaacaagggtggctgttccagctggtcatctacaatctcagctcactgcaacctccgcctcctgggttcaagcaattc

SEQ ID NO: 95329 - DNA, 120 bp, synthetic construct; identical to SEQ ID NO: 949
  source 1..120: mol_type = other DNA

SEQ ID NO: 95330 - DNA, 120 bp, synthetic construct; identical to SEQ ID NO: 950
  source 1..120: mol_type = other DNA

SEQ ID NO: 95331 - DNA, 120 bp, synthetic construct
  source 1..120: mol_type = other DNA
aaatcttttaaatacatttcttgtggtaactagtgaatctgtgtggatttaaaaacaaaaaaaagattatgaggccaaggcaggtggatcacttgaggccaggagtttgagaccagcctg

SEQ ID NO: 95332 - DNA, 120 bp, synthetic construct; identical to SEQ ID NO: 951
  source 1..120: mol_type = other DNA

SEQ ID NO: 95333 - DNA, 120 bp, synthetic construct
  source 1..120: mol_type = other DNA
gcatgagaatcgcttgaaccagggaggcagagattgcagtgagctgagatccaccattgcactccagcctgggcaacagagagagactgtgtcaaaaaacaaaacaacacataaataaga

SEQ ID NO: 95334 - DNA, 120 bp, synthetic construct; identical to SEQ ID NO: 952
  source 1..120: mol_type = other DNA

SEQ ID NO: 95335 - DNA, 120 bp, synthetic construct; identical to SEQ ID NO: 953
  source 1..120: mol_type = other DNA

SEQ ID NO: 95336 - DNA, 120 bp, synthetic construct; identical to SEQ ID NO: 954
  source 1..120: mol_type = other DNA

SEQ ID NO: 95337 - DNA, 120 bp, synthetic construct; identical to SEQ ID NO: 955
  source 1..120: mol_type = other DNA

SEQ ID NO: 95338 - DNA, 120 bp, synthetic construct; identical to SEQ ID NO: 956
  source 1..120: mol_type = other DNA

SEQ ID NO: 95339 - DNA, 120 bp, synthetic construct; identical to SEQ ID NO: 957
  source 1..120: mol_type = other DNA

SEQ ID NO: 95340 - DNA, 120 bp, synthetic construct; identical to SEQ ID NO: 958
  source 1..120: mol_type = other DNA

SEQ ID NO: 95341 - DNA, 120 bp, synthetic construct
  source 1..120: mol_type = other DNA
aaataaagtcacatccacaggtgttgggggctaagacttcaacatactttggagggggagagcacagttcaaccataatagcataccatgttttgatctttgagtgtattcctaaaattc

SEQ ID NO: 95342 - DNA, 120 bp, synthetic construct
  source 1..120: mol_type = other DNA
acaacttgtaattttttctaagttagatggaatttaaacattggggttattttattttattttatttttgagatggagtctcgctctgttgccaggctggagtgcagtggcgcaatctcg

SEQ ID NO: 95343 - DNA, 120 bp, synthetic construct; identical to SEQ ID NO: 959
  source 1..120: mol_type = other DNA

SEQ ID NO: 95344 - DNA, 120 bp, synthetic construct
  source 1..120: mol_type = other DNA
ccacctcagcctcccaaagtactgggattacaggtgtgagccaccacgcctggccaggccgtccatctttaataaatatacataaagttggtttttgtttttttgttttttttttgtttt

SEQ ID NO: 95345 - DNA, 120 bp, synthetic construct; identical to SEQ ID NO: 960
  source 1..120: mol_type = other DNA

SEQ ID NO: 95346 - DNA, 120 bp, synthetic construct; identical to SEQ ID NO: 961
  source 1..120: mol_type = other DNA

SEQ ID NO: 95347 - DNA, 120 bp, synthetic construct
  source 1..120: mol_type = other DNA
aaaatcctcttgaacttttctgggtagcctactctactctttcctaatagtaccactacagtatacagcactgtaaaattttttgctttaaaagtttgtttataaactggcatttataag

SEQ ID NO: 95348 - DNA, 120 bp, synthetic construct
  source 1..120: mol_type = other DNA
gatcctgataagagtgggatgagggataacaacagagagactgccgttcaatatttctttctttctttttttttgagacggagtctggctctgttgccctaggctggagtgcagtggcgt

SEQ ID NO: 95349 - DNA, 120 bp, synthetic construct
  source 1..120: mol_type = other DNA
tatatcataggacatttgttttgcctctggaatgtctgtctctttcactaatatagttctgtagaaaatgtagctcttggccagacatggtggctcatgcctgtaatcccaacactttgg

SEQ ID NO: 95350 - DNA, 120 bp, synthetic construct
  source 1..120: mol_type = other DNA
aaagtgctgggattacaggtgtgagccatcacgcctggccaaatgaggaatttaagatctaaagaaggtaaatggtatgcccatggctacacagctaagggacatagttgagataagaat

SEQ ID NO: 95351 - DNA, 120 bp, synthetic construct
  source 1..120: mol_type = other DNA
aacactgatcgtaagtgctaattcccttttcttcattggctgtgagtagtttgtttgaggagcagattggagaggagtatataagataaactggttttctgcatttgaaaaacattggtg

SEQ ID NO: 95352 - DNA, 120 bp, synthetic construct
  source 1..120: mol_type = other DNA
tcctgttggtcagtttgctgatgaaaacgtttaaaaccttcatctggatcaactttgtccaatagaaatagagtgtgagccacatgtgtaatttttaatttcctagaaattgcactaaaa

SEQ ID NO: 95353 - DNA, 120 bp, synthetic construct
  source 1..120: mol_type = other DNA
tgcttagcatgtttcaaacatcttaaatatacacctataacatgatttttaatgcctgtatgtcattttatgaaggtaggatgtattttcctgttattgatctagtacatttatgaagtg

SEQ ID NO: 95354 - DNA, 120 bp, synthetic construct
  source 1..120: mol_type = other DNA
aacttgcgttaggagacttcagtgactgcgagatttcagttgcatttctgccagctagtgttgtcttcatcagatatggcatttcttctgatcaaccgagttagttaatttagttagatt

SEQ ID NO: 95355 - DNA, 120 bp, synthetic construct
  source 1..120: mol_type = other DNA
tctatagggcatatttagaaagttcacctgactctaaagatcactatgggtcagatgtaccctgctgaataataactatctattaggctgtgtgcattgttctgacattagctgccgttc

SEQ ID NO: 95356 - DNA, 120 bp, synthetic construct
  source 1..120: mol_type = other DNA
gaagataacagttattcagatactagtttgctatttgtgcattatctagatcctgcacttgaagctacgcgcaacgtcagtatgcgttgggtagataatgcgtaaaggagttggtctcac

SEQ ID NO: 95357 - DNA, 120 bp, synthetic construct
  source 1..120: mol_type = other DNA
atgtcaggtgggaacaacatggatttttttcccccactctttgttaactaaatagacagatctatatggtttggggattcagctggacactgagtatgactggttaaatcagttctaatt

SEQ ID NO: 95358 - DNA, 120 bp, synthetic construct
  source 1..120: mol_type = other DNA
ttgagttttccccttgtctgaagcagttgagctcacccaaacccaagtggggcagcccttccttggaaggatatgagagcaacgagcgaagaaaactaaacctataccttgcacttagta

SEQ ID NO: 95359 - DNA, 120 bp, synthetic construct
  source 1..120: mol_type = other DNA
gaaagccacttgttatggtcttgtgcccccattctttgaaactgacactgtgttctttttggtctcctttccccagtgtctccctctgtaagcccattttcaatcgtatttttaaggttt

SEQ ID NO: 95360 - DNA, 120 bp, synthetic construct
  source 1..120: mol_type = other DNA
tcctggcaactacagttgagttacttacagatcaacagttgggtcactacaaagttgagatctaagtgttaacctgagtgcccaccagtaagaaaccggttagaggcaatcttaaaatga

SEQ ID NO: 95361 - DNA, 120 bp, synthetic construct
  source 1..120: mol_type = other DNA
attattgtgtttattaatcctcacaacaaccttcagaagtagacactgtattgtctccatattatggagcaggaatctctgtctcaaaaaggtgaagtaatgggtccaagacacacagct

SEQ ID NO: 95362 - DNA, 120 bp, synthetic construct
  source 1..120: mol_type = other DNA
cagactcagaaccttccagacagactcaggtgcttctcctgtgtttccctgcaccttgtatatacttagaatccagctgtgttcttaatgtaattattcatttgcattacactcctaagg

SEQ ID NO: 95363 - DNA, 120 bp, synthetic construct
  source 1..120: mol_type = other DNA
atcagtctgcacgtgtttaggaaacacactgttgactacttttgcttgaaataccctctttacttggcttttctcactccaagcatttctggttttccttttacctctctggctgtctct

SEQ ID NO: 95364 - DNA, 120 bp, synthetic construct
  source 1..120: mol_type = other DNA
gcccctcccccatactctgggttccagccagcctgtgctattttcagttcctctaatttgccatgctactttctcttacctctatatcctagggttatttttttttgctttttttttttc

SEQ ID NO: 95365 - DNA, 120 bp, synthetic construct
  source 1..120: mol_type = other DNA
cctaagtatttatacaataatatataatcaatccattcattcatttattgagacagggtcttgctctgttgcccaggctggagtgcagtggtgcaatcatactccgttgcagcctcgcac

SEQ ID NO: 95366 - DNA, 120 bp, synthetic construct
  source 1..120: mol_type = other DNA
tatcttaaattttgttgctgttgaaaatagttaacacctgagattttcctcctatgctgttttataattacccattttgaacagtgtttgttgataaggtagtcaaggggacacttcgaa

SEQ ID NO: 95367 - DNA, 120 bp, synthetic construct
  source 1..120: mol_type = other DNA
ccacacgttagatatatcccatcaaatttcaaatatacacaggagaattatccacattgaaggttattagtgcattccagggacatttccatgttgattcacaactacccctttacctta

SEQ ID NO: 95368 - DNA, 120 bp, synthetic construct
  source 1..120: mol_type = other DNA
gtttgagaaatgctgatcttacctgtgtcattcttattttgtagatgaggacattgggacctcagaagaataaggcaacttatttaggctaaagtcactgcttgtctactggggctggaa

SEQ ID NO: 95369 - DNA, 120 bp, synthetic construct
  source 1..120: mol_type = other DNA
aaaggattcacaagtgtaaatgtttttgacatgcactgccaaatttagacttcctttttgaaaagtcaaatgttaaggagatcaaagcaatcactaagcaggtactctggaagagaaata

SEQ ID NO: 95370 - DNA, 120 bp, synthetic construct
  source 1..120: mol_type = other DNA
cagaatttttaatgttaaaaaaaatacagatttccaggctctcaagtacactgaatgtgagtgtcaggcacaaagccgagacacagcgctgtcaatagctgagctctccttggggtttta

SEQ ID NO: 95371 - DNA, 120 bp, synthetic construct
  source 1..120: mol_type = other DNA
atatctcttcccttacctttctttctgccccttccttagcaatccagtacgtactgatgtatactgctcataggtggtttaacattgccatttccaagatgcttcttttctaatgaaatt

SEQ ID NO: 95372 - DNA, 120 bp, synthetic construct
  source 1..120: mol_type = other DNA
tcatctagacaacaagatgtaaaattaggacttgcttgttcattgtacagataaccctcaatgggttatgtctcagcaaacccatcgtaagttgaaaatatcctaagttgagagtgcatt

SEQ ID NO: 95373 - DNA, 120 bp, synthetic construct
  source 1..120: mol_type = other DNA
ttattattattattattattatttttgagatggagtctcactctaatgcccaggctggagtgcagtggtatgatcttggctcaccgcaacctctgcccccctggttcaagagattctcct

SEQ ID NO: 95374 - DNA, 120 bp, synthetic construct; identical to SEQ ID NO: 962
  source 1..120: mol_type = other DNA

SEQ ID NO: 95375 - DNA, 120 bp, synthetic construct
  source 1..120: mol_type = other DNA
ttgacagctgctactctaagtactgaaggattgagcccaaagatatgatcagaattaggtggcattaataaaggaggtgatttctggggacagaagaacatgaactgttagagtaggtag

SEQ ID NO: 95376 - DNA, 120 bp, synthetic construct
  source 1..120: mol_type = other DNA
agtgccactgccctccaaagcctgggcaacagagtgagaccctgtctcaaaaaaaaaaaaggtttttgaaacaaaaggccctcctatataatgagtcaatgaaagttatgctcttagagt

SEQ ID NO: 95377 - DNA, 120 bp, synthetic construct
  source 1..120: mol_type = other DNA
cctcaacgcagcttgcctctgataacatccagaaaaaatgaagaaaatatactgctttgtaaaatagaagagcttaacaagtacaaatttgtcacttttttcgggtgtttcgaaagagtg

SEQ ID NO: 95378 - DNA, 120 bp, synthetic construct
  source 1..120: mol_type = other DNA
cttattaagtatagtcatcctaccctgctatcaaacattgaatttattcctcctatcttactgtacgtttgtacctttagcctacttctccttagcctcccttcatccccagtcaccctc

SEQ ID NO: 95379 - DNA, 120 bp, synthetic construct
  source 1..120: mol_type = other DNA
ttttgctagttgtgaaatctaaatttgagaaccactgactagaaaagtgggactcttagtaatttttaaagttctttagagatttttcacctgatttattttctgatttcaacctccttg

SEQ ID NO: 95380 - DNA, 120 bp, synthetic construct
  source 1..120: mol_type = other DNA
attttttagaaaatgattaacgggagcaattagtaaaacaagcagtaaaatacccggatacaggaaattgagccaggcttgctggtatgtgcttgtcccagctactcgggaggctgagtt

SEQ ID NO: 95381 - DNA, 120 bp, synthetic construct
  source 1..120: mol_type = other DNA
ctagtgccctttttccaggcctcatcctctatcactgcagcatttatctctgttgtcacattcttctgcttaaaacttttcacagcttttcacgtacccagggcaggcattcaaaaatat

SEQ ID NO: 95382 - DNA, 120 bp, synthetic construct
  source 1..120: mol_type = other DNA
tccactctgccaacacagttagcttttaaatacatatctcctggtgtgccttccgtgattgtcacttacacctaagggtgattagactaatcacccaaaaatgtggggttttaatcacct

SEQ ID NO: 95383 - DNA, 120 bp, synthetic construct
  source 1..120: mol_type = other DNA
aaatttagttcaaaacacattaatttgagcattttctgtgtacagaagcatagttgcaaagttaagattcttgtgtttatgttgttttgttaaattcggaaagtctcagtcttgcaaatg

SEQ ID NO: 95384 - DNA, 120 bp, synthetic construct
  source 1..120: mol_type = other DNA
aagggctggtgctttgtaggaactcagaaaatcttcattttcttctttctggatgtcctctccctatgaatgtttcaccaccaccacctgcctcagctacagtttatacatatgaatagt

SEQ ID NO: 95385 - DNA, 120 bp, synthetic construct
  source 1..120: mol_type = other DNA
ccattgtccaagtagtgtaaactgtacccaatattagttttttattcctcactcccctctcactttccccacttcttaattttctgccatcacaatgtgttgcccaggctggtttcatgc

SEQ ID NO: 95386 - DNA, 120 bp, synthetic construct
  source 1..120: mol_type = other DNA
gtggtcaatgggccagaaatccttaacaaatatgtgggagaatcagaggctaacattcgcaaactttttgctgatgctgaagaggagcaaaggagggtaatgtgaacataagtgtgattt

SEQ ID NO: 95387 - DNA, 120 bp, synthetic construct
  source 1..120: mol_type = other DNA
ccaggttgctgacagcagatcttgggacttgtcagcctctgaaattgtagatttatcccaaggaattggctaaaacgattatggaggctgacatatatatgtgggtgtatatgcatacat

SEQ ID NO: 95388 - DNA, 120 bp, synthetic construct
  source 1..120: mol_type = other DNA
aatgtatgctacctatgtggcttgaaacccgaagctgagaaattagttaaaaaaattattcaggtgcagtggctcatgcctgtagtctcagctacttggaaggctgagatggaagggtca

SEQ ID NO: 95389 - DNA, 120 bp, synthetic construct
  source 1..120: mol_type = other DNA
atgtactgagactgaaggaagttgaacccagaaggaaacagtagagccaagaaacaatgatgagcaatgaaattggtgaaaatatagataaagtctgggagttctacttctagtagtggc

SEQ ID NO: 95390 - DNA, 120 bp, synthetic construct
  source 1..120: mol_type = other DNA
agagagagagagaataccgtttaaaggtctggtgcgtgtatttaaagttccagaaaggcaagagaaagaggatgaatcaaaatcaggatttgaagagaaaatggtttagaactttctaaa

SEQ ID NO: 95391 - DNA, 120 bp, synthetic construct
  source 1..120: mol_type = other DNA
tatattattggggaagatggtagggagtttgagaccagcctggtcaacatggtgtaaccccatctctactaaaaaaatacaaaaattagttgggcttggtggcgcacagctgtaatccca

SEQ ID NO: 95392 - DNA, 120 bp, synthetic construct; identical to SEQ ID NO: 963
  source 1..120: mol_type = other DNA

SEQ ID NO: 95393 - DNA, 120 bp, synthetic construct
  source 1..120: mol_type = other DNA
aggtcaaggctgcagtgagctgtgatagtgccactgcactcccgcttgggcaacagaatgagaccctgtctcaaaaaaataaaatgaataatagatttacatagatcgacatgaataaca

SEQ ID NO: 95394 - DNA, 120 bp, synthetic construct
  source 1..120: mol_type = other DNA
agtctgtgtacattgaaccatcagaaagctaaggcatcactatctcagccactagatgtggatggtctgtggttggttggcatcaccattgtttctgagtgtaaatttatatgcctgata

SEQ ID NO: 95395 - DNA, 120 bp, synthetic construct
  source 1..120: mol_type = other DNA
ctgtaatacctgccttcagcatctgtctacttttaaactatatcaagaaaatttggtgcacaaatgaaataaaagatgaaagaatactgtcatgtgtccttttagcaaaatgggatggcc

SEQ ID NO: 95396 - DNA, 120 bp, synthetic construct
  source 1..120: mol_type = other DNA
acatgaactcatctgtttttatggctgcatggtattccatgtgccacgttttctttatctagtctatcgttgatgggcatttgggttggttccaagtctttgctattgtgaacagtgcct

SEQ ID NO: 95397 - DNA, 120 bp, synthetic construct; identical to SEQ ID NO: 964
  source 1..120: mol_type = other DNA

SEQ ID NO: 95398 - DNA, 120 bp, synthetic construct
  source 1..120: mol_type = other DNA
ctgctgtatagaagtactttggcaaagttaaggttgtagttccaattcctcatttccaattttttctccagatggaaagatgaacagtttttggtattgaatttttttttaggaagcaag

SEQ ID NO: 95399 - DNA, 120 bp, synthetic construct
  source 1..120: mol_type = other DNA
tcccccttttcttcagattactataggtatattctggtattgtagcccagaatctgtcctgcttttatattcctccagcttaattatatgatccatcttcttacggtatctacggcttgc

SEQ ID NO: 95400 - DNA, 120 bp, synthetic construct
  source 1..120: mol_type = other DNA
tagaaaaatcccatcacaattgccaccaaaaaacatagctaggaatctttatgaaggaatgaaggaatttaaacaacaaaaactataaaactttattgggaagctgggcccaatggctca

SEQ ID NO: 95401 - DNA, 120 bp, synthetic construct
  source 1..120: mol_type = other DNA
gaggcggaggttgcatgagcagagatcataccactgcactccagcctgaacgacagagcgaaagtccatctcaaaaaaatatatatacttatatatatgcacacatgccataaagaaaag

SEQ ID NO: 95402 - DNA, 120 bp, synthetic construct
  source 1..120: mol_type = other DNA
tgaggctgcagtgagctttgatcgcaccactgcactccagcctgggcaacagagtgagatcctgtctctacaaagaatgaaaaaagaaaatgtttattgcagcaacatatataatactaa

SEQ ID NO: 95403 - DNA, 120 bp, synthetic construct
  source 1..120: mol_type = other DNA
aggattcctccagcctcagcctccagagtagctgggactataggcacgtaccactctgcccagctttatttttacactttatttgttttacaacttttgctctgttaacaaatctactac

SEQ ID NO: 95404 - DNA, 120 bp, synthetic construct
  source 1..120: mol_type = other DNA
caggcaggagccaccgcacccggccgtgttttttgtttataaaagaaaaaatttccagagtgcactttactccctgataggagactaaattacttaaatataaattttagaaggtacgtg

SEQ ID NO: 95405 - DNA, 120 bp, synthetic construct
  source 1..120: mol_type = other DNA
ggtttgcacatcatcatctttgatgaaattgatgccatctgcaagcagagagggagcatggctggtagcacgggagttcatgacactgttgtcaaccagttgctgtccaaaattgatggc

SEQ ID NO: 95406 - DNA, 120 bp, synthetic construct
  source 1..120: mol_type = other DNA
gactggaagttaaaatggagataggtaaggagatctgtcactgattgggtgtgtggtggggggagtggaggcatttagagttcattaacaggaacaatgtcatatggtgtagtatttttt

SEQ ID NO: 95407 - DNA, 120 bp, synthetic construct
  source 1..120: mol_type = other DNA
gacacgtaaagtgaaaattttgaagaagtgtttttaaatctttgtattgtattaaaagttgtaatatggccaggcatggtggctcatgcctgtaatcccagcactttgggaggctgaggc

SEQ ID NO: 95408 - DNA, 120 bp, synthetic construct
  source 1..120: mol_type = other DNA
gttctgtcttggcagtgccttttagttctcactgccactacccaccttctctttgattaaccttcctgtatcatatcattcaaccattcagacactttcagtgattccccatcatttaca

SEQ ID NO: 95409 - DNA, 120 bp, synthetic construct; identical to SEQ ID NO: 965
  source 1..120: mol_type = other DNA

SEQ ID NO: 95410 - DNA, 120 bp, synthetic construct
  source 1..120: mol_type = other DNA
caaaggtttggatggtgtgggaatattgtattgggtctttatataatggatccattcagggactatgtttttattcttccttgtttgtttgttttgagacggagtctcactctgtcgccc

SEQ ID NO: 95411 - DNA, 120 bp, synthetic construct
  source 1..120: mol_type = other DNA
tattatccttctgatttgcaagtaagcagtagtgcaaatagttcatgtttccatcacttttttccacatgatagaattatctgtaagcttcaggtgatatgtattgacttgcgatcattg

SEQ ID NO: 95412 - DNA, 120 bp, synthetic construct
  source 1..120: mol_type = other DNA
actttgaaaggtcagatttaaaaggttatgaaatttaagggtgaccacttgatatttgctagtgttgaaatacaagtttattagtttctgcaggtataagctgaaagatgctgcctcttc

SEQ ID NO: 95413 - DNA, 120 bp, synthetic construct
  source 1..120: mol_type = other DNA
tgtgacaccatttttctttttttcttttttttttttttggagatggagttttcttcttgttgcctaggctagagtgcaatggcgtgatctcggctcaccacaacctccgcctctcgagtt

SEQ ID NO: 95414 - DNA, 120 bp, synthetic construct; identical to SEQ ID NO: 966
  source 1..120: mol_type = other DNA

SEQ ID NO: 95415 - DNA, 120 bp, synthetic construct
  source 1..120: mol_type = other DNA
caaagccatgataccaatttaaaaattaggctgtgttgttttgtgctattggtagtgagcccagtcgctttaaaacacgtgttggtatcttaatcactcatctggtccaggcagctccaa

SEQ ID NO: 95416 - DNA, 120 bp, synthetic construct
  source 1..120: mol_type = other DNA
aggctgaggcaggagaatggcatgaacctgggaggtggagcttgcagcgtccgagatcgcgccactgcactccagcctgggggacagagtgagactccgtctcaaaaaaaaaaaaaaaaa

SEQ ID NO: 95417 - DNA, 120 bp, synthetic construct
  source 1..120: mol_type = other DNA
caattttggcagttctctatgtattctggatattaatcccttatcacatatatggtttgcaaatatttcagatttttttatgtgtgaaaatatgcttttaaatcctcaagagttacgttc

SEQ ID NO: 95418 - DNA, 120 bp, synthetic construct; identical to SEQ ID NO: 2409
  source 1..120: mol_type = other DNA

SEQ ID NO: 95419 - DNA, 120 bp, synthetic construct; identical to SEQ ID NO: 2410
  source 1..120: mol_type = other DNA

SEQ ID NO: 95420 - DNA, 120 bp, synthetic construct; identical to SEQ ID NO: 2411
  source 1..120: mol_type = other DNA

SEQ ID NO: 95421 - DNA, 120 bp, synthetic construct; identical to SEQ ID NO: 27206
  source 1..120: mol_type = other DNA

SEQ ID NO: 95422 - DNA, 120 bp, synthetic construct; identical to SEQ ID NO: 9339
  source 1..120: mol_type = other DNA

SEQ ID NO: 95423 - DNA, 120 bp, synthetic construct
  source 1..120: mol_type = other DNA
agtgaggagaccctccgcctggcaaccgccccatctgagaaatgaggagcccctccgcccggcaaccacaccgtctgggaagtgaggagcgtctccgcccggccagccgccccgtctggg

SEQ ID NO: 95424 - DNA, 120 bp, synthetic construct
  source 1..120: mol_type = other DNA
ccccaaccctgtgctctctgaaacatgtgctgtgtccactcagggttaaatggattaagggtggtgcaagatgtgctttgttaaacagatgcttgaaggcagcgtgctcgttgagagtca

SEQ ID NO: 95425 - DNA, 120 bp, synthetic construct; identical to SEQ ID NO: 31765
  source 1..120: mol_type = other DNA

SEQ ID NO: 95426 - DNA, 120 bp, synthetic construct
  source 1..120: mol_type = other DNA
agaatctagatttctttttttttttctttttatctttttttagaaacagagtctcgctctgtcgccaaggctgaaatacagtggcacgatcacggctcactgcagctttgacctcctggg

SEQ ID NO: 95427 - DNA, 120 bp, synthetic construct; identical to SEQ ID NO: 33208
  source 1..120: mol_type = other DNA

SEQ ID NO: 95428 - DNA, 120 bp, synthetic construct; identical to SEQ ID NO: 33209
  source 1..120: mol_type = other DNA

SEQ ID NO: 95429 - DNA, 120 bp, synthetic construct; identical to SEQ ID NO: 33210
  source 1..120: mol_type = other DNA

SEQ ID NO: 95430 - DNA, 120 bp, synthetic construct; identical to SEQ ID NO: 33211
  source 1..120: mol_type = other DNA

SEQ ID NO: 95431 - DNA, 120 bp, synthetic construct; identical to SEQ ID NO: 33212
  source 1..120: mol_type = other DNA

SEQ ID NO: 95432 - DNA, 120 bp, synthetic construct
  source 1..120: mol_type = other DNA
tatacctttttttgctttgtttttaagagatggggtctcactatattgcccaggctgaaatgcagtggcatttcatgatcatagtgcactatgcctcaaactgctgggctcaagtgatcc

SEQ ID NO: 95433 - DNA, 120 bp, synthetic construct
  source 1..120: mol_type = other DNA
ttactaaagataatgaccttcagtttcattcatgttgctgtaagtgacatgattccattctttctttttttttttgagatggggtttcactcttgttgcccaggctggagtgcaatggtg

SEQ ID NO: 95434 - DNA, 120 bp, synthetic construct; identical to SEQ ID NO: 26267
  source 1..120: mol_type = other DNA

SEQ ID NO: 95435 - DNA, 120 bp, synthetic construct; identical to SEQ ID NO: 26268
  source 1..120: mol_type = other DNA

SEQ ID NO: 95436 - DNA, 120 bp, synthetic construct
  source 1..120: mol_type = other DNA
gggggccgccaagccggcccttgcccccagctttggcagctctttcacttttggaaactctgcagccccggctgctgcacccacacctgcacctccgtccatgatcaagatcgtgcctgc

SEQ ID NO: 95437 - DNA, 120 bp, synthetic construct
  source 1..120: mol_type = other DNA
cccacctgtaatcccagctactcaggaggctgaggcacaagaatggtttgaacccaggagttggaggttgcagtgagccaagatcatgccactgtactccggcctgggtgacagagcaag

SEQ ID NO: 95438 - DNA, 120 bp, synthetic construct
  source 1..120: mol_type = other DNA
catggcagattaaagtgatctgaacttgagttacggtatttagggaaggaagagaaacagtgtggaagcagcgtgggagcacagggagcttcctcttgtccgggccggaggccaagccct

SEQ ID NO: 95439 - DNA, 120 bp, synthetic construct
  source 1..120: mol_type = other DNA
tctgaggagaggttgggcggggtggcaggctcctggccctctgaggccccgtgaagatcaggttcagcacaggaaagacatttcgggttaggagtacagcacagcccagggatgggagtt

SEQ ID NO: 95440 - DNA, 120 bp, synthetic construct
  source 1..120: mol_type = other DNA
ttcctgccaagcctgaatcaatgtttcatctccaaccctctgccagtttggcccctcagagcttggtggctcaagactgttagcctggcagagccaggggtgaagggagaagctcttgga

SEQ ID NO: 95441 - DNA, 120 bp, synthetic construct
  source 1..120: mol_type = other DNA
ctccttctggccatgttatatgaaatgtaattcttattttataaataatgtgatgtaaatgtaactggtgccccctccccgatgtgactgagggtgagtgagtggtggtggggctgctcc

SEQ ID NO: 95442 - DNA, 120 bp, synthetic construct; identical to SEQ ID NO: 10107
  source 1..120: mol_type = other DNA

SEQ ID NO: 95443 - DNA, 120 bp, synthetic construct; identical to SEQ ID NO: 10108
  source 1..120: mol_type = other DNA

SEQ ID NO: 95444 - DNA, 120 bp, synthetic construct; identical to SEQ ID NO: 10109
  source 1..120: mol_type = other DNA

SEQ ID NO: 95445 - DNA, 120 bp, synthetic construct
  source 1..120: mol_type = other DNA
ccatcagactaacagcaggtctcttggcagaaactctacaagccagaagagagtgggggcaaatattcaacattcttaaagaaaagaattttcaacccagaatttcatatccacccaaac

SEQ ID NO: 95446 - DNA, 120 bp, synthetic construct
  source 1..120: mol_type = other DNA
tcagctctgcaccaagcggacctaatagacatctacagaactctccaccccaaatcaacagaatatacatttttttcagcaccacaccacagctattccaaaattgaccacatacttgga

SEQ ID NO: 95447 - DNA, 120 bp, synthetic construct
  source 1..120: mol_type = other DNA
aaaaatcctcaataaaatactggcaaaccgaatccagcagcacatcaaaaagcttatccaccatgatcaagtgggcttcatccctgggatgcaaggctggttcattatacccaaatcaat

SEQ ID NO: 95448 - DNA, 120 bp, synthetic construct
  source 1..120: mol_type = other DNA
gcccacatcaccaagtcaatcctaagcgaaaagaacaaagctggaggcatcacactacctgacttcaaactatactacaaggctacagtaaccaaaacagcatggtactggtaccaaaac

SEQ ID NO: 95449 - DNA, 120 bp, synthetic construct
  source 1..120: mol_type = other DNA
tataaatcatgctgctataaagacacgtgcacccgtatgtttattccggcattattcacaatagcaaagacttggaaccaacccaaatgtccaacaatgatagactggattaagaaaatg

SEQ ID NO: 95450 - DNA, 120 bp, synthetic construct; identical to SEQ ID NO: 25391
  source 1..120: mol_type = other DNA

SEQ ID NO: 95451 - DNA, 120 bp, synthetic construct
  source 1..120: mol_type = other DNA
gaaagatcttgtaattattttatctttctttttttttttttttagacagagtctcactctgtcacccaggctggagtgcaatggcacaatctaggctcactgcaacctctgccacccagg

SEQ ID NO: 95452 - DNA, 120 bp, synthetic construct; identical to SEQ ID NO: 25392
  source 1..120: mol_type = other DNA

SEQ ID NO: 95453 - DNA, 120 bp, synthetic construct
  source 1..120: mol_type = other DNA
ttgtgaaaattttctcccattttgtaggttgcctgttcactctgatggtattttcttttgctgtgcagaagctctttagtttaattagatcccatttgtcaattttggcttttgttgcca

SEQ ID NO: 95454 - DNA, 120 bp, synthetic construct
  source 1..120: mol_type = other DNA
tggggtttcctagatatacaatcatgtcatctgcaaacagggacaatttgacttcctcttttcctaattgaataccctttatttccttctcctgcctaattgccctggccagaacttcca

SEQ ID NO: 95455 - DNA, 120 bp, synthetic construct
  source 1..120: mol_type = other DNA
ctggagtttttttggttggtaagctattgattattgccacagtttcagagcctgttattggtctattcagagattcaacttcttcctggtttagtcttgggagagtgtatgtgtcgagga

SEQ ID NO: 95456 - DNA, 120 bp, synthetic construct; identical to SEQ ID NO: 25393
  source 1..120: mol_type = other DNA

SEQ ID NO: 95457 - DNA, 120 bp, synthetic construct
  source 1..120: mol_type = other DNA
cccagtaatgggatggctgggtcaaatggtatttttagttctagatccctgaggaatcaccacactgacttccacaatggttgaactagtttacagtcccaccgacagtgttaaagtgtt

SEQ ID NO: 95458 - DNA, 120 bp, synthetic construct
  source 1..120: mol_type = other DNA
tgctaaaaaccaggcctggtaaacctataaatataggtgtattctttttctttctttcttttttttcgttttgagacagagtcttgctctgtcgcccaggctggagtgcagtggcgtgat

SEQ ID NO: 95459 - DNA, 120 bp, synthetic construct; identical to SEQ ID NO: 11121
  source 1..120: mol_type = other DNA

SEQ ID NO: 95460 - DNA, 120 bp, synthetic construct
  source 1..120: mol_type = other DNA
agattgcagcctctgcccggccaccaccccgtctgggaagtgaggagtgtctctgcctggccgcccatcgtctgggatgtgaggagcccctctgcctggctgcccagtctggaaagtgag

SEQ ID NO: 95461 - DNA, 120 bp, synthetic construct
  source 1..120: mol_type = other DNA
ccctgtccgggaggtgaggggcgcctctgcccggccgcccctactgggaagtgaggagcccctctgcccggccaccaccctgtctgggaggtgtgcccaacagctcattgagaacgggcc

SEQ ID NO: 95462 - DNA, 120 bp, synthetic construct; identical to SEQ ID NO: 11122
  source 1..120: mol_type = other DNA

SEQ ID NO: 95463 - DNA, 120 bp, synthetic construct; identical to SEQ ID NO: 28229
  source 1..120: mol_type = other DNA

SEQ ID NO: 95464 - DNA, 120 bp, synthetic construct
  source 1..120: mol_type = other DNA
gaagatctgtgggtgtagacaggagtcttcacttggatgcaagtgagacagttgactgcaacgctctagggagctgcttctgagccacccctcaaggcccagggttctggtgtgtcacta

SEQ ID NO: 95465 - DNA, 120 bp, synthetic construct; identical to SEQ ID NO: 21331
  source 1..120: mol_type = other DNA

SEQ ID NO: 95466 - DNA, 120 bp, synthetic construct
  source 1..120: mol_type = other DNA
aaggattgaatgaacatttctttaaagaaaatttagaatgtccaataagcacataaaaagatgcttgaggccaggtgtggtggcttaggcctgtaatctcagcacttggcaggccgaggc

SEQ ID NO: 95467 - DNA, 120 bp, synthetic construct; identical to SEQ ID NO: 12617
  source 1..120: mol_type = other DNA

SEQ ID NO: 95468 - DNA, 120 bp, synthetic construct; identical to SEQ ID NO: 12477
  source 1..120: mol_type = other DNA

SEQ ID NO: 95469 - DNA, 120 bp, synthetic construct
  source 1..120: mol_type = other DNA
gaagaaaccgaagtgggattcaaagcgaggccagcatgcttgatcattttgcttggaaggatggacttaccctgttaagctcctgatcttttctttaataaaaaatatgtcttggcctgg

SEQ ID NO: 95470 - DNA, 120 bp, synthetic construct; identical to SEQ ID NO: 12479
  source 1..120: mol_type = other DNA

SEQ ID NO: 95471 - DNA, 120 bp, synthetic construct
  source 1..120: mol_type = other DNA
aaaaatggcttcacagcaatgacgagattagtatttgattgactaactgggcattgcagcctagccaagttaacatgtcaaactgaccatcacaggttagtaaacacgtcacacagccaa

SEQ ID NO: 95472 - DNA, 120 bp, synthetic construct
  source 1..120: mol_type = other DNA
tcacactgaccatcacaggttagttaacacgtcacacagccaagttaacacgtcaaactgacgatcacaggttagttaacacgtcacacagccaaaacacatcaaactgaccatcacagg

SEQ ID NO: 95473 - DNA, 120 bp, synthetic construct
  source 1..120: mol_type = other DNA
gaccatcacaggttggttaacacgtcactcagccaagttaacacgtcacactgaccgtcacaggttagttaacacgtcacacagccaggttagcacgtcacactgagaatcacaggttag

SEQ ID NO: 95474 - DNA, 120 bp, synthetic construct
  source 1..120: mol_type = other DNA
aaccctcccttagagtgtaaagtagaagataaataatgtactggtgtgtgtttgtgtgtgtgtgtgtgtgtggtgtggtatgtggtatatgtggtgtgtggtgtggtatgtgattgtgta

SEQ ID NO: 95475 - DNA, 120 bp, synthetic construct; identical to SEQ ID NO: 12483
  source 1..120: mol_type = other DNA

SEQ ID NO: 95476 - DNA, 120 bp, synthetic construct; identical to SEQ ID NO: 12484
  source 1..120: mol_type = other DNA

SEQ ID NO: 95477 - DNA, 120 bp, synthetic construct
  source 1..120: mol_type = other DNA
gcacgcaccatgcgcgagccaaagcagggcgaggcattgcctcactcgggaagtgcaagggatcagggagttccctttcctaatcaaagaaaagggtgacggatggcacctggaaaatcg

SEQ ID NO: 95478 - DNA, 120 bp, synthetic construct
  source 1..120: mol_type = other DNA
aactacgtgaagaatgcagaagcctcaggagccgatgtgatcaactggaagaaagggtatcagcaatggaagatgaaatgaatgaaatgaagcgagaaggaaagtttagagaaaaaaaga

SEQ ID NO: 95479 - DNA, 120 bp, synthetic construct
  source 1..120: mol_type = other DNA
tctaccaagcaaatggaaaagaaaaaaaggcaggggttgcaatcctagtctctgataaaacagactttaaaccaacaaagatcaaaagagacaaagaaggccattacataatggtaaagg

SEQ ID NO: 95480 - DNA, 120 bp, synthetic construct
  source 1..120: mol_type = other DNA
aaattgatagaccgctagcaagactaataaagaaaaaaagaagaatcaaatagacgcaataaaaaatgataaaggggatatcaccactgatcccacagaaatacaaactaccatcagaga

SEQ ID NO: 95481 - DNA, 120 bp, synthetic construct
  source 1..120: mol_type = other DNA
tattcaacatagtgttggaagttctggccagggcaatcaggcaggagaaggaaataaagggtattcaattaggaaaagaggaagtcaaattgtccctgtttgcagatgacatgactgtat

SEQ ID NO: 95482 - DNA, 120 bp, synthetic construct
  source 1..120: mol_type = other DNA
tagacctaaaaccataaaaaccctagaagaaaacctaggcattaccattcaggacataggcgtgggcaaggacttcatgtctaaaacaccaaaagcaatggcaacaaaagccaaaactga

SEQ ID NO: 95483 - DNA, 120 bp, synthetic construct
  source 1..120: mol_type = other DNA
ggggacgggggagggatagcattaggatatatacctaatgctaaatgacgagttaatgggtgcagcacaccaacatgtcacatgtatacatatgtaacaaacctgcacattgtgcacatg

SEQ ID NO: 95484 - DNA, 120 bp, synthetic construct; identical to SEQ ID NO: 12464
  source 1..120: mol_type = other DNA

SEQ ID NO: 95485 - DNA, 120 bp, synthetic construct; identical to SEQ ID NO: 12465
  source 1..120: mol_type = other DNA

SEQ ID NO: 95486 - DNA, 120 bp, synthetic construct
  source 1..120: mol_type = other DNA
ttttcgcaacctactcatctgacaaagggctaatatccagaatctacaatgaactcaaacaaatttccaagaaaaaacaaacaaccccatcaaaaagtgggcgaaggacatgaacagaca

SEQ ID NO: 95487 - DNA, 120 bp, synthetic construct; identical to SEQ ID NO: 12466
  source 1..120: mol_type = other DNA

SEQ ID NO: 95488 - DNA, 120 bp, synthetic construct; identical to SEQ ID NO: 12467
  source 1..120: mol_type = other DNA

SEQ ID NO: 95489 - DNA, 120 bp, synthetic construct; identical to SEQ ID NO: 12468
  source 1..120: mol_type = other DNA

SEQ ID NO: 95490 - DNA, 120 bp, synthetic construct
  source 1..120: mol_type = other DNA
ctccaccacctcaaaagctgcaccatccgaacactggcttccaccagcactacagcagcaaagagaactactactctcttctcatttgttttctttctttctttctttctttctttcttt

SEQ ID NO: 95491 - DNA, 120 bp, synthetic construct; identical to SEQ ID NO: 12469
  source 1..120: mol_type = other DNA

SEQ ID NO: 95492 - DNA, 120 bp, synthetic construct; identical to SEQ ID NO: 12470
  source 1..120: mol_type = other DNA

SEQ ID NO: 95493 - DNA, 120 bp, synthetic construct; identical to SEQ ID NO: 12471
  source 1..120: mol_type = other DNA

SEQ ID NO: 95494 - DNA, 120 bp, synthetic construct; identical to SEQ ID NO: 12472
  source 1..120: mol_type = other DNA

SEQ ID NO: 95495 - DNA, 120 bp, synthetic construct; identical to SEQ ID NO: 12473
  source 1..120: mol_type = other DNA

SEQ ID NO: 95496 - DNA, 120 bp, synthetic construct
  source 1..120: mol_type = other DNA
gtaaactatcgcaaggacaaaaaaaccaaacaccgcatgttctcactcataggtgggaattgaacaatgagaacacatggacacaggaaggggaacatcacactctggggactgtggtgg

SEQ ID NO: 95497 - DNA, 120 bp, synthetic construct
  source 1..120: mol_type = other DNA
ttaattcaagattgattaaagacttaaacgttagccctaaaaccacaaaaaccctagaagaaaaccgcgcattaccattcagggcataggcatgagcaaggacttcatgtctaaaacacc

SEQ ID NO: 95498 - DNA, 120 bp, synthetic construct
  source 1..120: mol_type = other DNA
gaacacatggacacaggaaggggaacatcacactctggggactgttgtggggtggttggaggggtgagggatagcattaggagatatacctaatgctaaatgacgaattaatgggtgcag

SEQ ID NO: 95499 - DNA, 120 bp, synthetic construct; identical to SEQ ID NO: 12474
  source 1..120: mol_type = other DNA

SEQ ID NO: 95500 - DNA, 120 bp, synthetic construct; identical to SEQ ID NO: 12475
  source 1..120: mol_type = other DNA

SEQ ID NO: 95501 - DNA, 120 bp, synthetic construct; identical to SEQ ID NO: 12476
  source 1..120: mol_type = other DNA

SEQ ID NO: 95502 - DNA, 120 bp, synthetic construct
  source 1..120: mol_type = other DNA
tttccttttttttgggggggggtggggggttggttagagttgtaatggacccagatggaacttgtaatgtgggccccacatgatagaactaaattcagatatcattaaataaactcttgt

SEQ ID NO: 95503 - DNA, 120 bp, synthetic construct
  source 1..120: mol_type = other DNA
taaatgccttattttcttctgcaatgccacttgaccccaatacaaactcaacagtagttccaaatagccagaaaatggcactttgaatttctccatcctgcaagatctaaataattcttg

SEQ ID NO: 95504 - DNA, 120 bp, synthetic construct
  source 1..120: mol_type = other DNA
aaaaacccagcccagttcatggctcgtttggcagcaaccctgagacgctttacagccctggaccctaaaaggtcaaaaggccgtcttattctcaaaatacattttattacccaatctgct

SEQ ID NO: 95505 - DNA, 120 bp, synthetic construct
  source 1..120: mol_type = other DNA
tagacaatacccttttaagcactcctttttagttatccccacctgcccagttcccttattaggctgacgctttaactaaattatctgcttccctgactattcctggactacagctatatc

SEQ ID NO: 95506 - DNA, 120 bp, synthetic construct
  source 1..120: mol_type = other DNA
tttcttcctcatacctgatgcatatactttctgctccccggctccttcagctgtgctcgctctttaagtcccacaatgaccattgttcctggtccggacttcaatctggcctcccacatt

SEQ ID NO: 95507 - DNA, 120 bp, synthetic construct
  source 1..120: mol_type = other DNA
gctcttgtttacactgccggtttacactgtttctccaagccatcatagctgatatctcctggtgctatccccaaactgccacacttaactcctgaagtaaacaaacaatcttggctggca

SEQ ID NO: 95508 - DNA, 120 bp, synthetic construct
  source 1..120: mol_type = other DNA
gatcccacagaaatacaaactaccatcagagaatactataaacacctctacggaaataaaagagaaaatctagaagaagtggataaattcctggacacatacaccctcccaagactaaac

SEQ ID NO: 95509 - DNA, 120 bp, synthetic construct; identical to SEQ ID NO: 19874
  source 1..120: mol_type = other DNA

SEQ ID NO: 95510 - DNA, 120 bp, synthetic construct
  source 1..120: mol_type = other DNA
atcaccaccaccatcaccatcgtcaccactaccatcaccatcacaccaccaccatcaccatcaccaccatcatcaccatcaccaccaccaccatcaccatcaccaccactaccatcacca

SEQ ID NO: 95511 - DNA, 120 bp, synthetic construct
  source 1..120: mol_type = other DNA
aacaacaacaaagagcaagatgtcttagaagaagccaagagttcttgagcatctttttgtaccatcatttttttaaaaattttattattattatactttaagttttagggtacatgtgca

SEQ ID NO: 95512 - DNA, 120 bp, synthetic construct
  source 1..120: mol_type = other DNA
tttagacatgaagtccttgcccatgcctatgtcctcaatggtattgcctaggttttcttctagggtttttatggttttaggtctaacatttaagtctttaatccagcttgaattaatttt

SEQ ID NO: 95513 - DNA, 120 bp, synthetic construct; identical to SEQ ID NO: 33046
  source 1..120: mol_type = other DNA

SEQ ID NO: 95514 - DNA, 120 bp, synthetic construct; identical to SEQ ID NO: 33047
  source 1..120: mol_type = other DNA

SEQ ID NO: 95515 - DNA, 120 bp, synthetic construct
  source 1..120: mol_type = other DNA
actatttgtccctttgcagaaaaagtttggtgatacctgcataactagttatgggggattccgtgaaagctgaacacagtgactggatccctcttctcttcatgtggaaattactttaat

SEQ ID NO: 95516 - DNA, 120 bp, synthetic construct
  source 1..120: mol_type = other DNA
ttactctccaaaataaatcttttttttttaatctgccaaggctaatatatcaaagtaatatatcttccctcgctacccttccctgctctgcccctctctctctggcactcttccacagcc

SEQ ID NO: 95517 - DNA, 120 bp, synthetic construct; identical to SEQ ID NO: 3937
  source 1..120: mol_type = other DNA

SEQ ID NO: 95518 - DNA, 120 bp, synthetic construct; identical to SEQ ID NO: 15628
  source 1..120: mol_type = other DNA

SEQ ID NO: 95519 - DNA, 120 bp, synthetic construct
  source 1..120: mol_type = other DNA
cacatagtccagccagacgcttcccagcaagaaaatccgccagaaactacacttggctgggcaaagagagacatccatctccgatcgctgcttctaaaaaagaggaggaggagaggagag

SEQ ID NO: 95520 - DNA, 120 bp, synthetic construct; identical to SEQ ID NO: 13111
  source 1..120: mol_type = other DNA

SEQ ID NO: 95521 - DNA, 120 bp, synthetic construct; identical to SEQ ID NO: 22686
  source 1..120: mol_type = other DNA

SEQ ID NO: 95522 - DNA, 120 bp, synthetic construct; identical to SEQ ID NO: 22687
  source 1..120: mol_type = other DNA

SEQ ID NO: 95523 - DNA, 120 bp, synthetic construct; identical to SEQ ID NO: 22684
  source 1..120: mol_type = other DNA

SEQ ID NO: 95524 - DNA, 120 bp, synthetic construct; identical to SEQ ID NO: 22685
  source 1..120: mol_type = other DNA

SEQ ID NO: 95525 - DNA, 120 bp, synthetic construct; identical to SEQ ID NO: 30299
  source 1..120: mol_type = other DNA

SEQ ID NO: 95526 - DNA, 120 bp, synthetic construct; identical to SEQ ID NO: 30300
  source 1..120: mol_type = other DNA

SEQ ID NO: 95527 - DNA, 120 bp, synthetic construct; identical to SEQ ID NO: 15997
  source 1..120: mol_type = other DNA

SEQ ID NO: 95528 - DNA, 120 bp, synthetic construct; identical to SEQ ID NO: 14274
  source 1..120: mol_type = other DNA

SEQ ID NO: 95529 - DNA, 120 bp, synthetic construct
  source 1..120: mol_type = other DNA
gtcaattttgtcttttgttgccattgcttttggtgttttggacatgaagtccttgcccacgcctatgtcctgaatggtaatgcctaggttttcttctagggtttttatggttttaggtct

SEQ ID NO: 95530 - DNA, 120 bp, synthetic construct
  source 1..120: mol_type = other DNA
cgagggggttttctagataaacaatcatgtcgtctgcaaacagggacaatttgacttcctcttttcctaattgaataccctttatttccttctcctgcctgattgccctggccagaactt

SEQ ID NO: 95531 - DNA, 120 bp, synthetic construct
  source 1..120: mol_type = other DNA
gattttttgaagggttttttgtgtctctttttccttcagttctgctctgattttagttatttcttgccttctgctagcttttgaatgtgtttgctcttgcttttctagttcttttaattg

SEQ ID NO: 95532 - DNA, 120 bp, synthetic construct
  source 1..120: mol_type = other DNA
tctttatccaacttgccagtctgtgtcttttaattggagcatttagtccatttacatttaaagttaatattgctatgtgtgaatttgatcctgtcattatgatgttagctggtgattttg

SEQ ID NO: 95533 - DNA, 120 bp, synthetic construct; identical to SEQ ID NO: 14271
  source 1..120: mol_type = other DNA

SEQ ID NO: 95534 - DNA, 120 bp, synthetic construct
  source 1..120: mol_type = other DNA
attcttcctacccatgagcacggaatgttcttccatttgtttgtatcctcttttatttcactgagcagtggtttgcagttctccttgaagaggtccttcacatcccttgtaagttggatt

SEQ ID NO: 95535 - DNA, 120 bp, synthetic construct; identical to SEQ ID NO: 14272
  source 1..120: mol_type = other DNA

SEQ ID NO: 95536 - DNA, 120 bp, synthetic construct
  source 1..120: mol_type = other DNA
cccactttttgatggggttgtttgtttttttcttgtaaatttgtttgagttcattgtagattctggatattagccctctgtcagatgagtaggttgcgaaaattttctcccattttgtag

SEQ ID NO: 95537 - DNA, 120 bp, synthetic construct
  source 1..120: mol_type = other DNA
gtatcctcttttatttccttgagcagtggtttgtagttctccttgaagaggtccttcacatcccttgtaagttggattcctaggtattttattctccttgaagcaattgtgaatgggcgt

SEQ ID NO: 95538 - DNA, 120 bp, synthetic construct
  source 1..120: mol_type = other DNA
tcctggagtctttttagttggtaagctattgattattgccacaatttcagagcctgttattggtctattcagagattcaacttcttcctggtttagtcttgggagagtgtatgtgtcgag

SEQ ID NO: 95539 - DNA, 120 bp, synthetic construct
  source 1..120: mol_type = other DNA
ggtcactcaggacttgctttatgaatctgggtgctcctgtattgggtgcatatatattaagatagttagctcttcttgttgaattgatccctttaccattacgtaatggccttctttgtc

SEQ ID NO: 95540 - DNA, 120 bp, synthetic construct; identical to SEQ ID NO: 14273
  source 1..120: mol_type = other DNA

SEQ ID NO: 95541 - DNA, 120 bp, synthetic construct
  source 1..120: mol_type = other DNA
ccattaactcgtcatttagcattaggtatatctcctaatgctatccctcccccctccccccaccccacaacagtccccacagtgtgatgttccccttcctgtgtccatgcgttctcattg

SEQ ID NO: 95542 - DNA, 120 bp, synthetic construct
  source 1..120: mol_type = other DNA
ccagtttcagctttgtacatatggctagccagttttcccagcaccatttattaaatagggaatcctttccccattgcttatttttctcaggtttgtcaaagatcagatagttgtagataa

SEQ ID NO: 95543 - DNA, 120 bp, synthetic construct
  source 1..120: mol_type = other DNA
ttggttctgtttatatgctggattacatttattaatttgcatatattgaaccagccttgcatcccagggatgaagcccacttgattatggtgaataagctttttgatgtgctgctggatt

SEQ ID NO: 95544 - DNA, 120 bp, synthetic construct; identical to SEQ ID NO: 19877
  source 1..120: mol_type = other DNA

SEQ ID NO: 95545 - DNA, 120 bp, synthetic construct; identical to SEQ ID NO: 19878
  source 1..120: mol_type = other DNA

SEQ ID NO: 95546 - DNA, 120 bp, synthetic construct
  source 1..120: mol_type = other DNA
cttttcaccactcgcccccatccccctccaacccgctccaggcctcagactccgcactgacctgacaggccgcgacatgttcgctgtcgaaacaggaccgagtcgagaagccaaagacca

SEQ ID NO: 95547 - DNA, 120 bp, synthetic construct
  source 1..120: mol_type = other DNA
cgggggggggggggggtgccttaaggtggggtgtgaaatatatgcatatatggcacaccagagagaaaaggaaaaacaaattccagatgaattaatgagctgaataaaaaacattccaaa

SEQ ID NO: 95548 - DNA, 120 bp, synthetic construct
  source 1..120: mol_type = other DNA
gtgaagatgcagtgaatcaggcaataactgcaatcattactaataaaaatataagtggtaatcaatttgtcagaggcttatgattcattaatttgaattctgtaactcgttattagataa

SEQ ID NO: 95549 - DNA, 120 bp, synthetic construct
  source 1..120: mol_type = other DNA
cacctcggctgctgcccggcagcggcagcagctgcgtcggcggcccacacagcagcgagaggcgagaggaggctgcctcgaggatgaagtgcaaacccaaccagacacggacctacgacc

SEQ ID NO: 95550 - DNA, 120 bp, synthetic construct
  source 1..120: mol_type = other DNA
ctgtaactgttcaccctgcttttgggcggggggggggggggtggggggcgaggggtgggcggggagtgtgtgtgtctgcctgtgcgccctgtgatgtttttggttcttttatatttcaca

SEQ ID NO: 95551 - DNA, 120 bp, synthetic construct; identical to SEQ ID NO: 33883
  source 1..120: mol_type = other DNA

SEQ ID NO: 95552 - DNA, 120 bp, synthetic construct; identical to SEQ ID NO: 33884
  source 1..120: mol_type = other DNA

SEQ ID NO: 95553 - DNA, 120 bp, synthetic construct
  source 1..120: mol_type = other DNA
ttacacacaaaaggaggaaagcaggtgtgtgtaaacctccagcagcccgatattgtcagctaagacattgcaccgtttccatgtgattgattgattgatcgattgattgatttgagactg

SEQ ID NO: 95554 - DNA, 120 bp, synthetic construct; identical to SEQ ID NO: 13704
  source 1..120: mol_type = other DNA

SEQ ID NO: 95555 - DNA, 120 bp, synthetic construct; identical to SEQ ID NO: 13705
  source 1..120: mol_type = other DNA

SEQ ID NO: 95556 - DNA, 120 bp, synthetic construct
  source 1..120: mol_type = other DNA
gggaagaagcagctcttcacctgaaaaatgttcactttgcctcagttgtgaattctttcattgagaaggagaattaccattatgttactatattaatgaaaggagaagtggatgtgactc

SEQ ID NO: 95557 - DNA, 120 bp, synthetic construct
  source 1..120: mol_type = other DNA
ccatccatttacggtaaataattacactgataaaacaattattgtttcacagcagttgggttcttcttgcctgccacccagaaaaagccagtaccctgagacagtaggagttgtagcaga

SEQ ID NO: 95558 - DNA, 120 bp, synthetic construct
  source 1..120: mol_type = other DNA
atagggaagaatcttttcattcaacagatacctattgagtacagtgttttgagtattgagacactgttctaggcactaaagaaacaatggtgcgtagaacaaagtccctgccctcttgga

SEQ ID NO: 95559 - DNA, 120 bp, synthetic construct
  source 1..120: mol_type = other DNA
gccaaacacagtgtctgactcataatcagaattcaaaatatgttgaaggaaggaaggacccagtgaatgaacatacaagccaacctcttcctgtgaagctgtcatttagtactagactgc

SEQ ID NO: 95560 - DNA, 120 bp, synthetic construct
  source 1..120: mol_type = other DNA
ccacctcattagtgtatggtcacagttactgatcacagttactcttcctgtacttattccagtttcatggattttcggcccctgcattcccaaagtgaaaatacgtacctatatacctgt

SEQ ID NO: 95561 - DNA, 120 bp, synthetic construct
  source 1..120: mol_type = other DNA
ctggttagggaatgaaaaatgtatacatttcggaacaactccattttatctaaaaaagttcttgtgattgccagtttatttgcagtctcttaatgtatcccccactctttcagccagtac

SEQ ID NO: 95562 - DNA, 120 bp, synthetic construct
  source 1..120: mol_type = other DNA
gctgggattacaggtatgagccacaacgcccagccatcatttatctttttcactcattttttcatgagtatgcagaggagttttcaagaggctatctggtgtgatattgtaataggctga

SEQ ID NO: 95563 - DNA, 120 bp, synthetic construct
  source 1..120: mol_type = other DNA
gcctcccaaagtgctgggattacaggcatgaaccaccacgccctgcccatatttttgatgttagatgcatgattttgaaatgtttgaagagctcaaatataataagtgtgtatgtatgcc

SEQ ID NO: 95564 - DNA, 120 bp, synthetic construct
  source 1..120: mol_type = other DNA
taaagctgactagcaacattctcataaaactaaatgtcagctagagttccggaagtgtactttactgccaggttgctgggagggaaatatcttttcgtctatttgctggaccaaccctga

SEQ ID NO: 95565 - DNA, 120 bp, synthetic construct
  source 1..120: mol_type = other DNA
aaacctaccacacttccttaaattcccattccagactttttctcattttcatgttcaaaatgtttaaataggccaggcacagtggctcatgcctgtaatcccagcactttgggaggccga

SEQ ID NO: 95566 - DNA, 120 bp, synthetic construct
  source 1..120: mol_type = other DNA
taacttgatactttttgttttccttcatagattcactttctacctattcttggatgactccccaaacaatattatctacagcccagatgtttctaagctccaggccccaccgcacaccag

SEQ ID NO: 95567 - DNA, 120 bp, synthetic construct
  source 1..120: mol_type = other DNA
catggtttaaatttctaatgggttgaattcacctctgatgcatttgtgaagcaataagttaaattctgcagataaaatgcccgcaagtcagcctcctccttcaaaatggctgaagacaag

SEQ ID NO: 95568 - DNA, 120 bp, synthetic construct
  source 1..120: mol_type = other DNA
aagacagtatgaagaagggctcaacttgtccacaaaatgttttaggtctaccagtttgagaactgcaggacacacacctgcactttgttcctccctctgttgttgccattggtgaaaata

SEQ ID NO: 95569 - DNA, 120 bp, synthetic construct
  source 1..120: mol_type = other DNA
atactacttcttaaatatctttagaattcaccagcaaagccacctggccctacagctgtttttttgggggggtggggggtggggggagggtttaactacaaattcaatttctttaataga

SEQ ID NO: 95570 - DNA, 120 bp, synthetic construct; identical to SEQ ID NO: 27702
  source 1..120: mol_type = other DNA

SEQ ID NO: 95571 - DNA, 120 bp, synthetic construct; identical to SEQ ID NO: 13123
  source 1..120: mol_type = other DNA

SEQ ID NO: 95572 - DNA, 120 bp, synthetic construct; identical to SEQ ID NO: 13124
  source 1..120: mol_type = other DNA

SEQ ID NO: 95573 - DNA, 120 bp, synthetic construct
  source 1..120: mol_type = other DNA
atttatttttattttttatttttttgagacagagtctcactccattgcccaggctgaagtgcagtggtgcagtctcggctcactgcaaccttcgcttcctgaattcaagcaattcttgtg

SEQ ID NO: 95574 - DNA, 120 bp, synthetic construct
  source 1..120: mol_type = other DNA
tctctgctcactgctcactgcaacctccgcctcccaggttcaagtgattctcatgcctcagtctcccgattagctgggattacaggcatgcaccaccacacctggctaatttttgtattt

SEQ ID NO: 95575 - DNA, 120 bp, synthetic construct; identical to SEQ ID NO: 13125
  source 1..120: mol_type = other DNA

SEQ ID NO: 95576 - DNA, 120 bp, synthetic construct; identical to SEQ ID NO: 13126
  source 1..120: mol_type = other DNA

SEQ ID NO: 95577 - DNA, 120 bp, synthetic construct; identical to SEQ ID NO: 13127
  source 1..120: mol_type = other DNA

SEQ ID NO: 95578 - DNA, 120 bp, synthetic construct; identical to SEQ ID NO: 13128
  source 1..120: mol_type = other DNA

SEQ ID NO: 95579 - DNA, 120 bp, synthetic construct
  source 1..120: mol_type = other DNA
tcccaaagtgctgggattacaggtgtgagctaccatgcccagcctatctataaagtgtaaaagtccaacaaagtaggatttggttagaatgaaaaggtggagaaagaacttcaatgttag

SEQ ID NO: 95580 - DNA, 120 bp, synthetic construct
  source 1..120: mol_type = other DNA
aggaaaactcatctgcttagtacttttcttaaattgtccagtttcttttggcctctgaataccagagtcttttatgtgtaagattagaaacatctggccagcatatctgagtaaggctga

SEQ ID NO: 95581 - DNA, 120 bp, synthetic construct
  source 1..120: mol_type = other DNA
aaataatggcctccagctccatccaagttgtgcaagacattatttcattcttttttgtggctgagtagtattccatggcatgtatataccacattttctttatccactaattggttgatg

SEQ ID NO: 95582 - DNA, 120 bp, synthetic construct; identical to SEQ ID NO: 239
  source 1..120: mol_type = other DNA

SEQ ID NO: 95583 - DNA, 120 bp, synthetic construct
  source 1..120: mol_type = other DNA
tttcaattatctttcataatattccctggtgttagaacaaactgcctcctctgaacaaacattcctctcaccagggtgggaagtttaccaaactttgtggctcctttattcccctcctcc

SEQ ID NO: 95584 - DNA, 120 bp, synthetic construct
  source 1..120: mol_type = other DNA
catggagagcggcggacaactgggcagaggcggagctttcatctcggcaccctggttccagtgacccgcgctagcgtcccgtcccgcccgcgtcggagcggccgccggccccgggactga

SEQ ID NO: 95585 - DNA, 120 bp, synthetic construct
  source 1..120: mol_type = other DNA
tcatggggagaggcttctttcgtttcctcgtcaaacatctgattgacgcttgcaaactgtctgaatttgccatgcaaggttttcaaacaatttgcatgtttttcagatgctttcaaatct

SEQ ID NO: 95586 - DNA, 120 bp, synthetic construct
  source 1..120: mol_type = other DNA
cgcatcacagttgagtgaaatggccttcctgttcagctgttagagactgaagattgttagggcaccttagaatgtctcatcttttctaggttgtcaacaggtactatttgtcacataact

SEQ ID NO: 95587 - DNA, 120 bp, synthetic construct
  source 1..120: mol_type = other DNA
aacatagcagagaaactggattgtttttgtatataagactgcttccacctgaaatgctgtcataagtactgggggggtgggggagtgcccatcttgtacatgatattcttagaggtaata

SEQ ID NO: 95588 - DNA, 120 bp, synthetic construct
  source 1..120: mol_type = other DNA
tctgtgcttcaaggacaccaacaagtgaaagaacagccccacagaatcagagagcatatttgcaaattatactatctgttaagggactagaatataaaaaacacaaatcaataagaaatg

SEQ ID NO: 95589 - DNA, 120 bp, synthetic construct
  source 1..120: mol_type = other DNA
attatggtgacgggtgccctgctaaatagatatactgaaaaccattgaattgtacactttaaatgcgaattttatagaatacaaattatatctcagtaaaactgtttttaaaaagtggct

SEQ ID NO: 95590 - DNA, 120 bp, synthetic construct
  source 1..120: mol_type = other DNA
ttacaggagcatgccaccacgcccagttaattttgtatttttcagagatggggtttcaccatgttggtcaggctggtcttgaactcctaacctcaagtgatccacccgcctcagcctccc

SEQ ID NO: 95591 - DNA, 120 bp, synthetic construct
  source 1..120: mol_type = other DNA
aagttctttgagaaatcaccaaactacttttccacagtagctgaactaatttacattcacaccgacaatagataagcattcccttttcttggtagcctcgccagcaactgtggcttttga

SEQ ID NO: 95592 - DNA, 120 bp, synthetic construct
  source 1..120: mol_type = other DNA
agtgctgggattacaggtgtgagccactgcacctggcctgcccgcttgttaatggggttattttttgcttgttgaattgtttaagttccttatagattctgaatagacctttatcagatg

SEQ ID NO: 95593 - DNA, 120 bp, synthetic construct
  source 1..120: mol_type = other DNA
agatattaaacacaacttgaggaatatccttgactactgaagaaagtaggcaaactctgggcaggcactcagacttgggaagcttgcggcattcctctgaggtctaaggagcttcccatt

SEQ ID NO: 95594 - DNA, 120 bp, synthetic construct; identical to SEQ ID NO: 8971
  source 1..120: mol_type = other DNA

SEQ ID NO: 95595 - DNA, 120 bp, synthetic construct; identical to SEQ ID NO: 14471
  source 1..120: mol_type = other DNA

SEQ ID NO: 95596 - DNA, 120 bp, synthetic construct; identical to SEQ ID NO: 14472
  source 1..120: mol_type = other DNA

SEQ ID NO: 95597 - DNA, 120 bp, synthetic construct; identical to SEQ ID NO: 3763
  source 1..120: mol_type = other DNA

SEQ ID NO: 95598 - DNA, 120 bp, synthetic construct; identical to SEQ ID NO: 14474
  source 1..120: mol_type = other DNA

SEQ ID NO: 95599 - DNA, 120 bp, synthetic construct
  source 1..120: mol_type = other DNA
ctggagtgcaatggtgtgatctgggctcactgccacctccacctcccaggttcaagcaattctcctgccttagcttcctgagtagctgggattacaggcaagcactaccatgcccagcta

SEQ ID NO: 95600 - DNA, 120 bp, synthetic construct
  source 1..120: mol_type = other DNA
ggcaataggttctcttattggaatacagtgactactctgcctggtaagcacataccacaaagaaaaaaggctttgaataactctcccttaggctcctgattgcaagaagaaaatccctta

SEQ ID NO: 95601 - DNA, 120 bp, synthetic construct
  source 1..120: mol_type = other DNA
tgcttggcacttctccttcctgctaccatatgaaggacgtgtttgctttcccttctggcacaactgtaagtttcctgaggcctccccagccatgctaaactgtgagtcaattaaagagac

SEQ ID NO: 95602 - DNA, 120 bp, synthetic construct; identical to SEQ ID NO: 14475
  source 1..120: mol_type = other DNA

SEQ ID NO: 95603 - DNA, 120 bp, synthetic construct
  source 1..120: mol_type = other DNA
ctgtggttttgatttgcatttctctgatggccagtgatgatgagcattttttcatgtgtctgttggctgcattaatgtcttcttttgagaagtgtctgttcatatccttcgcccactttt

SEQ ID NO: 95604 - DNA, 120 bp, synthetic construct
  source 1..120: mol_type = other DNA
acgaggaatatttagaactcaacaataagaaatgagggtggggggagggagagcatcaggaagaatggctaatgtatgctgggtttaatacctagttgatggattgacagatacagcaaa

SEQ ID NO: 95605 - DNA, 120 bp, synthetic construct; identical to SEQ ID NO: 26509
  source 1..120: mol_type = other DNA

SEQ ID NO: 95606 - DNA, 120 bp, synthetic construct
  source 1..120: mol_type = other DNA
cgccctgtctgagaagtgaggagcccctccgcccagcagccgccccgtctgagaagtgaggagcccctccgcccggcagccaccccgtccgggagggaggttggggggtcagccccccgc

SEQ ID NO: 95607 - DNA, 120 bp, synthetic construct; identical to SEQ ID NO: 26510
  source 1..120: mol_type = other DNA

SEQ ID NO: 95608 - DNA, 120 bp, synthetic construct; identical to SEQ ID NO: 11885
  source 1..120: mol_type = other DNA

SEQ ID NO: 95609 - DNA, 120 bp, synthetic construct; identical to SEQ ID NO: 11886
  source 1..120: mol_type = other DNA

SEQ ID NO: 95610 - DNA, 120 bp, synthetic construct
  source 1..120: mol_type = other DNA
ggcaacaagagtgaaactctgtgtgtccccccccccccccgcgccaaaaaatccatcaatagcatgtttttaacatttaaaagaatttgaagccctataaagaaaccagatctatttgtt

SEQ ID NO: 95611 - DNA, 120 bp, synthetic construct; identical to SEQ ID NO: 13166
  source 1..120: mol_type = other DNA

SEQ ID NO: 95612 - DNA, 120 bp, synthetic construct
  source 1..120: mol_type = other DNA
caggcagaggcgctcctcacttcctagacggggcagccgggcagaggcactcctcacctcccagacgaagggcggcagggcagaggcgctcctcacatcccagacgatgagcggctgggc

SEQ ID NO: 95613 - DNA, 120 bp, synthetic construct; identical to SEQ ID NO: 23912
  source 1..120: mol_type = other DNA

SEQ ID NO: 95614 - DNA, 120 bp, synthetic construct; identical to SEQ ID NO: 23913
  source 1..120: mol_type = other DNA

SEQ ID NO: 95615 - DNA, 120 bp, synthetic construct; identical to SEQ ID NO: 25527
  source 1..120: mol_type = other DNA

SEQ ID NO: 95616 - DNA, 120 bp, synthetic construct; identical to SEQ ID NO: 25528
  source 1..120: mol_type = other DNA

SEQ ID NO: 95617 - DNA, 120 bp, synthetic construct
  source 1..120: mol_type = other DNA
caagaggagtgcttgagaccaggattttgagacaagcttgggcaaaatggcaagaccttgtctctacaaaaaatataaaaaattaaccaggtgtagtgctacatgcctgtaatcccagct

SEQ ID NO: 95618 - DNA, 120 bp, synthetic construct; identical to SEQ ID NO: 25529
  source 1..120: mol_type = other DNA

SEQ ID NO: 95619 - DNA, 120 bp, synthetic construct; identical to SEQ ID NO: 35110
  source 1..120: mol_type = other DNA

SEQ ID NO: 95620 - DNA, 120 bp, synthetic construct
  source 1..120: mol_type = other DNA
atccacaccaaaaacccatctgtacatcaccatcatcaaagaccaaaagtagataaaaccacaaagatggggaaaaaacagaacagaaaaactggaaactctaaaacgcagagcgcctct

SEQ ID NO: 95621 - DNA, 120 bp, synthetic construct
  source 1..120: mol_type = other DNA
gaaaagaattttcaacccagaatttcatatccagccaaactaagcttcataagtgaaggagaaataaaatactttacagacaagcaagtgctgagagattttgtcaccaccaggcctgcc

SEQ ID NO: 95622 - DNA, 120 bp, synthetic construct
  source 1..120: mol_type = other DNA
ccacagcgcaatcaaactagaactcaggattaagaatctcactcaaagccactcaactacatggaaactgaacaacctactcctgaatgactactgggtacataacgaaatgaaggcaga

SEQ ID NO: 95623 - DNA, 120 bp, synthetic construct
  source 1..120: mol_type = other DNA
caagtgggcttcatccctgggatgcaaggctggttcaatatacacaaatcaataaatgtaatccagcatataaacagagccaaagacaaaaatcacatgattatctcaatagatgcagaa

SEQ ID NO: 95624 - DNA, 120 bp, synthetic construct
  source 1..120: mol_type = other DNA
agccctcagaaataacgccgcatacctacaactacctgatctttgacaaatctgagaaaaacaagcaatggggaaaggatttcctatttaataaatggtgctgggaaaactggctagcca

SEQ ID NO: 95625 - DNA, 120 bp, synthetic construct
  source 1..120: mol_type = other DNA
aaaccaaacaccgcatattctcactcataggtgggaattgaacaatgagatcacatggacacaggaaggggaatatcacactctggggactgtggtggggaggggggagggatagcattg

SEQ ID NO: 95626 - DNA, 120 bp, synthetic construct
  source 1..120: mol_type = other DNA
aaaaattgcctaagacatacaaaattcagtattttcttttcttttttttctttctttctctctctctctctctccctccctccctccctctctctctctccctccctccctttctctctc

SEQ ID NO: 95627 - DNA, 120 bp, synthetic construct; identical to SEQ ID NO: 35112
  source 1..120: mol_type = other DNA

SEQ ID NO: 95628 - DNA, 120 bp, synthetic construct; identical to SEQ ID NO: 16500
  source 1..120: mol_type = other DNA

SEQ ID NO: 95629 - DNA, 120 bp, synthetic construct
  source 1..120: mol_type = other DNA
ctcacctcccagacggggtctcggccgggcagaggcgctcctcacatcccagatggggcggcggggcagaggcgctccccacatctcagaggatgggcggccaggcagagacgctcctca

SEQ ID NO: 95630 - DNA, 120 bp, synthetic construct; identical to SEQ ID NO: 16501
  source 1..120: mol_type = other DNA

SEQ ID NO: 95631 - DNA, 120 bp, synthetic construct; identical to SEQ ID NO: 16502
  source 1..120: mol_type = other DNA

SEQ ID NO: 95632 - DNA, 120 bp, synthetic construct
  source 1..120: mol_type = other DNA
accaggggagtcggaggtcgcagtgagctgagatcccgccactgcactccagcctggtgacaaaaggcaactccgtctcaaaaaatatatataaatatatatatttctaaaaatatatat

SEQ ID NO: 95633 - DNA, 120 bp, synthetic construct
  source 1..120: mol_type = other DNA
gcatgggcaacatactgaggccccatctccacaaaaaataatcacttttttcctttaaaaaagtttaaaacttatttaggcagggcgctgtggctcctggcctataatcccagcacattg

SEQ ID NO: 95634 - DNA, 120 bp, synthetic construct
  source 1..120: mol_type = other DNA
agcttaccagggcattgatgcagccagctggaaattggatcccagaccaggattttgaaactaatgttctaaccacagaacaaaatactctgcaactaccttaattcatctctgtgacta

SEQ ID NO: 95635 - DNA, 120 bp, synthetic construct
  source 1..120: mol_type = other DNA
aaatcccttaatatttccttccctcctttcctccttccctccttccctccctcctttccttcctctttctttccctccttctctctttctttctctctctttttctttttttgagatgga

SEQ ID NO: 95636 - DNA, 120 bp, synthetic construct
  source 1..120: mol_type = other DNA
cgcaatctccgctcggctcactgtaacctcagcctcccgggctcgatcgcatatatatatatatatatatatatatatatatatttgtgtgtgtgtgtgtgtgtgtgtgtgtgtgtgtgt

SEQ ID NO: 95637 - DNA, 120 bp, synthetic construct; identical to SEQ ID NO: 28233
  source 1..120: mol_type = other DNA

SEQ ID NO: 95638 - DNA, 120 bp, synthetic construct; identical to SEQ ID NO: 28234
  source 1..120: mol_type = other DNA

SEQ ID NO: 95639 - DNA, 120 bp, synthetic construct; identical to SEQ ID NO: 28235
  source 1..120: mol_type = other DNA

SEQ ID NO: 95640 - DNA, 120 bp, synthetic construct; identical to SEQ ID NO: 28236
  source 1..120: mol_type = other DNA

SEQ ID NO: 95641 - DNA, 120 bp, synthetic construct; identical to SEQ ID NO: 28237
  source 1..120: mol_type = other DNA

SEQ ID NO: 95642 - DNA, 120 bp, synthetic construct; identical to SEQ ID NO: 28238
  source 1..120: mol_type = other DNA

SEQ ID NO: 95643 - DNA, 120 bp, synthetic construct; identical to SEQ ID NO: 15096
  source 1..120: mol_type = other DNA

SEQ ID NO: 95644 - DNA, 120 bp, synthetic construct
  source 1..120: mol_type = other DNA
tttggaaggctgaggcaggaggatcacttgaggccaggagtctgagcctagcctaggcaacatagcgagacgtcatctctacaatttttctttttttttttttgagacagagttttcctt

SEQ ID NO: 95645 - DNA, 120 bp, synthetic construct; identical to SEQ ID NO: 10886
  source 1..120: mol_type = other DNA

SEQ ID NO: 95646 - DNA, 120 bp, synthetic construct; identical to SEQ ID NO: 10887
  source 1..120: mol_type = other DNA

SEQ ID NO: 95647 - DNA, 120 bp, synthetic construct
  source 1..120: mol_type = other DNA
gagcaagggaaaggagcgtggcctgggcgtcccgcagggcccccactaggaaagctatgaacgctcccgccttgagcacagccacaggcctgctctggtcacaatgtggggtcgccccac

SEQ ID NO: 95648 - DNA, 120 bp, synthetic construct
  source 1..120: mol_type = other DNA
cctaccgcattcaaatgatttctagaaatgtttttgttgtagccttgatcaatttcagtcgataaagcagcagatagtaagggaacaattccacactccccatccctgactctgcaacac

SEQ ID NO: 95649 - DNA, 120 bp, synthetic construct
  source 1..120: mol_type = other DNA
taagaaggcagttctgtctcagaggacaaaaggcctgggagcacccagacagtcactgcatggaggtcactcccctcccagtggccactgtggagacatttcacagaaatgcttgctgga

SEQ ID NO: 95650 - DNA, 120 bp, synthetic construct; identical to SEQ ID NO: 11002
  source 1..120: mol_type = other DNA

SEQ ID NO: 95651 - DNA, 120 bp, synthetic construct; identical to SEQ ID NO: 11003
  source 1..120: mol_type = other DNA

SEQ ID NO: 95652 - DNA, 120 bp, synthetic construct
  source 1..120: mol_type = other DNA
gaatctgacccctatttagcacttgctgtgggtggtgccaggacaatcacttgcatgctgggcatgacagttatggattatcttcagggttcctagggcgctggcttgggaaagatttcc

SEQ ID NO: 95653 - DNA, 120 bp, synthetic construct; identical to SEQ ID NO: 10892
  source 1..120: mol_type = other DNA

SEQ ID NO: 95654 - DNA, 120 bp, synthetic construct
  source 1..120: mol_type = other DNA
tggagcccgtggctttggggagcactctcctagatggcctagtcctgataatggtagtaatggggacagtaatcataactgctgtcatgtaatgtgtcatagtatgtgccaggcactgtg

SEQ ID NO: 95655 - DNA, 120 bp, synthetic construct; identical to SEQ ID NO: 11004
  source 1..120: mol_type = other DNA

SEQ ID NO: 95656 - DNA, 120 bp, synthetic construct; identical to SEQ ID NO: 10893
  source 1..120: mol_type = other DNA

SEQ ID NO: 95657 - DNA, 120 bp, synthetic construct
  source 1..120: mol_type = other DNA
gaccaaggcccgccggccaccaccccagccccaccggcgagcagagaccaaggcccgcctgccaccacccaggccccagagaccagcagagaccaaggtccctgaggagatccccccaga

SEQ ID NO: 95658 - DNA, 120 bp, synthetic construct; identical to SEQ ID NO: 11010
  source 1..120: mol_type = other DNA

SEQ ID NO: 95659 - DNA, 120 bp, synthetic construct; identical to SEQ ID NO: 10900
  source 1..120: mol_type = other DNA

SEQ ID NO: 95660 - DNA, 120 bp, synthetic construct; identical to SEQ ID NO: 11005
  source 1..120: mol_type = other DNA

SEQ ID NO: 95661 - DNA, 120 bp, synthetic construct; identical to SEQ ID NO: 10895
  source 1..120: mol_type = other DNA

SEQ ID NO: 95662 - DNA, 120 bp, synthetic construct; identical to SEQ ID NO: 10896
  source 1..120: mol_type = other DNA

SEQ ID NO: 95663 - DNA, 120 bp, synthetic construct; identical to SEQ ID NO: 10886
  source 1..120: mol_type = other DNA

SEQ ID NO: 95664 - DNA, 120 bp, synthetic construct; identical to SEQ ID NO: 10887
  source 1..120: mol_type = other DNA

SEQ ID NO: 95665 - DNA, 120 bp, synthetic construct; identical to SEQ ID NO: 10899
  source 1..120: mol_type = other DNA

SEQ ID NO: 95666 - DNA, 120 bp, synthetic construct; identical to SEQ ID NO: 10888
  source 1..120: mol_type = other DNA

SEQ ID NO: 95667 - DNA, 120 bp, synthetic construct; identical to SEQ ID NO: 10889
  source 1..120: mol_type = other DNA

SEQ ID NO: 95668 - DNA, 120 bp, synthetic construct; identical to SEQ ID NO: 10890
  source 1..120: mol_type = other DNA

SEQ ID NO: 95669 - DNA, 120 bp, synthetic construct; identical to SEQ ID NO: 10891
  source 1..120: mol_type = other DNA

SEQ ID NO: 95670 - DNA, 120 bp, synthetic construct; identical to SEQ ID NO: 95652
  source 1..120: mol_type = other DNA

SEQ ID NO: 95671 - DNA, 120 bp, synthetic construct; identical to SEQ ID NO: 10892
  source 1..120: mol_type = other DNA

SEQ ID NO: 95672 - DNA, 120 bp, synthetic construct
  source 1..120: mol_type = other DNA
atgctatgacacattacatgacagcagttatgattactgtccccattactatcattatcaagactaggccatctaggagagcactccccaaagccacgggctccagtgatagctctgagt

SEQ ID NO: 95673 - DNA, 120 bp, synthetic construct; identical to SEQ ID NO: 11004
  source 1..120: mol_type = other DNA

SEQ ID NO: 95674 - DNA, 120 bp, synthetic construct; identical to SEQ ID NO: 10893
  source 1..120: mol_type = other DNA

SEQ ID NO: 95675 - DNA, 120 bp, synthetic construct
  source 1..120: mol_type = other DNA
tcctgcctcctccgggggcgctgcggttcaggtggtcctgacccagctgggacccacttcacatccccaagccctgccctcccctgtgtggtgccagcaggaggagcggccctcaccacg

SEQ ID NO: 95676 - DNA, 120 bp, synthetic construct; identical to SEQ ID NO: 11010
  source 1..120: mol_type = other DNA

SEQ ID NO: 95677 - DNA, 120 bp, synthetic construct; identical to SEQ ID NO: 10900
  source 1..120: mol_type = other DNA

SEQ ID NO: 95678 - DNA, 120 bp, synthetic construct; identical to SEQ ID NO: 10894
  source 1..120: mol_type = other DNA

SEQ ID NO: 95679 - DNA, 120 bp, synthetic construct; identical to SEQ ID NO: 10895
  source 1..120: mol_type = other DNA

SEQ ID NO: 95680 - DNA, 120 bp, synthetic construct; identical to SEQ ID NO: 10896
  source 1..120: mol_type = other DNA

SEQ ID NO: 95681 - DNA, 120 bp, synthetic construct
  source 1..120: mol_type = other DNA
agaactttcctcccccccacgttttgagacagggtctggctctgtcatgcaggagactgtctgtagtgcagcgacacagtctcagctcactgcaacctccgcctcttgggctcaagtgat

SEQ ID NO: 95682 - DNA, 120 bp, synthetic construct; identical to SEQ ID NO: 10897
  source 1..120: mol_type = other DNA

SEQ ID NO: 95683 - DNA, 120 bp, synthetic construct; identical to SEQ ID NO: 11006
  source 1..120: mol_type = other DNA

SEQ ID NO: 95684 - DNA, 120 bp, synthetic construct
  source 1..120: mol_type = other DNA
tttgtaaatcccacataagtaagcgattctcatggaagcttttcttgactttggccacactcttgcatccacaaccaacttgtgctaccaagtgaacaaactatgactaaaggcctattc

SEQ ID NO: 95685 - DNA, 120 bp, synthetic construct; identical to SEQ ID NO: 95648
  source 1..120: mol_type = other DNA

SEQ ID NO: 95686 - DNA, 120 bp, synthetic construct; identical to SEQ ID NO: 95649
  source 1..120: mol_type = other DNA

SEQ ID NO: 95687 - DNA, 120 bp, synthetic construct; identical to SEQ ID NO: 11002
  source 1..120: mol_type = other DNA

SEQ ID NO: 95688 - DNA, 120 bp, synthetic construct; identical to SEQ ID NO: 11003
  source 1..120: mol_type = other DNA

SEQ ID NO: 95689 - DNA, 120 bp, synthetic construct; identical to SEQ ID NO: 11007
  source 1..120: mol_type = other DNA

SEQ ID NO: 95690 - DNA, 120 bp, synthetic construct; identical to SEQ ID NO: 11008
  source 1..120: mol_type = other DNA

SEQ ID NO: 95691 - DNA, 120 bp, synthetic construct
  source 1..120: mol_type = other DNA
gcaggacccagcaggaacctgacacatgcccgcagttccgctgaggtccagttagcacagcggtggtggagcctgcacagggggatggtcttgggccctgcactggggccgatgccgagc

SEQ ID NO: 95692 - DNA, 120 bp, synthetic construct; identical to SEQ ID NO: 11009
  source 1..120: mol_type = other DNA

SEQ ID NO: 95693 - DNA, 120 bp, synthetic construct
  source 1..120: mol_type = other DNA
gctagtgactatggacaagagtagggtgcaggctcctcacagcagtggccagaagtcggttttctcccatcccagcctggccagggagttgggttggggagatctgcacctgggacacca

SEQ ID NO: 95694 - DNA, 120 bp, synthetic construct; identical to SEQ ID NO: 95675
  source 1..120: mol_type = other DNA

SEQ ID NO: 95695 - DNA, 120 bp, synthetic construct; identical to SEQ ID NO: 11010
  source 1..120: mol_type = other DNA

SEQ ID NO: 95696 - DNA, 120 bp, synthetic construct; identical to SEQ ID NO: 10900
  source 1..120: mol_type = other DNA

SEQ ID NO: 95697 - DNA, 120 bp, synthetic construct; identical to SEQ ID NO: 11005
  source 1..120: mol_type = other DNA

SEQ ID NO: 95698 - DNA, 120 bp, synthetic construct; identical to SEQ ID NO: 10895
  source 1..120: mol_type = other DNA

SEQ ID NO: 95699 - DNA, 120 bp, synthetic construct; identical to SEQ ID NO: 11011
  source 1..120: mol_type = other DNA

SEQ ID NO: 95700 - DNA, 120 bp, synthetic construct; identical to SEQ ID NO: 10901
  source 1..120: mol_type = other DNA

SEQ ID NO: 95701 - DNA, 120 bp, synthetic construct; identical to SEQ ID NO: 10902
  source 1..120: mol_type = other DNA

SEQ ID NO: 95702 - DNA, 120 bp, synthetic construct
  source 1..120: mol_type = other DNA
agcatctatcattacatcaaacctttttattgctgaataatattccattggtggatatcctgaaacttattcattcatcaggtgatgaacatttgggttgttttcactttttggctactg

SEQ ID NO: 95703 - DNA, 120 bp, synthetic construct; identical to SEQ ID NO: 32777
  source 1..120: mol_type = other DNA

SEQ ID NO: 95704 - DNA, 120 bp, synthetic construct; identical to SEQ ID NO: 32778
  source 1..120: mol_type = other DNA

SEQ ID NO: 95705 - DNA, 120 bp, synthetic construct; identical to SEQ ID NO: 32779
  source 1..120: mol_type = other DNA

SEQ ID NO: 95706 - DNA, 120 bp, synthetic construct; identical to SEQ ID NO: 32780
  source 1..120: mol_type = other DNA

SEQ ID NO: 95707 - DNA, 120 bp, synthetic construct; identical to SEQ ID NO: 32781
  source 1..120: mol_type = other DNA

SEQ ID NO: 95708 - DNA, 120 bp, synthetic construct
  source 1..120: mol_type = other DNA
cctgctttctgcatctcctccgggtgtccttggctccaggttactccctccccaggaagttcacaccttcttccttctgtttccaggtggaggccgtcattcacccccgattcctggaag

SEQ ID NO: 95709 - DNA, 120 bp, synthetic construct; identical to SEQ ID NO: 32782
  source 1..120: mol_type = other DNA

SEQ ID NO: 95710 - DNA, 120 bp, synthetic construct
  source 1..120: mol_type = other DNA
acaccatgagacccctctctggcctgactgcctttgctcctgggcagaaccgtccgtgaagacagacagacagcagcctcaggggaaacgggccctgtcctctgggctcagcttttgctt

SEQ ID NO: 95711 - DNA, 120 bp, synthetic construct; identical to SEQ ID NO: 32783
  source 1..120: mol_type = other DNA

SEQ ID NO: 95712 - DNA, 120 bp, synthetic construct; identical to SEQ ID NO: 32784
  source 1..120: mol_type = other DNA

SEQ ID NO: 95713 - DNA, 120 bp, synthetic construct
  source 1..120: mol_type = other DNA
gcaatcgcagcactttgggaggccgaggcgggcgaatcaccagggcaggagattgagagcatcctggctaacatggtgaaaccccgtctctactaaaaatacaaaaaaattagccgggca

SEQ ID NO: 95714 - DNA, 120 bp, synthetic construct; identical to SEQ ID NO: 32785
  source 1..120: mol_type = other DNA

SEQ ID NO: 95715 - DNA, 120 bp, synthetic construct
  source 1..120: mol_type = other DNA
tggaatgaagtggcacgatctcggctcactgcagcctctgcctcctcggttcaagcaattctcctgtctcagcctcctgagtagctgcgattacaggcacgcatcatcagctaatttttg

SEQ ID NO: 95716 - DNA, 120 bp, synthetic construct; identical to SEQ ID NO: 32786
  source 1..120: mol_type = other DNA

SEQ ID NO: 95717 - DNA, 120 bp, synthetic construct; identical to SEQ ID NO: 32787
  source 1..120: mol_type = other DNA

SEQ ID NO: 95718 - DNA, 120 bp, synthetic construct; identical to SEQ ID NO: 32788
  source 1..120: mol_type = other DNA

SEQ ID NO: 95719 - DNA, 120 bp, synthetic construct; identical to SEQ ID NO: 32789
  source 1..120: mol_type = other DNA

SEQ ID NO: 95720 - DNA, 120 bp, synthetic construct
  source 1..120: mol_type = other DNA
atcagtggctcagaaaaagactcattcaaatcctgtatcaaagccatgtgtgagcatcttgagaaagcattgactgactaacttgacaagggaggaagcaaacaagaattctgcccttct

SEQ ID NO: 95721 - DNA, 120 bp, synthetic construct; identical to SEQ ID NO: 32790
  source 1..120: mol_type = other DNA

SEQ ID NO: 95722 - DNA, 120 bp, synthetic construct; identical to SEQ ID NO: 32791
  source 1..120: mol_type = other DNA

SEQ ID NO: 95723 - DNA, 120 bp, synthetic construct; identical to SEQ ID NO: 32791
  source 1..120: mol_type = other DNA

SEQ ID NO: 95724 - DNA, 120 bp, synthetic construct; identical to SEQ ID NO: 32844
  source 1..120: mol_type = other DNA

SEQ ID NO: 95725 - DNA, 120 bp, synthetic construct
  source 1..120: mol_type = other DNA
ttctgagccactgatacaaaaagtatattgtggaagtgtcttgtttcaattctgcaatcgcttctgtatgtgtttgaagtcctagaccccaggaggagagacaatcaaattagccaaagg

SEQ ID NO: 95726 - DNA, 120 bp, synthetic construct; identical to SEQ ID NO: 32845
  source 1..120: mol_type = other DNA

SEQ ID NO: 95727 - DNA, 120 bp, synthetic construct
  source 1..120: mol_type = other DNA
tgtcccagtaatgtggttcctctctttatttctgtaggtaaattgctagaatgagatgttggactgttttttaaaattaaaaatacatgaaagaacatagtggccagatttagcaagtat

SEQ ID NO: 95728 - DNA, 120 bp, synthetic construct; identical to SEQ ID NO: 32846
  source 1..120: mol_type = other DNA

SEQ ID NO: 95729 - DNA, 120 bp, synthetic construct; identical to SEQ ID NO: 32847
  source 1..120: mol_type = other DNA

SEQ ID NO: 95730 - DNA, 120 bp, synthetic construct
  source 1..120: mol_type = other DNA
acttgcatgctgggcgttatgtgttatgggttatcttcagggttcctagggcgctggcttgggcgagtttccatccagtggttttttttttttttttttttttttttttttttttttttt

SEQ ID NO: 95731 - DNA, 120 bp, synthetic construct
  source 1..120: mol_type = other DNA
acacctccacagagggtgcctggagcctgccagacgaggggggcctgagttaggatcaaggtctgtgcctgagggggcttcacaggccccacttctgtcctcatctggacaaagacgttg

SEQ ID NO: 95732 - DNA, 120 bp, synthetic construct
  source 1..120: mol_type = other DNA
agagtgagactccatctcaaaaaaaaaaaaaaaagaaaagaaaagaaaagaaagtaagtattggggcggggcatgatggctcatgcctgtaatctcagcactttgagaggctgaggcggg

SEQ ID NO: 95733 - DNA, 120 bp, synthetic construct
  source 1..120: mol_type = other DNA
cttcccacattcccacaggagccaaggcaaaggcctgtgagcccggggcggctacactccaagaatcagggtccccagtgcaccgggactccgctccaaggggggatgcaaccagttcca

SEQ ID NO: 95734 - DNA, 120 bp, synthetic construct
  source 1..120: mol_type = other DNA
tgtttgtccacaccctcctcatgctccatgctgagaagccaccacggccaccgggcctctgtcattcactctcaccccgccacacgggccctgcccccaggaccccagactcacttttcc

SEQ ID NO: 95735 - DNA, 120 bp, synthetic construct
  source 1..120: mol_type = other DNA
ctgtacctggctgcttgaccacctcaggggcagggggtcctcgaggttcaagcctcggcggggctggaggaggcaggctctggggccccttcatccactgcgatttctgaatctgcatct

SEQ ID NO: 95736 - DNA, 120 bp, synthetic construct
  source 1..120: mol_type = other DNA
cacagacacacaaagacacagtaacaaatcacagacacaaacacacagcaacacacagacacacacagtcacatacacagacactcaaatccatggaaatacacatactactgagtagct

SEQ ID NO: 95737 - DNA, 120 bp, synthetic construct
  source 1..120: mol_type = other DNA
ggagttccgtctcctcacttgaccccttagccagcccatgtgactccttgacaggagactctccagggagacccaaggcgtccttggtccccaggccggggcaggtgggtctgtggtcct

SEQ ID NO: 95738 - DNA, 120 bp, synthetic construct
  source 1..120: mol_type = other DNA
agccgcctctccccatgtccatgttgcaggcagctgccttctcctcagctcccaccgagcagaaaaaaagccagccagctctctccatcccaggattttccagggatactgataatgatg

SEQ ID NO: 95739 - DNA, 120 bp, synthetic construct
  source 1..120: mol_type = other DNA
cagagagaacccaaacatggctccctttgtcacttggcagagggaccaggccgccatataccagagagctttgccccatcagcttctgctgctgggccaactcccagcaccatgaccaca

SEQ ID NO: 95740 - DNA, 120 bp, synthetic construct; identical to SEQ ID NO: 32848
  source 1..120: mol_type = other DNA

SEQ ID NO: 95741 - DNA, 120 bp, synthetic construct; identical to SEQ ID NO: 32849
  source 1..120: mol_type = other DNA

SEQ ID NO: 95742 - DNA, 120 bp, synthetic construct
  source 1..120: mol_type = other DNA
tgtgaaagacatatattgtatgattccattcatatgcaagtccagagcatgtaaagctatatagaatcagttcgtggttatgtaggcctaggatgtagatcggtggggggcagggggtga

SEQ ID NO: 95743 - DNA, 120 bp, synthetic construct
  source 1..120: mol_type = other DNA
ccagcctgggcaacataaggagaccttgcctctacaaaaagttaaaaaaaaaaaaaaaaaaaaaagctggtcatggtggtatgtgcctatagtctcagctactcaggaggctaagatggg

SEQ ID NO: 95744 - DNA, 120 bp, synthetic construct
  source 1..120: mol_type = other DNA
gggaagggaagaggggggaaggggaggggagaggaaaggggaaggaaagagaaaggggaggggaaggaaaggaaagggagggaagggaaagggaaggaaaggaaagggagggaagggaaa

SEQ ID NO: 95745 - DNA, 120 bp, synthetic construct
  source 1..120: mol_type = other DNA
aagatttagaagaaatggataaattcctcgacacatacaccctcccaagaccaaaccaggaagaagttgaatctctgaatagaccaataacaggctctgaaattgaggcaataattaata

SEQ ID NO: 95746 - DNA, 120 bp, synthetic construct
  source 1..120: mol_type = other DNA
ccatgctcatgggtaggaagaatcaatatcgtgaaaatggccatactgcccaaggtaatttatagattcaatgccatccccatcaatctaccaatgactttcttcacagaattggaaaaa

SEQ ID NO: 95747 - DNA, 120 bp, synthetic construct
  source 1..120: mol_type = other DNA
gaggtgttcttagttgtaggtggaaaacatttgcctaatatcttgaagcatggtgctagctgtagggattttttttttaattattattatactttaagttttagggtacaagtgcacaat

SEQ ID NO: 95748 - DNA, 120 bp, synthetic construct
  source 1..120: mol_type = other DNA
agaagctctttagtttaattagatcccatttgtcaattttggcttttgttgcttttggtgttttaaacatgaagtccttgcccatgcctatgtccggaatggtaatgcctaggttttctt

SEQ ID NO: 95749 - DNA, 120 bp, synthetic construct
  source 1..120: mol_type = other DNA
gttgcttatcagcttaaggagattttgggctgagacagtggggttctctagatatacaatcatgtcatctgcaaacagggacaatttgacttcctcttttcctaattgaataccctttat

SEQ ID NO: 95750 - DNA, 120 bp, synthetic construct; identical to SEQ ID NO: 25369
  source 1..120: mol_type = other DNA

SEQ ID NO: 95751 - DNA, 120 bp, synthetic construct; identical to SEQ ID NO: 25370
  source 1..120: mol_type = other DNA

SEQ ID NO: 95752 - DNA, 120 bp, synthetic construct; identical to SEQ ID NO: 25371
  source 1..120: mol_type = other DNA

SEQ ID NO: 95753 - DNA, 120 bp, synthetic construct; identical to SEQ ID NO: 2235
  source 1..120: mol_type = other DNA

SEQ ID NO: 95754 - DNA, 120 bp, synthetic construct
  source 1..120: mol_type = other DNA
gtcacattgattgagttgcatatgttgaaccatcctcgcatcccagggataaatcccacttggtcatgatgaacgatctttctgatgtattgttgagttgggtttgctagtatttagtgg

SEQ ID NO: 95755 - DNA, 120 bp, synthetic construct
  source 1..120: mol_type = other DNA
taaaattctcaaaaataaacatcctagagacctccagttctggccaagctggagtttgccctttcctcccagatggtccctctacatcagaacaccctgaatataacagcaaaccagcaa

SEQ ID NO: 95756 - DNA, 120 bp, synthetic construct
  source 1..120: mol_type = other DNA
ccatctgtgaagaggcaaggtgaaccagcaatctagtttgctaggatggtatcagaacaggaatctgcacttatcaccttatgatatgatgggaccaccatcatatatgtggtctatcat

SEQ ID NO: 95757 - DNA, 120 bp, synthetic construct; identical to SEQ ID NO: 2079
  source 1..120: mol_type = other DNA

SEQ ID NO: 95758 - DNA, 120 bp, synthetic construct
  source 1..120: mol_type = other DNA
gtgggggttgtggtgagccgagatcgcgacattacgccccagcctgggcaacaagagccaaactccgtctcaaaaaaaaaaaaaaaaaaaaaaaggcaaaaaagaaaagaaaggaaattt

SEQ ID NO: 95759 - DNA, 120 bp, synthetic construct
  source 1..120: mol_type = other DNA
gtgtggtttataggttgccagccctttagccactgattttgtcttttaaaattctttactctgaaataattttagacttacagaaaagttacaaaaatgattatacagagagccctcgcc

SEQ ID NO: 95760 - DNA, 120 bp, synthetic construct; identical to SEQ ID NO: 2090
  source 1..120: mol_type = other DNA

SEQ ID NO: 95761 - DNA, 120 bp, synthetic construct; identical to SEQ ID NO: 2089
  source 1..120: mol_type = other DNA

SEQ ID NO: 95762 - DNA, 120 bp, synthetic construct
  source 1..120: mol_type = other DNA
cccatatcgacaaaaaataaaataaaaaataaaaagtctttaattagccaggcatggtggcacacacctgtagtcctagccacttgggaggctgaggcagttgtgaattgcttgagccca

SEQ ID NO: 95763 - DNA, 120 bp, synthetic construct
  source 1..120: mol_type = other DNA
gcactccagcctggacgacaaagcgagactccatgtcaaccaaagaaaagaaagaaaaaacaaaacaaaacatggcagaaccccactgtagggaaaagctttctaactaggattcaaatt

SEQ ID NO: 95764 - DNA, 120 bp, synthetic construct
  source 1..120: mol_type = other DNA
cctagtcgcctctcaaaaggccccacctcctaatggcatcaccttgcgggtaaaatttcctaacctgcacattgtgcacatgtaccctaaaacttgaagtgtaataataataaaataaaa

SEQ ID NO: 95765 - DNA, 120 bp, synthetic construct
  source 1..120: mol_type = other DNA
ccaccttttgaaagtagctgatctttgaaaagtatctgaactcccatgttcactgcagcattaatcacaatagccaagatatggaaacaacctaggtgtccatcaagggacagatggata

SEQ ID NO: 95766 - DNA, 120 bp, synthetic construct
  source 1..120: mol_type = other DNA
gggaaagcttcgagtgcccccccaccccattaaataagttactagcattaggacttaggtatatatgttttatcatgttaagaaagcatcctgtggtgcctattttcttaaggcttttct

SEQ ID NO: 95767 - DNA, 120 bp, synthetic construct
  source 1..120: mol_type = other DNA
agctcaaggctgcagtgagctgtgatcacaacgctgcactccagactgagtgatccagggagattcggtcattaaaatgaatgaatgaatgaatgaatgaatgaatacataagcagatgt

SEQ ID NO: 95768 - DNA, 120 bp, synthetic construct
  source 1..120: mol_type = other DNA
gtaaactttgtcattaaaaaaattacttttagcacctgctttcttattgaacattttactatctggtccactagtttgtttttaacccccagtctccttttaacactcatctactgcctt

SEQ ID NO: 95769 - DNA, 120 bp, synthetic construct; identical to SEQ ID NO: 35043
  source 1..120: mol_type = other DNA

SEQ ID NO: 95770 - DNA, 120 bp, synthetic construct
  source 1..120: mol_type = other DNA
ccacacacacacacacacacacacacacacacacacacacaccaacacagacatttatacacacatacaagtctatttgtattccatgtctatagtagaggtctcttgaagtggtcgttt

SEQ ID NO: 95771 - DNA, 120 bp, synthetic construct
  source 1..120: mol_type = other DNA
tggtagattgtttacagagtgaagagcaaagataaagggtttgcccctccttcccctcattgatgttgctgggttatattaaaatcagccacctttcatattctgtctcttcctcttcct

SEQ ID NO: 95772 - DNA, 120 bp, synthetic construct; identical to SEQ ID NO: 35041
  source 1..120: mol_type = other DNA

SEQ ID NO: 95773 - DNA, 120 bp, synthetic construct
  source 1..120: mol_type = other DNA
aactagaccacccattctcagtgatcttcacaggacaaggagttgtttcatcactgatgtgtggccactaaaatactgagtgttcttgcctgaagcccaatttgtaaagacacataatgt

SEQ ID NO: 95774 - DNA, 120 bp, synthetic construct
  source 1..120: mol_type = other DNA
ttatcgtacatcacattttggagtagccaaatttctagtgctcagtagccacatgtggctagtgtttactatactgaatagtgcaactctaggggaggagcagagggagcaaatacatat

SEQ ID NO: 95775 - DNA, 120 bp, synthetic construct
  source 1..120: mol_type = other DNA
ttcatgcatcaacagcaaagaatgaagctgagtttcctccttgtctcccagtgaactactcatatgacattttaccaaagaactggatagtttaaaaaggtaattggccaacaaagacag

SEQ ID NO: 95776 - DNA, 120 bp, synthetic construct
  source 1..120: mol_type = other DNA
ggttgcagtgagccgagatcatgccattgcaccccagcctgggcaacagagtgagactctttgtctcaaaaaaaaaattgtatgtggctacttattgttaatttcactttcattgacatt

SEQ ID NO: 95777 - DNA, 120 bp, synthetic construct
  source 1..120: mol_type = other DNA
gcacccagattcataaagcaagtccttagagacctacaaagagacttagactcccacagaataataatgggagactttaacaccccactgtcaacattggacagatcaatgagacagaaa

SEQ ID NO: 95778 - DNA, 120 bp, synthetic construct
  source 1..120: mol_type = other DNA
aataattaatagcttaccaaacaaaaaaagtccaggaccagatggattcacgcccccgaattctaccagaggtagaaggaggagctggtaccattccttctgaaactattccaagcaata

SEQ ID NO: 95779 - DNA, 120 bp, synthetic construct
  source 1..120: mol_type = other DNA
ggaatccaatttacaaggaacgtgaaggacctcttcaaggagaactacaaaccactgctcaatgaaataaaagaggatacaaacaaatggaagaacattccatgctcatgggtaggaaga

SEQ ID NO: 95780 - DNA, 120 bp, synthetic construct
  source 1..120: mol_type = other DNA
ccaccccctcaacaagtaggcgaaggatatgaacagacacttctcaaaagaagacatttatgcagccaaaagacacatgaaaaaatgctcatcatcactggccatcagagaaatgcaaat

SEQ ID NO: 95781 - DNA, 120 bp, synthetic construct; identical to SEQ ID NO: 2080
  source 1..120: mol_type = other DNA

SEQ ID NO: 95782 - DNA, 120 bp, synthetic construct
  source 1..120: mol_type = other DNA
caaaggggatctaatgaaactaaagagcttctgcagagcaaaagaaactatcatcagagtgaacagacaacctacagagtgggtggaaatttttgcagtctatccatctgacaaaggtct

SEQ ID NO: 95783 - DNA, 120 bp, synthetic construct
  source 1..120: mol_type = other DNA
aatgcacagaatggtggactgaaaaggggagaatgttatactatgtctcaaaactcggcaccttgattgttattttgtaacctgcctttctccccactgtgtcctgaatcagcaaaaact

SEQ ID NO: 95784 - DNA, 120 bp, synthetic construct
  source 1..120: mol_type = other DNA
cactcccagcagagcgaggaaaacatcctaaaggggaatctgagagtgttttaaaatagagtggattagtagaacatttgaaacagatcaggaaatgactgccttggagagacagattgt

SEQ ID NO: 95785 - DNA, 120 bp, synthetic construct
  source 1..120: mol_type = other DNA
attgaattactgtaatgagccccaaggaaacctgacaacagagagctatggaaatcgttaacagaatgtgttgccaccttactcctgagtaaaacagagtacttctcaacatgtgccatc

SEQ ID NO: 95786 - DNA, 120 bp, synthetic construct
  source 1..120: mol_type = other DNA
actaccaatcccagcctctggaagccatccttctactttctgtgtccatgagttcaactgatttgatttttagatcccacaaataagtgagaacatcagatgtttgtctttctgtgcctg

SEQ ID NO: 95787 - DNA, 120 bp, synthetic construct
  source 1..120: mol_type = other DNA
aacatatactggagaaaggacagtctcttcgataaatcgtgctggaaaacctggaccacccatatgcagaaaaatgcaactagacccctatctctccccacatacgaaaatcaaatcaaa

SEQ ID NO: 95788 - DNA, 120 bp, synthetic construct; identical to SEQ ID NO: 2087
  source 1..120: mol_type = other DNA

SEQ ID NO: 95789 - DNA, 120 bp, synthetic construct
  source 1..120: mol_type = other DNA
cctgaatgaccagtgggtcaatgcagaaattaagaaggaaattgaaacgaatggcaatggaaacacaacataccaaaacctctgggatatggcaaaagcagtactcagagggaagttcat

SEQ ID NO: 95790 - DNA, 120 bp, synthetic construct
  source 1..120: mol_type = other DNA
ccagagaaaaccactttcactagaggaagacaagaaggaaagaaagaatgaagagaagatcacaaaacaaccagaaaacaaataacaaaatggcaggactacgtccttacatgtcaaccg

SEQ ID NO: 95791 - DNA, 120 bp, synthetic construct
  source 1..120: mol_type = other DNA
ttagtgagcctgcagacaggctatttgaaaatacacagtcagaggagacaaaagaaaaaatacacaaaaatgaagcatgcctacaggacctagaaaacagcctcgaagggggaaatctaa

SEQ ID NO: 95792 - DNA, 120 bp, synthetic construct
  source 1..120: mol_type = other DNA
gggaagagtgggaaagactgcgtcctgtggtttgagtgacagctcagccacaatacttagaaccacaggtagccttctaaggtttttgatgctagtccctgattcccagatggcacttct

SEQ ID NO: 95793 - DNA, 120 bp, synthetic construct
  source 1..120: mol_type = other DNA
cgtgccactgcactccagcctgggcaacagagcgagactccatctcaaaaaaacaaacaaaaaaaagaactgcaactcttaggtgagtcctggtgttgaattaggcccagagacagtgga

SEQ ID NO: 95794 - DNA, 120 bp, synthetic construct
  source 1..120: mol_type = other DNA
tgaaccaaccttgcatcccaggagtagggcctacttgatcgtgatggattagttttttgatgtactgctggaatcaatttgctggtattttggtgaggatttttgcatctaggttcatca

SEQ ID NO: 95795 - DNA, 120 bp, synthetic construct
  source 1..120: mol_type = other DNA
ggcagaattcaaaaaaattctttgaagctattgaaaacaaaggtacaacataccagaatctctgggggcacagctaaaacagtgttaagaggaaagtttatggtgctaagtgcctacatg

SEQ ID NO: 95796 - DNA, 120 bp, synthetic construct
  source 1..120: mol_type = other DNA
ttctttatccaacttgccactctctgccttttaagtgggggcgtttagcccatttacattcaaggttaatattgatatgtgaggatttgatcctgtcactgtgccgttagctggttgtta

SEQ ID NO: 95797 - DNA, 120 bp, synthetic construct
  source 1..120: mol_type = other DNA
gctaaaagccagagtgtcttcttgtctccaaatggccacactagctctgcagtaatggttcttaaccagacctatgtggctgaaatgatagacataaaatttagaatctggatggcaaca

SEQ ID NO: 95798 - DNA, 120 bp, synthetic construct
  source 1..120: mol_type = other DNA
ccatgcttcagtgcagcttttcccatgctaaaccctctggactccatgcaggcaagatttctatctctgccagctctcccggcaattctccctgcaatctcaaatgtctgtgggggtcat

SEQ ID NO: 95799 - DNA, 120 bp, synthetic construct
  source 1..120: mol_type = other DNA
gccacaacaagaaagctacaaagcaatatcccttatgaataccagtgttcagaatcctagatgaaacgctagcaggcagaaccttgcagtatattgaaaggattacacacccatgactga

SEQ ID NO: 95800 - DNA, 120 bp, synthetic construct
  source 1..120: mol_type = other DNA
atacaggtggattttgattacgtggataagttcttcagtggtgattcctgagattttggtgcacccgtaacctgagcagtgtacactgtacccaatagatagtcttcttttatccctcac

SEQ ID NO: 95801 - DNA, 120 bp, synthetic construct
  source 1..120: mol_type = other DNA
gagtttcttgtagattctggatattagtcctttgttggatgcagggtttgtgaatgttttctcccactctgtgggttgtctgtttactcttctgagtatttcctttgccgtgcagaagct

SEQ ID NO: 95802 - DNA, 120 bp, synthetic construct
  source 1..120: mol_type = other DNA
agataccatctcacaccagttagaatggcgatcattaaaaagtcaggaataacaggtgctggagaggatgtgaagaaataggaacacttttacactgttggtgggactgtaaactagttc

SEQ ID NO: 95803 - DNA, 120 bp, synthetic construct
  source 1..120: mol_type = other DNA
ttctgagttctttattctgctccattggtctacatacctgtttttatgccagtaccatgctgctttggtaactatagccttgtggtataatttgaagccaggtaatgtgatgcctcctga

SEQ ID NO: 95804 - DNA, 120 bp, synthetic construct
  source 1..120: mol_type = other DNA
ctgaagcatctttgttagacttatttccatgtaccttactattttgtggcagttataattggtgttcattgaagagttgtttttcctctaagtggttgttgctggtttgtaggaatacag

SEQ ID NO: 95805 - DNA, 120 bp, synthetic construct
  source 1..120: mol_type = other DNA
atggttacacatacaggtttgttacatgggaatattgtgtgatgctgaggtttggggtgtggatcccatcacccaggttttgagcatagtatccaataaataggttttcaacccatatcc

SEQ ID NO: 95806 - DNA, 120 bp, synthetic construct
  source 1..120: mol_type = other DNA
cctactcagagcttcctaccgtaggtctttgagcccaaggtccatagtgtatcttttcaacagacttcttttttttttttttaatcctttaagttttagggtacatgtgcacaacgtgca

SEQ ID NO: 95807 - DNA, 120 bp, synthetic construct
  source 1..120: mol_type = other DNA
ttttcttcacatcctcattcttctctagtataccctgtaagagccactgtaccacatcctacaacagtttatttttacgttctgtgggtgtcgaggtgggagtatattggtgaatgttcc

SEQ ID NO: 95808 - DNA, 120 bp, synthetic construct
  source 1..120: mol_type = other DNA
ttatagggacagcagtcatattggagttagggcctaccctgcctggttcaatatgatctcatcttaatgtgactgcgtctgaaaaaacactatttccaaatacggccacatttacaggtt

SEQ ID NO: 95809 - DNA, 120 bp, synthetic construct
  source 1..120: mol_type = other DNA
aaagagataagttgaggaaggaactgttaagccaaaaggaagcacgcttgatgatttggaaaattcacagtctacccagatagtgcactatggaaacagggccaaaagtgtggctgaaca

SEQ ID NO: 95810 - DNA, 120 bp, synthetic construct
  source 1..120: mol_type = other DNA
tccccaaatttatgtctacctggaatctgtgaaggtgattttaattggaagcaaggtctctgtagatgtaatcaagtgacgataaagtcacactggactagggtgtgccctaatccaatg

SEQ ID NO: 95811 - DNA, 120 bp, synthetic construct
  source 1..120: mol_type = other DNA
tagattttagatattcttaacacaaaatgtgataagtaggtgagatgatggatatattaattagcttgagttagtctttctaaatgtatacacttatcaaaataccacattgtaccccgt

SEQ ID NO: 95812 - DNA, 120 bp, synthetic construct
  source 1..120: mol_type = other DNA
ggtcaaagatttttatgtctcattcagagtttctacacctaatcttgtcacagtcctgggtgatttcaatgtccatgtagaaaaccagtctgattccaagcctcatggtcgcaagacctc

SEQ ID NO: 95813 - DNA, 120 bp, synthetic construct
  source 1..120: mol_type = other DNA
aagttttgtctttctgtaaacacgcgacacagacttcacaaagatatcaaagatcctcagatttcagtatggaacaaccttaaaagccctgggtctttagaagaaagtcagactcagcca

SEQ ID NO: 95814 - DNA, 120 bp, synthetic construct
  source 1..120: mol_type = other DNA
tagaaatctttgaatcataattgctcattgttttaaatggtcttcacagtggagggggtttggaccagagagctgcatcttcacaaatggcactgctcttcagtaaacaccctctatgga

SEQ ID NO: 95815 - DNA, 120 bp, synthetic construct
  source 1..120: mol_type = other DNA
ggcccccgtttctatcattacatacagatgaacagatcaccagtaaaaggcacagcacaattttatctagcccacctatgctcaactggaacttacacggtattgatgatggtcaaattc

SEQ ID NO: 95816 - DNA, 120 bp, synthetic construct; identical to SEQ ID NO: 2081
  source 1..120: mol_type = other DNA

SEQ ID NO: 95817 - DNA, 120 bp, synthetic construct; identical to SEQ ID NO: 2082
  source 1..120: mol_type = other DNA

SEQ ID NO: 95818 - DNA, 120 bp, synthetic construct
  source 1..120: mol_type = other DNA
tgacgcgctggaaggaagtctggtacgagtggaaccagccggtactagaagtttactgagaattgggctttaaggcgtggctgagcaatctccaaatagcagaggctctgagggggtggg

SEQ ID NO: 95819 - DNA, 120 bp, synthetic construct
  source 1..120: mol_type = other DNA
ttctctaaccatctgacaagcaatatttgaaaccccgtaagtttaagcacaatcttgctatttgctcaacttcattcacccaataccgctttcatgatgtaccaaatgttatcacccatg

SEQ ID NO: 95820 - DNA, 120 bp, synthetic construct
  source 1..120: mol_type = other DNA
aaacctcagtgacttatttctcactcctgctgcatgtttatgccaggtgcatatccttcacgggatggtggatgttgggttctgagccattcttattggaatgactcagagacccaaact

SEQ ID NO: 95821 - DNA, 120 bp, synthetic construct
  source 1..120: mol_type = other DNA
aggataatgataaaatctctggccacacgggcagagaaaattagcgaggtggtgcgggtcagccacttttggaatgaagatagtgtcacacttacagtgacagaaaagattgaaaaagat

SEQ ID NO: 95822 - DNA, 120 bp, synthetic construct
  source 1..120: mol_type = other DNA
tattccagcactcttaaacattcttatatgctttcctgtactgtagagactagaaagttggaacatgaaaggaaacacacatgcacatgaccccacgcatgtgcgcacacactctctttc

SEQ ID NO: 95823 - DNA, 120 bp, synthetic construct
  source 1..120: mol_type = other DNA
tggatctaaccacggttctgctttgattgttttgggtgtgtcctggtgctagtgaattgtttcagtgtccccaagtggctctaatgtgtaatcatggttgagaactgcttgaacaattta

SEQ ID NO: 95824 - DNA, 120 bp, synthetic construct
  source 1..120: mol_type = other DNA
agattagggctagctaccacctcaatcaagatatagaacatataacacaacccaaaaggtttccagtcgatctcctcttcatcccttggctccgtgcaaacattgatatactttccgtta

SEQ ID NO: 95825 - DNA, 120 bp, synthetic construct; identical to SEQ ID NO: 35026
  source 1..120: mol_type = other DNA

SEQ ID NO: 95826 - DNA, 120 bp, synthetic construct
  source 1..120: mol_type = other DNA
tgcagtgggatccagtgttgtgtggcaatgtgtttaccaacatgatttggagtacatgtatctgtaacctaattgtggaagcatgtaatacgaaacactaatacttgctcgcatgggcaa

SEQ ID NO: 95827 - DNA, 120 bp, synthetic construct
  source 1..120: mol_type = other DNA
tgatgtaggcagaattccaaactaacacaggaagtaccagtaggaacacacgtgatgtcataaaggttactcaccactatgtctgtgtggggggatcagccagtacatggtgggacttga

SEQ ID NO: 95828 - DNA, 120 bp, synthetic construct; identical to SEQ ID NO: 35025
  source 1..120: mol_type = other DNA

SEQ ID NO: 95829 - DNA, 120 bp, synthetic construct
  source 1..120: mol_type = other DNA
ggtaagtggaccattgatgtgtctcaaacttgtctttttgttctcagttgcagaatgccatgaccatggtagcacttttcaaggaagaaagaaaggtgggagttctttccgggataattt

SEQ ID NO: 95830 - DNA, 120 bp, synthetic construct
  source 1..120: mol_type = other DNA
tccacgttgtctctcccttccctcctatttcttctttttacccttagattccttacgggataaagtatgacaaggcatggctaatgaattcaatccagagccattgcagtgaccgcttca

SEQ ID NO: 95831 - DNA, 120 bp, synthetic construct
  source 1..120: mol_type = other DNA
tgttgcacaagttcaaagacaacagctttgggtcaagaagagttagagtggcggctactatcttgggcctcagagacaaatctgccctccaccttatcccttccacccctctaactaaat

SEQ ID NO: 95832 - DNA, 120 bp, synthetic construct
  source 1..120: mol_type = other DNA
gtggagaaggagggaaggtggggcagtgccctgagaggcctgtccttctgtcttctcaacctcctctgccctctgccttccactcctgcctcaggaacgtggcccgcttctggacccttg

SEQ ID NO: 95833 - DNA, 120 bp, synthetic construct
  source 1..120: mol_type = other DNA
cacttcattcaatttttggttttggacagtgccatccgggattgtttccccaagttgttacgcctggtaagtatgtataataccgtcatcattgtctcctcttactcaagaaaaggacct

SEQ ID NO: 95834 - DNA, 120 bp, synthetic construct
  source 1..120: mol_type = other DNA
cactcctgctcctctttttctcctaggagcagcttgtgcaagtactttgaggatagcaggaatatgaaaacactcaaggacccctgtaagtgtgtgatggggaagagtgggcaaggtaag

SEQ ID NO: 95835 - DNA, 120 bp, synthetic construct
  source 1..120: mol_type = other DNA
gggtgaaggcgagaacagaaccctgagactgtccttccacttcaaagacaacaaacaccaccaccttagagttgcacaggctttaacatgctcacacggtgatccccagtcagagtattg

SEQ ID NO: 95836 - DNA, 120 bp, synthetic construct
  source 1..120: mol_type = other DNA
gtacatggggatgggggctgttgggacatcagaggaatgagtaatggaaactcacatgcaatttggaaaaataactatctgggtattttgcttccaaaaaaagtgggtccatgaaaaagg

SEQ ID NO: 95837 - DNA, 120 bp, synthetic construct
  source 1..120: mol_type = other DNA
acagttctggctcttattttaggtcattgatccattttctgccagtgtttgcacgtgatgtgagttaggggtcaaaattaattgttttgcaagtggatatccacttctcccagcaccatt

SEQ ID NO: 95838 - DNA, 120 bp, synthetic construct
  source 1..120: mol_type = other DNA
tctacggatctggctattctgaacacttcgtatgaatggaatcatataattatgtggctttttgtgactgggtgctcccacttagcacataatgttttcagggttcatccacgtcatagc

SEQ ID NO: 95839 - DNA, 120 bp, synthetic construct
  source 1..120: mol_type = other DNA
gacataaccacccaaagagccagttgctctgtgtattcgccccactcatgatcaccattttattttcataataaagagtgacgttacacgttgtacattgtgtgccctggattgctcttc

SEQ ID NO: 95840 - DNA, 120 bp, synthetic construct
  source 1..120: mol_type = other DNA
gaatatgccaaccttgttcttccctgtagtgcttcaatagtcgaagacaagctcctatacctctctaagccttggtcctctcagccagggagcagagactacaatgtgtgcttctcagcc

SEQ ID NO: 95841 - DNA, 120 bp, synthetic construct
  source 1..120: mol_type = other DNA
ggaattcataagggctcatccctgagaagaggcattatttcccatatgtcacttgttttcctgcccactgcatatgatggcatcaagtttatagacacctccaacagggtgtactttttt

SEQ ID NO: 95842 - DNA, 120 bp, synthetic construct
  source 1..120: mol_type = other DNA
cttcagcattacctggtatattagggatccaccaagaaacagaaccagcaaggggtgtgtgtgtgtgtgtgtgtgtgtgtctcgtttgtgtgtgtgtgtgtgtgcacttttttagaaatt

SEQ ID NO: 95843 - DNA, 120 bp, synthetic construct; identical to SEQ ID NO: 35016
  source 1..120: mol_type = other DNA

SEQ ID NO: 95844 - DNA, 120 bp, synthetic construct
  source 1..120: mol_type = other DNA
cggagttcacctttcttcttgggctatatgggaattgggatggtacttgccccttaaagatgacatgaggagtaaatggatcactgcattgaaagcaagcagagcaatgatatattagtc

SEQ ID NO: 95845 - DNA, 120 bp, synthetic construct
  source 1..120: mol_type = other DNA
cacagttctatgaaatgtcaatgcagtacatttgcacgtgggcaagcaaacaaaaaataagggaatgaagttcaggaaaatgttaacagttctttttccagcgatgatgggatcgttggt

SEQ ID NO: 95846 - DNA, 120 bp, synthetic construct
  source 1..120: mol_type = other DNA
accttctgtgaaggtatttttagatgagattgccatttagatctgtagactttgagtaaagcagattaccctgcacaatgtgggttggccttatccaatcagttgaaggccttcaggagt

SEQ ID NO: 95847 - DNA, 120 bp, synthetic construct
  source 1..120: mol_type = other DNA
atgtagatctgcagtgatgactttcttttattcttgacattgttcatttatgtgctaattgtgtggagtgtggaggggaaactttgattaggacagaaaggagcatacggcagccacagc

SEQ ID NO: 95848 - DNA, 120 bp, synthetic construct
  source 1..120: mol_type = other DNA
ataaaactaggaactaaggggatagttgccattacaaaaagaatatgccaaccttgttcttccctgtagtgcttcaatagtcgaagacaagctcctatacctctctaagccttggtcctc

SEQ ID NO: 95849 - DNA, 120 bp, synthetic construct
  source 1..120: mol_type = other DNA
aaaagaggaaacaaagaggatgtgaacgaagacaaagaagacatcggagggctccttttaggagatttgcttgaaggcctccgcggggatcttgccctcggtctagagaaagtaaagaaa

SEQ ID NO: 95850 - DNA, 120 bp, synthetic construct; identical to SEQ ID NO: 95838
  source 1..120: mol_type = other DNA

SEQ ID NO: 95851 - DNA, 120 bp, synthetic construct; identical to SEQ ID NO: 95837
  source 1..120: mol_type = other DNA

SEQ ID NO: 95852 - DNA, 120 bp, synthetic construct; identical to SEQ ID NO: 95836
  source 1..120: mol_type = other DNA

SEQ ID NO: 95853 - DNA, 120 bp, synthetic construct
  source 1..120: mol_type = other DNA
gctggttacttaacccttcagtttcctcatttgcaaaatggggctaataatctatctcttgggctactgtgaaataggaattaagtgaacttgtggttttcccagggccccacacatgat

SEQ ID NO: 95854 - DNA, 120 bp, synthetic construct
  source 1..120: mol_type = other DNA
caaattgtcttttgatttcaggaaaactttactggatctgagaccctaaagcatttagtcctgcaattcctgcagcagtgagtatccctgggaccatgaggaaggggagggctgagacag

SEQ ID NO: 95855 - DNA, 120 bp, synthetic construct
  source 1..120: mol_type = other DNA
agggacggatgggtgagacataggagaggagagacaagggagaaacaggatgcaatgcaaagggaagggaaagactctctactgcggaggtggagttcagggaggagaagaggagaaaag

SEQ ID NO: 95856 - DNA, 120 bp, synthetic construct
  source 1..120: mol_type = other DNA
aaaaggggaccatgtcagaggaaggaaaggagacctctaagcacagatgagtgagtgacagagagagaggagagagagagagagagagtaggaagggaggtctgtggtcctcccagagga

SEQ ID NO: 95857 - DNA, 120 bp, synthetic construct
  source 1..120: mol_type = other DNA
ttgtcttagaattgctgctgtcagccttacctgggtcaaagcggagattctggagatcaagagcttgctgggagacattgtaccgtttgttcatggtcagctgcagagatagagatgaag

SEQ ID NO: 95858 - DNA, 120 bp, synthetic construct
  source 1..120: mol_type = other DNA
aagaccacttaaaacaccctaagttgattatttggaggagagcttcggaatggggggaaagggagtttagggcatctatatttggcacaaaaataagaaatcatgtcagcggtcctttct

SEQ ID NO: 95859 - DNA, 120 bp, synthetic construct; identical to SEQ ID NO: 35009
  source 1..120: mol_type = other DNA

SEQ ID NO: 95860 - DNA, 120 bp, synthetic construct
  source 1..120: mol_type = other DNA
ccaaaccgcggttaaaggattttgagtaaaggaatgacaagatttgacttatgccttaaaaaatcactctgcctcctgtgttgaaaatagatggtaggggagtcaagggcaaaagcagga

SEQ ID NO: 95861 - DNA, 120 bp, synthetic construct; identical to SEQ ID NO: 35007
  source 1..120: mol_type = other DNA

SEQ ID NO: 95862 - DNA, 120 bp, synthetic construct
  source 1..120: mol_type = other DNA
gcagtcatttctacttctccctttgacaatatcagccactctctggtcccgtcatccttctgtcccaaaggacctgtaaagcacagccgtataattatatgtatatatttagacagagag

SEQ ID NO: 95863 - DNA, 120 bp, synthetic construct
  source 1..120: mol_type = other DNA
tcatctgacatatgggttcagggaaccaaaacagaaagctcagagcatgaaacaggttatgcggaaggattcagtagggagcttaagttcccgtttccgatctttcaggaaaaaaaaaaa

SEQ ID NO: 95864 - DNA, 120 bp, synthetic construct
  source 1..120: mol_type = other DNA
gaaatattatcttaatgtctgtttcagcctcttccattctttctgttccctcagtgccaattattggatttgttgagtttgtgccatcccttccttgctgatcctgggttgtggatgtct

SEQ ID NO: 95865 - DNA, 120 bp, synthetic construct
  source 1..120: mol_type = other DNA
ctgaataacatgggagccatatgtggggtggactacctgtgatgagggaggtctccagttttcatgcggcagccattgcagagtttctagaattcagtctctgtcatgcatgtcaattaa

SEQ ID NO: 95866 - DNA, 120 bp, synthetic construct
  source 1..120: mol_type = other DNA
aatagcaaactaaacccaacaatgggtaaagcagataatacagcatgacgaggttgtgtttaatcccaagcatgcaagctgagtttaacattttaagagatccataatgtaatctaacac

SEQ ID NO: 95867 - DNA, 120 bp, synthetic construct; identical to SEQ ID NO: 95820
  source 1..120: mol_type = other DNA

SEQ ID NO: 95868 - DNA, 120 bp, synthetic construct
  source 1..120: mol_type = other DNA
ctcatttcagcatttccaagttcgttctgtgagactgtagtgtcaggacaaagcaacaacaaaatgtgctctactctaaagaagtgtgggacatacagaactgaaggtaaacgaatactg

SEQ ID NO: 95869 - DNA, 120 bp, synthetic construct
  source 1..120: mol_type = other DNA
tccaacaacagctcctgtgagtccaggatcaaggcggatggcagacatagatgcatgggtgcgcacgcacacacacacacgcacgcacacacagtttctctgccaggtgttcacaagttc

SEQ ID NO: 95870 - DNA, 120 bp, synthetic construct; identical to SEQ ID NO: 2083
  source 1..120: mol_type = other DNA

SEQ ID NO: 95871 - DNA, 120 bp, synthetic construct
  source 1..120: mol_type = other DNA
ttaggcaagtgatttaacgcctctgtgcttcagtttcctcgtctgtaaaattctgttatactacctactccatagagttagcactcttaaatgcggtaaccttttggagtgtgtggcaca

SEQ ID NO: 95872 - DNA, 120 bp, synthetic construct
  source 1..120: mol_type = other DNA
tgaaatttcaagttggatttaggaagtatctatacaaagtcacaggatggaagcctacttcaagacctggtatctgccctggcccccgtttctatcattacatacagatgaacagatcac

SEQ ID NO: 95873 - DNA, 120 bp, synthetic construct
  source 1..120: mol_type = other DNA
ggttggcatattgagcaatttgccagggagcactatctgcaactgcttctctttttttcctattgcttggcactgacataaagttacttctagctacgctaatgaatttcacgaaggaac

SEQ ID NO: 95874 - DNA, 120 bp, synthetic construct
  source 1..120: mol_type = other DNA
cattagaggaaaaggttgttctttaattttggtacattataggagtctgactctcttcttttttctctccttgagacggactctcgctctgttgcccaggctggagtgcagtggtgcgat

SEQ ID NO: 95875 - DNA, 120 bp, synthetic construct
  source 1..120: mol_type = other DNA
ggatgtttacatctttccgttactggctcagttaaccatgaaactcactctgcctctgaactctcagttatataagcaagtgtctttacctattggataagccagcgagacttgcacttt

SEQ ID NO: 95876 - DNA, 120 bp, synthetic construct
  source 1..120: mol_type = other DNA
agagacaggggcattttactgctgaggatttgggactggagcacagttagacaggaggaatatgttttggtgatcaattgcacagcatagtgagcagagttaataacaacgtatcatata

SEQ ID NO: 95877 - DNA, 120 bp, synthetic construct
  source 1..120: mol_type = other DNA
agacacagtgaccaaagagctctagcttgatccttgctaaacaggactcaagtgctgtattcgtttcttcaggctgctataacaaatttccataaacgggtggcttgaaacaacagaatt

SEQ ID NO: 95878 - DNA, 120 bp, synthetic construct
  source 1..120: mol_type = other DNA
atgtttctgccttcagagacattcttctttcatttttgtcccatctctggacatttcagtccaggctggcagcgtttctgctagtataaaactctcaaaatccttgccatgtttttgcag

SEQ ID NO: 95879 - DNA, 120 bp, synthetic construct
  source 1..120: mol_type = other DNA
tagcccccagaactgtgtgagaataaatttatcttgcttttagccacccagtttgggtattttgttatggcagccctaagaaactaatgcagattttagtgctaagacgtgggttgttcc

SEQ ID NO: 95880 - DNA, 120 bp, synthetic construct
  source 1..120: mol_type = other DNA
ctaaggacttatgacctatacgtctgttttatagcctataaaattttgctaacatatttttcttggtgtggtgtcgttgtctggtaccttctgattttttgtcccgctttgcaccccccg

SEQ ID NO: 95881 - DNA, 120 bp, synthetic construct
  source 1..120: mol_type = other DNA
atttgtagacgtcttcatggggacaaacgggggagattcaatggcacgtgtcccagtgaaatgtcaccaaacagtctgcgttagactatcttgcctctcttcctcataccctcatgagat

SEQ ID NO: 95882 - DNA, 120 bp, synthetic construct
  source 1..120: mol_type = other DNA
tgaaaagactgacgaaacagccaacgttggcaatactggtgaagggagaaagatgaagagcagtggacaggaggagagagagagagaacacaaaggaacaatattaaaaattaacaagca

SEQ ID NO: 95883 - DNA, 120 bp, synthetic construct
  source 1..120: mol_type = other DNA
agaaccgccactgttgagcagaaatgacaatattgagcaaccttgtcctgttcttgatttttaaggacaatccatgtaaatcttcaccagtgtgcacagctgttggtgcagattattttg

SEQ ID NO: 95884 - DNA, 120 bp, synthetic construct
  source 1..120: mol_type = other DNA
catcccatgctcatggatgggtggaatcaatatggtgaaaatgaccatactgcccaaagcgatctacaaattcaatgcaattccaatcaaagtaccatgatcattcttcacagaactaga

SEQ ID NO: 95885 - DNA, 120 bp, synthetic construct
  source 1..120: mol_type = other DNA
gacgtttgggttggttccacgtctttgctattgtgaatagtgccgcaataaacatacatgtgcatgtgtctttatagcagcatgatttatagtcctttgggtatatacccagtaatggga

SEQ ID NO: 95886 - DNA, 120 bp, synthetic construct
  source 1..120: mol_type = other DNA
caagatggattgaagacttaaatgttagacctaaaactataaaaaccctagaagaaaacctaggcaatgccattcaggacataggcatcggcaaggacttcatgtctaaaacaccaaaag

SEQ ID NO: 95887 - DNA, 120 bp, synthetic construct
  source 1..120: mol_type = other DNA
tgagttacttcacttacagtagtggctttcagctccatccaagttgctgcagaggccattatttcgttccactttatggctgagtagtattctgtggtgtatatatgccacatcttcttt

SEQ ID NO: 95888 - DNA, 120 bp, synthetic construct
  source 1..120: mol_type = other DNA
cttccttagcgtgacataaaccatatatggaaatacctatagctaacgtcatactcaatggaaaagactgaaaggttttcccctaagatcgggaacaggacaaggatgcctgcttttgtc

SEQ ID NO: 95889 - DNA, 120 bp, synthetic construct
  source 1..120: mol_type = other DNA
tccaaagatctgtttggaatgtgctggtcttcttgatgatcgggtctcttattgggaggagttcttcctgtctgcatctggtcagccatctttgccccaaagccttcagtaatttttaaa

SEQ ID NO: 95890 - DNA, 120 bp, synthetic construct
  source 1..120: mol_type = other DNA
gcttttacattctttgatgaacttgaggttttgatgtggtataagtcaatttagtcaattggcttcatttctggatgattttggggaaccaagacacagctcagcgctcctgggctgcat

SEQ ID NO: 95891 - DNA, 120 bp, synthetic construct
  source 1..120: mol_type = other DNA
cttttgtttccatgtttagcgctcccttaaggacctctggtaatgcagatctgggggcaatgagttcccttagcatttgcttgtctgaaaaggattttatttctgcttttcttatgaagc

SEQ ID NO: 95892 - DNA, 120 bp, synthetic construct
  source 1..120: mol_type = other DNA
tgtaggcacttagcaccataaactttcctcttaacactgttttagctgtgcccccagagattctggtatgttgtacctttgttttcaatagcttcaaagaatttttttgaattctgccca

SEQ ID NO: 95893 - DNA, 120 bp, synthetic construct
  source 1..120: mol_type = other DNA
cctttgagtaggatgttggctgtgggtttgtcctagatgactcttattattttgaggtatgcttctctgatgcccagtttgttgagggtttttgacatgaagggatgttgaatttcgttg

SEQ ID NO: 95894 - DNA, 120 bp, synthetic construct; identical to SEQ ID NO: 2084
  source 1..120: mol_type = other DNA

SEQ ID NO: 95895 - DNA, 120 bp, synthetic construct
  source 1..120: mol_type = other DNA
ggacctctctccaatgaagggaaaaacagtcctagctggctttgccacttgcttattgtagagccccagggccttgagcaaacaaaggcagtagccaaggagtaattacagcaggccttg

SEQ ID NO: 95896 - DNA, 120 bp, synthetic construct; identical to SEQ ID NO: 95791
  source 1..120: mol_type = other DNA

SEQ ID NO: 95897 - DNA, 120 bp, synthetic construct; identical to SEQ ID NO: 2085
  source 1..120: mol_type = other DNA

SEQ ID NO: 95898 - DNA, 120 bp, synthetic construct; identical to SEQ ID NO: 2086
  source 1..120: mol_type = other DNA

SEQ ID NO: 95899 - DNA, 120 bp, synthetic construct; identical to SEQ ID NO: 2087
  source 1..120: mol_type = other DNA

SEQ ID NO: 95900 - DNA, 120 bp, synthetic construct
  source 1..120: mol_type = other DNA
aaagaaatccatacacctacagtgatctcatttttgacaaaggtgccaagaacatatactggagaaaggacagtctcttcgataaatcgtgctggaaaacctggaccacccatatgcaga

SEQ ID NO: 95901 - DNA, 120 bp, synthetic construct; identical to SEQ ID NO: 95786
  source 1..120: mol_type = other DNA

SEQ ID NO: 95902 - DNA, 120 bp, synthetic construct; identical to SEQ ID NO: 95785
  source 1..120: mol_type = other DNA

SEQ ID NO: 95903 - DNA, 120 bp, synthetic construct
  source 1..120: mol_type = other DNA
tgaaggctgtctgtggacagcactcccagcagagcgaggaaaacatcctaaaggggaatctgagagtgttttaaaatagagtggattagtagaacatttgaaacagatcaggaaatgact

SEQ ID NO: 95904 - DNA, 120 bp, synthetic construct; identical to SEQ ID NO: 95783
  source 1..120: mol_type = other DNA

SEQ ID NO: 95905 - DNA, 120 bp, synthetic construct; identical to SEQ ID NO: 95782
  source 1..120: mol_type = other DNA

SEQ ID NO: 95906 - DNA, 120 bp, synthetic construct
  source 1..120: mol_type = other DNA
gggtgcaggacaccaacatggcacatgtatacatatgtaacacacctgcacgttgtgcacatgcaccctaaaacttaaagtataataaaaaaaaaaatgacctgttggatttctactttg

SEQ ID NO: 95907 - DNA, 120 bp, synthetic construct
  source 1..120: mol_type = other DNA
aacaggcaacctacagaatgggaggaaaattttgcaatctactcatctgacaaagggctaatatccagaatctacaacgaactccaacaaatttacaagaaaaaaacaaaccaccccctc

SEQ ID NO: 95908 - DNA, 120 bp, synthetic construct
  source 1..120: mol_type = other DNA
gcattccctttgaaaactggcacaagacagggatgccctctctcaccactcctattcaacatagtgttggaagttctggccagggcaatcaggcaggagaaggaaataacgtgtattcag

SEQ ID NO: 95909 - DNA, 120 bp, synthetic construct
  source 1..120: mol_type = other DNA
cgagaacaaagacacaacataccagaatctctgggacacattcaaagcagtgcgtagagggaaatttatagcactaaatgcccacaagagaaagcaggaaagatctaaaattgacaccct

SEQ ID NO: 95910 - DNA, 120 bp, synthetic construct
  source 1..120: mol_type = other DNA
taaaatactttacagacaagcaaatgctgagggattttgtcaccaccaggcctgccctaacagagcttctgaaggaagcactaaacatggaaaggaacaaccggtaccagccactgcaaa

SEQ ID NO: 95911 - DNA, 120 bp, synthetic construct; identical to SEQ ID NO: 2088
  source 1..120: mol_type = other DNA

SEQ ID NO: 95912 - DNA, 120 bp, synthetic construct
  source 1..120: mol_type = other DNA
gccaccatgtcagtaaatagggacactttttcatgacttcatttccaatctgtgtgccttttagtgctttcctttgctttattgtaccggttgggtcttccaaggaggtattcaatagga

SEQ ID NO: 95913 - DNA, 120 bp, synthetic construct
  source 1..120: mol_type = other DNA
tgggtacttgacgcaagtcaggacagttgaaacctttcctggatgtttttctggagtaggtgctggttactgaagccaataatattactcactgaggtcctttaatcttcctgtattcat

SEQ ID NO: 95914 - DNA, 120 bp, synthetic construct
  source 1..120: mol_type = other DNA
acatacagtgtgtacaaatgagatggcagggctctgtagagagaaaaaaggaaggcatttctgaagaatgagggttggattagagcaagcagccctgaattatagatacttatgactcta

SEQ ID NO: 95915 - DNA, 120 bp, synthetic construct; identical to SEQ ID NO: 34985
  source 1..120: mol_type = other DNA

SEQ ID NO: 95916 - DNA, 120 bp, synthetic construct
  source 1..120: mol_type = other DNA
tgcatggagtctgctgagtgatgagcctgcagctatccatgctcttgaggagctcccatgagacctctttgttccattgttcatcactgccttcttgggtgggcagaagatgaaactaaa

SEQ ID NO: 95917 - DNA, 120 bp, synthetic construct
  source 1..120: mol_type = other DNA
ctaaaatacgtgtaatttaaaggggtagagatgatcttagaatgtagtctttgggttgggtgcagtggctcatgcctgtaatcccatcactttgggaggcccgaggcaggaggaccactg

SEQ ID NO: 95918 - DNA, 120 bp, synthetic construct
  source 1..120: mol_type = other DNA
tcacaatcccagtttaccctttagaatataagttagcaaacgttttctgtaaagagccatatggtaaatattccaaccagtgggccatagtttgcagacccttgctctagtggagtcctc

SEQ ID NO: 95919 - DNA, 120 bp, synthetic construct
  source 1..120: mol_type = other DNA
tggttggattacaggtgtgagccaccaagcccggcaatttctgcttttatgttatttctttatttgtgtttcttttggtttcccgggttgttcttttattagatttttgaggcagtgctt

SEQ ID NO: 95920 - DNA, 120 bp, synthetic construct
  source 1..120: mol_type = other DNA
gcaaagtgggatttatcccatcaatacagattggctcaatattagaaagtaccttgatatcatccaccatattaatatacttaaagacaaatatcatatggttatcaccacagatgttga

SEQ ID NO: 95921 - DNA, 120 bp, synthetic construct; identical to SEQ ID NO: 95765
  source 1..120: mol_type = other DNA

SEQ ID NO: 95922 - DNA, 120 bp, synthetic construct; identical to SEQ ID NO: 95764
  source 1..120: mol_type = other DNA

SEQ ID NO: 95923 - DNA, 120 bp, synthetic construct
  source 1..120: mol_type = other DNA
gaggttgcagtgagccgagatcgcgccactgcactccagcctggacgacaaagcgagactccatgtcaaccaaagaaaagaaagaaaaaacaaaacaaaacatggcagaaccccactgta

SEQ ID NO: 95924 - DNA, 120 bp, synthetic construct
  source 1..120: mol_type = other DNA
cacatagtttattcaaccactcgcctatgtttgggcattttgtttttaatacagaaaccaggtctcgctctataacccaggctgactgaagtgcagtggcacaatcatagctcatggtaa

SEQ ID NO: 95925 - DNA, 120 bp, synthetic construct; identical to SEQ ID NO: 2089
  source 1..120: mol_type = other DNA

SEQ ID NO: 95926 - DNA, 120 bp, synthetic construct; identical to SEQ ID NO: 2090
  source 1..120: mol_type = other DNA

SEQ ID NO: 95927 - DNA, 120 bp, synthetic construct
  source 1..120: mol_type = other DNA
acaaaatcagtggctaaagggctggcaacctataaaccacactgcttaacaataaccaattgaaacatagttagaaggatgcatacaaagagggatacatgctcataccacatgattcat

SEQ ID NO: 95928 - DNA, 120 bp, synthetic construct; identical to SEQ ID NO: 2091
  source 1..120: mol_type = other DNA

SEQ ID NO: 95929 - DNA, 120 bp, synthetic construct; identical to SEQ ID NO: 2079
  source 1..120: mol_type = other DNA

SEQ ID NO: 95930 - DNA, 120 bp, synthetic construct; identical to SEQ ID NO: 95756
  source 1..120: mol_type = other DNA

SEQ ID NO: 95931 - DNA, 120 bp, synthetic construct
  source 1..120: mol_type = other DNA
gatgtcaaaataaaattctcaaaaataaacatcctagagacctccagttctggccaagctggagtttgccctttcctcccagatggtccctctacatcagaacaccctgaatataacagc

SEQ ID NO: 95932 - DNA, 120 bp, synthetic construct
  source 1..120: mol_type = other DNA
agtggtgaatgtgggcatccttgtcatgttccagatcttagaggaaaggctttcactttttccccattcagtatgatactagctgtcagtctgttgtatatgacttttattatgttgagg

SEQ ID NO: 95933 - DNA, 120 bp, synthetic construct
  source 1..120: mol_type = other DNA
tcatcttatataaaaatcaaatcagaatggattaaagacgtaaatctgagatgtcagcctatgaaacttctacaagaaaacaccggggaaacgctccaggatactgttctgggcaaaaat

SEQ ID NO: 95934 - DNA, 120 bp, synthetic construct
  source 1..120: mol_type = other DNA
caacatacaacatgtaacgtcactgtttattatgaaaataaacggtgatcatgagtggggcaaatacacagaacaactggctcttcaggtggctatgtcctgtggcctgcaagttaactt

SEQ ID NO: 95935 - DNA, 120 bp, synthetic construct
  source 1..120: mol_type = other DNA
ggctttttgtgactggctgctctcacttagcatataatgttttcaagtttcatccatgtcatagcatatatcacaactacattcttttttatgaataatattccaataatattccaccat

SEQ ID NO: 95936 - DNA, 120 bp, synthetic construct
  source 1..120: mol_type = other DNA
ttttcagcacccagaatgatagtcaactggatataaatgtgtgagattatctgtgaattctgaactctgttccactgatgcccacgtctcttcctatatcggtaccacgcagtcttgatt

SEQ ID NO: 95937 - DNA, 120 bp, synthetic construct
  source 1..120: mol_type = other DNA
tcacattcttctgagggaaaaagacaaagggaaaaagcagaactactgataagggtctatgctcagcagtgcacatattgtcttgataaacatcttaaacaacagaaaacagagttcgag

SEQ ID NO: 95938 - DNA, 120 bp, synthetic construct
  source 1..120: mol_type = other DNA
cagaaacagcttatcattcatgatgcacagactggaggaaagaacaatgcaccctcaaactggacaggtagacaattccacactctcaacaacaggatccttcttaaccactactgccgc

SEQ ID NO: 95939 - DNA, 120 bp, synthetic construct
  source 1..120: mol_type = other DNA
gggcagacaggcatggacctaggtcagatcagggtggtttgtgggcaaagtgggggtgggaaaacacagagggaagaagaggaagggatggaatgaaatcagagaagctgggagaattct

SEQ ID NO: 95940 - DNA, 120 bp, synthetic construct; identical to SEQ ID NO: 35010
  source 1..120: mol_type = other DNA

SEQ ID NO: 95941 - DNA, 120 bp, synthetic construct; identical to SEQ ID NO: 95855
  source 1..120: mol_type = other DNA

SEQ ID NO: 95942 - DNA, 120 bp, synthetic construct; identical to SEQ ID NO: 95856
  source 1..120: mol_type = other DNA

SEQ ID NO: 95943 - DNA, 120 bp, synthetic construct
  source 1..120: mol_type = other DNA
gagattctggagatcaagagcttgctgggagacattgtaccgtttgttcatggtcagctgcagagatagagatgaagacagaggctctggggctctggtgatggtggtggtggtggtggt

SEQ ID NO: 95944 - DNA, 120 bp, synthetic construct
  source 1..120: mol_type = other DNA
tttctatcaggttccagaatattctctctctctctttctttctttctttcttccatttctttcttctccttccttccttctgtctctctctttccttccttccttccttccttcctccct

SEQ ID NO: 95945 - DNA, 120 bp, synthetic construct
  source 1..120: mol_type = other DNA
ccttctttgaaaagtgctactacatatacggcattctgcaattgggaacaaaacacaagtttgaagacacatcaatggtccacttaccatgtctcatgttgtgggctaactccatggtag

SEQ ID NO: 95946 - DNA, 120 bp, synthetic construct
  source 1..120: mol_type = other DNA
caatgtactgattatggccaggcctcagattaacttctgttgcggggggggggggtcgttgctttcactgtgtgtgacccactgtcaggacagtcctgctactctcgagtgttgggactt

SEQ ID NO: 95947 - DNA, 120 bp, synthetic construct
  source 1..120: mol_type = other DNA
agagagatgctgaagataagacacacacaggtgcacatctacttactgaactctggcatctctgcacaatccctgtcttgcagttgtgctgccagaattacaggtgttctcaacataaag

SEQ ID NO: 95948 - DNA, 120 bp, synthetic construct
  source 1..120: mol_type = other DNA
atgtatcattagaaataagtacctccctgtagactaagtacctccctgtagactaaggctagaactgcagctttgaggatctcagagaaggggacttttgcaaatagtggtgacaaaaat

SEQ ID NO: 95949 - DNA, 120 bp, synthetic construct
  source 1..120: mol_type = other DNA
ctaatattgttaagggagaagtagaaatgattgtccttggaatcaagtaggcatggcaaggaaagggcatgagtacctgacatacagactaaaaaggccaaggaatggatgtgtgggtca

SEQ ID NO: 95950 - DNA, 120 bp, synthetic construct
  source 1..120: mol_type = other DNA
gctagagtattcctcatactacatgacacaatgtggaaaaaagtccaggatataaaattgaatattctagactgacatcagcatgatctcaagctagaaagctacaagttgtccttccat

SEQ ID NO: 95951 - DNA, 120 bp, synthetic construct
  source 1..120: mol_type = other DNA
cgtgagccaccacacccggcctggactgattattgatagtcttctcttgcacgatgctagtatacaaagactgcgtgaggtggcttgtttttcaaatactcaaattctaacaaaaaatag

SEQ ID NO: 95952 - DNA, 120 bp, synthetic construct
  source 1..120: mol_type = other DNA
aaggggaaacaagactttcccagataaacaaaagctgaggaagttcattactgccagacctgctctaaagacatgctaaaaagagtccttcaaattgaagtaggacagtagacacaaagc

SEQ ID NO: 95953 - DNA, 120 bp, synthetic construct
  source 1..120: mol_type = other DNA
atggcttccagcttcattcatgtccctgcataggacatgatctcactcctttttatggctgcatagtattccatggtgtatatgtaccatattttctttgtccagtctatcattgatggg

SEQ ID NO: 95954 - DNA, 120 bp, synthetic construct
  source 1..120: mol_type = other DNA
actcgggaggctgaggcaggagaatggcgtgaactcaggaggcggagcttgcagtgggccgaaatagcgccactgcactctggcctgggtgaaagagcgagactccatctcaaaaaaaaa

SEQ ID NO: 95955 - DNA, 120 bp, synthetic construct
  source 1..120: mol_type = other DNA
ccactgcactccagctggagtgacagagtgagaccctgtctcaaaaaaaaaaaaggtttattcaccatgaccaagtgggatttattcctgggatgcaaggatggttcaacatatgaaaat

SEQ ID NO: 95956 - DNA, 120 bp, synthetic construct
  source 1..120: mol_type = other DNA
tctattcctggttagctgggagtgattgctattgttgctgtttagtcttgattggttgttgaattgcattgtatactttttttctggatcttttgtgataattgtccttttctccctcct

SEQ ID NO: 95957 - DNA, 120 bp, synthetic construct
  source 1..120: mol_type = other DNA
tcctctccagcacctgttgtttcctgacttttaaatgatcaccattctaactggtgtgcgatggtatctcattgtggttttgatgttcatttctctgatggccagtgatgatgagcattt

SEQ ID NO: 95958 - DNA, 120 bp, synthetic construct
  source 1..120: mol_type = other DNA
tgatattgattcttcctacccatgaacatggaatgttcttccatttgtttgtatcctcttttatttcattgagcagtggtttgtagttctccttgaagaggtccttcacgtcccttgtaa

SEQ ID NO: 95959 - DNA, 120 bp, synthetic construct
  source 1..120: mol_type = other DNA
ctggaatatcagccactgaggtttaggggttgctgataagcacagcattacctagcctctcctgacttatatatctcatctgtaaatttaaatgacaccctctttggatttttctgtgag

SEQ ID NO: 95960 - DNA, 120 bp, synthetic construct; identical to SEQ ID NO: 17285
  source 1..120: mol_type = other DNA

SEQ ID NO: 95961 - DNA, 120 bp, synthetic construct; identical to SEQ ID NO: 17286
  source 1..120: mol_type = other DNA

SEQ ID NO: 95962 - DNA, 120 bp, synthetic construct
  source 1..120: mol_type = other DNA
gaggtaacatgctgaaaagacaacgtgtacagctgacattagtacacaacctcatcggagagagaagaagcggagggaatcccaggagcaggggccatcatgctcaaaggttccaaggta

SEQ ID NO: 95963 - DNA, 120 bp, synthetic construct; identical to SEQ ID NO: 17287
  source 1..120: mol_type = other DNA

SEQ ID NO: 95964 - DNA, 120 bp, synthetic construct; identical to SEQ ID NO: 17288
  source 1..120: mol_type = other DNA

SEQ ID NO: 95965 - DNA, 120 bp, synthetic construct; identical to SEQ ID NO: 17289
  source 1..120: mol_type = other DNA

SEQ ID NO: 95966 - DNA, 120 bp, synthetic construct; identical to SEQ ID NO: 17290
  source 1..120: mol_type = other DNA

SEQ ID NO: 95967 - DNA, 120 bp, synthetic construct; identical to SEQ ID NO: 17291
  source 1..120: mol_type = other DNA

SEQ ID NO: 95968 - DNA, 120 bp, synthetic construct
  source 1..120: mol_type = other DNA
tatcttcccatctctgtctccttaagcgctgggattacaggcgtgagccattgcacctggcctcaatattacttttaaaagaggaaactatcccaatagatgttttggtaaaaagaagga

SEQ ID NO: 95969 - DNA, 120 bp, synthetic construct; identical to SEQ ID NO: 17292
  source 1..120: mol_type = other DNA

SEQ ID NO: 95970 - DNA, 120 bp, synthetic construct
  source 1..120: mol_type = other DNA
tgaattcaccaaacaccttcctggatttacagtgaacaagattccagggcgcagccatgaattcagatcacatctccctggatttccagtgaaatagattccagggtgcagctatgaact

SEQ ID NO: 95971 - DNA, 120 bp, synthetic construct; identical to SEQ ID NO: 17293
  source 1..120: mol_type = other DNA

SEQ ID NO: 95972 - DNA, 120 bp, synthetic construct
  source 1..120: mol_type = other DNA
gggaatacagacatgagccaccacgcccggctggtgttcgcatattttatgtgtggcccaagacaattcttcttccaacgtggcccagggaggccaaaaaattgggcaacaaaggaggta

SEQ ID NO: 95973 - DNA, 120 bp, synthetic construct
  source 1..120: mol_type = other DNA
acggtcaccggccgcctctcctgacctcggcctcggcccccaggtccccggtccccggggaaggggctccgggaaggcaggtttctcccggaaagaaaggaaacgcgctggtttgggcgc

SEQ ID NO: 95974 - DNA, 120 bp, synthetic construct
  source 1..120: mol_type = other DNA
agaagaaaataataaagtaaattggagatgtacacgggttatatgtaaatgctattttatatcagcaactttggcatcacgggatctgggtactgaggggtaggagcggccctgggacca

SEQ ID NO: 95975 - DNA, 120 bp, synthetic construct
  source 1..120: mol_type = other DNA
tctcccccctgcctcctcctctccccgttgcctcctcctctccccgtggcctcctcctctcccccctgcctcctcctctccctgctgcctcctcctctccccgcgggcctcctctgttag

SEQ ID NO: 95976 - DNA, 120 bp, synthetic construct
  source 1..120: mol_type = other DNA
gcgtttccgtttttgtggggggcggtggtggttgtggtttttgtggtctgagaaactcatgacagttacccacctcctgccaggacaaggccacaggaggttgcagaaaattcaggtcac

SEQ ID NO: 95977 - DNA, 120 bp, synthetic construct
  source 1..120: mol_type = other DNA
cctggaatccagtgaggggctcagtccacagaagccatgactgatgatcattatcatggaaccctccagctcagggaatgtctgagtagctccctgaagtccaaacggaagactatgacc

SEQ ID NO: 95978 - DNA, 120 bp, synthetic construct; identical to SEQ ID NO: 4114
  source 1..120: mol_type = other DNA

SEQ ID NO: 95979 - DNA, 120 bp, synthetic construct
  source 1..120: mol_type = other DNA
cacacctgtaatcctggcactttggaagcctgaggcaggtggatcccctgaggtcaggaggtggagaccagcctgaccaacatggtgaaaccccgtctctactaaaaatacaaaattagc

SEQ ID NO: 95980 - DNA, 120 bp, synthetic construct
  source 1..120: mol_type = other DNA
ctcccaaagtccagggattacaggcgtgagccaccatgcctaggcagtagttacaaattcagctgagtcttctaggtgctaaagcaaagaaaataattgtggttcataatgaaattcaaa

SEQ ID NO: 95981 - DNA, 120 bp, synthetic construct; identical to SEQ ID NO: 17279
  source 1..120: mol_type = other DNA

SEQ ID NO: 95982 - DNA, 120 bp, synthetic construct; identical to SEQ ID NO: 17280
  source 1..120: mol_type = other DNA

SEQ ID NO: 95983 - DNA, 120 bp, synthetic construct; identical to SEQ ID NO: 17281
  source 1..120: mol_type = other DNA

SEQ ID NO: 95984 - DNA, 120 bp, synthetic construct; identical to SEQ ID NO: 17282
  source 1..120: mol_type = other DNA

SEQ ID NO: 95985 - DNA, 120 bp, synthetic construct; identical to SEQ ID NO: 17283
  source 1..120: mol_type = other DNA

SEQ ID NO: 95986 - DNA, 120 bp, synthetic construct; identical to SEQ ID NO: 17284
  source 1..120: mol_type = other DNA

SEQ ID NO: 95987 - DNA, 120 bp, synthetic construct
  source 1..120: mol_type = other DNA
aatttatagattcaatgccatccccatcaagctaccaatgactttcttcacagaattggaaaaaactactttaaagttcatatggaaccaaaaagcccacattgccaagtcaatcctaag

SEQ ID NO: 95988 - DNA, 120 bp, synthetic construct
  source 1..120: mol_type = other DNA
ggtatatacccaaaggattataaatcatgctgctataaagacacatgcacacgtgtgtttattgaggcactattcacaatagcaaagacttggaaccaacccaaatgtccaacaatgata

SEQ ID NO: 95989 - DNA, 120 bp, synthetic construct; identical to SEQ ID NO: 24512
  source 1..120: mol_type = other DNA

SEQ ID NO: 95990 - DNA, 120 bp, synthetic construct
  source 1..120: mol_type = other DNA
gtttacaagagtatccagcacataagtgatcacaataaatgttggctgtttctgctactgctgttttttaatttttctttcttttaagcacagggtctcactctgttgcccaggctagag

SEQ ID NO: 95991 - DNA, 120 bp, synthetic construct; identical to SEQ ID NO: 28900
  source 1..120: mol_type = other DNA

SEQ ID NO: 95992 - DNA, 120 bp, synthetic construct; identical to SEQ ID NO: 28901
  source 1..120: mol_type = other DNA

SEQ ID NO: 95993 - DNA, 120 bp, synthetic construct; identical to SEQ ID NO: 28902
  source 1..120: mol_type = other DNA

SEQ ID NO: 95994 - DNA, 120 bp, synthetic construct
  source 1..120: mol_type = other DNA
cccattttgtaggttgcctattcactctgatggtagtttcttttgctgtacagaagctctttagtttaattagatcccatttgtcaattttggcttttgttgccattgcttttggtgttt

SEQ ID NO: 95995 - DNA, 120 bp, synthetic construct
  source 1..120: mol_type = other DNA
tttgggctgagacaatggggtttcctagatctacagtcatgttgtctgcaaacagggacaatttgacttcctcttttcctaattgaatactctttatttccttctcctgcctaattgccc

SEQ ID NO: 95996 - DNA, 120 bp, synthetic construct
  source 1..120: mol_type = other DNA
gtttgctcttgcttttctagttcttttaattgtgatgttagggtgtcaattttggatctttcctgctttctcttgtgggcatttagtgctataaatctccctctacacactgctttgaat

SEQ ID NO: 95997 - DNA, 120 bp, synthetic construct
  source 1..120: mol_type = other DNA
gtgaatttgatcctgtcattatgatgttagctggttattttgctcgttagttgatgcagtttcttcctagtcttgatggtctttacattttggcatgattttgcagcagctggtaccggt

SEQ ID NO: 95998 - DNA, 120 bp, synthetic construct
  source 1..120: mol_type = other DNA
gatcgtctgaagccttcttctctcagctcatcaaagtcattctcaatccagctttgttcccttgctggggaggaactgtgttcctttggaggaggagaggcgctctgctttttagagttt

SEQ ID NO: 95999 - DNA, 120 bp, synthetic construct; identical to SEQ ID NO: 21614
  source 1..120: mol_type = other DNA

SEQ ID NO: 96000 - DNA, 120 bp, synthetic construct
  source 1..120: mol_type = other DNA
taactggtgtgagatggtatctcattgtggttttgatttgcatttctctgatggccagtgatgatgaaccttttttcatatgtctgttgcctgcataaatgtcttcttttgagaagtgtc

SEQ ID NO: 96001 - DNA, 120 bp, synthetic construct
  source 1..120: mol_type = other DNA
tgtaagttggattcctaggtattttattctctttgaagcaattgtgaatgagaattcattcatggtttggctctctgtttgtctgttattggtgtataagaatccttgtgatttttgcac

SEQ ID NO: 96002 - DNA, 120 bp, synthetic construct
  source 1..120: mol_type = other DNA
agaattgcttgaacccaggaggcagagattgcagtgagctgagactgtgctactgaatcgaagcctgggcgactgagtgagactctgtatcaaaaataaataaaatgaaaataaggaaaa

SEQ ID NO: 96003 - DNA, 120 bp, synthetic construct
  source 1..120: mol_type = other DNA
tttcctgactttttaatgattgccattctaactggtgtgagatggtatctcattgtggttttgatttgcatttctctgatggccagtgatggtgagcattttttcatgtgtttttcagtt

SEQ ID NO: 96004 - DNA, 120 bp, synthetic construct
  source 1..120: mol_type = other DNA
gttccatatgaactttaaagtagttttttccaattctgtgaagaaagtcattggtagcttgatggggatagtattgaatctataaattaccttgggcagtatggccattttcatggtatt

SEQ ID NO: 96005 - DNA, 120 bp, synthetic construct
  source 1..120: mol_type = other DNA
tgtctctgcttggctttggtatcaggatgatgctaacctcataaaatgagttacggaggattccctctttttctattgattggaataatttcggaaggaatggtaccagttcctccttgt

SEQ ID NO: 96006 - DNA, 120 bp, synthetic construct; identical to SEQ ID NO: 22023
  source 1..120: mol_type = other DNA

SEQ ID NO: 96007 - DNA, 120 bp, synthetic construct
  source 1..120: mol_type = other DNA
cagtgtaaaagtgttcctatttctccacatcctctccagcacctgttgtttcctgactttttaatgatcgccattctaactggtgtgagatggtatctcattgttttgatttgcatttct

SEQ ID NO: 96008 - DNA, 120 bp, synthetic construct
  source 1..120: mol_type = other DNA
tttggttccataaaaagcaatgaaagtttattaggaacaaaaagaatgtccaggcacacttcctcatgcctgtaatcccaacagtttgggaggccaaggtgggcagatcatctgagatca

SEQ ID NO: 96009 - DNA, 120 bp, synthetic construct
  source 1..120: mol_type = other DNA
ataggaaaataaaatcacaatgaggtgccactcacacagctagaatggctacatttttttttttttttgagacagggtctcactctgtcgaccaggctgaagtgcagtggtactatctcg

SEQ ID NO: 96010 - DNA, 120 bp, synthetic construct; identical to SEQ ID NO: 15390
  source 1..120: mol_type = other DNA

SEQ ID NO: 96011 - DNA, 120 bp, synthetic construct; identical to SEQ ID NO: 15391
  source 1..120: mol_type = other DNA

SEQ ID NO: 96012 - DNA, 120 bp, synthetic construct; identical to SEQ ID NO: 8814
  source 1..120: mol_type = other DNA

SEQ ID NO: 96013 - DNA, 120 bp, synthetic construct
  source 1..120: mol_type = other DNA
ggcagagacactcctcagttcccagacagggtcgtggccgggtagaggcgctccccacatcccagacgatgggcggctgggcggagacgctcctcacttcctagacgggatgacggccgg

SEQ ID NO: 96014 - DNA, 120 bp, synthetic construct; identical to SEQ ID NO: 13804
  source 1..120: mol_type = other DNA

SEQ ID NO: 96015 - DNA, 120 bp, synthetic construct; identical to SEQ ID NO: 33133
  source 1..120: mol_type = other DNA

SEQ ID NO: 96016 - DNA, 120 bp, synthetic construct
  source 1..120: mol_type = other DNA
tccggaaagtccttatcgaccaccatggccttcacgtaccaggtccctgtgatctggagcaggccaaggccgtgagcccaccatgggtggcccagattctactctgaccctggcactcag

SEQ ID NO: 96017 - DNA, 120 bp, synthetic construct; identical to SEQ ID NO: 33134
  source 1..120: mol_type = other DNA

SEQ ID NO: 96018 - DNA, 120 bp, synthetic construct; identical to SEQ ID NO: 33135
  source 1..120: mol_type = other DNA

SEQ ID NO: 96019 - DNA, 120 bp, synthetic construct; identical to SEQ ID NO: 33071
  source 1..120: mol_type = other DNA

SEQ ID NO: 96020 - DNA, 120 bp, synthetic construct; identical to SEQ ID NO: 33072
  source 1..120: mol_type = other DNA

SEQ ID NO: 96021 - DNA, 120 bp, synthetic construct
  source 1..120: mol_type = other DNA
ttgcagtgagctgagatggtgccattgcactcctgcctgggcaacaactgtgaaactctgtctcaaaaaaacaaaagaaagaaggaaagaaagaaagaaagtatgcagcctatgacatga

SEQ ID NO: 96022 - DNA, 120 bp, synthetic construct
  source 1..120: mol_type = other DNA
aacctaggcaataccattcaggacataggcatgggcaaggacttcatgtctaaaacaccaaaagcaatggcaacaaaagacaaaattgacaaatgggattaattaaactaaagagcttct

SEQ ID NO: 96023 - DNA, 120 bp, synthetic construct
  source 1..120: mol_type = other DNA
tgtaccctaaaacttaaagtataataataaaagaaaaaaaaaaaaagaaatttgtgttcaaacagcatgcccccttgtggcttatgttgctagaaggagctgggaaggacacagccattg

SEQ ID NO: 96024 - DNA, 120 bp, synthetic construct; identical to SEQ ID NO: 14814
  source 1..120: mol_type = other DNA

SEQ ID NO: 96025 - DNA, 120 bp, synthetic construct; identical to SEQ ID NO: 14815
  source 1..120: mol_type = other DNA

SEQ ID NO: 96026 - DNA, 120 bp, synthetic construct; identical to SEQ ID NO: 14816
  source 1..120: mol_type = other DNA

SEQ ID NO: 96027 - DNA, 120 bp, synthetic construct
  source 1..120: mol_type = other DNA
ggaaggaagggagaaagagagagaaagaaagaaaggaagaaagaaaagaaaggaaggaaggaaggaagaaggaaggaagagagagagaaagaaagaaaggaaggaaggaaggagagagaa

SEQ ID NO: 96028 - DNA, 120 bp, synthetic construct
  source 1..120: mol_type = other DNA
ttcactcatgatttggctctctgtttgtctgttattggtgtataagaatgcttgtgatttttgtacattgattttgtatcctgagactttgctgaagttgcttatattgacttaaacgtt

SEQ ID NO: 96029 - DNA, 120 bp, synthetic construct
  source 1..120: mol_type = other DNA
taaactatcgcaaggacaaaaaaccaaacaccgcatgttctcactcgtagatgggaattgaacaatgagaacacatggacacaggaaggggaacatcacactctggggactgttgtgggg

SEQ ID NO: 96030 - DNA, 120 bp, synthetic construct
  source 1..120: mol_type = other DNA
tcatgataaaaatcctcaacagactaggcactgaaggaatgtacctcataatactgagagccatctatgacaaacctacagccagcatcatactgaatgggcaaaagctcaaaccattcc

SEQ ID NO: 96031 - DNA, 120 bp, synthetic construct
  source 1..120: mol_type = other DNA
tctctgcctggccgcccatcgtctgggatgtgaggagcccctctgcctggctgcccagtctggaaagtaaggagcatctccgcccggccgccatcccatctaggaagtgaggagcgcctc

SEQ ID NO: 96032 - DNA, 120 bp, synthetic construct; identical to SEQ ID NO: 14818
  source 1..120: mol_type = other DNA

SEQ ID NO: 96033 - DNA, 120 bp, synthetic construct
  source 1..120: mol_type = other DNA
taaccagtaatgggatggctgggtcaaatggtatttctagttctagatcccggaggaatcgccacactgacttccacaatggttgaactagtttacagtcccaccaacagtgtaaaagtg

SEQ ID NO: 96034 - DNA, 120 bp, synthetic construct
  source 1..120: mol_type = other DNA
aagtccttgcccatgcctatgtcctgaatggtattgcctaggttttcttctagggttcatatggttttagatctaacatttaagtctttaatccatcttgaataaatttttgtataaggt

SEQ ID NO: 96035 - DNA, 120 bp, synthetic construct; identical to SEQ ID NO: 26643
  source 1..120: mol_type = other DNA

SEQ ID NO: 96036 - DNA, 120 bp, synthetic construct
  source 1..120: mol_type = other DNA
acggggtggcggggcagaggcgctccccacatcttagacgatgggcggccgggcagagacgctcctcacttcctagatggcatgggggccgggaagaggcgctcctcacttcctagatgg

SEQ ID NO: 96037 - DNA, 120 bp, synthetic construct
  source 1..120: mol_type = other DNA
gtggaaggatcacttgagtccaggagtttgagaacaacctaggcaacataatgggaccctgtctctacaaaaaataaaaaaaaaattagctgggcatgatgatgtatgcctgtagtccca

SEQ ID NO: 96038 - DNA, 120 bp, synthetic construct
  source 1..120: mol_type = other DNA
ccagtccgtcaggtctctcgctgcagttccgcagtttgaccgcaggggacggaatctgcggcggcctggaaaactggcgggggcgcgaggcgccgctctctcttgggtcagattctcagc

SEQ ID NO: 96039 - DNA, 120 bp, synthetic construct; identical to SEQ ID NO: 35272
  source 1..120: mol_type = other DNA

SEQ ID NO: 96040 - DNA, 120 bp, synthetic construct
  source 1..120: mol_type = other DNA
tatacctaatgctaaatgacgagttaatgggtgcagcacaccagcatggcacatgtatacatatgtaactaacctgcacattgtgcacatgtaccctaaaacttataataataaaataaa

SEQ ID NO: 96041 - DNA, 120 bp, synthetic construct; identical to SEQ ID NO: 35273
  source 1..120: mol_type = other DNA

SEQ ID NO: 96042 - DNA, 120 bp, synthetic construct; identical to SEQ ID NO: 3062
  source 1..120: mol_type = other DNA

SEQ ID NO: 96043 - DNA, 120 bp, synthetic construct
  source 1..120: mol_type = other DNA
tctcatgtgcagagacacacataggatcaaaataaaggtatggaggaagacctaccaagcaaatggaaaacaaaaaaaggcaggagttgcaatcctagtctctgataaaacagactttta

SEQ ID NO: 96044 - DNA, 120 bp, synthetic construct
  source 1..120: mol_type = other DNA
tctcgctagtggtctatcaattttgttgatcttttcaaaaaaccaactcctggattcattgattttttgaagggttttttgtgtctctatctccttcagttctgctctgatcttagttat

SEQ ID NO: 96045 - DNA, 120 bp, synthetic construct
  source 1..120: mol_type = other DNA
ctctcacccctgctattcaacatagtgttggaagttctggccagggcaatcaggcaggagaaagaaataaagggtattcaattaggaaaagaggaagtcaaattgtccctgtttgcagat

SEQ ID NO: 96046 - DNA, 120 bp, synthetic construct
  source 1..120: mol_type = other DNA
gcaaaaatgaagcattccctttgaaaactggcacaagacagggatgccctctctcacccctgctattcaacatagtgttggaagttctggccagggcaatcaggcaggagaaagaaataa

SEQ ID NO: 96047 - DNA, 120 bp, synthetic construct
  source 1..120: mol_type = other DNA
acaccctaacatcacaattgaaagaactagagaagcaggagcaaacacattcaaaagctagcagaaggcaagaaataactaagatcagagcagaactgaaggagatagagacacaaaaaa

SEQ ID NO: 96048 - DNA, 120 bp, synthetic construct
  source 1..120: mol_type = other DNA
attgcaacccctgccttttttgttttccatttgcttggtagatcttcctccatacctttattttgagcctatgtgtgtctctgcacatgagatgggtctcctgaatacagcacactgatg

SEQ ID NO: 96049 - DNA, 120 bp, synthetic construct
  source 1..120: mol_type = other DNA
tcttgggaaaaactcaggactctcttaattcatcttctgaaagactatgtcttggacgggcttagaggctcatgcctgtaatcccagcactttgggaggccaatgtaggaagactgcttg

SEQ ID NO: 96050 - DNA, 120 bp, synthetic construct; identical to SEQ ID NO: 10172
  source 1..120: mol_type = other DNA

SEQ ID NO: 96051 - DNA, 120 bp, synthetic construct
  source 1..120: mol_type = other DNA
ctaccacagaattctatccacttaggcaagatgtgacacagagaacctttcatttttatcactgagtaatagctgttgcttggatacattaaaactttaccttatctattaccctaagct

SEQ ID NO: 96052 - DNA, 120 bp, synthetic construct
  source 1..120: mol_type = other DNA
actcgggaggcggaggttgcactgagccaagattgtaccactgcactccagcctgggtgacagacaagactctgtctcaaataaataaataaataatttaaataagatccagtgtctcat

SEQ ID NO: 96053 - DNA, 120 bp, synthetic construct
  source 1..120: mol_type = other DNA
tcttgctgaccagaaacataccgaagtaattgtgctcttccgtgtgaaacagatggtcttggtttttcaagttttcctgtgtgtttgtcctcttggatttcttttgctgagcctttgctt

SEQ ID NO: 96054 - DNA, 120 bp, synthetic construct
  source 1..120: mol_type = other DNA
gaggctgaggtgagaggatcacttgagcccaggaggtcgagactgcagtgagctataattagtctgagcgacagagaccgtgtctcaaaaaaaaatccatatatatatgtatatatgtat

SEQ ID NO: 96055 - DNA, 120 bp, synthetic construct
  source 1..120: mol_type = other DNA
gatgggtaggggggtcactgagtaaggggaaggctggaggccatgtcagagccaaaatggtgcagtcgcttaggaggggaggggaggagaggcggggtcagggatgtgggaggggtcttc

SEQ ID NO: 96056 - DNA, 120 bp, synthetic construct
  source 1..120: mol_type = other DNA
cttggcctcccaaagtgctgggattacaggcgtgagccactgtgcccagcccaaaaatgccttttaaaaaaataaaaagccttggtagtttgggtttttttgtttttgtttttttgagac

SEQ ID NO: 96057 - DNA, 120 bp, synthetic construct
  source 1..120: mol_type = other DNA
gtacctgtgtaacgatcacccagcatcctagaagctgcccctggcttttgtctatgtcactccctccccatcacaaggagtaagtagtcacactttcccatatatatatatatatatata

SEQ ID NO: 96058 - DNA, 120 bp, synthetic construct
  source 1..120: mol_type = other DNA
aatttttacaacagcatgtgaagccagtggtgttactgtcctcattacagagatgaaatacctaggaaactagggcctatgccttccgctttatataaggtttaacaaaaacaggccggg

SEQ ID NO: 96059 - DNA, 120 bp, synthetic construct
  source 1..120: mol_type = other DNA
gttgataggtagaaggaaaaaaggaaggattcatagatgagtgggtaggtgggtggctgaatgggtgggagggtgggcggatggatggatggatgagtgagtggatgggtggatagatga

SEQ ID NO: 96060 - DNA, 120 bp, synthetic construct
  source 1..120: mol_type = other DNA
gatggacagatggatgggtaggtggatagatgggtgggtgggtggatagctggacagatgggtaggtgggtggatggatgagtgggtgggtggatggtggatggatgtgtggatagatgg

SEQ ID NO: 96061 - DNA, 120 bp, synthetic construct
  source 1..120: mol_type = other DNA
tggatagatgagtggattgaaggatggatagatgtttgggtggatggtagaagcatgggtggatagatggaggggtgggtgggtaggtgggtggatggatgagtggatggacgggtggat

SEQ ID NO: 96062 - DNA, 120 bp, synthetic construct; identical to SEQ ID NO: 19312
  source 1..120: mol_type = other DNA

SEQ ID NO: 96063 - DNA, 120 bp, synthetic construct; identical to SEQ ID NO: 19313
  source 1..120: mol_type = other DNA

SEQ ID NO: 96064 - DNA, 120 bp, synthetic construct; identical to SEQ ID NO: 19314
  source 1..120: mol_type = other DNA

SEQ ID NO: 96065 - DNA, 120 bp, synthetic construct; identical to SEQ ID NO: 9111
  source 1..120: mol_type = other DNA

SEQ ID NO: 96066 - DNA, 120 bp, synthetic construct; identical to SEQ ID NO: 9112
  source 1..120: mol_type = other DNA

SEQ ID NO: 96067 - DNA, 120 bp, synthetic construct; identical to SEQ ID NO: 9113
  source 1..120: mol_type = other DNA

SEQ ID NO: 96068 - DNA, 120 bp, synthetic construct; identical to SEQ ID NO: 10562
  source 1..120: mol_type = other DNA

SEQ ID NO: 96069 - DNA, 120 bp, synthetic construct; identical to SEQ ID NO: 10563
  source 1..120: mol_type = other DNA

SEQ ID NO: 96070 - DNA, 120 bp, synthetic construct; identical to SEQ ID NO: 18661
  source 1..120: mol_type = other DNA

SEQ ID NO: 96071 - DNA, 120 bp, synthetic construct; identical to SEQ ID NO: 18662
  source 1..120: mol_type = other DNA

SEQ ID NO: 96072 - DNA, 120 bp, synthetic construct; identical to SEQ ID NO: 22688
  source 1..120: mol_type = other DNA

SEQ ID NO: 96073 - DNA, 120 bp, synthetic construct; identical to SEQ ID NO: 22689
  source 1..120: mol_type = other DNA

SEQ ID NO: 96074 - DNA, 120 bp, synthetic construct; identical to SEQ ID NO: 28072
  source 1..120: mol_type = other DNA

SEQ ID NO: 96075 - DNA, 120 bp, synthetic construct; identical to SEQ ID NO: 34119
  source 1..120: mol_type = other DNA

SEQ ID NO: 96076 - DNA, 120 bp, synthetic construct
  source 1..120: mol_type = other DNA
tctccttaaatacttaagattggctgtcattaactggagttcagtacacatatatttttttgaggtagggtctccctctgtttcccaggctggagtacagtgatacgatctccgctcact

SEQ ID NO: 96077 - DNA, 120 bp, synthetic construct
  source 1..120: mol_type = other DNA
gctgccccatcttgagaagtgaggagaccctccgcccggcagcctccctgtctgagaagtgaggagcccctccgcccggcagccaccccatctgggaagtgaggagcgtctccgcccggc

SEQ ID NO: 96078 - DNA, 120 bp, synthetic construct
  source 1..120: mol_type = other DNA
ataagacatatttaaatattagaaagaaacattttggtcaggcacagtggttcacacctactgtaatcccagcactatgagaggccaaagtgggcagatagcttgagcccaggaattcga

SEQ ID NO: 96079 - DNA, 120 bp, synthetic construct
  source 1..120: mol_type = other DNA
aaaaaaaaaagctttctgaggcctcgccagaagccaaacagatgctggtgctgtgtttatatggcctgcagaaccatgagccaaataaacctattttctttataaattacccagcctcag

SEQ ID NO: 96080 - DNA, 120 bp, synthetic construct
  source 1..120: mol_type = other DNA
caaaaacatttattaatgttctttttttttttggcaggaatttcttttgttctttttttgagacagttttgctcttgttgcccaggctggagtgtaatggcgccatcttggctcactgca

SEQ ID NO: 96081 - DNA, 120 bp, synthetic construct; identical to SEQ ID NO: 33129
  source 1..120: mol_type = other DNA

SEQ ID NO: 96082 - DNA, 120 bp, synthetic construct; identical to SEQ ID NO: 33130
  source 1..120: mol_type = other DNA

SEQ ID NO: 96083 - DNA, 120 bp, synthetic construct; identical to SEQ ID NO: 11664
  source 1..120: mol_type = other DNA

SEQ ID NO: 96084 - DNA, 120 bp, synthetic construct
  source 1..120: mol_type = other DNA
agtgcctctcctcctccaaaggaacacagctcgtcaccagcaacagaacaaagctggacgcagaatgactttgacgagttgagagaagaatgcttcagacgatcaaactactctgagcta

SEQ ID NO: 96085 - DNA, 120 bp, synthetic construct
  source 1..120: mol_type = other DNA
aaggccactacataatggtaaagggatccattcaacaagaagagctaactatcctaaatatatatgcacccaatacaggagcacccagattcataaagcaagtccttagagacctacaaa

SEQ ID NO: 96086 - DNA, 120 bp, synthetic construct
  source 1..120: mol_type = other DNA
accaacgagaaaaaccacatgattatctcaatagatgcagaaaaggcctttgacaaaattcaacagcccttcatgctaaaaactctcaataaattaggtattgatgggacgtatctcaaa

SEQ ID NO: 96087 - DNA, 120 bp, synthetic construct
  source 1..120: mol_type = other DNA
gattccctctttaataaatggtgctgggaaaactggctagccatatggagaaagctgaaactggatcccttccttacaccttatactaaaattaattcaagatggattaaagacttaaat

SEQ ID NO: 96088 - DNA, 120 bp, synthetic construct
  source 1..120: mol_type = other DNA
cctttgtagggacatggataaagctggaaaccatcattctcagcaaactattgcaaggacaaaaaactaaacactgcaggttctcactcataggtgggaacagaacaatgagaacacatg

SEQ ID NO: 96089 - DNA, 120 bp, synthetic construct; identical to SEQ ID NO: 7649
  source 1..120: mol_type = other DNA

SEQ ID NO: 96090 - DNA, 120 bp, synthetic construct; identical to SEQ ID NO: 7650
  source 1..120: mol_type = other DNA

SEQ ID NO: 96091 - DNA, 120 bp, synthetic construct; identical to SEQ ID NO: 19059
  source 1..120: mol_type = other DNA

SEQ ID NO: 96092 - DNA, 120 bp, synthetic construct; identical to SEQ ID NO: 19060
  source 1..120: mol_type = other DNA

SEQ ID NO: 96093 - DNA, 120 bp, synthetic construct
  source 1..120: mol_type = other DNA
ccacatactaggagaatcccaggatggggttcagcagtgttgatgaggataatgaaggaaatcagggggaggtgaagaaaacagaggaagggggtgagtaaaagaaaggtcatggaggag

SEQ ID NO: 96094 - DNA, 120 bp, synthetic construct; identical to SEQ ID NO: 19370
  source 1..120: mol_type = other DNA

SEQ ID NO: 96095 - DNA, 120 bp, synthetic construct; identical to SEQ ID NO: 11923
  source 1..120: mol_type = other DNA

SEQ ID NO: 96096 - DNA, 120 bp, synthetic construct; identical to SEQ ID NO: 11924
  source 1..120: mol_type = other DNA

SEQ ID NO: 96097 - DNA, 120 bp, synthetic construct
  source 1..120: mol_type = other DNA
tgtccaagtgttctcactgttcagttcccacctacgagtgagaacatgcggtgtttggttttttgtccttgtgatagtttgctgagaatgatggtttccagcttcatccatgtccctaca

SEQ ID NO: 96098 - DNA, 120 bp, synthetic construct
  source 1..120: mol_type = other DNA
tttgacaaacctgacaaaaacaagaaatggggaacgattccctatttaataaatggtgctgggaaaactggctagccatatgtagaaagctgaaactggatcccttccttacaccttata

SEQ ID NO: 96099 - DNA, 120 bp, synthetic construct; identical to SEQ ID NO: 24978
  source 1..120: mol_type = other DNA

SEQ ID NO: 96100 - DNA, 120 bp, synthetic construct; identical to SEQ ID NO: 24979
  source 1..120: mol_type = other DNA

SEQ ID NO: 96101 - DNA, 120 bp, synthetic construct; identical to SEQ ID NO: 24980
  source 1..120: mol_type = other DNA

SEQ ID NO: 96102 - DNA, 120 bp, synthetic construct; identical to SEQ ID NO: 12493
  source 1..120: mol_type = other DNA

SEQ ID NO: 96103 - DNA, 120 bp, synthetic construct
  source 1..120: mol_type = other DNA
aacagaacagagtcctcagaaataatgccgcatatctacaaccatctgatctttgacaaacctgacaaaaacaagcaatgaatggggaaaggattacctatttaataaatggttctgaga

SEQ ID NO: 96104 - DNA, 120 bp, synthetic construct
  source 1..120: mol_type = other DNA
actatgcagccataaaaaatgatgagttcatgtcctttgtagggacatggatgaagctggaaaccatcattctcagcaaactattgcagggacaaaaaaccaaacaccagatgttctcac

SEQ ID NO: 96105 - DNA, 120 bp, synthetic construct; identical to SEQ ID NO: 12494
  source 1..120: mol_type = other DNA

SEQ ID NO: 96106 - DNA, 120 bp, synthetic construct; identical to SEQ ID NO: 12495
  source 1..120: mol_type = other DNA

SEQ ID NO: 96107 - DNA, 120 bp, synthetic construct
  source 1..120: mol_type = other DNA
ctgaaatagaagccactttgcagagcggggccgggggtgggggggcggggttcaaaaaaacaaaaatgaagacaaaacttaccaaaatagtagtaaacaaatcttaaatgctttactatt

SEQ ID NO: 96108 - DNA, 120 bp, synthetic construct
  source 1..120: mol_type = other DNA
gaagaaatgctaacgagtatcctttaagttgaaagaaacaacactcaaaactctgtcaaaatacaaagttcttagccaggtctggtggctcacgcctataatcccaacactttgggaggc

SEQ ID NO: 96109 - DNA, 120 bp, synthetic construct; identical to SEQ ID NO: 12497
  source 1..120: mol_type = other DNA

SEQ ID NO: 96110 - DNA, 120 bp, synthetic construct; identical to SEQ ID NO: 12498
  source 1..120: mol_type = other DNA

SEQ ID NO: 96111 - DNA, 120 bp, synthetic construct
  source 1..120: mol_type = other DNA
caaccccatcaaaaagtgggcaaaggacatgaacagacacttctcattctcaaaagaagacatttatgcagccaaaaaaacacataaaaaaatgctcaccatcactggccatcagagaaa

SEQ ID NO: 96112 - DNA, 120 bp, synthetic construct
  source 1..120: mol_type = other DNA
gtaacgggttcatcacacaagggagtgccagacagtgggctcaggtcagtgggtgcatgagccaaaaaagggcgaggcattgcctcactcaggaagtgcaaggggtcagggagttccctt

SEQ ID NO: 96113 - DNA, 120 bp, synthetic construct
  source 1..120: mol_type = other DNA
agagaagtgcttaaaggagctgatggagctgaaaaccaaggcttgagaactacatgaagaatgcagaagcctcaggagccgatgcaatcaactggtagaaaggatatcagtgatggaaga

SEQ ID NO: 96114 - DNA, 120 bp, synthetic construct
  source 1..120: mol_type = other DNA
gcaccaagtggacctaatagacatctacagaactctccaccccaaatcaacagaatatacatttttttcagcaccacaccacacctattccaaagttgaccacatagttggaagtaaagc

SEQ ID NO: 96115 - DNA, 120 bp, synthetic construct
  source 1..120: mol_type = other DNA
gggaatcatccctaactcattttatgagtccagcatcattctgataccaaagctgggcagagacacaaccaaaaaagagaattttagaccaatatccttgatgaacattgatgcaaaatc

SEQ ID NO: 96116 - DNA, 120 bp, synthetic construct
  source 1..120: mol_type = other DNA
gctcgtgggtaggaagaatcaatatcatgaaaatggccatactgcccaaggtaatttacagattcaatgccgtccccatcaagctaccaatgcctttcttcacagaattggaaaaaacta

SEQ ID NO: 96117 - DNA, 120 bp, synthetic construct
  source 1..120: mol_type = other DNA
tagaatggcaatcattaaaaagtcaggaaacaacaggtgctggagagcttgtggagaaataggaacacttttacactgttggtgggactgtaaactagttcaaccactgtggaagtcagt

SEQ ID NO: 96118 - DNA, 120 bp, synthetic construct; identical to SEQ ID NO: 12485
  source 1..120: mol_type = other DNA

SEQ ID NO: 96119 - DNA, 120 bp, synthetic construct; identical to SEQ ID NO: 12486
  source 1..120: mol_type = other DNA

SEQ ID NO: 96120 - DNA, 120 bp, synthetic construct
  source 1..120: mol_type = other DNA
agatgtaaatcatcagtgttttggcttctgtgttgggtagagtgttagaaagtatgcgttgtattatgaagaaagaaaggaaaaaaagaaggaagggagggagggagggaggaaggaagg

SEQ ID NO: 96121 - DNA, 120 bp, synthetic construct
  source 1..120: mol_type = other DNA
aaatagtcacttaactagtgtgtgtatgtcatatgtggtctatgtagtgtgtgtgtgtgtgtgtgttgtgtgtgtgtgtgtgtagtgcggtgtgtgtgatgtgtgtgtgctgaatgtgtt

SEQ ID NO: 96122 - DNA, 120 bp, synthetic construct; identical to SEQ ID NO: 12488
  source 1..120: mol_type = other DNA

SEQ ID NO: 96123 - DNA, 120 bp, synthetic construct; identical to SEQ ID NO: 12489
  source 1..120: mol_type = other DNA

SEQ ID NO: 96124 - DNA, 120 bp, synthetic construct
  source 1..120: mol_type = other DNA
gcgtccctcagcagccccgggaagttctgtccctgctcccgagtgtgcccagagtcctgccgtttccttctagcgcgcgttctttactggcgccattcctgctgctaagagccctgagac

SEQ ID NO: 96125 - DNA, 120 bp, synthetic construct
  source 1..120: mol_type = other DNA
tgggcgacagagtgagactccgtctcaataataataataataataataataataataataatactgataggctggacgcggtggcttacgcctgtaatcccagcactttgggaggctgag

SEQ ID NO: 96126 - DNA, 120 bp, synthetic construct
  source 1..120: mol_type = other DNA
agaagaagaagaagaagaagaagaagaagaagaagaagaagaaggagaagaagaagcagctgaatgccaaagtgtgtggacttgagattgcctcctggagtgaaatgaccactgctgcag

SEQ ID NO: 96127 - DNA, 120 bp, synthetic construct; identical to SEQ ID NO: 12491
  source 1..120: mol_type = other DNA

SEQ ID NO: 96128 - DNA, 120 bp, synthetic construct; identical to SEQ ID NO: 12492
  source 1..120: mol_type = other DNA

SEQ ID NO: 96129 - DNA, 120 bp, synthetic construct; identical to SEQ ID NO: 34063
  source 1..120: mol_type = other DNA

SEQ ID NO: 96130 - DNA, 120 bp, synthetic construct
  source 1..120: mol_type = other DNA
ccacttgaacccgagaggcagagatttcagtgagctgagatcctgccactgcactccagcctgggcaacacaaagagactctatctcaaaaaaaaaaagaaaaaagaaaaaaaagaaatt

SEQ ID NO: 96131 - DNA, 120 bp, synthetic construct
  source 1..120: mol_type = other DNA
aactacatggattataatctaaatgtgaaaagcaaaatttttaaacttttggataaagaccacagtctccctctccctctcccgtctccctctccctctcccgtttccctctcccgtttc

SEQ ID NO: 96132 - DNA, 120 bp, synthetic construct
  source 1..120: mol_type = other DNA
gatccgccagcctcggcctcccgaggtgccgggattgcagatggagtctcgttcactcagtgctcaatggtgcccaggctggagtgcagtggcgtgatctcggctcgctacaaccacctc

SEQ ID NO: 96133 - DNA, 120 bp, synthetic construct
  source 1..120: mol_type = other DNA
ggccagccgccccatctgggaggtgaggggcacttctgccgggccgcccctactgggaagtgaggagcccctctgcccggccacgaccccgtctgggaggtgtgcccagcggctcattgg

SEQ ID NO: 96134 - DNA, 120 bp, synthetic construct
  source 1..120: mol_type = other DNA
tctcgatctcctgacctcgtgatccgcccacctcggcctcccgaagtgctgggactgcaggcgtgagccaccgcgcccagccaaaacttttaaacttttaaaagaacacaagaaaacatc

SEQ ID NO: 96135 - DNA, 120 bp, synthetic construct; identical to SEQ ID NO: 34065
  source 1..120: mol_type = other DNA

SEQ ID NO: 96136 - DNA, 120 bp, synthetic construct; identical to SEQ ID NO: 34066
  source 1..120: mol_type = other DNA

SEQ ID NO: 96137 - DNA, 120 bp, synthetic construct
  source 1..120: mol_type = other DNA
ttttggttactgtagccttgtagtatagcttgaaatcaggtagcatgatgcctccagctttgttctttttgcttaggattgacttggcaatgcgggctcttttttggttccatatgaact

SEQ ID NO: 96138 - DNA, 120 bp, synthetic construct
  source 1..120: mol_type = other DNA
gtgttttttgtctttggttctgtttatatgctggattacattcattgatttgcgtatattgaaccagccttgcatcccagggatgaagcccacttgatcatggtggataagctttttgat

SEQ ID NO: 96139 - DNA, 120 bp, synthetic construct; identical to SEQ ID NO: 34067
  source 1..120: mol_type = other DNA

SEQ ID NO: 96140 - DNA, 120 bp, synthetic construct; identical to SEQ ID NO: 34068
  source 1..120: mol_type = other DNA

SEQ ID NO: 96141 - DNA, 120 bp, synthetic construct; identical to SEQ ID NO: 34069
  source 1..120: mol_type = other DNA

SEQ ID NO: 96142 - DNA, 120 bp, synthetic construct
  source 1..120: mol_type = other DNA
catttttcagttgatggacatttagaggttgtttccactttttggccattataaataattctactatgggccagtcatggtggctcacgcctgtaattccagcactttcagaggccgagg

SEQ ID NO: 96143 - DNA, 120 bp, synthetic construct
  source 1..120: mol_type = other DNA
tgccaacactttgggagactgaggtggaaaaaacatttgagcccaggagttcaagaccaacctgagcaacatggcaggaccgcatctctccaaaaaaaaaaaaaaaaaattagttagcta

SEQ ID NO: 96144 - DNA, 120 bp, synthetic construct; identical to SEQ ID NO: 34057
  source 1..120: mol_type = other DNA

SEQ ID NO: 96145 - DNA, 120 bp, synthetic construct
  source 1..120: mol_type = other DNA
caatgtgcacatgtaccctaaaacttagagtataataaaaaaaagaaaaaaaaaagaaaaaaaaaggtatcttgattctctctgaaattttttattatttctgatgtttttttccaggct

SEQ ID NO: 96146 - DNA, 120 bp, synthetic construct
  source 1..120: mol_type = other DNA
tttgttgttccacatatggagcatgggcagagtagattttgcataattcttaagggccctaggatttacagaatggtcaatgagccttggcttcaccagctgcattagtccttaatgaaa

SEQ ID NO: 96147 - DNA, 120 bp, synthetic construct
  source 1..120: mol_type = other DNA
atagatagctcttattattttgaaatacgtgatctagaactagaaataccatttgacccagccatcccattactgggtatatacccaaatgactataaatcatgctgctataaagacaca

SEQ ID NO: 96148 - DNA, 120 bp, synthetic construct
  source 1..120: mol_type = other DNA
atttgtatagtgcaatttttttttgatcttggggattctggctgagcttgattcatgacaattatggttaaaaacatttgcttggccgggcgctgtggctcacgcttgtaatcccagcac

SEQ ID NO: 96149 - DNA, 120 bp, synthetic construct; identical to SEQ ID NO: 34060
  source 1..120: mol_type = other DNA

SEQ ID NO: 96150 - DNA, 120 bp, synthetic construct; identical to SEQ ID NO: 34061
  source 1..120: mol_type = other DNA

SEQ ID NO: 96151 - DNA, 120 bp, synthetic construct
  source 1..120: mol_type = other DNA
ctcaagttatttatgagatctaaaactcaaaacaactgaaatcatggacataaagaatagaaggatgccaccccactgtcaacattagacagatcaacgagacagaacgttaacaaggat

SEQ ID NO: 96152 - DNA, 120 bp, synthetic construct
  source 1..120: mol_type = other DNA
accaataacaggctctgaaattgtggcaataatcaatagtttaccaaccaaaaagagtgcaggaccagatggattcacagccaaattctaccagaggtacaaggaggaactggtaccatt

SEQ ID NO: 96153 - DNA, 120 bp, synthetic construct
  source 1..120: mol_type = other DNA
cgaaggacacgaacagacacttctcaaaagaagacatttatgcagccaaaaaacacatgaaaaaatgctcaccatcactggccatcagagaaatgcaaatcaaaaccacaatgagatacc

SEQ ID NO: 96154 - DNA, 120 bp, synthetic construct
  source 1..120: mol_type = other DNA
tctgggggcagggcacagacaaacaaaaagacagcagtaacctctgcagacttaaatgtccctgtctgacagctttgaagagggcagtggttctcccagcatgcagctggagatctgaga

SEQ ID NO: 96155 - DNA, 120 bp, synthetic construct
  source 1..120: mol_type = other DNA
atgggaaaagaccaaatctatgtctgattggtgtacctgaaagggatggggagaatggaaccaagttggaaaacactctgcaggatattatccaagagaaattccccaatctagcaaggc

SEQ ID NO: 96156 - DNA, 120 bp, synthetic construct
  source 1..120: mol_type = other DNA
ctttaacaccccactgtcaacattagacagatcaaagagacagaaagtcaacaaggatactcaggaattgaactcagctctgtaccaagcggacctaatagacatctacagaactctcca

SEQ ID NO: 96157 - DNA, 120 bp, synthetic construct
  source 1..120: mol_type = other DNA
ctgaatagaccaataacaggagctgaaattgtggcaataatcaatagcttagcaaccaaaaagagtccaggaccagatggattcacagccgaattctaccagaggtacaaggaggaactg

SEQ ID NO: 96158 - DNA, 120 bp, synthetic construct
  source 1..120: mol_type = other DNA
agaggatacaaacaaatggaagaacattccatgctcatgggtaggaagaatcaatatcatgaaaatggccatactgcccaaggtaatttacagattcaatgccatccccatcaatctccc

SEQ ID NO: 96159 - DNA, 120 bp, synthetic construct
  source 1..120: mol_type = other DNA
ctggaggggatgtggagaaataggaacacttttacactgttggtgggactgtaaactagttcaaccattgtggaagtcagtgtggcgattcctcagggatctagaactagaaataccatt

SEQ ID NO: 96160 - DNA, 120 bp, synthetic construct; identical to SEQ ID NO: 34062
  source 1..120: mol_type = other DNA

SEQ ID NO: 96161 - DNA, 120 bp, synthetic construct
  source 1..120: mol_type = other DNA
gaattgaacaatgagaatacttggatacagggtggggaacatcacacactggagcttgacgtggggtggggggaggggggtgggatagcattaggagatagacctaatgtaaatgatgag

SEQ ID NO: 96162 - DNA, 120 bp, synthetic construct
  source 1..120: mol_type = other DNA
cctgtgcatgtccctctgtggtccacaacccctgccccagctcacattgaccaagggagcagccagcaatgggccaccctatctgtgtcctcaacacccagaacagcctgtggttccatt

SEQ ID NO: 96163 - DNA, 120 bp, synthetic construct
  source 1..120: mol_type = other DNA
ccatctgcagctgcatcccgggacctagaacaggtacaaaagtacctaataagtacccactgaatgaataattggctgagttttctgtaccaaagactgagctaagactctttaaaagga

SEQ ID NO: 96164 - DNA, 120 bp, synthetic construct
  source 1..120: mol_type = other DNA
gttagtgacaaagcccctgagtcaagatgacagcagcccccataactcctaatcggctctcccgcgtggagtcatttaggagtagtcgcattagagacaagtccaacatctaatcttcca

SEQ ID NO: 96165 - DNA, 120 bp, synthetic construct
  source 1..120: mol_type = other DNA
ttcttggatcctcggatcctctgactctggtggggacaggcagaccaagctctcttggacccgggaagagggacccttggaagtcacttgggattgagttctagagtcttgacactgttt

SEQ ID NO: 96166 - DNA, 120 bp, synthetic construct
  source 1..120: mol_type = other DNA
gggtcctatgggaattctacgtttaacttttggaggagctgccaaactgttttccacagtggctgcgccatcacaatccaattttaggacatttttatcacccataaagcactccctgta

SEQ ID NO: 96167 - DNA, 120 bp, synthetic construct
  source 1..120: mol_type = other DNA
gccttggctttcctaagcttaaggaataaacccaaaaggaggtacctggaaggagctggatttggggactgaggagctgggagctgatggaagccgtgaaaggggatgtgctcctgggga

SEQ ID NO: 96168 - DNA, 120 bp, synthetic construct
  source 1..120: mol_type = other DNA
tttccatagccatggcccagcagtggagcctccaaaggctcgcaggccgccatccgcaggacagctatgaggacagcacccagtccagcatcttcacctacaccaacagcaactccacca

SEQ ID NO: 96169 - DNA, 120 bp, synthetic construct
  source 1..120: mol_type = other DNA
agatgacgaggtcaacagatagagatcatcctggccaacatactgaaacctcatgtctactaaaaatgcaaaaattagctgggcttggtggcgcatgcctgtagtcccagctactcagga

SEQ ID NO: 96170 - DNA, 120 bp, synthetic construct; identical to SEQ ID NO: 2125
  source 1..120: mol_type = other DNA

SEQ ID NO: 96171 - DNA, 120 bp, synthetic construct; identical to SEQ ID NO: 2126
  source 1..120: mol_type = other DNA

SEQ ID NO: 96172 - DNA, 120 bp, synthetic construct
  source 1..120: mol_type = other DNA
cacgttgcagtgagctatgattgtgccactgtactccagcctgggtgccagagccaggctctatctctatttggtgttgttgttgttgctgttgttgtttttgagacggagtcttgttct

SEQ ID NO: 96173 - DNA, 120 bp, synthetic construct
  source 1..120: mol_type = other DNA
ctcaaaaaaaaagaaaaaaaaaagaaaagaaaaataaattaccaggctgtgcatggtggctcatgcctgcaatcccagtactttgggaggacaaggcaggaggatctcttgaggtcagga

SEQ ID NO: 96174 - DNA, 120 bp, synthetic construct; identical to SEQ ID NO: 35591
  source 1..120: mol_type = other DNA

SEQ ID NO: 96175 - DNA, 120 bp, synthetic construct; identical to SEQ ID NO: 35592
  source 1..120: mol_type = other DNA

SEQ ID NO: 96176 - DNA, 120 bp, synthetic construct; identical to SEQ ID NO: 35593
  source 1..120: mol_type = other DNA

SEQ ID NO: 96177 - DNA, 120 bp, synthetic construct; identical to SEQ ID NO: 35594
  source 1..120: mol_type = other DNA

SEQ ID NO: 96178 - DNA, 120 bp, synthetic construct; identical to SEQ ID NO: 35595
  source 1..120: mol_type = other DNA

SEQ ID NO: 96179 - DNA, 120 bp, synthetic construct; identical to SEQ ID NO: 35596
  source 1..120: mol_type = other DNA

SEQ ID NO: 96180 - DNA, 120 bp, synthetic construct; identical to SEQ ID NO: 35597
  source 1..120: mol_type = other DNA

SEQ ID NO: 96181 - DNA, 120 bp, synthetic construct; identical to SEQ ID NO: 35598
  source 1..120: mol_type = other DNA

SEQ ID NO: 96182 - DNA, 120 bp, synthetic construct; identical to SEQ ID NO: 35599
  source 1..120: mol_type = other DNA

SEQ ID NO: 96183 - DNA, 120 bp, synthetic construct; identical to SEQ ID NO: 35600
  source 1..120: mol_type = other DNA

SEQ ID NO: 96184 - DNA, 120 bp, synthetic construct; identical to SEQ ID NO: 35601
  source 1..120: mol_type = other DNA

SEQ ID NO: 96185 - DNA, 120 bp, synthetic construct
  source 1..120: mol_type = other DNA
tagttaaaatggtgcattttataatatgtaaattatatctcaatagagctgttaaaaaaccacaagcaggccaggcgcagtggttcacagttgcaatcccagcgctttgggaggccaagg

SEQ ID NO: 96186 - DNA, 120 bp, synthetic construct; identical to SEQ ID NO: 35602
  source 1..120: mol_type = other DNA

SEQ ID NO: 96187 - DNA, 120 bp, synthetic construct; identical to SEQ ID NO: 35603
  source 1..120: mol_type = other DNA

SEQ ID NO: 96188 - DNA, 120 bp, synthetic construct
  source 1..120: mol_type = other DNA
tctcaccattgcactccaacctgggtgacagggtgaggctctgtctcacaaaaaaaaaaaaaagaattccttcagaaataaaaaggaatgatggcatgtgtgaggcaataaggtgacagt

SEQ ID NO: 96189 - DNA, 120 bp, synthetic construct; identical to SEQ ID NO: 35604
  source 1..120: mol_type = other DNA

SEQ ID NO: 96190 - DNA, 120 bp, synthetic construct; identical to SEQ ID NO: 35605
  source 1..120: mol_type = other DNA

SEQ ID NO: 96191 - DNA, 120 bp, synthetic construct
  source 1..120: mol_type = other DNA
ccaataaatcctaagcagggaagacagaaataggtccacacctagacacgagattttttttttttttttttttttgaaacagtgtttcgctcttgtcgcccaggctggagtacagtggcg

SEQ ID NO: 96192 - DNA, 120 bp, synthetic construct; identical to SEQ ID NO: 35606
  source 1..120: mol_type = other DNA

SEQ ID NO: 96193 - DNA, 120 bp, synthetic construct
  source 1..120: mol_type = other DNA
tgatcgcaccactgccctccagccagggtggcagactgagaccccatctcaaaaaataaataaataaaagcaaacaagaaaaaaaaaggcttgaaacatatctgatagataaagggctaa

SEQ ID NO: 96194 - DNA, 120 bp, synthetic construct; identical to SEQ ID NO: 35607
  source 1..120: mol_type = other DNA

SEQ ID NO: 96195 - DNA, 120 bp, synthetic construct; identical to SEQ ID NO: 35608
  source 1..120: mol_type = other DNA

SEQ ID NO: 96196 - DNA, 120 bp, synthetic construct; identical to SEQ ID NO: 35609
  source 1..120: mol_type = other DNA

SEQ ID NO: 96197 - DNA, 120 bp, synthetic construct
  source 1..120: mol_type = other DNA
gtccgcccacctcggcttcccaaagtgctgggattacaggtgtgagccaccgcccccggccacttaaattttgttttataattatgtaataaaacagttaaaagtctcaaattaaaatct

SEQ ID NO: 96198 - DNA, 120 bp, synthetic construct; identical to SEQ ID NO: 35610
  source 1..120: mol_type = other DNA

SEQ ID NO: 96199 - DNA, 120 bp, synthetic construct; identical to SEQ ID NO: 35591
  source 1..120: mol_type = other DNA

SEQ ID NO: 96200 - DNA, 120 bp, synthetic construct; identical to SEQ ID NO: 35592
  source 1..120: mol_type = other DNA

SEQ ID NO: 96201 - DNA, 120 bp, synthetic construct; identical to SEQ ID NO: 35593
  source 1..120: mol_type = other DNA

SEQ ID NO: 96202 - DNA, 120 bp, synthetic construct; identical to SEQ ID NO: 35594
  source 1..120: mol_type = other DNA

SEQ ID NO: 96203 - DNA, 120 bp, synthetic construct; identical to SEQ ID NO: 35595
  source 1..120: mol_type = other DNA

SEQ ID NO: 96204 - DNA, 120 bp, synthetic construct; identical to SEQ ID NO: 35596
  source 1..120: mol_type = other DNA

SEQ ID NO: 96205 - DNA, 120 bp, synthetic construct
  source 1..120: mol_type = other DNA
gcgtctgctggggaccctacaccttcttcgcatgctttgctgctgccaaccctggttacgccttccaccctttgatggctgccctgccggcctactttgccaaaagtgccactatctaca

SEQ ID NO: 96206 - DNA, 120 bp, synthetic construct; identical to SEQ ID NO: 35598
  source 1..120: mol_type = other DNA

SEQ ID NO: 96207 - DNA, 120 bp, synthetic construct; identical to SEQ ID NO: 35599
  source 1..120: mol_type = other DNA

SEQ ID NO: 96208 - DNA, 120 bp, synthetic construct; identical to SEQ ID NO: 35600
  source 1..120: mol_type = other DNA

SEQ ID NO: 96209 - DNA, 120 bp, synthetic construct; identical to SEQ ID NO: 35601
  source 1..120: mol_type = other DNA

SEQ ID NO: 96210 - DNA, 120 bp, synthetic construct; identical to SEQ ID NO: 96185
  source 1..120: mol_type = other DNA

SEQ ID NO: 96211 - DNA, 120 bp, synthetic construct; identical to SEQ ID NO: 35602
  source 1..120: mol_type = other DNA

SEQ ID NO: 96212 - DNA, 120 bp, synthetic construct; identical to SEQ ID NO: 35603
  source 1..120: mol_type = other DNA

SEQ ID NO: 96213 - DNA, 120 bp, synthetic construct; identical to SEQ ID NO: 96188
  source 1..120: mol_type = other DNA

SEQ ID NO: 96214 - DNA, 120 bp, synthetic construct; identical to SEQ ID NO: 35604
  source 1..120: mol_type = other DNA

SEQ ID NO: 96215 - DNA, 120 bp, synthetic construct; identical to SEQ ID NO: 35605
  source 1..120: mol_type = other DNA

SEQ ID NO: 96216 - DNA, 120 bp, synthetic construct
  source 1..120: mol_type = other DNA
ggtccacacctagacacgagattttttttttttttttttttttttgaaacagtgtttcgctcttgtcgcccaggctggagtacagtggcgtgatctcggctcactgcaacctctgcctcc

SEQ ID NO: 96217 - DNA, 120 bp, synthetic construct; identical to SEQ ID NO: 35611
  source 1..120: mol_type = other DNA

SEQ ID NO: 96218 - DNA, 120 bp, synthetic construct; identical to SEQ ID NO: 96193
  source 1..120: mol_type = other DNA

SEQ ID NO: 96219 - DNA, 120 bp, synthetic construct
  source 1..120: mol_type = other DNA
attaagagatcaggtagtgtagggtttgggagcttttaaggtgaagaggcccgggctgatcccacaggccagtataaagcgccgtgaccctcaggtgatgcgccagggccggctgccgtc

SEQ ID NO: 96220 - DNA, 120 bp, synthetic construct; identical to SEQ ID NO: 35608
  source 1..120: mol_type = other DNA

SEQ ID NO: 96221 - DNA, 120 bp, synthetic construct; identical to SEQ ID NO: 35609
  source 1..120: mol_type = other DNA

SEQ ID NO: 96222 - DNA, 120 bp, synthetic construct; identical to SEQ ID NO: 96197
  source 1..120: mol_type = other DNA

SEQ ID NO: 96223 - DNA, 120 bp, synthetic construct; identical to SEQ ID NO: 35610
  source 1..120: mol_type = other DNA

SEQ ID NO: 96224 - DNA, 120 bp, synthetic construct; identical to SEQ ID NO: 35591
  source 1..120: mol_type = other DNA

SEQ ID NO: 96225 - DNA, 120 bp, synthetic construct; identical to SEQ ID NO: 35592
  source 1..120: mol_type = other DNA

SEQ ID NO: 96226 - DNA, 120 bp, synthetic construct; identical to SEQ ID NO: 35593
  source 1..120: mol_type = other DNA

SEQ ID NO: 96227 - DNA, 120 bp, synthetic construct; identical to SEQ ID NO: 35594
  source 1..120: mol_type = other DNA

SEQ ID NO: 96228 - DNA, 120 bp, synthetic construct; identical to SEQ ID NO: 35595
  source 1..120: mol_type = other DNA

SEQ ID NO: 96229 - DNA, 120 bp, synthetic construct; identical to SEQ ID NO: 35596
  source 1..120: mol_type = other DNA

SEQ ID NO: 96230 - DNA, 120 bp, synthetic construct; identical to SEQ ID NO: 35597
  source 1..120: mol_type = other DNA

SEQ ID NO: 96231 - DNA, 120 bp, synthetic construct; identical to SEQ ID NO: 35598
  source 1..120: mol_type = other DNA

SEQ ID NO: 96232 - DNA, 120 bp, synthetic construct; identical to SEQ ID NO: 35599
  source 1..120: mol_type = other DNA

SEQ ID NO: 96233 - DNA, 120 bp, synthetic construct; identical to SEQ ID NO: 35600
  source 1..120: mol_type = other DNA

SEQ ID NO: 96234 - DNA, 120 bp, synthetic construct; identical to SEQ ID NO: 35601
  source 1..120: mol_type = other DNA

SEQ ID NO: 96235 - DNA, 120 bp, synthetic construct; identical to SEQ ID NO: 96185
  source 1..120: mol_type = other DNA

SEQ ID NO: 96236 - DNA, 120 bp, synthetic construct; identical to SEQ ID NO: 35602
  source 1..120: mol_type = other DNA

SEQ ID NO: 96237 - DNA, 120 bp, synthetic construct; identical to SEQ ID NO: 35603
  source 1..120: mol_type = other DNA

SEQ ID NO: 96238 - DNA, 120 bp, synthetic construct; identical to SEQ ID NO: 96188
  source 1..120: mol_type = other DNA

SEQ ID NO: 96239 - DNA, 120 bp, synthetic construct; identical to SEQ ID NO: 7412
  source 1..120: mol_type = other DNA

SEQ ID NO: 96240 - DNA, 120 bp, synthetic construct; identical to SEQ ID NO: 7413
  source 1..120: mol_type = other DNA

SEQ ID NO: 96241 - DNA, 120 bp, synthetic construct; identical to SEQ ID NO: 22744
  source 1..120: mol_type = other DNA

SEQ ID NO: 96242 - DNA, 120 bp, synthetic construct; identical to SEQ ID NO: 22745
  source 1..120: mol_type = other DNA

SEQ ID NO: 96243 - DNA, 120 bp, synthetic construct; identical to SEQ ID NO: 22746
  source 1..120: mol_type = other DNA

SEQ ID NO: 96244 - DNA, 120 bp, synthetic construct; identical to SEQ ID NO: 22747
  source 1..120: mol_type = other DNA

SEQ ID NO: 96245 - DNA, 120 bp, synthetic construct; identical to SEQ ID NO: 22748
  source 1..120: mol_type = other DNA

SEQ ID NO: 96246 - DNA, 120 bp, synthetic construct
  source 1..120: mol_type = other DNA
tctggtttgagctgtggaccaggctctgtgtcaagctgtctgcttgaatgacctcatgagatcccacagcggccctgggagagtcttttttcagcccattccctagatgggcgaagggag

SEQ ID NO: 96247 - DNA, 120 bp, synthetic construct
  source 1..120: mol_type = other DNA
gggggcagtgtggggggggcagtgtgggggcagtgtgtgcgcagtgtgggggcagtgtgtgggggcagtgtgggggcagtgtgtggggcagtgtgggggcagtgtgggggcagtgtgtgg

SEQ ID NO: 96248 - DNA, 120 bp, synthetic construct
  source 1..120: mol_type = other DNA
agcgtgggggagatcgtctagggggatagcgtgggggagatggtgtggggtggatagtgtgggggatagttggggggagctggggggatagtggggggatagcatcggggggatagtgtg

SEQ ID NO: 96249 - DNA, 120 bp, synthetic construct; identical to SEQ ID NO: 22752
  source 1..120: mol_type = other DNA

SEQ ID NO: 96250 - DNA, 120 bp, synthetic construct; identical to SEQ ID NO: 22753
  source 1..120: mol_type = other DNA

SEQ ID NO: 96251 - DNA, 120 bp, synthetic construct
  source 1..120: mol_type = other DNA
tgagatgatagaaaagggctcctgcttttcctgtaattgcagccccttgttcttgtggttgctacatgcaataaatgtaattctatgagaaggaccagcccttacatcccatcaaaatgt

SEQ ID NO: 96252 - DNA, 120 bp, synthetic construct
  source 1..120: mol_type = other DNA
cacatcaatgtttgcagggaacttggatttaacattatgaaaaaagattcattcagaaataaaaagggtgatactttgagagtcaacgtgagtctactttccaatgaattcaagcaatac

SEQ ID NO: 96253 - DNA, 120 bp, synthetic construct
  source 1..120: mol_type = other DNA
tggaataccatagactggtgatttaaacaacagaaatttatttctcaaagttctggagcctgggaagtccaagatcaatttctggtgagcgctttcttccaggtttatagatagccgtcc

SEQ ID NO: 96254 - DNA, 120 bp, synthetic construct
  source 1..120: mol_type = other DNA
tactattgccacaaaattgtcacatttcagcaatacgtatttattgctcatgtgtctgagatctgtcaactatgctgatgttggcgggggttggctgactgaaaggtgatcaaagctgac

SEQ ID NO: 96255 - DNA, 120 bp, synthetic construct
  source 1..120: mol_type = other DNA
ccagctaagcagagatttcaccataagctatgtccttgaatacgttactgctgggcccactgagcacagatatcctttcatttatgtggtatatgcatttctaaaaggtctatggggttt

SEQ ID NO: 96256 - DNA, 120 bp, synthetic construct
  source 1..120: mol_type = other DNA
aattccgaagggatcaaaaagtagattctaaaaaattaaaccctgtagtactagaagttaacatgggtaaattctataatctgagagtgggaaaactgccacgctactactcgaagtcca

SEQ ID NO: 96257 - DNA, 120 bp, synthetic construct
  source 1..120: mol_type = other DNA
gtgagggaagaaggggaaaaggcagtgagtaaagagtagctaaacttctttagaatgtactttactttgtatacctgactctgataagaatttaaattgctgataaaacatattgcaaca

SEQ ID NO: 96258 - DNA, 120 bp, synthetic construct
  source 1..120: mol_type = other DNA
cctagttcacgcacctggatacagagacttaggacagaacctatctcatgtggttattcaaggaaagtacccaatacactgtctggcagacagtcaagaaaatttattgttcatacccat

SEQ ID NO: 96259 - DNA, 120 bp, synthetic construct
  source 1..120: mol_type = other DNA
agctgagatcaggccactgaactccagcctgtgtgacagagtgagactctgtctcaaaaacaaacaaacaaacaaaaagaagaaaatatacatccttgggttccaagttctttctcattt

SEQ ID NO: 96260 - DNA, 120 bp, synthetic construct
  source 1..120: mol_type = other DNA
tattttttagagcagttttaagttcacagcaaaatagagcagaaaatgcagagaatttccatatgaccattgctccctcacacacacacacacacacagcctccccacaattaacacctc

SEQ ID NO: 96261 - DNA, 120 bp, synthetic construct
  source 1..120: mol_type = other DNA
gccaaactgttttcaacagtggctaggtgtttagttttttaagaaattgtcaaactgttttctacagtggctggggtttgggccatactcctgaaagataccattctaaatgttgtaata

SEQ ID NO: 96262 - DNA, 120 bp, synthetic construct
  source 1..120: mol_type = other DNA
gctgatgtttgtgaagagtttaaggtctatgtctagattcatctttttgcgtgtgaacatcccattgttcagcaccatttgttgaaaacttacttttctccgctgtattccctttgctcc

SEQ ID NO: 96263 - DNA, 120 bp, synthetic construct
  source 1..120: mol_type = other DNA
tgcatctgttgatatgatcatgtgattttccttctttagcctggtgctgtggtgtagttagtctgctgccacagcccaagtgtataaaatcctctgatgaatctcctgtgatgattcaaa

SEQ ID NO: 96264 - DNA, 120 bp, synthetic construct
  source 1..120: mol_type = other DNA
catacagaagtgctactgatttttgtatgttgattttgtatcatgaaactttactaaatttgttgatgcgttctagttgttttttgattcagtccttagagttttccaaatataagatca

SEQ ID NO: 96265 - DNA, 120 bp, synthetic construct
  source 1..120: mol_type = other DNA
ctggtttgttaaggttttggatttcttcatggttcaatcttggtaggttgtatgtgtccaagaattgtcaatctcctctagatttccctatttcttggcatatagctgctcatagtagcc

SEQ ID NO: 96266 - DNA, 120 bp, synthetic construct
  source 1..120: mol_type = other DNA
ctgtttaatgttgaaagttggcttttgaagtctccagctattattgtattggggcctgtctttctctttagctctcataatacttgctttatatatcggggtgcccaatgttgggtgcaa

SEQ ID NO: 96267 - DNA, 120 bp, synthetic construct
  source 1..120: mol_type = other DNA
tacttactatcaccagtgagttttgtaccttcagatgatttctttttgttcattaatgtccttttcttactgattgaagtactccctttagcatttcttgtaggacaggtctggtgttga

SEQ ID NO: 96268 - DNA, 120 bp, synthetic construct
  source 1..120: mol_type = other DNA
ttgtacctgtccatcttgggaagtctttccagatattcaaaataacttgggtgttctaatctaagatgtatctgctttagggagcacctcaaccccagtaatgctgtggttcttgcacat

SEQ ID NO: 96269 - DNA, 120 bp, synthetic construct
  source 1..120: mol_type = other DNA
ctgagtctcacttgaagccatcaagtttccagtcttactcaaggccctcgacatagtacctgagtattgctgctggttattcagggcccaagggctcttcattagcaagtggtaaatttt

SEQ ID NO: 96270 - DNA, 120 bp, synthetic construct
  source 1..120: mol_type = other DNA
tcagtagcccttctcttgtaggggtctctatgtctcttccatggggctttgctaagttcaaatacagattcacatattaaacagtgccgcctttaaactctgatctgcctttaaaatctt

SEQ ID NO: 96271 - DNA, 120 bp, synthetic construct
  source 1..120: mol_type = other DNA
atggtctaatttttgaggcctcccaagccgtattgaactgtgagtcctctttcctttaaaaattacccagtctcagatatgttttattagcagcctgagaatggactaacacaatggtct

SEQ ID NO: 96272 - DNA, 120 bp, synthetic construct
  source 1..120: mol_type = other DNA
gcagtcacagaacagataaatacaaagacaagttacattagcactgctctctgaacctgcaaatggatgcaaatgaagcctagactatataatccaagataagaagcagaaatttcagcc

SEQ ID NO: 96273 - DNA, 120 bp, synthetic construct
  source 1..120: mol_type = other DNA
gaattataagctgttgaggattcatggtgagctaggagcaaacggtgagtatccagaaatgcagctagaagggtttgtcctcaaggaccttagatgtcaggatgtttaactttatcctgt

SEQ ID NO: 96274 - DNA, 120 bp, synthetic construct
  source 1..120: mol_type = other DNA
aaggctgccagatttttgccttgaggaactcaggagatggtgatgccattaagagaactatgattggataggaaggtgaaaatgctttgggcatgttgtatttccagtgctcatgagtta

SEQ ID NO: 96275 - DNA, 120 bp, synthetic construct
  source 1..120: mol_type = other DNA
gagtaaaaggaaacaaaagaaagaagctgagacatttttatgatgacctaaatcagtgcttctgaaagtgtggtctgtggatttgtggggtctctaagactctttccatggatcaacaag

SEQ ID NO: 96276 - DNA, 120 bp, synthetic construct
  source 1..120: mol_type = other DNA
agactgaaacatctgacaactgtttatctattagaaagtgataaggggctgtactagggtaatggcaaacctctgtaactggaaattgaagagcaagacttgaatagaaatgaggttcca

SEQ ID NO: 96277 - DNA, 120 bp, synthetic construct
  source 1..120: mol_type = other DNA
cctcattaatagccattaatcatgtgttccattaacagccactctcaacagaatcaggactaagctattaaagtaagtgtaggatgaaggcaattctatgaataactaagccaatagatg

SEQ ID NO: 96278 - DNA, 120 bp, synthetic construct
  source 1..120: mol_type = other DNA
caactgtttctagaaaagggcaatgggaatggggttgctctttgcctgtaattctagaagaaaaggcatatggctagtccataagtctatacatttaagtcctggttggttgacagacta

SEQ ID NO: 96279 - DNA, 120 bp, synthetic construct
  source 1..120: mol_type = other DNA
tttttggtcagggcaaatttaggtcattatttttaacactggaactgtagtttcagagcagatagacaaactataatgagaatagatgaacagcaaggccactgaaaggactcagaacta

SEQ ID NO: 96280 - DNA, 120 bp, synthetic construct
  source 1..120: mol_type = other DNA
cactcatggacttagaagtaaggtataaaattcaaaaacgtatccatgtttctcaaggatcttgttgtaggccactctaattccatatattatgtggcttttcctagaatttttacacta

SEQ ID NO: 96281 - DNA, 120 bp, synthetic construct
  source 1..120: mol_type = other DNA
ctctgtgaactactaaggtgggagggggctatacgcagaggagaatgtcagatgctcagctcggtcccctccgcctgacgctcctctctgtctcagccaggactggtttctgtaagaaac

SEQ ID NO: 96282 - DNA, 120 bp, synthetic construct
  source 1..120: mol_type = other DNA
gaagttttcctagcatctctccatgacagttttcctctgttataacaaacatgacaaatgtgttgcctagaccagtttgccgttagtagcttcagatcgcctaagtcacaaactgcatct

SEQ ID NO: 96283 - DNA, 120 bp, synthetic construct
  source 1..120: mol_type = other DNA
gctagaagggactctagagattatctatgctaagtaaataaactgaggcacagaaaatgtaaattattttctctaagaacagatagttcattaattcagtgccactaaatctctcctagc

SEQ ID NO: 96284 - DNA, 120 bp, synthetic construct
  source 1..120: mol_type = other DNA
acattgagtgaatcatgaggctcagatgactatggcaacaacaacaacaaaaataactgctaacatggacgctgtgattaactctttggttctgtttgtaacaccatcatcatcatcccc

SEQ ID NO: 96285 - DNA, 120 bp, synthetic construct
  source 1..120: mol_type = other DNA
aaacccacaaaatatcctaattagaggatggatttaaagtgaaaaacactaaataaaattcagttctcaatttaatggcttacattaaaaaatactaacttaattgcatgcctttcactt

SEQ ID NO: 96286 - DNA, 120 bp, synthetic construct
  source 1..120: mol_type = other DNA
agcataatttctctactgctaagaagaaaatacaaataattaattggtgtctgtaggtattcaaataataaatgctgacaatatttactttgagattttgaacatctaataggatctctt

SEQ ID NO: 96287 - DNA, 120 bp, synthetic construct
  source 1..120: mol_type = other DNA
ctcagccgttgatatggcagtcagtttccagacataactgagtaacacttcaccttggctgcatctaaatcacttactttctgccctagggcttctctactggagtaattgccctccata

SEQ ID NO: 96288 - DNA, 120 bp, synthetic construct
  source 1..120: mol_type = other DNA
agtgtcagttgtggctcgacttcaaggcactctgcgcctcactctccttatctgtaaaaaggtgcgaattggactaaaaaaatcttaaacgctttctagtactaaaatgtcctatggcaa

SEQ ID NO: 96289 - DNA, 120 bp, synthetic construct
  source 1..120: mol_type = other DNA
ctgtatgtaagtaggtgtcttcgtgtgttcaggctgctataacaaagtaccatagcctgggtggcttacaaactacagaaatttactcttacagtgctggaggcttgaggagttcatgat

SEQ ID NO: 96290 - DNA, 120 bp, synthetic construct
  source 1..120: mol_type = other DNA
gtcaattcccattattcatgatagttatggtccataaagtcattatgactacagaattcgtgagtactgaagctttgcttctaggggatatatagggcaggttcctgtgagcctctgatt

SEQ ID NO: 96291 - DNA, 120 bp, synthetic construct
  source 1..120: mol_type = other DNA
gagtcaccagatacccaaccacatcacacaaatttaaaatatatacagcgcattgattgatttgcatatgttgaaccatccttgcatcccaaggataaatcccactgggttacaaggagt

SEQ ID NO: 96292 - DNA, 120 bp, synthetic construct
  source 1..120: mol_type = other DNA
aaagaatgtaattggattgttactcaaaggataaatgcttgaggggatggatacctcattcctcatgacatgtttatttcacattgtctgcctgtatcaaaacattccaagtaccccgta

SEQ ID NO: 96293 - DNA, 120 bp, synthetic construct
  source 1..120: mol_type = other DNA
attattaaaacatcaagaaacaatagatactggtgaggccatggagaaagaggaacgcttttacactgttggtgggaatgcaaattagttcaaccattgtggaagacaatgtggcaattc

SEQ ID NO: 96294 - DNA, 120 bp, synthetic construct
  source 1..120: mol_type = other DNA
acagaaagaagtggtaggctgggttctgcccacaagctgtcatttgccaaactctgacacagaacatcttaaataaaattttattcttgcagtggtcatgaaataggaacacatcatctt

SEQ ID NO: 96295 - DNA, 120 bp, synthetic construct
  source 1..120: mol_type = other DNA
aaaaggagtgctagggtaggccaaggtattctaaggatgcttataatcccttgacttcttgtctacagttttgttcaatgatttccttaagactcactgaaatctcctccctgcctgact

SEQ ID NO: 96296 - DNA, 120 bp, synthetic construct
  source 1..120: mol_type = other DNA
taaaagttcccctggtgactctaccatgcagccaagatcaagaaggacaggtctggtccaacctatccattttatggatgagaaaactgagtcctgtttgtgaaaaatatttaacggatc

SEQ ID NO: 96297 - DNA, 120 bp, synthetic construct
  source 1..120: mol_type = other DNA
gagaagaagctaggttttgcatgagtatcactgtttcttgtcattcttctcttcattcccatcaactccttctacatgcactgggtcattccaaaaccatcgtgtcaaggacatgatgat

SEQ ID NO: 96298 - DNA, 120 bp, synthetic construct
  source 1..120: mol_type = other DNA
ttcacgatggatttttccaggacttgcaatgcgatgtctgtcaacttcctaactcaggacagtaaactctataaataaagcaagcagaggatgcagcagagaatgacaacctggaatctt

SEQ ID NO: 96299 - DNA, 120 bp, synthetic construct
  source 1..120: mol_type = other DNA
gccaagaataggactataataactgactttgtgttctttccatcacagtatcagaaaaacactgttctcaaggtttattgccatcaattactatagctcaccttattccatcaccaagcc

SEQ ID NO: 96300 - DNA, 120 bp, synthetic construct
  source 1..120: mol_type = other DNA
ttgggtcagcattctagttgaaatagatgaagttataaaatttagctgaccaaaacatttttggaaagataattggtcaaagaagccctttgaaaacagttgtgttttcagaacaatcac

SEQ ID NO: 96301 - DNA, 120 bp, synthetic construct
  source 1..120: mol_type = other DNA
tacaaagcctcaattgtgatctaaaggtgctgtcataatctgtcctcgacagcatcattactcaatgtgtgactagtgagtgctaataattcctatcaggaaactggtcaagagacagcc

SEQ ID NO: 96302 - DNA, 120 bp, synthetic construct
  source 1..120: mol_type = other DNA
agtatggaaacctagtccattcaactcccatgccaaattcttcccatagactactccagtccattccatattctttgtcttagaaacagattggaaaagaataaggtatctgcggagact

SEQ ID NO: 96303 - DNA, 120 bp, synthetic construct
  source 1..120: mol_type = other DNA
actttcacagacactctccatctagtagaacaaatttggaataattgcaacattcctgtcacctacatgagcattaagtactcctctcaacactgccatgttacccgcactgcgctgtaa

SEQ ID NO: 96304 - DNA, 120 bp, synthetic construct
  source 1..120: mol_type = other DNA
gagcttttttactaaaatataaatcaatgtttggaattttcctattaaaagaatagttacataatttgtggctaaaaatgttgttagtgccaaatgactctattccaagtcagaagacaa

SEQ ID NO: 96305 - DNA, 120 bp, synthetic construct
  source 1..120: mol_type = other DNA
gaacatcagttcgcacaaacccctgtaaagagttagtaaagcttactgtactttatttattatacagatagcttatgtttcatggtgcatatatggtagcagtgcaatgtagtagtaaag

SEQ ID NO: 96306 - DNA, 120 bp, synthetic construct
  source 1..120: mol_type = other DNA
ccaccaacagtccataagggtcctatacgttcttcatatccccaccaacacttgttattttctgctttatttaatagtaatattcctaatgaatgtgaggaggtgtctcactgtggttta

SEQ ID NO: 96307 - DNA, 120 bp, synthetic construct
  source 1..120: mol_type = other DNA
tttccatttatttatgtcttctttaatttttttttttttttttttagacagagtctcactctgtcaccacactggggtacagtggcacgatctcggctcactgcaacctccacctcccgg

SEQ ID NO: 96308 - DNA, 120 bp, synthetic construct
  source 1..120: mol_type = other DNA
taagggacattggtttactgttttcttttcttgtagtatctttgtctgtctttgatgttagggtaatgctggccttatagatttaattaggaagtgctctctcctcttcgttatattgaa

SEQ ID NO: 96309 - DNA, 120 bp, synthetic construct
  source 1..120: mol_type = other DNA
ttgtcttcgttcactttctctatttttttttagtttctatttcatttatctctgctccaatttttccttccttctgctagctttctgcttactttgttctttctctagttccttaagttt

SEQ ID NO: 96310 - DNA, 120 bp, synthetic construct
  source 1..120: mol_type = other DNA
aaatcatgtaccacatgatattttgaagtatacatgcattctgggatggttaaatctagctagttataacttctgtaatgaaaacacaacattcactctcagcatttttcaatagtacca

SEQ ID NO: 96311 - DNA, 120 bp, synthetic construct
  source 1..120: mol_type = other DNA
gtacaagctgatatctcattgtagttttgactcgcatttccctgatgattactgatgttaaacatttttttcatatacctgttgaccatgtgtatgccttttgagacatgtccatgcagg

SEQ ID NO: 96312 - DNA, 120 bp, synthetic construct
  source 1..120: mol_type = other DNA
tttattgaaaagacttccctttccccattgtgtttacttagcacctttgttgaaagtcactgagatataaacttaaggtcttctcaggcttttttctggcctgtgcctctccctcggctt

SEQ ID NO: 96313 - DNA, 120 bp, synthetic construct
  source 1..120: mol_type = other DNA
tagttactcattggtctgtgggttcacagcattttaatggagccaactttgctcttaagatgagtaagcagttggtatgactcaggaatctctaagaatgtttctaccttaaaaggcagg

SEQ ID NO: 96314 - DNA, 120 bp, synthetic construct
  source 1..120: mol_type = other DNA
tgtcttgttgcatcacatcatggagagtcctcatctgatgtttatattctatggaattttgttccacagaggaataccacagactgatggttagcaaccaggctgcttcccaaaagctgt

SEQ ID NO: 96315 - DNA, 120 bp, synthetic construct
  source 1..120: mol_type = other DNA
tcactcctccttttgaaaggagtgaataatggaactgagagaaatcaaagcagagaaatggtggatgactttactcatgaaacatgaactcagaagaaaggaggttctcccattgcagat

SEQ ID NO: 96316 - DNA, 120 bp, synthetic construct
  source 1..120: mol_type = other DNA
gaggttgcaatgagccaagattgtcccactgcactccagcctggccaacagagcaagaccctgtctcagaaaaacgaatgataataagtcatattttacatcttcagatagataaaagag

SEQ ID NO: 96317 - DNA, 120 bp, synthetic construct
  source 1..120: mol_type = other DNA
aaggtagagaacaaaagcaatggaagagaggcaatattggaagaaataatagccccaaacatcctataactaaagaaagggatgagactgaactgatgtctctgtgttccaggcacaata

SEQ ID NO: 96318 - DNA, 120 bp, synthetic construct
  source 1..120: mol_type = other DNA
gagggaagggagctgatctctctgagccttagttttcttgcctgtaaaatggggatgatgaaatgcctaccccatcaactttatgaattacttagtgcaatacttggcatgtagacaaca

SEQ ID NO: 96319 - DNA, 120 bp, synthetic construct
  source 1..120: mol_type = other DNA
agcacctcttcctttccagatcctgaatctgacacctcccccaaaactgagctcttcaatccatcatcctaactccttttttataaactacaaatctcaaatgagcacctaatactgcca

SEQ ID NO: 96320 - DNA, 120 bp, synthetic construct
  source 1..120: mol_type = other DNA
gcaggagaatcatttgaacctgcgaggcggaggttgcagtgacccgagctagcaccactgcactccagcctgggcgacaaagtgagattccatctaaaaaaataattaattaattaatta

SEQ ID NO: 96321 - DNA, 120 bp, synthetic construct
  source 1..120: mol_type = other DNA
aatgtttttaatgaattctgaaatcttggacttaattatgaaaaacacatcctaggctgcatgtggcagctcacacctataatcccagcattttgggaggccaaggagggaggaccactt

SEQ ID NO: 96322 - DNA, 120 bp, synthetic construct
  source 1..120: mol_type = other DNA
ctgagaagtgagcaggcaggggctcgaaatatgtgggatgaggctcaagactcatacacactggagtgctctgtaagaagacgatagaaaatcacaagtaaaaataagaaactaaagcag

SEQ ID NO: 96323 - DNA, 120 bp, synthetic construct
  source 1..120: mol_type = other DNA
acatttcaaacctcatttctctcacactcacttatttctgacgtagcctgcaaagtgcattcctatctttcctccctgtctcgctccctcttttcctctctgtttttttctggaacttga

SEQ ID NO: 96324 - DNA, 120 bp, synthetic construct
  source 1..120: mol_type = other DNA
tttccaagatactctcagcacagtcatatttgaaaagaagataagaaagctttgcatgcctacttcgacgtggtcagagaggtggaagagtatttctgggacccattgcttacaacacaa

SEQ ID NO: 96325 - DNA, 120 bp, synthetic construct
  source 1..120: mol_type = other DNA
gctaagctatttctaagctctaaatatcaggttcttagaataaaagcaaagcagtattctctgtaaaccaaaaatctctagctcctgagatggatgctctgatgctgttttcaaagtctt

SEQ ID NO: 96326 - DNA, 120 bp, synthetic construct
  source 1..120: mol_type = other DNA
aagaaagcagagaagattgggagaggacaaaagagcgagaggatgtggagagaaagggtgacatgctaccaagaagactgatagtcagccgggtgcgatggctcacgcctgtaatcctgg

SEQ ID NO: 96327 - DNA, 120 bp, synthetic construct
  source 1..120: mol_type = other DNA
gggtaagtggacataaaagtcatggcaaatgcaagaaatatatctttccaagcacattgctgaacatataaaaggggcttgttgaattcttactgaattaggtatctttcttcacactac

SEQ ID NO: 96328 - DNA, 120 bp, synthetic construct
  source 1..120: mol_type = other DNA
acaaagcagtaggcatggagtaaggaaaaaggcttgtgttttaatagccaggagttctactcggacccactcaggtaaactgaatggcaaagataattcttcctgcaggtcatttctttt

SEQ ID NO: 96329 - DNA, 120 bp, synthetic construct
  source 1..120: mol_type = other DNA
ctgtaaagaaaccaattacttaacataaaacaccattaaagataagccacgaaatgtaaggtctgctgggtaggaaagtggcaaatgcaatgaagcatgtctttagatcatgcaggtcta

SEQ ID NO: 96330 - DNA, 120 bp, synthetic construct
  source 1..120: mol_type = other DNA
aacgtcttcacgccctggactggtaatacagcctatcccaaagcacctggactgagaacgggaaatgagtggttcccagagtgaaactgaggtactattactaaattaaggtaaatatat

SEQ ID NO: 96331 - DNA, 120 bp, synthetic construct
  source 1..120: mol_type = other DNA
ataaaaacaaagcaaacacacttgggttcctcatcatggattggatagagtctaatcttaccatggcatacaagttcttcatgtactggcctctcttcttccccagtcagatcccttgcc

SEQ ID NO: 96332 - DNA, 120 bp, synthetic construct
  source 1..120: mol_type = other DNA
tttacactagtgtcttttactgattctcactcttcttcctttatctcctagatacaccaagatgaagactgccaccaacatctacattttcaaccttgctctggcagatgccttagccac

SEQ ID NO: 96333 - DNA, 120 bp, synthetic construct
  source 1..120: mol_type = other DNA
tacctggagccgcctagagactttggacaattattacattttttatatcaatatagacctcatggaggatctagctcatgttgagaggttcatttttgttccctgaacgaaagcttaatg

SEQ ID NO: 96334 - DNA, 120 bp, synthetic construct
  source 1..120: mol_type = other DNA
aattctgatctagaatccttttcattttccccagaattattatataattcatagatgttgctgcaatacccctcttatttctcaaaagccagtcttgctctggttctgtgattaaagaga

SEQ ID NO: 96335 - DNA, 120 bp, synthetic construct
  source 1..120: mol_type = other DNA
ccaggctcaacctttctaattgaccagaggactaatgtaatatggcccagatacatccgtcatgggcgacattaatcctcatacccctggtattcagtgatgctcaagggaacacaggaa

SEQ ID NO: 96336 - DNA, 120 bp, synthetic construct
  source 1..120: mol_type = other DNA
taaaaatacatccaattaggccttatcttcatcgctgcctctatgaagcagtatcagtgtaagataacagcagaaacacattagccctcgaattggttgctgtcccaaaatgcccaactg

SEQ ID NO: 96337 - DNA, 120 bp, synthetic construct
  source 1..120: mol_type = other DNA
agagtaggaattggcatacggtcaactctgtggttttataggtcaaataaagtcatcctgccaacctagattcaaagggtgagaaattagactccatctcttgctgataggatctgcagt

SEQ ID NO: 96338 - DNA, 120 bp, synthetic construct
  source 1..120: mol_type = other DNA
cagcctactgctccagctgtagcctctgtgcctgatttatgttcagcttgctgtctttatgacttttagatctttattaggtagactaaggcataggcattcattttccatctgttctca

SEQ ID NO: 96339 - DNA, 120 bp, synthetic construct
  source 1..120: mol_type = other DNA
gaatccagacaagcacccagggcttcgaatattactccacagcttttctctgctttcctacacaatgctactttgcactcaattattatcacatggtctcagccagattctcaacattta

SEQ ID NO: 96340 - DNA, 120 bp, synthetic construct
  source 1..120: mol_type = other DNA
ggctattctttcagttctacagtttaaaaagaaaatggttccgtgtgtgtgtgtgtgtgtgtgtgcgtgtgatataggcatgtctctttttgcatgtatggaattagagtaaatgtaggt

SEQ ID NO: 96341 - DNA, 120 bp, synthetic construct
  source 1..120: mol_type = other DNA
ctctcactgagatttagtgttttggaacatgtcaatctttattttctacctcatgtagttttggatgctaaatatgaaaaggtgcatatttttctcttttaactttcaacaacaccacgt

SEQ ID NO: 96342 - DNA, 120 bp, synthetic construct; identical to SEQ ID NO: 28439
  source 1..120: mol_type = other DNA

SEQ ID NO: 96343 - DNA, 120 bp, synthetic construct; identical to SEQ ID NO: 28440
  source 1..120: mol_type = other DNA

SEQ ID NO: 96344 - DNA, 120 bp, synthetic construct
  source 1..120: mol_type = other DNA
atgcaagataaaatcctaaaaaattatttattttatttttttggagacaggatttagctctgctgtccaagctggagtgccgtggcaccagctcagctccctgcagcctctacttcccag

SEQ ID NO: 96345 - DNA, 120 bp, synthetic construct
  source 1..120: mol_type = other DNA
aggccaataaagatgaagatattgttagagaaccccaggaggctctgaatgaggtcaaatctcatggcgatattaaaacattaagaggagttgtggacaaactacaatgaaacacaaatc

SEQ ID NO: 96346 - DNA, 120 bp, synthetic construct
  source 1..120: mol_type = other DNA
gctattaggggctcttgtgtttagggtagagagaagctcagtcagaaagcatcagtatggcgagggccattcatgactcttgagtttcaacaacagatgatatctggaagattaataaat

SEQ ID NO: 96347 - DNA, 120 bp, synthetic construct
  source 1..120: mol_type = other DNA
cctataagttgggtaaatttctttcctcttgaggtcccaaagtaacttcagtcttctggacctgacagaaaatgacgttctttacttaccataggtcagaaaccctgaacagggactgtg

SEQ ID NO: 96348 - DNA, 120 bp, synthetic construct
  source 1..120: mol_type = other DNA
tcccataactttggaacatataccagtaacacatttatgcaaatatagtctaaagcaagcaaaacatcatttcacatttgataacacttcctctatgatttttatgccaaataagtcaaa

SEQ ID NO: 96349 - DNA, 120 bp, synthetic construct
  source 1..120: mol_type = other DNA
cttctttgtatagctagggggcatggtaaattccacatatccccaggccttatctagaatttaatggctttagggtaggtagattgaacaattttcaaaagtcaaagaaacagtttgacc

SEQ ID NO: 96350 - DNA, 120 bp, synthetic construct
  source 1..120: mol_type = other DNA
actatttcatatgatttttagagctgactatgacatgaaccctaaaattcctgttcccttgaaggtggagaccaagagaaggtactgccgtgtggttaaaaggtcaagctcccaaggtgg

SEQ ID NO: 96351 - DNA, 120 bp, synthetic construct
  source 1..120: mol_type = other DNA
gaatagcaattaatatcccatagcatcaaagctgttcttagccaagagggactttaacgagaggggtctctaacaccctaaatcttagaagagactctaaccatcctaagtagggcctct

SEQ ID NO: 96352 - DNA, 120 bp, synthetic construct
  source 1..120: mol_type = other DNA
ctatagacaagtgttaggaaatgtggcctaccttattttggtcatggggactgataatatgtataagcatttaaaaggctgtgaaaagccctactctctctccctctctctctctctctc

SEQ ID NO: 96353 - DNA, 120 bp, synthetic construct
  source 1..120: mol_type = other DNA
ttacaatattttcccgtgaaagaatataagattggaagccagagagcctgggttctgctgctagccctaatggagaccatttgtgtgagtttttcatcccatggcttaagggttgcttat

SEQ ID NO: 96354 - DNA, 120 bp, synthetic construct
  source 1..120: mol_type = other DNA
aaaattgaggtggaggagagtggccacaaaataaaaatattaaaccaactttcctcctccaatgcacctgggcacaccacttcacctctcaaggttatgtttgcttccatagattgacaa

SEQ ID NO: 96355 - DNA, 120 bp, synthetic construct
  source 1..120: mol_type = other DNA
cttgtgatgtgacaccatgaacccaaattgctgctacacatacaatgagttgcacagcagctgaggagttcagagatatgggttcagtgtcttttgtagcaagcagtaaacaaatcaatc

SEQ ID NO: 96356 - DNA, 120 bp, synthetic construct
  source 1..120: mol_type = other DNA
attattgcaaggactcaaagatgaaccaaatagcaacctccacatgctccagtggatggatatcctctgggccactctctcccacatatgaacatataacttgatttggatcaccatgac

SEQ ID NO: 96357 - DNA, 120 bp, synthetic construct
  source 1..120: mol_type = other DNA
taggatcaacttttgagtcttagtccacatcattttggagatactgacttgggtggctggtcctgtatcttatcagaattaagagcctttctgggacttcatgtgatttagcattggcta

SEQ ID NO: 96358 - DNA, 120 bp, synthetic construct
  source 1..120: mol_type = other DNA
tctaaacagctctgcctagtggatacagttacttcctttcctatttttttggtatcaaatctgggtaattaaatgtgtggtccttacaagagaaggacctcggagaacctagtgcagtcc

SEQ ID NO: 96359 - DNA, 120 bp, synthetic construct
  source 1..120: mol_type = other DNA
catcaaagctgtcattctgtccaggacagaacaagtctagggcagcttcagccctcaggctttaaatagcttcctccatggggtttcatgagattttattgacttaagaaaatcttcttc

SEQ ID NO: 96360 - DNA, 120 bp, synthetic construct
  source 1..120: mol_type = other DNA
tgtccctgaatccagcttatgagttcttgcctttttattcttccaaaaagttgttgtctgtcttggcaccctgcactttgtgccactttgagaagaatttcaacctcttagaagatggca

SEQ ID NO: 96361 - DNA, 120 bp, synthetic construct
  source 1..120: mol_type = other DNA
aaatagcaggccacatttccatgtgtctgagcaaatgttattgttcaacacatatgccagctttacagtggggatcaggtagggtgtatacttcaaatcagttacaggaaaaaaatcatt

SEQ ID NO: 96362 - DNA, 120 bp, synthetic construct
  source 1..120: mol_type = other DNA
ttatgacctcaacaaagaagaaccatcttttgttaagttcaccgtagtaacacataaagtaaatgctacctctgatcaaagcaccttgaatggaaggtccgagtctttttagtgttttgc

SEQ ID NO: 96363 - DNA, 120 bp, synthetic construct
  source 1..120: mol_type = other DNA
aagacaattctccgctttaactgattttctttgttgtgaaacacagtagagatttggcaatcaaccattttacttgatctaggtagacagccaagtcagatggcccatgcctagaagctc

SEQ ID NO: 96364 - DNA, 120 bp, synthetic construct
  source 1..120: mol_type = other DNA
ttctgcttaataccagctcctagtacgaattatctggcatgttgagagcaactttgtcttcaagtaggacctgatctatctttttccacaaatgtcatgtgtgtgaacaagtttcttcca

SEQ ID NO: 96365 - DNA, 120 bp, synthetic construct
  source 1..120: mol_type = other DNA
tgtttcccacattgtcacagcatgccctttacatctcaggatccaggcaaaagttgaaattcagaaacatagatatgaaatgtaagatacaaagaaaacacctctgcaaagattccgacc

SEQ ID NO: 96366 - DNA, 120 bp, synthetic construct
  source 1..120: mol_type = other DNA
agtagacagatgagtcaagttcaatttaatgcaaacaatattactgtgttctaagcgcttctgttactcgaaaggggtctgatccagaccccaaaagagggttcttggacctcatgcaag

SEQ ID NO: 96367 - DNA, 120 bp, synthetic construct
  source 1..120: mol_type = other DNA
aactgagggttcttccccttttaagaccgcatagggcaacttcctgacattgccatggcatttgtaaactgtcgtggtactggtgggaatgttttttagcatgctaatgcaatataatta

SEQ ID NO: 96368 - DNA, 120 bp, synthetic construct
  source 1..120: mol_type = other DNA
ttaattcctaggaatcgcatacctacggaaaacagtcctctgacctcctgtgacacatggggtgagcccttcctttttgtctcaatctcaaaaaacagtaagtctttaatccatttgcat

SEQ ID NO: 96369 - DNA, 120 bp, synthetic construct
  source 1..120: mol_type = other DNA
ggttttagagagagagcacagagtccctttgagacagtggggaaaattcatcttcatattgtcacatgcactgtaataggaatgtttagcaaaaaaaaccttccagagaaaggtggtttc

SEQ ID NO: 96370 - DNA, 120 bp, synthetic construct
  source 1..120: mol_type = other DNA
acccaatatttgcaaaattcaaatgtctcataggctcttcttccctggttccctcaggagctgggtttctgggttgcagaagtgcttttcatattctgtatctggttgtggtggcaatgt

SEQ ID NO: 96371 - DNA, 120 bp, synthetic construct
  source 1..120: mol_type = other DNA
aactctcttctctccatcattttgacttagagccagtcagaattcaatctccaatatcctgactagcacaagaaatccataggttgattcttgttctcctgcatctctgcaggtggcaaa

SEQ ID NO: 96372 - DNA, 120 bp, synthetic construct
  source 1..120: mol_type = other DNA
ttgaagcaatgttcaccatagcaaaattccagtgaagtctaagaactgggacagtccgttgaggatccttgtgccaggatgtatgttgccccatgaatgtgcacatgcatattaaaatat

SEQ ID NO: 96373 - DNA, 120 bp, synthetic construct
  source 1..120: mol_type = other DNA
tgaaacaatataaaacaatgtgagagggtctttctctcctctcaatgtcaacatcatatatgattggagacttccacataattgagttttagtgcccactgttacagaaaatcataatgg

SEQ ID NO: 96374 - DNA, 120 bp, synthetic construct
  source 1..120: mol_type = other DNA
gcctcggcctcccaaagtgttgggattacaggtgtgagccactgcgcctggccagaaatgtttaaaatttcataaatcttgaatccataaaattcaatgctaccatttataatttaatac

SEQ ID NO: 96375 - DNA, 120 bp, synthetic construct
  source 1..120: mol_type = other DNA
tcaaacctaacataagcaatcaacccttccacccattgtcctctttctagctgcttatattcctgagtctgaaagaagggcagaattaattcgtttccttgacagtgttgggggtgaaat

SEQ ID NO: 96376 - DNA, 120 bp, synthetic construct
  source 1..120: mol_type = other DNA
ttcccttgtctttctcattctgacattactgacctgttttaaaagaatattccccaagtaaatgttgcgacgtaggtaaatagcctaagaattagagtaacagacaactttgatactaaa

SEQ ID NO: 96377 - DNA, 120 bp, synthetic construct
  source 1..120: mol_type = other DNA
aagtccgatcccttcccatggtattcaagggccttcatattttgtgtgaacatgtcacaatttattcacccattctgctatcaattgatagacatttgggtcacctccagtcttaggtga

SEQ ID NO: 96378 - DNA, 120 bp, synthetic construct
  source 1..120: mol_type = other DNA
taaacaaagccaaccagatacttctttctgatgcatcgacattcaatccaagatttagtttgagaggcaggagggtgccctctctgaaatggtttatgtctgcaaagaagacttctgatg

SEQ ID NO: 96379 - DNA, 120 bp, synthetic construct
  source 1..120: mol_type = other DNA
gcttgaatctgagaggtggaggttgcagtgaaccgagatcatgccactgcactccagcctggacaacagagtaagactccatgtaaaaaaaaatatatagatagatatagatatagatat

SEQ ID NO: 96380 - DNA, 120 bp, synthetic construct
  source 1..120: mol_type = other DNA
tgtcaatttcagctgaatcatctagaaagagatgtcagatatatctaagtgattctgtagactgaactcatctaaatctctcatacccacctgaggggccctctctagaatggccagggg

SEQ ID NO: 96381 - DNA, 120 bp, synthetic construct
  source 1..120: mol_type = other DNA
cataagtactctataccaggggccaccttgggtattttaagagattcaaaaagagaagattctggtgatatttacagtcttattccaattatcttacaaatcaaaatgaaagtgtacagc

SEQ ID NO: 96382 - DNA, 120 bp, synthetic construct
  source 1..120: mol_type = other DNA
accccatcttgcctctaacctccaaggggtcctgttaattcctgggcataggctgaaccaactttgggaggaacttagtttagagtttatagtttaaaacaaagatgataacagaccttt

SEQ ID NO: 96383 - DNA, 120 bp, synthetic construct
  source 1..120: mol_type = other DNA
aaataagaaaaccagaataagctgaagagaaacagctaccatgccccaaggatggagcaatcaacaaaaacagtgctttgaggatctcatgtctctagcatctcagaaaaagccccctga

SEQ ID NO: 96384 - DNA, 120 bp, synthetic construct
  source 1..120: mol_type = other DNA
caggtgtgagcagccccgcctggccttatttttgaggcactacttggagatggacctcccaagaatcatatgcagctccagatagggcaaaaggaggccattatgaatcatagatataca

SEQ ID NO: 96385 - DNA, 120 bp, synthetic construct
  source 1..120: mol_type = other DNA
cctgacgacatgtgcccaaggtggtcagagcacagtttggttttatacatttttgggagacgtgagacatcaatcaacatatgtaagatgaacattggttcagtccagaagggcaggaca

SEQ ID NO: 96386 - DNA, 120 bp, synthetic construct
  source 1..120: mol_type = other DNA
cagtagtcgaccagaatataaaatcctagatccaaggtcaaacggggcacttgtccttcaagtcacccacctgggcctcttccaagtgtactttcctttctttcattcctgctctaaagc

SEQ ID NO: 96387 - DNA, 120 bp, synthetic construct
  source 1..120: mol_type = other DNA
acaagaccacagagtgaagtgtaagaatataaattgccttctcttgcataaactactgggaaaggagtttggagacagatagatgctatggtttgaatgtttgtcccctccaaaagtccc

SEQ ID NO: 96388 - DNA, 120 bp, synthetic construct
  source 1..120: mol_type = other DNA
tttttaacaaaatattagcaaataaggttcagcaacatttaataagaattatacaacacgggccgggcatggtggctcaagcctgtaatcccagcactttgggagtctcaggcaggtgga

SEQ ID NO: 96389 - DNA, 120 bp, synthetic construct
  source 1..120: mol_type = other DNA
ggagagacatacattgttcataggttggaagactcaatgaaataaagatgtcaattcttcccaaattgatatacaggtttttcccagcaatgggttttgtagatgtagacaagattattc

SEQ ID NO: 96390 - DNA, 120 bp, synthetic construct
  source 1..120: mol_type = other DNA
aaggtgacaagttagggaaaagagcatttgcattctagcttcattcttgggactgacaaactatggtgcaaggagaaacacaatatcatccttaatatgctgtgcttcccctgggtacct

SEQ ID NO: 96391 - DNA, 120 bp, synthetic construct
  source 1..120: mol_type = other DNA
tgaatgccaaccatactcttccttcttctattaagaaacagcaaatcctacctcctcatgattatcaatcatccctgccagctggtaaatcctttcagtgccactgatctcctaccatga

SEQ ID NO: 96392 - DNA, 120 bp, synthetic construct
  source 1..120: mol_type = other DNA
aggctttccattcatcaccagctttcagagtcacccataagtgaggctgtagggcagtcatagcccatttttggcttgaacatttagaaaccagtgagaacatgggtcatctattacttg

SEQ ID NO: 96393 - DNA, 120 bp, synthetic construct
  source 1..120: mol_type = other DNA
attccagccttgtgcctactacagtagttctgaataccttgcttatgactatacagtgctgccatctggcctctactattccagaattctgttatccccgttgcttctagatagttattt

SEQ ID NO: 96394 - DNA, 120 bp, synthetic construct
  source 1..120: mol_type = other DNA
ccttctctgtcaagatcctgactttgacattgaagactggccaaggccaagtgtttaatcttctttgaaattctgtcactcttgtacctgattttgaactctttctgccttcggaccaca

SEQ ID NO: 96395 - DNA, 120 bp, synthetic construct
  source 1..120: mol_type = other DNA
cgaggtatgctcagaagagacttctgggttgatgttgtgtttatgccttcctagaatacgtgactggaaaaacaagcagactggcatcaaggaattagctataaatccaggttcgttcgt

SEQ ID NO: 96396 - DNA, 120 bp, synthetic construct
  source 1..120: mol_type = other DNA
ttgtttctatttattttatttttgagaccaggtcttgttctgtcacccagactgcaatgcagtaacctgattatagctcactgtagccccgaactcctgggctcaaaggatactcctgcc

SEQ ID NO: 96397 - DNA, 120 bp, synthetic construct
  source 1..120: mol_type = other DNA
atggattctcccccagagcctccacaaggagtgcaaccttcctcgaactgtgagttcacaaatttgttgaagctgctctatttgtggtaatttgttatatcaggaataggaaataatatg

SEQ ID NO: 96398 - DNA, 120 bp, synthetic construct
  source 1..120: mol_type = other DNA
ctttttcagtttagaggggtagctgacacaggatgagagcacagtaaaacttaagctaagatttccacattaatatcttgcccccaaacaccatgcagtgctaaaagtcacattcccatc

SEQ ID NO: 96399 - DNA, 120 bp, synthetic construct
  source 1..120: mol_type = other DNA
tcaggagtttgaaaccagcctgggcaacatggtaaaccccggtctctactaaaaatataaaaattagccgggcgtagtcccagctactcgggaggctgaggcaggagaatcacttcaacc

SEQ ID NO: 96400 - DNA, 120 bp, synthetic construct
  source 1..120: mol_type = other DNA
actttaggagtctttctaggcctttgatcctattctgagatttgagctgttgtggcaaaactaagaattctttaaagcaaaagacgcccttgcaatgcagggctcagagtgtctatttgc

SEQ ID NO: 96401 - DNA, 120 bp, synthetic construct
  source 1..120: mol_type = other DNA
accctgctcaaaagtgtctggagctcttcaatttaagaaaaactggaagtctacaggctggtgttgcaaaccaaagaaaaataggtggaagggcactttatgtcacactgttatttctgc

SEQ ID NO: 96402 - DNA, 120 bp, synthetic construct
  source 1..120: mol_type = other DNA
ggggttggggtggggaagaaaatgaaaaattatgaatgcatgccccatttttttcccacaagatttcctgagcattcctcagacacagtgcaacatcataacaccagtgaatcaatagta

SEQ ID NO: 96403 - DNA, 120 bp, synthetic construct
  source 1..120: mol_type = other DNA
ttgaaaaacagaatgtttccatgggcaattactcctggtaaaatttgattcttgtccatagcattctctggagagcaatgaacagaagagacatttctcacatcccccctagagccccac

SEQ ID NO: 96404 - DNA, 120 bp, synthetic construct
  source 1..120: mol_type = other DNA
ccttccatcaaaacagtatgtattccaataatgctaataaacaacctattggtgctattccattctgcctcctctgtaaccaatggcacacatttctgaaatgtctagctcaggttagag

SEQ ID NO: 96405 - DNA, 120 bp, synthetic construct
  source 1..120: mol_type = other DNA
caaaacccgtaaatctatacttgaggcatcacattgtccaggaaaccttccctgcactcccaaaattggactgataagcttttaagtttttatgttctcatgccttccaatgatgccctc

SEQ ID NO: 96406 - DNA, 120 bp, synthetic construct
  source 1..120: mol_type = other DNA
gtcccatcagggtttggcccccaccattcaccaaaactgctcttgtgaagaccatcagtgacctccatgttgttaaatccaataaaccattaaatcaatgttaaaccaatgatccatctt

SEQ ID NO: 96407 - DNA, 120 bp, synthetic construct
  source 1..120: mol_type = other DNA
taggcacactcccgccccaaggtgtttgtgtttttgttccttttgcctgaaatattcggcctcagagaacctcaagcctcattccctttcctttttcagattttacacaaattatgtctt

SEQ ID NO: 96408 - DNA, 120 bp, synthetic construct
  source 1..120: mol_type = other DNA
ttcttctatggatgaaagaaaaaaatgtagacaataatacagaagaaggaaattaatgaaacaacagaaccttccaagctccttcctacaccaggcatcctggggctgggcctcatccag

SEQ ID NO: 96409 - DNA, 120 bp, synthetic construct
  source 1..120: mol_type = other DNA
aataggttgatgcactttgcttttgttcagcttcttcagcaagaccaatttccacatcagcatgtcctcctacctcctgagattaataggactgcatgacatgggtcctgttctatttca

SEQ ID NO: 96410 - DNA, 120 bp, synthetic construct
  source 1..120: mol_type = other DNA
ttcgtgacagtgttcctaatgcctccagtaatccactgtcccccttggaccaccaaagcaccctgagcacatctcaaccagagtatttttgcacttcattttaatcatgtatttgttttc

SEQ ID NO: 96411 - DNA, 120 bp, synthetic construct
  source 1..120: mol_type = other DNA
cagctgacaatcactacatctttgctgcagctgaaatcaagacatttccttctggatgcagtcctgaagactggtacccttgtatgaatcagatgaaaattcgagatcttatttatacga

SEQ ID NO: 96412 - DNA, 120 bp, synthetic construct
  source 1..120: mol_type = other DNA
tattcacatggggtgttccctgcatgcatgtctctgtgtccaaactccccctatttatgagggtatcagtcatgttggattagaaacctgccctattaactcatcttaactagttaaatc

SEQ ID NO: 96413 - DNA, 120 bp, synthetic construct
  source 1..120: mol_type = other DNA
tctgcttctaaaacacagtgtgggacaaataagccctagcaaattatacacatgctaaagtttgagaactactgccctagatgattgcttaatgtccttcccagaactacccttggagag

SEQ ID NO: 96414 - DNA, 120 bp, synthetic construct
  source 1..120: mol_type = other DNA
ctgaagacaattagacttttggctcacaccgtgtgcagacatcaaaagtgggcttttgtcaataagcacatgaaaagatgctcagtatcatcagtcatgagggaaatgcaagccaaaacc

SEQ ID NO: 96415 - DNA, 120 bp, synthetic construct
  source 1..120: mol_type = other DNA
aaccagaataataattgcctggggtctgggaggggacaagcaggagtggagaatggcagctaatgtgtaaggatttctttttgtgatgctgaaatgttccaaaattagattgtgatgaca

SEQ ID NO: 96416 - DNA, 120 bp, synthetic construct
  source 1..120: mol_type = other DNA
cctttcctagccaagggaagccatgagtaaccgtacctggaggaatgatacacttctacccaaatactgtgcttttcccacagtcttcgcaaccagcagaccaggagattccctcccatg

SEQ ID NO: 96417 - DNA, 120 bp, synthetic construct
  source 1..120: mol_type = other DNA
gctaaagaagcatgttctaacccattgcaaggatgctaaaaaccttgaaaaaaagattagatgaatgactaactagaatagccagtgtagagaagagtttaaatgatcttttggtgctga

SEQ ID NO: 96418 - DNA, 120 bp, synthetic construct
  source 1..120: mol_type = other DNA
aaaataaagggaaggaggaagatctatcaagcaaatggaaagcaaaaaaaaagcaggggttgcaatcctggtctctgataaaacagactttaaaccaacaaagatcaaaagagacaaaga

SEQ ID NO: 96419 - DNA, 120 bp, synthetic construct
  source 1..120: mol_type = other DNA
ctaagatcagagcagaactgaaggaggtagagacacaaaaaaccctttaaaaaaatcagtgaatccaggagcttttttttttttgaaaagatcaacaaaatagatagaatggtagcaata

SEQ ID NO: 96420 - DNA, 120 bp, synthetic construct
  source 1..120: mol_type = other DNA
ctggccaaagcaatcagacaagagaaagaaataaagtgtattcaattaggaaaagaggaggtcaaattgtctttgtttgtggatcacatgattgtatatttagaaaaccccatcatctca

SEQ ID NO: 96421 - DNA, 120 bp, synthetic construct
  source 1..120: mol_type = other DNA
acaggcaacctacagaatgggagaaaatctttgcaatctatccatctgacaaagggctaatatccagaatctacacagaacataaacaaatttataagaaaaaaacaaacaaccccatca

SEQ ID NO: 96422 - DNA, 120 bp, synthetic construct
  source 1..120: mol_type = other DNA
ttattatttaatgtatttacatgaagatatatgacctttatgttaaaaatatcgaagggtatcttcctccccctcttccatttctttttctaacttaaactttgggttgggcaactgtgt

SEQ ID NO: 96423 - DNA, 120 bp, synthetic construct
  source 1..120: mol_type = other DNA
acactacattatttctcttatcttacaagatcataaagagcgaggaaaaaagattggcagagaagaccgcttgtctctctcccattggagacgggagccaaattaattatttccgccccc

SEQ ID NO: 96424 - DNA, 120 bp, synthetic construct
  source 1..120: mol_type = other DNA
acattagcaaatgagacaaaacaacatttttagccaacagttataagttcactcctttccaagaccctgccaaatgaatgtgctgctcccttctcctcctcttccataccccagtctatt

SEQ ID NO: 96425 - DNA, 120 bp, synthetic construct
  source 1..120: mol_type = other DNA
tagtataatttgagagagaaatctcctatttttgttcctgttgggtagagataacgatcatacattgagtttttactatgtgacatgcactgtgttaattcttagaccaacgttatttca

SEQ ID NO: 96426 - DNA, 120 bp, synthetic construct
  source 1..120: mol_type = other DNA
aagagtagcttcattttgatttccctcattttcctctatttgttttaccttctctgccagagtcatgtacgtatcttctttcatgtgtttgatgtttctgttaagacagctcaaggctct

SEQ ID NO: 96427 - DNA, 120 bp, synthetic construct
  source 1..120: mol_type = other DNA
aggcgtgagccaccacacccagccacctttatcttttcaagatggcgctctcattcacttatcgctatgactattatctactgcaatctatgtacttgcataacatgacctaaataggta

SEQ ID NO: 96428 - DNA, 120 bp, synthetic construct
  source 1..120: mol_type = other DNA
atattcacaccacagaaaatgatgcagttatcaaaaataacaaggtagagctgcatgtactaacaaggaaggcttatgtggaaaaacaggctacagatggatatctgtcacctaattcta

SEQ ID NO: 96429 - DNA, 120 bp, synthetic construct
  source 1..120: mol_type = other DNA
gtttagattgtgactgttcataactgccatcacttgcccccaaactttacaaatcagttcagtgttactttacatggttaaaggtctagtttgtatggctgatataatacatgctatgta

SEQ ID NO: 96430 - DNA, 120 bp, synthetic construct
  source 1..120: mol_type = other DNA
accgcatgtcagcaaattccattgtctcattttaaaatatacacagcatctgactgctttccatctcaacctagtgttttgttgctagcaaatcccatcacctccacctgaacacaggca

SEQ ID NO: 96431 - DNA, 120 bp, synthetic construct
  source 1..120: mol_type = other DNA
tgtagggctgtttattttggctttcgtttgctttttgcccagctcatggcatggtgcttggcatataaaaagcacttgacaaatattgttgaatgaatggagttcccacacccagagata

SEQ ID NO: 96432 - DNA, 120 bp, synthetic construct
  source 1..120: mol_type = other DNA
ttagaccataacgatttctgtttcccccagattgaatctaaaaatgtaacgcaattcatgccaaagtcccacagactgtgtgtatgcacgcatgtgcatgtgtgtgtatgtgtgggtaat

SEQ ID NO: 96433 - DNA, 120 bp, synthetic construct
  source 1..120: mol_type = other DNA
gtggggctttgagagcgctcatccatgctgaagagatgtattttggtggaaccaatttataaagcaatttcatctagtaaagttgaagataggcatacatcatggccagcaattccattt

SEQ ID NO: 96434 - DNA, 120 bp, synthetic construct
  source 1..120: mol_type = other DNA
gaaggcatataaatagcaaaaaagcgtatgaaaagatgctcaacatcatgagtcattagggaattctaaattaaaacaataaaatgttactacccacctactagcatggcgaaaatccaa

SEQ ID NO: 96435 - DNA, 120 bp, synthetic construct
  source 1..120: mol_type = other DNA
ggcagtgaaactagtctgtatgatactgtattagtggatacatgacgttatacatttgtcaaaacccatagaactgtatgacataacgacataaagagtgaaccccatgccaggcgcggt

SEQ ID NO: 96436 - DNA, 120 bp, synthetic construct
  source 1..120: mol_type = other DNA
cctggaagtggaactgctggccatgatgtatgcctatcttcaactttactagatgatgacaaattgctttctaaattggttccaccaaaatatatctcttcagcatgggtgagcactctc

SEQ ID NO: 96437 - DNA, 120 bp, synthetic construct
  source 1..120: mol_type = other DNA
atcccactactggatatctactcacaggaaaagaagtcattatacgaagaaggatacttgcatgcatgtttacagcagcacaattcgcaattgctaaaatatggaaccagcccagatgcc

SEQ ID NO: 96438 - DNA, 120 bp, synthetic construct
  source 1..120: mol_type = other DNA
ttttttgtcatgacatacacagtttacatcataataaatgtggtattctgggcaggaatttgtgaccatgagcagtggtacacctagcgtacttaacgcccagggcagatcactgttaat

SEQ ID NO: 96439 - DNA, 120 bp, synthetic construct
  source 1..120: mol_type = other DNA
gatacttcacaaaacaagattactaggtaatgttctaggaacaaaattaagtgctgaggatacaaaggccaagatcagtcttcaccctgataggcatgctgcagaacccctcatctcccc

SEQ ID NO: 96440 - DNA, 120 bp, synthetic construct
  source 1..120: mol_type = other DNA
ctacctcggcctcacaaagtgctgggattacagatgtgagccaccctgcccagtccccctggttcacattttattcactttagcacaaagtacatcagcacatgtatgttaggtactcaa

SEQ ID NO: 96441 - DNA, 120 bp, synthetic construct
  source 1..120: mol_type = other DNA
aggaagactgtaatatgtactgtctgcttgtttcaggactcagttattaatctttaagaatctttgctaggatgaaagcctcttcttccagcaaatgcatcctgagactgggacttaatc

SEQ ID NO: 96442 - DNA, 120 bp, synthetic construct
  source 1..120: mol_type = other DNA
gtcctatatctggaagtctcttctaagcatcaagatagaggtcatctagttcaagatgcttaaattctctcttcagtatatcttttcaagaacaagaggtgtgaccaatacacaataggc

SEQ ID NO: 96443 - DNA, 120 bp, synthetic construct
  source 1..120: mol_type = other DNA
ctcaatggcacaccaaaaatatacaaaccaaactcatcattctttcactgctcagtatcttccatcaggtaagcgtgttttacagcagaatgaatagcgcacaatcagaaaagatacgtc

SEQ ID NO: 96444 - DNA, 120 bp, synthetic construct
  source 1..120: mol_type = other DNA
aaacgttattggttgtccctcatcttcagcagcagacaaactgttaactgtgtcaggcaaggattgtctctctttagataaggaggaaggaaaactgctgggtgtcttcactgtattttc

SEQ ID NO: 96445 - DNA, 120 bp, synthetic construct
  source 1..120: mol_type = other DNA
aaaagccttggcgacattttcatcagtacacagagaaaacatcaaagcaacatcaccaatgatatggttggttctgtgtccctatccaaatctcacctcgaattgtaatccccacatgtc

SEQ ID NO: 96446 - DNA, 120 bp, synthetic construct
  source 1..120: mol_type = other DNA
gaaggttgacagagagaggaagccaaagagcaaactaggatcttcttcaaaaaccctcagaatcattgcaactaattcagaacagttgaccttcttccaaatcaatatggtccccaggaa

SEQ ID NO: 96447 - DNA, 120 bp, synthetic construct
  source 1..120: mol_type = other DNA
acaaatacaaatgaaagtgaacctggagtttaatttccaaggattcagtatgaaaacacgctttatagaccgtgtagtgctaaggcatggctcattatttctaacattctggagaaacca

SEQ ID NO: 96448 - DNA, 120 bp, synthetic construct
  source 1..120: mol_type = other DNA
ctgaaatcctccataaagttgctgagtgatttatccgaatcccaggatcaaggggctatcggtgccaattacaatgcaaatagcctgacaaaatgttctcataacctcagataaaagtat

SEQ ID NO: 96449 - DNA, 120 bp, synthetic construct
  source 1..120: mol_type = other DNA
tgaaatatcacttcttccacagggtcttccatgacagagcagacagagcagtatcctctccactcccaacccctggccactccctagcccattgccctacttcatcttcagagcatttgt

SEQ ID NO: 96450 - DNA, 120 bp, synthetic construct
  source 1..120: mol_type = other DNA
cttggctatcaagagatgccaggagactttattctcaaaagctcttcatggcacccccatattggtaacagtccctagcacatggtaaatacacaaaaatatttatcagctgcctgacta

SEQ ID NO: 96451 - DNA, 120 bp, synthetic construct
  source 1..120: mol_type = other DNA
gactcaggagttaatttaagaagcaatgagaattcactggaagcttttgtgcaggtgaatcaatgtgatcagaaccgcatcttaggaagactaattgggaggtggtttttaggaggagag

SEQ ID NO: 96452 - DNA, 120 bp, synthetic construct
  source 1..120: mol_type = other DNA
tttgcaatagcttactgtataccctctcttagttttctgattctatgcctacctcccacttcccagtgtctgttgcacagagcagattgggggctccatttgaaatggaagttgattata

SEQ ID NO: 96453 - DNA, 120 bp, synthetic construct
  source 1..120: mol_type = other DNA
gactcacatctatttggagccttttcagtaagcctgttaaaagctgcccacttgcaacttctttgagaataaatggatgttctttccactatcaaccctctgaaaccttctgaagaagga

SEQ ID NO: 96454 - DNA, 120 bp, synthetic construct
  source 1..120: mol_type = other DNA
ctaaatgttagtttaaccaagtgccttccatgtctgtttttcagaaagagaagaaaacaaaaacaaaatctgtctgggaaatatgtgatcaggaggaacacattctgtttctaaggggga

SEQ ID NO: 96455 - DNA, 120 bp, synthetic construct
  source 1..120: mol_type = other DNA
gtctttagaggcattaaagggtaaactaatcagaaagttgtcaaaagctgagaaacattgtaaggtctgaagatatcattaagtttgaaagatataaagaaaataaaagctttttctaaa

SEQ ID NO: 96456 - DNA, 120 bp, synthetic construct
  source 1..120: mol_type = other DNA
aaaaaaaaggaaaagcatgtcctataaagctaaacagactgggattcccatctcaggcactcactggacacttgagcatgccattcaacatctctgaacctcagtttccttaaccatgaa

SEQ ID NO: 96457 - DNA, 120 bp, synthetic construct
  source 1..120: mol_type = other DNA
ttgaattcctctctagtgaatacacaaatcgctccatgtgcacttttaatgcactaaccccactcctgacttcctgctctctttctggctctccttttttctttctgctcttttttcatc

SEQ ID NO: 96458 - DNA, 120 bp, synthetic construct
  source 1..120: mol_type = other DNA
cccctacaagatatggcagaaaacgaagctagaaggtggtggaggccatgtcatagaaggccttacataccaggacaaggagaagttttgtgtgtagttttgtactaactcacaatctat

SEQ ID NO: 96459 - DNA, 120 bp, synthetic construct
  source 1..120: mol_type = other DNA
ctttgtagtggattcctgatggattacagccgatccaagtttatttaaccacctaaaattcaaatagaaagcaaatgttgaccaaagagattagccccccacccattcaccttcccccag

SEQ ID NO: 96460 - DNA, 120 bp, synthetic construct
  source 1..120: mol_type = other DNA
gtcagataattaggaatccttacgcaaccctcaacctgccatggtcttgttgtacctgttatttttgaatagaaaatatataacaaattcaatgccgggagcggtggttcatgcctccca

SEQ ID NO: 96461 - DNA, 120 bp, synthetic construct
  source 1..120: mol_type = other DNA
ttctatcaacactgattctatcaatttcctgttataatgaagctaatgagaggactaagatgggggtggggggtggttgtaatgacctggaaaagatatgaacaaattatgaacaaatat

SEQ ID NO: 96462 - DNA, 120 bp, synthetic construct
  source 1..120: mol_type = other DNA
gctcatggtcagatgaatttatatatatgagctccctctgccacatggagatgatcctcgctggaaaggaagaaattgttcctaaaccacaagaggtggctgcatggagaaaaaaaaaaa

SEQ ID NO: 96463 - DNA, 120 bp, synthetic construct
  source 1..120: mol_type = other DNA
agtttctactaaacttaattacatttcccttcatcgtccctgagagaaatgtcactatccagaaatgcagttgcccagggagaggaacttctaaaacaaggactcatcactgcaaacgct

SEQ ID NO: 96464 - DNA, 120 bp, synthetic construct
  source 1..120: mol_type = other DNA
tttcatcggtttaaaaatgcaccttactgtgtaggaggagaaattcactaggtaacaaacaaagcactgagaagcaattgtttctctgctactctgtctcactcacctcttgctggagag

SEQ ID NO: 96465 - DNA, 120 bp, synthetic construct
  source 1..120: mol_type = other DNA
atgtgtgggtttttcattgccattgcccaccatctgctgcaatggggcatgtggtaggcgttccattaacatattttcaattggtcatgtgaaataataagagacactaagaattctgag

SEQ ID NO: 96466 - DNA, 120 bp, synthetic construct
  source 1..120: mol_type = other DNA
aaggatggggtttaccagtttcctctacttacacgttcatttcctgcacattctcagctgcaaaataaaaggtcttgatctgtggatggctgatcttaaaagcacttgaaggaggaaaag

SEQ ID NO: 96467 - DNA, 120 bp, synthetic construct
  source 1..120: mol_type = other DNA
acaggccagggtttttgtaaatagccaatccttttcaaaccacaagaatcagcactggacatgtgcaaccacaccacagaggcaaagacttaaagctaacaccagtttactaaccttgtt

SEQ ID NO: 96468 - DNA, 120 bp, synthetic construct
  source 1..120: mol_type = other DNA
gtagggtgccaacccataatgcttcaaattctcagacattccgatgttaccttcactcacttctaaatcaccatatcccttggtgaacattatgaagagatagtatcctggctcagagtt

SEQ ID NO: 96469 - DNA, 120 bp, synthetic construct
  source 1..120: mol_type = other DNA
tgagccacaacaaagctagattgttcgtcacccatagaactcaaatcttctttcatctacactggtgtctctgagtagagaaatagaatctacaagattaaacataaatgagtctgtggt

SEQ ID NO: 96470 - DNA, 120 bp, synthetic construct
  source 1..120: mol_type = other DNA
tttctgtacaatgcacagtgcttcctgtggattctcaatccgccttacaaaaaagtatagttttgaaaaactatgttaggtctcatcaattccacttttagatctacagactgagtatcc

SEQ ID NO: 96471 - DNA, 120 bp, synthetic construct
  source 1..120: mol_type = other DNA
actgctgctcccctttttcctctaactatgccttcttctctttcaggggtcttgttctcctgtctgtttcttaaatgtcagagttcactagagttctgtccacagacttattctcttttt

SEQ ID NO: 96472 - DNA, 120 bp, synthetic construct
  source 1..120: mol_type = other DNA
ttaggagtttgagactagcctggccaacatggtgaaactctatctctactaaaaattacaaaaattagccaggtgtggtggcggacgcctgtaatcccagctacttgggaggctgaggct

SEQ ID NO: 96473 - DNA, 120 bp, synthetic construct
  source 1..120: mol_type = other DNA
tggtccttgcttatttgacttgcaaaaaaaaaatgcctcaaaaatgacaatcacagagggcaaatcttgagagaatgacagtgttcttctcttcctcctccttttcctcctcctccgctt

SEQ ID NO: 96474 - DNA, 120 bp, synthetic construct
  source 1..120: mol_type = other DNA
gggcggccctcccttacaggacctctcttactgtatttaattatctggttgtttgtctgcttctccaatggattgtgagtaccttgaaggaaataactgtgttgttcatacatattattt

SEQ ID NO: 96475 - DNA, 120 bp, synthetic construct
  source 1..120: mol_type = other DNA
aaatctatagagacagaaagcaggacggtggttgcctgcggttgggggtgggaactgactgtaaatggggatgggggatcttattggtacaataccaattatttaaaactgatttattat

SEQ ID NO: 96476 - DNA, 120 bp, synthetic construct
  source 1..120: mol_type = other DNA
ttacccaatgactatctgaatcagccgaaactgcaaaagtctccatttctccatataaatctattgttttctcagttactccccaaaacccccagggcactggaaacagatgaggtctaa

SEQ ID NO: 96477 - DNA, 120 bp, synthetic construct
  source 1..120: mol_type = other DNA
atcatttttacatagtcttggtaggtttttttcctttcttcccctctaaaattgcacagaatctaaagctcccctccttctctccatacaatagcgtccatggcactgcaactcatctgc

SEQ ID NO: 96478 - DNA, 120 bp, synthetic construct
  source 1..120: mol_type = other DNA
tgtaaaataagccttttttcttttcttttttttttttttttgagatggagtcttattcttgtcacccaggctggagcacagtggtgcaatctcatctcactgcaacctccgcctcccggg

SEQ ID NO: 96479 - DNA, 120 bp, synthetic construct
  source 1..120: mol_type = other DNA
agctgaggcaggaagattgcttgagcccaggagtttgaggttgtggtgagctatgatcacaccactggaggacagtgagaccccatctctaaaaaaagaaaaatacataaataaacaaat

SEQ ID NO: 96480 - DNA, 120 bp, synthetic construct
  source 1..120: mol_type = other DNA
gataaaggagcaccatttaagaaaatttaaaatcaggtgcattctctttgaatattagagatttagaagtaataggccgggcatggtggctcacgcctgtaatcccagcactttgggagg

SEQ ID NO: 96481 - DNA, 120 bp, synthetic construct
  source 1..120: mol_type = other DNA
aaaggataaatattgtatgattccacttataggagggaactacagtagtcaaattcgtagagacagagaggagaatggtggttgccagggactgggaggagaaggaatggagacttatta

SEQ ID NO: 96482 - DNA, 120 bp, synthetic construct
  source 1..120: mol_type = other DNA
gacaagtacccaatgtcttctagtccattcccatcttgtagcttaaaatcatcctttacacggggtcggtaggtgtatttttggactttcttacacaggacagatcatagtcactgagaa

SEQ ID NO: 96483 - DNA, 120 bp, synthetic construct
  source 1..120: mol_type = other DNA
acaaaatgtctaaactcgtgccatggtggtaggaacctttatttatttatttattttttagatggagtttcactcttgttgcccaggctagagtgcaatggcgctgtctcggctcactgc

SEQ ID NO: 96484 - DNA, 120 bp, synthetic construct
  source 1..120: mol_type = other DNA
gcaattgttcccacattacaacaagaagttattgagaactgcccatcccaactacagataatgtggccataaagctatgacaggggaaccattattttagaaatacattcaaggatctgc

SEQ ID NO: 96485 - DNA, 120 bp, synthetic construct
  source 1..120: mol_type = other DNA
gcaattccttcaaaaaatactggtacatgctctgtacctgccaacttctaggatacagaaacacagtttaaatcagacaagtaaagaatacgtcctctgctgcttatgttgtagctgggg

SEQ ID NO: 96486 - DNA, 120 bp, synthetic construct
  source 1..120: mol_type = other DNA
gagagagagagaaacagatagttggatgattcattttttctagtcaaggctcaggggcctcaagcttccttgaactggtgatgcaatggcacacatggtgtcaataaatgaaaactaaaa

SEQ ID NO: 96487 - DNA, 120 bp, synthetic construct
  source 1..120: mol_type = other DNA
ttatattttcattcctttgttcccattagtccccagaatgcgcatctcccacctctacttctcaaagatcctaataatgtgttagcaaaatgagagcagctgtgcaggacctaatcggaa

SEQ ID NO: 96488 - DNA, 120 bp, synthetic construct
  source 1..120: mol_type = other DNA
taggtcaaaggagaaggtacgtgcctctagaagaaggctatttaagctaaaatttgacctataaggagggataagtttgatggaattggataggagaaagacttcagggcatggagacag

SEQ ID NO: 96489 - DNA, 120 bp, synthetic construct
  source 1..120: mol_type = other DNA
acgcaatctctctgcatttcagtctatcccactttcaaaatgtggagacaactactacctctcagggtgattttgaggagtaaatgagagcatatatgcaaggtaccttgaatcacctac

SEQ ID NO: 96490 - DNA, 120 bp, synthetic construct
  source 1..120: mol_type = other DNA
gaagcctgtgtggttcagaaggacttcctttaaattctatgaagacagggacagcagccagaacatatttgctaaataatttgattcccggagaagatgaacatcctccttctatctgag

SEQ ID NO: 96491 - DNA, 120 bp, synthetic construct
  source 1..120: mol_type = other DNA
cacataaaaagaactttcctggcttataagcaactcctaagtacttttcccttaattgactaaaggccctccagtgctgatcttcacagtactacaaagggactcacactctcctgagag

SEQ ID NO: 96492 - DNA, 120 bp, synthetic construct
  source 1..120: mol_type = other DNA
gtcagcatggcccagatctttacacgatatcctcctccgactcatcgtgagaaaacctgcaatgattacatgaagaggtagataatgtattaccctgatttggtaggtaaagtattatcc

SEQ ID NO: 96493 - DNA, 120 bp, synthetic construct; identical to SEQ ID NO: 9180
  source 1..120: mol_type = other DNA

SEQ ID NO: 96494 - DNA, 120 bp, synthetic construct; identical to SEQ ID NO: 9181
  source 1..120: mol_type = other DNA

SEQ ID NO: 96495 - DNA, 120 bp, synthetic construct
  source 1..120: mol_type = other DNA
gaaacccaacagcatatgagaagtttccagatgaagcttcttccttcagggtgcatggttagcatctcattctccctgtcagatgagtgacagttatttttagtgtaaacacgttttgca

SEQ ID NO: 96496 - DNA, 120 bp, synthetic construct; identical to SEQ ID NO: 12419
  source 1..120: mol_type = other DNA

SEQ ID NO: 96497 - DNA, 120 bp, synthetic construct
  source 1..120: mol_type = other DNA
ccattgaaatcgagacaatgtgtttctcctaatttattctgcgtatgtctctgtgtgtgtgtttgtatgtgacagagagagagagagagagagagagagagagagagagagagagagaga

SEQ ID NO: 96498 - DNA, 120 bp, synthetic construct; identical to SEQ ID NO: 19614
  source 1..120: mol_type = other DNA

SEQ ID NO: 96499 - DNA, 120 bp, synthetic construct; identical to SEQ ID NO: 19615
  source 1..120: mol_type = other DNA

SEQ ID NO: 96500 - DNA, 120 bp, synthetic construct
  source 1..120: mol_type = other DNA
ggaagttgcagtgagccgaagtcgcaccactgcactccagcctgggtgacagtgcgagactccgtctaaaaaaaaaaaaaaaaaaaaaaaaaaaagatgtaatgtagcttagaaaccatt

SEQ ID NO: 96501 - DNA, 120 bp, synthetic construct
  source 1..120: mol_type = other DNA
tatacttaataaacagcctagttaaatgaacatgcatttgaacattagactctagagagacaagattaattaacctttgacacaagaagctcacagtgcaacaggccactgtgataggac

SEQ ID NO: 96502 - DNA, 120 bp, synthetic construct
  source 1..120: mol_type = other DNA
ttttttttcccaaaatgttttcctctcttcccctaaccaaagcacattttccattgttgcttttttttttttttttttttttttttttttgagacagaatctcgctctgtccccaggctg

SEQ ID NO: 96503 - DNA, 120 bp, synthetic construct; identical to SEQ ID NO: 23402
  source 1..120: mol_type = other DNA

SEQ ID NO: 96504 - DNA, 120 bp, synthetic construct; identical to SEQ ID NO: 14175
  source 1..120: mol_type = other DNA

SEQ ID NO: 96505 - DNA, 120 bp, synthetic construct
  source 1..120: mol_type = other DNA
gggacggcagatagcaaggtactgatcaaaggccatcacagtcaaaagcaagcattctgatgtacccaaagagaagaagaaataaaactggagaaaacatccagcaaaggagatgttttt

SEQ ID NO: 96506 - DNA, 120 bp, synthetic construct
  source 1..120: mol_type = other DNA
aggctagaatattttattgtcctacaaaaatgttgataaattgcttataagggcttatgtattagtaatgaccatgtcaccaaaataataaacccaaatatgataagaatcacaatcaga

SEQ ID NO: 96507 - DNA, 120 bp, synthetic construct; identical to SEQ ID NO: 23403
  source 1..120: mol_type = other DNA

SEQ ID NO: 96508 - DNA, 120 bp, synthetic construct; identical to SEQ ID NO: 23404
  source 1..120: mol_type = other DNA

SEQ ID NO: 96509 - DNA, 120 bp, synthetic construct; identical to SEQ ID NO: 14177
  source 1..120: mol_type = other DNA

SEQ ID NO: 96510 - DNA, 120 bp, synthetic construct
  source 1..120: mol_type = other DNA
agataccatttgacccagccatcccattactgggtatatactcaaaggattataaatcatgttgctataaagacacatgcacatgtatgtttattgcagcactattcgcaataacaaaga

SEQ ID NO: 96511 - DNA, 120 bp, synthetic construct
  source 1..120: mol_type = other DNA
cctcttaaagagatatggttttggttttatggaagaatggtttctaagctacatttcatcttttttttttttttttttttttttttttttagacggagtctcgcactgtcacccaggctg

SEQ ID NO: 96512 - DNA, 120 bp, synthetic construct; identical to SEQ ID NO: 14174
  source 1..120: mol_type = other DNA

SEQ ID NO: 96513 - DNA, 120 bp, synthetic construct
  source 1..120: mol_type = other DNA
ttttttttttttttttttttttttttttttgagacagaatctcgctctgtccccaggctgaatgcagtgtcatgatctcagctcactgcaacctctgcctcccaggttcaaacaattctt

SEQ ID NO: 96514 - DNA, 120 bp, synthetic construct; identical to SEQ ID NO: 23402
  source 1..120: mol_type = other DNA

SEQ ID NO: 96515 - DNA, 120 bp, synthetic construct; identical to SEQ ID NO: 14175
  source 1..120: mol_type = other DNA

SEQ ID NO: 96516 - DNA, 120 bp, synthetic construct; identical to SEQ ID NO: 96505
  source 1..120: mol_type = other DNA

SEQ ID NO: 96517 - DNA, 120 bp, synthetic construct; identical to SEQ ID NO: 96506
  source 1..120: mol_type = other DNA

SEQ ID NO: 96518 - DNA, 120 bp, synthetic construct; identical to SEQ ID NO: 14176
  source 1..120: mol_type = other DNA

SEQ ID NO: 96519 - DNA, 120 bp, synthetic construct; identical to SEQ ID NO: 23404
  source 1..120: mol_type = other DNA

SEQ ID NO: 96520 - DNA, 120 bp, synthetic construct; identical to SEQ ID NO: 14177
  source 1..120: mol_type = other DNA

SEQ ID NO: 96521 - DNA, 120 bp, synthetic construct
  source 1..120: mol_type = other DNA
taaatcatgttgctataaagacacacgcacatgtatgtttattgcagcactattcgcaataacaaagacttggaaccaacccaaatgtccaacaatgatagactgaattaagaaaatgtg

SEQ ID NO: 96522 - DNA, 120 bp, synthetic construct; identical to SEQ ID NO: 96510
  source 1..120: mol_type = other DNA

SEQ ID NO: 96523 - DNA, 120 bp, synthetic construct
  source 1..120: mol_type = other DNA
aacaacaacaacaacaacaacaacaacatcaacaacaacaaaagacagagacagagagagagagaatggaggaacatgtcatacaatcaaatgaatcttcccaaacaagagctttacccg

SEQ ID NO: 96524 - DNA, 120 bp, synthetic construct
  source 1..120: mol_type = other DNA
taccttgatttacctcatttattcatcaaatccactgtctgacagaagtattatcattagttatattttatagtctaaacaaatctaggcagaaaggtcaaataatttgcataagctcac

SEQ ID NO: 96525 - DNA, 120 bp, synthetic construct
  source 1..120: mol_type = other DNA
ctgatcagcaaacggactcaaaaagaacaggtagtcaaggcaggcaatatttccaccacagtttcagaactccctactttgtattactaagttaatacatttgtgcagccactacctttg

SEQ ID NO: 96526 - DNA, 120 bp, synthetic construct
  source 1..120: mol_type = other DNA
atcagtcaaaatattcagaaatgcattgttctaaatacctaatatttttacctaaataagatatcaccaacaacatgataggtcaatttaccgagttttagataatagaatatctcccct

SEQ ID NO: 96527 - DNA, 120 bp, synthetic construct
  source 1..120: mol_type = other DNA
atacatgaccataagagggctatagcacagtgataccacagccaaatgagacccacaggtagagaaggccttatgtctcccagtgcttgaaggcatacccaacacagctttcaggacaag

SEQ ID NO: 96528 - DNA, 120 bp, synthetic construct
  source 1..120: mol_type = other DNA
agcttgcagtgagccgagattgcgccactgcagtccgcagtccgacctgggcgacagagcgagactccgtctcaaaaaaaaaaaaaaaaaaaaaaaaaaaaaaaaaaaaaaaaaaaaaaa

SEQ ID NO: 96529 - DNA, 120 bp, synthetic construct
  source 1..120: mol_type = other DNA
gatggcttcaccttttgagcactgctgagaatcatgacactcctgtgtcaatcccttttcattccataatttcttaatgttggtttattaatgattctggttggaagcctattaaagaga

SEQ ID NO: 96530 - DNA, 120 bp, synthetic construct; identical to SEQ ID NO: 516
  source 1..120: mol_type = other DNA

SEQ ID NO: 96531 - DNA, 120 bp, synthetic construct
  source 1..120: mol_type = other DNA
aacatcacagttagaaatgaaaaagaccatattaccactgaccccacagaaataaaaaataaccatcagaaactactacaaacacctctatgcacacaaacttgaaaacctgtaagagat

SEQ ID NO: 96532 - DNA, 120 bp, synthetic construct
  source 1..120: mol_type = other DNA
tgagccaccatgctcggcctacatttcatcttaaaataaaagtaaacgaattgggattaatttggaagcacactgactactataataccaagaagttcatacgaaggcagatagatagcc

SEQ ID NO: 96533 - DNA, 120 bp, synthetic construct; identical to SEQ ID NO: 32885
  source 1..120: mol_type = other DNA

SEQ ID NO: 96534 - DNA, 120 bp, synthetic construct; identical to SEQ ID NO: 32883
  source 1..120: mol_type = other DNA

SEQ ID NO: 96535 - DNA, 120 bp, synthetic construct; identical to SEQ ID NO: 32884
  source 1..120: mol_type = other DNA

SEQ ID NO: 96536 - DNA, 120 bp, synthetic construct; identical to SEQ ID NO: 9772
  source 1..120: mol_type = other DNA

SEQ ID NO: 96537 - DNA, 120 bp, synthetic construct
  source 1..120: mol_type = other DNA
gtcctttgcccactttttgatggggttgtttgtttttttcttataaatttgtttgagttcattgtagattctggatattagccctttgtcagatgagtaggttgcgaaaattttctccca

SEQ ID NO: 96538 - DNA, 120 bp, synthetic construct
  source 1..120: mol_type = other DNA
tacattgattttgtatcctgagactttgctgaagttgcttatcagcttaaggagattttgggctgagacaatggggttaatgcccacaagagaaagcaggaaagatccaaaattgacacc

SEQ ID NO: 96539 - DNA, 120 bp, synthetic construct
  source 1..120: mol_type = other DNA
actatgatcaagtgggcttcatccctgggatgcaaggctcgttcaatatacgcaaatcaataaatgtaatccagcatataaacagagccaaagacaaaaaccacatgattatctcaatag

SEQ ID NO: 96540 - DNA, 120 bp, synthetic construct
  source 1..120: mol_type = other DNA
tctggatagatacccagtagtggattgctggatcaaatggtagttctatttttagttctttaaggaaactccacactgttttccatggtggctgtactagcttacaatcccaccagcagt

SEQ ID NO: 96541 - DNA, 120 bp, synthetic construct; identical to SEQ ID NO: 17340
  source 1..120: mol_type = other DNA

SEQ ID NO: 96542 - DNA, 120 bp, synthetic construct; identical to SEQ ID NO: 17341
  source 1..120: mol_type = other DNA

SEQ ID NO: 96543 - DNA, 120 bp, synthetic construct; identical to SEQ ID NO: 17342
  source 1..120: mol_type = other DNA

SEQ ID NO: 96544 - DNA, 120 bp, synthetic construct; identical to SEQ ID NO: 17343
  source 1..120: mol_type = other DNA

SEQ ID NO: 96545 - DNA, 120 bp, synthetic construct; identical to SEQ ID NO: 17344
  source 1..120: mol_type = other DNA

SEQ ID NO: 96546 - DNA, 120 bp, synthetic construct; identical to SEQ ID NO: 17345
  source 1..120: mol_type = other DNA

SEQ ID NO: 96547 - DNA, 120 bp, synthetic construct; identical to SEQ ID NO: 17346
  source 1..120: mol_type = other DNA

SEQ ID NO: 96548 - DNA, 120 bp, synthetic construct
  source 1..120: mol_type = other DNA
ttttaaaaatattttgtcgaattctttttgtatacatttatttatttagagattgggtctcactctgttgcccagcctggagtacagcagtgtcatcacagctcactgtagccttgaact

SEQ ID NO: 96549 - DNA, 120 bp, synthetic construct; identical to SEQ ID NO: 17347
  source 1..120: mol_type = other DNA

SEQ ID NO: 96550 - DNA, 120 bp, synthetic construct; identical to SEQ ID NO: 17348
  source 1..120: mol_type = other DNA

SEQ ID NO: 96551 - DNA, 120 bp, synthetic construct
  source 1..120: mol_type = other DNA
tactcaccatcgtcagttatctcatctagatcttctggataactcgttgcagcttctacatcatcactttctgcttcaccttgcacttttatgttatggagagggctgctttcctttaac

SEQ ID NO: 96552 - DNA, 120 bp, synthetic construct; identical to SEQ ID NO: 15922
  source 1..120: mol_type = other DNA

SEQ ID NO: 96553 - DNA, 120 bp, synthetic construct; identical to SEQ ID NO: 15923
  source 1..120: mol_type = other DNA

SEQ ID NO: 96554 - DNA, 120 bp, synthetic construct; identical to SEQ ID NO: 32981
  source 1..120: mol_type = other DNA

SEQ ID NO: 96555 - DNA, 120 bp, synthetic construct
  source 1..120: mol_type = other DNA
tgctattgtgaatagtgccgcaataaacatatgtgtgcatgtgtctttatagcagcatgatttatagtcctttgggtatatacccagtaatgggatggctgggtcaaatggtatttctag

SEQ ID NO: 96556 - DNA, 120 bp, synthetic construct
  source 1..120: mol_type = other DNA
aattacccagtctgtgatattctgttatagcaacacaaaatggacttagacggtatgctaatgagatgactgctggcagggagctctgaaataactttaggataggggctggttactaca

SEQ ID NO: 96557 - DNA, 120 bp, synthetic construct
  source 1..120: mol_type = other DNA
tggaggagattggtataacttagtataatagttacagacatagtctctggcctttggaacacctaaagaaaagtcctcctgtgccacctactagctgtctgaggtgtacttaacatctct

SEQ ID NO: 96558 - DNA, 120 bp, synthetic construct
  source 1..120: mol_type = other DNA
gcacatgtgtgtttacatacatctgtatttaatttcgtgatctggaatgatgtacattaagtagtcaacagaagttgctttaggcagaggaatgaactaggagaaataaacccttctatg

SEQ ID NO: 96559 - DNA, 120 bp, synthetic construct
  source 1..120: mol_type = other DNA
tgttaccttaactaagacaaattccttaaaagatgtggggtcttcttcccttgcacaattgtctctggacttaactgccagtgtgggattgcatttcccagccctcttatatttaggtgg

SEQ ID NO: 96560 - DNA, 120 bp, synthetic construct
  source 1..120: mol_type = other DNA
agccattattcacagaactttcagctgactacttgctcccaaaaggcagtttcctgatttctgcatactggcgtatcatgcaaacatctgtaagcatatccatttctactaagatcggac

SEQ ID NO: 96561 - DNA, 120 bp, synthetic construct
  source 1..120: mol_type = other DNA
taacttttcagggtcctttcttcccagttctgctgcaacacaagtaacccagattacatcagggagaggctgagctacagaggttcctgccaggagcttattcattgtcacactggttct

SEQ ID NO: 96562 - DNA, 120 bp, synthetic construct
  source 1..120: mol_type = other DNA
tcaggttctcaggcagagtaaacactgaaagaaacaaaaaaagtagcaattaaagagccatgggcttagtggtcagatgcacatttattagttatatgaccttgagcacatatcttagcc

SEQ ID NO: 96563 - DNA, 120 bp, synthetic construct
  source 1..120: mol_type = other DNA
cctcagcctcccaaagtgctgagaatacagacatgagccactgcacctggcctcaaatattcttattactcgggagtaaagcatctaatactttatttgacctgaggatttaaaaatagc

SEQ ID NO: 96564 - DNA, 120 bp, synthetic construct; identical to SEQ ID NO: 1688
  source 1..120: mol_type = other DNA

SEQ ID NO: 96565 - DNA, 120 bp, synthetic construct; identical to SEQ ID NO: 1689
  source 1..120: mol_type = other DNA

SEQ ID NO: 96566 - DNA, 120 bp, synthetic construct; identical to SEQ ID NO: 1690
  source 1..120: mol_type = other DNA

SEQ ID NO: 96567 - DNA, 120 bp, synthetic construct
  source 1..120: mol_type = other DNA
ttgggcccaggagaaatcccagtaggaggaactctgtgaccattgtctgattttcccccatttccctgtgaaaaagaaaaagatcacttaggaccagattgtcaaaaaacacctagacat

SEQ ID NO: 96568 - DNA, 120 bp, synthetic construct
  source 1..120: mol_type = other DNA
aaaggaatgctttgcagagtctcttggttcattcagtctcagatataaagagagtagtgaacttaggtggtatttggtaccaagattccaggagatgactgaggagggagagtcaaatgt

SEQ ID NO: 96569 - DNA, 120 bp, synthetic construct
  source 1..120: mol_type = other DNA
aacaggataagaagccttccataaataatctctgactctcctggcctcatcatggcacattctagatggggaagaaacccacattcacttaacatatcctacgttaggattggttagact

SEQ ID NO: 96570 - DNA, 120 bp, synthetic construct
  source 1..120: mol_type = other DNA
gtcctgccacttgaatgtatcccttcccagtgttagttgcaatgcagtatgcagcatctgccgtgaaactaaacaaccgtttaaaaactgttcggcagcaatggaattacaaattgtata

SEQ ID NO: 96571 - DNA, 120 bp, synthetic construct
  source 1..120: mol_type = other DNA
caaagggaaggacaagcactggttcatctctttacacctatacattcctagcacagagtgagtactcacaaaaaacatacggaatacatagaggacactttatctgttgaccccatttcc

SEQ ID NO: 96572 - DNA, 120 bp, synthetic construct
  source 1..120: mol_type = other DNA
taatatctactgcataagaatatgccaaaaggatgaattggacaaaccaaatgcacaagatatccaaacttaaaagaataggccaggcacggtggctcgcgcctgtgttcccagcacttt

SEQ ID NO: 96573 - DNA, 120 bp, synthetic construct
  source 1..120: mol_type = other DNA
tattagtttcttcacatttcatattaatttggattttcacttttgtcaaaggagtataaaataaattccatacagagaaaatgaaatggacttctgaggctaactgaatctctctgacct

SEQ ID NO: 96574 - DNA, 120 bp, synthetic construct; identical to SEQ ID NO: 1691
  source 1..120: mol_type = other DNA

SEQ ID NO: 96575 - DNA, 120 bp, synthetic construct
  source 1..120: mol_type = other DNA
cttccccacagtcttaatagatttcggggaaatttggtcatgtctcttcaaaaactaaattgttagttttgttttgatttttcagagacagggtttcactctgttgcccaggctggagta

SEQ ID NO: 96576 - DNA, 120 bp, synthetic construct
  source 1..120: mol_type = other DNA
ttgcattatttgaaaattttacagtaaaccaatgttcattccttgttcagaggaggttttcctgaccagcagacatcacgccatcaattggtgattcagggacccagggtccttacacct

SEQ ID NO: 96577 - DNA, 120 bp, synthetic construct; identical to SEQ ID NO: 30161
  source 1..120: mol_type = other DNA

SEQ ID NO: 96578 - DNA, 120 bp, synthetic construct
  source 1..120: mol_type = other DNA
gactttgtctgggtccctcagaaggtaatcagggcagtagcagtttcagaatgtttgtactgaaatgggggctaggggatttgtcttgaagctctatttggattgtatttcagataaaat

SEQ ID NO: 96579 - DNA, 120 bp, synthetic construct
  source 1..120: mol_type = other DNA
gtgcataccttttgatgcagcaatttcaattctaagaacatatcctacagaaatattcccatatgcataaatatatacatgtacatatattttaagcagaagcaatacttgtaaattgat

SEQ ID NO: 96580 - DNA, 120 bp, synthetic construct
  source 1..120: mol_type = other DNA
cctgtaattccagctactcaggagcctgaggcaggagaagcccttgaatcgggaggtggatgttgcagtgagctgagattgtgccattgcactccagcctgggcgacaagagcaaaactc

SEQ ID NO: 96581 - DNA, 120 bp, synthetic construct
  source 1..120: mol_type = other DNA
aggatcaagcgattcttgtgccccagcctcccaagtagctggaattacaggcgcatgccaccatgcctggctggtttttgtatttttagtagagaaaaggttcatcatattcgccaggct

SEQ ID NO: 96582 - DNA, 120 bp, synthetic construct
  source 1..120: mol_type = other DNA
tactattaaaaatgctgggaatacttatttatgttttatcgtaggagtccatggcgattgccttctcacagaagtgtgccaaatgactgaaactgtgattccagaaggccaggatggtac

SEQ ID NO: 96583 - DNA, 120 bp, synthetic construct; identical to SEQ ID NO: 1683
  source 1..120: mol_type = other DNA

SEQ ID NO: 96584 - DNA, 120 bp, synthetic construct; identical to SEQ ID NO: 96570
  source 1..120: mol_type = other DNA

SEQ ID NO: 96585 - DNA, 120 bp, synthetic construct
  source 1..120: mol_type = other DNA
agagatgtctttgttctggatcttaccacccagaaccaagtatagttctaaacttactctctaatctcattgagaacagcctctactcccaccctgtctgtgttctgtgttcctctgaat

SEQ ID NO: 96586 - DNA, 120 bp, synthetic construct
  source 1..120: mol_type = other DNA
cagacactccacctgtgacttagtcaggtatgctcagtagtagaggaatagcagttattaccagataaagtcatatctataaaaagtttttaaaaatacagccacaggcagagactccag

SEQ ID NO: 96587 - DNA, 120 bp, synthetic construct
  source 1..120: mol_type = other DNA
tgcagactctccaggtcatgatgacggagtatcggagagggtggcagatggccacgtaacgatcgtaggacatcagcaccagcaggagacattcgctgtgtccaaaactcaaacagagaa

SEQ ID NO: 96588 - DNA, 120 bp, synthetic construct
  source 1..120: mol_type = other DNA
cgcccagaaaaatctaatttctacaaattgtgtgagttgttattcaaaaccagtttttggtaaatcagtaactgtgcatcaatcagtagattaactgccaaatcaccaattatcggttcc

SEQ ID NO: 96589 - DNA, 120 bp, synthetic construct
  source 1..120: mol_type = other DNA
agtactggggcctatcacagggtaaagggtgggaggaggaagaggatcacaaaaaataactaatgggtactaggcttaatatctgggtgatgagataatttgtacaaaaaaccctcaaga

SEQ ID NO: 96590 - DNA, 120 bp, synthetic construct; identical to SEQ ID NO: 1684
  source 1..120: mol_type = other DNA

SEQ ID NO: 96591 - DNA, 120 bp, synthetic construct
  source 1..120: mol_type = other DNA
ttgcttgagcccagcagtttgaggttgtggtgagctatgatagaaccattgcacttcagcctgggcaatagagtgagaccctgtctcaacaaaaagaaaaggaaaaaaagaatatttgtt

SEQ ID NO: 96592 - DNA, 120 bp, synthetic construct; identical to SEQ ID NO: 1685
  source 1..120: mol_type = other DNA

SEQ ID NO: 96593 - DNA, 120 bp, synthetic construct
  source 1..120: mol_type = other DNA
gatcactcagctgtcaaccaggctgagcacatcagagaataacacctccttttctgaggattctgatacattttcaatcagaaacagaagcaaagattctgcagctcccacagaaactcc

SEQ ID NO: 96594 - DNA, 120 bp, synthetic construct
  source 1..120: mol_type = other DNA
tatctgttgcacttcaccggggtgtggaaagaaaaataaagaaaagattctaatgtttatggatggcctactaggcactagacttttcatatgatcaggagcatttttgtgtgtccccaa

SEQ ID NO: 96595 - DNA, 120 bp, synthetic construct
  source 1..120: mol_type = other DNA
tgtcatgccatcctgaagatatatttacctatgtcttggctgtttctccgaacattattagctgctcttttataaaacatctcttaggataatttactctgtaaggtggctaaacccacc

SEQ ID NO: 96596 - DNA, 120 bp, synthetic construct
  source 1..120: mol_type = other DNA
aatttcgtgatctggaatgatgtacattaagtagtcaacagaagttgctttaggcagaggaatgaactaggagaaataaacccttctatgtttttcaataatattacaggaaacacgtat

SEQ ID NO: 96597 - DNA, 120 bp, synthetic construct
  source 1..120: mol_type = other DNA
cctttggaacacctaaagaaaagtcctcctgtgccacctactagctgtctgaggtgtacttaacatctctgtgccttgatttttttcatgtataaattgtatataatagtaatacttccc

SEQ ID NO: 96598 - DNA, 120 bp, synthetic construct; identical to SEQ ID NO: 96556
  source 1..120: mol_type = other DNA

SEQ ID NO: 96599 - DNA, 120 bp, synthetic construct
  source 1..120: mol_type = other DNA
tccttctaagagttgctttagctgcatcctatatgttttgttatgttttaagtcatctgaatatattttctaacttcatttccaatttcttttttgacccaccggtgcttcacagtgtgg

SEQ ID NO: 96600 - DNA, 120 bp, synthetic construct
  source 1..120: mol_type = other DNA
ccaagattatttaacctcctgacattaagccaggaagaaattgaaatcctgaacagaccaataatgggttctgaaattaagtcagtgattaaaaaaaacctaccaaccaaaacaagccct

SEQ ID NO: 96601 - DNA, 120 bp, synthetic construct
  source 1..120: mol_type = other DNA
cctgactctggcaactgcccttcaactccctatttatcttactcaatttccatttattttacacataaatgagctcatgctgcatttttctttctgtgcctgacttgtttcacttggcat

SEQ ID NO: 96602 - DNA, 120 bp, synthetic construct
  source 1..120: mol_type = other DNA
ccctctctttacacagtatctactagtttcctagcataaggaagaacagaaaatatttcagaagatatgtctattctcctttccttcatcattcaattgtagccaatatgtttacactag

SEQ ID NO: 96603 - DNA, 120 bp, synthetic construct
  source 1..120: mol_type = other DNA
agactatctaaaagtttgtatcagcaactaggactcccttatgtatgtttgaacagttttgttctgtttgcttttgtgagaaatgagatgaattgatgtgcaaagtgttattagttaggg

SEQ ID NO: 96604 - DNA, 120 bp, synthetic construct
  source 1..120: mol_type = other DNA
aaagggtgcactttccaacacattttttcatgcattaccctaacaccaatgtcagacaaggacggtataagaaaattacaggccaatttattttatgatcatggatgtaaagattctcaa

SEQ ID NO: 96605 - DNA, 120 bp, synthetic construct
  source 1..120: mol_type = other DNA
gaggaagagcaacttggatgaatatatggatgtaaacttgctgatcaactacagccaaaaattacattgtaattgtaacgtgtccctaaacttgacccattaccaatcctgataagtctg

SEQ ID NO: 96606 - DNA, 120 bp, synthetic construct
  source 1..120: mol_type = other DNA
caaggatatagcagctcttgaataatgggaaagataaatgaagtgtttggcaagtagaaagataatcatgaagttcagtcattaaagtctcgccctgaacaaatgccatggacttgacat

SEQ ID NO: 96607 - DNA, 120 bp, synthetic construct
  source 1..120: mol_type = other DNA
attctgagtccttagcactctgtttgacccagcctctccttccaggaaatgactaaatatactcattcagagcatatttatttttgagcatctactttggggctaccactgtgttaggct

SEQ ID NO: 96608 - DNA, 120 bp, synthetic construct
  source 1..120: mol_type = other DNA
acatattttggggtatttgtgggtttttcacctaaaatgtaatcttacacaggctgtagattatatctctgtttccaggaagccccgtgtgttgctttgtgtgtgcatcagtctctcgag

SEQ ID NO: 96609 - DNA, 120 bp, synthetic construct
  source 1..120: mol_type = other DNA
agcatgaacttaactttgatgtatccaggttgaggaaaatgttaaagggagtttgaggaaagagaaatgggagttagtgggggctcaggagggtcagggatgtgagaaattacaaatcgt

SEQ ID NO: 96610 - DNA, 120 bp, synthetic construct
  source 1..120: mol_type = other DNA
gttaaggctgaattgagaaggctcagaagaccctggctagagtttcgtcaagtttaaaatgatcgtcaactctgtatacatcaaaattgagttcagtgcgtgctggactgttttctctgt

SEQ ID NO: 96611 - DNA, 120 bp, synthetic construct
  source 1..120: mol_type = other DNA
gtgtgatgtcccccttcctgtgtccaggtgttcttattgttcaattcccacctataagtgagaacatgcgatgtttggttttttgttttgcaatagtttgctgagaatgatggtttccag

SEQ ID NO: 96612 - DNA, 120 bp, synthetic construct
  source 1..120: mol_type = other DNA
ttctctgatggccggtgatgatgagcatttttcatgtgttttttggctgcataaatatcttcttttgagaagtgtctgttcatatccttcacccactttttgatggggttgtttttttct

SEQ ID NO: 96613 - DNA, 120 bp, synthetic construct
  source 1..120: mol_type = other DNA
tgtgaatgggagttcactcatgatttggctctctgtctattgttggtgtataagaatgcttatgatttttgtacactgattttgtatcctgagattttgctgaagttgcttatcagctta

SEQ ID NO: 96614 - DNA, 120 bp, synthetic construct
  source 1..120: mol_type = other DNA
tagcggtctattttgttgatcctttcaaaaaaccagctcctggattcattaattttttgatgggttttttgtgtgtctatttccttcagttctgctctgattttagttatttcttgcctt

SEQ ID NO: 96615 - DNA, 120 bp, synthetic construct
  source 1..120: mol_type = other DNA
tggccttctttgtctcttttgatctttgttggtttaaagtctgttttatcagactaggattgcaacccctgcctttttttgttttccatttgcttggtatattttcctccatccttttat

SEQ ID NO: 96616 - DNA, 120 bp, synthetic construct
  source 1..120: mol_type = other DNA
cacttcatttgattcatttcatcttccatcactgatagcctttctccagttgattgcattgcctcctgaggcttctgcattcttcatgtagttctcaagccttggttttcagctccatca

SEQ ID NO: 96617 - DNA, 120 bp, synthetic construct
  source 1..120: mol_type = other DNA
tcagatggttgtagatgtgcggtgttatttccgaggcctctgttctgttccattggtctatatatctgttttggtaccactaccatgctgttttggttactgtagccttgtagtatagtt

SEQ ID NO: 96618 - DNA, 120 bp, synthetic construct; identical to SEQ ID NO: 9777
  source 1..120: mol_type = other DNA

SEQ ID NO: 96619 - DNA, 120 bp, synthetic construct
  source 1..120: mol_type = other DNA
ctataaatcatgctgctataaagacacatgcacacctatgtttattgcggcactattcacaatagcaaagacttggaaccaacccaaatgtccaacgatgatagactggattaagaaaat

SEQ ID NO: 96620 - DNA, 120 bp, synthetic construct
  source 1..120: mol_type = other DNA
tggtaaacataggtaagtgtttccttgaattctgtgagcctttatagtaaactaactgaacccaaggaagggccgtgggatccccaatttacaatcacttggtcaaaagtacaggacaac

SEQ ID NO: 96621 - DNA, 120 bp, synthetic construct
  source 1..120: mol_type = other DNA
atgggactgagccctcaccctgtgggatctgacactatctccagatagatagtggcagatggtcatgggagtttagcttgggctagagcatttgactgtagatagtggcagatggtcacg

SEQ ID NO: 96622 - DNA, 120 bp, synthetic construct; identical to SEQ ID NO: 9785
  source 1..120: mol_type = other DNA

SEQ ID NO: 96623 - DNA, 120 bp, synthetic construct; identical to SEQ ID NO: 9786
  source 1..120: mol_type = other DNA

SEQ ID NO: 96624 - DNA, 120 bp, synthetic construct; identical to SEQ ID NO: 9780
  source 1..120: mol_type = other DNA

SEQ ID NO: 96625 - DNA, 120 bp, synthetic construct; identical to SEQ ID NO: 9781
  source 1..120: mol_type = other DNA

SEQ ID NO: 96626 - DNA, 120 bp, synthetic construct
  source 1..120: mol_type = other DNA
ttccaagtctttgctattgtgaatagtgccgcaataaacatatgtgtgcatgtttctttatagcaccatgatttatagacctttgggtatatacccagtaatgggatggctgggtcaaat

SEQ ID NO: 96627 - DNA, 120 bp, synthetic construct
  source 1..120: mol_type = other DNA
gagggctctgttctgttccattgatctatatctctgttttggtaccagtaccttgctgttttggttactgtagccttgtagtatagtttgaagtcaggtagcgtgatgcctccagctttg

SEQ ID NO: 96628 - DNA, 120 bp, synthetic construct
  source 1..120: mol_type = other DNA
catcaatacctaatttattgagagtttttagcgtgaagcgttgttgaaatttgtcaaaggccttttctgcatctattgacataatcatgtggtttttgtctttggctctgtttatatgct

SEQ ID NO: 96629 - DNA, 120 bp, synthetic construct
  source 1..120: mol_type = other DNA
ttgtcaccaccaggcctgccctaaaagagctcctgaaggaagcactaaacatggaaaggaacaacgggtaccagccaccacaaaatcatgccaaattgtaaagaccatcaaggctaggag

SEQ ID NO: 96630 - DNA, 120 bp, synthetic construct
  source 1..120: mol_type = other DNA
cctaagtgacaaatgccacttttgtgaaaatagaagataggagaaagtagaaggaaaatctcttgggacccaaactcactaagccaaagggaaaagtcaagcttgggaactctgtcatgc

SEQ ID NO: 96631 - DNA, 120 bp, synthetic construct; identical to SEQ ID NO: 9789
  source 1..120: mol_type = other DNA

SEQ ID NO: 96632 - DNA, 120 bp, synthetic construct; identical to SEQ ID NO: 9790
  source 1..120: mol_type = other DNA

SEQ ID NO: 96633 - DNA, 120 bp, synthetic construct; identical to SEQ ID NO: 9791
  source 1..120: mol_type = other DNA

SEQ ID NO: 96634 - DNA, 120 bp, synthetic construct; identical to SEQ ID NO: 9792
  source 1..120: mol_type = other DNA

SEQ ID NO: 96635 - DNA, 120 bp, synthetic construct; identical to SEQ ID NO: 9793
  source 1..120: mol_type = other DNA

SEQ ID NO: 96636 - DNA, 120 bp, synthetic construct; identical to SEQ ID NO: 9794
  source 1..120: mol_type = other DNA

SEQ ID NO: 96637 - DNA, 120 bp, synthetic construct; identical to SEQ ID NO: 9795
  source 1..120: mol_type = other DNA

SEQ ID NO: 96638 - DNA, 120 bp, synthetic construct; identical to SEQ ID NO: 9796
  source 1..120: mol_type = other DNA

SEQ ID NO: 96639 - DNA, 120 bp, synthetic construct; identical to SEQ ID NO: 9797
  source 1..120: mol_type = other DNA

SEQ ID NO: 96640 - DNA, 120 bp, synthetic construct; identical to SEQ ID NO: 9798
  source 1..120: mol_type = other DNA

SEQ ID NO: 96641 - DNA, 120 bp, synthetic construct; identical to SEQ ID NO: 9799
  source 1..120: mol_type = other DNA

SEQ ID NO: 96642 - DNA, 120 bp, synthetic construct; identical to SEQ ID NO: 9800
  source 1..120: mol_type = other DNA

SEQ ID NO: 96643 - DNA, 120 bp, synthetic construct; identical to SEQ ID NO: 9801
  source 1..120: mol_type = other DNA

SEQ ID NO: 96644 - DNA, 120 bp, synthetic construct; identical to SEQ ID NO: 9802
  source 1..120: mol_type = other DNA

SEQ ID NO: 96645 - DNA, 120 bp, synthetic construct; identical to SEQ ID NO: 9803
  source 1..120: mol_type = other DNA

SEQ ID NO: 96646 - DNA, 120 bp, synthetic construct; identical to SEQ ID NO: 9804
  source 1..120: mol_type = other DNA

SEQ ID NO: 96647 - DNA, 120 bp, synthetic construct
  source 1..120: mol_type = other DNA
ccaacaggtgaatgaaaagatgttcaacatcactaatcatcagggccacacaaatcaaaaccacaatgagatatcagctcacacctgctaggatggctattaccaggcaatacatagcaa

SEQ ID NO: 96648 - DNA, 120 bp, synthetic construct; identical to SEQ ID NO: 9805
  source 1..120: mol_type = other DNA

SEQ ID NO: 96649 - DNA, 120 bp, synthetic construct; identical to SEQ ID NO: 9806
  source 1..120: mol_type = other DNA

SEQ ID NO: 96650 - DNA, 120 bp, synthetic construct
  source 1..120: mol_type = other DNA
ttcttgtgctgagaagatttgtagtcaaatttggaacactctagtactgtaatggaggtgtgtaaatctcgttaactttagtgtaaagcttgtaaaatattctgaatacaattatggaag

SEQ ID NO: 96651 - DNA, 120 bp, synthetic construct; identical to SEQ ID NO: 9778
  source 1..120: mol_type = other DNA

SEQ ID NO: 96652 - DNA, 120 bp, synthetic construct; identical to SEQ ID NO: 9779
  source 1..120: mol_type = other DNA

SEQ ID NO: 96653 - DNA, 120 bp, synthetic construct; identical to SEQ ID NO: 96650
  source 1..120: mol_type = other DNA

SEQ ID NO: 96654 - DNA, 120 bp, synthetic construct
  source 1..120: mol_type = other DNA
gcacagaccacagactgtttctgtaattgtgttcttttttccaagcatgtcctttaccttggtgaaataaactttcaatctgattgagacctgtctcacatacttttggtttatacatcc

SEQ ID NO: 96655 - DNA, 120 bp, synthetic construct; identical to SEQ ID NO: 9805
  source 1..120: mol_type = other DNA

SEQ ID NO: 96656 - DNA, 120 bp, synthetic construct; identical to SEQ ID NO: 96647
  source 1..120: mol_type = other DNA

SEQ ID NO: 96657 - DNA, 120 bp, synthetic construct
  source 1..120: mol_type = other DNA
cgcattttctccaaaggctgaagtgaactttgtagtgtaaacaccagtagttttagcattggccattggaaccacctaaaccaaaaatgaatccatttcaaaattcaaagaataggttca

SEQ ID NO: 96658 - DNA, 120 bp, synthetic construct
  source 1..120: mol_type = other DNA
cagctcctggtgtcagcctgctgggttttgggaatggttgatggtttgttgctcacccccattaccatgagcttccccttttgccagtctaggaaaatcctgagttttttctgtgagact

SEQ ID NO: 96659 - DNA, 120 bp, synthetic construct
  source 1..120: mol_type = other DNA
gaggaaagtggacttaaatggagatatataatggtagaagaaatttaaggagatttccagttttcagattatttcatggtattagttatgatatttgtaccattaacaatattaatatta

SEQ ID NO: 96660 - DNA, 120 bp, synthetic construct; identical to SEQ ID NO: 9782
  source 1..120: mol_type = other DNA

SEQ ID NO: 96661 - DNA, 120 bp, synthetic construct; identical to SEQ ID NO: 9783
  source 1..120: mol_type = other DNA

SEQ ID NO: 96662 - DNA, 120 bp, synthetic construct; identical to SEQ ID NO: 9784
  source 1..120: mol_type = other DNA

SEQ ID NO: 96663 - DNA, 120 bp, synthetic construct; identical to SEQ ID NO: 9775
  source 1..120: mol_type = other DNA

SEQ ID NO: 96664 - DNA, 120 bp, synthetic construct; identical to SEQ ID NO: 9776
  source 1..120: mol_type = other DNA

SEQ ID NO: 96665 - DNA, 120 bp, synthetic construct; identical to SEQ ID NO: 17349
  source 1..120: mol_type = other DNA

SEQ ID NO: 96666 - DNA, 120 bp, synthetic construct; identical to SEQ ID NO: 17350
  source 1..120: mol_type = other DNA

SEQ ID NO: 96667 - DNA, 120 bp, synthetic construct; identical to SEQ ID NO: 17351
  source 1..120: mol_type = other DNA

SEQ ID NO: 96668 - DNA, 120 bp, synthetic construct; identical to SEQ ID NO: 17352
  source 1..120: mol_type = other DNA

SEQ ID NO: 96669 - DNA, 120 bp, synthetic construct
  source 1..120: mol_type = other DNA
caccaccccacaacagtccccagtatgtgatgttccccttccgggtccatgtgttctcactgttgaactcccacttatgagtgagaacatgaggtgttcggttttctgttcatgtgttag

SEQ ID NO: 96670 - DNA, 120 bp, synthetic construct
  source 1..120: mol_type = other DNA
tgaagtccttgcccatgcctatgtcctgaatggtattgcataggttttcttctagggtttttatggttttaggtctaacatgtaagtctttaagccatcttaaattaatttttgtataag

SEQ ID NO: 96671 - DNA, 120 bp, synthetic construct
  source 1..120: mol_type = other DNA
atatgctttatttctttctcctgcctgattgccctggccagaacttccaacactatgttgaataggagtggtgagagagggcatccctgtcttgtgccagttttcaaagggaatgcttcc

SEQ ID NO: 96672 - DNA, 120 bp, synthetic construct
  source 1..120: mol_type = other DNA
ccagtaatgggattgctgggtcaaatgtaaaaccccaaactataaaaaccatagaagaaaatctaggcaataccattcagaacataggcatcggcaaagattgttgcgggaagtcaggga

SEQ ID NO: 96673 - DNA, 120 bp, synthetic construct
  source 1..120: mol_type = other DNA
gtgttttttggctgcataaatgtcttcttttgagaagtgtctgttcatgtccttcgcccactttttgatggggttgtttgtttttttcttgtaaattagtttgagttcattgtagattct

SEQ ID NO: 96674 - DNA, 120 bp, synthetic construct
  source 1..120: mol_type = other DNA
tgtttgtctgttgttggtgtataagaatgcttgtgatttttgtacattgattttgtatcctgagactttgctgaagttgcttatcagcttaaggagattttgggctgacacaatggggtt

SEQ ID NO: 96675 - DNA, 120 bp, synthetic construct
  source 1..120: mol_type = other DNA
ttagggaggattccctctttttctgttgattggaatagtttcagaaggaatggtacctgttcctccttgtacctctggtagaatttggctgtgaatccatctggtcctggactctttttg

SEQ ID NO: 96676 - DNA, 120 bp, synthetic construct
  source 1..120: mol_type = other DNA
ggagagctttacttccaagtatgtggtcaattttggaataggtgtggtgtggtgctgaaaaaaatgtatattctgttgatttggggtggagagttctgtagatgtctattaggttggctt

SEQ ID NO: 96677 - DNA, 120 bp, synthetic construct
  source 1..120: mol_type = other DNA
aacccgacctttctctctggctgcccttaacattttttccttcattgttcaacttcggtgaatctgacaattatgtgtcttggagttgctcttctcaaggagtaactttgtggcgttctc

SEQ ID NO: 96678 - DNA, 120 bp, synthetic construct
  source 1..120: mol_type = other DNA
tcagatctccagctgtgtgctgggagaaccacagctctcttcaaagctgtcagacagggacatttaagtctgcagaggttactgctgactttttgtctgtgccctgcccccagaggtgga

SEQ ID NO: 96679 - DNA, 120 bp, synthetic construct
  source 1..120: mol_type = other DNA
caaaataaaaggatggaggaagatgtaccaagcaaatggaaaacaaaaaaaggcaggggttgcaatcctagtctctgataaaacagactttaaaccaacaaagatcaaaagagacaaaga

SEQ ID NO: 96680 - DNA, 120 bp, synthetic construct
  source 1..120: mol_type = other DNA
tagcctgctagcaagactaataaagaaaaaaagagataagaatcaaatagatgcaataaaaaatgataaaggggatatcaccaccaatcccacagaaatacaaactaccatcagagaata

SEQ ID NO: 96681 - DNA, 120 bp, synthetic construct
  source 1..120: mol_type = other DNA
tggccagggcaattaggcaggagaaggaaataaagggtattcaattaggaaaagaggaagtcaaattgtccctgtttgcagacaacatcattgtatatctagaaaaccccattgtgtcag

SEQ ID NO: 96682 - DNA, 120 bp, synthetic construct
  source 1..120: mol_type = other DNA
atcttgctacttgttcttggtctgttcagtttctatttcttcctggtttaatctaagagggttgtatatttccagaatgtctccatctcctccaggttttctagtttgtgtgcataaagg

SEQ ID NO: 96683 - DNA, 120 bp, synthetic construct
  source 1..120: mol_type = other DNA
tttctacacagacacggcaaccatccgatttctcaatcttttccccacctttcccccctttctattccacaaaaccaccattgtcatcatggcccgttctcaatgagctgttgggtacac

SEQ ID NO: 96684 - DNA, 120 bp, synthetic construct
  source 1..120: mol_type = other DNA
ggatcactcgcggttaggagctggagaccagcccggccatcacagcgaaaccccgtctccaccaaaaaaatacgaaaaccagtcaggcgtggcggcgcgcgcctgcaatcgcaggcactc

SEQ ID NO: 96685 - DNA, 120 bp, synthetic construct; identical to SEQ ID NO: 17353
  source 1..120: mol_type = other DNA

SEQ ID NO: 96686 - DNA, 120 bp, synthetic construct; identical to SEQ ID NO: 17354
  source 1..120: mol_type = other DNA

SEQ ID NO: 96687 - DNA, 120 bp, synthetic construct
  source 1..120: mol_type = other DNA
gtgagaacatgcggtgtttggttttttgttcttgtgatagttagctgagaatgatgatttccagcttcatccatgtccctaaaaggacatgactaaattgaatcaatgttgagctctagt

SEQ ID NO: 96688 - DNA, 120 bp, synthetic construct; identical to SEQ ID NO: 11917
  source 1..120: mol_type = other DNA

SEQ ID NO: 96689 - DNA, 120 bp, synthetic construct; identical to SEQ ID NO: 14221
  source 1..120: mol_type = other DNA

SEQ ID NO: 96690 - DNA, 120 bp, synthetic construct
  source 1..120: mol_type = other DNA
tcagatagttgtagatgtgtggtgttatttctgaggcctctgttctgttccattggtctacatatctgttttggtaccagtaccatgctgttttggttactgaagacttgtagtatagtt

SEQ ID NO: 96691 - DNA, 120 bp, synthetic construct
  source 1..120: mol_type = other DNA
ggcattttggttggttccaagtctttgctattgtgaacagtgccacaataaacatatgtgtgcatgtgtctttatagtagaatgatttataatcctttggatatatacccagtaatgcaa

SEQ ID NO: 96692 - DNA, 120 bp, synthetic construct
  source 1..120: mol_type = other DNA
tttgtctgtttttggagagatacaacctccatgagtatatctgcatgaaaaccacagacaatgaaggtatttcttcattgatttatttattcttttgactgtagtaacaaaccctggatg

SEQ ID NO: 96693 - DNA, 120 bp, synthetic construct
  source 1..120: mol_type = other DNA
gctgcaatgaacatgagcctggagatatctcttcagcatattgacttaaattcctttggatatatacaaggaagtgggattgctggatcatatagtaattctagttttagttttttgagt

SEQ ID NO: 96694 - DNA, 120 bp, synthetic construct
  source 1..120: mol_type = other DNA
tcagaatcagggtaatgctggccctttagaatgagttgggaagcatctgctcttcttaaattttctgccataattttgtagaattcatataatttttttctttaaaaagggaagtactta

SEQ ID NO: 96695 - DNA, 120 bp, synthetic construct; identical to SEQ ID NO: 6786
  source 1..120: mol_type = other DNA

SEQ ID NO: 96696 - DNA, 120 bp, synthetic construct; identical to SEQ ID NO: 6788
  source 1..120: mol_type = other DNA

SEQ ID NO: 96697 - DNA, 120 bp, synthetic construct
  source 1..120: mol_type = other DNA
ttagagatatgatgtgtgcctctgtgagttttggggtctaagataaattatggcactaggaagatggtcctttgtgtcagaagaactggagttgttggtgcaaaaaagtatgatgtcagc

SEQ ID NO: 96698 - DNA, 120 bp, synthetic construct; identical to SEQ ID NO: 6787
  source 1..120: mol_type = other DNA

SEQ ID NO: 96699 - DNA, 120 bp, synthetic construct
  source 1..120: mol_type = other DNA
agtatcctcaaatcatagtaacaagtatactttttccagtgaattgcatgtgtatattattgtatagtataaaaggcaatatttccatttattatcatctgtgcttttcaaagaaactct

SEQ ID NO: 96700 - DNA, 120 bp, synthetic construct
  source 1..120: mol_type = other DNA
aggtgatgaatatccaaattactctgatttgatcattacacattgtatacatgtatcaaaaatatcacatgtaccccaaaacatgtacaactatgatacatcaataaaaaacaacaaaaa

SEQ ID NO: 96701 - DNA, 120 bp, synthetic construct
  source 1..120: mol_type = other DNA
cagtctttcttgatgtgtgacacccacttctattttggctccactttaacaaaatgaataagtgagaaggtaatactggaaacagaacataactgtgactaggaatttggtcttgactcg

SEQ ID NO: 96702 - DNA, 120 bp, synthetic construct; identical to SEQ ID NO: 19275
  source 1..120: mol_type = other DNA

SEQ ID NO: 96703 - DNA, 120 bp, synthetic construct; identical to SEQ ID NO: 19276
  source 1..120: mol_type = other DNA

SEQ ID NO: 96704 - DNA, 120 bp, synthetic construct; identical to SEQ ID NO: 19277
  source 1..120: mol_type = other DNA

SEQ ID NO: 96705 - DNA, 120 bp, synthetic construct; identical to SEQ ID NO: 19278
  source 1..120: mol_type = other DNA

SEQ ID NO: 96706 - DNA, 120 bp, synthetic construct; identical to SEQ ID NO: 19279
  source 1..120: mol_type = other DNA

SEQ ID NO: 96707 - DNA, 120 bp, synthetic construct; identical to SEQ ID NO: 19280
  source 1..120: mol_type = other DNA

SEQ ID NO: 96708 - DNA, 120 bp, synthetic construct; identical to SEQ ID NO: 19281
  source 1..120: mol_type = other DNA

SEQ ID NO: 96709 - DNA, 120 bp, synthetic construct; identical to SEQ ID NO: 19282
  source 1..120: mol_type = other DNA

SEQ ID NO: 96710 - DNA, 120 bp, synthetic construct; identical to SEQ ID NO: 19283
  source 1..120: mol_type = other DNA

SEQ ID NO: 96711 - DNA, 120 bp, synthetic construct; identical to SEQ ID NO: 19284
  source 1..120: mol_type = other DNA

SEQ ID NO: 96712 - DNA, 120 bp, synthetic construct; identical to SEQ ID NO: 19285
  source 1..120: mol_type = other DNA

SEQ ID NO: 96713 - DNA, 120 bp, synthetic construct
  source 1..120: mol_type = other DNA
cttttacactgttggtgggagcgtacattagttcaaccattgtggaagacagtgtggtgtttcctcatggatctaaaactagaaataccatttgacccagcaatcccattactgggtata

SEQ ID NO: 96714 - DNA, 120 bp, synthetic construct
  source 1..120: mol_type = other DNA
agactgttctccacagtggctggactaagttgcattcccaccagcagtgtagaagtgttccccattctctgtagcctcaccagcacatgttaaactatctttaaatatatgaaaaaaatg

SEQ ID NO: 96715 - DNA, 120 bp, synthetic construct
  source 1..120: mol_type = other DNA
gctgcatagatgtcttcttttgagaagtgtctgttcatgtccttcacccactttttgatggggttgattgtttttttcttgtaaatttgtttgagttcattgtagattctggatattagc

SEQ ID NO: 96716 - DNA, 120 bp, synthetic construct
  source 1..120: mol_type = other DNA
agagccaaagacaaaaaccacatgattatctcaatagatgcagaaaaggcctttgacaaaattcaacaacccttcatgctaaaaactctcaataaattaggtattgatgggacgtatttc

SEQ ID NO: 96717 - DNA, 120 bp, synthetic construct
  source 1..120: mol_type = other DNA
ctgatctttgacaaacctgagaaaaacaagcaatggggaaaggattccctatttaataaatggtgctgggaaaactggctagccatatgtagaaagctgaaactggatcccttccttata

SEQ ID NO: 96718 - DNA, 120 bp, synthetic construct
  source 1..120: mol_type = other DNA
agctcatgatgtattaaagacttaaacataagatctaaaaccataaaaaaccctagaagaaaacctaggcaatatcattcagtacataggcatggacaaaaacttcatgactaaaacacc

SEQ ID NO: 96719 - DNA, 120 bp, synthetic construct
  source 1..120: mol_type = other DNA
gggctaggggaaggttagcattgggttaaatacctaatgtagatgatgggttgatgggtgcagcaaaccaccatggcacgtgtatacctatgtaacaatcctgcatgttctgcacatgta

SEQ ID NO: 96720 - DNA, 120 bp, synthetic construct; identical to SEQ ID NO: 30799
  source 1..120: mol_type = other DNA

SEQ ID NO: 96721 - DNA, 120 bp, synthetic construct; identical to SEQ ID NO: 1461
  source 1..120: mol_type = other DNA

SEQ ID NO: 96722 - DNA, 120 bp, synthetic construct; identical to SEQ ID NO: 96694
  source 1..120: mol_type = other DNA

SEQ ID NO: 96723 - DNA, 120 bp, synthetic construct; identical to SEQ ID NO: 6786
  source 1..120: mol_type = other DNA

SEQ ID NO: 96724 - DNA, 120 bp, synthetic construct; identical to SEQ ID NO: 6788
  source 1..120: mol_type = other DNA

SEQ ID NO: 96725 - DNA, 120 bp, synthetic construct; identical to SEQ ID NO: 96697
  source 1..120: mol_type = other DNA

SEQ ID NO: 96726 - DNA, 120 bp, synthetic construct; identical to SEQ ID NO: 6787
  source 1..120: mol_type = other DNA

SEQ ID NO: 96727 - DNA, 120 bp, synthetic construct; identical to SEQ ID NO: 96699
  source 1..120: mol_type = other DNA

SEQ ID NO: 96728 - DNA, 120 bp, synthetic construct; identical to SEQ ID NO: 96700
  source 1..120: mol_type = other DNA

SEQ ID NO: 96729 - DNA, 120 bp, synthetic construct; identical to SEQ ID NO: 96701
  source 1..120: mol_type = other DNA

SEQ ID NO: 96730 - DNA, 120 bp, synthetic construct; identical to SEQ ID NO: 96690
  source 1..120: mol_type = other DNA

SEQ ID NO: 96731 - DNA, 120 bp, synthetic construct; identical to SEQ ID NO: 96691
  source 1..120: mol_type = other DNA

SEQ ID NO: 96732 - DNA, 120 bp, synthetic construct; identical to SEQ ID NO: 96692
  source 1..120: mol_type = other DNA

SEQ ID NO: 96733 - DNA, 120 bp, synthetic construct; identical to SEQ ID NO: 96693
  source 1..120: mol_type = other DNA

SEQ ID NO: 96734 - DNA, 120 bp, synthetic construct; identical to SEQ ID NO: 96694
  source 1..120: mol_type = other DNA

SEQ ID NO: 96735 - DNA, 120 bp, synthetic construct; identical to SEQ ID NO: 6786
  source 1..120: mol_type = other DNA

SEQ ID NO: 96736 - DNA, 120 bp, synthetic construct; identical to SEQ ID NO: 6788
  source 1..120: mol_type = other DNA

SEQ ID NO: 96737 - DNA, 120 bp, synthetic construct; identical to SEQ ID NO: 96697
  source 1..120: mol_type = other DNA

SEQ ID NO: 96738 - DNA, 120 bp, synthetic construct; identical to SEQ ID NO: 6787
  source 1..120: mol_type = other DNA

SEQ ID NO: 96739 - DNA, 120 bp, synthetic construct; identical to SEQ ID NO: 96699
  source 1..120: mol_type = other DNA

SEQ ID NO: 96740 - DNA, 120 bp, synthetic construct; identical to SEQ ID NO: 96700
  source 1..120: mol_type = other DNA

SEQ ID NO: 96741 - DNA, 120 bp, synthetic construct; identical to SEQ ID NO: 96701
  source 1..120: mol_type = other DNA

SEQ ID NO: 96742 - DNA, 120 bp, synthetic construct
  source 1..120: mol_type = other DNA
gtgtgaataagaaaattgttctaatgtttgtaaaccaagcaactgttttaactgctcccctcttcctgattgacttctaaaagggattgatccatattgggtcctatcatatacgtcacg

SEQ ID NO: 96743 - DNA, 120 bp, synthetic construct
  source 1..120: mol_type = other DNA
ttctatatacgatctttgccatcctaatttaaaggaatattaattctttcttttcctctttcattccacaaacctgtattgactacatctaagttctaaatggtgcactggatgttgaaa

SEQ ID NO: 96744 - DNA, 120 bp, synthetic construct
  source 1..120: mol_type = other DNA
gaactcaaaggagatggaaagattccttctctccctcatatattttctctctttctgtctatatatatagaatatgagacatttccctaatcattatgtgtaattacaattacatatata

SEQ ID NO: 96745 - DNA, 120 bp, synthetic construct
  source 1..120: mol_type = other DNA
tccatgtccactagaatggaatgaacaagaaatggaggaggaaaataggtagtttttcaaaagttttcaaaaatatgaaaagaagaaatgaagtggtacttggaagagattgttgaaatg

SEQ ID NO: 96746 - DNA, 120 bp, synthetic construct
  source 1..120: mol_type = other DNA
aattttatatttttgacaagattaatgacccatgctcccttcctctccatttctttttttggaattctgttggtatgtagttactatattttattaaaggaaattagccttatctcttat

SEQ ID NO: 96747 - DNA, 120 bp, synthetic construct
  source 1..120: mol_type = other DNA
aatagatatataatatataactttccatgtgattttcctcttaatttttttctagctgatccatatgaattcctcttattaagaaaaataaagcatccaggattcaatgaagaactgact

SEQ ID NO: 96748 - DNA, 120 bp, synthetic construct
  source 1..120: mol_type = other DNA
tttagtaagaatcctataaaaacactagtatttttctctgagtttaaaattcaatacatgcctactgatatggttaggctttgtatccccacctgaatctcgtcttgaattgtaatcccc

SEQ ID NO: 96749 - DNA, 120 bp, synthetic construct
  source 1..120: mol_type = other DNA
aacgatggtaaaacaaatgctaatacccactacctgacttaaagaatatgatattatttttttccaattgaaattccctcaactactcagaattactgctatccctcttatcctttcatt

SEQ ID NO: 96750 - DNA, 120 bp, synthetic construct
  source 1..120: mol_type = other DNA
ggataaccacttgttctattactgctgtaacaaatttctacaaactaagtgacctaaaataacacaaacttgtcatcttacagtgtacacaagtcagaaatcaggcatgaattttagtga

SEQ ID NO: 96751 - DNA, 120 bp, synthetic construct
  source 1..120: mol_type = other DNA
cattgagtatacctagtatgtaacatgctttaagaatacaccagtgaaccaaacagaaatatctgacattacagaacttaacattccagtatttggagacagatgataaaaaagtgaaca

SEQ ID NO: 96752 - DNA, 120 bp, synthetic construct
  source 1..120: mol_type = other DNA
caagaggttgaggtaaggaaaatatgtaaagacaaaaagaagtccatgcaagctgttttgaaacaaacatcattggtcacagggtctgatgcaggagctggtgttaacttactggcagaa

SEQ ID NO: 96753 - DNA, 120 bp, synthetic construct
  source 1..120: mol_type = other DNA
gaacccaagcttataggaatttctgaaaggtctgtaaatcttatccagatggacagtgggagctcataaaggattctgcaagccatcacatctgtcaaacctgctatgtctaatccttaa

SEQ ID NO: 96754 - DNA, 120 bp, synthetic construct
  source 1..120: mol_type = other DNA
tgttctattctattcaatagaaacaagtacctgggaccagcttacactataggaaagagattatataagggtataaataccaagaggtagagatcatcaagagccattctggtagcagcc

SEQ ID NO: 96755 - DNA, 120 bp, synthetic construct
  source 1..120: mol_type = other DNA
ttcttagtaacaatttggacaagacagcaaatgctattgtccaagttttctaaagaagaatctgaagtgaaatgacatcaagagacctatcaagacctgtatccaggaaaaggtaaatct

SEQ ID NO: 96756 - DNA, 120 bp, synthetic construct
  source 1..120: mol_type = other DNA
gaaagtaaaagcatgattccatcaaatgttattctctaaacagtaattttataaatacaggttaaatgtgtgtggtcccagctactcaggaggtcccagctactcagtattccttttcaa

SEQ ID NO: 96757 - DNA, 120 bp, synthetic construct
  source 1..120: mol_type = other DNA
gtgtttttcatattaccaggtagatgataagaagattttaattttcttttttttttaacttttattttaagtttaggggcatttgttacataggtagactggtgtcacaggggtttattg

SEQ ID NO: 96758 - DNA, 120 bp, synthetic construct; identical to SEQ ID NO: 27399
  source 1..120: mol_type = other DNA

SEQ ID NO: 96759 - DNA, 120 bp, synthetic construct
  source 1..120: mol_type = other DNA
agagatttgtggaactttgaacttgagggagatgagttagggtatctggcagaagaaatttctaagcagcaaagcattcaagagtgacttgggtgtgttaaaagcactcagttttaacag

SEQ ID NO: 96760 - DNA, 120 bp, synthetic construct; identical to SEQ ID NO: 27400
  source 1..120: mol_type = other DNA

SEQ ID NO: 96761 - DNA, 120 bp, synthetic construct; identical to SEQ ID NO: 27401
  source 1..120: mol_type = other DNA

SEQ ID NO: 96762 - DNA, 120 bp, synthetic construct; identical to SEQ ID NO: 27402
  source 1..120: mol_type = other DNA

SEQ ID NO: 96763 - DNA, 120 bp, synthetic construct; identical to SEQ ID NO: 27403
  source 1..120: mol_type = other DNA

SEQ ID NO: 96764 - DNA, 120 bp, synthetic construct; identical to SEQ ID NO: 27404
  source 1..120: mol_type = other DNA

SEQ ID NO: 96765 - DNA, 120 bp, synthetic construct; identical to SEQ ID NO: 27405
  source 1..120: mol_type = other DNA

SEQ ID NO: 96766 - DNA, 120 bp, synthetic construct; identical to SEQ ID NO: 27406
  source 1..120: mol_type = other DNA

SEQ ID NO: 96767 - DNA, 120 bp, synthetic construct; identical to SEQ ID NO: 27407
  source 1..120: mol_type = other DNA

SEQ ID NO: 96768 - DNA, 120 bp, synthetic construct
  source 1..120: mol_type = other DNA
ccttgtttgcttgctcccttgctccatttgtaagaaataagtgatataatataggtaaaaatacttaacctcatgcctaccacatagtatagcacaataaatgttatttattataatctg

SEQ ID NO: 96769 - DNA, 120 bp, synthetic construct
  source 1..120: mol_type = other DNA
ttgccaaaattcaaaagtccagaaaccatttccaaattttcacctcttttatcttcaaatcctaaaactatgaaaattcacaaacttagctccatacattatggtagaaaggttaataat

SEQ ID NO: 96770 - DNA, 120 bp, synthetic construct
  source 1..120: mol_type = other DNA
aacaattctcatttaaaaacatagtagccatgactaatgatcttccagtgggaaggtactaagactttacaacatgtttcttgctggggataagacagcctacagccagcattcaactca

SEQ ID NO: 96771 - DNA, 120 bp, synthetic construct
  source 1..120: mol_type = other DNA
cccagaaaagtaaactgagtttccagaattcacacaattgatagaataggaaccagaattcaggcctcttgcttcctattccagaaagacaaattgcaataataatcaaataatatgagc

SEQ ID NO: 96772 - DNA, 120 bp, synthetic construct; identical to SEQ ID NO: 27408
  source 1..120: mol_type = other DNA

SEQ ID NO: 96773 - DNA, 120 bp, synthetic construct
  source 1..120: mol_type = other DNA
agtcccagaaacaaaaactcagataccactgagtgattctctccatccattggtccagccaactgggctgtggctaaaattatgagaactaagaaaatggggaggaaattgtgattatga

SEQ ID NO: 96774 - DNA, 120 bp, synthetic construct
  source 1..120: mol_type = other DNA
gtacatatgcataaagtacctgttcaccaaaaactacaaaacattgctgaaagaaattaaatgggcataatatagatgtagagatgtgttgaatttatgactcattttgaacaaggaata

SEQ ID NO: 96775 - DNA, 120 bp, synthetic construct
  source 1..120: mol_type = other DNA
gcacggaatggtgactgtaataaataacaaggtattgtatgtttcaaaatgactaacagagtagattttaaatgttttcaccacaaaaaagatatgtatgtcaataagacagacctaatc

SEQ ID NO: 96776 - DNA, 120 bp, synthetic construct
  source 1..120: mol_type = other DNA
cccaaagcacaggcaacaaaagcaaaaatatatgggattgcatcaaactaaaaagcttctgcacagcaaaggaaacaatatggtgaagagacaacctacaagttgtgagaaaatatttgc

SEQ ID NO: 96777 - DNA, 120 bp, synthetic construct; identical to SEQ ID NO: 27409
  source 1..120: mol_type = other DNA

SEQ ID NO: 96778 - DNA, 120 bp, synthetic construct
  source 1..120: mol_type = other DNA
aaataacaaacaaacccatcagtgggtgaaggatatgaactgacatttctctaaagaagacatttatgcatccaacaaacatatgaaaaaaagctcatcatcactggtcatcagagaaat

SEQ ID NO: 96779 - DNA, 120 bp, synthetic construct
  source 1..120: mol_type = other DNA
tctcttagtagcaattgtgaatgggagagttcactcatgatttggctctctgtttgtctgttttttgcatataggaatgcttgatttttgcacattgattttgtatcctgagacttttct

SEQ ID NO: 96780 - DNA, 120 bp, synthetic construct
  source 1..120: mol_type = other DNA
gggatcagtggtggtatctcctttatcattttttattgcatctgtttgattcttctctgttttcttctttatgagtctggctagtggtctatctattttattgatattttcaaaaaacca

SEQ ID NO: 96781 - DNA, 120 bp, synthetic construct
  source 1..120: mol_type = other DNA
agctcacgtaatatactgactactatactcaagtacagtttcttctgaatgcatgtcactttctcaccattgtaaagtcaaacaattataagtcaaactatcacaagccagggaccatcc

SEQ ID NO: 96782 - DNA, 120 bp, synthetic construct
  source 1..120: mol_type = other DNA
tattacagtccgtcatgtacatacactatacttaaacctaatgtttggtatttaaatcgtttcaagattttatcactgtcaacaaagtatgatgaatatttttatgctgaaaacttctgt

SEQ ID NO: 96783 - DNA, 120 bp, synthetic construct
  source 1..120: mol_type = other DNA
caatcttgccattttctgggatttcatatttccttatttttgttttttaccttttttggcttgaattttttgagtttttatgcattcttttccagtttcttaagatgctaataagttcat

SEQ ID NO: 96784 - DNA, 120 bp, synthetic construct
  source 1..120: mol_type = other DNA
gggctagaatttgtggtcactgccaacagtggattcatatcgatgggcaccttctttttcttaattgtatcatacatttttattctggtcactgtccaacgacattcctcaaatgattta

SEQ ID NO: 96785 - DNA, 120 bp, synthetic construct
  source 1..120: mol_type = other DNA
gtaaggtcaacagcttgttacaacccttaagtattattttcaggctgattgtcaatatgttttgtacaatgttctcacttataggtgggaattgaacaatgagaacacatggacacagga

SEQ ID NO: 96786 - DNA, 120 bp, synthetic construct
  source 1..120: mol_type = other DNA
aaccaagtggtttactaaaaaggacaattcactacatattattctcttacagtttttatgcctcattctgtgaaaattgctgtagtctcttccagttatgaagaaggtaggtggaaacaa

SEQ ID NO: 96787 - DNA, 120 bp, synthetic construct
  source 1..120: mol_type = other DNA
tggtggtgaaggatcccctcagcagcacaaattcaggagagagatgtcttaactacgttagcaagaaattccttttgctaaagaatagcattcctgaattcttactaacagccatgatag

SEQ ID NO: 96788 - DNA, 120 bp, synthetic construct
  source 1..120: mol_type = other DNA
ggctattatatattgaccattactatttgctagaaaatttatatacctggtcgtatccaatcctcacagaacttctataaagttgtgctattatcacctatattttccagatgtggccgt

SEQ ID NO: 96789 - DNA, 120 bp, synthetic construct
  source 1..120: mol_type = other DNA
ctgacttccttctccttctcttcttcaaggtaactgcagaggctatttcctggaatgaatcaacgagtgaaacgaataactctatggtgactgaattcatttttctgggtctctctgatt

SEQ ID NO: 96790 - DNA, 120 bp, synthetic construct
  source 1..120: mol_type = other DNA
tgtctaggaacttccacatacattgcctcaatttatctttcaacaacttgtgtgttatattttggaatacagatacaaagttattatgctttcaaaatattcttttgctaattcttagaa

SEQ ID NO: 96791 - DNA, 120 bp, synthetic construct
  source 1..120: mol_type = other DNA
tctctttccagggagaatcactgagccagaataaaattgaacactaaatattctaagaaaaaaggaatctagtttgtcaaaatgtgacttgaattaatagataaggagagtcagatgata

SEQ ID NO: 96792 - DNA, 120 bp, synthetic construct
  source 1..120: mol_type = other DNA
cacctgccatggttgtttgctgcacccatcaactcaccatctacattaggtatttctcctaacgttatccctctccttgcctcccacctcccgacaggccctggtgtgtgatattccctt

SEQ ID NO: 96793 - DNA, 120 bp, synthetic construct
  source 1..120: mol_type = other DNA
ccctcttcctccatcctccctctgctactctgtggtgtctgtttttctcatctttatgtccatgtgtactcgatgtttagctcccccttgttaggtgagaacatgtggtatttggttttc

SEQ ID NO: 96794 - DNA, 120 bp, synthetic construct
  source 1..120: mol_type = other DNA
tcctgtgtccatgtgatcttattgttcacttcccacctatgagtgagaatatgcggtgtttggttttttgttcttgcgatagtttactgagaatgatgatttccagtttcatccatgtcc

SEQ ID NO: 96795 - DNA, 120 bp, synthetic construct
  source 1..120: mol_type = other DNA
ctcccaagcctaaaccaggaagaagttgaatctctgaatagaccaataacagaagctgaaattgtggcaataatcaatagcttaccaaccaaaaagagtccaggaccagatggattcaca

SEQ ID NO: 96796 - DNA, 120 bp, synthetic construct
  source 1..120: mol_type = other DNA
acctaggaatccaacttacaagggacgtgaaggacctcttcaaggagaactacaaatcactgctcaaggaaataaaagaggatacaaagaaatggaagaacatgccatgctcatgggtag

SEQ ID NO: 96797 - DNA, 120 bp, synthetic construct; identical to SEQ ID NO: 14214
  source 1..120: mol_type = other DNA

SEQ ID NO: 96798 - DNA, 120 bp, synthetic construct
  source 1..120: mol_type = other DNA
tttctggctcctggccagaggctatatttcccagcctgtcataatagccacccttcaggctacaactctatgagaaataaaggtcctcctttccaaatttatgaaccccatcattcttca

SEQ ID NO: 96799 - DNA, 120 bp, synthetic construct
  source 1..120: mol_type = other DNA
agttcactcaccgacagggaatgcacctgtactcctaggtatttccatagtcatcctctaggtactacatccctgtagattaagaatgggaattttctagatgttgttaaaagaggagca

SEQ ID NO: 96800 - DNA, 120 bp, synthetic construct
  source 1..120: mol_type = other DNA
tagaaaaacgtcaccaactcagaaccttttctaaaatactccatcacacacataccactcccatcattatttactctaccattgcctttttatttcctgcttgtcttttagcactagtag

SEQ ID NO: 96801 - DNA, 120 bp, synthetic construct
  source 1..120: mol_type = other DNA
gtgatgacactcagaatcattgcatcatgtccccataataataaaaaagcatatgatcttgtaatggtatttactgctttaaaatattcatctcctttcaataataaagggacaattatt

SEQ ID NO: 96802 - DNA, 120 bp, synthetic construct
  source 1..120: mol_type = other DNA
actttggtgtggcagtttttaaccttacttaaagaaaagcatatttggtaatgtgaactgttatttcatttttatttgacaagttttgtgctattagtggtgtcagattcaatacagggc

SEQ ID NO: 96803 - DNA, 120 bp, synthetic construct
  source 1..120: mol_type = other DNA
ataaaatgggcaaccaaatgtatcctcgtgtaatctgttagtgacagggaacgtatgacaattttgaaagcagtgatataactctaggtaaatgctatgtctactaattatagtttctta

SEQ ID NO: 96804 - DNA, 120 bp, synthetic construct
  source 1..120: mol_type = other DNA
tgtgttcaatactttaatattccctttacgtaatcccattatttacacattgagaaacaaggaagtaaaggcagccatgaggaagttggtcaccaaatatattttgtgtaaagagaagtg

SEQ ID NO: 96805 - DNA, 120 bp, synthetic construct
  source 1..120: mol_type = other DNA
caggcaactagcaatttttgtagccagtccctacttacatccttcagagtgaaagcagccttggggagaaagcttctaggttgactgggattggtagacatctagccgtgtaattttttt

SEQ ID NO: 96806 - DNA, 120 bp, synthetic construct
  source 1..120: mol_type = other DNA
cactgaaaatactgaagctagtaatacaaaggaaaaaggcataaaaatagtgtgataactaattgcttacttaagaatattatctgaaattagaaactaatatcaatgaagaaaagggga

SEQ ID NO: 96807 - DNA, 120 bp, synthetic construct
  source 1..120: mol_type = other DNA
ttctcagggattttcttcaacaaagtttataaagtctcacccctccaactccattggaagcagaccagttggcctatcatgcattgttccaaaatataattaccattaaatagaggtcca

SEQ ID NO: 96808 - DNA, 120 bp, synthetic construct
  source 1..120: mol_type = other DNA
tacactggacaaagggatgactcatgtccctggaaggatggagaaggacagcttgagatttcatcctgctacttagaatggggcataatttaaagcttatgaattgtttgctgctggaat

SEQ ID NO: 96809 - DNA, 120 bp, synthetic construct
  source 1..120: mol_type = other DNA
aaaaaatttgaacagacactccagaaaagaagatacagaagtgatcagcaagttcacgaaaagatgcacgtcattactcagcagggaatggtccacaacacacgatcaagtgttcaggca

SEQ ID NO: 96810 - DNA, 120 bp, synthetic construct
  source 1..120: mol_type = other DNA
ttaggtatttctcctaatgctatccttcccctagccccccaccctgtgacaggcccccatgtgggatattcccctcgctgtttccctgtgttctcattgttcaactcccacttaagagtg

SEQ ID NO: 96811 - DNA, 120 bp, synthetic construct; identical to SEQ ID NO: 14212
  source 1..120: mol_type = other DNA

SEQ ID NO: 96812 - DNA, 120 bp, synthetic construct; identical to SEQ ID NO: 14213
  source 1..120: mol_type = other DNA

SEQ ID NO: 96813 - DNA, 120 bp, synthetic construct; identical to SEQ ID NO: 14747
  source 1..120: mol_type = other DNA

SEQ ID NO: 96814 - DNA, 120 bp, synthetic construct; identical to SEQ ID NO: 14748
  source 1..120: mol_type = other DNA

SEQ ID NO: 96815 - DNA, 120 bp, synthetic construct; identical to SEQ ID NO: 14749
  source 1..120: mol_type = other DNA

SEQ ID NO: 96816 - DNA, 120 bp, synthetic construct; identical to SEQ ID NO: 14750
  source 1..120: mol_type = other DNA

SEQ ID NO: 96817 - DNA, 120 bp, synthetic construct; identical to SEQ ID NO: 14751
  source 1..120: mol_type = other DNA

SEQ ID NO: 96818 - DNA, 120 bp, synthetic construct; identical to SEQ ID NO: 14752
  source 1..120: mol_type = other DNA

SEQ ID NO: 96819 - DNA, 120 bp, synthetic construct; identical to SEQ ID NO: 14753
  source 1..120: mol_type = other DNA

SEQ ID NO: 96820 - DNA, 120 bp, synthetic construct
  source 1..120: mol_type = other DNA
atgcttccagcatggcttttcaggctgctttctgttagaaaagaaatggtttgggggctgcttttttattaaaaggaaaagcctttctgaggactcttttaccctttctagctgcctaaa

SEQ ID NO: 96821 - DNA, 120 bp, synthetic construct
  source 1..120: mol_type = other DNA
gggcaatgaacaaaggaaaaaaacgaaaaggcttataagcatgaaagtaagcttacccttaaaaatcaaccacagaaatgaaaaccactgattttgattagcatgtaggataatgttgct

SEQ ID NO: 96822 - DNA, 120 bp, synthetic construct
  source 1..120: mol_type = other DNA
gggtcccagcacagctgccccacccccacccgttctttcatttggcggtggccctaagtttctctggggtagagctcccagagacaaccggcaggctctgtgccaccactagctgagtgt

SEQ ID NO: 96823 - DNA, 120 bp, synthetic construct
  source 1..120: mol_type = other DNA
gggagaccaggctgtagatgtgaggaagtacaaaggaaccacaggcctgagcaagagtgtatttaccgtccattactcttaagcgacatctactggattgcagccaaaactgctacaaca

SEQ ID NO: 96824 - DNA, 120 bp, synthetic construct
  source 1..120: mol_type = other DNA
tctttgggtatatgcccaataatgggattgctgggttgaatgctactttggttttaagtactttgtgaaatcaccacactgctacccataatggctgaactaatttatattcccaccagc

SEQ ID NO: 96825 - DNA, 120 bp, synthetic construct; identical to SEQ ID NO: 14747
  source 1..120: mol_type = other DNA

SEQ ID NO: 96826 - DNA, 120 bp, synthetic construct; identical to SEQ ID NO: 14748
  source 1..120: mol_type = other DNA

SEQ ID NO: 96827 - DNA, 120 bp, synthetic construct; identical to SEQ ID NO: 14749
  source 1..120: mol_type = other DNA

SEQ ID NO: 96828 - DNA, 120 bp, synthetic construct; identical to SEQ ID NO: 14750
  source 1..120: mol_type = other DNA

SEQ ID NO: 96829 - DNA, 120 bp, synthetic construct; identical to SEQ ID NO: 14751
  source 1..120: mol_type = other DNA

SEQ ID NO: 96830 - DNA, 120 bp, synthetic construct; identical to SEQ ID NO: 14752
  source 1..120: mol_type = other DNA

SEQ ID NO: 96831 - DNA, 120 bp, synthetic construct; identical to SEQ ID NO: 14753
  source 1..120: mol_type = other DNA

SEQ ID NO: 96832 - DNA, 120 bp, synthetic construct; identical to SEQ ID NO: 14754
  source 1..120: mol_type = other DNA

SEQ ID NO: 96833 - DNA, 120 bp, synthetic construct; identical to SEQ ID NO: 14755
  source 1..120: mol_type = other DNA

SEQ ID NO: 96834 - DNA, 120 bp, synthetic construct
  source 1..120: mol_type = other DNA
tgtggtctcccacatgccgccctcaggctggggagggatcgaagagcgcaggaactatcctagaccttcagcaaggcatacgaacagctgtcatacggaaaagtggccagattattttcc

SEQ ID NO: 96835 - DNA, 120 bp, synthetic construct; identical to SEQ ID NO: 14756
  source 1..120: mol_type = other DNA

SEQ ID NO: 96836 - DNA, 120 bp, synthetic construct
  source 1..120: mol_type = other DNA
ttttgttcctatgttggttcactcaggaaaatggcctccagctccatgcatgttgctgcaaaggatatgatctcattctttttatgactgcatagtattccatagtatatttgtaccata

SEQ ID NO: 96837 - DNA, 120 bp, synthetic construct; identical to SEQ ID NO: 11914
  source 1..120: mol_type = other DNA

SEQ ID NO: 96838 - DNA, 120 bp, synthetic construct; identical to SEQ ID NO: 24500
  source 1..120: mol_type = other DNA

SEQ ID NO: 96839 - DNA, 120 bp, synthetic construct
  source 1..120: mol_type = other DNA
ctgttcatgtccttcgcccactttttgatggggttgtttgtttttttcttgtaaatttgtttgagttcattgtagattctggatattagccgtttgtcagatgtgtaggttgcgaaaatt

SEQ ID NO: 96840 - DNA, 120 bp, synthetic construct
  source 1..120: mol_type = other DNA
tcatgatttggctctctgtttgtctgttgttggtgtataagaatgcttgtgatttttttacattgattttgtatcctgagactttgctgaagttgcttatcagcttaaggagattttggg

SEQ ID NO: 96841 - DNA, 120 bp, synthetic construct; identical to SEQ ID NO: 22205
  source 1..120: mol_type = other DNA

SEQ ID NO: 96842 - DNA, 120 bp, synthetic construct; identical to SEQ ID NO: 22206
  source 1..120: mol_type = other DNA

SEQ ID NO: 96843 - DNA, 120 bp, synthetic construct; identical to SEQ ID NO: 22207
  source 1..120: mol_type = other DNA

SEQ ID NO: 96844 - DNA, 120 bp, synthetic construct; identical to SEQ ID NO: 22208
  source 1..120: mol_type = other DNA

SEQ ID NO: 96845 - DNA, 120 bp, synthetic construct
  source 1..120: mol_type = other DNA
aagaggaaaaataaatgtacaaaaagatgcttgatctcattagtaattaaggaaatataaattaagacactagcgccctctccctctccctctccctctccctctccctctccctctccc

SEQ ID NO: 96846 - DNA, 120 bp, synthetic construct
  source 1..120: mol_type = other DNA
cctagccacgagtgatccgccagcctcagcctcccggggtgccgggattgcggacggagtctcgttcactcagtgctcagtggtgcccaggctggagtgcagtggcgtgatctcggctcg

SEQ ID NO: 96847 - DNA, 120 bp, synthetic construct
  source 1..120: mol_type = other DNA
gtgcccagcggctcattggggatgggccatgatgacaatggcggttttgtggaatagaaaggcgggaagggtggggaaaaaattgagaaatcagatggttgccgggtctgtgtggataga

SEQ ID NO: 96848 - DNA, 120 bp, synthetic construct
  source 1..120: mol_type = other DNA
gagaagtgaggagcctctccgcccggcagccaccccatctgggaagtgaggagcgtctccgcccggcagccaccccgtccgggagggaggtggtggggggtcagccccccgccaggccag

SEQ ID NO: 96849 - DNA, 120 bp, synthetic construct
  source 1..120: mol_type = other DNA
gtagaggggatgggaggaaaggaggaaggaagggggaaaaaagagaaggagggaacagtgtccaaagacaggagaataaatcatgatatgctcacagagttgaatatacaataaagaaat

SEQ ID NO: 96850 - DNA, 120 bp, synthetic construct
  source 1..120: mol_type = other DNA
tctcactcataggtgggaattgaacaatgagaacacatggacacaggaaggggaacatcacactctggggactgttgtgggttgggggaggggggagggatagcattgggagatacacct

SEQ ID NO: 96851 - DNA, 120 bp, synthetic construct
  source 1..120: mol_type = other DNA
cttttcatctcagcctcccaaagtgctggtattacaggcgtgagccaccatgcctgaccttagaattattaaccattactagcggttagctaacaattggctctattattagctaactat

SEQ ID NO: 96852 - DNA, 120 bp, synthetic construct; identical to SEQ ID NO: 12424
  source 1..120: mol_type = other DNA

SEQ ID NO: 96853 - DNA, 120 bp, synthetic construct; identical to SEQ ID NO: 12425
  source 1..120: mol_type = other DNA

SEQ ID NO: 96854 - DNA, 120 bp, synthetic construct; identical to SEQ ID NO: 12426
  source 1..120: mol_type = other DNA

SEQ ID NO: 96855 - DNA, 120 bp, synthetic construct; identical to SEQ ID NO: 12427
  source 1..120: mol_type = other DNA

SEQ ID NO: 96856 - DNA, 120 bp, synthetic construct; identical to SEQ ID NO: 12428
  source 1..120: mol_type = other DNA

SEQ ID NO: 96857 - DNA, 120 bp, synthetic construct
  source 1..120: mol_type = other DNA
tcatcattttttatggctgcatagtattccatggtgtatatgtgccacattttcttaatccagtctatcattgttggacatttggactggttgcaagtctttgctattgtgaatagtgcc

SEQ ID NO: 96858 - DNA, 120 bp, synthetic construct; identical to SEQ ID NO: 12421
  source 1..120: mol_type = other DNA

SEQ ID NO: 96859 - DNA, 120 bp, synthetic construct; identical to SEQ ID NO: 12422
  source 1..120: mol_type = other DNA

SEQ ID NO: 96860 - DNA, 120 bp, synthetic construct; identical to SEQ ID NO: 12423
  source 1..120: mol_type = other DNA

SEQ ID NO: 96861 - DNA, 120 bp, synthetic construct; identical to SEQ ID NO: 11902
  source 1..120: mol_type = other DNA

SEQ ID NO: 96862 - DNA, 120 bp, synthetic construct; identical to SEQ ID NO: 11903
  source 1..120: mol_type = other DNA

SEQ ID NO: 96863 - DNA, 120 bp, synthetic construct; identical to SEQ ID NO: 11904
  source 1..120: mol_type = other DNA

SEQ ID NO: 96864 - DNA, 120 bp, synthetic construct; identical to SEQ ID NO: 11905
  source 1..120: mol_type = other DNA

SEQ ID NO: 96865 - DNA, 120 bp, synthetic construct; identical to SEQ ID NO: 11906
  source 1..120: mol_type = other DNA

SEQ ID NO: 96866 - DNA, 120 bp, synthetic construct
  source 1..120: mol_type = other DNA
catgtactgaaatatcacactgtatctcatgaatatgaatgattatttcaatatatcaattaggctggccatggtggctcacgcctgtaatcccagcactttagcaggccgagatcagga

SEQ ID NO: 96867 - DNA, 120 bp, synthetic construct
  source 1..120: mol_type = other DNA
cgggcagagacacaaccaaaaaagagaattttagaccaatatccttgatgaacattgatgcaaaaatcctcaataaaatactggcaaaccgaatccagcagcacatcaaaaagcttatcc

SEQ ID NO: 96868 - DNA, 120 bp, synthetic construct
  source 1..120: mol_type = other DNA
ttcatatggaaccaaaagagagcccgcatcgccaagtcaatcctaagccaaaagaacaaagctggaggcatcacactacctgacttcaaactatactacaaggctacagtaaccaaaaca

SEQ ID NO: 96869 - DNA, 120 bp, synthetic construct
  source 1..120: mol_type = other DNA
tttattgcggcattattcacaatagcaaagacttggaaccaaatgtccaacaatgatagactggattaagaaaatgtggcacatatacaccatggaatactatgcagccataaaaaatga

SEQ ID NO: 96870 - DNA, 120 bp, synthetic construct; identical to SEQ ID NO: 96869
  source 1..120: mol_type = other DNA

SEQ ID NO: 96871 - DNA, 120 bp, synthetic construct
  source 1..120: mol_type = other DNA
acccaaatgtccaacaatgatagactggattaagaaaatgtggcacatattcaccgtggaatactatgtagccataaaaaatgatgagttcatgtactttgcagggacatggatgaaatt

SEQ ID NO: 96872 - DNA, 120 bp, synthetic construct
  source 1..120: mol_type = other DNA
tggagccaacccaaatgtccaacaatgatagactggattaagaaaatgaggcacatatacaccatggaatactatgcagccataaaaaatgatgagttcatgtcctttgtagggacatgg

SEQ ID NO: 96873 - DNA, 120 bp, synthetic construct
  source 1..120: mol_type = other DNA
gtgccacattttcttaatccagtctatcattgttggacatttgggttggttccaagtctttgctattgtgaatagtgctgcaataaacatacgtgtgcatgtgtctttatagcagcaagt

SEQ ID NO: 96874 - DNA, 120 bp, synthetic construct
  source 1..120: mol_type = other DNA
tctgatctctcacaaacctgacaaaaacaagaaatggggaaaggattccctattttggaaatggtgctgggaaaactggctagccatatgtagaaagctgaaactggattccttccttac

SEQ ID NO: 96875 - DNA, 120 bp, synthetic construct
  source 1..120: mol_type = other DNA
tgttgtgggtacatagtaggtgtatatatttatggggtacatgagatattttgatacagccatgcaatgcataataatcacgtcagggtaaatggggtatccatcatctcagccatttat

SEQ ID NO: 96876 - DNA, 120 bp, synthetic construct
  source 1..120: mol_type = other DNA
cattgttggacatttgggttggttccaagtctttgctattgtgaatagtgtcatggtattttctaagagccacagggaactctgagctgagagcttcttcctggccccctgaaccccacc

SEQ ID NO: 96877 - DNA, 120 bp, synthetic construct; identical to SEQ ID NO: 13290
  source 1..120: mol_type = other DNA

SEQ ID NO: 96878 - DNA, 120 bp, synthetic construct
  source 1..120: mol_type = other DNA
gcgaaaccccgtctccacccaaaagatacgaaaaccagtcaggcgtggcggcgcacgcctgcaatcgcaggcactcggcaggctgaggcaggagaatcaggcagggaggctgcagtgagc

SEQ ID NO: 96879 - DNA, 120 bp, synthetic construct; identical to SEQ ID NO: 4723
  source 1..120: mol_type = other DNA

SEQ ID NO: 96880 - DNA, 120 bp, synthetic construct
  source 1..120: mol_type = other DNA
atattgtgttaaataatttactagtatactttatttttatttttatttttggagacagagtctcgctctgtcccccaggctggagtgcagtggcgccttctcaactccctgccacctccg

SEQ ID NO: 96881 - DNA, 120 bp, synthetic construct
  source 1..120: mol_type = other DNA
ctactcatctaacaaagggctaatatccagaatctacaatgaactcaaacaaatttacaaaaaaataaacaaacaaccccatcaaaaagtgggcgaaggatatgaacagacacttctcaa

SEQ ID NO: 96882 - DNA, 120 bp, synthetic construct
  source 1..120: mol_type = other DNA
atgggtgcagcacaccagcatggcacatgtatacatatgtaactaacctgcacattgtgcacatgtaccctaaaacttaaagtataataataataaaataaaataaaataaataaacttg

SEQ ID NO: 96883 - DNA, 120 bp, synthetic construct; identical to SEQ ID NO: 16447
  source 1..120: mol_type = other DNA

SEQ ID NO: 96884 - DNA, 120 bp, synthetic construct; identical to SEQ ID NO: 16448
  source 1..120: mol_type = other DNA

SEQ ID NO: 96885 - DNA, 120 bp, synthetic construct
  source 1..120: mol_type = other DNA
caggaggcacaggttgcagtgagccgagattgagccattgcactccagcctgggggacgggagtgaaactccgtatcaaaaaaaaaaaaaaatgaatactttctgaaagtatttattcat

SEQ ID NO: 96886 - DNA, 120 bp, synthetic construct; identical to SEQ ID NO: 32947
  source 1..120: mol_type = other DNA

SEQ ID NO: 96887 - DNA, 120 bp, synthetic construct; identical to SEQ ID NO: 32948
  source 1..120: mol_type = other DNA

SEQ ID NO: 96888 - DNA, 120 bp, synthetic construct; identical to SEQ ID NO: 91442
  source 1..120: mol_type = other DNA

SEQ ID NO: 96889 - DNA, 120 bp, synthetic construct; identical to SEQ ID NO: 91443
  source 1..120: mol_type = other DNA

SEQ ID NO: 96890 - DNA, 120 bp, synthetic construct; identical to SEQ ID NO: 91444
  source 1..120: mol_type = other DNA

SEQ ID NO: 96891 - DNA, 120 bp, synthetic construct; identical to SEQ ID NO: 11918
  source 1..120: mol_type = other DNA

SEQ ID NO: 96892 - DNA, 120 bp, synthetic construct
  source 1..120: mol_type = other DNA
agtatacatgggagacttttcattttgttctgttctaagaaaaattcttctgccttgggatcctgttgatctgtgaccttacccccaaccctgtgctctctgaacatgtgctgtgtccac

SEQ ID NO: 96893 - DNA, 120 bp, synthetic construct; identical to SEQ ID NO: 23743
  source 1..120: mol_type = other DNA

SEQ ID NO: 96894 - DNA, 120 bp, synthetic construct
  source 1..120: mol_type = other DNA
gaatagtaccacaataaacatatgtgtgcatgtgtctttatagcagcatgatttatagtcctttgggtatatacccagtaatgggatggctgggtcaaatggtatttccagttctagatc

SEQ ID NO: 96895 - DNA, 120 bp, synthetic construct; identical to SEQ ID NO: 24171
  source 1..120: mol_type = other DNA

SEQ ID NO: 96896 - DNA, 120 bp, synthetic construct; identical to SEQ ID NO: 24172
  source 1..120: mol_type = other DNA

SEQ ID NO: 96897 - DNA, 120 bp, synthetic construct; identical to SEQ ID NO: 24173
  source 1..120: mol_type = other DNA

SEQ ID NO: 96898 - DNA, 120 bp, synthetic construct; identical to SEQ ID NO: 24174
  source 1..120: mol_type = other DNA

SEQ ID NO: 96899 - DNA, 120 bp, synthetic construct; identical to SEQ ID NO: 24175
  source 1..120: mol_type = other DNA

SEQ ID NO: 96900 - DNA, 120 bp, synthetic construct; identical to SEQ ID NO: 24176
  source 1..120: mol_type = other DNA

SEQ ID NO: 96901 - DNA, 120 bp, synthetic construct; identical to SEQ ID NO: 24177
  source 1..120: mol_type = other DNA

SEQ ID NO: 96902 - DNA, 120 bp, synthetic construct
  source 1..120: mol_type = other DNA
caatcatcaagatagaacatattcaatgtcataaaacaacccttaaaaaatgtaggccaggcggccggggcgcactttgggaggccaaggtgggcggatcacgaggtcaggagattgtga

SEQ ID NO: 96903 - DNA, 120 bp, synthetic construct
  source 1..120: mol_type = other DNA
ttttaatgcgatactgtcgaaagaagagacagatgagtgaataaaaaacaataaaaaatacaaaaagagactgggcaccatggctcatgcctgtaatcccagcactttgggaggctgagg

SEQ ID NO: 96904 - DNA, 120 bp, synthetic construct
  source 1..120: mol_type = other DNA
aaaaaaaaaaagcttcaccctgccttttgaatcccagagaacctgttctgggccaacaatgcaccaccaggctttcccaagtgcaccaaacatagttttgaatagttttccttgggcaaa

SEQ ID NO: 96905 - DNA, 120 bp, synthetic construct
  source 1..120: mol_type = other DNA
cgcactccagcctgggtgacagagtgagaccctgtctcaaaaacaaacaaacaaaaagaatgggagagacaaagagcagaaaaaattgcttatcttccagagataagccaacagaaaatc

SEQ ID NO: 96906 - DNA, 120 bp, synthetic construct
  source 1..120: mol_type = other DNA
ctcaaacaaatttacaagaaaaaaacaaacaaccccatcaaaaagtgggcgaaggagatgaacagacacttctaaaaagaagacatttacgcagccaaaaaacacatgaaaaaatgctca

SEQ ID NO: 96907 - DNA, 120 bp, synthetic construct; identical to SEQ ID NO: 22671
  source 1..120: mol_type = other DNA

SEQ ID NO: 96908 - DNA, 120 bp, synthetic construct; identical to SEQ ID NO: 22672
  source 1..120: mol_type = other DNA

SEQ ID NO: 96909 - DNA, 120 bp, synthetic construct; identical to SEQ ID NO: 22673
  source 1..120: mol_type = other DNA

SEQ ID NO: 96910 - DNA, 120 bp, synthetic construct; identical to SEQ ID NO: 22674
  source 1..120: mol_type = other DNA

SEQ ID NO: 96911 - DNA, 120 bp, synthetic construct; identical to SEQ ID NO: 28969
  source 1..120: mol_type = other DNA

SEQ ID NO: 96912 - DNA, 120 bp, synthetic construct; identical to SEQ ID NO: 11633
  source 1..120: mol_type = other DNA

SEQ ID NO: 96913 - DNA, 120 bp, synthetic construct; identical to SEQ ID NO: 11634
  source 1..120: mol_type = other DNA

SEQ ID NO: 96914 - DNA, 120 bp, synthetic construct; identical to SEQ ID NO: 11635
  source 1..120: mol_type = other DNA

SEQ ID NO: 96915 - DNA, 120 bp, synthetic construct; identical to SEQ ID NO: 11636
  source 1..120: mol_type = other DNA

SEQ ID NO: 96916 - DNA, 120 bp, synthetic construct; identical to SEQ ID NO: 11637
  source 1..120: mol_type = other DNA

SEQ ID NO: 96917 - DNA, 120 bp, synthetic construct; identical to SEQ ID NO: 11638
  source 1..120: mol_type = other DNA

SEQ ID NO: 96918 - DNA, 120 bp, synthetic construct; identical to SEQ ID NO: 21832
  source 1..120: mol_type = other DNA

SEQ ID NO: 96919 - DNA, 120 bp, synthetic construct; identical to SEQ ID NO: 13067
  source 1..120: mol_type = other DNA

SEQ ID NO: 96920 - DNA, 120 bp, synthetic construct
  source 1..120: mol_type = other DNA
ggtgtttcgttttttgtccttgcgatagtttgctgagaatgatggtttccagcttgatccatgtccctacaaaggacatgaactcatcattttttatggctgcatagtattccatggtgt

SEQ ID NO: 96921 - DNA, 120 bp, synthetic construct
  source 1..120: mol_type = other DNA
ctttccccatttcttgtttttgtcagctttgtcaaagatcagttagttgtagatgtgtggcattatttctgagggctctgttctgttccattggtctatctctgttttggtaccagtacc

SEQ ID NO: 96922 - DNA, 120 bp, synthetic construct; identical to SEQ ID NO: 7618
  source 1..120: mol_type = other DNA

SEQ ID NO: 96923 - DNA, 120 bp, synthetic construct
  source 1..120: mol_type = other DNA
tgtgatggtggccgggaagaggcgctcctcacttcctagatgggatggcggccgggcagagatgctcctcactttccagactaggcagccaggcagaggggctcctcacatcccagacga

SEQ ID NO: 96924 - DNA, 120 bp, synthetic construct
  source 1..120: mol_type = other DNA
tgtttctccttctcctctgtctctcgctttctctgtgcctctctctctctttctgcctctctttctctctgcctgtctctctctctgtctgcctctctctctgcctccctctctctctgc

SEQ ID NO: 96925 - DNA, 120 bp, synthetic construct
  source 1..120: mol_type = other DNA
cttagtacagaacaaaatgaaaagtctcccatgtctacctctttctacacagacaccgcaaccatccgatttctcaatcttttccccacctttcccccctctctattccacaaaaccgcc

SEQ ID NO: 96926 - DNA, 120 bp, synthetic construct
  source 1..120: mol_type = other DNA
tcagagggagaccatgtaaagagggagagggagaccgtggggagagggagagggagagggggagggggagggggagggggagggggagagatgattttggtttttaaaaattagttgaga

SEQ ID NO: 96927 - DNA, 120 bp, synthetic construct; identical to SEQ ID NO: 6362
  source 1..120: mol_type = other DNA

SEQ ID NO: 96928 - DNA, 120 bp, synthetic construct
  source 1..120: mol_type = other DNA
atggttcgaaattttcggtaagtgatggtcagagacttgggtttgatttaggaatcatggtgatgcataaaactatattctgcagtaaggcctctttctgcagaatgtagtgccacgctc

SEQ ID NO: 96929 - DNA, 120 bp, synthetic construct
  source 1..120: mol_type = other DNA
tctggactccaccattagcactacttctttagtgaatataaggctctcagaagtcagaatgataccgtaaataatattgtaaattaagcccataatattagacctagttgagacctcaga

SEQ ID NO: 96930 - DNA, 120 bp, synthetic construct
  source 1..120: mol_type = other DNA
ttgtatttactaatacactactgtctatatccagtagccagactacatttctgaaaatcctggtgagctatttctcacagtgaatgggggctggcacaaaagtatggctaaatcggccca

SEQ ID NO: 96931 - DNA, 120 bp, synthetic construct
  source 1..120: mol_type = other DNA
agaaatttcttcagagaatattgagctaagctactcaattctgtggaggttatggattggagccagaggtgactagttttcaggtgtttcattccagacctctgtaagggctcacataac

SEQ ID NO: 96932 - DNA, 120 bp, synthetic construct
  source 1..120: mol_type = other DNA
tcttttcacatgaccaggaaagtttaggctcacagacactttgaagggtgagggggagcggaatttattgagtgaaaaggaaaaaaactcagcaaagccagaggggttcctgttaacagg

SEQ ID NO: 96933 - DNA, 120 bp, synthetic construct
  source 1..120: mol_type = other DNA
aaaatctcagccataaggcccattggccccctcttatgtctccagaagttaaagtctttatctcaaattgtccatggggatcagagtatcatttaacactgaattttttcctactctggc

SEQ ID NO: 96934 - DNA, 120 bp, synthetic construct
  source 1..120: mol_type = other DNA
cattttggagccaaggggaggtctgtgaggagacagtaaacaggataggaatttaaactgggaccattgtatttgctttccttccagtgataaatttccctggttagttctcgatatcta

SEQ ID NO: 96935 - DNA, 120 bp, synthetic construct
  source 1..120: mol_type = other DNA
tccatgattttcaggccttgtgttcagcctgggccataccctatatttgctcttccctcaacataaattttgtcttttttttttttttctgagatggagtttccctcttgttgcccaggc

SEQ ID NO: 96936 - DNA, 120 bp, synthetic construct
  source 1..120: mol_type = other DNA
gactactacattccaagcactgtactaagcaccgggtatatattagtgaataaaataggaaaggtccctgctatttgtggatcatatgtaatccagtgagaagagtaaaagtagcaataa

SEQ ID NO: 96937 - DNA, 120 bp, synthetic construct
  source 1..120: mol_type = other DNA
agatgttgcagtgagctgagattgcgccgctgcgctccagcctgggcgacagagcgagactccgttaaaaaaaaaaaatactgatagcagtggaagttaaatttggattgaatgtaaatc

SEQ ID NO: 96938 - DNA, 120 bp, synthetic construct
  source 1..120: mol_type = other DNA
gacaatactggttgtcagaagttgggagtgggggaaaaggggagtttttctatggatctaaactttcgattattctagatgaataaattctagagatctgctgtgcaacatagtgcctat

SEQ ID NO: 96939 - DNA, 120 bp, synthetic construct
  source 1..120: mol_type = other DNA
agtatagcagtttggagactcagcttttgtgggctccaaaataaccaggagtctgagcttgaactcaagacaaaaaattgagggcctcaaaattagttcatgagtggtttttcctgtggt

SEQ ID NO: 96940 - DNA, 120 bp, synthetic construct
  source 1..120: mol_type = other DNA
agtgagccgagatcacaccactgcactccagcctgggtgacagagtgaaactccatctgaaaaaataaataaataaataaatataataaaatatttggttcttcttagtctaaacctttt

SEQ ID NO: 96941 - DNA, 120 bp, synthetic construct
  source 1..120: mol_type = other DNA
caaattgagtgaatttgtgcttttcccacctataagcttatcaccattgcaaaaagacctccataaatcccaacagatgattaactcttcatcccaagtagcacaggctctcttgttagg

SEQ ID NO: 96942 - DNA, 120 bp, synthetic construct
  source 1..120: mol_type = other DNA
ttggatgccagaggaaatgtaattgtctgtatcaaagactgctatgagaaattcctaatgataagcgggggttctccaaaggacctccaaaaacacatcacaagagagtcaggtgttgga

SEQ ID NO: 96943 - DNA, 120 bp, synthetic construct
  source 1..120: mol_type = other DNA
attaacactttgcagagacacatgaggttatatgtgatttgctgtgctttatcaagaataagaagataaagcatttgctgtgctttatcaagaggccgaggcaggcggatcacttgagct

SEQ ID NO: 96944 - DNA, 120 bp, synthetic construct
  source 1..120: mol_type = other DNA
atttatttatttatttattgagatggagtcttgctctgttgcccaggctggagtgcattggcgtgatcttggctcactgcaacttctgcctcccaggttcaaggaattctcccgcctcag

SEQ ID NO: 96945 - DNA, 120 bp, synthetic construct
  source 1..120: mol_type = other DNA
tgacacggttttgattttatctagtaggctggctctccaagctcctaagaaaaactgaggacaggagtgaccgcaactgctatgggttgatgttcctataaaacacctgaaataagagaa

SEQ ID NO: 96946 - DNA, 120 bp, synthetic construct
  source 1..120: mol_type = other DNA
gtgatccacctgccttggcctcccaaagtgctgggattaaggcatgaaccaccacacctggcctaaattcactttttaaacaatattttaaacacttatttgggggtagttattacttat

SEQ ID NO: 96947 - DNA, 120 bp, synthetic construct
  source 1..120: mol_type = other DNA
gagtccctgttttccttttttttcttttcacccgataaaccctgctcttctcacccttcaaagtgtctgtgagcctaatatttcacggttttgtgacaaggaccccattacaacaatata

SEQ ID NO: 96948 - DNA, 120 bp, synthetic construct
  source 1..120: mol_type = other DNA
gccaaattcactcaattaatacagatagcaccaagattcagatctgaagcccactattcttactaatgcacactccttccccctaaagagaaggaaggaggacgagggaaatatataagg

SEQ ID NO: 96949 - DNA, 120 bp, synthetic construct
  source 1..120: mol_type = other DNA
ctttggtacaatttttcaacaagtaccacctgttactttggtgcttagaattaaaataggtgtaattataactgttactgccccaaatctgtgccagcccctgacatgatcctcacagga

SEQ ID NO: 96950 - DNA, 120 bp, synthetic construct
  source 1..120: mol_type = other DNA
ataaaagccaagcacagagaggttaataactgccttagttctaccagcaaaggtactcggatcccttatatttccaaggaatgaattctatttatactctttttaccaaagcaggcaggg

SEQ ID NO: 96951 - DNA, 120 bp, synthetic construct
  source 1..120: mol_type = other DNA
gtgacttggaatagacctaccaggaggtccgaaactttgtttgaagtcttcatccatagtcctcaaccctcaatggtactcatacttgtactaggcacttagtaggtgcacaataaataa

SEQ ID NO: 96952 - DNA, 120 bp, synthetic construct
  source 1..120: mol_type = other DNA
atatagatgatatttaaggccatgggactggatacaattataaagagagtaagtgtagattgaaggatgagaggagaaccaagggctagtcctggggcacaccaacattcagaagtcaag

SEQ ID NO: 96953 - DNA, 120 bp, synthetic construct
  source 1..120: mol_type = other DNA
tagaacctaatgcaataatagctgaggacttcaacgctccaccttcagcattggacaaataatccagactgaaaatcaacaaagaaacattagacttaatctgcactgtagaccaagtgg

SEQ ID NO: 96954 - DNA, 120 bp, synthetic construct
  source 1..120: mol_type = other DNA
tgtccaattaaaatgtaagtcaaatcatgtccctcctctgctccaagccttaaaaggcttcccattttatccagacaaaagtcaaagttgttgccttctccccagcttccttctgcagcc

SEQ ID NO: 96955 - DNA, 120 bp, synthetic construct
  source 1..120: mol_type = other DNA
aatttcagaatcatacagtgaggccaggacttgttgtgttgtgtagttactccacagacatgagatgtgccatccacctaaaatttggtttggttgctgacagtgagaatatctcacatg

SEQ ID NO: 96956 - DNA, 120 bp, synthetic construct
  source 1..120: mol_type = other DNA
acagtaacagaaatgaggaccattgctttgtgtgggtttgatttttaatatttttttttctttttggagatggagtcttgctctgtcacccagggtggagtgcagtggcgcgatctcact

SEQ ID NO: 96957 - DNA, 120 bp, synthetic construct
  source 1..120: mol_type = other DNA
tcttccaatcaagacagcgtcatatattttattttattttttatttttttcagacagagtcttgctctgttgctcaggctggagtgcagtggcatgatctcggctcactacaacccctgc

SEQ ID NO: 96958 - DNA, 120 bp, synthetic construct
  source 1..120: mol_type = other DNA
ggttttccctctaattgttctgttctccattttccctctttccctgatattctgaatacctctccctcatcctgtggccactttccatcggttgaaataatttttcttggcaattttttg

SEQ ID NO: 96959 - DNA, 120 bp, synthetic construct
  source 1..120: mol_type = other DNA
ttttgccctcaaaagagaagactaatgattcttttcctgaaaatgatacgccatgaagttatttcttgcagataacgtctgctttttatggcaaccaccctagtataaagaattcacctc

SEQ ID NO: 96960 - DNA, 120 bp, synthetic construct
  source 1..120: mol_type = other DNA
gcatggctcagagaagttaatggagcttagaagctgactaagtcagggtttaaatcaagctgtctttattttctaaggccgtgttgttttgattaccccataatgctgcttctattcagc

SEQ ID NO: 96961 - DNA, 120 bp, synthetic construct
  source 1..120: mol_type = other DNA
tcctcagggcacaaagagaacaagcatagtacaatatcagaagaggctggcatgggagatgggggatgtcagaaaaaggagtagagtagctattgtagaaatctgactttcttttgtgta

SEQ ID NO: 96962 - DNA, 120 bp, synthetic construct
  source 1..120: mol_type = other DNA
tccagcctgggcgacagagcgggactctgtctcaaataaataaataaaataaaatgctgatcaagtcaaacaagtttcttgttagagtggaaattgcattctggagcgaggaggcttttg

SEQ ID NO: 96963 - DNA, 120 bp, synthetic construct
  source 1..120: mol_type = other DNA
cgcttgaacccaggaggtggaggttgtagtgagctgaggtcacagcactgcaccccagcctgggtgacagagtgagactccatctcaaaaaaaaaaaaaaatatatatatatatatgtaa

SEQ ID NO: 96964 - DNA, 120 bp, synthetic construct
  source 1..120: mol_type = other DNA
gagacacaggtgtgcaaatattttctcccattccataggttgccttttcactctgttgattgtttcttttgctatgcagaagctttttagatctcatttgaagtattattacaataaaaa

SEQ ID NO: 96965 - DNA, 120 bp, synthetic construct
  source 1..120: mol_type = other DNA
ttgctcaatttcttttacctagatgtactgtaactggtaagggagtgtatgttatatccatgggaagacagccttaagatttgagttgttttcttgcttcagcatggatccctggaggcc

SEQ ID NO: 96966 - DNA, 120 bp, synthetic construct
  source 1..120: mol_type = other DNA
tggcatcaccccaaactctgcctccatctttgcctgggcttctctgtgtatcttctcctcttcttataagaatatctgtcattgaatttaggacctaccctactccatatgacttcatct

SEQ ID NO: 96967 - DNA, 120 bp, synthetic construct
  source 1..120: mol_type = other DNA
ccaacaccagcccatttgacaagaacccatctaggtttgctgagagtattatctatcttatttcctcatcattcttatgttgatataactaaaatcatctgggtagagatgccagagggc

SEQ ID NO: 96968 - DNA, 120 bp, synthetic construct
  source 1..120: mol_type = other DNA
accatccttttcatggagagagtgaccatcactctctcaaaatggtcattgagccctgcataaatcatcccatcattctcagcaaactattgcaaggacaaaaaaccaaacaccgcatgt

SEQ ID NO: 96969 - DNA, 120 bp, synthetic construct
  source 1..120: mol_type = other DNA
agccactgataccaccatcatccagaaataatggatgttaacattttatctctggaaccatctttccacttaaagtttcatgccgtgcctttcctttttctaaacagtaggaaaagagat

SEQ ID NO: 96970 - DNA, 120 bp, synthetic construct
  source 1..120: mol_type = other DNA
ttttaaacctaaaataataaacgttcctcaaagcacagctaccaagtcaacggcgtaaatagcccttgggagcttttcagaaatgcaaattctcaggcctcaacccagacctcctgaatc

SEQ ID NO: 96971 - DNA, 120 bp, synthetic construct
  source 1..120: mol_type = other DNA
ttaccacatacttagtggcttaaaacaatacaaatatattatcttacagttctggagggcagaagtctaacatgagtgtacagggctgtgttccttctggaggctccagaggagaatcca

SEQ ID NO: 96972 - DNA, 120 bp, synthetic construct
  source 1..120: mol_type = other DNA
agtttctgggggggggcagggcagaggtaagaagtaattggtacgtgaaggaagtgaggaagtgttagggaccattatggaaatgtattctttttttgttttttgagacgaaatctcact

SEQ ID NO: 96973 - DNA, 120 bp, synthetic construct
  source 1..120: mol_type = other DNA
gagagagcagccgtatttttatcttttaaattgattctgtttttttttttttgagatggagttttgctcttgttgcccaagctggagtgcaatgcagcctctgcctcccggattcaagtg

SEQ ID NO: 96974 - DNA, 120 bp, synthetic construct
  source 1..120: mol_type = other DNA
gttattatcgttttcctcattggaaattgcatatgcgactggtgctagccaaccgctggactccttttctagttcacttatatatgagaccacaaatgctgctgaggcctgtttattcat

SEQ ID NO: 96975 - DNA, 120 bp, synthetic construct
  source 1..120: mol_type = other DNA
ccacctcctctctcactccgttttctaggacaatggttctcagcctagtcttcatactggattagcttggggagctttaaaaatgttgatatgggtctcactatcatagcttctgattta

SEQ ID NO: 96976 - DNA, 120 bp, synthetic construct
  source 1..120: mol_type = other DNA
aagtctgaagtatgacctctaggattaaacacccctctgcccccaccctctccttctctctctctctttcttggggttttagacatcataaaattaaccaattcatctgatatagggaat

SEQ ID NO: 96977 - DNA, 120 bp, synthetic construct
  source 1..120: mol_type = other DNA
ataatgatccctaggtcccactcctagagattttgatttttctgatttaattgatagagaatatggcctgggcatcaagagtttaaaaaactctccaagttgccaggtgcggtggctcac

SEQ ID NO: 96978 - DNA, 120 bp, synthetic construct
  source 1..120: mol_type = other DNA
tctctaatccctggggccaagcagtccttgaattttgtaagcaccagagtttattgctttctgtgtcagttcaggtccactaagcagatttcaagaaggaattagacttgcaagagattt

SEQ ID NO: 96979 - DNA, 120 bp, synthetic construct
  source 1..120: mol_type = other DNA
tattgtctagcatggcagatgcagtattggctcgagtgtataaacaatcagatttggacaccctggctaaagaagcatccatcccaattatcaatgggctgtcagatttgtaccatccta

SEQ ID NO: 96980 - DNA, 120 bp, synthetic construct
  source 1..120: mol_type = other DNA
atgcttccccctggggctttatcattactagattataaattcattgagggaaaatgagctgtcctattcatcataatgtcccctgcaggaccttgtgcaatgccttcatataggagacac

SEQ ID NO: 96981 - DNA, 120 bp, synthetic construct
  source 1..120: mol_type = other DNA
tccaggtattctgtatttcccctttctcataccaaagaatttcagctccataaaagcagtgatttttgtctcctttgtttattgtatctccagggccaaggacagtgtctcagtgtctgg

SEQ ID NO: 96982 - DNA, 120 bp, synthetic construct
  source 1..120: mol_type = other DNA
aggccattatgatgactggcattgtgcattaccaccacaaaggctgaagaaagcaataaaatccaggcagcatagaattctcaacccatgggaatgatactgtcatttttctaacactgc

SEQ ID NO: 96983 - DNA, 120 bp, synthetic construct
  source 1..120: mol_type = other DNA
taaaattgagagtccgggcaaaccaaggtgatttggtcaccctagtcccatgtcgtgcacagtcccacagaaagtagcttcagcctgatctcacaggtgagctctggagtgtaagttatg

SEQ ID NO: 96984 - DNA, 120 bp, synthetic construct
  source 1..120: mol_type = other DNA
actcagagagatgacccttacaacagataattctcctcttttattcagcgtgaactgaaataagggtcagatccgatatgtgcttaaagcggcttttattcactttatgggaagggtgag

SEQ ID NO: 96985 - DNA, 120 bp, synthetic construct
  source 1..120: mol_type = other DNA
tacttagggagtataaaacctactctccaaagggaaggctaaattttcagggtaggaggcacctgggggaatatccaagtctcttcatttatgtttaccagtatggctgttcacaacatt

SEQ ID NO: 96986 - DNA, 120 bp, synthetic construct
  source 1..120: mol_type = other DNA
atcaactcataatcaatgctaagaacttgggaaaatgagaaggatagaggaaggtgaggataattacagtgtttgaactgacaagacttccatatggagggtcttggaggtgaggctggg

SEQ ID NO: 96987 - DNA, 120 bp, synthetic construct
  source 1..120: mol_type = other DNA
atggaaaccggaagaggtgcttccaagagttagaaagcaccatgccttatgtttgcctttatgattaaagaagtcggagatagtgaaagctggggcaattggttgtctctttaaattcca

SEQ ID NO: 96988 - DNA, 120 bp, synthetic construct
  source 1..120: mol_type = other DNA
gcagtgttttactctttgtgtgtttagagaaattaggttacttctgatgcatgcagtttcttatgatttctcccctaagaaaagccccttaactatgctcctcaggctagtccttgcctc

SEQ ID NO: 96989 - DNA, 120 bp, synthetic construct
  source 1..120: mol_type = other DNA
aggctatttctgagaatgccgattacaaaaatgctgcaatgaacttgcttatccatatttctttgtgcaaatattactggagaataagatcctgaggagaggaattttggggtgaagtgg

SEQ ID NO: 96990 - DNA, 120 bp, synthetic construct
  source 1..120: mol_type = other DNA
taacagaaaactgagttactggtgtaacttgaagtggtactctcttaaatttaaaaagaaaaaaaaaaaaaaaagacttgccagacacggtggctcatgcctgtaatcccagcactttga

SEQ ID NO: 96991 - DNA, 120 bp, synthetic construct
  source 1..120: mol_type = other DNA
ccaaaattcttaccacccttgatccgcctgagcaccagccaccagtttgccaaccattataagtcatataattcttattttagaatctctttgttcatgtttagagaagcccctaattca

SEQ ID NO: 96992 - DNA, 120 bp, synthetic construct
  source 1..120: mol_type = other DNA
ggatgcctgtaccctagctgcaagggagtttgggaaaggcagtttttagctttcagcctctggagtagagaaaagcaagctggaaaggactagcttctaattatttatctaatctataaa

SEQ ID NO: 96993 - DNA, 120 bp, synthetic construct
  source 1..120: mol_type = other DNA
tattgcaggtgccaccatcctgcagaccacattttgagtagcaaagatctagatgacaaagaaaatgtgagctctccaaccacatacctcaggaagagacacagcaaaacattttccttg

SEQ ID NO: 96994 - DNA, 120 bp, synthetic construct
  source 1..120: mol_type = other DNA
ataaattattattattattttattattatttttattttttgagacagagtctcgctctgtcacccaggttggagtacaatggcacgatctcggctcactgcaacctccgcctcctgggtt

SEQ ID NO: 96995 - DNA, 120 bp, synthetic construct
  source 1..120: mol_type = other DNA
gtattggacagcacagacatcgaacacttccatcactgccgagagctctattggacagcactactctagggaataatttccacgcatgcaacttgatttaaaatgaggatgaaataagaa

SEQ ID NO: 96996 - DNA, 120 bp, synthetic construct
  source 1..120: mol_type = other DNA
acaaagcaaaaatgagaggggctcccaggaacccattaagaagtttacagtgtcttttacctggtagacattcttatgccaaagtttgccctggctaaactagttccttcttgtcattca

SEQ ID NO: 96997 - DNA, 120 bp, synthetic construct
  source 1..120: mol_type = other DNA
tagctattgtaaataatgctgcagtgaacatggaagtgcagatatccctgcaccagattggtttcagttcctttggatacatactaggaaatgggactgctggatcatatgggagttcta

SEQ ID NO: 96998 - DNA, 120 bp, synthetic construct
  source 1..120: mol_type = other DNA
tgcatgtggatatccagttttctcaacaccatttgctgaagagactgtcctttccccattatgtgttcttggcacctctgtcaaaaagcaattgaccataaatgcatgggttcatttctg

SEQ ID NO: 96999 - DNA, 120 bp, synthetic construct
  source 1..120: mol_type = other DNA
gagtagagtcagagaaaaccagggttccaacccagttctgcactatctgtcatctcaaggattgatttcctcaactataaatgataataataaaagctaccttagaattttgttgtatta

SEQ ID NO: 97000 - DNA, 120 bp, synthetic construct
  source 1..120: mol_type = other DNA
tcatggtgtccctgctgacagattactcacctcagctccagaagcctaaattttgatgttgtgttacttgtcaagaaagaagcaatgttcttcagtaacagaatgagttggtttatgggg

SEQ ID NO: 97001 - DNA, 120 bp, synthetic construct; identical to SEQ ID NO: 16315
  source 1..120: mol_type = other DNA

SEQ ID NO: 97002 - DNA, 120 bp, synthetic construct
  source 1..120: mol_type = other DNA
tgaaccacagtttatttagccattcacctacagaaggacatttggttgcttccaagttttggcaattatggataaagctgctatcaacatccatatacaggttttcatgtagacgtaagt

SEQ ID NO: 97003 - DNA, 120 bp, synthetic construct; identical to SEQ ID NO: 16316
  source 1..120: mol_type = other DNA

SEQ ID NO: 97004 - DNA, 120 bp, synthetic construct; identical to SEQ ID NO: 16317
  source 1..120: mol_type = other DNA

SEQ ID NO: 97005 - DNA, 120 bp, synthetic construct; identical to SEQ ID NO: 16318
  source 1..120: mol_type = other DNA

SEQ ID NO: 97006 - DNA, 120 bp, synthetic construct
  source 1..120: mol_type = other DNA
ggcaattctttttttctttctcttttttgagatggagtctagctgtgttgcccaggccggaatgcagtggcacgatttcggctcactgcaacctccacctcctgggttcaagtgattctc

SEQ ID NO: 97007 - DNA, 120 bp, synthetic construct
  source 1..120: mol_type = other DNA
ggtaggagaacggcgtgaacccagggggcagagcttgcagtgagccgagatcgtgccctgcactccagcctgggtgatagagcgagactccgtctaaacaaacaaacaaacaaacactgc

SEQ ID NO: 97008 - DNA, 120 bp, synthetic construct; identical to SEQ ID NO: 16319
  source 1..120: mol_type = other DNA

SEQ ID NO: 97009 - DNA, 120 bp, synthetic construct; identical to SEQ ID NO: 16320
  source 1..120: mol_type = other DNA

SEQ ID NO: 97010 - DNA, 120 bp, synthetic construct; identical to SEQ ID NO: 16321
  source 1..120: mol_type = other DNA

SEQ ID NO: 97011 - DNA, 120 bp, synthetic construct; identical to SEQ ID NO: 16322
  source 1..120: mol_type = other DNA

SEQ ID NO: 97012 - DNA, 120 bp, synthetic construct; identical to SEQ ID NO: 16323
  source 1..120: mol_type = other DNA

SEQ ID NO: 97013 - DNA, 120 bp, synthetic construct; identical to SEQ ID NO: 16324
  source 1..120: mol_type = other DNA

SEQ ID NO: 97014 - DNA, 120 bp, synthetic construct; identical to SEQ ID NO: 16325
  source 1..120: mol_type = other DNA

SEQ ID NO: 97015 - DNA, 120 bp, synthetic construct
  source 1..120: mol_type = other DNA
ttcaagtgattcttgtgtctcagccacctgagtagctgggactacaggcacaagccaccatgcctggctaataattgtattttagtagagacggggtttgtttggccaggcttgtctcaa

SEQ ID NO: 97016 - DNA, 120 bp, synthetic construct
  source 1..120: mol_type = other DNA
aaagtatacatgaggatgtgcatagattatatgcaaatactacactattttatataagggacttgaatatccatggattttggtatctttaagaagtcctggaaccaatccttggtggag

SEQ ID NO: 97017 - DNA, 120 bp, synthetic construct
  source 1..120: mol_type = other DNA
attattatcaactgtggtcaccatgctgcacaataggtttccctatgtctgttttatttttatttctttgagacagggtctcgctctgtcacccaggctggagtacagtggcaccatctt

SEQ ID NO: 97018 - DNA, 120 bp, synthetic construct; identical to SEQ ID NO: 16326
  source 1..120: mol_type = other DNA

SEQ ID NO: 97019 - DNA, 120 bp, synthetic construct; identical to SEQ ID NO: 16327
  source 1..120: mol_type = other DNA

SEQ ID NO: 97020 - DNA, 120 bp, synthetic construct; identical to SEQ ID NO: 16328
  source 1..120: mol_type = other DNA

SEQ ID NO: 97021 - DNA, 120 bp, synthetic construct; identical to SEQ ID NO: 16329
  source 1..120: mol_type = other DNA

SEQ ID NO: 97022 - DNA, 120 bp, synthetic construct; identical to SEQ ID NO: 16330
  source 1..120: mol_type = other DNA

SEQ ID NO: 97023 - DNA, 120 bp, synthetic construct; identical to SEQ ID NO: 16331
  source 1..120: mol_type = other DNA

SEQ ID NO: 97024 - DNA, 120 bp, synthetic construct; identical to SEQ ID NO: 16332
  source 1..120: mol_type = other DNA

SEQ ID NO: 97025 - DNA, 120 bp, synthetic construct
  source 1..120: mol_type = other DNA
gagtttgataccagcctgggcaacatggtgaaaccccgtctctacaaaaaatacaaaaagccagatgtggtgatgtgcacctgtaattctagctacttgggtggctaaagcacgagaatt

SEQ ID NO: 97026 - DNA, 120 bp, synthetic construct
  source 1..120: mol_type = other DNA
tactgtgcagtgtgtgtgtgtatgtgtgtgtgtgtgtgtgtgtgtttgtttgtttttggctgaagagtccaagctcatattatatccctccctctttaaccactaccagggtggtagtgg

SEQ ID NO: 97027 - DNA, 120 bp, synthetic construct; identical to SEQ ID NO: 16333
  source 1..120: mol_type = other DNA

SEQ ID NO: 97028 - DNA, 120 bp, synthetic construct; identical to SEQ ID NO: 16334
  source 1..120: mol_type = other DNA

SEQ ID NO: 97029 - DNA, 120 bp, synthetic construct; identical to SEQ ID NO: 16335
  source 1..120: mol_type = other DNA

SEQ ID NO: 97030 - DNA, 120 bp, synthetic construct; identical to SEQ ID NO: 16336
  source 1..120: mol_type = other DNA

SEQ ID NO: 97031 - DNA, 120 bp, synthetic construct; identical to SEQ ID NO: 16337
  source 1..120: mol_type = other DNA

SEQ ID NO: 97032 - DNA, 120 bp, synthetic construct; identical to SEQ ID NO: 16338
  source 1..120: mol_type = other DNA

SEQ ID NO: 97033 - DNA, 120 bp, synthetic construct
  source 1..120: mol_type = other DNA
gggcagaggttgcagtgagctgagatcatgccagttcactccagcctgggcaaaagagcaaaactccatcacaaacaaacaaacagcaacaaaaaaaactttccattgaaatatgatatg

SEQ ID NO: 97034 - DNA, 120 bp, synthetic construct
  source 1..120: mol_type = other DNA
aacctgggagacagaggctacagtgagccgagatggcgccattgcactccatcctgggtgacagggcgagactctgtcttaaatttttttttttaatggatgttgtcaaatcccctgcag

SEQ ID NO: 97035 - DNA, 120 bp, synthetic construct
  source 1..120: mol_type = other DNA
tatttatggggtacatgagatgttttgatacaggcatgcgatgtgtaataatcacatcatgtaaaatggggtatccattacctcaaacctttatcctttgtgttacaaacaatccaattg

SEQ ID NO: 97036 - DNA, 120 bp, synthetic construct; identical to SEQ ID NO: 16339
  source 1..120: mol_type = other DNA

SEQ ID NO: 97037 - DNA, 120 bp, synthetic construct; identical to SEQ ID NO: 16340
  source 1..120: mol_type = other DNA

SEQ ID NO: 97038 - DNA, 120 bp, synthetic construct; identical to SEQ ID NO: 16341
  source 1..120: mol_type = other DNA

SEQ ID NO: 97039 - DNA, 120 bp, synthetic construct
  source 1..120: mol_type = other DNA
gaggttgcagtgagctgagattgcaccactacatctgagtctgggcaacagagtgagactctgtctccaaaaaaagaaaaattagcccccgcctggtggcacacacctgtagtcccagcc

SEQ ID NO: 97040 - DNA, 120 bp, synthetic construct
  source 1..120: mol_type = other DNA
aaaggggtctgagagtccgctgctgtcggcggcaaagaggctgcgggcctggtacatgtgcgctcggagctggaacgcctgcttctctgtggggaagggcagcctgaggttccaggatgg

SEQ ID NO: 97041 - DNA, 120 bp, synthetic construct
  source 1..120: mol_type = other DNA
ttggcgcagtccttgccagtctcctcctccacgatggagaagagcaggtccttggagggcacacgggcataggcgacacgcttgttgttgctcatcatccagatgaagatgtcgggaatg

SEQ ID NO: 97042 - DNA, 120 bp, synthetic construct; identical to SEQ ID NO: 11724
  source 1..120: mol_type = other DNA

SEQ ID NO: 97043 - DNA, 120 bp, synthetic construct; identical to SEQ ID NO: 11725
  source 1..120: mol_type = other DNA

SEQ ID NO: 97044 - DNA, 120 bp, synthetic construct
  source 1..120: mol_type = other DNA
atctcccgttattattgtgtgggagtctaagcctctttgtaggtctctaaggacttgctttatgaatctgggtgctcttgtattgggtgcatatatatttaggatagttagctcttcttg

SEQ ID NO: 97045 - DNA, 120 bp, synthetic construct
  source 1..120: mol_type = other DNA
gccttgctagattggggaagttctcctgcataatatcctgcagagtgttttccaacttggttccattctctccgtcattttcaggtacaccaatcagatgtagatttggtcttttcacat

SEQ ID NO: 97046 - DNA, 120 bp, synthetic construct
  source 1..120: mol_type = other DNA
gtcatctagcattaggtgtatctcccaatgctatcccttcccactccccccaccccacaacagtccccagagtgtgatgttccccttctgtgtccatgtgatctcattgttcaattccca

SEQ ID NO: 97047 - DNA, 120 bp, synthetic construct
  source 1..120: mol_type = other DNA
ggtttttatggttttaggtctaacgtttaagtctttaatccatcttgaattgacttttgtgtaaggtgtaaggaagggatccagtatcagctttctacatatggctagccagttttccca

SEQ ID NO: 97048 - DNA, 120 bp, synthetic construct
  source 1..120: mol_type = other DNA
taattgccctggccagaacttccaacaccctgttgaataggagcggtgagagagggcatccctgtcttgtgccagttttcaaagggaatgcttccagtttttgcccattcagtatgatat

SEQ ID NO: 97049 - DNA, 120 bp, synthetic construct
  source 1..120: mol_type = other DNA
ttgtctattttgttgatcctttcaaaaaaccagctcctggattcattaattttttgaagggttttttgtgtctctatttccttcagttctgctctgattttagttatttcttgccttctg

SEQ ID NO: 97050 - DNA, 120 bp, synthetic construct
  source 1..120: mol_type = other DNA
gaatacagcacactgatgggtcttgactctttatccaatttcccagtctgtgtcttaattggagcatttagtccatttacatttaaagttaatattgttatgtgtgaatttgatcctgtc

SEQ ID NO: 97051 - DNA, 120 bp, synthetic construct
  source 1..120: mol_type = other DNA
cttggaggctttgctcatttgtttttattctgttttctctaaacttcccttctcacttcatttcattcatttcatcttctgttgctgataccctttcttccagttgatcgcatcagctcc

SEQ ID NO: 97052 - DNA, 120 bp, synthetic construct
  source 1..120: mol_type = other DNA
tgctagcaatcatcgagactccatgggcgtaggaccctccaagccaggtgtgggatataatcttgtggtgcaccgttttttaagcccgtcggaaaagcgcagtattcgggtgggagtgac

SEQ ID NO: 97053 - DNA, 120 bp, synthetic construct; identical to SEQ ID NO: 13084
  source 1..120: mol_type = other DNA

SEQ ID NO: 97054 - DNA, 120 bp, synthetic construct
  source 1..120: mol_type = other DNA
aagtgtctgttctttgcccactttttgatggggttgtttgtttttttcttgtaaatttgtttgagttcattgtagattctggatattagccctttgtcagatgagtaggttgcaaaaatt

SEQ ID NO: 97055 - DNA, 120 bp, synthetic construct
  source 1..120: mol_type = other DNA
tcattggtagcttgatggggatggcattgaatctgtaaattaccttgggcagtatggccattttcacgatattgattcttcctacccatgagcatggaatgttcttccatttgtttgtat

SEQ ID NO: 97056 - DNA, 120 bp, synthetic construct
  source 1..120: mol_type = other DNA
tcttttttggttgtgtctcttcccggctttggtatcagaatgatgctggcctcataaaatgagttagggaggattccctctttttctattgattggaatagtttcagaaggaatggtacc

SEQ ID NO: 97057 - DNA, 120 bp, synthetic construct
  source 1..120: mol_type = other DNA
cttggtgcagagctgagttcaattcctgggtatccttgttgactttctgtctcgttgatctgtgtaatgttgacagtggggtgttaaagtctcccattattaatgtgtgggagtctaagt

SEQ ID NO: 97058 - DNA, 120 bp, synthetic construct
  source 1..120: mol_type = other DNA
tctcctggataatatcctgcagagtgttttccaacttggttccattctccccatcactttcaggtacacgaatcagatgtagatttggtcttttcacatagtcccatatttcttggaggc

SEQ ID NO: 97059 - DNA, 120 bp, synthetic construct
  source 1..120: mol_type = other DNA
cctcccccagcctcgctgccgccttgcagtttgatctcagactgctgtactagcaatcagtgagactccgtgggcgtaggaccctccgaggcaggtgtgggatatagtctcgtggtgcgc

SEQ ID NO: 97060 - DNA, 120 bp, synthetic construct; identical to SEQ ID NO: 13085
  source 1..120: mol_type = other DNA

SEQ ID NO: 97061 - DNA, 120 bp, synthetic construct; identical to SEQ ID NO: 13086
  source 1..120: mol_type = other DNA

SEQ ID NO: 97062 - DNA, 120 bp, synthetic construct
  source 1..120: mol_type = other DNA
catggcccgttctcaatgagctgttgggtacacctcccagacggggtggtggccgggcagaggggctcctcacttcccagtaggcgcggccgggcagaggcacccctcacctcccggacg

SEQ ID NO: 97063 - DNA, 120 bp, synthetic construct
  source 1..120: mol_type = other DNA
cgaatccccgtctccaccaaaaaaatacaaaaaccagtcaggtgtggcggcgcgcgcctgcaatcgcaggcactcggcaagctgaggcaggagaatcaggcagggaggttgcagtgagcc

SEQ ID NO: 97064 - DNA, 120 bp, synthetic construct; identical to SEQ ID NO: 13087
  source 1..120: mol_type = other DNA

SEQ ID NO: 97065 - DNA, 120 bp, synthetic construct; identical to SEQ ID NO: 24851
  source 1..120: mol_type = other DNA

SEQ ID NO: 97066 - DNA, 120 bp, synthetic construct
  source 1..120: mol_type = other DNA
gcttgcagtgatccgagaccatgccactgcactccagcctgggcgacgagcgagactccgtctaaaaaaaaaaaaaaatctgagaaaaactatatcgtagcattaattttactgtcacag

SEQ ID NO: 97067 - DNA, 120 bp, synthetic construct; identical to SEQ ID NO: 5410
  source 1..120: mol_type = other DNA

SEQ ID NO: 97068 - DNA, 120 bp, synthetic construct
  source 1..120: mol_type = other DNA
agagggagactccatctcaaaaaaaaaaaaaaaaaaaaaaaaaaaaaaaaaaaaaagaatgcgtgtcctttggacacctctgggttcccaggccagctctggctaatggccctgagcatg

SEQ ID NO: 97069 - DNA, 120 bp, synthetic construct; identical to SEQ ID NO: 14995
  source 1..120: mol_type = other DNA

SEQ ID NO: 97070 - DNA, 120 bp, synthetic construct
  source 1..120: mol_type = other DNA
tgttagccacctaaatgtcttcttttgagaagtgtctgttcatatcctttgcccactttttaatgggtttgtttctttcttgtaaatttgttccttgtagattctggatattagaccttt

SEQ ID NO: 97071 - DNA, 120 bp, synthetic construct; identical to SEQ ID NO: 14996
  source 1..120: mol_type = other DNA

SEQ ID NO: 97072 - DNA, 120 bp, synthetic construct; identical to SEQ ID NO: 14997
  source 1..120: mol_type = other DNA

SEQ ID NO: 97073 - DNA, 120 bp, synthetic construct
  source 1..120: mol_type = other DNA
tggaacagtttggagggctcagaagacaggaagatgtgggaaactttggaacttcctagacttgctgagtggctttgatcaaaatgctgacagtgagatggacaatcaagtccaggctga

SEQ ID NO: 97074 - DNA, 120 bp, synthetic construct; identical to SEQ ID NO: 14998
  source 1..120: mol_type = other DNA

SEQ ID NO: 97075 - DNA, 120 bp, synthetic construct; identical to SEQ ID NO: 14999
  source 1..120: mol_type = other DNA

SEQ ID NO: 97076 - DNA, 120 bp, synthetic construct; identical to SEQ ID NO: 15000
  source 1..120: mol_type = other DNA

SEQ ID NO: 97077 - DNA, 120 bp, synthetic construct; identical to SEQ ID NO: 15001
  source 1..120: mol_type = other DNA

SEQ ID NO: 97078 - DNA, 120 bp, synthetic construct; identical to SEQ ID NO: 15002
  source 1..120: mol_type = other DNA

SEQ ID NO: 97079 - DNA, 120 bp, synthetic construct
  source 1..120: mol_type = other DNA
aaggcgggtggatcatgacgtcaggagatcaagactatcctggctaacacggtgaaaccctgtctctactgaaaaaaaaaaaacaaaaaacaaaaaaattagccgggcgtggtggcgggc

SEQ ID NO: 97080 - DNA, 120 bp, synthetic construct
  source 1..120: mol_type = other DNA
acctgtaatcgcagcacttttagaggtcaaggcaggtggatcacctgaggtcaagagattgagaccatcctagccaacatggtgaaatctcatctctactaaaaatacaaaaattagctg

SEQ ID NO: 97081 - DNA, 120 bp, synthetic construct
  source 1..120: mol_type = other DNA
gcaacagatgacaaattttgcactggtataaatcaagtcacttgtcaatcactacagttgttttttttttccttttaaagaataatgcctattattccaatctcaaattctaatgcagta

SEQ ID NO: 97082 - DNA, 120 bp, synthetic construct; identical to SEQ ID NO: 15005
  source 1..120: mol_type = other DNA

SEQ ID NO: 97083 - DNA, 120 bp, synthetic construct; identical to SEQ ID NO: 15006
  source 1..120: mol_type = other DNA

SEQ ID NO: 97084 - DNA, 120 bp, synthetic construct
  source 1..120: mol_type = other DNA
tggaggttcctcaagaaactaaaaatagaaggaccacatatccaggaatcccacggctgagtatatattaaaaggaaaggaaatcagtatattgaagaaatatctgcactcccatgttta

SEQ ID NO: 97085 - DNA, 120 bp, synthetic construct; identical to SEQ ID NO: 15007
  source 1..120: mol_type = other DNA

SEQ ID NO: 97086 - DNA, 120 bp, synthetic construct; identical to SEQ ID NO: 15008
  source 1..120: mol_type = other DNA

SEQ ID NO: 97087 - DNA, 120 bp, synthetic construct
  source 1..120: mol_type = other DNA
tccgcccacctcggcctcccaaagtgctgggattacaggcgtgagccaccgccccggccatgttttacattttctttatccattcatctttggatgagcacagggtggttccatgtcttg

SEQ ID NO: 97088 - DNA, 120 bp, synthetic construct; identical to SEQ ID NO: 15009
  source 1..120: mol_type = other DNA

SEQ ID NO: 97089 - DNA, 120 bp, synthetic construct; identical to SEQ ID NO: 15010
  source 1..120: mol_type = other DNA

SEQ ID NO: 97090 - DNA, 120 bp, synthetic construct; identical to SEQ ID NO: 15011
  source 1..120: mol_type = other DNA

SEQ ID NO: 97091 - DNA, 120 bp, synthetic construct
  source 1..120: mol_type = other DNA
aagtacgagacattctgcatcaaactatgaaaggcagtgattaatacttttttttttttttttgagatggagtctcgctttgccacccaggctggagtgcagtggtgcgatctcagctca

SEQ ID NO: 97092 - DNA, 120 bp, synthetic construct; identical to SEQ ID NO: 15012
  source 1..120: mol_type = other DNA

SEQ ID NO: 97093 - DNA, 120 bp, synthetic construct; identical to SEQ ID NO: 15013
  source 1..120: mol_type = other DNA

SEQ ID NO: 97094 - DNA, 120 bp, synthetic construct; identical to SEQ ID NO: 15014
  source 1..120: mol_type = other DNA

SEQ ID NO: 97095 - DNA, 120 bp, synthetic construct; identical to SEQ ID NO: 15015
  source 1..120: mol_type = other DNA

SEQ ID NO: 97096 - DNA, 120 bp, synthetic construct; identical to SEQ ID NO: 15016
  source 1..120: mol_type = other DNA

SEQ ID NO: 97097 - DNA, 120 bp, synthetic construct; identical to SEQ ID NO: 15017
  source 1..120: mol_type = other DNA

SEQ ID NO: 97098 - DNA, 120 bp, synthetic construct; identical to SEQ ID NO: 15018
  source 1..120: mol_type = other DNA

SEQ ID NO: 97099 - DNA, 120 bp, synthetic construct; identical to SEQ ID NO: 15019
  source 1..120: mol_type = other DNA

SEQ ID NO: 97100 - DNA, 120 bp, synthetic construct; identical to SEQ ID NO: 15020
  source 1..120: mol_type = other DNA

SEQ ID NO: 97101 - DNA, 120 bp, synthetic construct; identical to SEQ ID NO: 15021
  source 1..120: mol_type = other DNA

SEQ ID NO: 97102 - DNA, 120 bp, synthetic construct; identical to SEQ ID NO: 15022
  source 1..120: mol_type = other DNA

SEQ ID NO: 97103 - DNA, 120 bp, synthetic construct; identical to SEQ ID NO: 15023
  source 1..120: mol_type = other DNA

SEQ ID NO: 97104 - DNA, 120 bp, synthetic construct; identical to SEQ ID NO: 15024
  source 1..120: mol_type = other DNA

SEQ ID NO: 97105 - DNA, 120 bp, synthetic construct; identical to SEQ ID NO: 15025
  source 1..120: mol_type = other DNA

SEQ ID NO: 97106 - DNA, 120 bp, synthetic construct; identical to SEQ ID NO: 15026
  source 1..120: mol_type = other DNA

SEQ ID NO: 97107 - DNA, 120 bp, synthetic construct; identical to SEQ ID NO: 15027
  source 1..120: mol_type = other DNA

SEQ ID NO: 97108 - DNA, 120 bp, synthetic construct; identical to SEQ ID NO: 15028
  source 1..120: mol_type = other DNA

SEQ ID NO: 97109 - DNA, 120 bp, synthetic construct; identical to SEQ ID NO: 15029
  source 1..120: mol_type = other DNA

SEQ ID NO: 97110 - DNA, 120 bp, synthetic construct; identical to SEQ ID NO: 15030
  source 1..120: mol_type = other DNA

SEQ ID NO: 97111 - DNA, 120 bp, synthetic construct; identical to SEQ ID NO: 15031
  source 1..120: mol_type = other DNA

SEQ ID NO: 97112 - DNA, 120 bp, synthetic construct; identical to SEQ ID NO: 15032
  source 1..120: mol_type = other DNA

SEQ ID NO: 97113 - DNA, 120 bp, synthetic construct; identical to SEQ ID NO: 15033
  source 1..120: mol_type = other DNA

SEQ ID NO: 97114 - DNA, 120 bp, synthetic construct; identical to SEQ ID NO: 15034
  source 1..120: mol_type = other DNA

SEQ ID NO: 97115 - DNA, 120 bp, synthetic construct; identical to SEQ ID NO: 15035
  source 1..120: mol_type = other DNA

SEQ ID NO: 97116 - DNA, 120 bp, synthetic construct; identical to SEQ ID NO: 15036
  source 1..120: mol_type = other DNA

SEQ ID NO: 97117 - DNA, 120 bp, synthetic construct
  source 1..120: mol_type = other DNA
tttttccccttcccctagaggagcgactggcaggagtggagcttagtcttttttttttcccccaagaagaggggaaaggggagttttgaatatatatatgtatgtatatctatatgtaac

SEQ ID NO: 97118 - DNA, 120 bp, synthetic construct
  source 1..120: mol_type = other DNA
acacacatatatatgtatatctatatgtaacacacatatatatgtatatctatatgtaacatacatatatatgtatatatattttactatcggaggtttgtgtgaggttcaactcctccc

SEQ ID NO: 97119 - DNA, 120 bp, synthetic construct
  source 1..120: mol_type = other DNA
caaccttgtagtatggtttgaagtcaggtagggtgatgcctccagctttgttcttttggcttaggattgacttggcaatgcgggctcttttttggttccatatcaactttaaagtagttt

SEQ ID NO: 97120 - DNA, 120 bp, synthetic construct
  source 1..120: mol_type = other DNA
cttttacctctggtagaattcggctgtgaatctgtctggtcctggactttttttggttggtaggctattcattattgcctcaatttcagagactgttattggtctattcagagattcaac

SEQ ID NO: 97121 - DNA, 120 bp, synthetic construct
  source 1..120: mol_type = other DNA
taactttctgtttcgttgatctgtctatcgttgacagtggggtgttaaagtctcccattattattgtgtgggagtctaagtctctttgtaggtctctaaggacttgctttatgaatctgg

SEQ ID NO: 97122 - DNA, 120 bp, synthetic construct; identical to SEQ ID NO: 14984
  source 1..120: mol_type = other DNA

SEQ ID NO: 97123 - DNA, 120 bp, synthetic construct
  source 1..120: mol_type = other DNA
cctctggtagaattcggctgtgaatccatctggtcctggacgtttttggttggtaagctattgattattgctaaaatttcagagctcgttattggtctattcagagattcaacttcttcc

SEQ ID NO: 97124 - DNA, 120 bp, synthetic construct
  source 1..120: mol_type = other DNA
gtctaacattgacagtggggtgttaaagtctcccattattaatgtgtgggagtctaagtctctttgtaggtcactcaggacttgctttatgaatcttggtgctcctgtattgggtgcata

SEQ ID NO: 97125 - DNA, 120 bp, synthetic construct
  source 1..120: mol_type = other DNA
ttggagctgctcttctcgaggagtatctttgtggcgttctctgtatttcctgaatctgaatgtttgcctgccttgctagattggggaagttctcctggaaaatatcctgcagagtgtttt

SEQ ID NO: 97126 - DNA, 120 bp, synthetic construct
  source 1..120: mol_type = other DNA
ctcagctgcaggtctgttggagtttgctagaggtccactccagactctgtttgcctcagtatcagcagcggtggctgcagaacagcggtgcctgtagaacagcggtggctgtagaacagc

SEQ ID NO: 97127 - DNA, 120 bp, synthetic construct
  source 1..120: mol_type = other DNA
gaatggcgtgaacccgggaggcagagcttgcagtgagacgagctcgcgccaccgcactccagcctctgtctaaaaaaaaaaaagattcctcagctgctttgtaatccccactgctcactg

SEQ ID NO: 97128 - DNA, 120 bp, synthetic construct
  source 1..120: mol_type = other DNA
gattgttcatggggtatcatgtctagaaaatcttttcctaagacaaggttaaaaagattttctcatgaattaatggcatttgagcgacctggatgagactggagactattattctaagtg

SEQ ID NO: 97129 - DNA, 120 bp, synthetic construct; identical to SEQ ID NO: 14986
  source 1..120: mol_type = other DNA

SEQ ID NO: 97130 - DNA, 120 bp, synthetic construct; identical to SEQ ID NO: 14987
  source 1..120: mol_type = other DNA

SEQ ID NO: 97131 - DNA, 120 bp, synthetic construct
  source 1..120: mol_type = other DNA
tctctctcttcctttcctttccctttctttccttctttctttttctttcttttttgttttttttttttgagacagagtctcactctgttgcccaggctggagtacaatggtgtgatcttg

SEQ ID NO: 97132 - DNA, 120 bp, synthetic construct; identical to SEQ ID NO: 14988
  source 1..120: mol_type = other DNA

SEQ ID NO: 97133 - DNA, 120 bp, synthetic construct; identical to SEQ ID NO: 14989
  source 1..120: mol_type = other DNA

SEQ ID NO: 97134 - DNA, 120 bp, synthetic construct; identical to SEQ ID NO: 14990
  source 1..120: mol_type = other DNA

SEQ ID NO: 97135 - DNA, 120 bp, synthetic construct
  source 1..120: mol_type = other DNA
ttaacatgtatttagcctagaaaaattaaaactaggccaggcacagtggctcacacctataatcccagccctttgggaggctgaggcgggcagatcacgaggtcaggagctcaagaccag

SEQ ID NO: 97136 - DNA, 120 bp, synthetic construct; identical to SEQ ID NO: 14991
  source 1..120: mol_type = other DNA

SEQ ID NO: 97137 - DNA, 120 bp, synthetic construct; identical to SEQ ID NO: 14992
  source 1..120: mol_type = other DNA

SEQ ID NO: 97138 - DNA, 120 bp, synthetic construct; identical to SEQ ID NO: 14993
  source 1..120: mol_type = other DNA

SEQ ID NO: 97139 - DNA, 120 bp, synthetic construct; identical to SEQ ID NO: 14994
  source 1..120: mol_type = other DNA

SEQ ID NO: 97140 - DNA, 120 bp, synthetic construct
  source 1..120: mol_type = other DNA
ggtagaattcggctgtgaatccatctggtcttggactttttatggttggtatgctattattgcctcaatttcagaggtgctattggtctattcaggggttcaaattcttcctggtttggt

SEQ ID NO: 97141 - DNA, 120 bp, synthetic construct
  source 1..120: mol_type = other DNA
gtggggtgttaaagtctcccattattattgtgtgggagtctaagtctctctgtaggtctctaaggacttgctttatgaatctcggtgctcctgtattgggtgcatatatatttaagatag

SEQ ID NO: 97142 - DNA, 120 bp, synthetic construct
  source 1..120: mol_type = other DNA
ctccagcctgggtgacagggtgagaccctgttaaaaaaaaaaagaagaagaagaaggtggggggcggggggagggagggaaatttgtcttttataaaattatataattcagttaaaagat

SEQ ID NO: 97143 - DNA, 120 bp, synthetic construct; identical to SEQ ID NO: 26328
  source 1..120: mol_type = other DNA

SEQ ID NO: 97144 - DNA, 120 bp, synthetic construct; identical to SEQ ID NO: 12792
  source 1..120: mol_type = other DNA

SEQ ID NO: 97145 - DNA, 120 bp, synthetic construct
  source 1..120: mol_type = other DNA
tcaaacaaatttacaagaaaaaaacaaagaaccccatcaaaaaatgggcaaaggacatgaacagacacttctcaaaagaagacatttatgcagccaaaaaacacatgaaaaaatgctcac

SEQ ID NO: 97146 - DNA, 120 bp, synthetic construct; identical to SEQ ID NO: 12793
  source 1..120: mol_type = other DNA

SEQ ID NO: 97147 - DNA, 120 bp, synthetic construct
  source 1..120: mol_type = other DNA
ggacattccactgtcaacattagacacatcaacgagacagaaaggtaacaacgctatccaggaactgaactcaactctgcaccaagcggacctaatagatactacagaactctccacccc

SEQ ID NO: 97148 - DNA, 120 bp, synthetic construct
  source 1..120: mol_type = other DNA
ctaccagaggtacaaagaggagctggtaccattccttccaaaactactcgaatcaatagaaaaagaaggaatcctccctaactcattttatgaggccagcattatcctgacaccaaagcc

SEQ ID NO: 97149 - DNA, 120 bp, synthetic construct
  source 1..120: mol_type = other DNA
cccctgcattccctccctaattgcactcattttctgccttccaatccagaagtcttctctttatttatttatgtatgtatgtatgtatttatttatttattattattatactttaagttt

SEQ ID NO: 97150 - DNA, 120 bp, synthetic construct
  source 1..120: mol_type = other DNA
aaatttgtttttgaaaggatcaacaaaactgatagaccgctagcaagactaataaagaaaaaaagagagaagaatcaaatagacgcaataaaaaatgataaaggggatatcaccaccgat

SEQ ID NO: 97151 - DNA, 120 bp, synthetic construct
  source 1..120: mol_type = other DNA
ttctggccagggcaattaggcaggagaaggaaatcaagggtattcaattaggaaaagaggaagtcaaattgtccctgtttgcagacgacatgattgtatatctagaaaaccccactgtct

SEQ ID NO: 97152 - DNA, 120 bp, synthetic construct
  source 1..120: mol_type = other DNA
ttcgcaacctactcttcggacaaagggctaatatccagaatctaaaaaacacattaataaaagctttgaatccacatagatcactctcaacagaaagatgtctccagatggaagatgcag

SEQ ID NO: 97153 - DNA, 120 bp, synthetic construct; identical to SEQ ID NO: 6258
  source 1..120: mol_type = other DNA

SEQ ID NO: 97154 - DNA, 120 bp, synthetic construct
  source 1..120: mol_type = other DNA
caggtgatctgcccgcctcggcctcccaaagttctgggattacagatgtgagccaccactccctgatctaaaccaggtatttcttttttttttttttttatgctgtttattttttaattt

SEQ ID NO: 97155 - DNA, 120 bp, synthetic construct
  source 1..120: mol_type = other DNA
agcacctcttgtttcctgactttttaatgattgccattctaactggtgtgagatggtatctcattgtggttttgatttgcatttctctgatggccagtgatgatgagcattttttcatgt

SEQ ID NO: 97156 - DNA, 120 bp, synthetic construct
  source 1..120: mol_type = other DNA
ccaattctgtgaagaaagtcattggtagcttgatagggatggcattgaatctgtaaattaccttgggcagtatggccattttcacgatattgattcttcctacccatgagcatggaatgt

SEQ ID NO: 97157 - DNA, 120 bp, synthetic construct; identical to SEQ ID NO: 31715
  source 1..120: mol_type = other DNA

SEQ ID NO: 97158 - DNA, 120 bp, synthetic construct
  source 1..120: mol_type = other DNA
ggacctggagcttttgagataagtacacattttgagataagtacatagttagataagcttgccctgtggggagcatctggtgaagggaaggtaaagggtatcattgcgtttctaaagaac

SEQ ID NO: 97159 - DNA, 120 bp, synthetic construct; identical to SEQ ID NO: 31716
  source 1..120: mol_type = other DNA

SEQ ID NO: 97160 - DNA, 120 bp, synthetic construct; identical to SEQ ID NO: 24202
  source 1..120: mol_type = other DNA

SEQ ID NO: 97161 - DNA, 120 bp, synthetic construct
  source 1..120: mol_type = other DNA
cctcattctgggaaagttgtactcaactcttgccccaactcctttttcttttttttttttgtgagacggagtctcgctctgtcgccaggctggagtgcagtagtgtaatcacaactcact

SEQ ID NO: 97162 - DNA, 120 bp, synthetic construct; identical to SEQ ID NO: 17367
  source 1..120: mol_type = other DNA

SEQ ID NO: 97163 - DNA, 120 bp, synthetic construct
  source 1..120: mol_type = other DNA
ggggctgctggtccgccctctgggactacgagacgcccaaggtgatcgtggtgaggaaccggcgcctgggggtcctgtaccgcgccgtgcagctgctcatcctgctctacttcgtgtggt

SEQ ID NO: 97164 - DNA, 120 bp, synthetic construct
  source 1..120: mol_type = other DNA
aaagcactgggattacaggtgtgagtcactgcgcccggcctaatcctgccctcttttagcagaagtagagatagagactttagaagttcagggactcacctgggatcccagggatatccc

SEQ ID NO: 97165 - DNA, 120 bp, synthetic construct
  source 1..120: mol_type = other DNA
aagatagagacaaggccagtgagcgaggcaggttggacagcggggcccccagggaccctcccagcgtccccctcccagcctgagaacaggagaacgcacagcggggcccccagggaccct

SEQ ID NO: 97166 - DNA, 120 bp, synthetic construct
  source 1..120: mol_type = other DNA
aacaggagaacgcacagctgggcccccagggaccctcccaacgtccccctcccagcctgagaacaggagaacacacagctgggcccccagggaccctcccaacgtcccccgccccccgcc

SEQ ID NO: 97167 - DNA, 120 bp, synthetic construct
  source 1..120: mol_type = other DNA
cctcagaacaggagaaggcacacgcaccttgccgttcaccatcacgtcaaagcggatcccgtaggctttcatcagggtgcggaactccaccccggctgcgtctcggtaatatctggcaaa

SEQ ID NO: 97168 - DNA, 120 bp, synthetic construct; identical to SEQ ID NO: 17364
  source 1..120: mol_type = other DNA

SEQ ID NO: 97169 - DNA, 120 bp, synthetic construct; identical to SEQ ID NO: 17362
  source 1..120: mol_type = other DNA

SEQ ID NO: 97170 - DNA, 120 bp, synthetic construct; identical to SEQ ID NO: 17363
  source 1..120: mol_type = other DNA

SEQ ID NO: 97171 - DNA, 120 bp, synthetic construct
  source 1..120: mol_type = other DNA
ctgagctgcacgtttctaaggtagggaggaggaagatgcccccaattaagttgatctttgagccaaggaggctggggagcagcctccccaagctagagccctgcagagcgagtttccctt

SEQ ID NO: 97172 - DNA, 120 bp, synthetic construct
  source 1..120: mol_type = other DNA
ctgtgtccccttggtgctgattctgggctgttacggattaattgtgagagctttgatttacaaagatctggacaactctcctctgaggagaaaatcgatttacctggtaatcattgtact

SEQ ID NO: 97173 - DNA, 120 bp, synthetic construct
  source 1..120: mol_type = other DNA
cactaaactcatcagttcatccggcatcagatcaatggatctctgagcggggtgtttttttcagtgtcttataagcatagatgatagttgactgagtttctttagggcattgaatagaca

SEQ ID NO: 97174 - DNA, 120 bp, synthetic construct
  source 1..120: mol_type = other DNA
gtttgcaactgatggtggcataacttgtttgaaagcactttacaagtagagcaacatggggctgtatgttaaggcaagaaagaaccttagtgccccgtggaccataatgacaggaaattt

SEQ ID NO: 97175 - DNA, 120 bp, synthetic construct
  source 1..120: mol_type = other DNA
ctaagaagaaatacagcatgcaagttggaattcagagttaaaaccatgatgttgccgctcagccagctatgtgactgttgaccctttcaagaacacacatggatttaaaagttggatgac

SEQ ID NO: 97176 - DNA, 120 bp, synthetic construct
  source 1..120: mol_type = other DNA
gatctgtcatgttttagcagtcaagtgggatgggcattatataaacaacgttacaatgtaaggaaaatctttaaggagatggggagagaaaaaggcagctggtataatcggttactgctg

SEQ ID NO: 97177 - DNA, 120 bp, synthetic construct; identical to SEQ ID NO: 34254
  source 1..120: mol_type = other DNA

SEQ ID NO: 97178 - DNA, 120 bp, synthetic construct; identical to SEQ ID NO: 33339
  source 1..120: mol_type = other DNA

SEQ ID NO: 97179 - DNA, 120 bp, synthetic construct
  source 1..120: mol_type = other DNA
actcatccatccatccatctatccatccatccatccatccatccatccatccacccacccatccatccactcattcattcacctgtctacagtgagggtctgtgtccattcagctgctca

SEQ ID NO: 97180 - DNA, 120 bp, synthetic construct
  source 1..120: mol_type = other DNA
atactgcttgggtgacggataccctgaaatctcacacatcaccactaaagaacttcctcgtgtaaccaaatggcacgtgtttccccaaaacctatggaagtaaaaagtgtaaaacaaacc

SEQ ID NO: 97181 - DNA, 120 bp, synthetic construct
  source 1..120: mol_type = other DNA
ctgcctcctttcttcaccctgtgtcattcttttcttctttcctgtcttctcccctttcttcttccttcctcctctctccttccttctcttcttccctccttccttccttccttccttcct

SEQ ID NO: 97182 - DNA, 120 bp, synthetic construct
  source 1..120: mol_type = other DNA
gatggaaattttagaaaatcagcacaacggttgttcttggcggtgtctggcctgcagaggtggctgtccagaaatttctgggcactgaattgtctgaagcaacggacagaccacaggtgg

SEQ ID NO: 97183 - DNA, 120 bp, synthetic construct
  source 1..120: mol_type = other DNA
tctgcgtctatgtcattagtgaagtcaaaatgtggtcataatagagtagggagaggccctaataaaattcactggcgtccttaggagaaagagaaatttaggcacagacacagagagaag

SEQ ID NO: 97184 - DNA, 120 bp, synthetic construct
  source 1..120: mol_type = other DNA
tagatgagtaggtagatggatgggtggatggatgggtgggtggatggatagatgagtaggtagatggatagatgagtaggtagatgggtgcgtggacggatgggtgaatagatggatgag

SEQ ID NO: 97185 - DNA, 120 bp, synthetic construct
  source 1..120: mol_type = other DNA
atcagtgtttagataggtggatgtgtgggtggatgaatggatgggttgatgggtagatggatgggtgggtgtatggatgggtggatgaatagatgagtaggtggatgggtgggtggatgg

SEQ ID NO: 97186 - DNA, 120 bp, synthetic construct
  source 1..120: mol_type = other DNA
tgggtgggtagatgggtggatggatgaatagatgatgcatggatggatgcttctatccaccatgaaatgccgattgtttccagaaaatcaccagaagctgcagcaaagcttggaacagat

SEQ ID NO: 97187 - DNA, 120 bp, synthetic construct; identical to SEQ ID NO: 33333
  source 1..120: mol_type = other DNA

SEQ ID NO: 97188 - DNA, 120 bp, synthetic construct
  source 1..120: mol_type = other DNA
tgtagagagaatgaatgaatgatacccagatattccccacaaatgtggggggaattaatgaatgacatccggggattccccacaaatgtgaagggaattaatgaatgacacacagagatt

SEQ ID NO: 97189 - DNA, 120 bp, synthetic construct
  source 1..120: mol_type = other DNA
atattccctgcaaatgtggagggaacgaatgaatgacatccagggcttccctgcaaatgtggagggaacgaatgaatgataccccagattcacttctgcaaatgtagagagaatgaatga

SEQ ID NO: 97190 - DNA, 120 bp, synthetic construct; identical to SEQ ID NO: 33334
  source 1..120: mol_type = other DNA

SEQ ID NO: 97191 - DNA, 120 bp, synthetic construct; identical to SEQ ID NO: 33335
  source 1..120: mol_type = other DNA

SEQ ID NO: 97192 - DNA, 120 bp, synthetic construct
  source 1..120: mol_type = other DNA
ccatgtatgtgtctatcatctatgcatccatccatccatccctccatccatccattcatccatccatccatccatccatccatctattctatcatctatgtatctatgtatccatccatt

SEQ ID NO: 97193 - DNA, 120 bp, synthetic construct; identical to SEQ ID NO: 33336
  source 1..120: mol_type = other DNA

SEQ ID NO: 97194 - DNA, 120 bp, synthetic construct
  source 1..120: mol_type = other DNA
acccacctcggcctcccaaagtgctgggattacaggcatcagccaccgcgcccaacctgcctttttcttttcttttattattattattttttaaagataaaaacaactttgtagagatag

SEQ ID NO: 97195 - DNA, 120 bp, synthetic construct; identical to SEQ ID NO: 33337
  source 1..120: mol_type = other DNA

SEQ ID NO: 97196 - DNA, 120 bp, synthetic construct
  source 1..120: mol_type = other DNA
gaattgcttgaacctgggaggcggaggttgcagtgagccgagattttgtcactgcactccagcctgggcaacaacagcgaaactccatctcaaaaaaaaataaaaaaataaataaaaata

SEQ ID NO: 97197 - DNA, 120 bp, synthetic construct
  source 1..120: mol_type = other DNA
caaatcttatcttgtagttcccataattcccatgtgttgtggaagggacctggtgggagatgactgaataatgggggtggatctttcccgtgctgttctcataatactgaataagtctca

SEQ ID NO: 97198 - DNA, 120 bp, synthetic construct
  source 1..120: mol_type = other DNA
attaagggcggtgcaagatgtgctttgttaaacagatgcttgaaggcagcatgctcgttaagagtcatcaccactccctaatcttaagtacccagggacacaaacactgcggaaggccgc

SEQ ID NO: 97199 - DNA, 120 bp, synthetic construct; identical to SEQ ID NO: 24964
  source 1..120: mol_type = other DNA

SEQ ID NO: 97200 - DNA, 120 bp, synthetic construct; identical to SEQ ID NO: 10839
  source 1..120: mol_type = other DNA

SEQ ID NO: 97201 - DNA, 120 bp, synthetic construct
  source 1..120: mol_type = other DNA
actgtcaatatgagatcaacaagacagaaggttaacaagaatatccaggactggaactcagctctgcactaagcagaccattataatagacatctacagaactctgtccaccccaaatca

SEQ ID NO: 97202 - DNA, 120 bp, synthetic construct
  source 1..120: mol_type = other DNA
ctaagaggagctggtaccattccttctgaaactattccaatcaacagaaaaagagggaatcctccctaactcattttatgaggccagtatcatcctgataccaaagcctggcagagacac

SEQ ID NO: 97203 - DNA, 120 bp, synthetic construct
  source 1..120: mol_type = other DNA
aatatcgtgaaaatggccatactgcccaaggtaatttacagattcaatgccatccccatcaagctaccaatgactttcttcacagaattggaaaaatctactttaaagttcatatggaac

SEQ ID NO: 97204 - DNA, 120 bp, synthetic construct
  source 1..120: mol_type = other DNA
gcacatgtaccctagaacttaaagtataaaaaaaaaaaaagggaaggaaggaaggaaagaagggagtcagggagggggaggggggagggagagaggaaggaaggaagtaaagaaataaag

SEQ ID NO: 97205 - DNA, 120 bp, synthetic construct; identical to SEQ ID NO: 10841
  source 1..120: mol_type = other DNA

SEQ ID NO: 97206 - DNA, 120 bp, synthetic construct
  source 1..120: mol_type = other DNA
agctgcagtgagctatgattataccactgcacaccagcctgggcgacagggtgagacgaaagaaagaaaagaaaaggaaaaagaggaaacaggaaaaagagaagaaaaaggaaggaagaa

SEQ ID NO: 97207 - DNA, 120 bp, synthetic construct; identical to SEQ ID NO: 12102
  source 1..120: mol_type = other DNA

SEQ ID NO: 97208 - DNA, 120 bp, synthetic construct
  source 1..120: mol_type = other DNA
attctcactcataggtgggaattgaacaatgagatcacatggacacaggaaggggaacatcatactctggggactgttgtggggtggagggaggtgggagggatagcattgggagatata

SEQ ID NO: 97209 - DNA, 120 bp, synthetic construct
  source 1..120: mol_type = other DNA
tcccagcaccatttattaaatagggaatcatttccccattgcttgttttagtcaggtttgtgaaagatcagatagttgtagatatgcggcattatttctgagagctctgttctgttccat

SEQ ID NO: 97210 - DNA, 120 bp, synthetic construct
  source 1..120: mol_type = other DNA
ggacttttctgcatctattgagataatcatgtggtttttgtctttggttctttttatatgttggattacatttactgatttgcatatgttgaatcagccttgcatcccagggatgaagcc

SEQ ID NO: 97211 - DNA, 120 bp, synthetic construct
  source 1..120: mol_type = other DNA
ggcatttagtgctatacatttccctctacacactgctttgaagctgtcccagagattctggtatgttgtgtctttgttctcgttggtttcaaagaacatctttatttctgccttcatttc

SEQ ID NO: 97212 - DNA, 120 bp, synthetic construct
  source 1..120: mol_type = other DNA
accaatcagacgtagatttggtcttttcacatagtcccatatttcttggatgctttgttcgtttctttttattcttttttctctaaacttctctcctcgcttcgtttcattcatttcgtc

SEQ ID NO: 97213 - DNA, 120 bp, synthetic construct
  source 1..120: mol_type = other DNA
gttcctgagaggctaaggctgtagtgagttgtaatcatgcccctgcacttcagcctgagcaacagagtgagaccctgtctttaaaaaaaacacaaaaactataaaagtgagtttggaaaa

SEQ ID NO: 97214 - DNA, 120 bp, synthetic construct
  source 1..120: mol_type = other DNA
gcggctggccgggcagaggggctcctcacttcccagtaggggcggccgggcagaggcgcccctcacctcccagacggggcggctggccgggcagagtggctcctcacttcccagtagggg

SEQ ID NO: 97215 - DNA, 120 bp, synthetic construct
  source 1..120: mol_type = other DNA
cagcgaatccccgtctccaccaaaaaaacacgaaaaccagtcaggcgtggcggcgcgcgcctgcaattgcaggcactcggcaagctgaggcaggagaatcaggcagggaggttgcagtga

SEQ ID NO: 97216 - DNA, 120 bp, synthetic construct
  source 1..120: mol_type = other DNA
agtgatcctcccaccttggcctcccaaagagttggaatgattacaggtataagccaccataccaggcccacaatcattttcaaaaggttcttttcaaaatgacagaaacaatatctttag

SEQ ID NO: 97217 - DNA, 120 bp, synthetic construct
  source 1..120: mol_type = other DNA
caatatcctctttgttgtcactgctgcttccttcttctgtcccatgggtctagattactgaaataatatcccagtagattttctgtttctcccagtttatccaacttccacaatgaagac

SEQ ID NO: 97218 - DNA, 120 bp, synthetic construct
  source 1..120: mol_type = other DNA
tgaggagcatctctgcctggccgcccatcgtctgggaggtgaggagcccctctgcctggctgcccagtctggaaagtgaggagcgtctctgcccggccgccatcccatctaggaagtgag

SEQ ID NO: 97219 - DNA, 120 bp, synthetic construct
  source 1..120: mol_type = other DNA
ctgtactaagaattcttctgccttgggatcctgtagatctgtgaccttacccccaaccctgtgctctctgaaacatgtgctgtgtccactcagggttaaatggattaagggcggtgcaag

SEQ ID NO: 97220 - DNA, 120 bp, synthetic construct; identical to SEQ ID NO: 31692
  source 1..120: mol_type = other DNA

SEQ ID NO: 97221 - DNA, 120 bp, synthetic construct; identical to SEQ ID NO: 31693
  source 1..120: mol_type = other DNA

SEQ ID NO: 97222 - DNA, 120 bp, synthetic construct
  source 1..120: mol_type = other DNA
tgttagtcaaatggcatttcccagtgagagaagctcgtgaatgttgtgctgaaaaagactcttaatgatccagcaagtttgggaaatgctgcgttaagcaagacctacatttttccttcc

SEQ ID NO: 97223 - DNA, 120 bp, synthetic construct; identical to SEQ ID NO: 34224
  source 1..120: mol_type = other DNA

SEQ ID NO: 97224 - DNA, 120 bp, synthetic construct
  source 1..120: mol_type = other DNA
ttcctattttctccctccacctctcctctccttcccttcctctcccccgcccacccccaccaagggcgttgtgaataatcttactaatctgtgccatttgtaggttaaaggctgcctctt

SEQ ID NO: 97225 - DNA, 120 bp, synthetic construct
  source 1..120: mol_type = other DNA
ggatgcagatgcggatgagaccctcggtgactgtgaggggaacccagattttcagatggcctccctgtacgtgggcgacctgcaccctgaggtgaccgaggcaatgctgtacgagaagtt

SEQ ID NO: 97226 - DNA, 120 bp, synthetic construct
  source 1..120: mol_type = other DNA
ttgagtgtattctcaaggccaccccaccctctcctgcaaggtacttgatttaaccatttaaacgttccattatgtggagaggggataaaaataacgctcccttctgaatcgaacccttat

SEQ ID NO: 97227 - DNA, 120 bp, synthetic construct; identical to SEQ ID NO: 34225
  source 1..120: mol_type = other DNA

SEQ ID NO: 97228 - DNA, 120 bp, synthetic construct; identical to SEQ ID NO: 34226
  source 1..120: mol_type = other DNA

SEQ ID NO: 97229 - DNA, 120 bp, synthetic construct
  source 1..120: mol_type = other DNA
tgtctttcctatgaccgtacatagacctctgagattgcctcgaatccactcacaagcgctgtctcttccacttccaaaatatcatgtgaatccacacactagtctccacattgatgcttc

SEQ ID NO: 97230 - DNA, 120 bp, synthetic construct
  source 1..120: mol_type = other DNA
ggccacattcaaacgctttccaattctctctaaataacagcctaacgctgacgtttttgttggcctgtatctcataattatttttatttagaggaatttggtagtggcggggttggggtg

SEQ ID NO: 97231 - DNA, 120 bp, synthetic construct; identical to SEQ ID NO: 34219
  source 1..120: mol_type = other DNA

SEQ ID NO: 97232 - DNA, 120 bp, synthetic construct
  source 1..120: mol_type = other DNA
ttgcatgtccgaacatgtccaaacttctcgccaaggcttttcatcaccagcctcaatatcctcactcagactctgctctcaatgctcctagctgtacgtgcatgggagttggtttaaaat

SEQ ID NO: 97233 - DNA, 120 bp, synthetic construct
  source 1..120: mol_type = other DNA
tggggagacagacaatagacagatcagggaatatgaaaacagttaaaggttgctatgaatgctctcggggacataaacaagatgatttggtacatattgcctagaaccccagaaaagtgg

SEQ ID NO: 97234 - DNA, 120 bp, synthetic construct; identical to SEQ ID NO: 34220
  source 1..120: mol_type = other DNA

SEQ ID NO: 97235 - DNA, 120 bp, synthetic construct
  source 1..120: mol_type = other DNA
aaaccaaaacaaaacctgagctctctctctagaatgaagtgcctggtcccagttcaccatctaatatttatggaaagcttatcaggtacttggtgctgggggctaaggggcccgcaatgt

SEQ ID NO: 97236 - DNA, 120 bp, synthetic construct; identical to SEQ ID NO: 34221
  source 1..120: mol_type = other DNA

SEQ ID NO: 97237 - DNA, 120 bp, synthetic construct; identical to SEQ ID NO: 34222
  source 1..120: mol_type = other DNA

SEQ ID NO: 97238 - DNA, 120 bp, synthetic construct; identical to SEQ ID NO: 34223
  source 1..120: mol_type = other DNA

SEQ ID NO: 97239 - DNA, 120 bp, synthetic construct; identical to SEQ ID NO: 13576
  source 1..120: mol_type = other DNA

SEQ ID NO: 97240 - DNA, 120 bp, synthetic construct; identical to SEQ ID NO: 13577
  source 1..120: mol_type = other DNA

SEQ ID NO: 97241 - DNA, 120 bp, synthetic construct; identical to SEQ ID NO: 9338
  source 1..120: mol_type = other DNA

SEQ ID NO: 97242 - DNA, 120 bp, synthetic construct
  source 1..120: mol_type = other DNA
taaggaaatgaaggcagaaataaagatgttctttgaaaccaatgagaagaaagacacaacataccagaatctctgggacacatttaaagcagtgtgtagagggaaatttatagcactaaa

SEQ ID NO: 97243 - DNA, 120 bp, synthetic construct
  source 1..120: mol_type = other DNA
agacaaaaaccacatgattatctcaatagatgcagaaaaggcctttgacaaaattcaacagcccttcatgctaaaaacaccaataaattaggtattgatgggacgtatctaaaaataaca

SEQ ID NO: 97244 - DNA, 120 bp, synthetic construct
  source 1..120: mol_type = other DNA
atggtactggtaccaaaacagagatatagaccaatggaacagaacagagccctcagaaataataccgcacatctacaactatctgatctttgacaaacctgacaaaaacaagcaatgggg

SEQ ID NO: 97245 - DNA, 120 bp, synthetic construct; identical to SEQ ID NO: 28534
  source 1..120: mol_type = other DNA

SEQ ID NO: 97246 - DNA, 120 bp, synthetic construct
  source 1..120: mol_type = other DNA
tggggttgtttgtttttttcttgtaaatttgtttgagttcattgtagattctggatattagccctttgtcagatgagtaggttgcgaaaattttctcccattttgtaggttgcttgttca

SEQ ID NO: 97247 - DNA, 120 bp, synthetic construct
  source 1..120: mol_type = other DNA
agcttgatggggatggcattgaatctgtaaattaccttgggcagtatggccattttcatgatattgattcttcctacctatgagcatggaatgttcttccatttgtttgtatcctctttt

SEQ ID NO: 97248 - DNA, 120 bp, synthetic construct
  source 1..120: mol_type = other DNA
ttgccagtattttattgaggatttttgcatcaatgttcatcaaggatattggtctaaaattctcttttttggttgtgtctctgcccggctttggtatcagaatgatgctagcctcataaa

SEQ ID NO: 97249 - DNA, 120 bp, synthetic construct
  source 1..120: mol_type = other DNA
gctgaggagagctttacttccaagtatgtggtcaattttagaataggtgtggtgtggtgctgaaaaaaatgtatattctgttgatttggggtggagagttctgtagatgtctattaggtc

SEQ ID NO: 97250 - DNA, 120 bp, synthetic construct
  source 1..120: mol_type = other DNA
gtctgatgggcttccctttgagggtaacccgacctttctctctggctgcccttaacattttttccttcatttcaactttggtgaatctgacaattatgtgtcttggagttggctcttctc

SEQ ID NO: 97251 - DNA, 120 bp, synthetic construct
  source 1..120: mol_type = other DNA
tttggtgtggatgtcctttctgtttgttagttttccttctaacagacaggaccctcagctgcaggtctgttggaataccctgccgtgtgaggtgtcagtgtgcccctgctggggggtgcc

SEQ ID NO: 97252 - DNA, 120 bp, synthetic construct; identical to SEQ ID NO: 28535
  source 1..120: mol_type = other DNA

SEQ ID NO: 97253 - DNA, 120 bp, synthetic construct
  source 1..120: mol_type = other DNA
ctgttgtttcctgactttttaatgattgccattctaactggtgtgagatgatatctcagagtggttttgatttgcatttctctgatggccagtgatgatgagcattttttcatgtgtttt

SEQ ID NO: 97254 - DNA, 120 bp, synthetic construct; identical to SEQ ID NO: 97055
  source 1..120: mol_type = other DNA

SEQ ID NO: 97255 - DNA, 120 bp, synthetic construct
  source 1..120: mol_type = other DNA
ccttgtacctctggtagaattcggctgtgaatccatctggtcctggactctttttggttggtaaactattgattattgccccaatttcagctcctgttattggtctattcagagattcaa

SEQ ID NO: 97256 - DNA, 120 bp, synthetic construct
  source 1..120: mol_type = other DNA
taggatagttagctcctctggttgaattgatccctttaccattatgtaatggccttctttgtctcttttgatctttgttggtttaaagtctgttttatcagagactaggattgcaacccc

SEQ ID NO: 97257 - DNA, 120 bp, synthetic construct
  source 1..120: mol_type = other DNA
tcatttcatcttccattgctgataccctttcttccagttgatcgcatcggctcttgaggcttctgcattcttcacgtagttctcgagccttggttttagctccatcagctcctttaagca

SEQ ID NO: 97258 - DNA, 120 bp, synthetic construct
  source 1..120: mol_type = other DNA
cttgcgcttcccacgtgaggcaatgccttgccctgcttcggctcgcgcctggtgcgtgcacccactggcctgcgcccactgtctggcactccctagtgagatgaacccggtacctccgat

SEQ ID NO: 97259 - DNA, 120 bp, synthetic construct; identical to SEQ ID NO: 28536
  source 1..120: mol_type = other DNA

SEQ ID NO: 97260 - DNA, 120 bp, synthetic construct; identical to SEQ ID NO: 28537
  source 1..120: mol_type = other DNA

SEQ ID NO: 97261 - DNA, 120 bp, synthetic construct; identical to SEQ ID NO: 28538
  source 1..120: mol_type = other DNA

SEQ ID NO: 97262 - DNA, 120 bp, synthetic construct; identical to SEQ ID NO: 28539
  source 1..120: mol_type = other DNA

SEQ ID NO: 97263 - DNA, 120 bp, synthetic construct; identical to SEQ ID NO: 28540
  source 1..120: mol_type = other DNA

SEQ ID NO: 97264 - DNA, 120 bp, synthetic construct; identical to SEQ ID NO: 28541
  source 1..120: mol_type = other DNA

SEQ ID NO: 97265 - DNA, 120 bp, synthetic construct
  source 1..120: mol_type = other DNA
atttcaaatcttcaactcaaaaccttaaaaatctccctctacacactgctttgaatgtgtcccagagattctggtatgttgtgtctttgttctcgttggtttcaaagaacatctttattt

SEQ ID NO: 97266 - DNA, 120 bp, synthetic construct
  source 1..120: mol_type = other DNA
tctcttgtgggcttttagtgctataaatttccctctacacactgctttaaatatgtcccagagattctggtacattgtgtctttgttctcattggtttcaaagaacatctttatttctgc

SEQ ID NO: 97267 - DNA, 120 bp, synthetic construct
  source 1..120: mol_type = other DNA
tcccaaagtgctaggattacaggcatgagccaccacgcccagcctggttttattttttggtagtccaaattccccagtagttttttttctcattgttgttgttgttgttttttttctttt

SEQ ID NO: 97268 - DNA, 120 bp, synthetic construct
  source 1..120: mol_type = other DNA
agttcactgtagattctggatattagccctttgtcagatgagtaggttgcgaaaattctctcccattttgtaggttgcctgttcactctgatggtagtttcttttgctgtgcagaagctc

SEQ ID NO: 97269 - DNA, 120 bp, synthetic construct
  source 1..120: mol_type = other DNA
gattcctaggtataaagagtcaagacccatcagtgtgctgtattcaggaaacccatctcacgtgcagagacacacataggctcaaaataaaaggatggaggaagatctaccaagcaaatg

SEQ ID NO: 97270 - DNA, 120 bp, synthetic construct
  source 1..120: mol_type = other DNA
agcactaaatgcccacaagagaaagcagggaagatccaaaattgacaccctaacatcacaattaaaagaactagaaaagcaagagcaaacacattcaaaagctagcagaaggcaagaaat

SEQ ID NO: 97271 - DNA, 120 bp, synthetic construct
  source 1..120: mol_type = other DNA
ggtattgatgggacgtatctcaaaataataagagctatctatgacaaacccacagccaatatcatactgaatgggcaaaaactggaagcattccctttgaaaactggcataagacaggga

SEQ ID NO: 97272 - DNA, 120 bp, synthetic construct
  source 1..120: mol_type = other DNA
gcaggcttgtcacactcattgtttaagctccatgcctgtttacctaaaaagctggacttaaatacatcgaacttggaactcagaaaaataaaacatcttctgacctgggtaggtccgtct

SEQ ID NO: 97273 - DNA, 120 bp, synthetic construct
  source 1..120: mol_type = other DNA
gcttctctcagcagctcagtggagtgtagacagtgtagtagatcatcacctgagcagccaggatgggagtggggtctctgtggtctccattttacaaatgggttgacaggtgctcaggaa

SEQ ID NO: 97274 - DNA, 120 bp, synthetic construct; identical to SEQ ID NO: 14701
  source 1..120: mol_type = other DNA

SEQ ID NO: 97275 - DNA, 120 bp, synthetic construct; identical to SEQ ID NO: 14702
  source 1..120: mol_type = other DNA

SEQ ID NO: 97276 - DNA, 120 bp, synthetic construct; identical to SEQ ID NO: 14703
  source 1..120: mol_type = other DNA

SEQ ID NO: 97277 - DNA, 120 bp, synthetic construct; identical to SEQ ID NO: 27703
  source 1..120: mol_type = other DNA

SEQ ID NO: 97278 - DNA, 120 bp, synthetic construct; identical to SEQ ID NO: 23865
  source 1..120: mol_type = other DNA

SEQ ID NO: 97279 - DNA, 120 bp, synthetic construct; identical to SEQ ID NO: 23866
  source 1..120: mol_type = other DNA

SEQ ID NO: 97280 - DNA, 120 bp, synthetic construct
  source 1..120: mol_type = other DNA
aagaaaattaattaaattaattaatggccacacacagtagctcatgcctataatcccagcactttgagaggccaaggcatgaggactgcttgagcccaagagttcaagaacagcctgaac

SEQ ID NO: 97281 - DNA, 120 bp, synthetic construct
  source 1..120: mol_type = other DNA
gaggtgaggagcgtctctgcccggccgctccgtctgagaagtgaggaaaccctctgcctggcaaccgccccgtctgagaagtgaggagcccctccgtccggcaaccaccccgtctgggaa

SEQ ID NO: 97282 - DNA, 120 bp, synthetic construct
  source 1..120: mol_type = other DNA
atggtgaaaccccatctctactaaaaatacaaaaattaggccgggcacagtggcttacaactgtaattccagcactttgggaagctgaggcgggtggattacctgaagtcacgagttcga

SEQ ID NO: 97283 - DNA, 120 bp, synthetic construct; identical to SEQ ID NO: 7230
  source 1..120: mol_type = other DNA

SEQ ID NO: 97284 - DNA, 120 bp, synthetic construct; identical to SEQ ID NO: 7231
  source 1..120: mol_type = other DNA

SEQ ID NO: 97285 - DNA, 120 bp, synthetic construct
  source 1..120: mol_type = other DNA
actgcattctggcatgggcaataggagtaagacctggtctcaaaaaaaaaaaaaaaaaaaaaaagattgcgttcttaaataggatggtcagggtgggcttcacggagaagctgaccttgc

SEQ ID NO: 97286 - DNA, 120 bp, synthetic construct
  source 1..120: mol_type = other DNA
ctgcactctagcctgggtgacagagcaagactcagtctcaaaaaaaaaaaaaaaaacaagaaaatattaaactaggccaagtgtggtggctcacacctgtaatcctagcactttgggagg

SEQ ID NO: 97287 - DNA, 120 bp, synthetic construct; identical to SEQ ID NO: 7233
  source 1..120: mol_type = other DNA

SEQ ID NO: 97288 - DNA, 120 bp, synthetic construct
  source 1..120: mol_type = other DNA
atgcccagctaatccttaagttttaaaggggcttagaattgtcatgtattgaattttttttggggggggggacagaatcttgctctgtcacccaggctagagtgcagtggtctgatctca

SEQ ID NO: 97289 - DNA, 120 bp, synthetic construct
  source 1..120: mol_type = other DNA
ctgcctatttcgtaaggctggtatgaagtgtgaggctcctggcacacagcaagtgatggggatggtagtggtgtcaggccatcacctaccttcagtatggaaggaaactggttttaattc

SEQ ID NO: 97290 - DNA, 120 bp, synthetic construct
  source 1..120: mol_type = other DNA
caacatggtgaaaccctgtctctactaaaaatacaaaaaaatttagctaggcatagtggtatgcacctgtaataccagctactcgggaggctgaggcaaaacaatcgcttgaacccagga

SEQ ID NO: 97291 - DNA, 120 bp, synthetic construct; identical to SEQ ID NO: 17333
  source 1..120: mol_type = other DNA

SEQ ID NO: 97292 - DNA, 120 bp, synthetic construct
  source 1..120: mol_type = other DNA
tcccaaatagctgggactacaggaatgtaccaccatgcctggctaatttttaatttttttttacagagacatggtctcactatgttgcccatatggcagtgccattaactgggataggaa

SEQ ID NO: 97293 - DNA, 120 bp, synthetic construct
  source 1..120: mol_type = other DNA
cagcatggtactggtaccaaaacagagatatagaccaatggaacagaacggagccctcagaaataataccacacatctacaaccatctgatctttgacaaacctgacaaaaacaagaaat

SEQ ID NO: 97294 - DNA, 120 bp, synthetic construct
  source 1..120: mol_type = other DNA
tgggactgtaaactagttcaaccattgtggaagacagtgtggcgattcctcaagggtctagaactagaaataccatttgacccagccatcccactactgggcatatactcaaaggactat

SEQ ID NO: 97295 - DNA, 120 bp, synthetic construct
  source 1..120: mol_type = other DNA
agtgagccgagatggcaccactgcactccagcctggttgacagagcgagactctgtctcaaaaaaataataattattataatatgatactgtggaaacagacaccctacaatttgcatgc

SEQ ID NO: 97296 - DNA, 120 bp, synthetic construct; identical to SEQ ID NO: 33861
  source 1..120: mol_type = other DNA

SEQ ID NO: 97297 - DNA, 120 bp, synthetic construct
  source 1..120: mol_type = other DNA
tggttcaggaatactatattctggtgttacctgtatggatatggatatttctctctctctctctatctctatgtatgtatctgtctgtctgtctatctatctatctatctatctatctat

SEQ ID NO: 97298 - DNA, 120 bp, synthetic construct; identical to SEQ ID NO: 34003
  source 1..120: mol_type = other DNA

SEQ ID NO: 97299 - DNA, 120 bp, synthetic construct; identical to SEQ ID NO: 34004
  source 1..120: mol_type = other DNA

SEQ ID NO: 97300 - DNA, 120 bp, synthetic construct; identical to SEQ ID NO: 34005
  source 1..120: mol_type = other DNA

SEQ ID NO: 97301 - DNA, 120 bp, synthetic construct
  source 1..120: mol_type = other DNA
gaagcttattttggctggatgtgaaattctgggttgaaaattcttttatgactgctgaatattggcccccactctcttctggattgtagggtttctgtagagagatccgctattagtctg

SEQ ID NO: 97302 - DNA, 120 bp, synthetic construct
  source 1..120: mol_type = other DNA
ctctctctctctctctctatatatatatatgtgtgtgtgtgtgtatatgtatatatgtatatatgtatgtatgtatgtatatatgtatgtgtatatatgtatgtatatacgtatgtatgt

SEQ ID NO: 97303 - DNA, 120 bp, synthetic construct
  source 1..120: mol_type = other DNA
acaagtaagttgtctagggccagccttgggaaagaaaagggcaatgttcgaatatctctgctttcctgttttcctggcagcagattcctgaaataattagcctaccggtttttatttcat

SEQ ID NO: 97304 - DNA, 120 bp, synthetic construct; identical to SEQ ID NO: 34000
  source 1..120: mol_type = other DNA

SEQ ID NO: 97305 - DNA, 120 bp, synthetic construct; identical to SEQ ID NO: 34001
  source 1..120: mol_type = other DNA

SEQ ID NO: 97306 - DNA, 120 bp, synthetic construct; identical to SEQ ID NO: 34002
  source 1..120: mol_type = other DNA

SEQ ID NO: 97307 - DNA, 120 bp, synthetic construct; identical to SEQ ID NO: 13168
  source 1..120: mol_type = other DNA

SEQ ID NO: 97308 - DNA, 120 bp, synthetic construct; identical to SEQ ID NO: 26545
  source 1..120: mol_type = other DNA

SEQ ID NO: 97309 - DNA, 120 bp, synthetic construct; identical to SEQ ID NO: 26546
  source 1..120: mol_type = other DNA

SEQ ID NO: 97310 - DNA, 120 bp, synthetic construct; identical to SEQ ID NO: 26547
  source 1..120: mol_type = other DNA

SEQ ID NO: 97311 - DNA, 120 bp, synthetic construct
  source 1..120: mol_type = other DNA
ctagcaagacttgtgtaatttcaaacactgattctaaagttcattagacgaaacaagcatagcaaagaatatttgacaggctgggcgtggtggctcacgcctgtaatcccagcactttgg

SEQ ID NO: 97312 - DNA, 120 bp, synthetic construct; identical to SEQ ID NO: 20588
  source 1..120: mol_type = other DNA

SEQ ID NO: 97313 - DNA, 120 bp, synthetic construct; identical to SEQ ID NO: 20589
  source 1..120: mol_type = other DNA

SEQ ID NO: 97314 - DNA, 120 bp, synthetic construct
  source 1..120: mol_type = other DNA
gagaatgactctgacgagttgaaagaaggcctcagatgatcagactactctgagctacaggaggaaattcgaatcaatggcaaagaagttaaaagctttgaaaaaaaataagatgaatgg

SEQ ID NO: 97315 - DNA, 120 bp, synthetic construct
  source 1..120: mol_type = other DNA
tcagtgtgctgtattcaggaaacccatctcacgtgcagagacacacataggctcaaaataaagggatggaggaagatctaccaagcaaatggaaaccaaaagaaggcagggattgcaatc

SEQ ID NO: 97316 - DNA, 120 bp, synthetic construct
  source 1..120: mol_type = other DNA
ataaagaagaaaagagagaagaatcaaatagacgcaatcaaaaatgataaaggggagatcaccaccgatcccacagaaatacaaactaccatcagagaatactataaacacctctatgca

SEQ ID NO: 97317 - DNA, 120 bp, synthetic construct
  source 1..120: mol_type = other DNA
agtcaaattgtccctgtttgcagatgacatgattgtatatttagaaaaccccatcatctcagcccaaaatctcctcaagctgataagcaacttcagctaagtctcaggatacaaaatcaa

SEQ ID NO: 97318 - DNA, 120 bp, synthetic construct
  source 1..120: mol_type = other DNA
gctctttagtttaattagatcccatttgtcaattttggcttttgttgccattgcttttggtgttttagacatgaagtccttgcccatgcctatgtcctgaatggtattgcctaggttttc

SEQ ID NO: 97319 - DNA, 120 bp, synthetic construct
  source 1..120: mol_type = other DNA
ggtaggaaatgaacaatgagaacacatggacacaggaaggggaacatcacacacccgggactgttgtggggtcaggggagggtggagggatagcattaagagatatacctaatgctaaat

SEQ ID NO: 97320 - DNA, 120 bp, synthetic construct
  source 1..120: mol_type = other DNA
ggctaagaaaataaatgagcaaaggcccagggataaaagggcagtaggaacagagtgagtgtaggaagtggtagaagagaagcctagttctataatatccagtaccttacaaacatgaag

SEQ ID NO: 97321 - DNA, 120 bp, synthetic construct; identical to SEQ ID NO: 27479
  source 1..120: mol_type = other DNA

SEQ ID NO: 97322 - DNA, 120 bp, synthetic construct
  source 1..120: mol_type = other DNA
tatactttaagttttagggtgcatgtgtacaacgtgcaggttagttatatatgtatacatgtgctatgttggtgtgctgcacccattaacttcgtcatttaacattaggtgtatctcctg

SEQ ID NO: 97323 - DNA, 120 bp, synthetic construct
  source 1..120: mol_type = other DNA
tagtgtcagataggtacagagatgtatggaaagtgttacctgccagccagtttataatcttgtagaaaaaagaaaagttagggctgagcacagtggctcaagcctgtaatcccagcactt

SEQ ID NO: 97324 - DNA, 120 bp, synthetic construct
  source 1..120: mol_type = other DNA
gacggagacgctcctcacttcccagatggggtggctgccgggcggagaggctcctcacttctcagacggggcagctgccgggcggaggggctcctcacttctcagacggggtggttgcca

SEQ ID NO: 97325 - DNA, 120 bp, synthetic construct; identical to SEQ ID NO: 25038
  source 1..120: mol_type = other DNA

SEQ ID NO: 97326 - DNA, 120 bp, synthetic construct; identical to SEQ ID NO: 25039
  source 1..120: mol_type = other DNA

SEQ ID NO: 97327 - DNA, 120 bp, synthetic construct
  source 1..120: mol_type = other DNA
gccattctaactggtgtgagatggtatctcattgtggttttgatttgcatttctctgatggccagtgaaaaatatggaacgcttcacgaatttgcgtgtcatccttgcgcaggggccatg

SEQ ID NO: 97328 - DNA, 120 bp, synthetic construct
  source 1..120: mol_type = other DNA
aatgttattaaactctggaaagcattctgtgaatttagagtgagggcttaagccatttttgaaaacttccatatgaattccttcctcccttccttcccttccctccctcccttcccttcc

SEQ ID NO: 97329 - DNA, 120 bp, synthetic construct; identical to SEQ ID NO: 25040
  source 1..120: mol_type = other DNA

SEQ ID NO: 97330 - DNA, 120 bp, synthetic construct; identical to SEQ ID NO: 25041
  source 1..120: mol_type = other DNA

SEQ ID NO: 97331 - DNA, 120 bp, synthetic construct; identical to SEQ ID NO: 35143
  source 1..120: mol_type = other DNA

SEQ ID NO: 97332 - DNA, 120 bp, synthetic construct; identical to SEQ ID NO: 35144
  source 1..120: mol_type = other DNA

SEQ ID NO: 97333 - DNA, 120 bp, synthetic construct
  source 1..120: mol_type = other DNA
cacgcacggctaattttgtatttttagtagagacagggttttaccatgttggccaggcaggtctcaaactcctgacttcaagggatccacctgcctcagcctcccaaggtgctgggatta

SEQ ID NO: 97334 - DNA, 120 bp, synthetic construct; identical to SEQ ID NO: 19752
  source 1..120: mol_type = other DNA

SEQ ID NO: 97335 - DNA, 120 bp, synthetic construct; identical to SEQ ID NO: 22344
  source 1..120: mol_type = other DNA

SEQ ID NO: 97336 - DNA, 120 bp, synthetic construct; identical to SEQ ID NO: 22345
  source 1..120: mol_type = other DNA

SEQ ID NO: 97337 - DNA, 120 bp, synthetic construct; identical to SEQ ID NO: 22346
  source 1..120: mol_type = other DNA

SEQ ID NO: 97338 - DNA, 120 bp, synthetic construct
  source 1..120: mol_type = other DNA
gtgtggaagtggaccccagtgggctgccaatgctggctcgggcagcctgcttttattcttttatctggccccacccacatcctgctgattggtagagcccagtggcctgttttgtcaggg

SEQ ID NO: 97339 - DNA, 120 bp, synthetic construct
  source 1..120: mol_type = other DNA
cagtacaccctccgcagccactggcccaggtgctaagttccccattgcccggggccagcagggctggctgggtgctccgagtgcggggcccaccaagcccacgcccacccggaactccag

SEQ ID NO: 97340 - DNA, 120 bp, synthetic construct
  source 1..120: mol_type = other DNA
gtcttcttttgagaagtgtctgttcatatcctccacccactttttaaatggggttgtttgattttctcttgtaaatttgtttgcgttcattgtagattctggatattagccctttgtcag

SEQ ID NO: 97341 - DNA, 120 bp, synthetic construct
  source 1..120: mol_type = other DNA
gggagttcactcaggatttggctctctgtttgtctgttattggtgtataagaatgcttgtgatttttgtacattgattttgtatcctgagactttgcagaagttgcttatcagcttaagg

SEQ ID NO: 97342 - DNA, 120 bp, synthetic construct
  source 1..120: mol_type = other DNA
caaccatctgatctttgacaaaccttacaaaaacaagaaatggggaaaggagtccctatttaataaatggtgctgggaaaactggctaggcatatgtagaaagctggaactagatccctt

SEQ ID NO: 97343 - DNA, 120 bp, synthetic construct
  source 1..120: mol_type = other DNA
tctcactcataggtgggaattgaacaatgagaacacttggacataggaaggggaacatcatacaccggggcctgttgaggggttgggggaggggggagggatagcattaggagatatacc

SEQ ID NO: 97344 - DNA, 120 bp, synthetic construct
  source 1..120: mol_type = other DNA
cttgatgaacattgatgcaaaaatcctcagtaaaatactggcaaaccgaatccagcagcacatcaaaaagcttatccaccacgatcaagtgtgcttcatccctgggatgcaaggctggtt

SEQ ID NO: 97345 - DNA, 120 bp, synthetic construct
  source 1..120: mol_type = other DNA
attcaatgccatccccatcaagctaccaatgacttccttcacagaattggaaaaaaactactttaaagttcatatggaaccaaaaaagagcatgcatcgccaagtcagtcctaagccaaa

SEQ ID NO: 97346 - DNA, 120 bp, synthetic construct
  source 1..120: mol_type = other DNA
gaattgtcaaatgactccttccagactgttagcaactaggtagcacctttttctaaaatcagagaaggagcatgatttatattcctttgggcatatacccagtaatgggatggctgggtc

SEQ ID NO: 97347 - DNA, 120 bp, synthetic construct; identical to SEQ ID NO: 22348
  source 1..120: mol_type = other DNA

SEQ ID NO: 97348 - DNA, 120 bp, synthetic construct
  source 1..120: mol_type = other DNA
accctaacttatgaatagtggtatacaaatatatttccatctttttgtccagccagcaaatgagagtctgtacccgaccatttcacaaaagaccaatgttggtcagagacaggtgggagg

SEQ ID NO: 97349 - DNA, 120 bp, synthetic construct
  source 1..120: mol_type = other DNA
ccaggcgtggtggcacatgcctgtaatcccagctactcgggaggctgaagcacaagaattgcttgaacatgggaggtggaggttgcagtgagccaagatcgtgccactgcactccaacct

SEQ ID NO: 97350 - DNA, 120 bp, synthetic construct
  source 1..120: mol_type = other DNA
cagtttcaagtgactctcctgtctcagcctccccaatagctgggattactggtgcacaccatcgcacccagctcatttttgtatttttagtggagacagggtttcaccatgttggccagg

SEQ ID NO: 97351 - DNA, 120 bp, synthetic construct
  source 1..120: mol_type = other DNA
aggtccaaaaaaacatgtattgtaactgtgtgcattatccttgtgagttattaaagtcagaccttgttttcttgattcacttcagcccaggctgcagtgcagtggtacaatctcggctca

SEQ ID NO: 97352 - DNA, 120 bp, synthetic construct
  source 1..120: mol_type = other DNA
cattactctttatgtgaatttttttttttttttttttgagacagggtcttgctctgttgccaggcttgagtgaagtggtatgatttcagctcactgcagcctccacctcccaggttcaag

SEQ ID NO: 97353 - DNA, 120 bp, synthetic construct
  source 1..120: mol_type = other DNA
cttgatttttttccctgccgtctaggaactgttgagattattactggactggacttctggcttcttgttcttcttctttttttttttagagacaaggccttcctgtgttacccaggctgt

SEQ ID NO: 97354 - DNA, 120 bp, synthetic construct
  source 1..120: mol_type = other DNA
ctcctgaccttgtgatccacccacctcagcctcccaaagggccgggattataggcgtgagccacggcgtcaggtcaaatgattgaatttattaatgaaaataaaatatttttatatttag

SEQ ID NO: 97355 - DNA, 120 bp, synthetic construct
  source 1..120: mol_type = other DNA
gcctcccaaagcactggaattacagctgtgagccaccatgcctggccccagtgcttatttttccatggctaataaactaagaatgtttttcagattttgaaatggctgaaaaacatcaga

SEQ ID NO: 97356 - DNA, 120 bp, synthetic construct
  source 1..120: mol_type = other DNA
ataacattatttaaatgcttaataagtaaattctaggccaggcatggtggcttacgcctgtaatcccagcattttgggagcgtgaggcgggtggatcacaaagtcaggagctcaagacca

SEQ ID NO: 97357 - DNA, 120 bp, synthetic construct
  source 1..120: mol_type = other DNA
tggtcttgaattcccgacctcaggtgatccacccgccttggcctctcaaagtgttgagattacaggcgtgagccactgcacctggactattagttatttttgggacagggtctcactcta

SEQ ID NO: 97358 - DNA, 120 bp, synthetic construct
  source 1..120: mol_type = other DNA
ctcagcctcctgagtagctgggactacagctgcatgccaccatgcctggctaatttttgtctttttttatagtgatggggttttgccacattgcccaaggtaaaactttttttttttctt

SEQ ID NO: 97359 - DNA, 120 bp, synthetic construct
  source 1..120: mol_type = other DNA
ctgagatcgcgccattgcactccagcctgggcaacaagagcaaaactccatcccaaaaaaaaaaaaaagtatttctgggattattggatcatttaatcatccttcctaaggctacttaaa

SEQ ID NO: 97360 - DNA, 120 bp, synthetic construct
  source 1..120: mol_type = other DNA
ggtaggaagagaggggtgaatataaagaagaaaaaagataaagtttgttggaatcacttcccagctttttttttttttttttttttttgagacggagtctcgctctgtggcccaggctgg

SEQ ID NO: 97361 - DNA, 120 bp, synthetic construct
  source 1..120: mol_type = other DNA
tcccaaagtgctgggattacaggtgtgagagactgcacctggttcatgttactctgttgatgaaaaactttcagttggctcccattagccacaacataaagtccaagttctttttttttt

SEQ ID NO: 97362 - DNA, 120 bp, synthetic construct
  source 1..120: mol_type = other DNA
gaaattgtaggctttgatggtaaaggcatcttatttacctactagattataggggccctgggaccaggattcatatctgattcatctctgcatctctcacagagaatgggacataagtag

SEQ ID NO: 97363 - DNA, 120 bp, synthetic construct
  source 1..120: mol_type = other DNA
aaaaaaaaaatttttttttttttaattagtcaaggctggtggcatgcatctgtagtcctgctactcaggaggctgaggtgggaggactgcttgagcctgagaggttgagacttcagtgag

SEQ ID NO: 97364 - DNA, 120 bp, synthetic construct
  source 1..120: mol_type = other DNA
tgtaaaggttttcttttgagggatgagggtagagttgaagaaagagtatttacaatgtagtcgaataaaaaatgacctgcgtttgagcccaggcattcgaggttgcagtgagctatggtc

SEQ ID NO: 97365 - DNA, 120 bp, synthetic construct
  source 1..120: mol_type = other DNA
ccttagcctcgcaccaccaggcctggctaatttttgtgtctttagtagagacgaggtatctttagtagagatggggtatctttagtagagacgccacacttattttttgtatactgagta

SEQ ID NO: 97366 - DNA, 120 bp, synthetic construct
  source 1..120: mol_type = other DNA
tagcttaaagccataataggaatgttgcctagtgccattcccttcacctaaagggagaaacccctccagtatgtttcttctttttcttgttctctggtgcctttagaaagttgttttttg

SEQ ID NO: 97367 - DNA, 120 bp, synthetic construct
  source 1..120: mol_type = other DNA
atatcctcatactacagatgagggaactgaggacctagagggaaagcttaccaaataacaatgttgttcataatagtagtaccaagcagagcttcttgcatcccttggacctcagcaaaa

SEQ ID NO: 97368 - DNA, 120 bp, synthetic construct
  source 1..120: mol_type = other DNA
taggaccttaaggtatttctatatttttaaaaatatttgtgtgtgtgtgtgtgtgtgtgtttaagattaggtctcgctctgctgcccaagatggagtgtggtggcgtgatcacagctcac

SEQ ID NO: 97369 - DNA, 120 bp, synthetic construct
  source 1..120: mol_type = other DNA
tcgcctaggctggagtgcagtggcacaatcttggctcactgcaactctgcctcccaggttcaagcgactgtcctgcctcagcctcctgagtagctgggattataggtgcgcaccaccaca

SEQ ID NO: 97370 - DNA, 120 bp, synthetic construct
  source 1..120: mol_type = other DNA
tttatgcagccatttaaaagtatatctatgttcactgaacaaatatttattgggcacctctgtgtaaagcacagtgttagatgttgtatatatttggagagcaagaatgaggtatattca

SEQ ID NO: 97371 - DNA, 120 bp, synthetic construct
  source 1..120: mol_type = other DNA
aagcggagattgcagtaagccaagatcgccccactgcactccagcctgggcaacagagtatgactctctctccaaaaacaaacaaacaaacaaaaaacccatatctagataaacctgtga

SEQ ID NO: 97372 - DNA, 120 bp, synthetic construct
  source 1..120: mol_type = other DNA
gagattcccacttacctctgcgaagtgccaggtataaagtttttcccactgccaagcatccagagctttccaaagagaaactacatcttcgcaagcagttatgatacatggctctttaca

SEQ ID NO: 97373 - DNA, 120 bp, synthetic construct
  source 1..120: mol_type = other DNA
aaccacaggtttcaatgttattcctcggagggagtaacattgaaacaacatacattatactatctactattatgaccatgggagcactatgtatcaaaccacagagcgtggccaaagcag

SEQ ID NO: 97374 - DNA, 120 bp, synthetic construct
  source 1..120: mol_type = other DNA
gtaactttttacctacacatttgaaaatatgaatgaaatagttgattctttaagagactaagttattaggacactgggcatggtggctcatgcctgtgatcccagcactttgggaggcca

SEQ ID NO: 97375 - DNA, 120 bp, synthetic construct
  source 1..120: mol_type = other DNA
accgtgcccagctccctaacttagatttagacatgaagttcagttacttagcctaagttgttcttgccaataggttggcatagaaactttaagaggagagctcaaaacataaacagaggt

SEQ ID NO: 97376 - DNA, 120 bp, synthetic construct
  source 1..120: mol_type = other DNA
gctgcctgaactgtcgaattgtttagtatcactggcaagacagactgagtctttcaaatgagcaagttggggtgtgcagcaagttcgtccagcaacttctgtagatgctttttcatagga

SEQ ID NO: 97377 - DNA, 120 bp, synthetic construct
  source 1..120: mol_type = other DNA
caacggtcatgagttagttgattaattagcagctatttttctgcactacccaaaacagtgtattgctagccaggtatggtagctcacagctgtaatcctagtactttcagaggtcaaggt

SEQ ID NO: 97378 - DNA, 120 bp, synthetic construct
  source 1..120: mol_type = other DNA
atgctggctcttctcactatggaaaacttagtccccttttgaagcaaagagtaatttactgctttttgtttgcttgtttgtttcaagacgaggtctcactctgttgcccaggctggagtg

SEQ ID NO: 97379 - DNA, 120 bp, synthetic construct
  source 1..120: mol_type = other DNA
acgtgaatgtcaccttgagaaaaaaagtttttaaatgtagctgcagtttactacaattatagcagactatttcaaactactggctgggcctggtggctcacgcctgtaatcccagcactt

SEQ ID NO: 97380 - DNA, 120 bp, synthetic construct
  source 1..120: mol_type = other DNA
tacaatgtatcgttgctgcccatcctccaaaattctgtgtcccttggaggccttagagacactgcattagatattttatccaaaaaagttgcttaggccttttcattacatgatgacttc

SEQ ID NO: 97381 - DNA, 120 bp, synthetic construct
  source 1..120: mol_type = other DNA
ctgaggcaggaggaacatttgagcccaggagatagaggctgcaccacggcactccagcctggacaacagtgagcccctgtctctttatttttatttatttatttatttatttatttattt

SEQ ID NO: 97382 - DNA, 120 bp, synthetic construct
  source 1..120: mol_type = other DNA
tacaaggaggttatctgtagagacagtcatttttttgccttgtgcctccaaacttacaggtgaagtaaatctaatgttttttaggtcgtgagtagtaagttcactgctacctttaggagg

SEQ ID NO: 97383 - DNA, 120 bp, synthetic construct
  source 1..120: mol_type = other DNA
acacaatctcttctcttaacttctaaatctcaactagttttctatctcatgtatttctttctttattttcccccttggctcaagtaattttaataacactcccatttcaataacccctca

SEQ ID NO: 97384 - DNA, 120 bp, synthetic construct
  source 1..120: mol_type = other DNA
atcttcacactgtgggaaaaagaacaatagccaaaatatacctgggaaatgaataataaagcaggcataagtgaatggtctagatttacctgagtgttttagctgcggtgagagatcctg

SEQ ID NO: 97385 - DNA, 120 bp, synthetic construct
  source 1..120: mol_type = other DNA
agataaacagagtgatatgagagagttactggcctactgacagggactactttagttacagtggtcagggaggcatttttgactatcatttgagcctaagactgaatgaggaaggagcta

SEQ ID NO: 97386 - DNA, 120 bp, synthetic construct
  source 1..120: mol_type = other DNA
agtgagccaagatcgagccactgcactccagcctgggagatagagcggagagtctgtctcaaaaacaaacaaaacaaaacctatgtgcaaaacatgctactagacaagttgccaaccgta

SEQ ID NO: 97387 - DNA, 120 bp, synthetic construct
  source 1..120: mol_type = other DNA
tgtcctgacaggaaagctaaacggaacctgcagaaccattcagatcataccatttatgaacattcccttctccaaaaaatatacataggattcctttttggtggttagggatacgcccct

SEQ ID NO: 97388 - DNA, 120 bp, synthetic construct; identical to SEQ ID NO: 10820
  source 1..120: mol_type = other DNA

SEQ ID NO: 97389 - DNA, 120 bp, synthetic construct; identical to SEQ ID NO: 10821
  source 1..120: mol_type = other DNA

SEQ ID NO: 97390 - DNA, 120 bp, synthetic construct
  source 1..120: mol_type = other DNA
ctagaatcattaatgccagcgacacttttcctgggctttgcctggtgacgttaattcttagtgttgggtttttaaaacagcctgtgtctcctgttttcctttcagaagagtttgaagaac

SEQ ID NO: 97391 - DNA, 120 bp, synthetic construct
  source 1..120: mol_type = other DNA
tgggattacaggtgtgagccactgtacctggttgctatttgagttttctaagaactcaccttttgtcttttgtggtcctcagacagatggtgagaacaggacaaattttattagacccat

SEQ ID NO: 97392 - DNA, 120 bp, synthetic construct
  source 1..120: mol_type = other DNA
agggaggggggagggaggaagggagggactttattgatttagtctaggggggttgcctgtgattctgaagcatgaaaattaagtgttaaagcttttctaactttggttttcatagtttag

SEQ ID NO: 97393 - DNA, 120 bp, synthetic construct; identical to SEQ ID NO: 25953
  source 1..120: mol_type = other DNA

SEQ ID NO: 97394 - DNA, 120 bp, synthetic construct; identical to SEQ ID NO: 25954
  source 1..120: mol_type = other DNA

SEQ ID NO: 97395 - DNA, 120 bp, synthetic construct; identical to SEQ ID NO: 25955
  source 1..120: mol_type = other DNA

SEQ ID NO: 97396 - DNA, 120 bp, synthetic construct; identical to SEQ ID NO: 25956
  source 1..120: mol_type = other DNA

SEQ ID NO: 97397 - DNA, 120 bp, synthetic construct; identical to SEQ ID NO: 25957
  source 1..120: mol_type = other DNA

SEQ ID NO: 97398 - DNA, 120 bp, synthetic construct
  source 1..120: mol_type = other DNA
agatccctgaggaatcgccacactgacttccgcaatggttgaactagtttacagtcccaccaacagtgtaaaagtgttcctatttctccacatcctctccagcacctgttgtttcctgac

SEQ ID NO: 97399 - DNA, 120 bp, synthetic construct
  source 1..120: mol_type = other DNA
ggatctttacatgttcagcaagaaatgattatggatcagcaaccagcactgcccagctggttgtcacctcaggtatgtgaggagtaaaaaaaatgactgggttctgttccccagcaccag

SEQ ID NO: 97400 - DNA, 120 bp, synthetic construct
  source 1..120: mol_type = other DNA
ctgaaaaggtaatacaagataagccttcttgtataaaatgtaatacaagataaaactcagagaagctgtaaaggccttcaaactcaaatttcactgatagtctgtatcaatgatagtata

SEQ ID NO: 97401 - DNA, 120 bp, synthetic construct; identical to SEQ ID NO: 25958
  source 1..120: mol_type = other DNA

SEQ ID NO: 97402 - DNA, 120 bp, synthetic construct; identical to SEQ ID NO: 25959
  source 1..120: mol_type = other DNA

SEQ ID NO: 97403 - DNA, 120 bp, synthetic construct; identical to SEQ ID NO: 25960
  source 1..120: mol_type = other DNA

SEQ ID NO: 97404 - DNA, 120 bp, synthetic construct; identical to SEQ ID NO: 25961
  source 1..120: mol_type = other DNA

SEQ ID NO: 97405 - DNA, 120 bp, synthetic construct
  source 1..120: mol_type = other DNA
gaggacgacggagatctccctcccagaggaggggtgtcagcgaacactccgggtcgggcccattgtttccttcctgccaccccttcctttcccacgggggatactgaggcccagagagga

SEQ ID NO: 97406 - DNA, 120 bp, synthetic construct; identical to SEQ ID NO: 19328
  source 1..120: mol_type = other DNA

SEQ ID NO: 97407 - DNA, 120 bp, synthetic construct; identical to SEQ ID NO: 19329
  source 1..120: mol_type = other DNA

SEQ ID NO: 97408 - DNA, 120 bp, synthetic construct
  source 1..120: mol_type = other DNA
gctgtagtgagccgtgatcgcaccactgcactccaacctgggcaacagagtgagaccctgtctcttaagaataaaaaataataataaagaattgctagcgtgacagaagccacagaaaat

SEQ ID NO: 97409 - DNA, 120 bp, synthetic construct
  source 1..120: mol_type = other DNA
cacgttgtgcacatgtaccctagaacttaaagtataataaaaaaaaaaaagaaaaagggtggagagatggaggggagggtggggggatggagaggagggtggagggaaagaagagagggt

SEQ ID NO: 97410 - DNA, 120 bp, synthetic construct; identical to SEQ ID NO: 32910
  source 1..120: mol_type = other DNA

SEQ ID NO: 97411 - DNA, 120 bp, synthetic construct
  source 1..120: mol_type = other DNA
ctcagctcaccacaacctctacctcctgggttcaagcaattctcctgctaagcctcctgagtagatgggattaacaggcctgtgccaccacgcccggataattttgtatttttagtagag

SEQ ID NO: 97412 - DNA, 120 bp, synthetic construct
  source 1..120: mol_type = other DNA
tctagtatgtttagtgttttacaagtgcttttttttctgcctaaaatttaagaaatactttacccaatgtactaaatatatatgtgtgcatgtgtgtgtgtgtgtatatatataaaaaat

SEQ ID NO: 97413 - DNA, 120 bp, synthetic construct; identical to SEQ ID NO: 32911
  source 1..120: mol_type = other DNA

SEQ ID NO: 97414 - DNA, 120 bp, synthetic construct
  source 1..120: mol_type = other DNA
tcctcacttcctagatgggatggcggctgggcagagatgctcctcactttccagactgggcagccaggcagaggggctcctcacatcccagacgatgggcggccaggcagagacgctcct

SEQ ID NO: 97415 - DNA, 120 bp, synthetic construct; identical to SEQ ID NO: 32912
  source 1..120: mol_type = other DNA

SEQ ID NO: 97416 - DNA, 120 bp, synthetic construct; identical to SEQ ID NO: 7841
  source 1..120: mol_type = other DNA

SEQ ID NO: 97417 - DNA, 120 bp, synthetic construct; identical to SEQ ID NO: 28965
  source 1..120: mol_type = other DNA

SEQ ID NO: 97418 - DNA, 120 bp, synthetic construct
  source 1..120: mol_type = other DNA
ttctaactggtgtgagatggtatctcattgtggttttgatttgcctttctctgatggccagtgatgatgagcattttttcatgtgttttttggctgcataaatgtcttcttttgagaagt

SEQ ID NO: 97419 - DNA, 120 bp, synthetic construct
  source 1..120: mol_type = other DNA
gtagttctccttgaagaggtccttcacatcccttgtaagttggattcctaggtatattcagatcctttcttatgttcacttaaaagttattgattccaacttctgtcctagagatagcat

SEQ ID NO: 97420 - DNA, 120 bp, synthetic construct; identical to SEQ ID NO: 28966
  source 1..120: mol_type = other DNA

SEQ ID NO: 97421 - DNA, 120 bp, synthetic construct; identical to SEQ ID NO: 28967
  source 1..120: mol_type = other DNA

SEQ ID NO: 97422 - DNA, 120 bp, synthetic construct; identical to SEQ ID NO: 28968
  source 1..120: mol_type = other DNA

SEQ ID NO: 97423 - DNA, 120 bp, synthetic construct
  source 1..120: mol_type = other DNA
tgcataagtgtctgtccatgtccttcgcccactttttgatggggttgtttgtttttttcttgtaaatttgtttgagttcattgtagattctggatattagccctttgtcagatgagtagg

SEQ ID NO: 97424 - DNA, 120 bp, synthetic construct; identical to SEQ ID NO: 26922
  source 1..120: mol_type = other DNA

SEQ ID NO: 97425 - DNA, 120 bp, synthetic construct
  source 1..120: mol_type = other DNA
ccagtttccccagcaccatttattaaatagggagtcctttccccattgcttgtttttctcaggtttgtcaaagatcagatagttgtagatatgcggcgttatttctgagggctctgttct

SEQ ID NO: 97426 - DNA, 120 bp, synthetic construct
  source 1..120: mol_type = other DNA
agtcagatgtcttgtaattggtaggttgtgctggggggtggggggtggggagcttatgaattagagcatttctgtcttataaattcttaatacggtaataagcacaagaccctgaatagt

SEQ ID NO: 97427 - DNA, 120 bp, synthetic construct
  source 1..120: mol_type = other DNA
accatcactcttcctgagtttctgagatcatcaggcccaacctttactttaccaacggggaaacagatctgtcctaattctcccaagtccgaagactttaagtccattccattcaataaa

SEQ ID NO: 97428 - DNA, 120 bp, synthetic construct
  source 1..120: mol_type = other DNA
gggggttctgtgagaggagggggttccgtgagaggaggggattgtgtgagggggggttctgtgagaggagggggttccgtgagaggagggggttccgtgagaggagggggttctgtgaga

SEQ ID NO: 97429 - DNA, 120 bp, synthetic construct
  source 1..120: mol_type = other DNA
gaatttaaggaattatgtaacatttcactagttcattatgtatggcgttaagcagagttactctagatatccaaactgcttttctggtggagacttttaatcccaccccccccacccccc

SEQ ID NO: 97430 - DNA, 120 bp, synthetic construct
  source 1..120: mol_type = other DNA
ggtttaagtgattctgctgcctcagcctcccaagtagctaggactatagtcacatgcaatgacacttggcagtatactgcctttatttaagtagaacatgccacttggtgacatttaatc

SEQ ID NO: 97431 - DNA, 120 bp, synthetic construct; identical to SEQ ID NO: 13602
  source 1..120: mol_type = other DNA

SEQ ID NO: 97432 - DNA, 120 bp, synthetic construct; identical to SEQ ID NO: 27171
  source 1..120: mol_type = other DNA

SEQ ID NO: 97433 - DNA, 120 bp, synthetic construct
  source 1..120: mol_type = other DNA
agtctatcattgttggacacttgggttggttccaagtctttgctactgtgaataatgctgcaataaacatacgtgtgcatgtgtctttatagcagcatgatttatagtcctttgggtata

SEQ ID NO: 97434 - DNA, 120 bp, synthetic construct; identical to SEQ ID NO: 6920
  source 1..120: mol_type = other DNA

SEQ ID NO: 97435 - DNA, 120 bp, synthetic construct; identical to SEQ ID NO: 6921
  source 1..120: mol_type = other DNA

SEQ ID NO: 97436 - DNA, 120 bp, synthetic construct; identical to SEQ ID NO: 6922
  source 1..120: mol_type = other DNA

SEQ ID NO: 97437 - DNA, 120 bp, synthetic construct; identical to SEQ ID NO: 12270
  source 1..120: mol_type = other DNA

SEQ ID NO: 97438 - DNA, 120 bp, synthetic construct; identical to SEQ ID NO: 12271
  source 1..120: mol_type = other DNA

SEQ ID NO: 97439 - DNA, 120 bp, synthetic construct; identical to SEQ ID NO: 12272
  source 1..120: mol_type = other DNA

SEQ ID NO: 97440 - DNA, 120 bp, synthetic construct
  source 1..120: mol_type = other DNA
ggatggctgggatggctgggtcaaatggtatttctagttctagatccctgaggaatcgccacactgacttccacaatggttgaactagtttacagtcccaccaacagtgtaaaagtgttc

SEQ ID NO: 97441 - DNA, 120 bp, synthetic construct
  source 1..120: mol_type = other DNA
gtaccatttattaaatagggaatcctttccccatttcttgtttttgtcaggtttgtcaaatatcagatggttgtagatatgtggcattatttctgagggctctgttctgttccattgatc

SEQ ID NO: 97442 - DNA, 120 bp, synthetic construct
  source 1..120: mol_type = other DNA
tcattactcattcatgtcctttcatttcatttcaatattttctgcaaagtcatcgcccgcgccgcatctgcgtggcggggggcggggtggggcggagccacgccgcggagtcgccgcagg

SEQ ID NO: 97443 - DNA, 120 bp, synthetic construct
  source 1..120: mol_type = other DNA
ttttattgttgttcttccttccattcgtccgcccatggccgcgggtgggactaggcctgtctggacccaggggtcccaaatgtcatgagacacggggtctggtttggagaatgtcacaag

SEQ ID NO: 97444 - DNA, 120 bp, synthetic construct; identical to SEQ ID NO: 14469
  source 1..120: mol_type = other DNA

SEQ ID NO: 97445 - DNA, 120 bp, synthetic construct; identical to SEQ ID NO: 14470
  source 1..120: mol_type = other DNA

SEQ ID NO: 97446 - DNA, 120 bp, synthetic construct
  source 1..120: mol_type = other DNA
tactttaagattgtctccttaaaaaaaaaaaaaaaaaaagagagagagagagagagagaaaaggagggggtggtggagaagcgggagcgaaggaaaggaggcaaaaggcaaagtgaagga

SEQ ID NO: 97447 - DNA, 120 bp, synthetic construct; identical to SEQ ID NO: 32956
  source 1..120: mol_type = other DNA

SEQ ID NO: 97448 - DNA, 120 bp, synthetic construct; identical to SEQ ID NO: 32957
  source 1..120: mol_type = other DNA

SEQ ID NO: 97449 - DNA, 120 bp, synthetic construct; identical to SEQ ID NO: 32958
  source 1..120: mol_type = other DNA

SEQ ID NO: 97450 - DNA, 120 bp, synthetic construct; identical to SEQ ID NO: 32959
  source 1..120: mol_type = other DNA

SEQ ID NO: 97451 - DNA, 120 bp, synthetic construct
  source 1..120: mol_type = other DNA
attatatctaatatataagtagagaatatgtgatgcactatttaatcagaggtcagatgagaagtggctcactatcatgagaacagcaagggagaaatccacccccatgattcaatcatt

SEQ ID NO: 97452 - DNA, 120 bp, synthetic construct; identical to SEQ ID NO: 9053
  source 1..120: mol_type = other DNA

SEQ ID NO: 97453 - DNA, 120 bp, synthetic construct; identical to SEQ ID NO: 9054
  source 1..120: mol_type = other DNA

SEQ ID NO: 97454 - DNA, 120 bp, synthetic construct
  source 1..120: mol_type = other DNA
gttccaagtctttgctcttgtgaatagtgccgcaataaatatacgtgtgcatgtgtctttatagcagcatgatttatagtcctttgggcatatacccagtaatgggatggctgggtcaaa

SEQ ID NO: 97455 - DNA, 120 bp, synthetic construct; identical to SEQ ID NO: 9055
  source 1..120: mol_type = other DNA

SEQ ID NO: 97456 - DNA, 120 bp, synthetic construct; identical to SEQ ID NO: 9056
  source 1..120: mol_type = other DNA

SEQ ID NO: 97457 - DNA, 120 bp, synthetic construct; identical to SEQ ID NO: 9057
  source 1..120: mol_type = other DNA

SEQ ID NO: 97458 - DNA, 120 bp, synthetic construct
  source 1..120: mol_type = other DNA
aaccattgtggaagtcagtgtggcgattcctcagggatctagaactagaaataccatttgacccagccatcccattactgggtatatacccaaaggactataaatcatgctgctctaaag

SEQ ID NO: 97459 - DNA, 120 bp, synthetic construct
  source 1..120: mol_type = other DNA
catataaacagaaccaaagacaaaaaccatatgattctctcaagagatgcagaaaaggcctttgacacaattcaacaatgcgtcacgctaaaactctcaataaattaggtattgatggga

SEQ ID NO: 97460 - DNA, 120 bp, synthetic construct
  source 1..120: mol_type = other DNA
atatagaccaatggaacagaacagagccctcagaaataatgccacatatctacacccatctgatctttgacaaacatgacaaaaataagaaatggggaaacgattccctatttaataaat

SEQ ID NO: 97461 - DNA, 120 bp, synthetic construct
  source 1..120: mol_type = other DNA
gaaccaacccaaatgtccaacaatgatagactggattaagaaaatgtggcacatatacaccgtggaatactatgcagtcataaaagatgatgagttcatgtcctttgtagggacatggat

SEQ ID NO: 97462 - DNA, 120 bp, synthetic construct
  source 1..120: mol_type = other DNA
gcagatcgagctgactcccgttctgccaggtctggtcgctggggttttgtctatgggaacttccttggagtgggctttaatgacggactttcatagaggaaactgcaattatcaaagcaa

SEQ ID NO: 97463 - DNA, 120 bp, synthetic construct
  source 1..120: mol_type = other DNA
tgtaaaatcctaaatagtgtcttctaaatggcaagccgctgtgccagtagctttttatatcagtggggttttaattcccaccttcctgcttgcatcaagaattccttctcagttgtgatg

SEQ ID NO: 97464 - DNA, 120 bp, synthetic construct
  source 1..120: mol_type = other DNA
aggagatacctcttttccaggtttttttggccacactctctggatgaatattgcctttcagttcagaccactctaggaagaggagatagttttggtttaaatgagagagtgtaggatgac

SEQ ID NO: 97465 - DNA, 120 bp, synthetic construct
  source 1..120: mol_type = other DNA
tttttttttttttgagatggagtctcgctctgtcacccaggctggagtgcagagaagcgatctcgtctcactgcaacctccgcctcccgagttcaagcaattctcctgcctcagcctccc

SEQ ID NO: 97466 - DNA, 120 bp, synthetic construct
  source 1..120: mol_type = other DNA
ctgccttggcctcccgaagtattaggattgcaggcttgagccactgtgcttggccagccagaatatttaataaggaaaaacaaatgcagaaatatagaggtgacaatttgaattcttatt

SEQ ID NO: 97467 - DNA, 120 bp, synthetic construct
  source 1..120: mol_type = other DNA
ccttcaggcctaggatgaatgactttgttttcagagaggatttgcttttgtttctgccaggtgtctggccccactcctagcctaggactcctttaattgaatttaccacttttttttttt

SEQ ID NO: 97468 - DNA, 120 bp, synthetic construct
  source 1..120: mol_type = other DNA
ttgttgttttaatttttttttctttttttttttttagatggagtcttgctctgtcacccaggctcaagtgctgttggcgtgatcttggctcattgcaacctccacctcccaagttcaagc

SEQ ID NO: 97469 - DNA, 120 bp, synthetic construct
  source 1..120: mol_type = other DNA
agggctatttggcctccctcttccccaagctcagcaccaggggcaggacactactccctgtttcagactcagactggtacccaagcttgctttgcttctcttttaataaagattaaagct

SEQ ID NO: 97470 - DNA, 120 bp, synthetic construct
  source 1..120: mol_type = other DNA
ccatcagttgactgatgtgacttcctttaaaatcttatcagcatccctttctgcatttcaaatttactactgaagttgattttgctgtaattgatattgtgcaagcacgactgtaatata

SEQ ID NO: 97471 - DNA, 120 bp, synthetic construct
  source 1..120: mol_type = other DNA
gtattttacttctggaaggaaaattaggaggtcacctttaagctctttatatgacagttgatatacagcgttaagagctgtgccaggatctatggccattctttggcttgactgggtggg

SEQ ID NO: 97472 - DNA, 120 bp, synthetic construct
  source 1..120: mol_type = other DNA
tcctactctgttgtattctgttcattgccacgatttattgagcactgacctgtaggttaactcattgactcttcaccatctcgcgaagcaagtttgtgaataaatagtccaaagggaact

SEQ ID NO: 97473 - DNA, 120 bp, synthetic construct
  source 1..120: mol_type = other DNA
cacactcatgctgaggagagcagcattggctgggtgtatttcaggggatgaaattgaagtcttttactggagaggagctgcattatttaaataaaaagaatcatggtgactgcatagaag

SEQ ID NO: 97474 - DNA, 120 bp, synthetic construct
  source 1..120: mol_type = other DNA
ttagtttggatgaggctctgtggccagttttaggaacagtagtctttggaattgaacccaacatttcaccttaagaatacaaggcttcagtgttctagtgggtgaatgcatacactcaag

SEQ ID NO: 97475 - DNA, 120 bp, synthetic construct
  source 1..120: mol_type = other DNA
gtgatccttggagtagaggaagttgtacattcaaggttttctaccctttttgtgtgtgtttattttaatgaggacaatgggaactacaccatttctttcctgttagttcatcctggatta

SEQ ID NO: 97476 - DNA, 120 bp, synthetic construct
  source 1..120: mol_type = other DNA
gaagggttatatttttcttagctgtgtgtgtgtttgtgtgtgtatgtattcatgtgtgtgtgtgtgtgtgtgtgtgtctaattcctttgcgaattttgggaccatccaggttttccccct

SEQ ID NO: 97477 - DNA, 120 bp, synthetic construct
  source 1..120: mol_type = other DNA
cctcctgcctaggcctcccaaagtgctgggattacagatatgagccactgctcccagcagtaattttttttttataacttgtaacagaaatttggcattttcttcaattatgaagacagg

SEQ ID NO: 97478 - DNA, 120 bp, synthetic construct
  source 1..120: mol_type = other DNA
tgtgtcttgagtggttttgttgctgtaagtcaagcacatttattattcatgtataggggggccaagtttcatctgagaatgtaatttcatgctaataggttgcgttgtaagtccctggtt

SEQ ID NO: 97479 - DNA, 120 bp, synthetic construct
  source 1..120: mol_type = other DNA
aaacggacctgtctttcctttgtgagttttcagtgtaattctagcatttctgggagaaatatgtaagtacctcaagggcagaaatcctgcccacttaaatgtttcataattatcacctaa

SEQ ID NO: 97480 - DNA, 120 bp, synthetic construct
  source 1..120: mol_type = other DNA
tacttttggatcaaaaatgacagaaatcaaattgcttgacatctagtaaccagagtggacatgaaagaggagtcaattctacagcaagccctgtaaccagctccgtgcaggagaaacatg

SEQ ID NO: 97481 - DNA, 120 bp, synthetic construct
  source 1..120: mol_type = other DNA
cttctgcacaacaaaggaaacaatcaacagcatgaagaggcaacctgttgaatgagagaaaatattgcatactatcttctgacaagggactaatatccagactatatcagaaacccagca

SEQ ID NO: 97482 - DNA, 120 bp, synthetic construct
  source 1..120: mol_type = other DNA
tcgttctacagcagagcagagtgactatagttagcaacaatgtattgtatatttcaaagtagctggaagtgaggactggaattgttctcaacacataaaaataataaatgcacaaagtga

SEQ ID NO: 97483 - DNA, 120 bp, synthetic construct
  source 1..120: mol_type = other DNA
gggtctgtagagggatgaattagcatcctgttagaaaggtgctgggtccctcctcagtcactttgaatgctccctgtttttgcagcagtcatgacccatatttttaaacttttaaagtat

SEQ ID NO: 97484 - DNA, 120 bp, synthetic construct
  source 1..120: mol_type = other DNA
tctcaggttcaagacatcaatagtgccaaggttgagaaaccctgctgtacatagcgttggatcgtgtgaatataccaccatttatttctctgtgtatttcttagagcctcaacttgagca

SEQ ID NO: 97485 - DNA, 120 bp, synthetic construct
  source 1..120: mol_type = other DNA
aagggaaaaggacaagaatggcacaagaagtattagacttacagggaaaggagatctctgacatttacccatacagaccctagtatttcaaaggcattgtatagccatgccggctaggct

SEQ ID NO: 97486 - DNA, 120 bp, synthetic construct
  source 1..120: mol_type = other DNA
tttcctttttcttttttcttttttttttttttgagacagagtcttggtttgtcccctaggcactggagtgcagtggcatgatctcagcttaccaccatctccctctcccgggttcaagca

SEQ ID NO: 97487 - DNA, 120 bp, synthetic construct
  source 1..120: mol_type = other DNA
aatgcttggattacagaagcgtgccaccacacctggcctcagatgaaatatcctgcatttactccatactagagaaaaatagagacgtgacatgtagcctgcatagcttttttgaattct

SEQ ID NO: 97488 - DNA, 120 bp, synthetic construct
  source 1..120: mol_type = other DNA
acccttttatgcctcagtgtctgactgagctatttagtgaagcacttctttgatctgtctctgtctttcttttctccctctaaaggactgcctctgaaggaaaaatccaggtcaccaggc

SEQ ID NO: 97489 - DNA, 120 bp, synthetic construct
  source 1..120: mol_type = other DNA
aatagggtcacctactctcaaattctgcggttcaaattgtggttggagatgagatgttctatttctgcatctctcctggaccatcttagagcagtgcaaagtttactggatcttccagtg

SEQ ID NO: 97490 - DNA, 120 bp, synthetic construct
  source 1..120: mol_type = other DNA
cacgaggaacagtgagaaacatcttcaggattcccatggcctaggcatggaataaatgcaaggttagggcttattttctgagaaataaacccttagtaggatgctagataaaacacagga

SEQ ID NO: 97491 - DNA, 120 bp, synthetic construct
  source 1..120: mol_type = other DNA
tacacttttattctaatgttctaatcaattaagtcctgtatatttaatattcatttctgtcagggttgaatttgatccaggagaaatggatgtgtactaactagtcaggtgtaactggaa

SEQ ID NO: 97492 - DNA, 120 bp, synthetic construct
  source 1..120: mol_type = other DNA
ctaccttaaaaaaaaaaactgtatggaaagcaactccataaacaagtcagaaacaacattattcacaaagttaaggaataaagaaccaggggtcagggccggggccagttgcggtggctc

SEQ ID NO: 97493 - DNA, 120 bp, synthetic construct
  source 1..120: mol_type = other DNA
ctctgtggcaatgctgttgggaactgaaactcccatccatcgctggtaggagtatagattggtgtaatattctataatggacaatttagttatatctattgatatgacagatgttcatac

SEQ ID NO: 97494 - DNA, 120 bp, synthetic construct
  source 1..120: mol_type = other DNA
aggctgcagctgttattacaatcattttataagtgaaggaacagagaggttaagtaatttacttaagggcatacagcagttggccactggtggaatcagtatgcacaacccatcatgacc

SEQ ID NO: 97495 - DNA, 120 bp, synthetic construct
  source 1..120: mol_type = other DNA
gatcacttgagttcagtgagccatgaacatgccactgcactgcagcctgtgtgacagagtaagcaagaccctgtctctaaaaaaaataaaattaaagggaattttactctactggcaaag

SEQ ID NO: 97496 - DNA, 120 bp, synthetic construct
  source 1..120: mol_type = other DNA
tctactactaataatgacagtaagtctctagaaaggcgttaatctgactcttccaaaaatgccctttgctttgctctcccttaaaagggcagaatccttccctgggtccacttttgatga

SEQ ID NO: 97497 - DNA, 120 bp, synthetic construct
  source 1..120: mol_type = other DNA
tcgttcttttaaacgtttggactgctttggctttttctgtggtggggcctagaagaagacaggtcacagcaggtctcacttgaagaaatctttaacacagaacataaaagtgactgtaac

SEQ ID NO: 97498 - DNA, 120 bp, synthetic construct
  source 1..120: mol_type = other DNA
tgatttaagggtgttttagaaaattaacctgattgtcaactggaaaaagaggtgatagagctggaaatcagtaaaggggctctgggccaggcagggaaatgatgtgatggctgctttaca

SEQ ID NO: 97499 - DNA, 120 bp, synthetic construct
  source 1..120: mol_type = other DNA
tatcacaaagagcccttttccataaggagatgctttttaaaaatatcagtctcacaggtcaggagtattgctacacccaggatagccatgaaatctaaacttcccctggcctcactgtct

SEQ ID NO: 97500 - DNA, 120 bp, synthetic construct
  source 1..120: mol_type = other DNA
gatatgcctatacttgttgtatgcacacccagctgctctaccagtgtcttgtccattaatttttctgttttttctgctttatttcatgatatgcttatgaaaggatttctcatataactc

SEQ ID NO: 97501 - DNA, 120 bp, synthetic construct
  source 1..120: mol_type = other DNA
tatgaggagaaccaagatggaaagcacagaacatatgattatgattccaagtgaaagatgcagccaaagctctcctgtgtcataaacctgttccttcctgcaggatatctgaaaaagcca

SEQ ID NO: 97502 - DNA, 120 bp, synthetic construct
  source 1..120: mol_type = other DNA
tggggaagctgaggcaggacgattgcttgagcccaagagttcaagtccagcttgggcaacatagcaagacctcgtttctaaaaaataatcaaaaacaacaataaaacccctatgttatga

SEQ ID NO: 97503 - DNA, 120 bp, synthetic construct
  source 1..120: mol_type = other DNA
atactcgggaggctgaggcgggagaatcacttgaacccgggacgcagaggtttcagtgagtcgagatcatgccactaaaaaaaaaaaaaaaagaatcaaactattttggcctctccattt

SEQ ID NO: 97504 - DNA, 120 bp, synthetic construct
  source 1..120: mol_type = other DNA
catattttaaaaattggtacagtttaattgtatcgaggtagctagaagtttgaagagtatttttggcccaggtatgtatgattaatgatcaaatggaagacaccaacaacaggaatattt

SEQ ID NO: 97505 - DNA, 120 bp, synthetic construct
  source 1..120: mol_type = other DNA
aaatcaacctgggggaaaaaacagtaaaaatacaaacacaaaaaagtcattgaatatttagaagtgggtatatcgtggtagcctggtaacttggttttgtcacttggaaaatgaactggc

SEQ ID NO: 97506 - DNA, 120 bp, synthetic construct
  source 1..120: mol_type = other DNA
atgacactcctccctgggacacatgcttggatttggctctggaaatgccccgccccaccatgaaaccatctagtcttttccccaggttacttctcttgtagtcacgcaaaatcaaggctg

SEQ ID NO: 97507 - DNA, 120 bp, synthetic construct
  source 1..120: mol_type = other DNA
cctttttctgacagtcactttctttccaaagcttagaacatcataggctctttggcagagagtacagctttcaacaagaaaaagaaaagtttttggccactctgcccccttgcagttcaa

SEQ ID NO: 97508 - DNA, 120 bp, synthetic construct
  source 1..120: mol_type = other DNA
ttctcaaagtgctgggattacaggcgagaaccaccacacacagcctcgtttgcttacttttcaaaacagctctgtgtttgtgtgcgtgtacatggtaaaatttacaacgaaatacacatt

SEQ ID NO: 97509 - DNA, 120 bp, synthetic construct
  source 1..120: mol_type = other DNA
ctcccagagtgctgggattacaggtgtgagccgccgcgtctggccaggttgtctttttattactgagttgccagtgtgctttacgtttcttcacatggtatatatatatatatatatata

SEQ ID NO: 97510 - DNA, 120 bp, synthetic construct
  source 1..120: mol_type = other DNA
ttccaagtcttggattccgaccagatttgcttaatggatgagcagaacgtctagctttagagagttttaggtaacttcacccagctgatcccactgtgcctttaaccaccttcctcttgg

SEQ ID NO: 97511 - DNA, 120 bp, synthetic construct
  source 1..120: mol_type = other DNA
ctcccaaagtgctgggattacaaaccactgctcctggcagagttttcaaaaatcctctagctcttgctaaaaaaagttggtgctttcttagctctggtgggtatgcaagtgtaatattta

SEQ ID NO: 97512 - DNA, 120 bp, synthetic construct
  source 1..120: mol_type = other DNA
atggaagcaaaactgcttatgaataacattaagtgaatgcagaatgaataacttaggtatgtagactcacagctaagaaaaatatatatacatgtagctaatggctcagggtaatctgca

SEQ ID NO: 97513 - DNA, 120 bp, synthetic construct
  source 1..120: mol_type = other DNA
tgtttttatagccacagaatgtcaaaactgagaattagtgacagaactggaattagaacctgactcccaatagctggccctaggctgttaccttgtactctgagtccaaggtagacaaaa

SEQ ID NO: 97514 - DNA, 120 bp, synthetic construct
  source 1..120: mol_type = other DNA
ttttttattcttatgttacaaaggtaggctgttgaccaggcagaccagaagaaacaaaatactttaaatccatagactcagattttagccccaactccacctccatgagctgtgtgactt

SEQ ID NO: 97515 - DNA, 120 bp, synthetic construct
  source 1..120: mol_type = other DNA
ctcatataaagactctagagaatctttacacctaagagtgtgacatatggcagctctaaatacatctgctccctagctcaggccggcttcctgtctttatgttttgagagtcattttgga

SEQ ID NO: 97516 - DNA, 120 bp, synthetic construct
  source 1..120: mol_type = other DNA
atccgccggattgctgaggtggctaagctgtttgctgatgctggtctggtctgcattaccagctttatttctccattcgcaaaggtaaaaaaaaaaaaaaaaaaaaaaggcactacacac

SEQ ID NO: 97517 - DNA, 120 bp, synthetic construct
  source 1..120: mol_type = other DNA
gctggggagattaaaggtaagagaattggctagtagcgtctaccagttacataggctgtcagtcctcagtccttattctgtcctcagaaatcttccttgagtttcaaactgttttccaaa

SEQ ID NO: 97518 - DNA, 120 bp, synthetic construct
  source 1..120: mol_type = other DNA
cattgtaccctatactataatcaaagatatccacgaactctttgtgccggaaaacaaacttgaccacgtccgagctgaggctgaaactctcccttcattatcaattactaaggtaagtgg

SEQ ID NO: 97519 - DNA, 120 bp, synthetic construct
  source 1..120: mol_type = other DNA
gttgttcctttaaaactaaggaactgaaaaatggtgtaaagccaagagaaagacaggtctgtttcatctccacttgctctttgctggtgctgatattcagaaggtagcacgcagaagtac

SEQ ID NO: 97520 - DNA, 120 bp, synthetic construct
  source 1..120: mol_type = other DNA
aggcagcaattattatcccactttacagatgaggaaactgcctcagattaagtgatttgctcataacattcataagtgaaagcccaagaccagagtccagaatcttaggaatcctggccc

SEQ ID NO: 97521 - DNA, 120 bp, synthetic construct
  source 1..120: mol_type = other DNA
cccaggctgatcttgaattcctttcctccagtcatcctcctgccttggccttgcaaagtgctattatagacaacaaattcttaaaagagtctgtgatccaaaaagatgaagaacagctaa

SEQ ID NO: 97522 - DNA, 120 bp, synthetic construct
  source 1..120: mol_type = other DNA
ggtgccagtagggcttttgcagtttatggactcttcttcaagtgggaaaaattgtttccttcctctgtattaacctcaattgaagactgtctaggaggttgctttagttccacagtgtta

SEQ ID NO: 97523 - DNA, 120 bp, synthetic construct
  source 1..120: mol_type = other DNA
cgggaggatcacttgagcccaggagctagagtcccacctgggcaacatagggaaactttgtctctaaaaataaatacataaataaaagaacctggagtcttgaagagactaagtgacttt

SEQ ID NO: 97524 - DNA, 120 bp, synthetic construct
  source 1..120: mol_type = other DNA
atgatctccacagccacagacatgtgcccacttttgtcttccttcaaaccattgcaaatttcttgattacctacaatctgaaagcaacattgtttttattctgaccatgtctcctaaaaa

SEQ ID NO: 97525 - DNA, 120 bp, synthetic construct
  source 1..120: mol_type = other DNA
atagcatgacaaagctagtatatttgtatgttgtatatgtgaagtgtcataataggaatttgttctttgacattgttgctgtaagattcgtttggtggagagctgaaaatgtttcttaat

SEQ ID NO: 97526 - DNA, 120 bp, synthetic construct
  source 1..120: mol_type = other DNA
atggttgcttgttatggaactgggagtaaatatacatttgctgtgactgtaaacttctgcattgtacaagaatgaaaaggtagaattctgaatatgtcatctatctttggtgttgctttc

SEQ ID NO: 97527 - DNA, 120 bp, synthetic construct
  source 1..120: mol_type = other DNA
aatgtggtcagtaagcaatccacagaaagcatgatttctagtgacaacgacagcatttctgaaggggttattctttgttagcctctctcccttttcctcaactagactatgcagtggatt

SEQ ID NO: 97528 - DNA, 120 bp, synthetic construct
  source 1..120: mol_type = other DNA
tttgtgagggcatcattgtaggaggaacaccgttttgtacatttttttacattatctagaatcatagagaaatgagatgtttttagaaagccaaattttatccctttaagccccagactg

SEQ ID NO: 97529 - DNA, 120 bp, synthetic construct
  source 1..120: mol_type = other DNA
cttttctggggagaagagtcttttgtctaattaggcctttgactgattggatgaggcccactcacattctggagggtactctactttactcaaagtctactgatttaaatgttaatccca

SEQ ID NO: 97530 - DNA, 120 bp, synthetic construct
  source 1..120: mol_type = other DNA
gaagcaatcctcccatcttggcctcccaaaatgctgggattataggtgtaagccactgcacctggctgaaaatacattttttacaagtgcatgagatgggtacagaaaatagaatgaata

SEQ ID NO: 97531 - DNA, 120 bp, synthetic construct
  source 1..120: mol_type = other DNA
ggttttggaaaattttaaactccctactgcattgaggtcaggacttagatatgaaaagggaacccacaaagaggcgtttccaaagttagatcacttatggaggccacctccatgatttaa

SEQ ID NO: 97532 - DNA, 120 bp, synthetic construct
  source 1..120: mol_type = other DNA
gaacaagaactcagagttcatgctctgtggctagtgagggggtcaatgatactctcttagtaaatgatactctcttagtaaacaaaaatcagcacagatagtggcagagtttccagagga

SEQ ID NO: 97533 - DNA, 120 bp, synthetic construct
  source 1..120: mol_type = other DNA
agactgggtgacagagcgagactctgtctgaaagaaaaaaaaaagagaggccagactcaaaataactgtaagatctcatccagcctcatgaccctgtcaaaagatatggcttcttttggt

SEQ ID NO: 97534 - DNA, 120 bp, synthetic construct
  source 1..120: mol_type = other DNA
acacatctctcactttaaatcaaaatgattgagcttagtgaggaaggcatgtagaaagctgaaattggacccaggtgcagtggctcacacttgtaatcccagcactttgggaggccaggg

SEQ ID NO: 97535 - DNA, 120 bp, synthetic construct
  source 1..120: mol_type = other DNA
atgtgtcaaagtctcagttaatgtttcctagatccagcaagagaaggcccttagagaaagcctggctgtatcaatgtagattttctcttcaaatgcaaatgtaccccacaaaaggcagat

SEQ ID NO: 97536 - DNA, 120 bp, synthetic construct
  source 1..120: mol_type = other DNA
tcactgctaattgacagtgcacctagttacccaagaactctgaggaagatgtataaggagattaatttgttttcatgcataacaccatccattctgcagcccacggatcaaagagtaatt

SEQ ID NO: 97537 - DNA, 120 bp, synthetic construct
  source 1..120: mol_type = other DNA
cacctgagcctgggaagtcgaggctgcagtgagctgtgattgtatcagtgcactccaacctgggctataggagtgagaccctttctcaaaaaaaaaaaaagtttagataatattacattt

SEQ ID NO: 97538 - DNA, 120 bp, synthetic construct
  source 1..120: mol_type = other DNA
gagcaggtgaaacttgtaaaactaatgcttgctggggctttgttgcctttcgtccatggctcccagagatttgtcaagtagtaattatttttcacaatgctcttggtgaggaaagtaaga

SEQ ID NO: 97539 - DNA, 120 bp, synthetic construct
  source 1..120: mol_type = other DNA
gaagtcagcactgactcctatgacacatgagcataactgagtgccccttctttgtcctcccagagtaatttggacttgcccctttcatacctgtgacaggtgaagctgaaatgtcaatat

SEQ ID NO: 97540 - DNA, 120 bp, synthetic construct
  source 1..120: mol_type = other DNA
catcccagaaatgccaaacacatagttttaacatctctcttcaaacagacaggtttttaggctggatggtggatgaattcggtttgatgcccccttcaccaatagatagagcaatatacg

SEQ ID NO: 97541 - DNA, 120 bp, synthetic construct
  source 1..120: mol_type = other DNA
taaaaccattacatgtttgactgaggaatgagattggctgtaagtatttgtgtcagtgactaggagagacacagctctgtaattgattatacttcaataccagatggaaaatatttaaac

SEQ ID NO: 97542 - DNA, 120 bp, synthetic construct
  source 1..120: mol_type = other DNA
cagagttgattgggcaggaaattctagagttctgggtaccctgattatgatcaaaagagtaggtgatgactctgggtgggtcttcccaccaagggtctccttgcctttatgagatagaca

SEQ ID NO: 97543 - DNA, 120 bp, synthetic construct
  source 1..120: mol_type = other DNA
gatgaatgatcttcccttgtatgtgtataccacattttatttacccattcatccatctatgcacatttgggttgcttccacctcttggctatttgaatagtgctgctgtgaacatgagga

SEQ ID NO: 97544 - DNA, 120 bp, synthetic construct
  source 1..120: mol_type = other DNA
cttttaggtgtttcatccattttgagttaaattttgtatgtggtgtaagataagggtccaacttcattcctttgcatgtggatatccagttttcccaacattatttgttgaagagactgt

SEQ ID NO: 97545 - DNA, 120 bp, synthetic construct
  source 1..120: mol_type = other DNA
ggatcaccatgtctacttgaaagcatgagtgataaactatggttattcagatatgactattcggcagatatttttcaaaatggacaaagggaacctgataattcaaggaaaacagctgag

SEQ ID NO: 97546 - DNA, 120 bp, synthetic construct
  source 1..120: mol_type = other DNA
gagaaaacttttcagataaaatagaaatcacaattaatcattagcaatcataacaatgttctttctagatggtgatggaaagtggggactggctggttggtggagaccttcaggtgctgg

SEQ ID NO: 97547 - DNA, 120 bp, synthetic construct
  source 1..120: mol_type = other DNA
caaagtgctgggattacaggcatgagccaccatcatgcctggcttcagcatttttatagttaaaaataacctgaaaacatcttctattggtatgtctataatatggaaacagttttataa

SEQ ID NO: 97548 - DNA, 120 bp, synthetic construct
  source 1..120: mol_type = other DNA
agtgacctgagatcgctgactgcactccagcctgggcaacagagtgagactctttcaaaaaaaaaaaaaaaagccagtggataatgaatgcacagaacaataaacatagctgtgtccttt

SEQ ID NO: 97549 - DNA, 120 bp, synthetic construct
  source 1..120: mol_type = other DNA
ggaagttggcaagtgaatgaggtggctaatgaaacttaactgggtgatagggcaagttgtatgtaacctaatattcaatttcagaagttccagttactctccatgccctgtgagcttcat

SEQ ID NO: 97550 - DNA, 120 bp, synthetic construct
  source 1..120: mol_type = other DNA
tgtataaaagaaatgatgaggcagaatttgggccctttgaaaaactctccagtgcattgccacatgctcccaagtggactgagtcccttgagagtcaagacgtggtcttataaattttat

SEQ ID NO: 97551 - DNA, 120 bp, synthetic construct
  source 1..120: mol_type = other DNA
cacctgagcaggcaggtcccagatttcttaaggctttgtttgaccatgtgtctagttacttgctgaaaagtgaatatattttccagcatgtcttgacaacctgtactcttccaatgtcat

SEQ ID NO: 97552 - DNA, 120 bp, synthetic construct
  source 1..120: mol_type = other DNA
ggtcagattcccctcagctgcttaacaaagttcctcgaacagaaagtgcttacaaagctgccttctcggatactgaaaggtcgagttttctgaactgcactgattttattgcagttgaaa

SEQ ID NO: 97553 - DNA, 120 bp, synthetic construct
  source 1..120: mol_type = other DNA
tcccttggcacccttacccacgtggggcaacattttccccttacaccaagagtacatccttaatcccgtatgcttttctttctttctctttctttctttctttccttctttctttctttc

SEQ ID NO: 97554 - DNA, 120 bp, synthetic construct; identical to SEQ ID NO: 15418
  source 1..120: mol_type = other DNA

SEQ ID NO: 97555 - DNA, 120 bp, synthetic construct
  source 1..120: mol_type = other DNA
tgcagtgagctgtgtttgtaccactgcactccaggctgggtgacagagtgagaccctgtctcaaaaaaaaaaaaaaaaaaagaagaagaaggagaagaggaagaagaagaagaagaagaa

SEQ ID NO: 97556 - DNA, 120 bp, synthetic construct
  source 1..120: mol_type = other DNA
gtatttaatgtgaagttcaaggaggtgggagggggttagaaagactgccttgaaatatttgacaggcggccgggcgcagtggcttatgcctataatcccagtactctgggaggctgaggc

SEQ ID NO: 97557 - DNA, 120 bp, synthetic construct
  source 1..120: mol_type = other DNA
tgctcatggtggagggtgagtgggcctttgtgtacatggtggagggtgactggccctctgtgttcatcgtggagggtgagtgggccctccgtgctcatggtggagggtgagcgggccctc

SEQ ID NO: 97558 - DNA, 120 bp, synthetic construct
  source 1..120: mol_type = other DNA
tgttcgtggtggagggtgagtgggcctctgtgttcgtggtggagggtgagtgggccctccgtgggtgagtgggccctccgtgttcatcgcggagggtgagtgggccctccgtgttcatgg

SEQ ID NO: 97559 - DNA, 120 bp, synthetic construct
  source 1..120: mol_type = other DNA
aacgaatatagatgaggatcagttaactttatttttgaataacatatacaaggaaataactcaagaaaaacatcatcggccgggcgcggtggctcacgcctgtaatcccagcactttggg

SEQ ID NO: 97560 - DNA, 120 bp, synthetic construct; identical to SEQ ID NO: 10209
  source 1..120: mol_type = other DNA

SEQ ID NO: 97561 - DNA, 120 bp, synthetic construct; identical to SEQ ID NO: 10210
  source 1..120: mol_type = other DNA

SEQ ID NO: 97562 - DNA, 120 bp, synthetic construct
  source 1..120: mol_type = other DNA
tccgcccacctcggcctcccaaagtgctgggattacaggcgtgagccactgtgccctgccaaaaatactcttaaatatatatatatatctcctatatatatctcctatatatatatatat

SEQ ID NO: 97563 - DNA, 120 bp, synthetic construct
  source 1..120: mol_type = other DNA
aacactttccacatcatagtttatctatagaaaatgtgtcaccttccacaatggttgaactagtttacagtccgacaaatattgtaaaagtgttcctatttctccacatcctctccagca

SEQ ID NO: 97564 - DNA, 120 bp, synthetic construct; identical to SEQ ID NO: 21931
  source 1..120: mol_type = other DNA

SEQ ID NO: 97565 - DNA, 120 bp, synthetic construct
  source 1..120: mol_type = other DNA
ggaatggtatcagctcctctttgtacctctggtagagttcggctgtgactttgtctggtcctgggcttttttttggttagtaggctattaattactgcctcaatttcataaagacagata

SEQ ID NO: 97566 - DNA, 120 bp, synthetic construct
  source 1..120: mol_type = other DNA
catctacagaactctccaccccaaatcaacagaatatacatttttttcggcaccacaccacacctattccaaaattgaccacatacttggaagtaaagctctcctcagcaaatgtaaaag

SEQ ID NO: 97567 - DNA, 120 bp, synthetic construct
  source 1..120: mol_type = other DNA
tgataccgaagccaggcagagacacaaccaaaaaagagaattttagaccaatatccttgataaacattgatgcaaaaatcctcaataaaatactggcaaaacgaatccagcggcacatca

SEQ ID NO: 97568 - DNA, 120 bp, synthetic construct
  source 1..120: mol_type = other DNA
ccatgctcatgggtaggaacaatcaatatcgtgaaaatggccatactgcccagggtaatttacagattcaatgccatccccatcaagctaccaaagcctttcttcacagaattggaaaaa

SEQ ID NO: 97569 - DNA, 120 bp, synthetic construct; identical to SEQ ID NO: 21932
  source 1..120: mol_type = other DNA

SEQ ID NO: 97570 - DNA, 120 bp, synthetic construct
  source 1..120: mol_type = other DNA
ctcttgaactcgggaggcgaaggttgcagtgagccgagatcccgccactgcactccagcctgaacgacacagtgagactccgtctcaaaataaataaataaataaataaataaataaata

SEQ ID NO: 97571 - DNA, 120 bp, synthetic construct
  source 1..120: mol_type = other DNA
gttgcagtgagccgagatcatgccactgcactccagcctgggcgacagaatgagactctgcctcaaaaaaaaaaaaaaatatgtatatatatgttaaaaatatatattatacataatata

SEQ ID NO: 97572 - DNA, 120 bp, synthetic construct; identical to SEQ ID NO: 21933
  source 1..120: mol_type = other DNA

SEQ ID NO: 97573 - DNA, 120 bp, synthetic construct
  source 1..120: mol_type = other DNA
cagtaatgggatggctgggtcaaatggtatttctagttctagatccttgaggaatccccacactgtcttccacaatggttgaactagtttacactcccaccaacagtgtaaaagctgaac

SEQ ID NO: 97574 - DNA, 120 bp, synthetic construct; identical to SEQ ID NO: 21934
  source 1..120: mol_type = other DNA

SEQ ID NO: 97575 - DNA, 120 bp, synthetic construct; identical to SEQ ID NO: 21927
  source 1..120: mol_type = other DNA

SEQ ID NO: 97576 - DNA, 120 bp, synthetic construct
  source 1..120: mol_type = other DNA
ccatgttgtaggttgcctgttcactgtgatggtagtttcttttgctgtgcagaagctctttagtttaattagatcccatttgtcaattttgtcttttgttgccattgcttttggtgtttt

SEQ ID NO: 97577 - DNA, 120 bp, synthetic construct
  source 1..120: mol_type = other DNA
tgattgccctggccagaacttccaacactgtgttgaataggagcggtgagagagggcatccctgtcttgtgccagttttcaaagggaatgcttccagtttttgcccattcagtatgatat

SEQ ID NO: 97578 - DNA, 120 bp, synthetic construct
  source 1..120: mol_type = other DNA
gaactagaaaagcaagagcaaacacattcaaaagctagcagaaggcaagcaataactaaaatcagagcagaactgaaggaaatagagacacaaaaaacccttcaaaaaattaatgaatcc

SEQ ID NO: 97579 - DNA, 120 bp, synthetic construct
  source 1..120: mol_type = other DNA
ccactttttgaaacaacaggtgctggagaggatgtggagaaataggaacacttttacactgttggtgggactgtaaactagttcaaccattgtggaagtcagtgtggcgattcctcaggg

SEQ ID NO: 97580 - DNA, 120 bp, synthetic construct; identical to SEQ ID NO: 21926
  source 1..120: mol_type = other DNA

SEQ ID NO: 97581 - DNA, 120 bp, synthetic construct
  source 1..120: mol_type = other DNA
catatccaccattagatgcccactggtggtattccattgttggatatatcacatttcagttgtttccagtttttttgccggtatgaataaaggtgttatgaacattcatggacaagtgta

SEQ ID NO: 97582 - DNA, 120 bp, synthetic construct
  source 1..120: mol_type = other DNA
ggagatatacattaggagagtaatgttgttttcatgtatggtaactgatatgttttggctctgtgtcccaaatctcatcttgtaggtcccataattcccacatgttgtgggagggacctg

SEQ ID NO: 97583 - DNA, 120 bp, synthetic construct; identical to SEQ ID NO: 21928
  source 1..120: mol_type = other DNA

SEQ ID NO: 97584 - DNA, 120 bp, synthetic construct
  source 1..120: mol_type = other DNA
aaaaattttctcccatgttgtaggttgcctgtttactctgatggtagtttcttttgctgtgcagaagctctttagtttaattagatcccatttgtcaattttggcttttgttgccattgc

SEQ ID NO: 97585 - DNA, 120 bp, synthetic construct
  source 1..120: mol_type = other DNA
taagttggattcctaggtattttattctctttgaagcaattgtgaatgggagttcactcatgatttggctctctgtttgtctgttggtgctgtataagaatgcctgtgatttttgtacat

SEQ ID NO: 97586 - DNA, 120 bp, synthetic construct
  source 1..120: mol_type = other DNA
cgaggaatgtattcatttcttctagattttctagtttatttgcgtagaggtgtttgtagtattctctgatggtagtttgtatttctgtgggatcggtggtgatatcccctttatcatttt

SEQ ID NO: 97587 - DNA, 120 bp, synthetic construct
  source 1..120: mol_type = other DNA
agtctgtttaatccgagactaggattgcaacccctgcctttttttgttttccattggcttggtagatcttcctccatccttttattttgagcctatgtgtgtctctgcacgtgagatggg

SEQ ID NO: 97588 - DNA, 120 bp, synthetic construct
  source 1..120: mol_type = other DNA
tgctgataccctttcttccagttgatcgcatcagctcctgaggcttctgcattcttcacgtagttctcgagccttggttttcagctccatcagctcctttaagcacttctctgtattggt

SEQ ID NO: 97589 - DNA, 120 bp, synthetic construct
  source 1..120: mol_type = other DNA
gaccccttgcgcttcccaggtgaggcaatgcctcgccctgcttcggctcgcacatggtgcgcgcacacactggcctgcgcccactgtctggcactccctagtgagatgaacccggtacct

SEQ ID NO: 97590 - DNA, 120 bp, synthetic construct; identical to SEQ ID NO: 21929
  source 1..120: mol_type = other DNA

SEQ ID NO: 97591 - DNA, 120 bp, synthetic construct; identical to SEQ ID NO: 21930
  source 1..120: mol_type = other DNA

SEQ ID NO: 97592 - DNA, 120 bp, synthetic construct
  source 1..120: mol_type = other DNA
atagagtctggatattagccctttgtcagatgagtaggttgcgaaaattttctcccattttgtaggttgcctgttcactctgatggtagtttcttttgctgtgcagaagctctttagttt

SEQ ID NO: 97593 - DNA, 120 bp, synthetic construct
  source 1..120: mol_type = other DNA
gtataatttgtaatttgtccaccgaggttctcctagtatgaggtgatttcttattgtttcatgaataaaattatgatatacctacatatatgaatatatttacaaatcctgaccttatgt

SEQ ID NO: 97594 - DNA, 120 bp, synthetic construct
  source 1..120: mol_type = other DNA
taaataactagatagcttgccagtgaaatatagaagtacttaaaatggtttctgtaaaaaattgataatacccagcactttgggaggccgaggcgggtggatcatgaggtcaggagatcg

SEQ ID NO: 97595 - DNA, 120 bp, synthetic construct; identical to SEQ ID NO: 22558
  source 1..120: mol_type = other DNA

SEQ ID NO: 97596 - DNA, 120 bp, synthetic construct; identical to SEQ ID NO: 22559
  source 1..120: mol_type = other DNA

SEQ ID NO: 97597 - DNA, 120 bp, synthetic construct; identical to SEQ ID NO: 19269
  source 1..120: mol_type = other DNA

SEQ ID NO: 97598 - DNA, 120 bp, synthetic construct; identical to SEQ ID NO: 19270
  source 1..120: mol_type = other DNA

SEQ ID NO: 97599 - DNA, 120 bp, synthetic construct; identical to SEQ ID NO: 19271
  source 1..120: mol_type = other DNA

SEQ ID NO: 97600 - DNA, 120 bp, synthetic construct; identical to SEQ ID NO: 19272
  source 1..120: mol_type = other DNA

SEQ ID NO: 97601 - DNA, 120 bp, synthetic construct; identical to SEQ ID NO: 19273
  source 1..120: mol_type = other DNA

SEQ ID NO: 97602 - DNA, 120 bp, synthetic construct; identical to SEQ ID NO: 19274
  source 1..120: mol_type = other DNA

SEQ ID NO: 97603 - DNA, 120 bp, synthetic construct
  source 1..120: mol_type = other DNA
tgaaaagatcaacaaaattgatagaccgctagcaagactaataaagaagagagaagaatcaaatagaagcaataaaaaatgataaagggaatatcgccaccgatcccacagaaatacaaa

SEQ ID NO: 97604 - DNA, 120 bp, synthetic construct
  source 1..120: mol_type = other DNA
agaaaccctggaagaaaacctaggcaataccattcaggacataggcatgggcaaggacttcatgtctaaaacacaaaaagcaatggcaacaaaagccaaaattcgcaaatgggatctaat

SEQ ID NO: 97605 - DNA, 120 bp, synthetic construct
  source 1..120: mol_type = other DNA
aagattgagctgtcctactatacaccacagtacaggtatgttaaattctaacgaaccttcatccagatgtggtaattacatgcctgtaatcccagtactttgggaggccaaggcaggtgg

SEQ ID NO: 97606 - DNA, 120 bp, synthetic construct
  source 1..120: mol_type = other DNA
gagtctgggaagcagaggttgcagtgagctgtgatcaccccactgcactccaccctaggtgatggagcaagacccagcctcaaattaaaaaaaaaaaaatatatatatatatatatatat

SEQ ID NO: 97607 - DNA, 120 bp, synthetic construct
  source 1..120: mol_type = other DNA
aaacagtctgcttttcttttctttttttaaaaaaagagcccattagaagattgagaaacactgtccccaaggaataaagccttcaaaatacattatgatataacatatcaatgttttcca

SEQ ID NO: 97608 - DNA, 120 bp, synthetic construct
  source 1..120: mol_type = other DNA
aagcatggtaaaaacaacataccttcaagttttggggtcgtgtaaatttgttgagaagtgcagtctgaatgagctcccaccggctccccgcagttcgctcaccattcttttggaaaaaag

SEQ ID NO: 97609 - DNA, 120 bp, synthetic construct
  source 1..120: mol_type = other DNA
cctgtatacatactactgtggcctctctttttaataccactactaccaattgccacctcccccactgtatctggttaaatctctattgtcaccttcatagctctgccagattttcattat

SEQ ID NO: 97610 - DNA, 120 bp, synthetic construct
  source 1..120: mol_type = other DNA
ttctgccttatgcctctcaatcaaatcctttcttctaaggaggagtattaacattgctgcagacccatatagatttgccactggtaagagaaagagattatggtttaaagtttaacatta

SEQ ID NO: 97611 - DNA, 120 bp, synthetic construct
  source 1..120: mol_type = other DNA
aagttgcacactccttatgagaatctaacaaatgcctgatgatctgaggtggaacagtttcattctgaaaccatcccccaacccatggaaaaatggtcttccataaaactggtccccggt

SEQ ID NO: 97612 - DNA, 120 bp, synthetic construct; identical to SEQ ID NO: 413
  source 1..120: mol_type = other DNA

SEQ ID NO: 97613 - DNA, 120 bp, synthetic construct
  source 1..120: mol_type = other DNA
caagaccatcctggccaacatggtgaaacctcatctctactaaaaatacaaaaattagttaggcattgtgccgcgcgtcggtagtcccagctacttaggaggctgaggcaggcgaatcgc

SEQ ID NO: 97614 - DNA, 120 bp, synthetic construct
  source 1..120: mol_type = other DNA
agtttaagagtagcctagccaacatggcgaaaccccgtctctattaaaaatacaaacatcagccaaggttggtggtatgcacctgtagtcccagctacttgggagggtgaggtaggagga

SEQ ID NO: 97615 - DNA, 120 bp, synthetic construct; identical to SEQ ID NO: 414
  source 1..120: mol_type = other DNA

SEQ ID NO: 97616 - DNA, 120 bp, synthetic construct; identical to SEQ ID NO: 415
  source 1..120: mol_type = other DNA

SEQ ID NO: 97617 - DNA, 120 bp, synthetic construct; identical to SEQ ID NO: 416
  source 1..120: mol_type = other DNA

SEQ ID NO: 97618 - DNA, 120 bp, synthetic construct; identical to SEQ ID NO: 417
  source 1..120: mol_type = other DNA

SEQ ID NO: 97619 - DNA, 120 bp, synthetic construct
  source 1..120: mol_type = other DNA
cacctggatttaaatcccagcattaccactcagaaggtacatgattccagtgaattctcttacccaaatctcagttatctcatttagtgagtataataccatctgtctgcctgtcacggc

SEQ ID NO: 97620 - DNA, 120 bp, synthetic construct
  source 1..120: mol_type = other DNA
tcttctgtagtctgctttgcatttgcaagctttacagttgtgagaaactgttgattgtctctattctcttcactatctgtgtcactgtgatcatcattttgaggtgaccgatcaatgtta

SEQ ID NO: 97621 - DNA, 120 bp, synthetic construct
  source 1..120: mol_type = other DNA
gggcaacagagtgagactccatctcaaaaaaaaaaaaagacacagactattcctctctcatcttggtatctcaagtatacaggacagtccctggcatacaggactctctaaaaaattact

SEQ ID NO: 97622 - DNA, 120 bp, synthetic construct
  source 1..120: mol_type = other DNA
ggagaacatgggcataatcggtaagatttcttcggaaaaggtaaggcttgacttatgccttgaaaagtaaacatgcagtcacataaagagaaaattataagcaaaggcaccaatatcagg

SEQ ID NO: 97623 - DNA, 120 bp, synthetic construct; identical to SEQ ID NO: 10639
  source 1..120: mol_type = other DNA

SEQ ID NO: 97624 - DNA, 120 bp, synthetic construct; identical to SEQ ID NO: 10640
  source 1..120: mol_type = other DNA

SEQ ID NO: 97625 - DNA, 120 bp, synthetic construct; identical to SEQ ID NO: 10641
  source 1..120: mol_type = other DNA

SEQ ID NO: 97626 - DNA, 120 bp, synthetic construct; identical to SEQ ID NO: 10642
  source 1..120: mol_type = other DNA

SEQ ID NO: 97627 - DNA, 120 bp, synthetic construct
  source 1..120: mol_type = other DNA
tttgtatcagtcattgctcaaccagagaaatggaaccaggaggacatatatatgaagagatttattgccaaaaattggcctacacaattgtggagctgactagtcaggtccaaagggtgc

SEQ ID NO: 97628 - DNA, 120 bp, synthetic construct
  source 1..120: mol_type = other DNA
tatgtcttgataggggtgtgggatataaaagcatatcaatttgccaaaactcaccatattatccacttaacattgtatacttcaatgtgtgtaaattttacttcaaaaataaaagaactg

SEQ ID NO: 97629 - DNA, 120 bp, synthetic construct
  source 1..120: mol_type = other DNA
cctgacagtggaggaacctggtcaacccaacttaaccaagtcattacactggtgtcacaaatattgggacaaagtgctatcacatgtctcctcaaaagatatactaaatagaacacagta

SEQ ID NO: 97630 - DNA, 120 bp, synthetic construct
  source 1..120: mol_type = other DNA
gggtggaggttgcagtaagctgagattgcgccactgcactccagcctggtgacagagtgagactctgtctcaaaacaaacagaaaaacacacaataaaaaccacataatataaataaagc

SEQ ID NO: 97631 - DNA, 120 bp, synthetic construct
  source 1..120: mol_type = other DNA
ccaaaacaggaagaaagaaaacaacacattaataagcttacttcaaaacttaaaacttctgtgcttcaaaagtcactgtgaagagaatgaaaagacatgctagaaatatctgataaagga

SEQ ID NO: 97632 - DNA, 120 bp, synthetic construct
  source 1..120: mol_type = other DNA
aaatgcatggtatggtaaaaagagcactgcactgagattaggaaacgtgagaaactcaaagtggatcttcactagctaggtgaccttagataaccaaacctcactggacatcattccatc

SEQ ID NO: 97633 - DNA, 120 bp, synthetic construct
  source 1..120: mol_type = other DNA
ctaatgattattaaaaacttagaaaagacaagcataaaaacgtttaatttccaaacatttttggaaaactccaactgaatttggacctttcccaatgagctggtgtcttgacaggcacct

SEQ ID NO: 97634 - DNA, 120 bp, synthetic construct; identical to SEQ ID NO: 408
  source 1..120: mol_type = other DNA

SEQ ID NO: 97635 - DNA, 120 bp, synthetic construct
  source 1..120: mol_type = other DNA
atgggatattttgttctcagtgttcaatccaaatctaccttaacagctaaaaaaaaaatttttttttttttttttttgagacagtctcgctctgttgcccaggctggagcacagtggtgt

SEQ ID NO: 97636 - DNA, 120 bp, synthetic construct
  source 1..120: mol_type = other DNA
tcagtaaaaaatggtgcagtaaaaacctctgaaaactctctcctccatgaaagcaatgtgaacactgtgatgagcactgtgagaatcaactgaaaagtagccaaaggcttgcagcaatcc

SEQ ID NO: 97637 - DNA, 120 bp, synthetic construct
  source 1..120: mol_type = other DNA
gaactgtgatgaaaagcgaaaatctgatttccagggtcacattacattattttaaatgtccagttttaaatgaaaattagaagacatggaaagaaatgagaaagtatggcccatactcaa

SEQ ID NO: 97638 - DNA, 120 bp, synthetic construct; identical to SEQ ID NO: 409
  source 1..120: mol_type = other DNA

SEQ ID NO: 97639 - DNA, 120 bp, synthetic construct
  source 1..120: mol_type = other DNA
ttcggtgagccgagattgcaccattgcactccagcctgggcaacaacagcaaacctctgtctcaaaaaaaaaaaaaaaaaaaaaaaaattcaaactgtggggtaactgaatagtttttaa

SEQ ID NO: 97640 - DNA, 120 bp, synthetic construct
  source 1..120: mol_type = other DNA
gtttataaacctatttgtgtctcatgggccacaaatcaagggaggtctttatctgggaaggtttcaaagtcattctcccccattcactactcaacttccctttatgtatttcacgtgact

SEQ ID NO: 97641 - DNA, 120 bp, synthetic construct
  source 1..120: mol_type = other DNA
tagaaggcgaagcagtcttcttttaccacaggagaacttagaaaatactaaaacataccactgaggagttcttcaattgagctaccagagagaatcatatatttggatttgtgttctgga

SEQ ID NO: 97642 - DNA, 120 bp, synthetic construct
  source 1..120: mol_type = other DNA
tttatacaggcactactagggcctcaaacaggaaagtggtaaagtaaaggaaagagaagaaactcggtaaagaaataaaatggactgtacttgagaactaagagactggctgagtgccta

SEQ ID NO: 97643 - DNA, 120 bp, synthetic construct
  source 1..120: mol_type = other DNA
ggtgctaactagcagtaactttgtttagttcatgtgtattaagaatctctcagtttatccaagactttaaagatggaaagaacttcatcaagaggggaatgtgggggaaaaagtgatact

SEQ ID NO: 97644 - DNA, 120 bp, synthetic construct
  source 1..120: mol_type = other DNA
gtctgaaccaagaggctgatgctgtccagatcttgggattttctgtcaaaggctttttagagaagcacatataagaaacagagagtatacactggcaaatcacaacattaccaaggctgt

SEQ ID NO: 97645 - DNA, 120 bp, synthetic construct
  source 1..120: mol_type = other DNA
ttgccttattagatatttttcccctgatcacttactgaataaaaaatataaatgaatgaaacagaggagatccaaagttctaactcacataagagtgcccataatcttttttgggaggga

SEQ ID NO: 97646 - DNA, 120 bp, synthetic construct
  source 1..120: mol_type = other DNA
aataaaaataagtcaaattctgcctatcaaaattaaggggacaatcttcgtctcacttagaggcaaagttactgtgtctcattgacacagcagccttgccagtctctgcattttgacctg

SEQ ID NO: 97647 - DNA, 120 bp, synthetic construct
  source 1..120: mol_type = other DNA
tttttttctctcttcaggtcgcttaaccttttatctacttccctctattaataatcatctaaaccacgcactcagtcttctgaagtaaatttctttatctttcacttcacaaataaacat

SEQ ID NO: 97648 - DNA, 120 bp, synthetic construct
  source 1..120: mol_type = other DNA
atttatgagaagaaattccctggcactaggataaatagaggttggaaaaccatctttctaggtgctataaaatagaatcctctcatggtgcaagagtccttctatttctagggggtctag

SEQ ID NO: 97649 - DNA, 120 bp, synthetic construct
  source 1..120: mol_type = other DNA
tttcaaggagcaataaatctgggaggatctaaatgaagtactattaatgtagtcaataattttagaggatgagatccttttctagtcagatttatttatttattttttaaagctagtagc

SEQ ID NO: 97650 - DNA, 120 bp, synthetic construct
  source 1..120: mol_type = other DNA
actggaacacatcttttataatggaggtatcttaccataggtctagactagaggtgaattttcccagagaagatgtgcatctgcttctgctgtcgtctgggaacactatcagcctgatac

SEQ ID NO: 97651 - DNA, 120 bp, synthetic construct
  source 1..120: mol_type = other DNA
agacagagtcttgctctgtcgcccaggctagagtgcagtggcacaatctcagctcactgcaacctccacctcctgggttcaagtgattcttgtgcctcaacctcccgagtagctggcatt

SEQ ID NO: 97652 - DNA, 120 bp, synthetic construct
  source 1..120: mol_type = other DNA
tactattactgtcttagctgctatcagtttttggggaagcaagaatgttaaggttcaatagaggaagatggagatataaaactcagtacaaaacagttttataagaactccacaaagggc

SEQ ID NO: 97653 - DNA, 120 bp, synthetic construct; identical to SEQ ID NO: 410
  source 1..120: mol_type = other DNA

SEQ ID NO: 97654 - DNA, 120 bp, synthetic construct; identical to SEQ ID NO: 411
  source 1..120: mol_type = other DNA

SEQ ID NO: 97655 - DNA, 120 bp, synthetic construct
  source 1..120: mol_type = other DNA
gtacaaatcaagcagaatctcaatgtactctgtttattcactgctccaatcctaacttcaaatcactgtgtaaccaaatacactttcccatcttcctgatagagcagggggaagtggggg

SEQ ID NO: 97656 - DNA, 120 bp, synthetic construct
  source 1..120: mol_type = other DNA
agtaataatcccattagtatacagtaaatcaaacccaaagcactacaacctccattttaaaatacgagcaagtgatagtccggaacccagccagaaagtcattcctggctcttctgtgag

SEQ ID NO: 97657 - DNA, 120 bp, synthetic construct
  source 1..120: mol_type = other DNA
ggctgcttaggattctctacaacattgtggagactaacactaggttacctgccttaattcatttttcatgttctgctatccaaaagaacatccatcacctaggaagacaagaatacgcct

SEQ ID NO: 97658 - DNA, 120 bp, synthetic construct
  source 1..120: mol_type = other DNA
ggctgaaaaacaaaggtcttttaaaattaaaatatataataaaattggccgggtgcggtggctgatgcctgtaatcccagcactttgggaggccaaggctggtggatcacgagttcagga

SEQ ID NO: 97659 - DNA, 120 bp, synthetic construct
  source 1..120: mol_type = other DNA
tcgtaattcctaagactaagacataatatgaaaagtaaaagacaagagactgagaacaaagggtctaaattatagtcttagcactctgccactaaccagctccattactcaaaacaagtc

SEQ ID NO: 97660 - DNA, 120 bp, synthetic construct
  source 1..120: mol_type = other DNA
tgggaggatctcttgagcccaggaatttgagaccagcctgggcaacataatgagacccagtctcaaaacaacaacagcaagaaaagttatttccttgaggaaagtttcctttattaaatt

SEQ ID NO: 97661 - DNA, 120 bp, synthetic construct
  source 1..120: mol_type = other DNA
tcatcttaagagagtaaaacattctccaattttaaaaggctaaaaaatatggtcttcggggctgacactctgatattggagagaattgtgaattcatttctctgctgccatgtggagtta

SEQ ID NO: 97662 - DNA, 120 bp, synthetic construct
  source 1..120: mol_type = other DNA
aaagaaaaaacaaggaacatgttggaggagactaggtaattaaatgtaactgggatgctgggtaggatcctggaacagaaaaaggatactagaaaaactggtagaatcagactgggtgca

SEQ ID NO: 97663 - DNA, 120 bp, synthetic construct
  source 1..120: mol_type = other DNA
tatttcagcattaaggaatataagcacaacaaaagttctcgtgaataatcaaactgaagaggcatgtggagtccagagaactggggaatcatctgagaggacagaaagaacatgggccct

SEQ ID NO: 97664 - DNA, 120 bp, synthetic construct
  source 1..120: mol_type = other DNA
ataagtcttgaccctcttattccaaattacacttcatactcacaatttctttataagaatcaaatctaacttcattaaagctattaatagaacatgtaaaaaccaccatacggacatgca

SEQ ID NO: 97665 - DNA, 120 bp, synthetic construct; identical to SEQ ID NO: 10599
  source 1..120: mol_type = other DNA

SEQ ID NO: 97666 - DNA, 120 bp, synthetic construct; identical to SEQ ID NO: 10600
  source 1..120: mol_type = other DNA

SEQ ID NO: 97667 - DNA, 120 bp, synthetic construct; identical to SEQ ID NO: 10601
  source 1..120: mol_type = other DNA

SEQ ID NO: 97668 - DNA, 120 bp, synthetic construct
  source 1..120: mol_type = other DNA
ccaaacaaaataaaatacaggattctttatttttaaaagttaaggctggcacagtggctcacacctgtaatcccagcactttgggaggccaaggcatcatctgaggtcaggagtttgaga

SEQ ID NO: 97669 - DNA, 120 bp, synthetic construct; identical to SEQ ID NO: 10602
  source 1..120: mol_type = other DNA

SEQ ID NO: 97670 - DNA, 120 bp, synthetic construct; identical to SEQ ID NO: 10603
  source 1..120: mol_type = other DNA

SEQ ID NO: 97671 - DNA, 120 bp, synthetic construct; identical to SEQ ID NO: 10604
  source 1..120: mol_type = other DNA

SEQ ID NO: 97672 - DNA, 120 bp, synthetic construct; identical to SEQ ID NO: 10605
  source 1..120: mol_type = other DNA

SEQ ID NO: 97673 - DNA, 120 bp, synthetic construct; identical to SEQ ID NO: 10606
  source 1..120: mol_type = other DNA

SEQ ID NO: 97674 - DNA, 120 bp, synthetic construct
  source 1..120: mol_type = other DNA
aggccaagccaagtggatcacttgaggtcaggagttcaagaccagcctgggcaagatggtgaaaccctatctctactaaaaatacaaaaattattttatggtatgaatacatccacaatt

SEQ ID NO: 97675 - DNA, 120 bp, synthetic construct; identical to SEQ ID NO: 10608
  source 1..120: mol_type = other DNA

SEQ ID NO: 97676 - DNA, 120 bp, synthetic construct; identical to SEQ ID NO: 10609
  source 1..120: mol_type = other DNA

SEQ ID NO: 97677 - DNA, 120 bp, synthetic construct; identical to SEQ ID NO: 10610
  source 1..120: mol_type = other DNA

SEQ ID NO: 97678 - DNA, 120 bp, synthetic construct; identical to SEQ ID NO: 10611
  source 1..120: mol_type = other DNA

SEQ ID NO: 97679 - DNA, 120 bp, synthetic construct; identical to SEQ ID NO: 10612
  source 1..120: mol_type = other DNA

SEQ ID NO: 97680 - DNA, 120 bp, synthetic construct; identical to SEQ ID NO: 10613
  source 1..120: mol_type = other DNA

SEQ ID NO: 97681 - DNA, 120 bp, synthetic construct; identical to SEQ ID NO: 10614
  source 1..120: mol_type = other DNA

SEQ ID NO: 97682 - DNA, 120 bp, synthetic construct; identical to SEQ ID NO: 10615
  source 1..120: mol_type = other DNA

SEQ ID NO: 97683 - DNA, 120 bp, synthetic construct; identical to SEQ ID NO: 10616
  source 1..120: mol_type = other DNA

SEQ ID NO: 97684 - DNA, 120 bp, synthetic construct; identical to SEQ ID NO: 10617
  source 1..120: mol_type = other DNA

SEQ ID NO: 97685 - DNA, 120 bp, synthetic construct; identical to SEQ ID NO: 10618
  source 1..120: mol_type = other DNA

SEQ ID NO: 97686 - DNA, 120 bp, synthetic construct; identical to SEQ ID NO: 10619
  source 1..120: mol_type = other DNA

SEQ ID NO: 97687 - DNA, 120 bp, synthetic construct; identical to SEQ ID NO: 10620
  source 1..120: mol_type = other DNA

SEQ ID NO: 97688 - DNA, 120 bp, synthetic construct; identical to SEQ ID NO: 10621
  source 1..120: mol_type = other DNA

SEQ ID NO: 97689 - DNA, 120 bp, synthetic construct; identical to SEQ ID NO: 10622
  source 1..120: mol_type = other DNA

SEQ ID NO: 97690 - DNA, 120 bp, synthetic construct
  source 1..120: mol_type = other DNA
atcacgaggtcaagagatcgagaccatcatggccaacatggtgaaacccagtctctaataaaaatacaaaaattagctgggtgtggtggcgcacgtctgtagtcctagctactcgggaag

SEQ ID NO: 97691 - DNA, 120 bp, synthetic construct; identical to SEQ ID NO: 10623
  source 1..120: mol_type = other DNA

SEQ ID NO: 97692 - DNA, 120 bp, synthetic construct; identical to SEQ ID NO: 10624
  source 1..120: mol_type = other DNA

SEQ ID NO: 97693 - DNA, 120 bp, synthetic construct
  source 1..120: mol_type = other DNA
tactcgggaggctgaggcaggagactcacttgaaccagggagtcagatgttgcagtgagccgaggtcgtgccactgcactccagcctgggtgacagagcgagactccgtctcaaaaaaaa

SEQ ID NO: 97694 - DNA, 120 bp, synthetic construct
  source 1..120: mol_type = other DNA
aaatagaattaactcattctcctctacaaacacctccattttctgacgtactctttcaataagaccacagttctctcagttactgaggttaaaaatctaggctgggggccgggcacagtg

SEQ ID NO: 97695 - DNA, 120 bp, synthetic construct; identical to SEQ ID NO: 16027
  source 1..120: mol_type = other DNA

SEQ ID NO: 97696 - DNA, 120 bp, synthetic construct
  source 1..120: mol_type = other DNA
atcatggcccgttctcaatgagctgctgggcacacctcccagacgggggggcgaccgggcagaggcgcccctcacctcccgggaggggcggctggccgggtggggggctgacccccccac

SEQ ID NO: 97697 - DNA, 120 bp, synthetic construct; identical to SEQ ID NO: 31929
  source 1..120: mol_type = other DNA

SEQ ID NO: 97698 - DNA, 120 bp, synthetic construct; identical to SEQ ID NO: 31930
  source 1..120: mol_type = other DNA

SEQ ID NO: 97699 - DNA, 120 bp, synthetic construct; identical to SEQ ID NO: 30113
  source 1..120: mol_type = other DNA

SEQ ID NO: 97700 - DNA, 120 bp, synthetic construct; identical to SEQ ID NO: 24606
  source 1..120: mol_type = other DNA

SEQ ID NO: 97701 - DNA, 120 bp, synthetic construct
  source 1..120: mol_type = other DNA
ggctgaggcaggagaattgcttgcaccaaggaggcagaggttgcagtgagctgagatcacgtcattgcactccagtctgggcaacaagagcaaaactttgtctcaaaaaaaaaaaaaaaa

SEQ ID NO: 97702 - DNA, 120 bp, synthetic construct
  source 1..120: mol_type = other DNA
cacgcttctcagtctaaatcctatccattcttcacgcacaaactcaagtactatttcacaaatgaggcttctgtttctctctccttcccactgtactgacttgattaggtaccttcagaa

SEQ ID NO: 97703 - DNA, 120 bp, synthetic construct; identical to SEQ ID NO: 13568
  source 1..120: mol_type = other DNA

SEQ ID NO: 97704 - DNA, 120 bp, synthetic construct; identical to SEQ ID NO: 13569
  source 1..120: mol_type = other DNA

SEQ ID NO: 97705 - DNA, 120 bp, synthetic construct; identical to SEQ ID NO: 13570
  source 1..120: mol_type = other DNA

SEQ ID NO: 97706 - DNA, 120 bp, synthetic construct; identical to SEQ ID NO: 13571
  source 1..120: mol_type = other DNA

SEQ ID NO: 97707 - DNA, 120 bp, synthetic construct; identical to SEQ ID NO: 13572
  source 1..120: mol_type = other DNA

SEQ ID NO: 97708 - DNA, 120 bp, synthetic construct; identical to SEQ ID NO: 13573
  source 1..120: mol_type = other DNA

SEQ ID NO: 97709 - DNA, 120 bp, synthetic construct; identical to SEQ ID NO: 26560
  source 1..120: mol_type = other DNA

SEQ ID NO: 97710 - DNA, 120 bp, synthetic construct
  source 1..120: mol_type = other DNA
acagcatcccaaggcagaagaatttttcttagtacagaacaaaatggagtctcgtatgtctacttctttctacacagacacggtaacaatctgatctctcttccttttccccacatttcc

SEQ ID NO: 97711 - DNA, 120 bp, synthetic construct
  source 1..120: mol_type = other DNA
ggaggtggaggttgtagtgagccgagatcacgccactgcactccagcctgggcaacattgagcattgagtgagtgagactccatctgcaatcccagcacttcgggaggccgaggtgggca

SEQ ID NO: 97712 - DNA, 120 bp, synthetic construct
  source 1..120: mol_type = other DNA
tgaggaatcgccacactgtcttccacagtggttaaactagtttacactcccaccaacagagtaaaaacattccagtttcttcacatcctctccagcacctgttgtttcctgactttttaa

SEQ ID NO: 97713 - DNA, 120 bp, synthetic construct
  source 1..120: mol_type = other DNA
cttcatggggatggcattgaatctataaattaccttgggcagtatggctattttcacgaaattgattcttcctatccatgaccatggaatattcttccatttgtttgtatcctcttttat

SEQ ID NO: 97714 - DNA, 120 bp, synthetic construct; identical to SEQ ID NO: 13167
  source 1..120: mol_type = other DNA

SEQ ID NO: 97715 - DNA, 120 bp, synthetic construct
  source 1..120: mol_type = other DNA
agtctacaatgaactcaaacaaatttgcaagaaaaaaacaaacaaccccatcaaaaagtgggcaaaggacatgaacagacacttctcaaaagaagacatttatgcagccaaaaaacacat

SEQ ID NO: 97716 - DNA, 120 bp, synthetic construct
  source 1..120: mol_type = other DNA
caaaaacaaaacaaaaaaaccatatataaccaagctataacccaaccaccttgggcacatgttctcaggatctcttgagactatgcctcaggccattgagagacaggactagctggattt

SEQ ID NO: 97717 - DNA, 120 bp, synthetic construct; identical to SEQ ID NO: 11695
  source 1..120: mol_type = other DNA

SEQ ID NO: 97718 - DNA, 120 bp, synthetic construct; identical to SEQ ID NO: 11696
  source 1..120: mol_type = other DNA

SEQ ID NO: 97719 - DNA, 120 bp, synthetic construct
  source 1..120: mol_type = other DNA
gttgttgttgttttgttttcattttgtctcgttttgtttttgtttttgagacaggttctccctctgtcacccaggctggtgtacagtggtgcaatcacggctcactatagcctcgaccct

SEQ ID NO: 97720 - DNA, 120 bp, synthetic construct; identical to SEQ ID NO: 5003
  source 1..120: mol_type = other DNA

SEQ ID NO: 97721 - DNA, 120 bp, synthetic construct; identical to SEQ ID NO: 23900
  source 1..120: mol_type = other DNA

SEQ ID NO: 97722 - DNA, 120 bp, synthetic construct
  source 1..120: mol_type = other DNA
accaacacagatacgttgttactaagtaaggccctgtaccaacacagatacattgttactaactaaggccctgcaccaacacagatacgttgttactaagtaaggccctgcaccaacaca

SEQ ID NO: 97723 - DNA, 120 bp, synthetic construct; identical to SEQ ID NO: 23901
  source 1..120: mol_type = other DNA

SEQ ID NO: 97724 - DNA, 120 bp, synthetic construct
  source 1..120: mol_type = other DNA
ttgttactaagtaaggccctgcaccaacacagatacattgttactaactaaggccctacagcaacacagatacattgttattaactaaggccctgcaccaacacagatacattgttagta

SEQ ID NO: 97725 - DNA, 120 bp, synthetic construct; identical to SEQ ID NO: 23902
  source 1..120: mol_type = other DNA

SEQ ID NO: 97726 - DNA, 120 bp, synthetic construct
  source 1..120: mol_type = other DNA
tcctgcacttaaaggaattctacctcactcccaactctcctgcagaaatggtaagttttccaaggatttttctttatggtctacctctaggtgaacagatatacagaactggcatgacca

SEQ ID NO: 97727 - DNA, 120 bp, synthetic construct
  source 1..120: mol_type = other DNA
aattaactaacagttctttaggttttacaggaagcatggtattggcttctggatggagcttttactcatggtggaaagtgaagcgggagcttacacatcatgtggctagagcaaaagggg

SEQ ID NO: 97728 - DNA, 120 bp, synthetic construct; identical to SEQ ID NO: 35502
  source 1..120: mol_type = other DNA

SEQ ID NO: 97729 - DNA, 120 bp, synthetic construct
  source 1..120: mol_type = other DNA
ggtggcggcggggcagagacactcctcagttcccagatggggtcgcggccgggcagaggcgctcctcacatctcagacggggcagacgggcagaggcgctccccacatcccagacaatgg

SEQ ID NO: 97730 - DNA, 120 bp, synthetic construct; identical to SEQ ID NO: 35503
  source 1..120: mol_type = other DNA

SEQ ID NO: 97731 - DNA, 120 bp, synthetic construct
  source 1..120: mol_type = other DNA
atccttcgcccacttgttgatggggctgtttgtttttttcttgtaaatttgtttgagttcattgtagattctggatattagccctttgtcagatgagtagattgcaaaaattttctcccg

SEQ ID NO: 97732 - DNA, 120 bp, synthetic construct; identical to SEQ ID NO: 35504
  source 1..120: mol_type = other DNA

SEQ ID NO: 97733 - DNA, 120 bp, synthetic construct
  source 1..120: mol_type = other DNA
aaactcagggtatttctttgttttgatttttgtttttctttttattattattattatactttacgttctagggtacatgtgcacaacaagcaggtttgtcacatatgtatacatatgcca

SEQ ID NO: 97734 - DNA, 120 bp, synthetic construct
  source 1..120: mol_type = other DNA
gcctgttcactctgacggtagtttcttttgctgtgcagaagctctttagttgaattagatcccatttgtcaattctggcttttgttgccattgcttttggtgttttagacatgaagtcct

SEQ ID NO: 97735 - DNA, 120 bp, synthetic construct; identical to SEQ ID NO: 35505
  source 1..120: mol_type = other DNA

SEQ ID NO: 97736 - DNA, 120 bp, synthetic construct
  source 1..120: mol_type = other DNA
cacttgttgatggggttgtttgtttcttgtcaatttgtttgagttcattgtagattctggttattagccgtttgtcagatgagtagattgcaaaaattttctcccattctgtaggttgcc

SEQ ID NO: 97737 - DNA, 120 bp, synthetic construct; identical to SEQ ID NO: 22249
  source 1..120: mol_type = other DNA

SEQ ID NO: 97738 - DNA, 120 bp, synthetic construct; identical to SEQ ID NO: 22250
  source 1..120: mol_type = other DNA

SEQ ID NO: 97739 - DNA, 120 bp, synthetic construct; identical to SEQ ID NO: 7662
  source 1..120: mol_type = other DNA

SEQ ID NO: 97740 - DNA, 120 bp, synthetic construct
  source 1..120: mol_type = other DNA
aagaggaacatcacactctggggactgttgtggggtggggggatgggggagtgatagcattaggagatatacctaatgctaaatgacgagttaatgggtgcagcacaccagcatggcaca

SEQ ID NO: 97741 - DNA, 120 bp, synthetic construct
  source 1..120: mol_type = other DNA
attttgtcttctaaattttgctaaagatatatgtacagaagaacatttctctgctatttgaaaaacagtgggctgggcgcagtggctcacgcctgtaatcccagcactttcggaggctga

SEQ ID NO: 97742 - DNA, 120 bp, synthetic construct; identical to SEQ ID NO: 2809
  source 1..120: mol_type = other DNA

SEQ ID NO: 97743 - DNA, 120 bp, synthetic construct; identical to SEQ ID NO: 2810
  source 1..120: mol_type = other DNA

SEQ ID NO: 97744 - DNA, 120 bp, synthetic construct
  source 1..120: mol_type = other DNA
gcatgtgtctttatagcagcatgatttatagtcctttgggtatatacccagtaatgggatggctgggtcaaatggtatttctagttctagatccctgagggatcgccacactgacttccc

SEQ ID NO: 97745 - DNA, 120 bp, synthetic construct
  source 1..120: mol_type = other DNA
gttttcttctagggtttttatggttttaggtctaacgtttaagtctttaatccatcttgaattaatttttgtataaggtgtaaggaagggattcagtttcagctttctacatatggctag

SEQ ID NO: 97746 - DNA, 120 bp, synthetic construct; identical to SEQ ID NO: 7665
  source 1..120: mol_type = other DNA

SEQ ID NO: 97747 - DNA, 120 bp, synthetic construct; identical to SEQ ID NO: 7666
  source 1..120: mol_type = other DNA

SEQ ID NO: 97748 - DNA, 120 bp, synthetic construct; identical to SEQ ID NO: 11919
  source 1..120: mol_type = other DNA

SEQ ID NO: 97749 - DNA, 120 bp, synthetic construct; identical to SEQ ID NO: 11920
  source 1..120: mol_type = other DNA

SEQ ID NO: 97750 - DNA, 120 bp, synthetic construct
  source 1..120: mol_type = other DNA
gtttttaataaagaagtattttaaaaactcagaaaatggacaaggccgggggcatcactcatcatccactcagcttaaatcctcttgaaagtcaaggggcattaaaaagtaccaccatta

SEQ ID NO: 97751 - DNA, 120 bp, synthetic construct
  source 1..120: mol_type = other DNA
tgatggtttccagtttcatccatgtccctacaaaggacatgaactcatcattttttacggctgcatagtattccatggtgtgtatatgccacattttcttaatccagtctatcgttgttg

SEQ ID NO: 97752 - DNA, 120 bp, synthetic construct; identical to SEQ ID NO: 4754
  source 1..120: mol_type = other DNA

SEQ ID NO: 97753 - DNA, 120 bp, synthetic construct; identical to SEQ ID NO: 32205
  source 1..120: mol_type = other DNA

SEQ ID NO: 97754 - DNA, 120 bp, synthetic construct; identical to SEQ ID NO: 32206
  source 1..120: mol_type = other DNA

SEQ ID NO: 97755 - DNA, 120 bp, synthetic construct; identical to SEQ ID NO: 32207
  source 1..120: mol_type = other DNA

SEQ ID NO: 97756 - DNA, 120 bp, synthetic construct
  source 1..120: mol_type = other DNA
cacatgtagatgctcaataaatgttggaagggagaaggaaaggaaggaagcgatagtggatggatgggtggataaatagatggatggatggatgaatagatggatggatggataaatgga

SEQ ID NO: 97757 - DNA, 120 bp, synthetic construct; identical to SEQ ID NO: 32209
  source 1..120: mol_type = other DNA

SEQ ID NO: 97758 - DNA, 120 bp, synthetic construct
  source 1..120: mol_type = other DNA
acctcaaatgatccgcctgccttggtctcccaaaatgctgggattacaggcgcgagccactgcacccagctcttttattatgttttctagctaactattgtttacttataagaatatata

SEQ ID NO: 97759 - DNA, 120 bp, synthetic construct
  source 1..120: mol_type = other DNA
gggcctccctattccctgagagacatcaatactgaaattaggccaatcaataaccctacaatggcctctatgtgttcaagtgaaaggaagagtcatgtatctctcactttaaatcaaaag

SEQ ID NO: 97760 - DNA, 120 bp, synthetic construct; identical to SEQ ID NO: 32211
  source 1..120: mol_type = other DNA

SEQ ID NO: 97761 - DNA, 120 bp, synthetic construct; identical to SEQ ID NO: 11812
  source 1..120: mol_type = other DNA

SEQ ID NO: 97762 - DNA, 120 bp, synthetic construct; identical to SEQ ID NO: 21336
  source 1..120: mol_type = other DNA

SEQ ID NO: 97763 - DNA, 120 bp, synthetic construct; identical to SEQ ID NO: 21337
  source 1..120: mol_type = other DNA

SEQ ID NO: 97764 - DNA, 120 bp, synthetic construct; identical to SEQ ID NO: 21338
  source 1..120: mol_type = other DNA

SEQ ID NO: 97765 - DNA, 120 bp, synthetic construct; identical to SEQ ID NO: 21339
  source 1..120: mol_type = other DNA

SEQ ID NO: 97766 - DNA, 120 bp, synthetic construct; identical to SEQ ID NO: 21340
  source 1..120: mol_type = other DNA

SEQ ID NO: 97767 - DNA, 120 bp, synthetic construct; identical to SEQ ID NO: 30554
  source 1..120: mol_type = other DNA

SEQ ID NO: 97768 - DNA, 120 bp, synthetic construct; identical to SEQ ID NO: 30555
  source 1..120: mol_type = other DNA

SEQ ID NO: 97769 - DNA, 120 bp, synthetic construct
  source 1..120: mol_type = other DNA
gacaccatcaattatttatttatttatttatttatttatttatgtttgagaaggagtttcactctgtcgcccaggctggagtgcagtggtgctctctgggctcactacaacctctgcctc

SEQ ID NO: 97770 - DNA, 120 bp, synthetic construct; identical to SEQ ID NO: 24332
  source 1..120: mol_type = other DNA

SEQ ID NO: 97771 - DNA, 120 bp, synthetic construct; identical to SEQ ID NO: 8972
  source 1..120: mol_type = other DNA

SEQ ID NO: 97772 - DNA, 120 bp, synthetic construct
  source 1..120: mol_type = other DNA
ccacccacctcagcctcccaaaatgctgggattacaggcgtgagccactgcgcccggccttttttttccttcgtgtagctaaagtttatcaattttgttgatcttttctttttttttttt

SEQ ID NO: 97773 - DNA, 120 bp, synthetic construct
  source 1..120: mol_type = other DNA
agattagggagtggtgatgattcttaacgagcatgctgcctttcaagcatctgtttaacaaagcacatcttgcaccgcccttaatccatttaaccctgagtggacacagcacatgtttca

SEQ ID NO: 97774 - DNA, 120 bp, synthetic construct
  source 1..120: mol_type = other DNA
cgctcctcacctcccagacggggttgcggccgggcagaggcgctcctcacttcctagatgggatggcggccgggcagagacgctcctcactttccagactgggcagccaggcagaggggc

SEQ ID NO: 97775 - DNA, 120 bp, synthetic construct; identical to SEQ ID NO: 33004
  source 1..120: mol_type = other DNA

SEQ ID NO: 97776 - DNA, 120 bp, synthetic construct; identical to SEQ ID NO: 33005
  source 1..120: mol_type = other DNA

SEQ ID NO: 97777 - DNA, 120 bp, synthetic construct; identical to SEQ ID NO: 19641
  source 1..120: mol_type = other DNA

SEQ ID NO: 97778 - DNA, 120 bp, synthetic construct; identical to SEQ ID NO: 19642
  source 1..120: mol_type = other DNA

SEQ ID NO: 97779 - DNA, 120 bp, synthetic construct
  source 1..120: mol_type = other DNA
ggggaattgtccggagagaatcatcactctgaccggccccaccaatgccatctttaaggctttcgctatgatcatcgacaagctggaggaagatatcaacagctccatgaccaacagtac

SEQ ID NO: 97780 - DNA, 120 bp, synthetic construct
  source 1..120: mol_type = other DNA
ccctgtttttagttttgttttgggttttttggctcatgaattttatttctgtttgtcgataagaaatgtaagagtggaatgttaataaatttcagtttagttctgtaatgtcaagaattt

SEQ ID NO: 97781 - DNA, 120 bp, synthetic construct; identical to SEQ ID NO: 23355
  source 1..120: mol_type = other DNA

SEQ ID NO: 97782 - DNA, 120 bp, synthetic construct; identical to SEQ ID NO: 23356
  source 1..120: mol_type = other DNA

SEQ ID NO: 97783 - DNA, 120 bp, synthetic construct; identical to SEQ ID NO: 23357
  source 1..120: mol_type = other DNA

SEQ ID NO: 97784 - DNA, 120 bp, synthetic construct; identical to SEQ ID NO: 23358
  source 1..120: mol_type = other DNA

SEQ ID NO: 97785 - DNA, 120 bp, synthetic construct
  source 1..120: mol_type = other DNA
atcctcatggtctccctctccttccacagacccctctgctcgccatcctgacggcctccctctccctccacggacccctctacacactgtcctcccagcctccctctacacgccatcctc

SEQ ID NO: 97786 - DNA, 120 bp, synthetic construct; identical to SEQ ID NO: 23361
  source 1..120: mol_type = other DNA

SEQ ID NO: 97787 - DNA, 120 bp, synthetic construct; identical to SEQ ID NO: 23362
  source 1..120: mol_type = other DNA

SEQ ID NO: 97788 - DNA, 120 bp, synthetic construct; identical to SEQ ID NO: 23363
  source 1..120: mol_type = other DNA

SEQ ID NO: 97789 - DNA, 120 bp, synthetic construct; identical to SEQ ID NO: 23364
  source 1..120: mol_type = other DNA

SEQ ID NO: 97790 - DNA, 120 bp, synthetic construct; identical to SEQ ID NO: 23365
  source 1..120: mol_type = other DNA

SEQ ID NO: 97791 - DNA, 120 bp, synthetic construct; identical to SEQ ID NO: 23366
  source 1..120: mol_type = other DNA

SEQ ID NO: 97792 - DNA, 120 bp, synthetic construct; identical to SEQ ID NO: 23367
  source 1..120: mol_type = other DNA

SEQ ID NO: 97793 - DNA, 120 bp, synthetic construct; identical to SEQ ID NO: 23368
  source 1..120: mol_type = other DNA

SEQ ID NO: 97794 - DNA, 120 bp, synthetic construct; identical to SEQ ID NO: 23369
  source 1..120: mol_type = other DNA

SEQ ID NO: 97795 - DNA, 120 bp, synthetic construct; identical to SEQ ID NO: 23339
  source 1..120: mol_type = other DNA

SEQ ID NO: 97796 - DNA, 120 bp, synthetic construct; identical to SEQ ID NO: 23340
  source 1..120: mol_type = other DNA

SEQ ID NO: 97797 - DNA, 120 bp, synthetic construct
  source 1..120: mol_type = other DNA
actctagcctgggcgacagagcgagactccatctcaaaaaaaaaaaaaaataataataataaaataaataaatacattttgtaaggctatagctgccacagatggtgattcctctgatgg

SEQ ID NO: 97798 - DNA, 120 bp, synthetic construct
  source 1..120: mol_type = other DNA
agcaataaactatttttacttttttctttgttgtttttttgagatggagtctctgttgcccaggctggagtgtgcagtggtgcaatctcggctcactgcaacctctgcctcctgggttca

SEQ ID NO: 97799 - DNA, 120 bp, synthetic construct
  source 1..120: mol_type = other DNA
cctcggcctcccaaagtgctgggattccagtcgtgagccactgcgcctggcctagagttttttgctttccgtaagataacaattttccttatagaactgaaaaatatgaaaaacaattta

SEQ ID NO: 97800 - DNA, 120 bp, synthetic construct
  source 1..120: mol_type = other DNA
tcttcatcagcccaccacttcctgtttgtccatggcctcctgggtggccccccgatcttcagcccaccccttcccgtccatggtcttctgggtggcccctcccttcttcatcagcccatc

SEQ ID NO: 97801 - DNA, 120 bp, synthetic construct; identical to SEQ ID NO: 23343
  source 1..120: mol_type = other DNA

SEQ ID NO: 97802 - DNA, 120 bp, synthetic construct; identical to SEQ ID NO: 23344
  source 1..120: mol_type = other DNA

SEQ ID NO: 97803 - DNA, 120 bp, synthetic construct
  source 1..120: mol_type = other DNA
atgggagctacaattcaaaatgagatttgggtgcagacacaggcaagccatatcaattgcaaagcccaccgggcatccttgttctgagaggagcaccaggccgcggggtgagctctgggc

SEQ ID NO: 97804 - DNA, 120 bp, synthetic construct; identical to SEQ ID NO: 23345
  source 1..120: mol_type = other DNA

SEQ ID NO: 97805 - DNA, 120 bp, synthetic construct
  source 1..120: mol_type = other DNA
ttggcctcccaaagtgccgagattgcagcctctgcccggccgccaccccgtctgggaagtgatgagtgtctctgcctggccgcccatcgtctgggatgtgaggagcccctctgcctggct

SEQ ID NO: 97806 - DNA, 120 bp, synthetic construct
  source 1..120: mol_type = other DNA
tgcataacaggagagagtcttgttttccattgttgacatttttactctttatatttaagtatcttttttttttttctttttgagatggagttttgctcttgttgcccaggctggagtgca

SEQ ID NO: 97807 - DNA, 120 bp, synthetic construct; identical to SEQ ID NO: 23346
  source 1..120: mol_type = other DNA

SEQ ID NO: 97808 - DNA, 120 bp, synthetic construct; identical to SEQ ID NO: 23347
  source 1..120: mol_type = other DNA

SEQ ID NO: 97809 - DNA, 120 bp, synthetic construct; identical to SEQ ID NO: 23348
  source 1..120: mol_type = other DNA

SEQ ID NO: 97810 - DNA, 120 bp, synthetic construct; identical to SEQ ID NO: 23349
  source 1..120: mol_type = other DNA

SEQ ID NO: 97811 - DNA, 120 bp, synthetic construct; identical to SEQ ID NO: 23350
  source 1..120: mol_type = other DNA

SEQ ID NO: 97812 - DNA, 120 bp, synthetic construct; identical to SEQ ID NO: 23351
  source 1..120: mol_type = other DNA

SEQ ID NO: 97813 - DNA, 120 bp, synthetic construct; identical to SEQ ID NO: 23352
  source 1..120: mol_type = other DNA

SEQ ID NO: 97814 - DNA, 120 bp, synthetic construct; identical to SEQ ID NO: 23353
  source 1..120: mol_type = other DNA

SEQ ID NO: 97815 - DNA, 120 bp, synthetic construct; identical to SEQ ID NO: 23354
  source 1..120: mol_type = other DNA

SEQ ID NO: 97816 - DNA, 120 bp, synthetic construct
  source 1..120: mol_type = other DNA
ggctgtggaggttgtactgggtcccccagcagtgccagcccaccgtgctgcactatggcttggccccaatattttctctctgatggggaaaaatggccacctgagggaagtacaaattac

SEQ ID NO: 97817 - DNA, 120 bp, synthetic construct
  source 1..120: mol_type = other DNA
cgaaaagcaatccagggccctgaacaaaatctagaggcattattaaacctggcaacctcggtgttctataatagggaccaagaggaacaggcccaaaaggaaaagcgagatcagagaaag

SEQ ID NO: 97818 - DNA, 120 bp, synthetic construct
  source 1..120: mol_type = other DNA
taggagtacaaaaactgaacggtcagtggagactagtggaagatcttagactcatcaatgaggcagtaattccactatatccagttgtacccaacccctataccctgctctctcaagtac

SEQ ID NO: 97819 - DNA, 120 bp, synthetic construct; identical to SEQ ID NO: 13883
  source 1..120: mol_type = other DNA

SEQ ID NO: 97820 - DNA, 120 bp, synthetic construct; identical to SEQ ID NO: 13884
  source 1..120: mol_type = other DNA

SEQ ID NO: 97821 - DNA, 120 bp, synthetic construct
  source 1..120: mol_type = other DNA
gaatggtattgcctaggttttcttctagggtttttatggttttaggcctaacatataagtctttaatccatcttgaatgaatttttgtataaggtgtaaggaagggatccagtttcagct

SEQ ID NO: 97822 - DNA, 120 bp, synthetic construct
  source 1..120: mol_type = other DNA
atgcttccagtttttgcccattcagtatgatattggctgtgggtttgtcataaatagctcttattattttgagatacgtcccatcaataccaaatttattgagagtttttagcctgaagg

SEQ ID NO: 97823 - DNA, 120 bp, synthetic construct
  source 1..120: mol_type = other DNA
gacttactcaaggtcaccagctagtaagaggtaaagccatgattttttttttttctttttaaatgagacaggatctcgctctgtcacctaggctagagtgcaatggcacaatctgggttc

SEQ ID NO: 97824 - DNA, 120 bp, synthetic construct; identical to SEQ ID NO: 13886
  source 1..120: mol_type = other DNA

SEQ ID NO: 97825 - DNA, 120 bp, synthetic construct; identical to SEQ ID NO: 24744
  source 1..120: mol_type = other DNA

SEQ ID NO: 97826 - DNA, 120 bp, synthetic construct; identical to SEQ ID NO: 24745
  source 1..120: mol_type = other DNA

SEQ ID NO: 97827 - DNA, 120 bp, synthetic construct
  source 1..120: mol_type = other DNA
atgtgtgtgtgtgtgtgtgtgtgtgtgtgtgtgtgtgtgtgtgtatatatatataaaacattaaattaaaaaatagtaatatctagcatggttgttttgttgacatcccacacactggtt

SEQ ID NO: 97828 - DNA, 120 bp, synthetic construct
  source 1..120: mol_type = other DNA
attgcttgagcccaggatgtcatggctgccttgttgtgttcacaccactgcattccagactgggaaacagactgagcccttgtctcagaaaaaaaaaaaaaaaattgaaaaagttctcag

SEQ ID NO: 97829 - DNA, 120 bp, synthetic construct; identical to SEQ ID NO: 34571
  source 1..120: mol_type = other DNA

SEQ ID NO: 97830 - DNA, 120 bp, synthetic construct; identical to SEQ ID NO: 34572
  source 1..120: mol_type = other DNA

SEQ ID NO: 97831 - DNA, 120 bp, synthetic construct; identical to SEQ ID NO: 34573
  source 1..120: mol_type = other DNA

SEQ ID NO: 97832 - DNA, 120 bp, synthetic construct
  source 1..120: mol_type = other DNA
tggtatgtggcgattaggcctggtggaactgccatcaataaatcaagtgtgatcagggtgaggaacaggaaagaaggaaatatggggaaatggggtgaatatcaggtggatcagagagat

SEQ ID NO: 97833 - DNA, 120 bp, synthetic construct
  source 1..120: mol_type = other DNA
ttgatctcccaagggaggtccctcgatctgagtcacggcaccaaatttcatgcgcgtccgtgtgaagagaccaccaaacaggctttgtgtgagcaacatggctgtttatttcacctgggt

SEQ ID NO: 97834 - DNA, 120 bp, synthetic construct; identical to SEQ ID NO: 34574
  source 1..120: mol_type = other DNA

SEQ ID NO: 97835 - DNA, 120 bp, synthetic construct
  source 1..120: mol_type = other DNA
attccttcccaaggttagtttggcctatgcctaggaatgaacaaggacagcttaaaggttagaagcaagatggagttgattaggtctaatctctttcactatcataatatcctcagttat

SEQ ID NO: 97836 - DNA, 120 bp, synthetic construct
  source 1..120: mol_type = other DNA
ggctctctttttttttcttagaggaaccaggacatgctgataacctttcttaagttatgttaatatgtaaatgcagtcaacatctggggtattctaggcctttggtagctccacaaacag

SEQ ID NO: 97837 - DNA, 120 bp, synthetic construct
  source 1..120: mol_type = other DNA
tcaccttgttagccaggatggtctcgattccctgacctcgtgatccacccgcctcggcctcccaaagtgctaggattacaggtgtgagccactgcgcccagcctctaatgctcatttttc

SEQ ID NO: 97838 - DNA, 120 bp, synthetic construct; identical to SEQ ID NO: 34577
  source 1..120: mol_type = other DNA

SEQ ID NO: 97839 - DNA, 120 bp, synthetic construct; identical to SEQ ID NO: 34578
  source 1..120: mol_type = other DNA

SEQ ID NO: 97840 - DNA, 120 bp, synthetic construct; identical to SEQ ID NO: 34579
  source 1..120: mol_type = other DNA

SEQ ID NO: 97841 - DNA, 120 bp, synthetic construct; identical to SEQ ID NO: 34580
  source 1..120: mol_type = other DNA

SEQ ID NO: 97842 - DNA, 120 bp, synthetic construct
  source 1..120: mol_type = other DNA
ggatcacctgaggtcaggagtttgagaccaggctggccaacatagcaaaaccccgtctctaccaaaatacaaaaattagccgagcatggtggcggacacctataatcccagctactcggg

SEQ ID NO: 97843 - DNA, 120 bp, synthetic construct; identical to SEQ ID NO: 34581
  source 1..120: mol_type = other DNA

SEQ ID NO: 97844 - DNA, 120 bp, synthetic construct
  source 1..120: mol_type = other DNA
ccgccctcctcagcctcccaaagtgctgggattacaggcgtgagccactgcgcccggccaatataatgcagtcttgagataatctgataaattatttatttatttttaattttaattttt

SEQ ID NO: 97845 - DNA, 120 bp, synthetic construct; identical to SEQ ID NO: 34582
  source 1..120: mol_type = other DNA

SEQ ID NO: 97846 - DNA, 120 bp, synthetic construct
  source 1..120: mol_type = other DNA
tgggaggtggaggttccagtgagctgagatcatgccactgcactccagcctgagcgacagagcgacactccatctcaataaataaatttaaataaatacatacatacataaaggaaaatc

SEQ ID NO: 97847 - DNA, 120 bp, synthetic construct; identical to SEQ ID NO: 2007
  source 1..120: mol_type = other DNA

SEQ ID NO: 97848 - DNA, 120 bp, synthetic construct; identical to SEQ ID NO: 2008
  source 1..120: mol_type = other DNA

SEQ ID NO: 97849 - DNA, 120 bp, synthetic construct
  source 1..120: mol_type = other DNA
tagtctttttttgtttgtttgtttttgttttttatttttttattttactttaagttctagggtacatgtgcacaatgtacaggtttgttacatatgtatacacgtgccatgttggtgtgc

SEQ ID NO: 97850 - DNA, 120 bp, synthetic construct
  source 1..120: mol_type = other DNA
tatgtggggagtgtgtgtgtgtgtgtgtgtgtgtgtgtattagattgggttttgaggggaaaaaatttaaagtatgggagaatctaattttaaaaataatataattgatgttctcagagg

SEQ ID NO: 97851 - DNA, 120 bp, synthetic construct
  source 1..120: mol_type = other DNA
tctgcccacctcagcctcccaaagtgctgtgattacaggcataagccaccacacccagccttacccttccccctttctaagagtcacataactctacccaaacctaaagtatcaatttaa

SEQ ID NO: 97852 - DNA, 120 bp, synthetic construct
  source 1..120: mol_type = other DNA
atcatgaggtcaggagttcaagaccagcctgaccaacatggagaagcccctgtctctactaaaaatacaaaattagccaggcatggtggtgcacgcctgtaataccaactattcacgagg

SEQ ID NO: 97853 - DNA, 120 bp, synthetic construct; identical to SEQ ID NO: 6676
  source 1..120: mol_type = other DNA

SEQ ID NO: 97854 - DNA, 120 bp, synthetic construct; identical to SEQ ID NO: 34588
  source 1..120: mol_type = other DNA

SEQ ID NO: 97855 - DNA, 120 bp, synthetic construct; identical to SEQ ID NO: 34589
  source 1..120: mol_type = other DNA

SEQ ID NO: 97856 - DNA, 120 bp, synthetic construct; identical to SEQ ID NO: 34314
  source 1..120: mol_type = other DNA

SEQ ID NO: 97857 - DNA, 120 bp, synthetic construct; identical to SEQ ID NO: 34315
  source 1..120: mol_type = other DNA

SEQ ID NO: 97858 - DNA, 120 bp, synthetic construct; identical to SEQ ID NO: 34316
  source 1..120: mol_type = other DNA

SEQ ID NO: 97859 - DNA, 120 bp, synthetic construct; identical to SEQ ID NO: 34317
  source 1..120: mol_type = other DNA

SEQ ID NO: 97860 - DNA, 120 bp, synthetic construct; identical to SEQ ID NO: 34318
  source 1..120: mol_type = other DNA

SEQ ID NO: 97861 - DNA, 120 bp, synthetic construct; identical to SEQ ID NO: 34319
  source 1..120: mol_type = other DNA

SEQ ID NO: 97862 - DNA, 120 bp, synthetic construct; identical to SEQ ID NO: 34320
  source 1..120: mol_type = other DNA

SEQ ID NO: 97863 - DNA, 120 bp, synthetic construct; identical to SEQ ID NO: 34321
  source 1..120: mol_type = other DNA

SEQ ID NO: 97864 - DNA, 120 bp, synthetic construct; identical to SEQ ID NO: 34322
  source 1..120: mol_type = other DNA

SEQ ID NO: 97865 - DNA, 120 bp, synthetic construct; identical to SEQ ID NO: 34323
  source 1..120: mol_type = other DNA

SEQ ID NO: 97866 - DNA, 120 bp, synthetic construct; identical to SEQ ID NO: 34324
  source 1..120: mol_type = other DNA

SEQ ID NO: 97867 - DNA, 120 bp, synthetic construct; identical to SEQ ID NO: 34325
  source 1..120: mol_type = other DNA

SEQ ID NO: 97868 - DNA, 120 bp, synthetic construct; identical to SEQ ID NO: 34326
  source 1..120: mol_type = other DNA

SEQ ID NO: 97869 - DNA, 120 bp, synthetic construct; identical to SEQ ID NO: 34327
  source 1..120: mol_type = other DNA

SEQ ID NO: 97870 - DNA, 120 bp, synthetic construct; identical to SEQ ID NO: 34328
  source 1..120: mol_type = other DNA

SEQ ID NO: 97871 - DNA, 120 bp, synthetic construct; identical to SEQ ID NO: 34329
  source 1..120: mol_type = other DNA

SEQ ID NO: 97872 - DNA, 120 bp, synthetic construct; identical to SEQ ID NO: 34330
  source 1..120: mol_type = other DNA

SEQ ID NO: 97873 - DNA, 120 bp, synthetic construct
  source 1..120: mol_type = other DNA
aggctaagaggaaggagtcacgtcttatatggccaaagcaggaggaagacggagcaggtgcaggtgccacacacttttaaacaaccagaactcgtgagaactcactcactatcacaagaa

SEQ ID NO: 97874 - DNA, 120 bp, synthetic construct; identical to SEQ ID NO: 34331
  source 1..120: mol_type = other DNA

SEQ ID NO: 97875 - DNA, 120 bp, synthetic construct; identical to SEQ ID NO: 34332
  source 1..120: mol_type = other DNA

SEQ ID NO: 97876 - DNA, 120 bp, synthetic construct; identical to SEQ ID NO: 34333
  source 1..120: mol_type = other DNA

SEQ ID NO: 97877 - DNA, 120 bp, synthetic construct; identical to SEQ ID NO: 34334
  source 1..120: mol_type = other DNA

SEQ ID NO: 97878 - DNA, 120 bp, synthetic construct; identical to SEQ ID NO: 34335
  source 1..120: mol_type = other DNA

SEQ ID NO: 97879 - DNA, 120 bp, synthetic construct; identical to SEQ ID NO: 34336
  source 1..120: mol_type = other DNA

SEQ ID NO: 97880 - DNA, 120 bp, synthetic construct; identical to SEQ ID NO: 34337
  source 1..120: mol_type = other DNA

SEQ ID NO: 97881 - DNA, 120 bp, synthetic construct; identical to SEQ ID NO: 1950
  source 1..120: mol_type = other DNA

SEQ ID NO: 97882 - DNA, 120 bp, synthetic construct; identical to SEQ ID NO: 1949
  source 1..120: mol_type = other DNA

SEQ ID NO: 97883 - DNA, 120 bp, synthetic construct
  source 1..120: mol_type = other DNA
ctgcctttgttagtcaacaaaaaagagggtcttgagtcataatgcagacaaaaggtaacatcggctgcatattgtgcctgaataatggagatttcttcaacagaaactgtttgaaaaaca

SEQ ID NO: 97884 - DNA, 120 bp, synthetic construct
  source 1..120: mol_type = other DNA
tccccctcaggggaaatctttcaaattaaatttgggcaattttctttatgtagatactagaaaaggattctctctcagctcatatttgtgtgtcttttgtcattttttcttcacagttac

SEQ ID NO: 97885 - DNA, 120 bp, synthetic construct
  source 1..120: mol_type = other DNA
agataggcatttggatcaaatgttagcattttttgtttctgcagatttattgtgtctgcaatttaatatggattatagaaacatacggaatgaagcctccgtataattgtttatcccatt

SEQ ID NO: 97886 - DNA, 120 bp, synthetic construct
  source 1..120: mol_type = other DNA
tggcaacagtagtctacaaataaagaatattgtttcttaatagcttaagcaatgttaacatgatacattctctctttttaccaaaaagtcttttcaaactcttagcaaaattaaacattt

SEQ ID NO: 97887 - DNA, 120 bp, synthetic construct; identical to SEQ ID NO: 1951
  source 1..120: mol_type = other DNA

SEQ ID NO: 97888 - DNA, 120 bp, synthetic construct; identical to SEQ ID NO: 1952
  source 1..120: mol_type = other DNA

SEQ ID NO: 97889 - DNA, 120 bp, synthetic construct
  source 1..120: mol_type = other DNA
tacgccatcacatagcaaaatgtacacaacagcagaaagtagacattttactcatagtttctgcaaaatctgaataaagataaagtttttctattataaataatgccaaagatgtggtct

SEQ ID NO: 97890 - DNA, 120 bp, synthetic construct; identical to SEQ ID NO: 1953
  source 1..120: mol_type = other DNA

SEQ ID NO: 97891 - DNA, 120 bp, synthetic construct; identical to SEQ ID NO: 1954
  source 1..120: mol_type = other DNA

SEQ ID NO: 97892 - DNA, 120 bp, synthetic construct
  source 1..120: mol_type = other DNA
taagaatttaattcctcagtcgcactagccacatttcaagtggttaataggcacaagcggctaccatattggaccatgcagattattttaataaaatatttttatcattgcagaaagttc

SEQ ID NO: 97893 - DNA, 120 bp, synthetic construct
  source 1..120: mol_type = other DNA
ataaaatgatggccctctgtcatgtgttgcctacttgtttaatttagatttgtggtttcttgaaagccaactgaaagtgttttacccctcataggaaaatcctgttgcgaataagaagga

SEQ ID NO: 97894 - DNA, 120 bp, synthetic construct
  source 1..120: mol_type = other DNA
tttttcatgtttgaagctttcattttcttaaaagatttgttttgagtttaaaatgttaacagtgagattggatgagaggaaggggaagtctatattccaatatactgatatcatgtaggg

SEQ ID NO: 97895 - DNA, 120 bp, synthetic construct
  source 1..120: mol_type = other DNA
gtcacaaatactcattctcagtttctcttgtccatgtggcagaagatactgaaatatgttccccttgacattgctcaaagaagaaatctcttaaaagttctaatcactgttaaatttctc

SEQ ID NO: 97896 - DNA, 120 bp, synthetic construct
  source 1..120: mol_type = other DNA
attcaggtagtaaagccaaattaagccaaggtgaaaatttcttattcaacaagacattcagcccattcagttcaaaacaatattctgtgtactttttaaggagtggaagaaaaattgacg

SEQ ID NO: 97897 - DNA, 120 bp, synthetic construct
  source 1..120: mol_type = other DNA
acagttcctcttgaaaattagcagctgtacttagtgaaaaattatgaaggtgcaatgttgttgtcagctgtaacaggttttaattatcttttttattttaaagtcatcaaatttagagat

SEQ ID NO: 97898 - DNA, 120 bp, synthetic construct
  source 1..120: mol_type = other DNA
catttagtgcacaataacactataaggtagacacaattgttaaccctgttttacacaaagatacagagaatttaaataacttgcataaagtcacacagctagtgagtggtggatcttgga

SEQ ID NO: 97899 - DNA, 120 bp, synthetic construct
  source 1..120: mol_type = other DNA
agtgagccaagattgcaccactgcactccagcctgggtaatagagcaagactcagtccccacacccccccaaaaaaaatctccaatacgcaaaatgcctatataagtttgttttatgtat

SEQ ID NO: 97900 - DNA, 120 bp, synthetic construct
  source 1..120: mol_type = other DNA
cttcatactatctgtataaggattatgatggtgataaatgagaagaacatggtgagtattccaaactcctatcgaccctacccaatatactaaagattatcaagtggagagttattttgg

SEQ ID NO: 97901 - DNA, 120 bp, synthetic construct; identical to SEQ ID NO: 1955
  source 1..120: mol_type = other DNA

SEQ ID NO: 97902 - DNA, 120 bp, synthetic construct; identical to SEQ ID NO: 1956
  source 1..120: mol_type = other DNA

SEQ ID NO: 97903 - DNA, 120 bp, synthetic construct
  source 1..120: mol_type = other DNA
tttcctttcttttttttatttttatttttatttttattttttattattatactttaagttttagggtacatgtgcacattgtgcaggttagttacatacgtatacatgtgccatgctggt

SEQ ID NO: 97904 - DNA, 120 bp, synthetic construct
  source 1..120: mol_type = other DNA
ccatgttgtaggttgcctgttcactctgatggtagtttcttttgctgtgcagaagcactttagtttaattagatcccatttgtcaattttgtcttttgttgccattgcttttggtgtttt

SEQ ID NO: 97905 - DNA, 120 bp, synthetic construct
  source 1..120: mol_type = other DNA
gaagcaattgtgaatgggagttcactcatcatttggctctctatttgtctgttgttggtgtataagaatgcttgtgatttttgtacattgattttgtatcctgagactttgctgaagttg

SEQ ID NO: 97906 - DNA, 120 bp, synthetic construct
  source 1..120: mol_type = other DNA
agtttatttgcgcagaggtgtttatagtattctctgatggtagtttgtattcctgtggatcggtggtgatatcccctttatcattttttattgcgtctatttgattcttctctctttttt

SEQ ID NO: 97907 - DNA, 120 bp, synthetic construct
  source 1..120: mol_type = other DNA
ttattaatgtgtcggagtctaagtctctttgtaggtcactcaggacttgctttatgaatctgggtgctcctgtattgggtgcatatatatttaggatagttagctcttcttgttgaattg

SEQ ID NO: 97908 - DNA, 120 bp, synthetic construct
  source 1..120: mol_type = other DNA
ttttccaacttggttccattctccccatcactttcaggtacaccaatcagacgtagatttggtcttttcacatagtcccatatttcttggaggctttgcttgtttctttttattcttttt

SEQ ID NO: 97909 - DNA, 120 bp, synthetic construct
  source 1..120: mol_type = other DNA
ccagcctcgctgccaccttgcagtttgatctcagactgctgtgctagcaatcagcgagactccgtgggcgtaggaccttccgagccaggtgcaggatataatctcgtggtgcgccgtttt

SEQ ID NO: 97910 - DNA, 120 bp, synthetic construct
  source 1..120: mol_type = other DNA
aatatttactttatttctttaacttttattttaggttcaggtatgcatgtgcgggtttgttatataggtaaactcatgccacaggagtttgctatacaaattatttcatcacccaggtac

SEQ ID NO: 97911 - DNA, 120 bp, synthetic construct; identical to SEQ ID NO: 1957
  source 1..120: mol_type = other DNA

SEQ ID NO: 97912 - DNA, 120 bp, synthetic construct; identical to SEQ ID NO: 1958
  source 1..120: mol_type = other DNA

SEQ ID NO: 97913 - DNA, 120 bp, synthetic construct
  source 1..120: mol_type = other DNA
aacaaatacccagtgaagacacaaatatatatattacacacacacacacacacacacacacacacccacaattatatatatatgaagaaaccacatttgttaacaaatgactaaaattgt

SEQ ID NO: 97914 - DNA, 120 bp, synthetic construct
  source 1..120: mol_type = other DNA
tttgacatctcaagtttcagaatacacaggaaataattacataaaattggacagccaatgcccttgcccgcctctgcttgctgtggtcagttcctctgaaaatactaggtttatcggttg

SEQ ID NO: 97915 - DNA, 120 bp, synthetic construct
  source 1..120: mol_type = other DNA
tgggttgtaggagaagggcaaagaaatttaaggttaccttgtcacatttttcatgagacagaaaaattagaatgtaatttacatacattaagatacgtatgtaggcatattttccctgga

SEQ ID NO: 97916 - DNA, 120 bp, synthetic construct
  source 1..120: mol_type = other DNA
tacaccatggaatactatgcagccataaaaaaggatgagttcatgtcctttttaaggacaaggatgaagctggaaaccatcattctcagcaaactattgcaaggacagaaaaccaaacac

SEQ ID NO: 97917 - DNA, 120 bp, synthetic construct; identical to SEQ ID NO: 1959
  source 1..120: mol_type = other DNA

SEQ ID NO: 97918 - DNA, 120 bp, synthetic construct
  source 1..120: mol_type = other DNA
tagggagaagtagcaagagagattgatttttgactcactttcaactcggtactgtttttaaatgcctttcttattttcaagcccttctcaagctgttccttgaagttgtataattcctgt

SEQ ID NO: 97919 - DNA, 120 bp, synthetic construct
  source 1..120: mol_type = other DNA
tactgattttaatttaaaacagtttttgttaacatgcatgtttagggttggcttcttaataatttcttcttcctcttctctctctcctcttcttttggtcagtgttgtgcgggttaatac

SEQ ID NO: 97920 - DNA, 120 bp, synthetic construct
  source 1..120: mol_type = other DNA
agccctgctacttacaaatcagtagtttgcccagcttcattcttttaatctgtccagtcatgcttctgccaaaaacttgatataagcaaatcattaagaatgaatccataaatctgatta

SEQ ID NO: 97921 - DNA, 120 bp, synthetic construct
  source 1..120: mol_type = other DNA
gcactttggggtgaagttcctgcaatgacatctccttatctgatgaaatggaaaaatattcaggagtcagatagatatggatcacagttttatgcttacctcttaccagacatgctactt

SEQ ID NO: 97922 - DNA, 120 bp, synthetic construct
  source 1..120: mol_type = other DNA
tcatgaaagtggcatatatgctatgggaaaggagacttaaagaaaaacagagaaaagaagcatgtgttgattcatccataaactttagtaaattttacaatgtgaaataagtaggccaac

SEQ ID NO: 97923 - DNA, 120 bp, synthetic construct
  source 1..120: mol_type = other DNA
aggtaacagtgaaagactgtctccaaaaaaaataaataaataaaattaaaaaaattaaaaagggaaaaagtgggggaatgaagtgattaccaagtaattctgcttgtttaaaaaataagt

SEQ ID NO: 97924 - DNA, 120 bp, synthetic construct
  source 1..120: mol_type = other DNA
ttgcgatctggggttagaaaatctaaattgtgaaaaatctcacctaccacaagatttagaaatcttgatttaaattgccaagaatgagacatcaaataatacattgtgaagacaaagagc

SEQ ID NO: 97925 - DNA, 120 bp, synthetic construct
  source 1..120: mol_type = other DNA
tgagtgatctactcacatcatgcctcttaacttaatattaccaactaactataagaagcaccactaaattttatgttattagatacagatgtattgatctgttatttcattgtccactgt

SEQ ID NO: 97926 - DNA, 120 bp, synthetic construct
  source 1..120: mol_type = other DNA
tttttcattggtcttttgcttgcacaaattatatcttcaccaatctattctacaaataggtaataaagtgttttatccataaaatgttaaatatctattactagagcactaagggcatca

SEQ ID NO: 97927 - DNA, 120 bp, synthetic construct
  source 1..120: mol_type = other DNA
tcctgagttcaattgattctcctaccttagcctcccgagtagctgggactacagacgtctgccacaaagcttggctaattttgttgttgttattgtatttttagtagagacagggtttca

SEQ ID NO: 97928 - DNA, 120 bp, synthetic construct
  source 1..120: mol_type = other DNA
tcatttgtctttgtctcctcgtggccctccatatgacagtgatactgctaatatgagtactttctcatatactgcctctaccatctggaattgctttatttacatctcattcatatgccc

SEQ ID NO: 97929 - DNA, 120 bp, synthetic construct
  source 1..120: mol_type = other DNA
gcttggaggatgtaagtatttaacagatcctgtgtgtttcaggaggcatttaaatcttttaattttgctgtgaggaaagttattcctaagggatcagtcacagatagctatattaccccc

SEQ ID NO: 97930 - DNA, 120 bp, synthetic construct
  source 1..120: mol_type = other DNA
aattagattagatacagctataagtaaacataaactatgttcttatgtaacctcaagagttattttaggccgggcgcggtggctcatgcctgtaatcacagcactttcggaggccgtggc

SEQ ID NO: 97931 - DNA, 120 bp, synthetic construct
  source 1..120: mol_type = other DNA
aatcatggcatgctacagccttgaactcctgggctcaatcaattcccctgcctcagcctccttagaagctgagactacaggctagcactaccaggcccaacgttttttgtacatttttta

SEQ ID NO: 97932 - DNA, 120 bp, synthetic construct; identical to SEQ ID NO: 34590
  source 1..120: mol_type = other DNA

SEQ ID NO: 97933 - DNA, 120 bp, synthetic construct; identical to SEQ ID NO: 34591
  source 1..120: mol_type = other DNA

SEQ ID NO: 97934 - DNA, 120 bp, synthetic construct; identical to SEQ ID NO: 34592
  source 1..120: mol_type = other DNA

SEQ ID NO: 97935 - DNA, 120 bp, synthetic construct; identical to SEQ ID NO: 34593
  source 1..120: mol_type = other DNA

SEQ ID NO: 97936 - DNA, 120 bp, synthetic construct; identical to SEQ ID NO: 34594
  source 1..120: mol_type = other DNA

SEQ ID NO: 97937 - DNA, 120 bp, synthetic construct
  source 1..120: mol_type = other DNA
tgttgagatggagtcttgctcttgtcgcccaggctgaagtgcagtggcatgatctcagctcactgcaacctccgcctcccaggttcaagcgattctcctgcctcagcctcccaagtagct

SEQ ID NO: 97938 - DNA, 120 bp, synthetic construct; identical to SEQ ID NO: 34595
  source 1..120: mol_type = other DNA

SEQ ID NO: 97939 - DNA, 120 bp, synthetic construct; identical to SEQ ID NO: 34596
  source 1..120: mol_type = other DNA

SEQ ID NO: 97940 - DNA, 120 bp, synthetic construct
  source 1..120: mol_type = other DNA
cacctctgctaaggcagtgaagaagggaaatgtggggttggagcccccacacagaatccctaccagggcactgcctagtggagttgtgagaagagggccactgtcctccagactccagaa

SEQ ID NO: 97941 - DNA, 120 bp, synthetic construct; identical to SEQ ID NO: 34597
  source 1..120: mol_type = other DNA

SEQ ID NO: 97942 - DNA, 120 bp, synthetic construct; identical to SEQ ID NO: 34598
  source 1..120: mol_type = other DNA

SEQ ID NO: 97943 - DNA, 120 bp, synthetic construct; identical to SEQ ID NO: 34599
  source 1..120: mol_type = other DNA

SEQ ID NO: 97944 - DNA, 120 bp, synthetic construct; identical to SEQ ID NO: 34600
  source 1..120: mol_type = other DNA

SEQ ID NO: 97945 - DNA, 120 bp, synthetic construct
  source 1..120: mol_type = other DNA
ccaaagtgctgggattataggcctgagccactgcgtcggcctgaatttctttctaatataaaggaatagcacctatgatagaacacattagaactgcctacttagcacagatagtgtagc

SEQ ID NO: 97946 - DNA, 120 bp, synthetic construct
  source 1..120: mol_type = other DNA
caatccatttgtgacaaggatataggctggaatgagagatctctctctttctctcactctctctctctctctctctctctctgtgtgtgtgtgtgtgtatatatgtgtgtgtgtatatat

SEQ ID NO: 97947 - DNA, 120 bp, synthetic construct; identical to SEQ ID NO: 34601
  source 1..120: mol_type = other DNA

SEQ ID NO: 97948 - DNA, 120 bp, synthetic construct
  source 1..120: mol_type = other DNA
tcactgcaagccccgcctcccaggttcaagccattctcctgcctcagccttccgagtagctgggactacaggggcccgccaccgtgcctggctaattttttgtattttcagtagagacag

SEQ ID NO: 97949 - DNA, 120 bp, synthetic construct; identical to SEQ ID NO: 34602
  source 1..120: mol_type = other DNA

SEQ ID NO: 97950 - DNA, 120 bp, synthetic construct; identical to SEQ ID NO: 34603
  source 1..120: mol_type = other DNA

SEQ ID NO: 97951 - DNA, 120 bp, synthetic construct; identical to SEQ ID NO: 34604
  source 1..120: mol_type = other DNA

SEQ ID NO: 97952 - DNA, 120 bp, synthetic construct; identical to SEQ ID NO: 34605
  source 1..120: mol_type = other DNA

SEQ ID NO: 97953 - DNA, 120 bp, synthetic construct; identical to SEQ ID NO: 34606
  source 1..120: mol_type = other DNA

SEQ ID NO: 97954 - DNA, 120 bp, synthetic construct; identical to SEQ ID NO: 34607
  source 1..120: mol_type = other DNA

SEQ ID NO: 97955 - DNA, 120 bp, synthetic construct
  source 1..120: mol_type = other DNA
gttacagtaagtttagatcatgccactgcactccagcctgggtgacagagcaagagactgtctcaaaaaaaagaaaaaaagaaaaggaaatttatttaatagatagttgactccttactt

SEQ ID NO: 97956 - DNA, 120 bp, synthetic construct
  source 1..120: mol_type = other DNA
ttaaaaatatattatcattttttaaagattccatagtctgagtaacggccagtatagtttagtattacaaaactcctgagaaagggttatgatactcaggagaataaaaaacacaagtgt

SEQ ID NO: 97957 - DNA, 120 bp, synthetic construct
  source 1..120: mol_type = other DNA
cattctcacagcttagctcccgcttatgagtgagaacataggatatttgattttccattcctgagttacttcacttagaatcatagtctccgatcctatccaggttgctgcaaatgccat

SEQ ID NO: 97958 - DNA, 120 bp, synthetic construct
  source 1..120: mol_type = other DNA
ttttgtttaaggaagttaaagatagggccccaatcccttctagcttggagggtttctgctgacaaatcggctgttaatctgatacgttttcttttttaggttacctggtgttttttcctc

SEQ ID NO: 97959 - DNA, 120 bp, synthetic construct
  source 1..120: mol_type = other DNA
aaggttgctgtttagattttttttttttttttttgaaatggagtcctactttgtcacccatgctggagtgcagtggtgcgatctcggcttactgcaacctctgcctcctgggttcaagcg

SEQ ID NO: 97960 - DNA, 120 bp, synthetic construct
  source 1..120: mol_type = other DNA
cagtctctgctgtgtcatgcagtttgtcagggaagtaggggaaagccggcagttacagacctcacctagctctcatgcaacccaaaaggcctgtctcactcccaccgtgccccccgccaa

SEQ ID NO: 97961 - DNA, 120 bp, synthetic construct; identical to SEQ ID NO: 2015
  source 1..120: mol_type = other DNA

SEQ ID NO: 97962 - DNA, 120 bp, synthetic construct; identical to SEQ ID NO: 2016
  source 1..120: mol_type = other DNA

SEQ ID NO: 97963 - DNA, 120 bp, synthetic construct
  source 1..120: mol_type = other DNA
attgatagggattgtgaatgacattacttctattgtgtaaacttaggaaaaatcagtcttcaatagtatacatatagtgaaatatagtgtacagtaatattaatatttaaatatagctga

SEQ ID NO: 97964 - DNA, 120 bp, synthetic construct
  source 1..120: mol_type = other DNA
ccactccactccagcctggtggacagagtccccatcacttaaaaaagaaaaataaattcatctaggcaaaaaggcaattagttggctgaatgacaataggaaatgtcaccaatagctgta

SEQ ID NO: 97965 - DNA, 120 bp, synthetic construct; identical to SEQ ID NO: 2017
  source 1..120: mol_type = other DNA

SEQ ID NO: 97966 - DNA, 120 bp, synthetic construct; identical to SEQ ID NO: 2018
  source 1..120: mol_type = other DNA

SEQ ID NO: 97967 - DNA, 120 bp, synthetic construct
  source 1..120: mol_type = other DNA
attgggtgcttattataagccaggaactgtgctaaacagtaatgacatcaaattactaccacttaggactatatttgtgcataacaaatactcagaaaaaatgtatgtactgatgataca

SEQ ID NO: 97968 - DNA, 120 bp, synthetic construct
  source 1..120: mol_type = other DNA
ttaaaatctttttaattttagagacagcatcttgctctgtcatccaggttggagtgcagtggtgcaatcacagctaactgcaaccttaaactcctgggctggaacaatcctcctgcttca

SEQ ID NO: 97969 - DNA, 120 bp, synthetic construct
  source 1..120: mol_type = other DNA
tctcgaactcctgacctcaggtgagctgcctgcctcagtttcccaaagtgctgagattacaggcatgagtcaccgtgcccggcccagtttgaatttgtgtagggattatgctcaatctgt

SEQ ID NO: 97970 - DNA, 120 bp, synthetic construct
  source 1..120: mol_type = other DNA
ttagtaaaactgccccattgctcaagattcagtggaaaggaagcaaaacaaaacaaagaaaccttatgagcaaaatgcttaattcagcacataacagcatatagtttccattggttaaag

SEQ ID NO: 97971 - DNA, 120 bp, synthetic construct; identical to SEQ ID NO: 34620
  source 1..120: mol_type = other DNA

SEQ ID NO: 97972 - DNA, 120 bp, synthetic construct; identical to SEQ ID NO: 34621
  source 1..120: mol_type = other DNA

SEQ ID NO: 97973 - DNA, 120 bp, synthetic construct
  source 1..120: mol_type = other DNA
ctgctgatacccaggcaaacagggtctggagtggacctctagcaaactccaacagacctgaagctgagggtcctgtttgttagaaggaaaactaacaaacagaaaggacatccacaccaa

SEQ ID NO: 97974 - DNA, 120 bp, synthetic construct
  source 1..120: mol_type = other DNA
ctcggcagaaactctacaagccagaagagagtgggggccaatattcaacattcttaaagaaaagaaatttcaacccagaatttcatatccaggcaaactaagcttcataagtgaaggaga

SEQ ID NO: 97975 - DNA, 120 bp, synthetic construct
  source 1..120: mol_type = other DNA
ggatacccaggaattgaactcagctctgcaccaagtggacctaatagacatctacagaactctccaccccaaatcaacagaatatacattgttttcagcaccacaccacaactcttccaa

SEQ ID NO: 97976 - DNA, 120 bp, synthetic construct
  source 1..120: mol_type = other DNA
gaggaattggtaccattccttgtgaaactattccaatcaatagaaaaagagggaatcctccccaactcattttatgaggccagcatcatcctgataccaaagcctgacagagacacaacc

SEQ ID NO: 97977 - DNA, 120 bp, synthetic construct
  source 1..120: mol_type = other DNA
cttacaagggacgtgaaggccctcttcaaggagaactacaaaccactgctcaatgaaataaaagaggatacaaacaaatggaagaacattccatgctcatgggtaggaagaatcaatatt

SEQ ID NO: 97978 - DNA, 120 bp, synthetic construct
  source 1..120: mol_type = other DNA
acaaagggctaatatctagaatctacaatgaactcaaacaaatttacaagaaagaaacaaacaaccccatcaaaaagtgggcaaaggacatgaacagacacttctcaaaagaagacattt

SEQ ID NO: 97979 - DNA, 120 bp, synthetic construct; identical to SEQ ID NO: 34622
  source 1..120: mol_type = other DNA

SEQ ID NO: 97980 - DNA, 120 bp, synthetic construct
  source 1..120: mol_type = other DNA
ttggcatccttgttgtgttccagatcttagagaaaaggctttcagtttttttctcattaagtatgtgagtctgtcatatatggcttttattatgttgaggtatgttcctactatacccag

SEQ ID NO: 97981 - DNA, 120 bp, synthetic construct
  source 1..120: mol_type = other DNA
ctcgtttctttttactcttttttctctaaacttcccttctcgcttcatttcattcatttcatcttccatcgctgatatcctttcttccagttgatcgcatcggctcctgaggcttctgca

SEQ ID NO: 97982 - DNA, 120 bp, synthetic construct
  source 1..120: mol_type = other DNA
cccgattttccaggtgccgtccgtcacccctttctttgattaggaaagggaactccctgaccccttgcactttccaagtgaggcaatgcctcgccctgcttcagctcgcgcacggtgcgc

SEQ ID NO: 97983 - DNA, 120 bp, synthetic construct
  source 1..120: mol_type = other DNA
taaaccggcagtgtcaacaagagcagggcatgtatgagtagctgagaatggtgaataggagtatgactagacagaagatagtagggatgacaagtttttttggggcacagtctaagttgg

SEQ ID NO: 97984 - DNA, 120 bp, synthetic construct
  source 1..120: mol_type = other DNA
ttgaagtctgggccaggaacaatggtaattgtgggacttaaagagtgagtacagctgaaggagccggggagcagaaagtatatgcgtcagttatgaggaagaaaatagattttggaagtt

SEQ ID NO: 97985 - DNA, 120 bp, synthetic construct; identical to SEQ ID NO: 34623
  source 1..120: mol_type = other DNA

SEQ ID NO: 97986 - DNA, 120 bp, synthetic construct; identical to SEQ ID NO: 34624
  source 1..120: mol_type = other DNA

SEQ ID NO: 97987 - DNA, 120 bp, synthetic construct
  source 1..120: mol_type = other DNA
ttgacaaattatttattattctgtgcatatataaggaatagccattaattaaagattgctgagaccagctcggtcatggagaccctaacccagtggccctagaggagttaaagacgcaca

SEQ ID NO: 97988 - DNA, 120 bp, synthetic construct; identical to SEQ ID NO: 34625
  source 1..120: mol_type = other DNA

SEQ ID NO: 97989 - DNA, 120 bp, synthetic construct; identical to SEQ ID NO: 34626
  source 1..120: mol_type = other DNA

SEQ ID NO: 97990 - DNA, 120 bp, synthetic construct; identical to SEQ ID NO: 34627
  source 1..120: mol_type = other DNA

SEQ ID NO: 97991 - DNA, 120 bp, synthetic construct; identical to SEQ ID NO: 34628
  source 1..120: mol_type = other DNA

SEQ ID NO: 97992 - DNA, 120 bp, synthetic construct; identical to SEQ ID NO: 34629
  source 1..120: mol_type = other DNA

SEQ ID NO: 97993 - DNA, 120 bp, synthetic construct; identical to SEQ ID NO: 34630
  source 1..120: mol_type = other DNA

SEQ ID NO: 97994 - DNA, 120 bp, synthetic construct; identical to SEQ ID NO: 34631
  source 1..120: mol_type = other DNA

SEQ ID NO: 97995 - DNA, 120 bp, synthetic construct
  source 1..120: mol_type = other DNA
tgtagtcccagctactcgggaggctgaggcaggagaatggagtgaaccaggaggcggagctggcagtaagccgagatcgcgccactgcactccagcctgggcgacagagcgagactccgt

SEQ ID NO: 97996 - DNA, 120 bp, synthetic construct
  source 1..120: mol_type = other DNA
cgacccacccatctcagcctcccaaattgctgggattacaggctgtgagccactgtgccctgccaattctgaagtttattaaaaacattagagcattttatcctggcataaattctagca

SEQ ID NO: 97997 - DNA, 120 bp, synthetic construct; identical to SEQ ID NO: 34632
  source 1..120: mol_type = other DNA

SEQ ID NO: 97998 - DNA, 120 bp, synthetic construct; identical to SEQ ID NO: 34633
  source 1..120: mol_type = other DNA

SEQ ID NO: 97999 - DNA, 120 bp, synthetic construct; identical to SEQ ID NO: 34634
  source 1..120: mol_type = other DNA

SEQ ID NO: 98000 - DNA, 120 bp, synthetic construct; identical to SEQ ID NO: 34635
  source 1..120: mol_type = other DNA

SEQ ID NO: 98001 - DNA, 120 bp, synthetic construct
  source 1..120: mol_type = other DNA
atcctaaacaggtcctgttaagaattccgtcattatcttgtcatgctttaaggcccaggaaaggcctaggcaaaactgttggtgggcttttgttacattccatcctgagtggttattaaa

SEQ ID NO: 98002 - DNA, 120 bp, synthetic construct; identical to SEQ ID NO: 34636
  source 1..120: mol_type = other DNA

SEQ ID NO: 98003 - DNA, 120 bp, synthetic construct; identical to SEQ ID NO: 34637
  source 1..120: mol_type = other DNA

SEQ ID NO: 98004 - DNA, 120 bp, synthetic construct; identical to SEQ ID NO: 34638
  source 1..120: mol_type = other DNA

SEQ ID NO: 98005 - DNA, 120 bp, synthetic construct; identical to SEQ ID NO: 34639
  source 1..120: mol_type = other DNA

SEQ ID NO: 98006 - DNA, 120 bp, synthetic construct; identical to SEQ ID NO: 34640
  source 1..120: mol_type = other DNA

SEQ ID NO: 98007 - DNA, 120 bp, synthetic construct; identical to SEQ ID NO: 34641
  source 1..120: mol_type = other DNA

SEQ ID NO: 98008 - DNA, 120 bp, synthetic construct; identical to SEQ ID NO: 34642
  source 1..120: mol_type = other DNA

SEQ ID NO: 98009 - DNA, 120 bp, synthetic construct
  source 1..120: mol_type = other DNA
agatcgtgccactgcactccagcctgggcaacagagcaagaatccattgggaggggaaggggaacaaaaaataaaaaactcttaacaaagaaaagctcaggaccagatgtgtttactggt

SEQ ID NO: 98010 - DNA, 120 bp, synthetic construct; identical to SEQ ID NO: 34643
  source 1..120: mol_type = other DNA

SEQ ID NO: 98011 - DNA, 120 bp, synthetic construct; identical to SEQ ID NO: 34644
  source 1..120: mol_type = other DNA

SEQ ID NO: 98012 - DNA, 120 bp, synthetic construct
  source 1..120: mol_type = other DNA
actgcaacctcagcctcccaggttcaattgattctcctgccttatcctcctaagtagctgggattacaggtgccccccaccacattgggctaatttttatatttttagtagagatggggt

SEQ ID NO: 98013 - DNA, 120 bp, synthetic construct; identical to SEQ ID NO: 34645
  source 1..120: mol_type = other DNA

SEQ ID NO: 98014 - DNA, 120 bp, synthetic construct; identical to SEQ ID NO: 34646
  source 1..120: mol_type = other DNA

SEQ ID NO: 98015 - DNA, 120 bp, synthetic construct; identical to SEQ ID NO: 34647
  source 1..120: mol_type = other DNA

SEQ ID NO: 98016 - DNA, 120 bp, synthetic construct
  source 1..120: mol_type = other DNA
agtgatgaacgaatgtgaaggcctaggacactactgtacactactgtagactttatcaacactgtacacttaggatacactaaatcgaaggaagtctatttttctttcttcaataataaa

SEQ ID NO: 98017 - DNA, 120 bp, synthetic construct; identical to SEQ ID NO: 34648
  source 1..120: mol_type = other DNA

SEQ ID NO: 98018 - DNA, 120 bp, synthetic construct; identical to SEQ ID NO: 34649
  source 1..120: mol_type = other DNA

SEQ ID NO: 98019 - DNA, 120 bp, synthetic construct; identical to SEQ ID NO: 34650
  source 1..120: mol_type = other DNA

SEQ ID NO: 98020 - DNA, 120 bp, synthetic construct; identical to SEQ ID NO: 34651
  source 1..120: mol_type = other DNA

SEQ ID NO: 98021 - DNA, 120 bp, synthetic construct; identical to SEQ ID NO: 34652
  source 1..120: mol_type = other DNA

SEQ ID NO: 98022 - DNA, 120 bp, synthetic construct; identical to SEQ ID NO: 34653
  source 1..120: mol_type = other DNA

SEQ ID NO: 98023 - DNA, 120 bp, synthetic construct; identical to SEQ ID NO: 34654
  source 1..120: mol_type = other DNA

SEQ ID NO: 98024 - DNA, 120 bp, synthetic construct
  source 1..120: mol_type = other DNA
caggcgtgagccaccgcgcccggccgtgtaattgttttaatattgcttatctcatggccagtgcttgtttagctgctagagaaaaataaaaaccttgtggaaggttaaaacataatttat

SEQ ID NO: 98025 - DNA, 120 bp, synthetic construct; identical to SEQ ID NO: 34655
  source 1..120: mol_type = other DNA

SEQ ID NO: 98026 - DNA, 120 bp, synthetic construct; identical to SEQ ID NO: 34656
  source 1..120: mol_type = other DNA

SEQ ID NO: 98027 - DNA, 120 bp, synthetic construct; identical to SEQ ID NO: 34657
  source 1..120: mol_type = other DNA

SEQ ID NO: 98028 - DNA, 120 bp, synthetic construct; identical to SEQ ID NO: 34658
  source 1..120: mol_type = other DNA

SEQ ID NO: 98029 - DNA, 120 bp, synthetic construct; identical to SEQ ID NO: 34659
  source 1..120: mol_type = other DNA

SEQ ID NO: 98030 - DNA, 120 bp, synthetic construct; identical to SEQ ID NO: 34660
  source 1..120: mol_type = other DNA

SEQ ID NO: 98031 - DNA, 120 bp, synthetic construct; identical to SEQ ID NO: 34661
  source 1..120: mol_type = other DNA

SEQ ID NO: 98032 - DNA, 120 bp, synthetic construct; identical to SEQ ID NO: 34662
  source 1..120: mol_type = other DNA

SEQ ID NO: 98033 - DNA, 120 bp, synthetic construct; identical to SEQ ID NO: 34663
  source 1..120: mol_type = other DNA

SEQ ID NO: 98034 - DNA, 120 bp, synthetic construct; identical to SEQ ID NO: 34664
  source 1..120: mol_type = other DNA

SEQ ID NO: 98035 - DNA, 120 bp, synthetic construct; identical to SEQ ID NO: 34665
  source 1..120: mol_type = other DNA

SEQ ID NO: 98036 - DNA, 120 bp, synthetic construct; identical to SEQ ID NO: 34666
  source 1..120: mol_type = other DNA

SEQ ID NO: 98037 - DNA, 120 bp, synthetic construct; identical to SEQ ID NO: 34667
  source 1..120: mol_type = other DNA

SEQ ID NO: 98038 - DNA, 120 bp, synthetic construct; identical to SEQ ID NO: 34668
  source 1..120: mol_type = other DNA

SEQ ID NO: 98039 - DNA, 120 bp, synthetic construct; identical to SEQ ID NO: 34669
  source 1..120: mol_type = other DNA

SEQ ID NO: 98040 - DNA, 120 bp, synthetic construct
  source 1..120: mol_type = other DNA
atggccagtggaatgcaattttcagtttgtcttgtaaggtaggaaatttgcatttgttaattggcaagctcccaccatgatccaagtccaagatcccagtgccttgtactgctaacatat

SEQ ID NO: 98041 - DNA, 120 bp, synthetic construct
  source 1..120: mol_type = other DNA
aagctgacaatctttccacatagaagattattattcaaataactgtcttaagtaaatgttatattaatttcttgtttcttaagtagacagttattaaattagcttctggtattttagaga

SEQ ID NO: 98042 - DNA, 120 bp, synthetic construct
  source 1..120: mol_type = other DNA
gagcctgagtagtcaaagccattctaagcaaaaagaacaaaactgaaggcatcaccttacctgacttcaaactatactacaaagctacagtaatgaaaacagcatgatacccatgcaaaa

SEQ ID NO: 98043 - DNA, 120 bp, synthetic construct; identical to SEQ ID NO: 34673
  source 1..120: mol_type = other DNA

SEQ ID NO: 98044 - DNA, 120 bp, synthetic construct
  source 1..120: mol_type = other DNA
tccatgatctaattactctcaccaggccccacctccaacattaggcattacagttcaacatgagatttgggtggggacacatatccaaactatatcacaaccaaaaccaaaattgacaag

SEQ ID NO: 98045 - DNA, 120 bp, synthetic construct
  source 1..120: mol_type = other DNA
aatcatatcctgtgcagcaatgtgaatgcatttcgaggccattttcctaagtgaacaaatacagaaacagaatccaaatactgcatgttctcacttataagtgggaggtaaacattgatg

SEQ ID NO: 98046 - DNA, 120 bp, synthetic construct
  source 1..120: mol_type = other DNA
gactttgcctttcaagaaaaagagaatcatattaaatacaatttttaattttaccaaactagttttgaattatctagtggaaattttcagtctgtatttcaaaaaatacattgtgccttt

SEQ ID NO: 98047 - DNA, 120 bp, synthetic construct
  source 1..120: mol_type = other DNA
tacatcaacaaggcagagaaaattaatgatgcttgataaagaaataagataaattcatttctcaagaacattttgattgtaagctactcctgtattgtcttttaacattaatgtctatgc

SEQ ID NO: 98048 - DNA, 120 bp, synthetic construct
  source 1..120: mol_type = other DNA
gttttataaaataagttcattgtcttgatagttattttttttccttcccgcattataggaattcatgaagttacgtctgtcatcttcatttgttatttgaagttactctgcaagttacct

SEQ ID NO: 98049 - DNA, 120 bp, synthetic construct
  source 1..120: mol_type = other DNA
ctagatggatcctctgtgcaagatgagttatttctgcttccagtcatcctcttcccataatataaataaaacctgcacaagtccaaaaccttgaactttatcttaccatcttctcagaaa

SEQ ID NO: 98050 - DNA, 120 bp, synthetic construct; identical to SEQ ID NO: 34680
  source 1..120: mol_type = other DNA

SEQ ID NO: 98051 - DNA, 120 bp, synthetic construct; identical to SEQ ID NO: 34681
  source 1..120: mol_type = other DNA

SEQ ID NO: 98052 - DNA, 120 bp, synthetic construct; identical to SEQ ID NO: 34682
  source 1..120: mol_type = other DNA

SEQ ID NO: 98053 - DNA, 120 bp, synthetic construct
  source 1..120: mol_type = other DNA
tatttcacccacgtaactcattattctcatttgtcatgaaatatttgtgcactgatagacaatgaaaattggcatcttcctctaggatttttatttcactgatggcaggttttgaactcc

SEQ ID NO: 98054 - DNA, 120 bp, synthetic construct
  source 1..120: mol_type = other DNA
ctatttcactgaagatttctcccctcatatcttgtatcatttttttgatctccataaattggacttcacctttttctggtacctccttgattagcttaataattgaccttctgaattctt

SEQ ID NO: 98055 - DNA, 120 bp, synthetic construct
  source 1..120: mol_type = other DNA
caggtcaactgttcttcagtcctaaaatacaataatccctaatcagatatatctgtttcaagaactaaaattacttctaatttacaagactcgcttcttataaactattccatcaactta

SEQ ID NO: 98056 - DNA, 120 bp, synthetic construct
  source 1..120: mol_type = other DNA
actgatcttggattctaaatggattggagcttttgccttgagtaaatgtattcctacaaaaaccatagaattttagagagaaaaatgatattagaaagacattatatacccaaccctctc

SEQ ID NO: 98057 - DNA, 120 bp, synthetic construct
  source 1..120: mol_type = other DNA
gcctgggcgacagggcgagactccgtctcaaaaaaaaaaaaaaaaaaaaaaaaaaaaaaagaaattgttgaagcagaatctccgttattaaaagtaacgcaaaaccaaaacaaaactctt

SEQ ID NO: 98058 - DNA, 120 bp, synthetic construct
  source 1..120: mol_type = other DNA
atgtaattacctaaaactgagttctttgaagaaggaaagaaataataccaaatttagctctaatatgcctggctatatgtcatataaattctattaagttaactatatatccccagtttt

SEQ ID NO: 98059 - DNA, 120 bp, synthetic construct; identical to SEQ ID NO: 2030
  source 1..120: mol_type = other DNA

SEQ ID NO: 98060 - DNA, 120 bp, synthetic construct; identical to SEQ ID NO: 2031
  source 1..120: mol_type = other DNA

SEQ ID NO: 98061 - DNA, 120 bp, synthetic construct
  source 1..120: mol_type = other DNA
gggggaggataaacatgcattattttgtgtatgagttatcttcatattttggagtgtgcagaagtgattggctatttttgatgaccactaatacagtaaaatttggtatctcattattta

SEQ ID NO: 98062 - DNA, 120 bp, synthetic construct
  source 1..120: mol_type = other DNA
gtgctttatactttgtaaaagtgaaatacagctttatttcttgcttttctgatgttactgttcccttacatttaaaaatcattttagggtgatagcatcattcgcatttctacagcgttt

SEQ ID NO: 98063 - DNA, 120 bp, synthetic construct
  source 1..120: mol_type = other DNA
cagacatttgctgaaactcttcacttccttttccctccaaacaatttaaaagataattttataactgctgtcataacacatcagctctttaacttcttgcaactaagaattatcttttcc

SEQ ID NO: 98064 - DNA, 120 bp, synthetic construct
  source 1..120: mol_type = other DNA
agtgatatctcaatatagttttgtttttccctaattattagttatgctgagtatcttttcgtgtgcatactggtcatatgttcatcttccttggaaaatggctattcaagtcctttgccc

SEQ ID NO: 98065 - DNA, 120 bp, synthetic construct
  source 1..120: mol_type = other DNA
tttcccctctttggttaggtttatacatacatatattcttgttttgatactattgtaaacagaaatgttttcctaattttattttcatattgttcattgttagtgtttagaaacctaact

SEQ ID NO: 98066 - DNA, 120 bp, synthetic construct
  source 1..120: mol_type = other DNA
tgttaggggattttgtgactgtgcaaacatcatagagtgtacttacatgaacttacactctatagcctattacatacttaggctatatggcatagcctattgttcctaggctacaaacct

SEQ ID NO: 98067 - DNA, 120 bp, synthetic construct; identical to SEQ ID NO: 2032
  source 1..120: mol_type = other DNA

SEQ ID NO: 98068 - DNA, 120 bp, synthetic construct
  source 1..120: mol_type = other DNA
tgtttatagtattctctgatggtagtttgtatttctgtgggatcagtggtgctattctctttatcattttttattatgtctacctgattcttctctcttttcttccttactagtctagct

SEQ ID NO: 98069 - DNA, 120 bp, synthetic construct
  source 1..120: mol_type = other DNA
ccctttaccattatgtaatgcccttctttgtcttttcttgacctttgttggtttaaagtctgttttatcagagtctagaattgcaacccctgctttttttctttctttccatttgcttgg

SEQ ID NO: 98070 - DNA, 120 bp, synthetic construct
  source 1..120: mol_type = other DNA
ttccactttatcagcttggctattgatacttgtgtatggttcacaaagttctcgtgctgtgtttttcagctccataacgtcatttatgtttctctctaaactcgttactctagttagcac

SEQ ID NO: 98071 - DNA, 120 bp, synthetic construct; identical to SEQ ID NO: 2033
  source 1..120: mol_type = other DNA

SEQ ID NO: 98072 - DNA, 120 bp, synthetic construct
  source 1..120: mol_type = other DNA
attggtctatagtgttgttgaagagccatatgttcttttttctttttttttttttttttgagacagagtctcgccttgttgcccaggctggaatgcagtggtgtgatcttggctcactga

SEQ ID NO: 98073 - DNA, 120 bp, synthetic construct
  source 1..120: mol_type = other DNA
atgcaccacgaattgcgtctgaccttttagagtataggtgacttttctaatgagattcagaaaataatttccacttgtccatttggcatttctacctgtatgttcattactcttgaagtg

SEQ ID NO: 98074 - DNA, 120 bp, synthetic construct
  source 1..120: mol_type = other DNA
aattttaccctgttttgaagaatatgttttaaagtgagcttaaataatacaatataaaaattgacttcttcaagtggcgagagcactcagagacgcgacgtggagctggcgggtaccgag

SEQ ID NO: 98075 - DNA, 120 bp, synthetic construct
  source 1..120: mol_type = other DNA
caaaggggtttgggctacaggagttaattgggtagagttgtgactaagaagataaggttggtttaacaaagtttgtacaaatttccctcagtctcaattttctgtcctcgaagacaagtt

SEQ ID NO: 98076 - DNA, 120 bp, synthetic construct
  source 1..120: mol_type = other DNA
tttccaccacagaatactgcttcaagttgcctcagtacaagtttgttatcttaacatttctcttttatccaaagacgatttatccattgtctcccagagagtgctctttgtctccagata

SEQ ID NO: 98077 - DNA, 120 bp, synthetic construct
  source 1..120: mol_type = other DNA
tctgcctcctgggttcatgccattctcctgcctcagcctcctgagtagctaggactacaggtacccaccaccaagcctggctaatttttttttgtagttttagtagagacagggtttcac

SEQ ID NO: 98078 - DNA, 120 bp, synthetic construct; identical to SEQ ID NO: 2034
  source 1..120: mol_type = other DNA

SEQ ID NO: 98079 - DNA, 120 bp, synthetic construct
  source 1..120: mol_type = other DNA
aatattttttaaaaacagataattttccagtaaggaaatattctatataattgccaggtacagttttatagattctatgtgttaattacttactgaagaattgtcaaggtgtaagtggaa

SEQ ID NO: 98080 - DNA, 120 bp, synthetic construct; identical to SEQ ID NO: 2035
  source 1..120: mol_type = other DNA

SEQ ID NO: 98081 - DNA, 120 bp, synthetic construct; identical to SEQ ID NO: 2036
  source 1..120: mol_type = other DNA

SEQ ID NO: 98082 - DNA, 120 bp, synthetic construct
  source 1..120: mol_type = other DNA
ctcacactccaattgtctgcatacctcattcttcctggacacaggtctcaggacccaccaaatggcaggactgaaagagctgtaacacaaacagggctgaaacaccaccccccccacccc

SEQ ID NO: 98083 - DNA, 120 bp, synthetic construct
  source 1..120: mol_type = other DNA
tatgggttttagagttggagactatatctttctactagtttgtattcccatcctcaatttagaaataattaagaagtatatttttatacctttttaagaaaaatgaaaaggacagtgcca

SEQ ID NO: 98084 - DNA, 120 bp, synthetic construct
  source 1..120: mol_type = other DNA
tatgctacaaaattattccaacatctaatccaagtcagaaaccatctgttgcttgaatgacatttggcttgtttaaaatgtattaattaaacagacatgttgtgtaactatggcaaaggg

SEQ ID NO: 98085 - DNA, 120 bp, synthetic construct
  source 1..120: mol_type = other DNA
atagatttgttttaatttctgtgtcacaacttctctgcagggctacagacagaaatttgtcatgaacaaattatgacatgaatattaatgtagtagcccttttatactgcacaataatta

SEQ ID NO: 98086 - DNA, 120 bp, synthetic construct
  source 1..120: mol_type = other DNA
cgtgcatgagtctttatagtagaatgatttataatcctttgggtatatacccagtaatgggatggctgggtcaaatggtatttctggttctagacccttgaggaatcgccacactgtctt

SEQ ID NO: 98087 - DNA, 120 bp, synthetic construct
  source 1..120: mol_type = other DNA
atcagatgagccagtttatcgatctgggtggtgccagctggtccatcaagtgcaggatctgcaaaatatctcaagcactgcttaggagcagtttagggagggtcagaatcttgtagcctc

SEQ ID NO: 98088 - DNA, 120 bp, synthetic construct
  source 1..120: mol_type = other DNA
tagttacttgggagggtcgcttgagcctgggaggtagaggttgcagtgagccaagattgtgccattgcattccaacctagatgacagaatgagaccctgtctaaaacaaaacaaaacaaa

SEQ ID NO: 98089 - DNA, 120 bp, synthetic construct
  source 1..120: mol_type = other DNA
tagtctctttttatacagtctttccacgaagctagcttgagcttccccacagtatggcatgctcccagtactcaaactactttcaatgcagctgtaattttccatggtgagttttccaag

SEQ ID NO: 98090 - DNA, 120 bp, synthetic construct
  source 1..120: mol_type = other DNA
attcagatcatatctgaaaccctgtaattttcattctccctttcagtcccagcggcgtgtcacatttcacctgccagaaggctctcaggaaagcagcagtgatggtggactgggagacca

SEQ ID NO: 98091 - DNA, 120 bp, synthetic construct
  source 1..120: mol_type = other DNA
tgggccaaatacctggcaaaaacataaataaggtaatataaactagacattttgaaaggttattttgagcattatggattgcagggatgtataattcaaataaagcttctaggctttaga

SEQ ID NO: 98092 - DNA, 120 bp, synthetic construct
  source 1..120: mol_type = other DNA
gtaaactcagagtaagcatccacagtgcacatctcaccctgaaataaaattccaactgaatgagactcaaatggaatactgttgataataataggagaattggtatgtgtcagaaatagt

SEQ ID NO: 98093 - DNA, 120 bp, synthetic construct
  source 1..120: mol_type = other DNA
agtgaaatgtttaacatagtacgtgtgtgtgtgtgtgtgtgtgtgtgtgtgtgttgttttaattaaaaagaaaaaacatagctggtttagaattggccatagcaaagtattctctttagg

SEQ ID NO: 98094 - DNA, 120 bp, synthetic construct
  source 1..120: mol_type = other DNA
ccgcattttcaaaggattttcttgagacacattcatggagacacatgtggccctggtaaagaacaagttgtgagtctacttttgaggattttacatatccaggtatagtgttaactcaaa

SEQ ID NO: 98095 - DNA, 120 bp, synthetic construct
  source 1..120: mol_type = other DNA
gctagagtttatctcaggttagcaaatctgtttgacattcatttttatttcagtagatcaggtttgcttagcactcaaatacactactaattaattcacaacaaggaagtaattaatctt

SEQ ID NO: 98096 - DNA, 120 bp, synthetic construct
  source 1..120: mol_type = other DNA
aataaaaagaaaagtgaatgcatcattttgttaatatttttacatgaaacaaatgggaaatatattccacttaacaaaaagaaattatgctccctttaaaggttaattacgtagcaaggc

SEQ ID NO: 98097 - DNA, 120 bp, synthetic construct
  source 1..120: mol_type = other DNA
ttaaatataatatggattagatagaggttgatcactcaaaagcaggccactataagtaaagcaatctcttatcttgtcttttctgtttgaaagtgacaagcactaggagactggcacaag

SEQ ID NO: 98098 - DNA, 120 bp, synthetic construct
  source 1..120: mol_type = other DNA
cactaggtacatggtctttatctggcacttctttttttaatcaatcttatattggaaatgtttgtatgttatctaaacaaactttttctgaatagtgtatatgaaataagccattaaaag

SEQ ID NO: 98099 - DNA, 120 bp, synthetic construct
  source 1..120: mol_type = other DNA
agcatttggagcaatacagactgccgatttctaaaattactgtttgtgctaaccagtgaaagtactgcagaaaaaactgtaaacatgctgaatgataatgatctctatgtcaggaaaact

SEQ ID NO: 98100 - DNA, 120 bp, synthetic construct; identical to SEQ ID NO: 2037
  source 1..120: mol_type = other DNA

SEQ ID NO: 98101 - DNA, 120 bp, synthetic construct; identical to SEQ ID NO: 2038
  source 1..120: mol_type = other DNA

SEQ ID NO: 98102 - DNA, 120 bp, synthetic construct
  source 1..120: mol_type = other DNA
tggctaacacaggtgaaaccccgtctctactaaaaatataaaaaattagccggtcgtggtggtgggcgcctgtggtcccagctgctcgggaggctgaggcaggagaatggcatgaaccct

SEQ ID NO: 98103 - DNA, 120 bp, synthetic construct
  source 1..120: mol_type = other DNA
ccaaagtgctgggattacaggcgtgagccaccgtgcccggcctttttctgataatttttatttgaaaaacaatgcactccatttatacgtcacccatgtcatctaggtgaatataaatgc

SEQ ID NO: 98104 - DNA, 120 bp, synthetic construct
  source 1..120: mol_type = other DNA
aggaaattgtaggcaggtgtgttttcatctctcacactatgtggctttttctattccatggtaggaatcaaagatagccaagttaagaacattgtggctcattggaattagaacttcatg

SEQ ID NO: 98105 - DNA, 120 bp, synthetic construct; identical to SEQ ID NO: 2039
  source 1..120: mol_type = other DNA

SEQ ID NO: 98106 - DNA, 120 bp, synthetic construct; identical to SEQ ID NO: 2040
  source 1..120: mol_type = other DNA

SEQ ID NO: 98107 - DNA, 120 bp, synthetic construct
  source 1..120: mol_type = other DNA
tcctagtttggatcatcattttcaaaatggtaaataggactgagtaattcatttgagtccaattactatcttatctttaagaagatggttggaatgagttctgcaaaatggtgatagcgg

SEQ ID NO: 98108 - DNA, 120 bp, synthetic construct
  source 1..120: mol_type = other DNA
ttttggaactgttctagcagagtttaagaagaactgtgaggggtaggcaataggttggtctttgagcttaatcactgaattccacttctccaacctgtgcatgagtgaaataagcaggta

SEQ ID NO: 98109 - DNA, 120 bp, synthetic construct
  source 1..120: mol_type = other DNA
aaagttagtgtctccctcagcacctctcttcactgctcacaaacacctcttacaacagataatttctgttaaaagctttttctaggccgggcgcagtggctcacgcctgtaatcccagca

SEQ ID NO: 98110 - DNA, 120 bp, synthetic construct
  source 1..120: mol_type = other DNA
attgcttgaaccccggaggcagaggttgcagtaagccgagatcgcgccactgcactccagcccgggcaacagagtgaaattccatctcataaaaaaaaaaaaaaaaaaaaaggaaaaatt

SEQ ID NO: 98111 - DNA, 120 bp, synthetic construct
  source 1..120: mol_type = other DNA
tttttttgtttgtttgtttctgttttttgttttttgagacggagtcttgttctgttgcccaggctggagtgcagtggcataatctcggctcactgaaacctctgcctccgggttcaagca

SEQ ID NO: 98112 - DNA, 120 bp, synthetic construct
  source 1..120: mol_type = other DNA
gcctcggcctcccaaagtgctgggattacaggcgtgagccactgcgcccagccaagaaatagtattttttacttttattcaaatctatatagaatttatctatataaatgcctgcttaac

SEQ ID NO: 98113 - DNA, 120 bp, synthetic construct
  source 1..120: mol_type = other DNA
tgctttactctacctcattttgcttgtgcttattctgtttcaattagtggactcttaacatttgtatttactaaaaaatcaatgccaagaaattgcttcttttaagacttatgctttgaa

SEQ ID NO: 98114 - DNA, 120 bp, synthetic construct; identical to SEQ ID NO: 2041
  source 1..120: mol_type = other DNA

SEQ ID NO: 98115 - DNA, 120 bp, synthetic construct
  source 1..120: mol_type = other DNA
tttctttatccagtctatcactgatgggcatttgggttggtttcaagtctttgcttttgtaaatagtgttgcactttttttaaagggcaggtaagagttaacaggaaatggagattgaac

SEQ ID NO: 98116 - DNA, 120 bp, synthetic construct
  source 1..120: mol_type = other DNA
ctcttggagtttatcttttattaccataataggagttcacacaatcttgcatctatagtaccttcatttaaagatttgtttgttggaactgcaaaaagaattattttctattaattaatt

SEQ ID NO: 98117 - DNA, 120 bp, synthetic construct
  source 1..120: mol_type = other DNA
caatcagaagccagaaacaaatacttaaagggtcggaagaataagacatggatttgtgctgaatgaagtggccaaatatacatattcagtaagctataggaggaggcatgaatatttatg

SEQ ID NO: 98118 - DNA, 120 bp, synthetic construct
  source 1..120: mol_type = other DNA
ggttaaggaggttgttcaatttacaccattaggacatgatggaaccagtggtacatgtgccaccaatatctgtctttaactcttatgtgatcctgacacaaatatgtttgtttacagatt

SEQ ID NO: 98119 - DNA, 120 bp, synthetic construct
  source 1..120: mol_type = other DNA
tgacattaatgtacttttacatcattgactaacaaagaatgtaatttacaatttttatgtgaatgagaactctagtccatcaatgcaattacaatgcatcaattatccttcctgaatgtt

SEQ ID NO: 98120 - DNA, 120 bp, synthetic construct
  source 1..120: mol_type = other DNA
gtgggaatggttaatgagtacacaaaaatagaaagaatgagtaagacctactaattgatagaacaatagggtgactatagtcaataataactgtacattttgaaaaaaactgaaagagtg

SEQ ID NO: 98121 - DNA, 120 bp, synthetic construct
  source 1..120: mol_type = other DNA
tgcatgtaaatatacctcattgattttaacaatgacagaggtgggtggatgactgtcagagttgtttttcttaagctattgtggtcctcccctgaatgatgctgtaacatgcattatgct

SEQ ID NO: 98122 - DNA, 120 bp, synthetic construct
  source 1..120: mol_type = other DNA
ttggtgtatacctaaactactaatcaccatcagatttccatcatgcttccattgccccaagctaggtctcttctctatctactagttattctatttttttagttattcaaatttaacatc

SEQ ID NO: 98123 - DNA, 120 bp, synthetic construct
  source 1..120: mol_type = other DNA
aagctctgttttaaggtgtatatatatgtaggattgttaattcttcttggtaaattgatccttttataattataaaatttcactccatatccgtgtttatattccttgttctgatgtcta

SEQ ID NO: 98124 - DNA, 120 bp, synthetic construct
  source 1..120: mol_type = other DNA
tttcatattccactttaatatatctgttgacctctgactatgtctcctgtattatttcttagtgcttgcgctaggcctgataatatacatacctaacctttcacagtttactcagagtta

SEQ ID NO: 98125 - DNA, 120 bp, synthetic construct; identical to SEQ ID NO: 2042
  source 1..120: mol_type = other DNA

SEQ ID NO: 98126 - DNA, 120 bp, synthetic construct; identical to SEQ ID NO: 2043
  source 1..120: mol_type = other DNA

SEQ ID NO: 98127 - DNA, 120 bp, synthetic construct
  source 1..120: mol_type = other DNA
cggctaattatttttgtatttctagtagagacgggatttcaccatgttagccaggatggtcttgatctcctgacctcgtgatctgcccgcctcagcctcccaaagtgctgggattacagg

SEQ ID NO: 98128 - DNA, 120 bp, synthetic construct
  source 1..120: mol_type = other DNA
gtgcctatttttatacctgtaccatgctgttttggtgattatggccttatagtataaagtcaggtaatatgatgcctccagatttgtactttttgcttagacttgctttggctatgcggg

SEQ ID NO: 98129 - DNA, 120 bp, synthetic construct
  source 1..120: mol_type = other DNA
tgcttatgtttatgagcacagaggaggtttctctgggcttgagacccaaacctttgagaagcagatgctggctaactggtagtggtatctgtgagggaagtgtaatctggctggttctag

SEQ ID NO: 98130 - DNA, 120 bp, synthetic construct
  source 1..120: mol_type = other DNA
tttagcaccacagagggttatttgtgaccttgataagagaattttcagtgtaatattggaagtgaaagtctggatctagtaggttcaagatggaaaggggagcagagaaattgtatgagt

SEQ ID NO: 98131 - DNA, 120 bp, synthetic construct
  source 1..120: mol_type = other DNA
attatgttagagaagcaattgaaacatatgcagaaaacgttgcattatcttctttcctctatcctccccttcactccctgcctttctcctttccttctttcccttcttttctccttcctc

SEQ ID NO: 98132 - DNA, 120 bp, synthetic construct
  source 1..120: mol_type = other DNA
ggcatatgtccatactccatcctaagaaatccaattcttttaataattgtaatagaattgattgagcttgctattagagtgtttaactgtactcttgaaatgggttttactaaaagagat

SEQ ID NO: 98133 - DNA, 120 bp, synthetic construct
  source 1..120: mol_type = other DNA
tagatgcctcaaagctggtttttttggacctgcatttttttgtgaaaaataaaatgctaacttatagggaaaatgataactaattttcttggcagtggtcaataactggagctagcataa

SEQ ID NO: 98134 - DNA, 120 bp, synthetic construct
  source 1..120: mol_type = other DNA
acagagaaataagcgctctgagtcttgggagattctgtctgtgtacaagcatgaactatgctccatatgagaacatgagccttgtcatctgctttaaatgtcattggagaacagttatca

SEQ ID NO: 98135 - DNA, 120 bp, synthetic construct
  source 1..120: mol_type = other DNA
gtttaaaataggtcttacaaatattatgaaaatacaacttactgtaatcatactgcagtttgtcatatgtggttcattgttatgaggcagtaaggtgatggcagaggcagcactatatat

SEQ ID NO: 98136 - DNA, 120 bp, synthetic construct
  source 1..120: mol_type = other DNA
ttcacatgagatgagaataaattctctacctgaaattctccaccttacaatataggatcaaggcaagaatttcggaagctacatattgctaaaaaactgaattatctctctgtgtatcat

SEQ ID NO: 98137 - DNA, 120 bp, synthetic construct
  source 1..120: mol_type = other DNA
tatcaagtaggagttgagtaaatacttgtagtgtatgtatggaaaatagttgctaaataaattctaccagaaaataactgtgatttccatgggcactctgttaaaaagggggagggaggg

SEQ ID NO: 98138 - DNA, 120 bp, synthetic construct; identical to SEQ ID NO: 2044
  source 1..120: mol_type = other DNA

SEQ ID NO: 98139 - DNA, 120 bp, synthetic construct; identical to SEQ ID NO: 2045
  source 1..120: mol_type = other DNA

SEQ ID NO: 98140 - DNA, 120 bp, synthetic construct
  source 1..120: mol_type = other DNA
ccccaatattgctagagaggccaacagtcaaattcaggaaatacagagaacccctaaaaaatcagacacaagaagatcatccccaagaaacataatcatcaaaatttctgaggtcaaaat

SEQ ID NO: 98141 - DNA, 120 bp, synthetic construct
  source 1..120: mol_type = other DNA
attctaacatagagaaacatgcacacaaatgttcactgcagcactattcacaatagtaaagacatggaatcaagctaaatgcccatcaatgacagattggataaagaaaacgtggcacac

SEQ ID NO: 98142 - DNA, 120 bp, synthetic construct
  source 1..120: mol_type = other DNA
gctctggcactgtactattattgcttttgagtcttaagtaagcagaagaaaagctttcttacatggaatggcccactgttttacatggaaacagaagtcctgcaacaggtgcagaacttt

SEQ ID NO: 98143 - DNA, 120 bp, synthetic construct
  source 1..120: mol_type = other DNA
ggaaggtcagtctcaactcctccccacctctccttgttacttgaagcatgccataaaacctaggaaggattttctgactgttccctgaagcaggtcataagacactcaatagaaaggtgc

SEQ ID NO: 98144 - DNA, 120 bp, synthetic construct
  source 1..120: mol_type = other DNA
attctggatggctgtggatcaagtcagcttgcatatagtactaaaaccattataattttgaaaaatatatctaggaaagtatgaaaaagtgattgagtttataaatcaaaacttgctaaa

SEQ ID NO: 98145 - DNA, 120 bp, synthetic construct
  source 1..120: mol_type = other DNA
atacccatgcattgtgggaggacctggtgggaggtaattgaatcatgggggcaggaccttcccatgctgtgctcctgatagtgggtaagtctcatgagatctgatggttttaaaaagagg

SEQ ID NO: 98146 - DNA, 120 bp, synthetic construct
  source 1..120: mol_type = other DNA
tgagtgctgcctagggacttggtgccctgtgtcccagctgctccagtcatggctgaaaggggccaaggtagagtttgggccatggcttcagagggtgcaatccccaagccttggtagctt

SEQ ID NO: 98147 - DNA, 120 bp, synthetic construct
  source 1..120: mol_type = other DNA
gaatgatatggtttggctgtgtccacacccaaatctcatcttgaatttccatgtgttgtgggggaactgggtggaaggtaattgaatcatgggggcaggcttttcccatgctgctctcat

SEQ ID NO: 98148 - DNA, 120 bp, synthetic construct; identical to SEQ ID NO: 2046
  source 1..120: mol_type = other DNA

SEQ ID NO: 98149 - DNA, 120 bp, synthetic construct
  source 1..120: mol_type = other DNA
ttccaatccatgagcatgaaacgtttttccatgtgtttttgtcatctctgatttctttgagcagtgttttgtagttctctttgcagagatatttcaccttggttagatgtgttcctaggt

SEQ ID NO: 98150 - DNA, 120 bp, synthetic construct
  source 1..120: mol_type = other DNA
tttggaatagtttcagtagaattgggaccagctcttctttgtacttctggtagaattgaactgtgaatccatttggtccagggctttttttttttttttttttttttttgattggtaggt

SEQ ID NO: 98151 - DNA, 120 bp, synthetic construct; identical to SEQ ID NO: 2047
  source 1..120: mol_type = other DNA

SEQ ID NO: 98152 - DNA, 120 bp, synthetic construct
  source 1..120: mol_type = other DNA
cctagagacttgttgaatggctttgcccaaaatgctgacagcaatatgcacaataaagtccaggctgaggtggtgtcagatggaaatgaggaactggagcaaaagtgacccttgttatgt

SEQ ID NO: 98153 - DNA, 120 bp, synthetic construct; identical to SEQ ID NO: 2048
  source 1..120: mol_type = other DNA

SEQ ID NO: 98154 - DNA, 120 bp, synthetic construct; identical to SEQ ID NO: 2049
  source 1..120: mol_type = other DNA

SEQ ID NO: 98155 - DNA, 120 bp, synthetic construct
  source 1..120: mol_type = other DNA
cagctctgtcacctacctttctatctcaacttcagtttccccattgatttaacaggaatgaaaatagtatttatgtcagagagttgttgaaatgataaaatgcatacaaaaagagacccc

SEQ ID NO: 98156 - DNA, 120 bp, synthetic construct
  source 1..120: mol_type = other DNA
ctttttctgaatcttctgtagttctcttgctcagacagtactctatgacaagtcattgcagcattttgccctttgtaatctttctgaaaagttcaatttcatcttctttgaagcaattat

SEQ ID NO: 98157 - DNA, 120 bp, synthetic construct
  source 1..120: mol_type = other DNA
tgtgtttcaatcattcaccacttgagttccagtgagaacaaaagtaaagttttatctttgagtctaccgattatttccgttacagggtaagaaaatgtgtttgctaagtaggcatattct

SEQ ID NO: 98158 - DNA, 120 bp, synthetic construct
  source 1..120: mol_type = other DNA
gatagcataagtattaaaatgatatttgagcactgtactgcaaagctgctaaaaacagaaaaattacatatatagtagtttgtataatatagatgtgtgtgtgtgtatatatatatatat

SEQ ID NO: 98159 - DNA, 120 bp, synthetic construct
  source 1..120: mol_type = other DNA
tattgctaagtcaatgcaaactagtgaagtggcttattttggtgaattacactatgataaacatttttttggaccaccatatcacatatcacacaggacaaccatatagaaactcatagc

SEQ ID NO: 98160 - DNA, 120 bp, synthetic construct
  source 1..120: mol_type = other DNA
ctaaatacatatatatacacaaacatataaaataagtgctaagtcgggtctgggacaatgtcatttattcagcacagtgttcttggtacatagcaagacctgaaacatactaaataatca

SEQ ID NO: 98161 - DNA, 120 bp, synthetic construct
  source 1..120: mol_type = other DNA
tagctaaagggccaagtgatagctgggaacattatgtgcccattcctgatggtgcccatttttcaaaaggaagggattttgagaaaggtcctcagaattcagtaatactggtatatagtg

SEQ ID NO: 98162 - DNA, 120 bp, synthetic construct
  source 1..120: mol_type = other DNA
gactggcttatagtttaaataaatatcttagctagtcatggttatattctcttagactaaatttcagtcaaattcttagcaatattaatatgcgtatttgaactaatttctgtgtgaatt

SEQ ID NO: 98163 - DNA, 120 bp, synthetic construct
  source 1..120: mol_type = other DNA
agagagaaaaaatataaatatagaaaataaatcaaagtctccaattctttgaaaatgccagcatggtactactgttaagctgtcagtaattcactgtgattacaagaaatcacaacttca

SEQ ID NO: 98164 - DNA, 120 bp, synthetic construct
  source 1..120: mol_type = other DNA
atgaggtatgtgtaatgttttgatacagacatataatgtataatgatcaagtcagggtaattagagaacacatcatctcaagcctttatcatttttttgttttaggaacattccaattcc

SEQ ID NO: 98165 - DNA, 120 bp, synthetic construct
  source 1..120: mol_type = other DNA
ttgttaagcccacagctagtatcataccaaacaaggaaagtctgtaactctttcctctaagatcaagaacaataaaagcatgtgcacttttaccacttttattcaacatagttctctact

SEQ ID NO: 98166 - DNA, 120 bp, synthetic construct
  source 1..120: mol_type = other DNA
gcatattgacaatgcccgtcttgctgctgatgactttagagtcaagtatgagacacagctggcgatgcgccagtctgtggagaacgacatccatgggctccgcaaggtcattgatgacac

SEQ ID NO: 98167 - DNA, 120 bp, synthetic construct; identical to SEQ ID NO: 2050
  source 1..120: mol_type = other DNA

SEQ ID NO: 98168 - DNA, 120 bp, synthetic construct; identical to SEQ ID NO: 2051
  source 1..120: mol_type = other DNA

SEQ ID NO: 98169 - DNA, 120 bp, synthetic construct
  source 1..120: mol_type = other DNA
gttgagtcctccataattcatatttcttgagttctttctgggagtcagcaaaatctttaaaaagattctttaaaaaaagaatttgttatcttaaatatccaaactaactgagaaggattt

SEQ ID NO: 98170 - DNA, 120 bp, synthetic construct; identical to SEQ ID NO: 2052
  source 1..120: mol_type = other DNA

SEQ ID NO: 98171 - DNA, 120 bp, synthetic construct; identical to SEQ ID NO: 2053
  source 1..120: mol_type = other DNA

SEQ ID NO: 98172 - DNA, 120 bp, synthetic construct
  source 1..120: mol_type = other DNA
gtagcatgttttggtattgttctcatgataaattttagtaatatttatgaaactcaaagaggagattttttttctttaaaatgtatgttttcttaattttgtggtaaaagaagcctagtt

SEQ ID NO: 98173 - DNA, 120 bp, synthetic construct
  source 1..120: mol_type = other DNA
tgacctttttagttaccaaattagaaaggatttttatcactaagctctagacaacactgaaattgcagtctttaaaaatgaaaagcacgtacgttattacttttctgtttaaagcagtct

SEQ ID NO: 98174 - DNA, 120 bp, synthetic construct
  source 1..120: mol_type = other DNA
tgaagaaagtcaataatgcaaggcttgaatttatctagaaaataatgacaataatctctaatcccttatgtcctaattgtgagaaataatataaaattttaggtgaagacaatggtatta

SEQ ID NO: 98175 - DNA, 120 bp, synthetic construct
  source 1..120: mol_type = other DNA
cctatgaatttattattcatttctctcctctgatagtataagcattttcagtattttgtttgagcagccattaaagatataattatatttttctgtattctattccaatttgatctataa

SEQ ID NO: 98176 - DNA, 120 bp, synthetic construct
  source 1..120: mol_type = other DNA
ttgtgtatggcaagagatagcggtctagtttcattcttctgcatatggatatccagttttcagttttccaggaagtattgattgaagaaactgtcctttccctaatgtatattcttggaa

SEQ ID NO: 98177 - DNA, 120 bp, synthetic construct; identical to SEQ ID NO: 2054
  source 1..120: mol_type = other DNA

SEQ ID NO: 98178 - DNA, 120 bp, synthetic construct
  source 1..120: mol_type = other DNA
ctttgctattgtgagtagtgctgcagtgaacatatgcatgcgtgtgtctttataatagaatgatttatattcctttggatatattcccagtaatgggattgctgggtcaaatgttatttc

SEQ ID NO: 98179 - DNA, 120 bp, synthetic construct
  source 1..120: mol_type = other DNA
ttctgtaaagaatgtcattgataatttaataggaatagcattgaatgtatacattgttttaggcaggatgaccattttaatgatattgattatttctatccatgagcataaaatgttttt

SEQ ID NO: 98180 - DNA, 120 bp, synthetic construct
  source 1..120: mol_type = other DNA
ttaacatactgatcattcagcagcatattgtttaatttctatgtgagtgtatggtttccaaaattcctcttgtaattaatttctagttttagtccattgtggtgagagaaggtgcttgat

SEQ ID NO: 98181 - DNA, 120 bp, synthetic construct
  source 1..120: mol_type = other DNA
taaggttaccatgaaacttgcaaatactatcttataacccattattttaagctaataataatttaacactgtataaacaaacaaacataaaaatgtagagaaaactcataaacactctac

SEQ ID NO: 98182 - DNA, 120 bp, synthetic construct
  source 1..120: mol_type = other DNA
cctactcatatctctttctctacctcctctttaaggccagttactcttagatttgctcttttgaggctgttatctagattctgtagttgtatgtcattacttttattcttttttctttac

SEQ ID NO: 98183 - DNA, 120 bp, synthetic construct
  source 1..120: mol_type = other DNA
aaaaaaaaaaaaaaatggagtctctctctcgctctctgttctgagctgcctggagttattggtggaatgacacaagcacctctgtgaccaccactactaggattgtgctgggtcagaccc

SEQ ID NO: 98184 - DNA, 120 bp, synthetic construct
  source 1..120: mol_type = other DNA
gtatgagtgtacctagaaatctgatatggtttggctctgtgttcccctcaaaatctcatctcaaattataatccccatgtttccagggaggaacatgtaatctccatgtgtcaagggaag

SEQ ID NO: 98185 - DNA, 120 bp, synthetic construct; identical to SEQ ID NO: 2055
  source 1..120: mol_type = other DNA

SEQ ID NO: 98186 - DNA, 120 bp, synthetic construct
  source 1..120: mol_type = other DNA
ctaggttggggaagtgaccatggatgatatcctgaaatatgttttcaaagttgcttccattctcctcgtctttttcagggacaacaatgcttcatagatttgttctctttccataattcc

SEQ ID NO: 98187 - DNA, 120 bp, synthetic construct
  source 1..120: mol_type = other DNA
tactggtggtggttttagcgcaagggctggacgctgtcaggtgcaggtctttgtgcaccctctatgtgcattcatgcaggcagaggtccccactcagggaatgtgagggtctgctgttct

SEQ ID NO: 98188 - DNA, 120 bp, synthetic construct
  source 1..120: mol_type = other DNA
tgaagatctgttaggagtgcagcagctgtcaggatccctcagtggcagccgttccacctggctgcttctagttggccatcttgctcagctccaatcatttaacctcttaaagtctgttta

SEQ ID NO: 98189 - DNA, 120 bp, synthetic construct
  source 1..120: mol_type = other DNA
gtgtatgaggtatttcaaggaaagatgtgaaacatgtaaattaattgtcttttttatccctcaaagataaccaaggtatttattaaattccctgaagccgtatgacaagacatacagcta

SEQ ID NO: 98190 - DNA, 120 bp, synthetic construct
  source 1..120: mol_type = other DNA
tacatttgatccagcaatcccactactgggtatctacccagaggaaaaaaagtcattatatgaaaaggatactcgcacaggcatgtttatagcagcacaattcacaattgtgaaaatgtg

SEQ ID NO: 98191 - DNA, 120 bp, synthetic construct
  source 1..120: mol_type = other DNA
aggagaggggtgagaaataaaagactacacattgagtacagcatacactgcttgggtgataggtgcaccaaaatctcagaaatcaccactaaagaacttattcatgtaaaaaaaattttt

SEQ ID NO: 98192 - DNA, 120 bp, synthetic construct
  source 1..120: mol_type = other DNA
atcaccctgccaaagattcagccaagagaatttgggtagctttattaaagctgggttggacggtgagtctgagcattaattttttatgtagtagaacacagggtcaaagcttgccttctg

SEQ ID NO: 98193 - DNA, 120 bp, synthetic construct
  source 1..120: mol_type = other DNA
cttttccaagtgtcatataatactttgttaaattttaaattgaagtattacattgtgaagccacagaactccatgattatagataaagtgcttttcttagcaaagcttaactgacatgac

SEQ ID NO: 98194 - DNA, 120 bp, synthetic construct
  source 1..120: mol_type = other DNA
ttttcacctctggagaaataagaggggtatttagaataggtctcttaactaagaggcctaacatttttgtctgtgaatccataatattggcaaactaataatgtgtacacaccactgaca

SEQ ID NO: 98195 - DNA, 120 bp, synthetic construct
  source 1..120: mol_type = other DNA
ttgagctaattagctactggaaaactcaaattagtaattatatatatttttattatatacctgtatgtgttattatatatttatacctctatctattagactcaggcaagcttgaggaag

SEQ ID NO: 98196 - DNA, 120 bp, synthetic construct
  source 1..120: mol_type = other DNA
tccgttatctcttctctcatgatatttctgtatttttcttcttgggcagagccaagttttgtgagtttatttggtcattttctgcatgtatcccgactcctgctttttttttccccttca

SEQ ID NO: 98197 - DNA, 120 bp, synthetic construct
  source 1..120: mol_type = other DNA
aggtttttccctttacgtcacatattctgcgctatttttcttccttgcatttattgtgatgaagctgtcaagtttatgtcagaaataggcgtttacaatgaacaaaacctacactgtgaa

SEQ ID NO: 98198 - DNA, 120 bp, synthetic construct
  source 1..120: mol_type = other DNA
tatttttattgtctatatttaaggtgttcaacgtgatgtttttgtacacctctgcgtagtaaaaagatcactacagtcagacaaaaacattaacctacccatcacataccatagctacca

SEQ ID NO: 98199 - DNA, 120 bp, synthetic construct
  source 1..120: mol_type = other DNA
tctatgcacattttttatgtcacataatcattttattttgttctctctcacaatttttcatagtaaaacatgtttgctttggagaaagctgtattttttgtgcattaatgagctgaagta

SEQ ID NO: 98200 - DNA, 120 bp, synthetic construct; identical to SEQ ID NO: 2056
  source 1..120: mol_type = other DNA

SEQ ID NO: 98201 - DNA, 120 bp, synthetic construct; identical to SEQ ID NO: 2057
  source 1..120: mol_type = other DNA

SEQ ID NO: 98202 - DNA, 120 bp, synthetic construct; identical to SEQ ID NO: 2058
  source 1..120: mol_type = other DNA

SEQ ID NO: 98203 - DNA, 120 bp, synthetic construct; identical to SEQ ID NO: 2059
  source 1..120: mol_type = other DNA

SEQ ID NO: 98204 - DNA, 120 bp, synthetic construct
  source 1..120: mol_type = other DNA
gtagttcttaagacaaggctgaagaacaaggcctaatcaagaaaggtcttaaaggagcctgaccaaagtttggtcaatgagagactctttgtttctatcataacattcatcacactgtac

SEQ ID NO: 98205 - DNA, 120 bp, synthetic construct
  source 1..120: mol_type = other DNA
cttgcaaagtttctataacaacgatgctatcctattgggaccacatggtatcacatatgttatgccagattactcactcttaacagacacctgtggttcattaacaaaatgtgctggagt

SEQ ID NO: 98206 - DNA, 120 bp, synthetic construct
  source 1..120: mol_type = other DNA
tttcacttgtagtaatttttgcctagataaaggtggtggattaaaaaaataggaagactaaaatagatggaagtgcctctcctcatctggagtttgaaaaaaaaaaacaaaaaaacagtg

SEQ ID NO: 98207 - DNA, 120 bp, synthetic construct
  source 1..120: mol_type = other DNA
atggaggagtaaatatatttccagttggttttcttttaggaaacacagcaaaaccctttgtttaacatcagggatgatctaaaaggaaatcctgtaagtgtgagaggcaatgtcagacac

SEQ ID NO: 98208 - DNA, 120 bp, synthetic construct
  source 1..120: mol_type = other DNA
aggagggactcctccctaactaattctctgaggctagcattatcctgataccaaaacctggcagagatacaacaaaagaaagaatactttagaccaatatccttgatgaacatcaatgca

SEQ ID NO: 98209 - DNA, 120 bp, synthetic construct
  source 1..120: mol_type = other DNA
caaatggaaaaacattccaggctcatggataggaagaatcactattgtaaaaatggccatactgttcaaagtaatttatagattcaatgctattcccattaaactaccattgacattctt

SEQ ID NO: 98210 - DNA, 120 bp, synthetic construct; identical to SEQ ID NO: 2060
  source 1..120: mol_type = other DNA

SEQ ID NO: 98211 - DNA, 120 bp, synthetic construct
  source 1..120: mol_type = other DNA
ctctcactctcctcccttaagtaggtcctggtgtctattgttcccttctttgtgtccatgcatccttaatatttagctcttacttgtaagtgagaacatgtggtatttggtttcctgttc

SEQ ID NO: 98212 - DNA, 120 bp, synthetic construct
  source 1..120: mol_type = other DNA
aaggggtcctgtttcaatcttctggatatggctatccaattatctcaacaccttctattgaatagggagtctttcctcattgcttgtttttgtcaactttgttgaagatcagatggctgt

SEQ ID NO: 98213 - DNA, 120 bp, synthetic construct
  source 1..120: mol_type = other DNA
tagagtgagcatccttgtctggttctggttttcaagaggaacacttttagcttttgctcaattagtatgatgttggctgtgggtttgtcatagatggctcttattatttttatgtaagtt

SEQ ID NO: 98214 - DNA, 120 bp, synthetic construct
  source 1..120: mol_type = other DNA
acgttccttttaacattgctttaatagctgtgtcccagagattctggtatattgtatctttgttctcattagtttcaaagtgcttcatcttccggtttatccttgctactgtcctcggtt

SEQ ID NO: 98215 - DNA, 120 bp, synthetic construct
  source 1..120: mol_type = other DNA
ttgagacagaattttgctcttgtagcccagactggaaggcagtggcatgatctaggctcactgcaacctctgcctcctgggttcaagtgattctttgcctcagtctcccaagtggctgag

SEQ ID NO: 98216 - DNA, 120 bp, synthetic construct
  source 1..120: mol_type = other DNA
atcacataaaaagttttaatagtgacaagaaatattttcttttctgagacatgttcttataattctgcaaaatgatttctgtttcagattctcatcttctttgagataagtattatttga

SEQ ID NO: 98217 - DNA, 120 bp, synthetic construct
  source 1..120: mol_type = other DNA
aaatgtttattttattcagaacaaacctgtatcttgttgtagttgaaatttataacttactgaggacaacattgaagtgtaactaacagggatcattaccaggctataacatcttgtcta

SEQ ID NO: 98218 - DNA, 120 bp, synthetic construct
  source 1..120: mol_type = other DNA
agaaaaggatggcctgtagaaattccttttctgaccagtatctttacaggtggccaatacacattcatatgcaatctcactggagagattagtacacctgtgatatctattagtgtctgt

SEQ ID NO: 98219 - DNA, 120 bp, synthetic construct
  source 1..120: mol_type = other DNA
gatgctgtgggggacctcttcctcaagtataatatgtcctgttacttgctgttaaggcaatgtattacaaatcagaatttttggaagccttatcattaaagaagctgatttcacatacca

SEQ ID NO: 98220 - DNA, 120 bp, synthetic construct
  source 1..120: mol_type = other DNA
ggtcatgggcaagttacttaattatgcctcagttttctaatctctcaggtggagataatattagtacctacctcatggaaatgctttgaagagtaaatgagagatgatgtatccaatgtt

SEQ ID NO: 98221 - DNA, 120 bp, synthetic construct
  source 1..120: mol_type = other DNA
ctttttttccttttgtattgttattttcataaagttcttcacattgacttcttcatctttcaatacgtagttttttacagattctttgaagtataaattatataccaggaaattcaccta

SEQ ID NO: 98222 - DNA, 120 bp, synthetic construct
  source 1..120: mol_type = other DNA
gagaatagcttaaacccgggaggtggaggttgcagtgagccaagatctccccactgcactccagcctgggtgacagagcgtgactacatctcaaaaataataaataaatattaaaaatta

SEQ ID NO: 98223 - DNA, 120 bp, synthetic construct
  source 1..120: mol_type = other DNA
acctatttaccgctaacgcattaccagtcgtccaactgctgaagataagaaaaatgtatctgtgtgtgtgtgtgtggcattttagcattaagtttataatgtacccttacttttagttaa

SEQ ID NO: 98224 - DNA, 120 bp, synthetic construct
  source 1..120: mol_type = other DNA
caaagtatgcatttgcattatatttatagaggtaatcaatctgtcttataaagactcagattttacaattttcttaatttcctcctgtgttagaaaataaaacacacaatgtcaaacgac

SEQ ID NO: 98225 - DNA, 120 bp, synthetic construct
  source 1..120: mol_type = other DNA
attttctaaagtattcacttaattcagacatttatgtgaagtaggcttccccttccatcttctcttcccagcttcacttcctatcatgaaaagttacatccataaactttgggtgaaata

SEQ ID NO: 98226 - DNA, 120 bp, synthetic construct
  source 1..120: mol_type = other DNA
cccgagtagctgggactacaagtgcccgacaccacacccagctaatttttttgtatttttagtagagacggggattcaccgtgttagccaggatggtcttgatctcctgacctcgtgatc

SEQ ID NO: 98227 - DNA, 120 bp, synthetic construct
  source 1..120: mol_type = other DNA
attaagcactttctttgtcctgtgggatagggtggagggaaaaactgattggcttctaattacataagagaggagataggataattagacaccacttgtaaaaataattccaagtacagg

SEQ ID NO: 98228 - DNA, 120 bp, synthetic construct
  source 1..120: mol_type = other DNA
tatcatgagattggagcaattcagtcacatcttcaggctgcacttttaattctagttctcttgctatttctaccacatctgcagtgatttccttcactgaagtcttgaacctctcaaaat

SEQ ID NO: 98229 - DNA, 120 bp, synthetic construct
  source 1..120: mol_type = other DNA
gttatgaagatagctattttccttcaacctcatgaaccaacccctgctagcttcagcgttttcttctgcagcttccttacctctcagccttcatagaattaatcttttctctggattagg

SEQ ID NO: 98230 - DNA, 120 bp, synthetic construct
  source 1..120: mol_type = other DNA
aaatagtccttctgaagaagaggaattacaaactcactgtggagtttaagaaaaagtgggtaaaatattgtggtgagagagttaattaactttcctacgatcaaaaattataaagtgcca

SEQ ID NO: 98231 - DNA, 120 bp, synthetic construct
  source 1..120: mol_type = other DNA
ttttcttttaaagacttccagagatagaggttttgcagcagtgaatcagtatgcctttctggtagttcgcattgtcatgaaattctttcttttattttcacttttcttactccccaatcc

SEQ ID NO: 98232 - DNA, 120 bp, synthetic construct
  source 1..120: mol_type = other DNA
cttgagatgtgataactaactaaagttaacttaatagcagcatagaaaattcagagagtatcatctgtacaagtgtatgtgtatagtaatacctaaaatttagtacagggcatgtgcttg

SEQ ID NO: 98233 - DNA, 120 bp, synthetic construct
  source 1..120: mol_type = other DNA
ccactgcattccagcctgggctacaagagcaaaactctttctcaaaaaaaaaaaaaaaaaaaaagtagaattactatcttatcagttcttggccaaccatgtacacaactgaatactgaa

SEQ ID NO: 98234 - DNA, 120 bp, synthetic construct
  source 1..120: mol_type = other DNA
agtgcagatgtggagagaagggaaccctagtaccgtgttggtggaaatgtaaattagtacaaccactatagagaacagtttggagttccctcaaaaaaacaaaaattgagctaccatatg

SEQ ID NO: 98235 - DNA, 120 bp, synthetic construct
  source 1..120: mol_type = other DNA
agagcaacgcataaaatatattctcctatttaaaaatcctgcccatgagaagggatctaacataattgagtatttcttgggaagaacatttactcatgttttcaagatccaactgaattg

SEQ ID NO: 98236 - DNA, 120 bp, synthetic construct; identical to SEQ ID NO: 34830
  source 1..120: mol_type = other DNA

SEQ ID NO: 98237 - DNA, 120 bp, synthetic construct; identical to SEQ ID NO: 34831
  source 1..120: mol_type = other DNA

SEQ ID NO: 98238 - DNA, 120 bp, synthetic construct; identical to SEQ ID NO: 34832
  source 1..120: mol_type = other DNA

SEQ ID NO: 98239 - DNA, 120 bp, synthetic construct; identical to SEQ ID NO: 34833
  source 1..120: mol_type = other DNA

SEQ ID NO: 98240 - DNA, 120 bp, synthetic construct; identical to SEQ ID NO: 34834
  source 1..120: mol_type = other DNA

SEQ ID NO: 98241 - DNA, 120 bp, synthetic construct; identical to SEQ ID NO: 34835
  source 1..120: mol_type = other DNA

SEQ ID NO: 98242 - DNA, 120 bp, synthetic construct
  source 1..120: mol_type = other DNA
atgaagcgagaagagaagtttagagaaaaaaagggtaaaaataaacgagcaaagcctccaagacatatgggactatgtgaaaagaccaaatctacgtttgattggtatacctgaaagtga

SEQ ID NO: 98243 - DNA, 120 bp, synthetic construct
  source 1..120: mol_type = other DNA
acatcatggaatactacacagccataaaaaagaatgaggtcatgtcctttggaggaacacagatgaagccggaggccattatccttagcaaactaacatgggaacagaaaaccaaatacc

SEQ ID NO: 98244 - DNA, 120 bp, synthetic construct; identical to SEQ ID NO: 34836
  source 1..120: mol_type = other DNA

SEQ ID NO: 98245 - DNA, 120 bp, synthetic construct
  source 1..120: mol_type = other DNA
taaaatgtccatactacctaaattaatctattgattcaatgcaatctctatcaaaataccaatgatatttttcacagaaagagaaaaacaatcctaaaatttatatggaaccctgtaata

SEQ ID NO: 98246 - DNA, 120 bp, synthetic construct; identical to SEQ ID NO: 34837
  source 1..120: mol_type = other DNA

SEQ ID NO: 98247 - DNA, 120 bp, synthetic construct; identical to SEQ ID NO: 34838
  source 1..120: mol_type = other DNA

SEQ ID NO: 98248 - DNA, 120 bp, synthetic construct; identical to SEQ ID NO: 34839
  source 1..120: mol_type = other DNA

SEQ ID NO: 98249 - DNA, 120 bp, synthetic construct; identical to SEQ ID NO: 34840
  source 1..120: mol_type = other DNA

SEQ ID NO: 98250 - DNA, 120 bp, synthetic construct; identical to SEQ ID NO: 34841
  source 1..120: mol_type = other DNA

SEQ ID NO: 98251 - DNA, 120 bp, synthetic construct; identical to SEQ ID NO: 34842
  source 1..120: mol_type = other DNA

SEQ ID NO: 98252 - DNA, 120 bp, synthetic construct; identical to SEQ ID NO: 34843
  source 1..120: mol_type = other DNA

SEQ ID NO: 98253 - DNA, 120 bp, synthetic construct; identical to SEQ ID NO: 34844
  source 1..120: mol_type = other DNA

SEQ ID NO: 98254 - DNA, 120 bp, synthetic construct; identical to SEQ ID NO: 34845
  source 1..120: mol_type = other DNA

SEQ ID NO: 98255 - DNA, 120 bp, synthetic construct; identical to SEQ ID NO: 34846
  source 1..120: mol_type = other DNA

SEQ ID NO: 98256 - DNA, 120 bp, synthetic construct; identical to SEQ ID NO: 34847
  source 1..120: mol_type = other DNA

SEQ ID NO: 98257 - DNA, 120 bp, synthetic construct; identical to SEQ ID NO: 34848
  source 1..120: mol_type = other DNA

SEQ ID NO: 98258 - DNA, 120 bp, synthetic construct
  source 1..120: mol_type = other DNA
cccatctcctcaagtatttatcctttatgttacaaaccatccaattatattcatttagttatttttaaatgtataattaaattattatcgactatagtcatcctgttgtgctatcaaata

SEQ ID NO: 98259 - DNA, 120 bp, synthetic construct
  source 1..120: mol_type = other DNA
ccttctgtgggttgtctcttcactttgttgatagcttcctctgctgtgcagaagctttttaacttaatgtgatctcgtttgtttatttttgctttggttgtctgtgcttgtactcatgaa

SEQ ID NO: 98260 - DNA, 120 bp, synthetic construct; identical to SEQ ID NO: 34849
  source 1..120: mol_type = other DNA

SEQ ID NO: 98261 - DNA, 120 bp, synthetic construct
  source 1..120: mol_type = other DNA
attttattgggttgtgcatgtcttggaatttgtctatttcttctagattttccaatttataggcatatagttgctcatagtagccactaatgaccctttgaatttcttgcagcatcagtt

SEQ ID NO: 98262 - DNA, 120 bp, synthetic construct; identical to SEQ ID NO: 34850
  source 1..120: mol_type = other DNA

SEQ ID NO: 98263 - DNA, 120 bp, synthetic construct; identical to SEQ ID NO: 34851
  source 1..120: mol_type = other DNA

SEQ ID NO: 98264 - DNA, 120 bp, synthetic construct
  source 1..120: mol_type = other DNA
taatacctttccaacagtcccccagagttttagctcattccagcattaacccaaaagtccaagtccaaagtctcatccaagacaaggcaagtcacttctgcctgtgagcctgtaaaatca

SEQ ID NO: 98265 - DNA, 120 bp, synthetic construct
  source 1..120: mol_type = other DNA
ttgcatcatgaagctgaaaattttccaaacgtttatgctctgcttcctcttaatgctttgccacttagaaatttcttctgccagataccctaaatcatctctctcaagttcaaagttcca

SEQ ID NO: 98266 - DNA, 120 bp, synthetic construct; identical to SEQ ID NO: 34852
  source 1..120: mol_type = other DNA

SEQ ID NO: 98267 - DNA, 120 bp, synthetic construct; identical to SEQ ID NO: 34853
  source 1..120: mol_type = other DNA

SEQ ID NO: 98268 - DNA, 120 bp, synthetic construct; identical to SEQ ID NO: 34854
  source 1..120: mol_type = other DNA

SEQ ID NO: 98269 - DNA, 120 bp, synthetic construct; identical to SEQ ID NO: 34855
  source 1..120: mol_type = other DNA

SEQ ID NO: 98270 - DNA, 120 bp, synthetic construct; identical to SEQ ID NO: 34856
  source 1..120: mol_type = other DNA

SEQ ID NO: 98271 - DNA, 120 bp, synthetic construct; identical to SEQ ID NO: 34857
  source 1..120: mol_type = other DNA

SEQ ID NO: 98272 - DNA, 120 bp, synthetic construct
  source 1..120: mol_type = other DNA
acaaaaacagacacatagaccaagggaacagaatagagaactcagaaataaattcacacacctacagtgtactagttttcaacaaaagtgccaagaatatacactgaggaaaagccactc

SEQ ID NO: 98273 - DNA, 120 bp, synthetic construct; identical to SEQ ID NO: 34858
  source 1..120: mol_type = other DNA

SEQ ID NO: 98274 - DNA, 120 bp, synthetic construct; identical to SEQ ID NO: 34859
  source 1..120: mol_type = other DNA

SEQ ID NO: 98275 - DNA, 120 bp, synthetic construct
  source 1..120: mol_type = other DNA
cctttgttagctgtattcctaggtatttttctctttgtagcaattgtgaataggaaatcattcatgatttggctctttgcttgcctgttgttggtgtattggaatgctagcgacttttgt

SEQ ID NO: 98276 - DNA, 120 bp, synthetic construct
  source 1..120: mol_type = other DNA
cttgcagtgagccgagatggcgccactgcattccagcctgggtgacagagtgagactctgtctccaaaaaaaaaaaaaattcatagtagtcatagtttttatatcactttagagtcaata

SEQ ID NO: 98277 - DNA, 120 bp, synthetic construct; identical to SEQ ID NO: 34860
  source 1..120: mol_type = other DNA

SEQ ID NO: 98278 - DNA, 120 bp, synthetic construct; identical to SEQ ID NO: 34861
  source 1..120: mol_type = other DNA

SEQ ID NO: 98279 - DNA, 120 bp, synthetic construct; identical to SEQ ID NO: 34862
  source 1..120: mol_type = other DNA

SEQ ID NO: 98280 - DNA, 120 bp, synthetic construct; identical to SEQ ID NO: 34863
  source 1..120: mol_type = other DNA

SEQ ID NO: 98281 - DNA, 120 bp, synthetic construct; identical to SEQ ID NO: 34864
  source 1..120: mol_type = other DNA

SEQ ID NO: 98282 - DNA, 120 bp, synthetic construct; identical to SEQ ID NO: 34865
  source 1..120: mol_type = other DNA

SEQ ID NO: 98283 - DNA, 120 bp, synthetic construct; identical to SEQ ID NO: 34866
  source 1..120: mol_type = other DNA

SEQ ID NO: 98284 - DNA, 120 bp, synthetic construct
  source 1..120: mol_type = other DNA
tatacacacacacacacacacacacacacaggtgctatatatacatatatataggtgctccagggttgggttcatgtatatttaaaatcattacatcctcttgctgaattgaccacttcg

SEQ ID NO: 98285 - DNA, 120 bp, synthetic construct; identical to SEQ ID NO: 34867
  source 1..120: mol_type = other DNA

SEQ ID NO: 98286 - DNA, 120 bp, synthetic construct; identical to SEQ ID NO: 34868
  source 1..120: mol_type = other DNA

SEQ ID NO: 98287 - DNA, 120 bp, synthetic construct
  source 1..120: mol_type = other DNA
ttccgggttggcaattctttctttaagaatgttgaatattggctcccaatcttttctggcttgtagagttatcactgagaggtcctctgctagtctgatggtcttccctttataggtgac

SEQ ID NO: 98288 - DNA, 120 bp, synthetic construct; identical to SEQ ID NO: 34869
  source 1..120: mol_type = other DNA

SEQ ID NO: 98289 - DNA, 120 bp, synthetic construct; identical to SEQ ID NO: 34870
  source 1..120: mol_type = other DNA

SEQ ID NO: 98290 - DNA, 120 bp, synthetic construct
  source 1..120: mol_type = other DNA
tgctatgttttagcaaagagactggtggcattttgcccctgccctagagatttgtgtaactttgaaattgagggagataatttagggtatctggcagaagaaatttctaagcagcaaagc

SEQ ID NO: 98291 - DNA, 120 bp, synthetic construct; identical to SEQ ID NO: 34871
  source 1..120: mol_type = other DNA

SEQ ID NO: 98292 - DNA, 120 bp, synthetic construct; identical to SEQ ID NO: 34872
  source 1..120: mol_type = other DNA

SEQ ID NO: 98293 - DNA, 120 bp, synthetic construct
  source 1..120: mol_type = other DNA
ctacagtgcccaccaccaagcctagctaattttttgtatttttggtagagacggggtttcactgtgttagccaggatggtctcgatctcctgacctcatgatccacccgcctcggcctcc

SEQ ID NO: 98294 - DNA, 120 bp, synthetic construct; identical to SEQ ID NO: 34873
  source 1..120: mol_type = other DNA

SEQ ID NO: 98295 - DNA, 120 bp, synthetic construct; identical to SEQ ID NO: 34874
  source 1..120: mol_type = other DNA

SEQ ID NO: 98296 - DNA, 120 bp, synthetic construct; identical to SEQ ID NO: 34875
  source 1..120: mol_type = other DNA

SEQ ID NO: 98297 - DNA, 120 bp, synthetic construct; identical to SEQ ID NO: 34876
  source 1..120: mol_type = other DNA

SEQ ID NO: 98298 - DNA, 120 bp, synthetic construct; identical to SEQ ID NO: 34877
  source 1..120: mol_type = other DNA

SEQ ID NO: 98299 - DNA, 120 bp, synthetic construct; identical to SEQ ID NO: 34878
  source 1..120: mol_type = other DNA

SEQ ID NO: 98300 - DNA, 120 bp, synthetic construct; identical to SEQ ID NO: 34879
  source 1..120: mol_type = other DNA

SEQ ID NO: 98301 - DNA, 120 bp, synthetic construct; identical to SEQ ID NO: 34880
  source 1..120: mol_type = other DNA

SEQ ID NO: 98302 - DNA, 120 bp, synthetic construct; identical to SEQ ID NO: 34881
  source 1..120: mol_type = other DNA

SEQ ID NO: 98303 - DNA, 120 bp, synthetic construct; identical to SEQ ID NO: 34882
  source 1..120: mol_type = other DNA

SEQ ID NO: 98304 - DNA, 120 bp, synthetic construct; identical to SEQ ID NO: 34883
  source 1..120: mol_type = other DNA

SEQ ID NO: 98305 - DNA, 120 bp, synthetic construct
  source 1..120: mol_type = other DNA
acaaatggaatcatatccagttaagaagcttctgcacagcaaataaaacaatcaacaaagtgaagagacaacccacagaatggaagaaaatatttgcaaattaccccccagacaaggttt

SEQ ID NO: 98306 - DNA, 120 bp, synthetic construct
  source 1..120: mol_type = other DNA
caattgaactcatggagatagagtgtaggatatgattaccagaggctgggaagcatagtagagaaagtgagtgggtggcagggatggttaatcattccaaaaagtagttagaataaatgg

SEQ ID NO: 98307 - DNA, 120 bp, synthetic construct
  source 1..120: mol_type = other DNA
ctgccctagatatctgtggaactttgaacatgagagagatgatttagggtatctggcagaataaatttctaagcagtaaagcattcaagaggtaacttgggtgctcttaaatgcattcag

SEQ ID NO: 98308 - DNA, 120 bp, synthetic construct
  source 1..120: mol_type = other DNA
aatgggcatatttacccaatgcctgtacctccattgtatctaggaagtaactaacttgcttttgattttacaggctcataggtggaagggagttgccttgtctcagatgagactttggac

SEQ ID NO: 98309 - DNA, 120 bp, synthetic construct; identical to SEQ ID NO: 34884
  source 1..120: mol_type = other DNA

SEQ ID NO: 98310 - DNA, 120 bp, synthetic construct; identical to SEQ ID NO: 34885
  source 1..120: mol_type = other DNA

SEQ ID NO: 98311 - DNA, 120 bp, synthetic construct; identical to SEQ ID NO: 34886
  source 1..120: mol_type = other DNA

SEQ ID NO: 98312 - DNA, 120 bp, synthetic construct; identical to SEQ ID NO: 34887
  source 1..120: mol_type = other DNA

SEQ ID NO: 98313 - DNA, 120 bp, synthetic construct; identical to SEQ ID NO: 34888
  source 1..120: mol_type = other DNA

SEQ ID NO: 98314 - DNA, 120 bp, synthetic construct; identical to SEQ ID NO: 34889
  source 1..120: mol_type = other DNA

SEQ ID NO: 98315 - DNA, 120 bp, synthetic construct; identical to SEQ ID NO: 34890
  source 1..120: mol_type = other DNA

SEQ ID NO: 98316 - DNA, 120 bp, synthetic construct; identical to SEQ ID NO: 34891
  source 1..120: mol_type = other DNA

SEQ ID NO: 98317 - DNA, 120 bp, synthetic construct; identical to SEQ ID NO: 34892
  source 1..120: mol_type = other DNA

SEQ ID NO: 98318 - DNA, 120 bp, synthetic construct; identical to SEQ ID NO: 34893
  source 1..120: mol_type = other DNA

SEQ ID NO: 98319 - DNA, 120 bp, synthetic construct
  source 1..120: mol_type = other DNA
ccttatagtacagtctgaagtcagataatgtgatgcctccagctttgttctttttgcttaggattattttggctatttggcttattttgtggttccatataaattttagaacagtttttt

SEQ ID NO: 98320 - DNA, 120 bp, synthetic construct
  source 1..120: mol_type = other DNA
tgtttatgcggtgaatcacatttattgatttgcatatgctgtaccaatcttgcatcccaagaatgaaacctacttgatcacagtcttcacggtcaattaattttttgaagtgctgttgga

SEQ ID NO: 98321 - DNA, 120 bp, synthetic construct; identical to SEQ ID NO: 34894
  source 1..120: mol_type = other DNA

SEQ ID NO: 98322 - DNA, 120 bp, synthetic construct; identical to SEQ ID NO: 34895
  source 1..120: mol_type = other DNA

SEQ ID NO: 98323 - DNA, 120 bp, synthetic construct; identical to SEQ ID NO: 34896
  source 1..120: mol_type = other DNA

SEQ ID NO: 98324 - DNA, 120 bp, synthetic construct; identical to SEQ ID NO: 34897
  source 1..120: mol_type = other DNA

SEQ ID NO: 98325 - DNA, 120 bp, synthetic construct; identical to SEQ ID NO: 34898
  source 1..120: mol_type = other DNA

SEQ ID NO: 98326 - DNA, 120 bp, synthetic construct; identical to SEQ ID NO: 34899
  source 1..120: mol_type = other DNA

SEQ ID NO: 98327 - DNA, 120 bp, synthetic construct; identical to SEQ ID NO: 34900
  source 1..120: mol_type = other DNA

SEQ ID NO: 98328 - DNA, 120 bp, synthetic construct; identical to SEQ ID NO: 34901
  source 1..120: mol_type = other DNA

SEQ ID NO: 98329 - DNA, 120 bp, synthetic construct; identical to SEQ ID NO: 34902
  source 1..120: mol_type = other DNA

SEQ ID NO: 98330 - DNA, 120 bp, synthetic construct; identical to SEQ ID NO: 34903
  source 1..120: mol_type = other DNA

SEQ ID NO: 98331 - DNA, 120 bp, synthetic construct; identical to SEQ ID NO: 34904
  source 1..120: mol_type = other DNA

SEQ ID NO: 98332 - DNA, 120 bp, synthetic construct; identical to SEQ ID NO: 34905
  source 1..120: mol_type = other DNA

SEQ ID NO: 98333 - DNA, 120 bp, synthetic construct; identical to SEQ ID NO: 34906
  source 1..120: mol_type = other DNA

SEQ ID NO: 98334 - DNA, 120 bp, synthetic construct; identical to SEQ ID NO: 34907
  source 1..120: mol_type = other DNA

SEQ ID NO: 98335 - DNA, 120 bp, synthetic construct
  source 1..120: mol_type = other DNA
atgactgtatctccatggacatattcttcataaatatttagaacagcttatactgtcttctattatactggcttgaagataattgataccattgatgcaggatcaagtgttgtctgtctt

SEQ ID NO: 98336 - DNA, 120 bp, synthetic construct
  source 1..120: mol_type = other DNA
aggagtacatgtgcaggtttgttatataggtaaactcctgtcttgggggtttattgtacagattaattcatcacccaggtactaagacaggtaagtacccaatagttatttttttctgct

SEQ ID NO: 98337 - DNA, 120 bp, synthetic construct
  source 1..120: mol_type = other DNA
gatcttgtaggtgtcacaaacctcagtgtaataggcatcattgataagagattcctcttttaactgtttattttggcattgctacattcgttttgaagattttcttggtagccttgcata

SEQ ID NO: 98338 - DNA, 120 bp, synthetic construct
  source 1..120: mol_type = other DNA
tgtagggagctgtggaaaattatccatattttgtcataaacatgtttactgactgtacatcagaaaatcactaaataatgcatgaaattataaaaattacattaaaatattaaaattacc

SEQ ID NO: 98339 - DNA, 120 bp, synthetic construct
  source 1..120: mol_type = other DNA
cgggttcaagcaattctcctgccttagcctcctgagtagctgggcttacaggcgcccaccaccgcactcagctaatttcttgtatttttagtagagacggggtttcaccatgttggccag

SEQ ID NO: 98340 - DNA, 120 bp, synthetic construct
  source 1..120: mol_type = other DNA
atcgtaaatgtagaagttactttcttatctgtgtgactgaaggggaacacagtgctaaatgataaaacagagtagcctgaggtggttttcttctaatttcaggtcagatttacatttcac

SEQ ID NO: 98341 - DNA, 120 bp, synthetic construct; identical to SEQ ID NO: 1960
  source 1..120: mol_type = other DNA

SEQ ID NO: 98342 - DNA, 120 bp, synthetic construct
  source 1..120: mol_type = other DNA
attgtgtcctttgctgtgcagaagctttgtaacttgatgtgatcccatttgcccatttttgctttggttgcctgtgcttgtgaggtattgctcaagaaatctttgcccagaccaacatcc

SEQ ID NO: 98343 - DNA, 120 bp, synthetic construct
  source 1..120: mol_type = other DNA
ctcttatctgatggctctagctaggactaccagtactatgttgaataatagtggtgacagggggcatccttgtcatgttccagatcttagagggaagaatttccatttttccacatttag

SEQ ID NO: 98344 - DNA, 120 bp, synthetic construct
  source 1..120: mol_type = other DNA
attgtgaatagtgctgcaatgaacatacatgtgcatgtatctgtatcgtgcaataatgtatattcccttgggtatatacccagtaatgggattgctgggtcaaatggtatttctggtcct

SEQ ID NO: 98345 - DNA, 120 bp, synthetic construct
  source 1..120: mol_type = other DNA
tcttgggcagctccacccctgtggctttgcagggtacagcccctctcctggctgatttcataggctggcattgagtgtctgtggcttttccaggcacatggtgtaagttgtcaatggatc

SEQ ID NO: 98346 - DNA, 120 bp, synthetic construct
  source 1..120: mol_type = other DNA
gaaatttcttctgccggataccctaaatcatctctctcaaattcaaagttccacaaatctctagggcagggacaaaatgccaccagtctcttcactaaaacatagcaagagtcacctttg

SEQ ID NO: 98347 - DNA, 120 bp, synthetic construct
  source 1..120: mol_type = other DNA
tgcagaagctctttaattagatcccatttgtcaatttttccttttgttgcagttgcatttgacattttcatcatgatgcctttgcccttgcctatgtcctgaatggtattgcctagattt

SEQ ID NO: 98348 - DNA, 120 bp, synthetic construct
  source 1..120: mol_type = other DNA
tccttgtcttgtgccggttttcaggggagatgcttccagcttttgcccattcaatatgatattggctatgggtttgtcataaatggctcttattattttgagatatgtttcttcgatagc

SEQ ID NO: 98349 - DNA, 120 bp, synthetic construct; identical to SEQ ID NO: 1961
  source 1..120: mol_type = other DNA

SEQ ID NO: 98350 - DNA, 120 bp, synthetic construct
  source 1..120: mol_type = other DNA
ggttggttctatgtgtctaggaatttctctattttcttctaggttttccaatttattggcatatagttgctgatagtagccactaatgagcctttgcatttctgcagtgtcagttgtaaa

SEQ ID NO: 98351 - DNA, 120 bp, synthetic construct; identical to SEQ ID NO: 1962
  source 1..120: mol_type = other DNA

SEQ ID NO: 98352 - DNA, 120 bp, synthetic construct
  source 1..120: mol_type = other DNA
tcattgtttattctttctacttaggataagagtagtttacacattacagttacagtgttataatattctatgtttttctgtgtacttgctgttaccagtgacttttgtacctccaggtga

SEQ ID NO: 98353 - DNA, 120 bp, synthetic construct; identical to SEQ ID NO: 1963
  source 1..120: mol_type = other DNA

SEQ ID NO: 98354 - DNA, 120 bp, synthetic construct
  source 1..120: mol_type = other DNA
cagaaatgctacccaagggtcgtgtcctggaattgaggaccccaaaagcccacttggtgctctgctcccctgttgccatgctggtacctgaagccagctgtctagaaatgtcatctggga

SEQ ID NO: 98355 - DNA, 120 bp, synthetic construct
  source 1..120: mol_type = other DNA
tctgccatcttgctctgtctttcattatagtattttttttcttttagtattgtggcatatgaaaaaatatttctgaccaaccacccataatcatttttatctaaactgctatcagtcatt

SEQ ID NO: 98356 - DNA, 120 bp, synthetic construct
  source 1..120: mol_type = other DNA
acagccctgcctgtggaggtttgattctacttgggctacatcctacttctcaaaaaccaggtcactgagaaatctgggactttcattcatatatgtgtccaatgttttagtgaccaaaaa

SEQ ID NO: 98357 - DNA, 120 bp, synthetic construct
  source 1..120: mol_type = other DNA
ttttcttagaatgttcttaaaggacctttttacaagaaatttttaagaaaatcttctaagaaatgtaaaatactttataccagctattgaagaatagtaacggtgaattttgttttgaga

SEQ ID NO: 98358 - DNA, 120 bp, synthetic construct
  source 1..120: mol_type = other DNA
gtgcacgtgtgagcacaagcaaatgaaacaagtaaaaaagagaattctgaattattatgcatgctagtaaaaaatgattggttcctcctaggatgtttacagaattaatcagattatgtc

SEQ ID NO: 98359 - DNA, 120 bp, synthetic construct
  source 1..120: mol_type = other DNA
gtgactaacggcttgggacattttattgtaatccgttttttattgtatttcccttgacaaggctacaaatgaattctgaaataaatgttctagaagtagtgcatagactctaaaaggtac

SEQ ID NO: 98360 - DNA, 120 bp, synthetic construct
  source 1..120: mol_type = other DNA
catgcatttttcatgacctcaacctgaattggcacttttgtatactagagatcaatgccatttcagatatcagaatccaaaaatcaacatatcatgtgtaaattattcttgcatgcagtt

SEQ ID NO: 98361 - DNA, 120 bp, synthetic construct
  source 1..120: mol_type = other DNA
gctcatgtggatgtgagctcagttgaactaactacatttggggtaggactgatgttggattcatgtgttagttattctttattcctgaaggagattgaacagaaaacagtcttggaatca

SEQ ID NO: 98362 - DNA, 120 bp, synthetic construct
  source 1..120: mol_type = other DNA
ttggataattggctccgaaacttaagaactttggaacattttccttgttctttttatattatattatctttgtttctgtttatgcaacctctaataataacttacaatttccccatatag

SEQ ID NO: 98363 - DNA, 120 bp, synthetic construct; identical to SEQ ID NO: 1964
  source 1..120: mol_type = other DNA

SEQ ID NO: 98364 - DNA, 120 bp, synthetic construct; identical to SEQ ID NO: 1965
  source 1..120: mol_type = other DNA

SEQ ID NO: 98365 - DNA, 120 bp, synthetic construct; identical to SEQ ID NO: 1966
  source 1..120: mol_type = other DNA

SEQ ID NO: 98366 - DNA, 120 bp, synthetic construct
  source 1..120: mol_type = other DNA
gtgaaagatgaaaatgacaatgctccagttttcacccagtctttcgtaactgtttctattcctgagaataactctcctggcatccagttgacgaaagtaagtgcaatggatgcagacagt

SEQ ID NO: 98367 - DNA, 120 bp, synthetic construct
  source 1..120: mol_type = other DNA
tctgtttgcaatcgaccaagaaacaggcaacataacattgatggagaaatgtgatgttacagaccttggtttacacagagtgttggtcaaagctaatgacttaggacagcctgattctct

SEQ ID NO: 98368 - DNA, 120 bp, synthetic construct
  source 1..120: mol_type = other DNA
ttcagttgatgtagaactttacaaaatctattgacttcaaagagggatcaaaacaatcatattctacagatgtacccaatagatatatggattcaattaagtttggtagaagatgagaac

SEQ ID NO: 98369 - DNA, 120 bp, synthetic construct
  source 1..120: mol_type = other DNA
ttaatcttagtttcagggaataaagtcttttgaacacctattcaggcttaacaaaatagtagcaatgtgaaaatcaaaactgattttctttcaccaaaagttcgagatattaaagaaggc

SEQ ID NO: 98370 - DNA, 120 bp, synthetic construct
  source 1..120: mol_type = other DNA
ttccatgacgcattttatatcatataactaagagacattttctgaatcataagaattagtcaaaatacaaaaaagtaaatgctaatgagaatcagttattggttgttatcaggtttttat

SEQ ID NO: 98371 - DNA, 120 bp, synthetic construct
  source 1..120: mol_type = other DNA
gatagcaattggttgttatgacactagagaaaccataagtataaataattattttaaaatcacttttgatcaatgtcatataaaagagataaactgccaaaaccaagtcttgcttaatac

SEQ ID NO: 98372 - DNA, 120 bp, synthetic construct
  source 1..120: mol_type = other DNA
ctccaggagtttggaagtgagctgaactagccaaactactctctgaaaggtatccagggcaagagacatttttaagaccccaaacaaacaaaaaacaaaaccaaaacactctggttcagt

SEQ ID NO: 98373 - DNA, 120 bp, synthetic construct
  source 1..120: mol_type = other DNA
tcaaaaggagaatgtaaagttcatactccctgatattttgaaaaaaagtatattgatatttcttatattacgaaacataattccagtcatatgagggtggaaacaacgattgagatagga

SEQ ID NO: 98374 - DNA, 120 bp, synthetic construct
  source 1..120: mol_type = other DNA
gcttatggtagatatcatgtgagttacaatattatattacatactcttaaacaactgttgtagaaaagttgcttgaaattaaaatacacacttgtacaagttattcacatagaacaagtt

SEQ ID NO: 98375 - DNA, 120 bp, synthetic construct
  source 1..120: mol_type = other DNA
aatttaattgatattattattacgtttgccttgcaagttctcagatatctccaaccttttgtgttgtcattcatcgactacgggaatattctcaatgaaatgtccttgatggtctctctg

SEQ ID NO: 98376 - DNA, 120 bp, synthetic construct
  source 1..120: mol_type = other DNA
actccagcctgggcgacagagctagactccatctcaaaaaaaaaaaaaaaagaaaagaaaagaaaagaaaatatatatatactttagaataatttttagaagttgagtttatattcaatc

SEQ ID NO: 98377 - DNA, 120 bp, synthetic construct
  source 1..120: mol_type = other DNA
aagactgatttatttattaaacatattgtttatttttatagatgtatgattggacaaatttatgtaataacataccttgattagttgatagtgtaatacagaggcatgttacatatctcc

SEQ ID NO: 98378 - DNA, 120 bp, synthetic construct
  source 1..120: mol_type = other DNA
taaaaacattttcattctttttatcttaaaacttggaagaaacattagatacaataatactttcattagtcaattagagaaaagtttaagtaatacggctttgactattcagtagtagtg

SEQ ID NO: 98379 - DNA, 120 bp, synthetic construct
  source 1..120: mol_type = other DNA
ccaaagaaactgctgagttatcttccagattgttatcatgactgtgtttacatgataccaaaacatatggaggcaaaatagaattttttactacatatagggatattttgctgacctgac

SEQ ID NO: 98380 - DNA, 120 bp, synthetic construct
  source 1..120: mol_type = other DNA
ccaaatgatcacagatccagtaatgttaaagtacatataaaaaattaaattgatttttgttatctaagtactagtacagattctgcttctcttgcacacacacacaaataaagacaaatt

SEQ ID NO: 98381 - DNA, 120 bp, synthetic construct
  source 1..120: mol_type = other DNA
ttaagtgaaatacttatgaataaagttgtttctgcattgcaataacacatcttctgatattttttgaagtgcttcttgtcagcaggggctactagtttcattaacatcatcaaggatcct

SEQ ID NO: 98382 - DNA, 120 bp, synthetic construct; identical to SEQ ID NO: 1967
  source 1..120: mol_type = other DNA

SEQ ID NO: 98383 - DNA, 120 bp, synthetic construct; identical to SEQ ID NO: 1968
  source 1..120: mol_type = other DNA

SEQ ID NO: 98384 - DNA, 120 bp, synthetic construct
  source 1..120: mol_type = other DNA
cttttgctcagttacaactatagagaattttcaatcatcccagataaaataaaagcagctattaacattcttaaagtcggtgactattttcttcagtgcacataccttggtaatagaggg

SEQ ID NO: 98385 - DNA, 120 bp, synthetic construct
  source 1..120: mol_type = other DNA
gtggtatacttcagtcaaatcacctgaactctctcattccctgagcggtggtcactgtactcatcacaatgtctatatacactgtgtggagagtaaagtttatttaaccacataagctgc

SEQ ID NO: 98386 - DNA, 120 bp, synthetic construct
  source 1..120: mol_type = other DNA
aacaaatttttgttttggtcttggagaaatattttacttacttaattaagtaataaatatattttttgagacagagtctctctctgtcacccaggctggagtgcagtggtgcaatctcgg

SEQ ID NO: 98387 - DNA, 120 bp, synthetic construct
  source 1..120: mol_type = other DNA
tcttccttcacctactcccatttctaatatatgaacccaggacaaactttgaagatagtagctattcaaaaagttttaactgaactttctgcagatattgtgttgcaagccctagctctg

SEQ ID NO: 98388 - DNA, 120 bp, synthetic construct
  source 1..120: mol_type = other DNA
ttgccccagccgaatttagccaatttcttgttcattctcctgtaccaaagctatctcagatcaacagtctaggtgattctactttattaactgcttaattagagctcacttgcatggtag

SEQ ID NO: 98389 - DNA, 120 bp, synthetic construct
  source 1..120: mol_type = other DNA
tgaagaacttgaagtccgatgtttgagggcaggaagcatccagcatgggagagagatgtaggctggaagactcagccagtgtattctttccagtttcttctgcctgcttttattctagcc

SEQ ID NO: 98390 - DNA, 120 bp, synthetic construct
  source 1..120: mol_type = other DNA
agtggtgccacttccacttccaccacttgattcctggacctgtgaatcctggctatgagaggaagcagtaccatatattggacagtgattcagaggatacacagccttctggagaacttt

SEQ ID NO: 98391 - DNA, 120 bp, synthetic construct
  source 1..120: mol_type = other DNA
ttttcacattctttctccataggcatagggagatattatgtaagtattactctcttttctgaattaccaataaattactttaagggggatgtttataataaaatgataagaatatgactt

SEQ ID NO: 98392 - DNA, 120 bp, synthetic construct
  source 1..120: mol_type = other DNA
tctgtccactgcataagtgttaattttcttagagttatatcctcagcctgttctcatcattttatactctctctgttgttttatatataacctatatcctgatgagttctgatctccata

SEQ ID NO: 98393 - DNA, 120 bp, synthetic construct
  source 1..120: mol_type = other DNA
tgattaaattccacagagtcattgtgactcagctcaggttcctctatgtgcgtgtgtgtgtgtgtgtgtgtgtgtgtgtgtgtgcgtgtataaaatatttgagtagaaaaaaatgtgata

SEQ ID NO: 98394 - DNA, 120 bp, synthetic construct
  source 1..120: mol_type = other DNA
tgaataaagatataatagagaagaaaaatagaaattacctataatcctaccaactcaatgataataagtgttacttcagtgcatattctttcaatcttttttctgtgtgctcatttttta

SEQ ID NO: 98395 - DNA, 120 bp, synthetic construct
  source 1..120: mol_type = other DNA
aaatcactgcttcagagaaataatgtagaagcatcatggaggttatggctttctatgtacatataagatctttacgtttgaggatcatatttaaagactaaaaaattataatgtacttga

SEQ ID NO: 98396 - DNA, 120 bp, synthetic construct
  source 1..120: mol_type = other DNA
aagaatcatggcatttgttagattcataggtagtgacaaacaaaatgtttgtgaaattcctttttaaatatcaaacacaaaaccactttggaacaaatttttattactcttttactcttt

SEQ ID NO: 98397 - DNA, 120 bp, synthetic construct
  source 1..120: mol_type = other DNA
atgggggtttgttgtacaggttatttcatcacccaggtattaagcctagtagccattagttgttttttctggtcctctccctcttcccaccctccaccctctgaaaggccccattgtgtg

SEQ ID NO: 98398 - DNA, 120 bp, synthetic construct
  source 1..120: mol_type = other DNA
ggtggatcaactgaggtcaggagtttgagaccagactggccaacattgtgaaaccctgtctcgattaaaaatacacagattagctgggcatggtgggactgtgccagtaatcccaggtac

SEQ ID NO: 98399 - DNA, 120 bp, synthetic construct
  source 1..120: mol_type = other DNA
tgctgacttcaggctaaaaattttttatttaaatttagcctcttttagatgcctccctagattcaaaatcttatcggcattgcctaataagtagttgaaactttcagttcaacagagacc

SEQ ID NO: 98400 - DNA, 120 bp, synthetic construct
  source 1..120: mol_type = other DNA
acttcagaaactaagttacatccttttgtttgttgattggtttgtttttaggccatccaaccccctcaagataagttacattctaatgtgggcatgttcaaatcttacaggatgatctgc

SEQ ID NO: 98401 - DNA, 120 bp, synthetic construct
  source 1..120: mol_type = other DNA
ctataatccctttgttatgctatcaagtactacatcttattcattctttctgactatatttttgtgtccattaatcatccccacttaccctcctctccccaacttaccacccttccagcc

SEQ ID NO: 98402 - DNA, 120 bp, synthetic construct
  source 1..120: mol_type = other DNA
tgttgaggtatattttttctattcctagtttattgaaagtttttatcatgaagtgatgttgcattttatcaaatgtttattcagcatcaaccaaaatgattatatggtttctgatcttca

SEQ ID NO: 98403 - DNA, 120 bp, synthetic construct
  source 1..120: mol_type = other DNA
ggccaggattgcctatggaacataaccccattggcctgagaaccacctcaccccatgctccacagtggtcatggcaagccctccccaaggagagtctgcacccagacccaccaaaccctg

SEQ ID NO: 98404 - DNA, 120 bp, synthetic construct
  source 1..120: mol_type = other DNA
caccagatccccacgaatggatccaaaccaagaagaaatctctgaattgccagataaacacttcagaaggtagattattaagctactcaaggagataccacagaaaggtgaaaaccaact

SEQ ID NO: 98405 - DNA, 120 bp, synthetic construct
  source 1..120: mol_type = other DNA
ttcaagagactcactaacacataaggactcacataaacttaaggtaatggggtggaaaaaaacattccatgcaaatggaaaccaaaagcaactaggagtagctattcctatatcagacaa

SEQ ID NO: 98406 - DNA, 120 bp, synthetic construct; identical to SEQ ID NO: 1969
  source 1..120: mol_type = other DNA

SEQ ID NO: 98407 - DNA, 120 bp, synthetic construct; identical to SEQ ID NO: 1970
  source 1..120: mol_type = other DNA

SEQ ID NO: 98408 - DNA, 120 bp, synthetic construct; identical to SEQ ID NO: 1971
  source 1..120: mol_type = other DNA

SEQ ID NO: 98409 - DNA, 120 bp, synthetic construct
  source 1..120: mol_type = other DNA
gtagacaattgtccattaaagcaattacattaatgcatcaggctgatttgaaatcagtattgaggtagagtcagaatatttgcatatttttttctttgtcataacatcctcaccaaagct

SEQ ID NO: 98410 - DNA, 120 bp, synthetic construct
  source 1..120: mol_type = other DNA
ctgtgcaatggtggataaaatagggccacactatactgttccagaagcattttctctagagccttctataagtcccttctatgctaaataattcaaacatgcattttgcattcagtaaac

SEQ ID NO: 98411 - DNA, 120 bp, synthetic construct
  source 1..120: mol_type = other DNA
ctctaccctacacatgtgtaacctcccccattgtcaatatcccccaccagagtgacacatttgttatagttgatgaatttacacatcaatatcacccaaagtccatagtttacattgggg

SEQ ID NO: 98412 - DNA, 120 bp, synthetic construct
  source 1..120: mol_type = other DNA
ctcggtaataatagctaacctgtatatagcacttaactttgtgccagacaccattctactggcatatatcatctcacttaggtaatattttaaattctgtttctttagattaggaaactg

SEQ ID NO: 98413 - DNA, 120 bp, synthetic construct
  source 1..120: mol_type = other DNA
gtgatggttaatattgagtgccaacttgattgaaggatgcaaagtattgtttctgggtgtgtctgtgagggtgttggcaaaggagattaacatttgggtcagtggactggaaaaggcaga

SEQ ID NO: 98414 - DNA, 120 bp, synthetic construct
  source 1..120: mol_type = other DNA
ataattgcctgccagagatgcccatgccttaatccctgggacctgtgaatatgatgccttagataggaaaggacatggaaagtcgctaatcagatgatattgcagtaagtattttatcct

SEQ ID NO: 98415 - DNA, 120 bp, synthetic construct
  source 1..120: mol_type = other DNA
aaatggaccattgaagctcaacttgaaagcaacatatggcagtctcatcttcatcatggtttgacatgtgttaaaaaatttttgaaaagaaactaccaatattaagaatcaactaggcaa

SEQ ID NO: 98416 - DNA, 120 bp, synthetic construct
  source 1..120: mol_type = other DNA
agggttatatagaaaaacagaatcaacaggatgtatgcatatatacacacacacaaacacgcacacacacacacacacacacacacacacacacacacatatatatatagaaggagattt

SEQ ID NO: 98417 - DNA, 120 bp, synthetic construct
  source 1..120: mol_type = other DNA
agaactgttttgacaaaagggaaatatagtttatttaaagcacacactatctaaataatctagatagataatgtgctaaataatacactcacatgcacacacactggctttatgtttcct

SEQ ID NO: 98418 - DNA, 120 bp, synthetic construct
  source 1..120: mol_type = other DNA
agacagacacttagcctggaaattaagcttcatggtttattttagtgactccccttatctgtactaccaatggcatgctgtgaatatattcttgactgctgcacttagtaacacttctct

SEQ ID NO: 98419 - DNA, 120 bp, synthetic construct
  source 1..120: mol_type = other DNA
taatcctgtatatatagatgtcttaggagctttgtagaagtgtttctgtaatattttagagaccttaacaactgtaacctgaatctgataaaatggtgcctagcttagattataataaat

SEQ ID NO: 98420 - DNA, 120 bp, synthetic construct
  source 1..120: mol_type = other DNA
tctctcagaataaattcaggaacagaaagataataaagagaaataagccccaacaacagaaattttgtaaggctcaaagactcattaaaaggtgttagatctagcccaaatgtccataga

SEQ ID NO: 98421 - DNA, 120 bp, synthetic construct
  source 1..120: mol_type = other DNA
gaaagggagctgaggtgaactttgttttgggaaattcattacagatagttttgttttttcatttttcttttctttttcaataagctttagtggtgtgtgtgtgtgtgtgtgtgtgtgtgt

SEQ ID NO: 98422 - DNA, 120 bp, synthetic construct
  source 1..120: mol_type = other DNA
ttttctgctcctgtatcagtttgcggaggataacggcttccaactccatccatgtccctgcaaaggacgtgatgtcatgtttttttttaatggctgcatagtattccatgaatacactat

SEQ ID NO: 98423 - DNA, 120 bp, synthetic construct
  source 1..120: mol_type = other DNA
aagtggagattactggcactcttgctcccaccctttttacccacaaatcttaaacacatttaagtctctggaattacccacctttagttaattttgattcctttacctttgaatgaaaaa

SEQ ID NO: 98424 - DNA, 120 bp, synthetic construct
  source 1..120: mol_type = other DNA
taataacaatcataatgtgaacaattaacaaaaatcacccaaaatagggtttctaaatggagacattcttaatggccctttcgttgaatgtgttgagtgtctctaaagagaaagggtgat

SEQ ID NO: 98425 - DNA, 120 bp, synthetic construct
  source 1..120: mol_type = other DNA
tgtcttttcctgcctgagagtcctagataaattatagaaattagactggaatcccactgtagatatgttactgagtttaaactgaaataactctgtgtctaaaataaatcacccaaagct

SEQ ID NO: 98426 - DNA, 120 bp, synthetic construct
  source 1..120: mol_type = other DNA
ggttcaatctggaagggtgggaaaactcaaagcaggggcttccaggccataggtagattcaaacatatactgattggcaattggttgaaagagttattatctatagaaaggaaagtctag

SEQ ID NO: 98427 - DNA, 120 bp, synthetic construct
  source 1..120: mol_type = other DNA
gcatcgatgttattaaggaaatgatcgtaattgaatgggcttaacactttaccttttcattttttaagaatattcaatgaggatgcttattatcttctcattttattagatttactatta

SEQ ID NO: 98428 - DNA, 120 bp, synthetic construct
  source 1..120: mol_type = other DNA
aaactgtgtttctttcaataatctattctgatatgcagagtttttactgtatggataggaagagtgattagatttattaactaggtctcattagttcaaaacatcattacactgtttctc

SEQ ID NO: 98429 - DNA, 120 bp, synthetic construct
  source 1..120: mol_type = other DNA
ctaaaatttccacagctcacaatcttgagggagttgccagaacacaatgcagagaaagataatccaggtggagcctgaataacttcctgagttaaggagacagagatggttagaatttct

SEQ ID NO: 98430 - DNA, 120 bp, synthetic construct
  source 1..120: mol_type = other DNA
ccaagcacaagaaacatgaagaaaactgcacccattacagctcataataatcaaattgctcaaactcaatgataaagaaaaaaaaatgtaacgcagccagagaaacaagacacactatgt

SEQ ID NO: 98431 - DNA, 120 bp, synthetic construct
  source 1..120: mol_type = other DNA
gatatagaagtgtgtgtgtgcatgggcacacatgcgcatgtatacacacacaggcacacaaacatatatatgtattgtttttgaaaacaggatctcactctgttgcctagtctggagtgc

SEQ ID NO: 98432 - DNA, 120 bp, synthetic construct
  source 1..120: mol_type = other DNA
caagatagttcataatgttaaaggcatgcattcatcaagaggatatactcattattcatgttcgtgcaactaataaaagaaccttaaaatacatgaagtaaaaactggtagaactgcagg

SEQ ID NO: 98433 - DNA, 120 bp, synthetic construct
  source 1..120: mol_type = other DNA
tgatgaaatatacaaattactcgaaaaatgcaaacaaccaaagttcactaaaggagaaatagataagctgattagtcctatatctattaaggaaatggaattccttgtttaaaaccttcc

SEQ ID NO: 98434 - DNA, 120 bp, synthetic construct
  source 1..120: mol_type = other DNA
aacttccacaacttaagatagaacatccatgtaaaacctacagctaacgtcataataatggtgaaaaacagaatgctttccccctgaatatcaaaagcaagatatgcaattattaggaaa

SEQ ID NO: 98435 - DNA, 120 bp, synthetic construct
  source 1..120: mol_type = other DNA
actttcgggtgaatcatatagtgcatcattatgtaacatcaaataagcctttgatatttcctcatttttcttagatttttatacactggctctatctgtagaaagtaggctggaagggaa

SEQ ID NO: 98436 - DNA, 120 bp, synthetic construct
  source 1..120: mol_type = other DNA
atttttagggcctcttttatcccaaaatgcaaaggccagttttgtcatacatgatgaattagatgcgccacgttcttgtattaacctccaaagaaggcaactcttggtattctaaacatc

SEQ ID NO: 98437 - DNA, 120 bp, synthetic construct
  source 1..120: mol_type = other DNA
aaaatatatatcatacttgactgcaagtattgtaaatgaccataaaaaatataagaaagctgtgcttctgtcatatgttcttgatgcctggagtttgaatttggattcaaacctgtttcc

SEQ ID NO: 98438 - DNA, 120 bp, synthetic construct
  source 1..120: mol_type = other DNA
aaagaaatcatagagaggagaaaatgcccatacagatttttctcaagaagactacaggatgaggctctcagttaggaattcttttctctaccagtctcctggggacataaagagtaattt

SEQ ID NO: 98439 - DNA, 120 bp, synthetic construct
  source 1..120: mol_type = other DNA
aatcagatgatacatttatattagttgaatatgttataactgttaaagaaaagcattatttataacacttgttaaataaggtgaggaaggtcctaaggagggaccattgcaataggtgta

SEQ ID NO: 98440 - DNA, 120 bp, synthetic construct
  source 1..120: mol_type = other DNA
tgatggagtggaaaaatactttattagaagtcaagtgttgaggattcagactcaatgctacttttgtcacctgggtaactgtgataaatcactcggcttctagcgctgttttctctgctg

SEQ ID NO: 98441 - DNA, 120 bp, synthetic construct
  source 1..120: mol_type = other DNA
gattgatatatatatataaatgtgatatatatatatatatatacacacacacatatatatcacattttctttatccactcattgattgatgggcacttaggttgattccttatctttgca

SEQ ID NO: 98442 - DNA, 120 bp, synthetic construct
  source 1..120: mol_type = other DNA
ctctgatgcatcaactattccagtcatctaaaattcatttttagctgaacaaatttccatgaaattattgtgacttctgacaactttattttttctagttattgcagtccaacaatcaca

SEQ ID NO: 98443 - DNA, 120 bp, synthetic construct
  source 1..120: mol_type = other DNA
tattaatcagctaggaataacagttagtacaacccactacagagaacagtttggaggtttctcaaaaaactaaaaattgagctaccatatgatccagcaatcccactcctgggcatatac

SEQ ID NO: 98444 - DNA, 120 bp, synthetic construct; identical to SEQ ID NO: 1972
  source 1..120: mol_type = other DNA

SEQ ID NO: 98445 - DNA, 120 bp, synthetic construct
  source 1..120: mol_type = other DNA
actcacaccaacagtgtaaaagcattcctttttctccacaattttaccagcatctgttgttttttgaatttttaataatagccattctggatgacatgagatggtatctcactgtggctt

SEQ ID NO: 98446 - DNA, 120 bp, synthetic construct
  source 1..120: mol_type = other DNA
tggtacactgtctcttcattctcagtagtttcaaagaacttcttgatttctaccttaatttcattatttacccacaagacattcaggagcaggctgttcaatttccatgtagttgtgtgg

SEQ ID NO: 98447 - DNA, 120 bp, synthetic construct
  source 1..120: mol_type = other DNA
ttctgggttggaaatccttttcttcaagaatgttgaatattagcccccaatctcttctggcttgtaggatttccactgagaagtctgctgttagtctgatgggtttccctttgtcagtaa

SEQ ID NO: 98448 - DNA, 120 bp, synthetic construct
  source 1..120: mol_type = other DNA
cattgattcttcctcatatctgtgggcttacctaccttcaatcttttaggttgctgacctgtgaataagggttttgtggggtcttttttgttgatgttgttgttttctgtttgtttgttt

SEQ ID NO: 98449 - DNA, 120 bp, synthetic construct
  source 1..120: mol_type = other DNA
tcccaccttactggtgatcccaaggccagagcatgtaaagttcctgggtgtctgtgtgtgtctgagtggctgctctgctgagactccacacagctctgtgtgtcagacccaaggccctgg

SEQ ID NO: 98450 - DNA, 120 bp, synthetic construct
  source 1..120: mol_type = other DNA
tgtccagtctgcaaaacactgtagtcactatgcggtattttagagcttcagaacttattcatctgaatattcaactgaacatttatatcctttaaccaatgtctccccattttccacact

SEQ ID NO: 98451 - DNA, 120 bp, synthetic construct
  source 1..120: mol_type = other DNA
agtttttggtgtcagtttgtgttttttcactttgtttgtttgttgttgttgttgtttgagatggagtcttgatctgtctcctacgctggagtgcagtggcgcaatctcagctcactacaa

SEQ ID NO: 98452 - DNA, 120 bp, synthetic construct
  source 1..120: mol_type = other DNA
aaaactctgccaaaaaaaaattactagaatgaataaacgaattcagtaaagtcacagggtacaaaatcaacagggaaagatcagatgcatttctatacactaacaatgaactctcaaaag

SEQ ID NO: 98453 - DNA, 120 bp, synthetic construct; identical to SEQ ID NO: 1973
  source 1..120: mol_type = other DNA

SEQ ID NO: 98454 - DNA, 120 bp, synthetic construct
  source 1..120: mol_type = other DNA
ataaggacgtaccagagactgggtcatttgtaaaggaaaaatatttaatcaactcacagttcagcatggctggagaagcctcaggaaacttacaatcatggcagaagtagaagcgaacat

SEQ ID NO: 98455 - DNA, 120 bp, synthetic construct
  source 1..120: mol_type = other DNA
ttaacatgatggtgctatgttatattaatgaacaatatcatttcttatttgaaaccttagttattatggctgcatgaagatcaagatcacttaggaagaaaaccatgatgtaacattaca

SEQ ID NO: 98456 - DNA, 120 bp, synthetic construct
  source 1..120: mol_type = other DNA
tttattcacagccaaaataacaattagaggccatgtacattagatgtgcaattcccagctctggctttgttgacagcagacattaggtagagtggagtgtcttctagacacacttgtgag

SEQ ID NO: 98457 - DNA, 120 bp, synthetic construct
  source 1..120: mol_type = other DNA
ttattcagaatactatttcctagaatataaagagatgtgttattcaactaaagaatagtttgtgttctcactcataagtgggagttgaacaatgagaacgcatggacacaggcaggggaa

SEQ ID NO: 98458 - DNA, 120 bp, synthetic construct; identical to SEQ ID NO: 1974
  source 1..120: mol_type = other DNA

SEQ ID NO: 98459 - DNA, 120 bp, synthetic construct
  source 1..120: mol_type = other DNA
ttatattcaaacaataaaataacaatagaaatatttcagatttgtaaatagtctttttctctcccaaaataccaccacatttgtaattttttctttagtttgttatcctgtctcacagtt

SEQ ID NO: 98460 - DNA, 120 bp, synthetic construct
  source 1..120: mol_type = other DNA
acccaaaggaatgtagttggtataaaaaatagttggttaaaaagtgattacctcagaaagggtggcttaattatatgagcatttgcttgactctggagaatactttgcaagcccaaggac

SEQ ID NO: 98461 - DNA, 120 bp, synthetic construct
  source 1..120: mol_type = other DNA
agttcgtagtgcagcacctcatagtgcagccgctcctaggcactgaataaagttagttctgatgattattctgcctttcgaaaacatcaggtgcaataaaaaatgatgcaacaggaaaat

SEQ ID NO: 98462 - DNA, 120 bp, synthetic construct; identical to SEQ ID NO: 1975
  source 1..120: mol_type = other DNA

SEQ ID NO: 98463 - DNA, 120 bp, synthetic construct
  source 1..120: mol_type = other DNA
ccaaaggactataaatcatgctgctataaaaacacatgcacacgtatgtttattgtggcattattcacaatagcaaagacttggaaccaacccaaatgtccaacaatgatagactggatt

SEQ ID NO: 98464 - DNA, 120 bp, synthetic construct
  source 1..120: mol_type = other DNA
attacaggtgtgagccaccatgcccagcctacaacttttacttgtcaattaaaaagtaaatttaacaaaaggaaaagtaaaattaacaggcattttgcaaaacctttatattgggtttat

SEQ ID NO: 98465 - DNA, 120 bp, synthetic construct
  source 1..120: mol_type = other DNA
cctagaggcgtgaaataattttacttgggtttctttttcttttcttttttttttttgagacactttcactcttgttgcccaggctggagtgcaatggcccgatctcggctcactgcaacc

SEQ ID NO: 98466 - DNA, 120 bp, synthetic construct; identical to SEQ ID NO: 1976
  source 1..120: mol_type = other DNA

SEQ ID NO: 98467 - DNA, 120 bp, synthetic construct; identical to SEQ ID NO: 1977
  source 1..120: mol_type = other DNA

SEQ ID NO: 98468 - DNA, 120 bp, synthetic construct
  source 1..120: mol_type = other DNA
ttcctagtgattcagaagtagcaggaacagtcagtctcactcatcactcaaagagaccttgaattcatcttctcttttttctcatttctccatgccataatttacaatgtcatcaccctt

SEQ ID NO: 98469 - DNA, 120 bp, synthetic construct
  source 1..120: mol_type = other DNA
atttctccctacttatattctgtgggcagctgctatccccttgctgtctgtctgatcctcaatctcttcctcttgtccactcaaacttcctcatggtattttgcttattcatcttacatc

SEQ ID NO: 98470 - DNA, 120 bp, synthetic construct
  source 1..120: mol_type = other DNA
gttccccttcatttgacttgtttttctaatgttcagagtgtgtgctgttttatttactgcaaagagatgctctgtttctccataaagtgattacaaatccgtggagctacagtcatcata

SEQ ID NO: 98471 - DNA, 120 bp, synthetic construct
  source 1..120: mol_type = other DNA
ctcaacagatcatcccgctgcgccctcccaaagttctgggattacaggcatgaaccaccatgcccagccccaaactggagatctgtatagagcattttatgttgctttgatgaaagatat

SEQ ID NO: 98472 - DNA, 120 bp, synthetic construct
  source 1..120: mol_type = other DNA
catagtggaaggcaaggaggaacaagtcacaccttatgtggatggcagcaggcaaaaagagagcttgtgcagggtaactcctgttgttgttgttgttttcttttttttaggtttcaatat

SEQ ID NO: 98473 - DNA, 120 bp, synthetic construct
  source 1..120: mol_type = other DNA
tttgatacctggctttagggtctgagtgtatcctaaacctatcaggctggagttgttcactttagccaagaagcaggcttcagggtcaatcaaatacttggctgctatttcgaaacgcgt

SEQ ID NO: 98474 - DNA, 120 bp, synthetic construct
  source 1..120: mol_type = other DNA
tatgggagctacaagatgagatttgggtggggacacagagccaaaccatatcaaccaccaataaagccaatttaataaaatgaagaatatatgtgtatgtgaaaaatactatatgttata

SEQ ID NO: 98475 - DNA, 120 bp, synthetic construct
  source 1..120: mol_type = other DNA
ttctcccgccccccatccagagaccagactaacataggcatagttccttggaatctcactgttctgatggcattttttaaaatccaacatatgtatgcttcttcaaagtcttggctttgt

SEQ ID NO: 98476 - DNA, 120 bp, synthetic construct
  source 1..120: mol_type = other DNA
ataaaaaataaataaaaagtttaatttacgacattcagggaaaaccatactcaaaccctatttttcccctggaggctttgcattcttcaaagaacattgccatattccaactgaaatgga

SEQ ID NO: 98477 - DNA, 120 bp, synthetic construct
  source 1..120: mol_type = other DNA
tttaagggagaagccatttccttgccttttccaccttccttggctcatgtctcttcctccatcctcaaagcgactctgcatttctctcacccttcttcacctcatgtctccctttgacta

SEQ ID NO: 98478 - DNA, 120 bp, synthetic construct
  source 1..120: mol_type = other DNA
ttattaaacttaatgagtgtctactgcttaccttatgtctggatgacaatggacaggtgcttatttattttaaatctactcattatttatataaaagctttataatttctcaggttggta

SEQ ID NO: 98479 - DNA, 120 bp, synthetic construct
  source 1..120: mol_type = other DNA
atatcttaagacatgtgtcatgttgacatatattgttaacttaatgtgtcttcctctttgctgagggatatgttgtcttaatctttttttcccccaaacattgcaatttacttctctctc

SEQ ID NO: 98480 - DNA, 120 bp, synthetic construct
  source 1..120: mol_type = other DNA
atcaagaccatcctggctaacatggtgaaaccccgcctctgacaaaaatacaaaaaaatgtgccaggtgtggtggtggacgcctgtagtcccagctactcgggaggctgaggcaggagaa

SEQ ID NO: 98481 - DNA, 120 bp, synthetic construct
  source 1..120: mol_type = other DNA
caatgtgtttgtggttgcttgttgggagatttttatgatggctgttttaaaattcttcccaaataattctaacaattctgtcattctggtgttggtgtctgttgcttgctttatcacttt

SEQ ID NO: 98482 - DNA, 120 bp, synthetic construct
  source 1..120: mol_type = other DNA
ctcccttggtaagctgtctctttccaggacgtttggctactgagaacaggcttttgttaagactttctttttttttttttttttggtctgttggtgcttccaggttactggcttttccag

SEQ ID NO: 98483 - DNA, 120 bp, synthetic construct
  source 1..120: mol_type = other DNA
aatttcagttactttctcgactttgcctactgtgctttcctgtgaacacttctttgctattttggcattcttgtgttttcaggttcagccaccctattgtgcctctctgctcatttccac

SEQ ID NO: 98484 - DNA, 120 bp, synthetic construct
  source 1..120: mol_type = other DNA
ttattaactttctcctcacctgtaaggctgtgttttatttcaaaaaatagaaaaaagctgctatgactatcactgttttgaatcatccttttatagatgagaagctgcaagttcaatgaa

SEQ ID NO: 98485 - DNA, 120 bp, synthetic construct
  source 1..120: mol_type = other DNA
ggatctccttgtttttaagggctgaataatattccattgtatatatacattacattttcttcatttatatattgatggacacttaggttgcttccatatcttggctattgtgaataatgc

SEQ ID NO: 98486 - DNA, 120 bp, synthetic construct; identical to SEQ ID NO: 1978
  source 1..120: mol_type = other DNA

SEQ ID NO: 98487 - DNA, 120 bp, synthetic construct; identical to SEQ ID NO: 1979
  source 1..120: mol_type = other DNA

SEQ ID NO: 98488 - DNA, 120 bp, synthetic construct; identical to SEQ ID NO: 1980
  source 1..120: mol_type = other DNA

SEQ ID NO: 98489 - DNA, 120 bp, synthetic construct; identical to SEQ ID NO: 1981
  source 1..120: mol_type = other DNA

SEQ ID NO: 98490 - DNA, 120 bp, synthetic construct; identical to SEQ ID NO: 1982
  source 1..120: mol_type = other DNA

SEQ ID NO: 98491 - DNA, 120 bp, synthetic construct
  source 1..120: mol_type = other DNA
tgggtacataatgagtgtatatatctatggggtacatgagattttttgatacaggcatgcaatgtgaaataaggatgtcatagagaagggagtatccatcccctcaagcacttatccttc

SEQ ID NO: 98492 - DNA, 120 bp, synthetic construct
  source 1..120: mol_type = other DNA
ttttttttttgagacagagtttctctcttgttgtccaggctggagtgcaatggcgtgctctcggctcaccacaacctctgacgcctgggttcaagagattctcctgcctcagcctcctga

SEQ ID NO: 98493 - DNA, 120 bp, synthetic construct
  source 1..120: mol_type = other DNA
aagttccagctgttttggttactatagctttgtagtattatttgaggacatgttatgtgattcctcaagttttgttctttcgcttagaatagctttggctattctgggtcttttgtggtt

SEQ ID NO: 98494 - DNA, 120 bp, synthetic construct
  source 1..120: mol_type = other DNA
tgttgattttagcttgctagtattttgttgaggatttttgcatcaatactcatcagagatattggcctgtagttttatctttttattgtgtcagtctggttttggtatcagggtaatact

SEQ ID NO: 98495 - DNA, 120 bp, synthetic construct; identical to SEQ ID NO: 1983
  source 1..120: mol_type = other DNA

SEQ ID NO: 98496 - DNA, 120 bp, synthetic construct; identical to SEQ ID NO: 1984
  source 1..120: mol_type = other DNA

SEQ ID NO: 98497 - DNA, 120 bp, synthetic construct
  source 1..120: mol_type = other DNA
ttaaatggcttgaggtaaccttctccaggttgaatctgctttatgttcgatttctttcttatacttggatattgatgtctttctctaggtttgagaagttttctgttattatccctttga

SEQ ID NO: 98498 - DNA, 120 bp, synthetic construct; identical to SEQ ID NO: 1985
  source 1..120: mol_type = other DNA

SEQ ID NO: 98499 - DNA, 120 bp, synthetic construct
  source 1..120: mol_type = other DNA
caggtggtatcctagatgaaagacaaagtccttcccacccttccttctcctctcttcaagtggaagaaaggggtgtctttcagtgctgaaagctgtgcagcctggggttagggtagggat

SEQ ID NO: 98500 - DNA, 120 bp, synthetic construct
  source 1..120: mol_type = other DNA
tgagtgacacaaactattgtactgatcaaaagtaaagatacacttactggtgaagggatgccaatatgttttctttagatatcaggtgaacttgagcaaaatgcttgttactccacttta

SEQ ID NO: 98501 - DNA, 120 bp, synthetic construct
  source 1..120: mol_type = other DNA
tccgcctcctgggttcaagtgattctcctccctcagcctcccaagtagctgggattataggtatgcaccaccatgcccggctaatttttttgtatttttagtacagacggggtttcacca

SEQ ID NO: 98502 - DNA, 120 bp, synthetic construct
  source 1..120: mol_type = other DNA
tacatgtgcaggtctcttatatgggtaaattgtttgtcacttgggtttggtgtacaaatgatcccgtcacccaagtagtgagcacagtacctgatagtatttcagtgctcactctcctcc

SEQ ID NO: 98503 - DNA, 120 bp, synthetic construct
  source 1..120: mol_type = other DNA
gaaaccagagtcttatagaggaagccactaaaatctggagaatagtgacttgccaaaaatccaaaattttgtttcagtgttagagccagtctcagaatctaggccttctttccccatgta

SEQ ID NO: 98504 - DNA, 120 bp, synthetic construct
  source 1..120: mol_type = other DNA
atgtttatgctatactgtagcttattaagtgtgcaatagcattaatgtctaataaaataatgtgcgtcagccaatatcatactgaatgggcaaaaactggaagcattccctttgaaaact

SEQ ID NO: 98505 - DNA, 120 bp, synthetic construct
  source 1..120: mol_type = other DNA
gaaaacctaggcaataccattcaggacataggcatgggcaaggacttcatgtctaaaacaccaaaagcaatggcaacaaaagccaaaattgacatatgggatctaattaaactgaagaac

SEQ ID NO: 98506 - DNA, 120 bp, synthetic construct
  source 1..120: mol_type = other DNA
tcctttgtagggacatggttgaagctggaaaccatcaatctcagcaaactatcgcaaggagaaaaaaccaaacaccgcatgttctcactcataggtgggaattgaacaatgagaacacat

SEQ ID NO: 98507 - DNA, 120 bp, synthetic construct
  source 1..120: mol_type = other DNA
ataagaagcaactttgtatccattcaagttttatcatgatattgcaacaattcagtcacatcctcaagctccacttgtaagtctagttcttttgctacttccataacatctacagtggct

SEQ ID NO: 98508 - DNA, 120 bp, synthetic construct
  source 1..120: mol_type = other DNA
ttatggagatggcttctttccttaaacctcatgaccaacctctgctaacttcatttttttttttcctgtagctttctcgcctctttcagccttcgtagaattgaagagtgttaggaactt

SEQ ID NO: 98509 - DNA, 120 bp, synthetic construct
  source 1..120: mol_type = other DNA
cggtggctcacccctgtaatcccaacactttgggaggctgagatgggcagatcgcttgaggtcaggagttcaagtccagactgggcaacatggcaaaaccttgtctctataaaaaaaaaa

SEQ ID NO: 98510 - DNA, 120 bp, synthetic construct
  source 1..120: mol_type = other DNA
ctgattaaatattccaaaagtggtctgaacaatggtagcccacttgtgagtaatgaatacagcctctcaggacagctatctggaaattaatggcatttgtctaaatatgtatgttctgat

SEQ ID NO: 98511 - DNA, 120 bp, synthetic construct
  source 1..120: mol_type = other DNA
tgaataacctgctcctgaataactttcgggtaaataatgaaattgagccagaaatcaagttatttgaagctaatgagaaaaaagatacaacattcaagaatcactgggacacagctaagg

SEQ ID NO: 98512 - DNA, 120 bp, synthetic construct; identical to SEQ ID NO: 1986
  source 1..120: mol_type = other DNA

SEQ ID NO: 98513 - DNA, 120 bp, synthetic construct
  source 1..120: mol_type = other DNA
ctaagatactccatgagaagatcaaccccagaacacataatcattagattctccaaggtagaaatgaaggaaaaaatgttaagggcagccagagagaaaggccaagtcacctacaaaggg

SEQ ID NO: 98514 - DNA, 120 bp, synthetic construct
  source 1..120: mol_type = other DNA
tcaggacttgaactcagccctggattgagtggacatctacagaactctccaccaaaaatcaacagagtatacattcttctcagtgccacatggcacttattctaaaatcaaccacatgat

SEQ ID NO: 98515 - DNA, 120 bp, synthetic construct
  source 1..120: mol_type = other DNA
aactgaattctaccagagttacaaagaggagctggtaccattccttctgaaaccattccaaacaattgtaaaggagggactcctccctaactcattttatgaggccaacatcatcctgat

SEQ ID NO: 98516 - DNA, 120 bp, synthetic construct
  source 1..120: mol_type = other DNA
aaggaaaaacattccagactcatagataggaagaatcaatatcgtgaaaacggccatactgcccaaagtaatctatagattcaattctgttcccattaaactaccattgacattctttac

SEQ ID NO: 98517 - DNA, 120 bp, synthetic construct
  source 1..120: mol_type = other DNA
atgctttgacactgttggtgggaatgtaaattagttcaaccattgtgtaagacagtgtggcgattcttcaaggatctagatctagaaataccatttgatccagcaatcccaatactgggt

SEQ ID NO: 98518 - DNA, 120 bp, synthetic construct; identical to SEQ ID NO: 1987
  source 1..120: mol_type = other DNA

SEQ ID NO: 98519 - DNA, 120 bp, synthetic construct
  source 1..120: mol_type = other DNA
tctgaaattcacttatataaacaaaactataataatccagtgggaactgacttaatattcaatgtttcagccaggacacgagatctaagttattgttacaaatgtgtacatgaccattgt

SEQ ID NO: 98520 - DNA, 120 bp, synthetic construct
  source 1..120: mol_type = other DNA
agtcagctaattcctcttttcaaatctccaaagtctgcttctcatttagagtaaaacccaaggtccttacagtggtctacaaggccctacgagatcttccttcaggtctaccatttcttt

SEQ ID NO: 98521 - DNA, 120 bp, synthetic construct; identical to SEQ ID NO: 1988
  source 1..120: mol_type = other DNA

SEQ ID NO: 98522 - DNA, 120 bp, synthetic construct; identical to SEQ ID NO: 1989
  source 1..120: mol_type = other DNA

SEQ ID NO: 98523 - DNA, 120 bp, synthetic construct
  source 1..120: mol_type = other DNA
ttctttgctgcatagaagctttttaacttgatatgatgccatttgtccatttttgctttggttgccttggcttgtagggtatgactcaagaaatttttgcccagaccaatgtcctggagc

SEQ ID NO: 98524 - DNA, 120 bp, synthetic construct
  source 1..120: mol_type = other DNA
accaagataattttacttcttcctttccaatttggatgccctttatttctttctcttgtttaattgccctagctaggactttcagtgctatgttgaataacaatggttaaagtgggtatc

SEQ ID NO: 98525 - DNA, 120 bp, synthetic construct; identical to SEQ ID NO: 1990
  source 1..120: mol_type = other DNA

SEQ ID NO: 98526 - DNA, 120 bp, synthetic construct; identical to SEQ ID NO: 1991
  source 1..120: mol_type = other DNA

SEQ ID NO: 98527 - DNA, 120 bp, synthetic construct; identical to SEQ ID NO: 1992
  source 1..120: mol_type = other DNA

SEQ ID NO: 98528 - DNA, 120 bp, synthetic construct
  source 1..120: mol_type = other DNA
caccaaaacctcatcttgaattgtaactcctacaattgccacttgtcatgggaggaacgcggtgggaggtgattgaattatgggggcaggtctttcctgcactgttctcatgattgtgaa

SEQ ID NO: 98529 - DNA, 120 bp, synthetic construct
  source 1..120: mol_type = other DNA
gtgtccatgtgttctcattgttcaactcccacttatgagtgggaacatgtggtttttggttttcggttcctgtgttagtttgctgaggatgttggcatccagcttcatccatgtccctgc

SEQ ID NO: 98530 - DNA, 120 bp, synthetic construct; identical to SEQ ID NO: 1993
  source 1..120: mol_type = other DNA

SEQ ID NO: 98531 - DNA, 120 bp, synthetic construct; identical to SEQ ID NO: 1994
  source 1..120: mol_type = other DNA

SEQ ID NO: 98532 - DNA, 120 bp, synthetic construct
  source 1..120: mol_type = other DNA
ctaggacatgcttaggaattttagtctttgtgcttttgactgcctttcaaatttacccaggatctcagagcgctttaccccatggtggcaaggcttgatgagaaactcaagttccaacca

SEQ ID NO: 98533 - DNA, 120 bp, synthetic construct
  source 1..120: mol_type = other DNA
tgggttggtaacatttcatgtcctcttttccacctactttgaattatacaatatatttttaccaactatagtcactttagaatgctacttattcttaattttgccactcctccttcaaca

SEQ ID NO: 98534 - DNA, 120 bp, synthetic construct
  source 1..120: mol_type = other DNA
ctgagatcacaccactgcactctagcctgggtgacagagcgagactccgtctcaaaaaaacaaaaaaatagcctctatattcattttgatgttatagtgagacatgggattattgataaa

SEQ ID NO: 98535 - DNA, 120 bp, synthetic construct
  source 1..120: mol_type = other DNA
agatggggttttgccatcttggccaggctggtcttgaactcctgacctcgtcatccacccgcctcagcctcccaaagtactgggattacagacgtgagccaccgcgcccggccgttgatc

SEQ ID NO: 98536 - DNA, 120 bp, synthetic construct
  source 1..120: mol_type = other DNA
cataactttcttgaagtttaaaatagcagcattaatgtattaattataatcttgcatttttagatgattgatagagttaaaaagagatattccaactcatttataatcttgcgaggctga

SEQ ID NO: 98537 - DNA, 120 bp, synthetic construct
  source 1..120: mol_type = other DNA
actgtggagcttaaaagtcaaaatggtagatatgaaaatgagttttttggggaatactttatttgcatcaaataatgtgtaagatatattggcacatctgtatgattatgtgtcctcagc

SEQ ID NO: 98538 - DNA, 120 bp, synthetic construct
  source 1..120: mol_type = other DNA
ggtgtgtgcctgtaattccagctactggggggctgaggcaggaggatcgcttgaacctggaaggccgaggttgcagtgagccaagactgtgccactgcactccagcctgagcaacagagc

SEQ ID NO: 98539 - DNA, 120 bp, synthetic construct
  source 1..120: mol_type = other DNA
tgtgttgtttgttttacattgatattggcactgttgtaaattctttttgttttttgctccacatagtgtgtgttggctgatccaaaaataaaaaaagcaagacaggggtgccaaggaaaa

SEQ ID NO: 98540 - DNA, 120 bp, synthetic construct
  source 1..120: mol_type = other DNA
gggaggaactgagtcaggagcagtgaaattgatagagcctccagctctttttgccaatcaaaacatttaagatgattctgttatttatgtactttagctttgagcctttgcttagctata

SEQ ID NO: 98541 - DNA, 120 bp, synthetic construct; identical to SEQ ID NO: 1995
  source 1..120: mol_type = other DNA

SEQ ID NO: 98542 - DNA, 120 bp, synthetic construct
  source 1..120: mol_type = other DNA
ggcgattctctatagaatgtggatttttcccacaagagacattgcaggataatttcaaggtatgcaaggaaatatattttggggtaaaacattttgttttttactcttgttatgccagag

SEQ ID NO: 98543 - DNA, 120 bp, synthetic construct
  source 1..120: mol_type = other DNA
ttaatttccaaatgtaacaaaatatttggcttaaaaatagaggtattattgacatatacataccaatattttggtgaccctgaaacccacattgattcattttctgctttcggttagtgg

SEQ ID NO: 98544 - DNA, 120 bp, synthetic construct
  source 1..120: mol_type = other DNA
tttagggatagagggatagatgaacaagtgcatcaaatgaaatatagttcgaaagcactattacccattcaattccaagcactaaaccattaagaaacttcttgcggttctcttcctttc

SEQ ID NO: 98545 - DNA, 120 bp, synthetic construct
  source 1..120: mol_type = other DNA
tctttagtctccatccagttccagcaaatgctactacatgcacactgagaagtaacaaaaaggtaaaactctgttttcattattctccctaatttgctcctcaaatcattcttatcccca

SEQ ID NO: 98546 - DNA, 120 bp, synthetic construct; identical to SEQ ID NO: 1996
  source 1..120: mol_type = other DNA

SEQ ID NO: 98547 - DNA, 120 bp, synthetic construct; identical to SEQ ID NO: 1997
  source 1..120: mol_type = other DNA

SEQ ID NO: 98548 - DNA, 120 bp, synthetic construct; identical to SEQ ID NO: 1998
  source 1..120: mol_type = other DNA

SEQ ID NO: 98549 - DNA, 120 bp, synthetic construct
  source 1..120: mol_type = other DNA
gatttatattccttttggtatatacttagtaatgggatttctgtgtcgaatggtatttctgtctttaggtctttgaggaatcaccacactgtctgctgcaatggttgaattaatttacac

SEQ ID NO: 98550 - DNA, 120 bp, synthetic construct; identical to SEQ ID NO: 1999
  source 1..120: mol_type = other DNA

SEQ ID NO: 98551 - DNA, 120 bp, synthetic construct
  source 1..120: mol_type = other DNA
ctcccagtgatctctcctcacttctctcaggcctattttaactcagtcctctagagcctcatggttgatggagacagtcacatggctggatatattaaaattatctaagatatctacctt

SEQ ID NO: 98552 - DNA, 120 bp, synthetic construct
  source 1..120: mol_type = other DNA
caaagagttgaattaggttttgcatctaagttaaactgaagcttgtgatatgatgcttccacagagctattaaaagttattaaaatcctgattctgtgtgtctaataaattttggctgta

SEQ ID NO: 98553 - DNA, 120 bp, synthetic construct
  source 1..120: mol_type = other DNA
ctgcaagcctaggcatcactgctacttaatctttctgcttacctatttcacaggtatttaatgcccatttagtcatcatttgaaaaacttatatatatattaaccaaagctaaatttatc

SEQ ID NO: 98554 - DNA, 120 bp, synthetic construct
  source 1..120: mol_type = other DNA
tttctccacaaccttgccagcatttattattttttgacttattaataatagccattcttactggcatgcaatagtatctcattgtagttttcatttgcatttctctaataattagtgata

SEQ ID NO: 98555 - DNA, 120 bp, synthetic construct
  source 1..120: mol_type = other DNA
ggcagtatggccatttaacaatattgatccttcttatccatgagcatggaatgtttttgcatttgtttgtgtcatctctgatttctttgagcagtgttttgtaattctcatagtagagac

SEQ ID NO: 98556 - DNA, 120 bp, synthetic construct
  source 1..120: mol_type = other DNA
cacttggaaccaacccaaatgcccatcaatgatacactgaataaaatgtggcacatatacgccatggaatactatgcagccataagaaaggatgagttcatgtcctttgcagggacgtgg

SEQ ID NO: 98557 - DNA, 120 bp, synthetic construct; identical to SEQ ID NO: 34546
  source 1..120: mol_type = other DNA

SEQ ID NO: 98558 - DNA, 120 bp, synthetic construct; identical to SEQ ID NO: 34547
  source 1..120: mol_type = other DNA

SEQ ID NO: 98559 - DNA, 120 bp, synthetic construct; identical to SEQ ID NO: 34548
  source 1..120: mol_type = other DNA

SEQ ID NO: 98560 - DNA, 120 bp, synthetic construct
  source 1..120: mol_type = other DNA
ttgaacctgggagatggaggttgcagtgagccaggctcttgccactgcactctagcctgggtgacagagtgagctctgtctaaataaataaacagataattaaaagtaaaaataaatttg

SEQ ID NO: 98561 - DNA, 120 bp, synthetic construct
  source 1..120: mol_type = other DNA
gtatccgttgtaatgtctcctttttcatctctgattttatttatttttgtctttccttttcttagtcgggctacagattagtaaattttgattatattttcaaagaaaccaacttttcat

SEQ ID NO: 98562 - DNA, 120 bp, synthetic construct; identical to SEQ ID NO: 34549
  source 1..120: mol_type = other DNA

SEQ ID NO: 98563 - DNA, 120 bp, synthetic construct
  source 1..120: mol_type = other DNA
cagtcttgagccacagcaaccaacctgattttttaaatggataacaataacactgattgcataaacaaacatgcaaaaaaaaactaataaaaactctacactttaacttcatccccccat

SEQ ID NO: 98564 - DNA, 120 bp, synthetic construct
  source 1..120: mol_type = other DNA
ctgggttcaagtaattttcctgcctcagcctcctgagtagctgggactagaggcacgcgccaccacacgcagctaattttttttttttgtatttttagtaaagatggggtttcaccatgt

SEQ ID NO: 98565 - DNA, 120 bp, synthetic construct; identical to SEQ ID NO: 34550
  source 1..120: mol_type = other DNA

SEQ ID NO: 98566 - DNA, 120 bp, synthetic construct; identical to SEQ ID NO: 34551
  source 1..120: mol_type = other DNA

SEQ ID NO: 98567 - DNA, 120 bp, synthetic construct
  source 1..120: mol_type = other DNA
tctgaattagaatgacctggggagcatgttaaaagtaaaatgttcctttaggtggctcttggatccacaataagaaatatctatctctttaattcctttttgccaatatgctactttgta

SEQ ID NO: 98568 - DNA, 120 bp, synthetic construct
  source 1..120: mol_type = other DNA
gtggtaattacacagagggattgtgttctccttcttgcaatactggattctagattcaaaaatacttgaaatgctttttctggtttctacctgcatctcacgaggcctctattggaattc

SEQ ID NO: 98569 - DNA, 120 bp, synthetic construct
  source 1..120: mol_type = other DNA
cctgaactctccttgtgattgcaattatttatctgagtgggcatgggagagacagagaaattggtagtaaaagataaagagaaaaaattccgtgtaaggaaatatgttagccgctagccc

SEQ ID NO: 98570 - DNA, 120 bp, synthetic construct
  source 1..120: mol_type = other DNA
acaaagccttcttcacttgaaatattggaaataatttctgagttccaaaacactgacattcaatgaacattgcctttcattacttttgttaatacatctttttatacacatcatttgtac

SEQ ID NO: 98571 - DNA, 120 bp, synthetic construct
  source 1..120: mol_type = other DNA
gagtattcctagactagtttcttgagggaacttaaactaaagctcagatctaaatatttccagtttggcaaattcagaaatacctttatttccattagtatttttgacctcccaaaactt

SEQ ID NO: 98572 - DNA, 120 bp, synthetic construct
  source 1..120: mol_type = other DNA
tcacacacgcctatatagaattgtcatgaatatccatttatcataatacttgtttattgttcaattccctaagttataagagcccaaggaatctgcttctctccccagaaaattaataac

SEQ ID NO: 98573 - DNA, 120 bp, synthetic construct
  source 1..120: mol_type = other DNA
tttattgtatgaccttgttacatgaattgatggtaacggttgctcagcgatttcccaaaggatgttgtggtaggcagaataatgccccttccccaaggatgtccacatcatctatggaaa

SEQ ID NO: 98574 - DNA, 120 bp, synthetic construct
  source 1..120: mol_type = other DNA
acccatgtaagacagataaacagaagaaaatgatacaagttttttcaatacaagttttatgtggcacaggagccatcataaagaaatgaagacccaaagaccctgagttatttatatgct

SEQ ID NO: 98575 - DNA, 120 bp, synthetic construct
  source 1..120: mol_type = other DNA
acaattaggcactaataaataaggtactggaaactagagaatagcacaataaaatacaactttggctgagccaataacacacacacacacacacacacacacatacatacaaacatacac

SEQ ID NO: 98576 - DNA, 120 bp, synthetic construct
  source 1..120: mol_type = other DNA
gatgaccaatgtgctttattaagaagcaaagaagtatcagagatgcttaaggcaaatgggcagatgacttgaattggagtcatttgactgcatgtgaaagctagtacatgactaagagcc

SEQ ID NO: 98577 - DNA, 120 bp, synthetic construct
  source 1..120: mol_type = other DNA
tagcactttattttaaatatgaggggaattttcaaatagtcatgtaaactgcaaagtaaaaaactacatattttaaatatacagtttctttacacagcactgtttcttaaagctgcatta

SEQ ID NO: 98578 - DNA, 120 bp, synthetic construct; identical to SEQ ID NO: 34563
  source 1..120: mol_type = other DNA

SEQ ID NO: 98579 - DNA, 120 bp, synthetic construct; identical to SEQ ID NO: 34564
  source 1..120: mol_type = other DNA

SEQ ID NO: 98580 - DNA, 120 bp, synthetic construct
  source 1..120: mol_type = other DNA
accctagctcttctttatttgtttatttttttgagacggagtttccctcttgttgtccaagctggagtgcaatggcaagatctcagctcaccacaacctctgcctcccagttttaagtga

SEQ ID NO: 98581 - DNA, 120 bp, synthetic construct
  source 1..120: mol_type = other DNA
aaatatatataagaaatatatataagcaatttaactgcatataaggccttgatcactttcgttatcttaaagtcccaattattttgagtgtgagacttccagttatactacattcttgga

SEQ ID NO: 98582 - DNA, 120 bp, synthetic construct
  source 1..120: mol_type = other DNA
aacaaaacctaagataagttgtttaactctagggaggaatggagaatgaaattgttcttgggatgtagaaacatctcatctgtgaatctgaagtcaatttcctgttactgggcagtatac

SEQ ID NO: 98583 - DNA, 120 bp, synthetic construct
  source 1..120: mol_type = other DNA
ggaaatctccattgcagcaggtgatgtgaggtttgattaaataaattgacagactgctcagaggctgattcagtattttaataacattgcaataaatcttttgcaatgtggtcccatttt

SEQ ID NO: 98584 - DNA, 120 bp, synthetic construct
  source 1..120: mol_type = other DNA
tagagaacccttaagtaggaaatacgcataacaagttgttttaattgctaatgcatttgtataaacagagcaatctatgacaattgtgctgtcaataatctctgagatatggttaagtaa

SEQ ID NO: 98585 - DNA, 120 bp, synthetic construct
  source 1..120: mol_type = other DNA
gacctaaaagagtgcctggctcttagttgattatctcctggttctggaaaggaaggaaggaagacaaagaggaaagaagattctctatataatgtggatttttcccacaaaggatggctt

SEQ ID NO: 98586 - DNA, 120 bp, synthetic construct; identical to SEQ ID NO: 10747
  source 1..120: mol_type = other DNA

SEQ ID NO: 98587 - DNA, 120 bp, synthetic construct; identical to SEQ ID NO: 10748
  source 1..120: mol_type = other DNA

SEQ ID NO: 98588 - DNA, 120 bp, synthetic construct; identical to SEQ ID NO: 10749
  source 1..120: mol_type = other DNA

SEQ ID NO: 98589 - DNA, 120 bp, synthetic construct
  source 1..120: mol_type = other DNA
tagcattaggagatatacctaatgtaaatgatgagttaatgggtgaagcacaccaacatggcacatgtatatatatgtaacaaaccggcacgttgtgcacatgtaccctagaacttaaag

SEQ ID NO: 98590 - DNA, 120 bp, synthetic construct
  source 1..120: mol_type = other DNA
agaatgctttgacgagctgagagaagaaggcttcagatgatcaaactactctgagctgacggagaatgactttgacgagttgagagaagaaggcttcagatgatcaactacgctgagcta

SEQ ID NO: 98591 - DNA, 120 bp, synthetic construct
  source 1..120: mol_type = other DNA
aggccaaattgtaaagacgatcaaggctaggaagaaactgcatgaactaacgagcaaaataaccagctaacatcataatgacatgatcaaattcacacataacaatattaactttaaata

SEQ ID NO: 98592 - DNA, 120 bp, synthetic construct
  source 1..120: mol_type = other DNA
gagcttctgcaaagcaaaagaaactaccatcagagtgaccaggcaacctacaaaatgggagaaaatttttgcaacctactcatctgacaaagggctaatatccagaatctacaatgaact

SEQ ID NO: 98593 - DNA, 120 bp, synthetic construct
  source 1..120: mol_type = other DNA
aaggggaacatcacattctggggactgttgtggggtggggggaggggggagggatagtattaggagatatacctaatgctaaatgatgagttaatgggtgcagtacaccaacatggcaca

SEQ ID NO: 98594 - DNA, 120 bp, synthetic construct; identical to SEQ ID NO: 10751
  source 1..120: mol_type = other DNA

SEQ ID NO: 98595 - DNA, 120 bp, synthetic construct
  source 1..120: mol_type = other DNA
tcacaccatttagaatggcaatcattaaaaagtcaggaaactacaggtgctggagaggatgtggagaaataggaacacttttacactgttggtgggactgtaaactagttcaaccattgt

SEQ ID NO: 98596 - DNA, 120 bp, synthetic construct; identical to SEQ ID NO: 10752
  source 1..120: mol_type = other DNA

SEQ ID NO: 98597 - DNA, 120 bp, synthetic construct
  source 1..120: mol_type = other DNA
agactttgctgaagttgcttatcagcttaaggagattttgggctgagtgaaaatggccataccacccaaggtaaatcatagattcaatgccatccccatcaagctaccaatgactttctt

SEQ ID NO: 98598 - DNA, 120 bp, synthetic construct
  source 1..120: mol_type = other DNA
aagtgggcaaaggacatgaacagacacttcccaaaagaagatatttatgcagccaaaaaacgcatgaaaaaatgctcaccatcactggccatcagagaaatgcaaatcaaaaccacaatg

SEQ ID NO: 98599 - DNA, 120 bp, synthetic construct; identical to SEQ ID NO: 10753
  source 1..120: mol_type = other DNA

SEQ ID NO: 98600 - DNA, 120 bp, synthetic construct; identical to SEQ ID NO: 10754
  source 1..120: mol_type = other DNA

SEQ ID NO: 98601 - DNA, 120 bp, synthetic construct
  source 1..120: mol_type = other DNA
aactcttcaattagcattaggtatatctcctaatgctatccctccccccttcccccaccccacaacagtcccccgtgtgtgatgttccccttctgtgtccatgtgttctcattgttcaat

SEQ ID NO: 98602 - DNA, 120 bp, synthetic construct; identical to SEQ ID NO: 10741
  source 1..120: mol_type = other DNA

SEQ ID NO: 98603 - DNA, 120 bp, synthetic construct
  source 1..120: mol_type = other DNA
agttcaaccattgtggaagacagtgtggcgattcctcaaggatctagaactagaaataccatttgacccagccatcgcattactgggcatatatgcaaaggattataaatcatgctgcta

SEQ ID NO: 98604 - DNA, 120 bp, synthetic construct; identical to SEQ ID NO: 10742
  source 1..120: mol_type = other DNA

SEQ ID NO: 98605 - DNA, 120 bp, synthetic construct
  source 1..120: mol_type = other DNA
acagaaggtaattgcatacctgtatgaaggatgtttcaaacttgaaaacttagggaatttcagtgaggcatcacgctacctgacttcaaactatactacaaggctacagtaaccaaaaca

SEQ ID NO: 98606 - DNA, 120 bp, synthetic construct
  source 1..120: mol_type = other DNA
acccaaagaattataaatcattctgctataaagacacatgcacacgtatgtttattgcggcactattcacaatagcaaagacttggaaccaacccaaatgtccaacaatgatagactgga

SEQ ID NO: 98607 - DNA, 120 bp, synthetic construct; identical to SEQ ID NO: 10743
  source 1..120: mol_type = other DNA

SEQ ID NO: 98608 - DNA, 120 bp, synthetic construct
  source 1..120: mol_type = other DNA
cgtgaaaatggccatactgcccaaagtaatttacagattcaatgccatccccatcaagctaccaatgcctttcttcacagaattggaaaaaactactttaaagttcatatggaaccaaaa

SEQ ID NO: 98609 - DNA, 120 bp, synthetic construct
  source 1..120: mol_type = other DNA
tgggtatatacccaaaggactagaaatcatgctgctataaagacacatgcacacatatgtttattgtggcattattcacgatagcaaagtcttggaaccaacccaaatgtccaacaatga

SEQ ID NO: 98610 - DNA, 120 bp, synthetic construct; identical to SEQ ID NO: 10744
  source 1..120: mol_type = other DNA

SEQ ID NO: 98611 - DNA, 120 bp, synthetic construct
  source 1..120: mol_type = other DNA
cttgtctctaacccttctctgcttttctgggagaggggcaagtacccctcaacccctcctctttcacccttagcagcaagtcccgcttttctacagggcaagaacccccaatctcttatt

SEQ ID NO: 98612 - DNA, 120 bp, synthetic construct
  source 1..120: mol_type = other DNA
aaatcagatagcgtttaggctctttttcatcaaatataaaaatccagcccagttcatgacgtgtttggcagcaaccctgagacactttacagccctagaccctaaaaggtcaaaaggccg

SEQ ID NO: 98613 - DNA, 120 bp, synthetic construct
  source 1..120: mol_type = other DNA
accccactcaacgccgacatcccatcccgcagcacgctttaaaaagattaaagcctgttatcacttgcctgctacagcatggccttttaaagcctataaactctccttacaattccccca

SEQ ID NO: 98614 - DNA, 120 bp, synthetic construct
  source 1..120: mol_type = other DNA
ttcctgttcctcaccctgatcacgcttgatttattgatggcggttccaccaggcctaatccccacacaccagcaaaggcaggttatgctatagtacaagccactagcccgcctcttagaa

SEQ ID NO: 98615 - DNA, 120 bp, synthetic construct
  source 1..120: mol_type = other DNA
attcatccaaaaccgtatccaggccatcaccaatcattctatatgacaaatgtttcttctaacatccccacaatatcaccccttaccacaaggcctcccttcagcttaatctctcccagt

SEQ ID NO: 98616 - DNA, 120 bp, synthetic construct
  source 1..120: mol_type = other DNA
caaattttaaattttttcttttatagatttgcatttgttacatttaagaaattgttgccagccgggcacagtggctcacgcctgttatcccagcactttcgaaggctgaggtggggggat

SEQ ID NO: 98617 - DNA, 120 bp, synthetic construct; identical to SEQ ID NO: 10745
  source 1..120: mol_type = other DNA

SEQ ID NO: 98618 - DNA, 120 bp, synthetic construct; identical to SEQ ID NO: 10746
  source 1..120: mol_type = other DNA

SEQ ID NO: 98619 - DNA, 120 bp, synthetic construct
  source 1..120: mol_type = other DNA
tgactgtatatctgaaaaccccactgtctcagcccaaaatctccttaagctgataagcaaattcagcaaagtctcaggatacaaaatcaatgtacaaaaatcacaagcattcttatacac

SEQ ID NO: 98620 - DNA, 120 bp, synthetic construct
  source 1..120: mol_type = other DNA
aggcaacctacaaaatgggagaaagttttcgcaacctactcatctgacaaagggctaatatccagaatctacaatgaactcaaacaaatttacaagaaaaaaacaaccccatcaaaaagt

SEQ ID NO: 98621 - DNA, 120 bp, synthetic construct
  source 1..120: mol_type = other DNA
actaacctgcacattgtgcacatgtaccctaaaacttaaagtataataaaaacaaaaaacaaaacacagggaattaaaaatgaataaatttggttctctatatatgtacatagtgctcta

SEQ ID NO: 98622 - DNA, 120 bp, synthetic construct
  source 1..120: mol_type = other DNA
agacatttttaaaaattgaaaaggaaacacataatccaaacttcctagtgactaaatacctgacttttgccctttgagttcaaaagtcttctaggccaggcgcggtggctcacgcctgta

SEQ ID NO: 98623 - DNA, 120 bp, synthetic construct; identical to SEQ ID NO: 25361
  source 1..120: mol_type = other DNA

SEQ ID NO: 98624 - DNA, 120 bp, synthetic construct
  source 1..120: mol_type = other DNA
ggcaaggacttcatgtctaaaacaccaaaagcaatgtcaacaaaagccaaaattgacaaatgggatctaattaaactaaagagcttctgcacagcaaaagaaactaccatcagagtgaac

SEQ ID NO: 98625 - DNA, 120 bp, synthetic construct; identical to SEQ ID NO: 25362
  source 1..120: mol_type = other DNA

SEQ ID NO: 98626 - DNA, 120 bp, synthetic construct; identical to SEQ ID NO: 25363
  source 1..120: mol_type = other DNA

SEQ ID NO: 98627 - DNA, 120 bp, synthetic construct; identical to SEQ ID NO: 25364
  source 1..120: mol_type = other DNA

SEQ ID NO: 98628 - DNA, 120 bp, synthetic construct; identical to SEQ ID NO: 25365
  source 1..120: mol_type = other DNA

SEQ ID NO: 98629 - DNA, 120 bp, synthetic construct; identical to SEQ ID NO: 25366
  source 1..120: mol_type = other DNA

SEQ ID NO: 98630 - DNA, 120 bp, synthetic construct
  source 1..120: mol_type = other DNA
atttaagtttagtagtcttttttttatttttattttttaatgtaaggtcttgctctgtagccctggccagagtgcagtggcacattcttggctcactacagcctcgacctcctgggctca

SEQ ID NO: 98631 - DNA, 120 bp, synthetic construct
  source 1..120: mol_type = other DNA
gtagtgtgttagtctgttcttacattcctgtaaaggaatatctggactgggcaatttgtattcaaaagaggtttaattggctcatggttctgcaggctatacaggaagcatggtgcctgc

SEQ ID NO: 98632 - DNA, 120 bp, synthetic construct
  source 1..120: mol_type = other DNA
gtaatctacatcttaggtaatttttatgccaaaatttctattagcttaggaaagtaatgggtattaaaattcactcaggccgggcacggtggctcacgcctgtaatcccagcactttggg

SEQ ID NO: 98633 - DNA, 120 bp, synthetic construct; identical to SEQ ID NO: 13771
  source 1..120: mol_type = other DNA

SEQ ID NO: 98634 - DNA, 120 bp, synthetic construct; identical to SEQ ID NO: 3633
  source 1..120: mol_type = other DNA

SEQ ID NO: 98635 - DNA, 120 bp, synthetic construct; identical to SEQ ID NO: 13773
  source 1..120: mol_type = other DNA

SEQ ID NO: 98636 - DNA, 120 bp, synthetic construct
  source 1..120: mol_type = other DNA
aaccacaaagatggggaaaaaacaggacagaaaaactggaaactgtaaaacgcagagcgcctctcctcctccaaaggaacgcagttcctcaccagcaacggaacaaagctggatggagaa

SEQ ID NO: 98637 - DNA, 120 bp, synthetic construct
  source 1..120: mol_type = other DNA
accaccaggcctgccctaaaagagctcctgaaggaagcgctaagcatggaaaggaacaaccggtaccagccgctgcaaaatcatgccaaaatataaagaccatagagactaggaagaaac

SEQ ID NO: 98638 - DNA, 120 bp, synthetic construct
  source 1..120: mol_type = other DNA
gcagaaggcaagaaataactaaaatcagagcagaactgaaggaaatagagacacaaaaaacccttcaaaaaattaatgaatccaggagctggttttttgaaaggatcaccaaaagtgata

SEQ ID NO: 98639 - DNA, 120 bp, synthetic construct
  source 1..120: mol_type = other DNA
tggccagggcaatcaggcaggagaaggaaataaagggtattcaattaggaaaagaggaagtcaaattgtccctgtttgcagacgacatgattgtttatctagaaaaccccattgtctcag

SEQ ID NO: 98640 - DNA, 120 bp, synthetic construct
  source 1..120: mol_type = other DNA
aaggacttcatgtccaaaacaccaaaagcaatggcaacaaaagctaaaattgacaaatgggatctaattaaactaaagagcttctgcacagcaaaagaaactaccatcagagtgaacagg

SEQ ID NO: 98641 - DNA, 120 bp, synthetic construct
  source 1..120: mol_type = other DNA
gatgacgagttagtgggtgcagcgcaccagcatggcacatgtatacatatgtaactaacctgcacaatgtgcacatgtaccctaaaacttaaagtataataaaaaaaaaaaaatttggaa

SEQ ID NO: 98642 - DNA, 120 bp, synthetic construct; identical to SEQ ID NO: 13774
  source 1..120: mol_type = other DNA

SEQ ID NO: 98643 - DNA, 120 bp, synthetic construct
  source 1..120: mol_type = other DNA
ctgttctgttccattgatctctatctctgttttggtaccagtaccatgctgttttggttactgtagccttgtagtatagtttgaagtcaggtagcatgatgcctccagctttgttctttt

SEQ ID NO: 98644 - DNA, 120 bp, synthetic construct
  source 1..120: mol_type = other DNA
attcacaatagcaaagacttggaaacaacccaaatgtccaacaacgatagactggattaagaaaatgtggcacatatacaccatggaatactatgcagccataaaaaatgatgagttcat

SEQ ID NO: 98645 - DNA, 120 bp, synthetic construct; identical to SEQ ID NO: 13775
  source 1..120: mol_type = other DNA

SEQ ID NO: 98646 - DNA, 120 bp, synthetic construct; identical to SEQ ID NO: 13776
  source 1..120: mol_type = other DNA

SEQ ID NO: 98647 - DNA, 120 bp, synthetic construct
  source 1..120: mol_type = other DNA
atcagatagttgtagatatgcggtgttatttctgagggctctgttctgttccattgatctctatctctgttttggtaccagtaccatgctgttttggttactgtagccttgtagtatagt

SEQ ID NO: 98648 - DNA, 120 bp, synthetic construct; identical to SEQ ID NO: 13777
  source 1..120: mol_type = other DNA

SEQ ID NO: 98649 - DNA, 120 bp, synthetic construct; identical to SEQ ID NO: 13778
  source 1..120: mol_type = other DNA

SEQ ID NO: 98650 - DNA, 120 bp, synthetic construct
  source 1..120: mol_type = other DNA
aaatcatcattttcagtaaactatcgcagggacaaaaaaccaaacactgcatattctcactcataggtgggaattgaacaatgagaacacgtggacacaggaaggggaacatcacactct

SEQ ID NO: 98651 - DNA, 120 bp, synthetic construct
  source 1..120: mol_type = other DNA
attggtctaaaattctcttttttggttgtgtctctgcccggctttggtaccaggatgatgacaaaattcaacaacccttcatgctaagaactcttaataaattaggtattgatgggacgt

SEQ ID NO: 98652 - DNA, 120 bp, synthetic construct
  source 1..120: mol_type = other DNA
aacaagaaatggggaaaggattccctatttaataaatggtgcccatgggaaaactggctagccatatgtagaaagctgaaactggatcccttccttacaccttatacaaaaattaattca

SEQ ID NO: 98653 - DNA, 120 bp, synthetic construct
  source 1..120: mol_type = other DNA
gatagctttaggagatatacttagtgctagatgacgagttaatgggtgcagcacaccagcatggcacatgtacacatatgtaactaacctgtacattgtgcacatgtaccctaaaacttt

SEQ ID NO: 98654 - DNA, 120 bp, synthetic construct; identical to SEQ ID NO: 13780
  source 1..120: mol_type = other DNA

SEQ ID NO: 98655 - DNA, 120 bp, synthetic construct; identical to SEQ ID NO: 27075
  source 1..120: mol_type = other DNA

SEQ ID NO: 98656 - DNA, 120 bp, synthetic construct; identical to SEQ ID NO: 27076
  source 1..120: mol_type = other DNA

SEQ ID NO: 98657 - DNA, 120 bp, synthetic construct; identical to SEQ ID NO: 27077
  source 1..120: mol_type = other DNA

SEQ ID NO: 98658 - DNA, 120 bp, synthetic construct; identical to SEQ ID NO: 27078
  source 1..120: mol_type = other DNA

SEQ ID NO: 98659 - DNA, 120 bp, synthetic construct
  source 1..120: mol_type = other DNA
cagagactcgggcaccaacgcccaggtcacctactcgctgctgccgccccaggacccgcacctgcccctcgcctccctggtctccatcaacgcagacaacggccacctgttcgccctcag

SEQ ID NO: 98660 - DNA, 120 bp, synthetic construct; identical to SEQ ID NO: 27073
  source 1..120: mol_type = other DNA

SEQ ID NO: 98661 - DNA, 120 bp, synthetic construct
  source 1..120: mol_type = other DNA
ggtggtgctggtcaaggacaatggcgagcctccgcgctcggccaccgccacgctgcatgtgctcctggtggacggcttctcccagccctacctgcctctcccggaggcggcaccggccca

SEQ ID NO: 98662 - DNA, 120 bp, synthetic construct; identical to SEQ ID NO: 27068
  source 1..120: mol_type = other DNA

SEQ ID NO: 98663 - DNA, 120 bp, synthetic construct
  source 1..120: mol_type = other DNA
gccaccgccacgctgcatgtgctcctggtggacggcttctcccagccctacctgcctctcccggaggcggcaccggcccaggcccaggccgacttgctcaccgtctacctggtggtggca

SEQ ID NO: 98664 - DNA, 120 bp, synthetic construct; identical to SEQ ID NO: 27069
  source 1..120: mol_type = other DNA

SEQ ID NO: 98665 - DNA, 120 bp, synthetic construct; identical to SEQ ID NO: 27070
  source 1..120: mol_type = other DNA

SEQ ID NO: 98666 - DNA, 120 bp, synthetic construct; identical to SEQ ID NO: 27071
  source 1..120: mol_type = other DNA

SEQ ID NO: 98667 - DNA, 120 bp, synthetic construct; identical to SEQ ID NO: 27072
  source 1..120: mol_type = other DNA

SEQ ID NO: 98668 - DNA, 120 bp, synthetic construct; identical to SEQ ID NO: 27070
  source 1..120: mol_type = other DNA

SEQ ID NO: 98669 - DNA, 120 bp, synthetic construct; identical to SEQ ID NO: 27074
  source 1..120: mol_type = other DNA

SEQ ID NO: 98670 - DNA, 120 bp, synthetic construct
  source 1..120: mol_type = other DNA
gaggagcagggcggcctcggtgggtcgctgctcggtgcccgagggtccttttccagggcatctggtggacgtgaggggcgctgagaccctgtcccagagctaccagtatgaggtgtgtct

SEQ ID NO: 98671 - DNA, 120 bp, synthetic construct
  source 1..120: mol_type = other DNA
ctaatgctatccctcccccctacctccaccccatgacaggccccagtgtgtgatgttccccatcctgtgtccaagtgttctcattgttcaattcccacctatgagtgagaacatgcagtg

SEQ ID NO: 98672 - DNA, 120 bp, synthetic construct
  source 1..120: mol_type = other DNA
gtcaattttggcttttgttgccattgcttttggtgttatagacatgaagtccttgcccatgcctatgtcctgaatggtattgcctaggttttcttgtagggtttttatggttataagtct

SEQ ID NO: 98673 - DNA, 120 bp, synthetic construct
  source 1..120: mol_type = other DNA
atactagtggttacaaaatgtataaactatttacatttttagaaatccaaagttggcccggcgcggtggctcacgcctgtaatcctagcactttgggaagccgaggtgggcagatcacga

SEQ ID NO: 98674 - DNA, 120 bp, synthetic construct
  source 1..120: mol_type = other DNA
tctccttccggactccgggtctttctcccctcgcggcccctctcccgagctcttcttgctccggactccgggtctttctccccgcgcggcccctctcccgagctcttcttgctccggact

SEQ ID NO: 98675 - DNA, 120 bp, synthetic construct
  source 1..120: mol_type = other DNA
ctccccgcgcggcccctctcccgagttcttctccttccggactccgggtctttctccccacggcctctctcccgagttctctctccagactcccggatcttcttcccgctcacattgtcc

SEQ ID NO: 98676 - DNA, 120 bp, synthetic construct; identical to SEQ ID NO: 25110
  source 1..120: mol_type = other DNA

SEQ ID NO: 98677 - DNA, 120 bp, synthetic construct; identical to SEQ ID NO: 25111
  source 1..120: mol_type = other DNA

SEQ ID NO: 98678 - DNA, 120 bp, synthetic construct; identical to SEQ ID NO: 25112
  source 1..120: mol_type = other DNA

SEQ ID NO: 98679 - DNA, 120 bp, synthetic construct; identical to SEQ ID NO: 25113
  source 1..120: mol_type = other DNA

SEQ ID NO: 98680 - DNA, 120 bp, synthetic construct
  source 1..120: mol_type = other DNA
gtgagaactgggtgtcggtgctgggaccctgtagacacttagtgtgagaactgggcgtgggtgctgggaccctctagacactgtgagtgtgagaactgggcgtcggtgctgggaccctgt

SEQ ID NO: 98681 - DNA, 120 bp, synthetic construct; identical to SEQ ID NO: 25114
  source 1..120: mol_type = other DNA

SEQ ID NO: 98682 - DNA, 120 bp, synthetic construct; identical to SEQ ID NO: 25115
  source 1..120: mol_type = other DNA

SEQ ID NO: 98683 - DNA, 120 bp, synthetic construct; identical to SEQ ID NO: 25116
  source 1..120: mol_type = other DNA

SEQ ID NO: 98684 - DNA, 120 bp, synthetic construct; identical to SEQ ID NO: 25117
  source 1..120: mol_type = other DNA

SEQ ID NO: 98685 - DNA, 120 bp, synthetic construct; identical to SEQ ID NO: 25118
  source 1..120: mol_type = other DNA

SEQ ID NO: 98686 - DNA, 120 bp, synthetic construct
  source 1..120: mol_type = other DNA
tctccccaaatgctaggattacaggtgtgagccaccacacccggccctcacagacttttctttacattatttggaaacattctagaaaagcctctgttcattggaaatcccacaaagacc

SEQ ID NO: 98687 - DNA, 120 bp, synthetic construct; identical to SEQ ID NO: 25119
  source 1..120: mol_type = other DNA

SEQ ID NO: 98688 - DNA, 120 bp, synthetic construct; identical to SEQ ID NO: 25120
  source 1..120: mol_type = other DNA

SEQ ID NO: 98689 - DNA, 120 bp, synthetic construct
  source 1..120: mol_type = other DNA
ctccgtggaggcgtgagcaggtgggcggggcccgggggtcgctgcagtgttagtgctctccgtggaggcgtgagcaggtgggcggggccccgggggtcgctgcagtgttagtgctcgccg

SEQ ID NO: 98690 - DNA, 120 bp, synthetic construct; identical to SEQ ID NO: 98689
  source 1..120: mol_type = other DNA

SEQ ID NO: 98691 - DNA, 120 bp, synthetic construct; identical to SEQ ID NO: 98689
  source 1..120: mol_type = other DNA

SEQ ID NO: 98692 - DNA, 120 bp, synthetic construct
  source 1..120: mol_type = other DNA
ccaaagtgctgggatttcaggcgtgagccaccgtgcccagccagggatactagattttatcacagtattatgaaaggtaagcttgtcatcgtaaagcttatagatactccttttatatgt

SEQ ID NO: 98693 - DNA, 120 bp, synthetic construct; identical to SEQ ID NO: 29662
  source 1..120: mol_type = other DNA

SEQ ID NO: 98694 - DNA, 120 bp, synthetic construct
  source 1..120: mol_type = other DNA
caaaatgtcatgagtcatctaaaatgaaatccaaatgtcagtacatatgtaaatctgacattagaataaaaactggctagccatatgtagaaagctgaaactggatcccttccttacacc

SEQ ID NO: 98695 - DNA, 120 bp, synthetic construct
  source 1..120: mol_type = other DNA
ttctcactcacagatgggaattgaacaatgagaacacatggacacagggcggggaacatcacacactggggcctgttgtggggtgagggaaggggggagggatagcattaggagatatac

SEQ ID NO: 98696 - DNA, 120 bp, synthetic construct; identical to SEQ ID NO: 29663
  source 1..120: mol_type = other DNA

SEQ ID NO: 98697 - DNA, 120 bp, synthetic construct
  source 1..120: mol_type = other DNA
tctctgagattaaatatcaagaatatatcaatagaaactccaaaaccaaaaagcagagaatgaagactgaaaaaaaaaaacaacagaatagaatattccagaattgtgggatacctatta

SEQ ID NO: 98698 - DNA, 120 bp, synthetic construct
  source 1..120: mol_type = other DNA
tcgctgattgctagcacggcagtctgagatcagactgcaatgcagcagccaggctgggggaggggcgcccgccattgcccaggcttgattaggtaaacaaagcagccaggaagctcgaac

SEQ ID NO: 98699 - DNA, 120 bp, synthetic construct
  source 1..120: mol_type = other DNA
gctgagagaagaaggcttcagacgatcaaattactctgagctacgggaggatattcaaaccaaaggcaaagaagttgaaaactttgaaaaaaatttagaagaatgtagaattagaataac

SEQ ID NO: 98700 - DNA, 120 bp, synthetic construct
  source 1..120: mol_type = other DNA
gatggaggaagatccaccaagcaaatggaaaacaaaaaaaggcaggggttgcaatcccagtctctgataaaacagactttaaaccaacaaagatcaaaagagacaaagaaggccattaca

SEQ ID NO: 98701 - DNA, 120 bp, synthetic construct
  source 1..120: mol_type = other DNA
aaagaaaaaaagagagaagaatcaaatagacgcaataaaaaatgaaaaaggggatatcaccaccgatcccacagaaatacaaactaccatcagagaatactacaaacacctctacgcaaa

SEQ ID NO: 98702 - DNA, 120 bp, synthetic construct
  source 1..120: mol_type = other DNA
caaaatcaatgtacaaaaatcacaagcattcttatacaccaacaacagacaaacagagagccaaatcatgagtgaactcccattcacaattgcttcaaggagaataaaatacctaggaat

SEQ ID NO: 98703 - DNA, 120 bp, synthetic construct
  source 1..120: mol_type = other DNA
aggacatgagcagacacttctcaaaagaagacatttatgcagcaaaaaaacacatgaaaaaatgctcatcatcactggccatcagagaaatgcaaatcaaaaccacaatgagataccatc

SEQ ID NO: 98704 - DNA, 120 bp, synthetic construct; identical to SEQ ID NO: 29664
  source 1..120: mol_type = other DNA

SEQ ID NO: 98705 - DNA, 120 bp, synthetic construct
  source 1..120: mol_type = other DNA
gagattgcagcctctgcccggccgccaccccgtctaggaagtgaggagcctctctgcccggccgcccattgtctgggatgtgaggagtgcctctgcccggccgccaccccatctgagaag

SEQ ID NO: 98706 - DNA, 120 bp, synthetic construct; identical to SEQ ID NO: 31373
  source 1..120: mol_type = other DNA

SEQ ID NO: 98707 - DNA, 120 bp, synthetic construct
  source 1..120: mol_type = other DNA
cataaatgtcttcttttgagaagtgtctgttcatgtccttcgcccactttttgacctttcaactctcctactagagttgttagcacttctgaggccttggcacttgctaatacttctgcc

SEQ ID NO: 98708 - DNA, 120 bp, synthetic construct; identical to SEQ ID NO: 28402
  source 1..120: mol_type = other DNA

SEQ ID NO: 98709 - DNA, 120 bp, synthetic construct
  source 1..120: mol_type = other DNA
gcaatccacccacctcggcctcccaaagactgggattacaggctatgaaccactgctcctagtgtaactctctcttttgctgaagtattttaaagcaaatcccaaacatacataatatta

SEQ ID NO: 98710 - DNA, 120 bp, synthetic construct
  source 1..120: mol_type = other DNA
gtgtccctgggtacttgagattagggagtggtgatgactcttaacgagcacgctgccttcaagcatctgtttaacaaagcacatcttgcaccgcccttaatccatttaaccctgagtgga

SEQ ID NO: 98711 - DNA, 120 bp, synthetic construct
  source 1..120: mol_type = other DNA
agtgagcgagactctgtctgcaatcctggcacctcgggaggccgaggctggtggatcactccggttaggagctggagaccagcccggccaacacagcgaaaccccgtctccaccaaaaaa

SEQ ID NO: 98712 - DNA, 120 bp, synthetic construct; identical to SEQ ID NO: 22765
  source 1..120: mol_type = other DNA

SEQ ID NO: 98713 - DNA, 120 bp, synthetic construct; identical to SEQ ID NO: 22766
  source 1..120: mol_type = other DNA

SEQ ID NO: 98714 - DNA, 120 bp, synthetic construct; identical to SEQ ID NO: 23391
  source 1..120: mol_type = other DNA

SEQ ID NO: 98715 - DNA, 120 bp, synthetic construct; identical to SEQ ID NO: 23392
  source 1..120: mol_type = other DNA

SEQ ID NO: 98716 - DNA, 120 bp, synthetic construct; identical to SEQ ID NO: 23393
  source 1..120: mol_type = other DNA

SEQ ID NO: 98717 - DNA, 120 bp, synthetic construct; identical to SEQ ID NO: 23394
  source 1..120: mol_type = other DNA

SEQ ID NO: 98718 - DNA, 120 bp, synthetic construct; identical to SEQ ID NO: 23395
  source 1..120: mol_type = other DNA

SEQ ID NO: 98719 - DNA, 120 bp, synthetic construct; identical to SEQ ID NO: 23396
  source 1..120: mol_type = other DNA

SEQ ID NO: 98720 - DNA, 120 bp, synthetic construct
  source 1..120: mol_type = other DNA
gttgctgagaagtattccattctttttttttctttttctttttttttttttttttgagttggagtctcatgcagttgcccaggctggagtgcagtggcgcgatctcagctcactgcaagc

SEQ ID NO: 98721 - DNA, 120 bp, synthetic construct; identical to SEQ ID NO: 23397
  source 1..120: mol_type = other DNA

SEQ ID NO: 98722 - DNA, 120 bp, synthetic construct; identical to SEQ ID NO: 23398
  source 1..120: mol_type = other DNA

SEQ ID NO: 98723 - DNA, 120 bp, synthetic construct; identical to SEQ ID NO: 23399
  source 1..120: mol_type = other DNA

SEQ ID NO: 98724 - DNA, 120 bp, synthetic construct; identical to SEQ ID NO: 4957
  source 1..120: mol_type = other DNA

SEQ ID NO: 98725 - DNA, 120 bp, synthetic construct
  source 1..120: mol_type = other DNA
ctcagcctcccaaggtgctgggattacagtgtgagccacagcgcctggcctcaaatttttatacaatataaaacgtcaaggagatgtttctgttagtgtttcctatggaaaacaacctaa

SEQ ID NO: 98726 - DNA, 120 bp, synthetic construct; identical to SEQ ID NO: 23401
  source 1..120: mol_type = other DNA

SEQ ID NO: 98727 - DNA, 120 bp, synthetic construct
  source 1..120: mol_type = other DNA
acatatttgagtgtctaccatgtactagacactttctgagattgcttctgacttccttatctcaattaatggcagtcccactcttcccaaaccagaaggtgctgagctgttcttaatcag

SEQ ID NO: 98728 - DNA, 120 bp, synthetic construct; identical to SEQ ID NO: 14448
  source 1..120: mol_type = other DNA

SEQ ID NO: 98729 - DNA, 120 bp, synthetic construct; identical to SEQ ID NO: 14449
  source 1..120: mol_type = other DNA

SEQ ID NO: 98730 - DNA, 120 bp, synthetic construct
  source 1..120: mol_type = other DNA
agtgccgcagtaaacatacgtgtgcatgtgtctttatagcagcatgatttatagtcctttgggtatatacccagtaatggaatggctgggtcaaatggtatttctagttctagatccctg

SEQ ID NO: 98731 - DNA, 120 bp, synthetic construct
  source 1..120: mol_type = other DNA
ggaaataaagggtattcaattaggaaaagaggaagtcaaattgtccctgtttgcaggtgatatgattgtatatctagaaaaccccattgtctcagcccaaaatctccttaagctgataag

SEQ ID NO: 98732 - DNA, 120 bp, synthetic construct; identical to SEQ ID NO: 14450
  source 1..120: mol_type = other DNA

SEQ ID NO: 98733 - DNA, 120 bp, synthetic construct; identical to SEQ ID NO: 14451
  source 1..120: mol_type = other DNA

SEQ ID NO: 98734 - DNA, 120 bp, synthetic construct
  source 1..120: mol_type = other DNA
agcatttctcctgccccagtctcccaaagtgctagaattacagatgtgagctacttcacccagcctgtatatgtttagatacacaagtatttgccattgtgttacagttgcctacagtat

SEQ ID NO: 98735 - DNA, 120 bp, synthetic construct
  source 1..120: mol_type = other DNA
gcttccagtttttgcccattcagtatgatattggctgtgggtttgtcatagatagctcttattattttgaaatatgtcccatcaatacctaatttattgagagattttagcatgaagggt

SEQ ID NO: 98736 - DNA, 120 bp, synthetic construct
  source 1..120: mol_type = other DNA
aaacaaacaaccccatcaaaaagtgggcgaaggacatgaacagacacttctcaaaagaggacatttatgcagccaaaaaacacatgaaaaaatgctcaccatcactggccatcagagaaa

SEQ ID NO: 98737 - DNA, 120 bp, synthetic construct; identical to SEQ ID NO: 14452
  source 1..120: mol_type = other DNA

SEQ ID NO: 98738 - DNA, 120 bp, synthetic construct; identical to SEQ ID NO: 14453
  source 1..120: mol_type = other DNA

SEQ ID NO: 98739 - DNA, 120 bp, synthetic construct; identical to SEQ ID NO: 9453
  source 1..120: mol_type = other DNA

SEQ ID NO: 98740 - DNA, 120 bp, synthetic construct; identical to SEQ ID NO: 9454
  source 1..120: mol_type = other DNA

SEQ ID NO: 98741 - DNA, 120 bp, synthetic construct; identical to SEQ ID NO: 9455
  source 1..120: mol_type = other DNA

SEQ ID NO: 98742 - DNA, 120 bp, synthetic construct
  source 1..120: mol_type = other DNA
tttttaatgattgccattctaactggtgtgagacggtatctcattgtggttttgatttgcatttctctgatggccagtgatggtgagcattttttcatgtgttttttggctgcataaatg

SEQ ID NO: 98743 - DNA, 120 bp, synthetic construct; identical to SEQ ID NO: 14372
  source 1..120: mol_type = other DNA

SEQ ID NO: 98744 - DNA, 120 bp, synthetic construct; identical to SEQ ID NO: 14373
  source 1..120: mol_type = other DNA

SEQ ID NO: 98745 - DNA, 120 bp, synthetic construct; identical to SEQ ID NO: 8901
  source 1..120: mol_type = other DNA

SEQ ID NO: 98746 - DNA, 120 bp, synthetic construct
  source 1..120: mol_type = other DNA
gggggctgatccccacctccctcccggacggggcagctggccaggagggggctgacccccacctccctcccggacggggtggctgccgggcagagatgctcctcacttcccagacggggt

SEQ ID NO: 98747 - DNA, 120 bp, synthetic construct; identical to SEQ ID NO: 26916
  source 1..120: mol_type = other DNA

SEQ ID NO: 98748 - DNA, 120 bp, synthetic construct; identical to SEQ ID NO: 22383
  source 1..120: mol_type = other DNA

SEQ ID NO: 98749 - DNA, 120 bp, synthetic construct
  source 1..120: mol_type = other DNA
aaaagccaaaattgacaaatgggatctaattaaactaaagagcttctgcacagcaaaagaaattaccatcagagtgaacaggcaacctacagaatgggagaaaatttttgcaacctactc

SEQ ID NO: 98750 - DNA, 120 bp, synthetic construct; identical to SEQ ID NO: 4819
  source 1..120: mol_type = other DNA

SEQ ID NO: 98751 - DNA, 120 bp, synthetic construct
  source 1..120: mol_type = other DNA
cttgaaacctaatcctttgctctgccttcctggtgagactttatgaatgggagcctcattcaaaatagcattaggagatatacctaatgttaaatgacgagttaatgggtgcagcacacc

SEQ ID NO: 98752 - DNA, 120 bp, synthetic construct; identical to SEQ ID NO: 22385
  source 1..120: mol_type = other DNA

SEQ ID NO: 98753 - DNA, 120 bp, synthetic construct; identical to SEQ ID NO: 22386
  source 1..120: mol_type = other DNA

SEQ ID NO: 98754 - DNA, 120 bp, synthetic construct; identical to SEQ ID NO: 22387
  source 1..120: mol_type = other DNA

SEQ ID NO: 98755 - DNA, 120 bp, synthetic construct; identical to SEQ ID NO: 22388
  source 1..120: mol_type = other DNA

SEQ ID NO: 98756 - DNA, 120 bp, synthetic construct; identical to SEQ ID NO: 32643
  source 1..120: mol_type = other DNA

SEQ ID NO: 98757 - DNA, 120 bp, synthetic construct; identical to SEQ ID NO: 32644
  source 1..120: mol_type = other DNA

SEQ ID NO: 98758 - DNA, 120 bp, synthetic construct; identical to SEQ ID NO: 32645
  source 1..120: mol_type = other DNA

SEQ ID NO: 98759 - DNA, 120 bp, synthetic construct; identical to SEQ ID NO: 32646
  source 1..120: mol_type = other DNA

SEQ ID NO: 98760 - DNA, 120 bp, synthetic construct
  source 1..120: mol_type = other DNA
atgaaattttttgttaactattattttaagttcaggggtacttgtgcaggatgtgcagctttgttacgtaggtaaacgtgtgccatccatgtcggctcactgcacagatcatcccttcac

SEQ ID NO: 98761 - DNA, 120 bp, synthetic construct; identical to SEQ ID NO: 32639
  source 1..120: mol_type = other DNA

SEQ ID NO: 98762 - DNA, 120 bp, synthetic construct; identical to SEQ ID NO: 32640
  source 1..120: mol_type = other DNA

SEQ ID NO: 98763 - DNA, 120 bp, synthetic construct
  source 1..120: mol_type = other DNA
aatgagctgttgggcacacctcccagacggggtggtggccgggcagaggggctcctcacttcccagtaggggcagctgggcagaggcgcccctcacctcccagacggggcgcctggccgg

SEQ ID NO: 98764 - DNA, 120 bp, synthetic construct
  source 1..120: mol_type = other DNA
cctgacttggcctcccaaagtgttgggattacaggcatgggccactgcatctggccaggatttcattctgttttatggctaatattccattgtgtacatataccacattttcttattcat

SEQ ID NO: 98765 - DNA, 120 bp, synthetic construct
  source 1..120: mol_type = other DNA
gtcatctgcaaacagggacaatttgacttcctcttttcctaattgaataccctttatttccttctcctgcctaactgacctggccagaacttccaacactatgttgaataggagtggtga

SEQ ID NO: 98766 - DNA, 120 bp, synthetic construct
  source 1..120: mol_type = other DNA
agacaaaattgacaaatgggatctaattaaactaaagagcttctgcacagcaaaagaaactaccatcagagtgaacaggcaacctacaaaatgggaggaaattttcgcaacctgctcatc

SEQ ID NO: 98767 - DNA, 120 bp, synthetic construct; identical to SEQ ID NO: 2231
  source 1..120: mol_type = other DNA

SEQ ID NO: 98768 - DNA, 120 bp, synthetic construct
  source 1..120: mol_type = other DNA
tgatgatgagcattttttcacatgttttttggctgcataaatgtcttcttttgagaagtgtctgttcatgtccttcgcccactttttgatggggttgtttgtttttttcttgtaaatttg

SEQ ID NO: 98769 - DNA, 120 bp, synthetic construct
  source 1..120: mol_type = other DNA
ccagcctgagtgacagagccagactctgtctcaaaaaaacaataaccaaacaaaaagataggctgaaatctaggtctctggcaccaaacagccaagttgtgaatgcaaagcaaaagttct

SEQ ID NO: 98770 - DNA, 120 bp, synthetic construct; identical to SEQ ID NO: 32647
  source 1..120: mol_type = other DNA

SEQ ID NO: 98771 - DNA, 120 bp, synthetic construct
  source 1..120: mol_type = other DNA
aacctccgcctccttggttcaagcgattctcctgcctcagcctcctgtaagactgggattacaggcacacactaccacgtccaactaatttttgcatttttttttttttttttttttagt

SEQ ID NO: 98772 - DNA, 120 bp, synthetic construct; identical to SEQ ID NO: 15695
  source 1..120: mol_type = other DNA

SEQ ID NO: 98773 - DNA, 120 bp, synthetic construct; identical to SEQ ID NO: 15696
  source 1..120: mol_type = other DNA

SEQ ID NO: 98774 - DNA, 120 bp, synthetic construct; identical to SEQ ID NO: 15697
  source 1..120: mol_type = other DNA

SEQ ID NO: 98775 - DNA, 120 bp, synthetic construct; identical to SEQ ID NO: 15698
  source 1..120: mol_type = other DNA

SEQ ID NO: 98776 - DNA, 120 bp, synthetic construct
  source 1..120: mol_type = other DNA
agtaagcattcaacgtgtgtgtttgctgctagtttgaccccactgagcctcagttttcccatctgtaaaaatggaggtagtatcaatattgtgaaaatggccatactgcccaaggtaatt

SEQ ID NO: 98777 - DNA, 120 bp, synthetic construct
  source 1..120: mol_type = other DNA
ggtcatcagagaaatccaaaacaaaaccacaatgagatatcatctcacaccagttagaatggcaatcattaaaaagtcaggaaacaacaggtgctggagaggatgtggagaaataggaac

SEQ ID NO: 98778 - DNA, 120 bp, synthetic construct
  source 1..120: mol_type = other DNA
tttttggattattcatgccattgcctttatttatttatttatttatttattttgagatggcgtctcgctctgttgcccaggttggaggacagtggcgccatttcggctcactgcaacctc

SEQ ID NO: 98779 - DNA, 120 bp, synthetic construct; identical to SEQ ID NO: 15699
  source 1..120: mol_type = other DNA

SEQ ID NO: 98780 - DNA, 120 bp, synthetic construct
  source 1..120: mol_type = other DNA
gaaagttttgggcgcgcggggccggccgcactcacctggcccaagttgaggtacccgtgcgccgccgccacgcggtccgcctcggccgggccgcccagcacttgcaccgcccagtggttg

SEQ ID NO: 98781 - DNA, 120 bp, synthetic construct
  source 1..120: mol_type = other DNA
ttccaccgctgcgccaaggtgcgggtgtagggatgggaggccggggcgaacccgcagccgggacggtgcggtgctgtttcctctcgggcctcagtttccccccatgtaagagaggaagtg

SEQ ID NO: 98782 - DNA, 120 bp, synthetic construct
  source 1..120: mol_type = other DNA
cttggagtcagatgtggggttgaatcttggcttcctctcactagctgtggtgcttgacaagtcacttatccttgagcctccattgcctaatctttaaaagggaggtgacaatcgtcccta

SEQ ID NO: 98783 - DNA, 120 bp, synthetic construct
  source 1..120: mol_type = other DNA
aggtaccatgaacaaagatacagagctgggaaaaccagaggtggaagataaggagcacatgtccacagttctttttcttttttttttgagatggagtttcgctcttgttgcccaggctgg

SEQ ID NO: 98784 - DNA, 120 bp, synthetic construct
  source 1..120: mol_type = other DNA
tgataatgagtaagttctcccgctatgatttcccttgaaggctgattattaaaaagagcttggcacctccctctcttctctcttgcttcttctcttgccatgtgattgatctctgcacat

SEQ ID NO: 98785 - DNA, 120 bp, synthetic construct
  source 1..120: mol_type = other DNA
tactatactctgttgtgtctcttttgttgtaatttgtaagtaggggtgagataaagtacacctagggtttgctgggtttcttccatgtcatcatgttcctccttgcatggggccaggatc

SEQ ID NO: 98786 - DNA, 120 bp, synthetic construct
  source 1..120: mol_type = other DNA
cctagtgcttcaaatcttaaaaaaacgtttttatttgtgcttctgcaccaccttctagcccacctcgtttcctggcctctaacttgatgagagcgtgtgtcattttcacactgattctcc

SEQ ID NO: 98787 - DNA, 120 bp, synthetic construct
  source 1..120: mol_type = other DNA
tataataattggaacattcatttaaggactaaatgaggtcgtgaagcattcagcagatgctaggtacggaaactcgctgaagtgggggcaggttaagaagcctctggggatacgaaggca

SEQ ID NO: 98788 - DNA, 120 bp, synthetic construct
  source 1..120: mol_type = other DNA
tttgctgctgtccaaatggcttaagcagagtcccccggcctctctggcttctgcaggccttgaagttgccccatgtcgactacatcgaggaggactcctctgtctttgcccagagcatcc

SEQ ID NO: 98789 - DNA, 120 bp, synthetic construct
  source 1..120: mol_type = other DNA
cagctttcaccccttaccggttctcgtgggatcttgggaagccactttcttctatgagctttgtcgttcttgtctgtaaaatgggcacataaccctgtccctgtccttctcacaggttgc

SEQ ID NO: 98790 - DNA, 120 bp, synthetic construct
  source 1..120: mol_type = other DNA
tttcttccccataggatgcccatggattgccccccttcccgcttcccccgagtgtctgtgggaggtggcaggaatggcaggcaggggtgtggaaccccttctggagtcatatcaagggct

SEQ ID NO: 98791 - DNA, 120 bp, synthetic construct
  source 1..120: mol_type = other DNA
tgggtggcctccaggtcagatgtgaaaggaagaacttggccacagtctgagcttctcaggcgtatggcagggctgcctggtgagagggaatgagctccctgctctggaggtatgcaagca

SEQ ID NO: 98792 - DNA, 120 bp, synthetic construct
  source 1..120: mol_type = other DNA
tagatgcctattgatgagtgaaagctcctaacacactcagagagcaaggactccgcctcatcccacagcctgggaggagaggcagactgccaaggacctgctcagcatgctacagaagaa

SEQ ID NO: 98793 - DNA, 120 bp, synthetic construct
  source 1..120: mol_type = other DNA
gactctgctagcagcaacctgcctgaagtcttcctttggcctggctgagagtttctgagacctgcgctggagcggaggtgcttccttccttgcttcctttcttcctctctcccttctcca

SEQ ID NO: 98794 - DNA, 120 bp, synthetic construct
  source 1..120: mol_type = other DNA
atgctcattccctcctctcccacaaatgtcgccttggaaagacggaggcagcctggtggaggtgtatctcctagacaccagcatacagagtgaccaccgggaaatcgagggcagggtcat

SEQ ID NO: 98795 - DNA, 120 bp, synthetic construct
  source 1..120: mol_type = other DNA
acagagaagagggagggttctctcccttactgacttccttctgtggccagacattgagcaaggcctctgtacagcatgtcctggggctggccttgccgtagctgctaaatagttgacgaa

SEQ ID NO: 98796 - DNA, 120 bp, synthetic construct
  source 1..120: mol_type = other DNA
caggaggtggaggttgcagtgagctgagatcgtgccactgcaatccagcctgagtgatagagcgagattccatctcaaaaataaataagtaaataactagcagctgtaaatgtggctgtt

SEQ ID NO: 98797 - DNA, 120 bp, synthetic construct
  source 1..120: mol_type = other DNA
gagtcttttaattctttagacaatcctgggagcaactgtccctgtttcacagagggcggggccacacagctggtgagtgggcagccaagactctgttcaagtttgtgtgggtccaacact

SEQ ID NO: 98798 - DNA, 120 bp, synthetic construct
  source 1..120: mol_type = other DNA
ggcacgttcctggaggccgaacccttctggctttggaaggagtcgtcagagacccccgccatgcgggaggctggggaggaaggggctcgaaacctccatcatcgcagagtctgaatagca

SEQ ID NO: 98799 - DNA, 120 bp, synthetic construct
  source 1..120: mol_type = other DNA
cagattttccttaggaggggacatttgagtgggacccaaacaggtgtatagcagttgtccagcccagctggcaaggcctgagtctgcctctgcaacccctctcttgggctcctttctctg

SEQ ID NO: 98800 - DNA, 120 bp, synthetic construct
  source 1..120: mol_type = other DNA
tctcccttctcccttgtctgtgtaaggaggatgacgccaccttaaataggattaaatgagaatggggctctgaaagggctgtgcaatattttcataacgtgtttttatagagacagttga

SEQ ID NO: 98801 - DNA, 120 bp, synthetic construct
  source 1..120: mol_type = other DNA
ctggatccttgctttggcctcctggatttctctctatctccattttgaaaccactctgtgtttggaagaacttttgagtattcagagctgcccactggcagaacagtcttccttgggcag

SEQ ID NO: 98802 - DNA, 120 bp, synthetic construct
  source 1..120: mol_type = other DNA
cgttgctttaaaatccagcctctggtataggcaactattgacgggctaccctgtgtcgaaaacatgcccaggcaggtagcaggaagtcacagatggggacctcttggggcatcaagggat

SEQ ID NO: 98803 - DNA, 120 bp, synthetic construct
  source 1..120: mol_type = other DNA
cagagttgagaacacaggagtcctggtgctcaggccagcatctctttttttctttgagttgtttctaggtttcctagctcttgcctcagaccttaaagagagagggtctgatggggatgg

SEQ ID NO: 98804 - DNA, 120 bp, synthetic construct
  source 1..120: mol_type = other DNA
ctagaaacctgagtgtataactctccttaaaagccagtaggagctcctcaaaaggcagccctaaggagtccactcttaaatgaactcagagtcagttttaaaatgcaagtctgtgttgat

SEQ ID NO: 98805 - DNA, 120 bp, synthetic construct
  source 1..120: mol_type = other DNA
tcagtttcagagggatgagtttggcactggcatggtaggcatctgtctatctccacggccctcaaaccaggcatgaagcaggagctcacgtgtttggtcagccatggtgcagaaccgcct

SEQ ID NO: 98806 - DNA, 120 bp, synthetic construct
  source 1..120: mol_type = other DNA
aaacatcgttggggggtgagtgtgaaaggtgctgatggccctcatctccagctaactgtggagaagcccctgggggctccctgattaatggaggcttagctttctggatggcatctagcc

SEQ ID NO: 98807 - DNA, 120 bp, synthetic construct; identical to SEQ ID NO: 18299
  source 1..120: mol_type = other DNA

SEQ ID NO: 98808 - DNA, 120 bp, synthetic construct; identical to SEQ ID NO: 18300
  source 1..120: mol_type = other DNA

SEQ ID NO: 98809 - DNA, 120 bp, synthetic construct; identical to SEQ ID NO: 18301
  source 1..120: mol_type = other DNA

SEQ ID NO: 98810 - DNA, 120 bp, synthetic construct
  source 1..120: mol_type = other DNA
tcaaccagcggggctgaagtgatcctcatgcctcagcttcctgaatagctgggactacaggcatgcctcaccatgcctggctaatttttttttttttttttttctgtaagtattttattt

SEQ ID NO: 98811 - DNA, 120 bp, synthetic construct
  source 1..120: mol_type = other DNA
atataggagcctggctaatttttaatttttttttttttttttttgagagggagtttcactctgtcaccaaggctagagtgcagtggcacgatctcggctcactgcaacctctacctccca

SEQ ID NO: 98812 - DNA, 120 bp, synthetic construct; identical to SEQ ID NO: 25026
  source 1..120: mol_type = other DNA

SEQ ID NO: 98813 - DNA, 120 bp, synthetic construct
  source 1..120: mol_type = other DNA
tggccgcccatcgtctgggatgtgaggagcccctctgcccggctgcccagtctgggaagtgaggagcgcctcctccccgccgccatcccgtctaggaagtgaggagcgtctctgcccggc

SEQ ID NO: 98814 - DNA, 120 bp, synthetic construct; identical to SEQ ID NO: 25027
  source 1..120: mol_type = other DNA

SEQ ID NO: 98815 - DNA, 120 bp, synthetic construct; identical to SEQ ID NO: 25028
  source 1..120: mol_type = other DNA

SEQ ID NO: 98816 - DNA, 120 bp, synthetic construct; identical to SEQ ID NO: 25029
  source 1..120: mol_type = other DNA

SEQ ID NO: 98817 - DNA, 120 bp, synthetic construct; identical to SEQ ID NO: 25030
  source 1..120: mol_type = other DNA

SEQ ID NO: 98818 - DNA, 120 bp, synthetic construct
  source 1..120: mol_type = other DNA
aacacctgacctcgtgatccacctgcctcgtcctccaaaagtgctgaaattacaggcgtgagccatggcgcctagccaatttttgtatttttagtagagacagggttttgtcatgttggc

SEQ ID NO: 98819 - DNA, 120 bp, synthetic construct
  source 1..120: mol_type = other DNA
tacaaacttcctttttgaaaaggaaagtagaaaatcagaaccgagattccctttaagaaaagtcagtttagggccgggtacagtggctcatgcctgtaatcccagcactttgggaagcta

SEQ ID NO: 98820 - DNA, 120 bp, synthetic construct
  source 1..120: mol_type = other DNA
acatcgagcagatatatacagatatatagtaagttctacttccctttcctttccctagaaaggtagaggccctttcagtttgggcctgatgctcaccctttaactttaggtcaagtctgt

SEQ ID NO: 98821 - DNA, 120 bp, synthetic construct
  source 1..120: mol_type = other DNA
aaacaagagcacagtttaaaaattatcttaaatatcttttaaaaacacattttccaggctgggctcagtagctcacgcttgtaatcccagctcgttgggaggcagaggcaggcagatcgc

SEQ ID NO: 98822 - DNA, 120 bp, synthetic construct
  source 1..120: mol_type = other DNA
cctgggagcttgagcaggcaattctctgctcactgaagtttgtgaactatgtgtcatggaaataggggctttagaagtcagacaaacctaatttcaactcccagcttaatcagttaatat

SEQ ID NO: 98823 - DNA, 120 bp, synthetic construct; identical to SEQ ID NO: 9114
  source 1..120: mol_type = other DNA

SEQ ID NO: 98824 - DNA, 120 bp, synthetic construct
  source 1..120: mol_type = other DNA
gcaggagaatcgcttgaacctgggaggcgcaggttgcagtgagccgacatctcgccactgcactccagcctgggggacagaatgagactccaactcaaaaaaagaaaaaaagaaaaagaa

SEQ ID NO: 98825 - DNA, 120 bp, synthetic construct; identical to SEQ ID NO: 19696
  source 1..120: mol_type = other DNA

SEQ ID NO: 98826 - DNA, 120 bp, synthetic construct; identical to SEQ ID NO: 26077
  source 1..120: mol_type = other DNA

SEQ ID NO: 98827 - DNA, 120 bp, synthetic construct
  source 1..120: mol_type = other DNA
agccccccgagtagctgggactacaggcacacgccgccatgcctggctaattttttgtatttttagtagagatggggtttcaccatattagccaggatggtctcgatctcctcacctggt

SEQ ID NO: 98828 - DNA, 120 bp, synthetic construct; identical to SEQ ID NO: 26078
  source 1..120: mol_type = other DNA

SEQ ID NO: 98829 - DNA, 120 bp, synthetic construct
  source 1..120: mol_type = other DNA
cacctgcctttgtgggaagagcacagcttctctgcataactgctggagggtgggtcgtccagtgctgctgtgtgtgtatgcctcaggttcaggtgcacctgcctttgtgggaagagcaca

SEQ ID NO: 98830 - DNA, 120 bp, synthetic construct
  source 1..120: mol_type = other DNA
ggtgcacctgcctttgtggggagagcacagcttccctgcataactgctggagggcggatcattgagtgctgctctgtgtgtatgcctcaggttcaggtgcacctgcctttgtgggaagag

SEQ ID NO: 98831 - DNA, 120 bp, synthetic construct; identical to SEQ ID NO: 26082
  source 1..120: mol_type = other DNA

SEQ ID NO: 98832 - DNA, 120 bp, synthetic construct; identical to SEQ ID NO: 26083
  source 1..120: mol_type = other DNA

SEQ ID NO: 98833 - DNA, 120 bp, synthetic construct; identical to SEQ ID NO: 26073
  source 1..120: mol_type = other DNA

SEQ ID NO: 98834 - DNA, 120 bp, synthetic construct; identical to SEQ ID NO: 26074
  source 1..120: mol_type = other DNA

SEQ ID NO: 98835 - DNA, 120 bp, synthetic construct; identical to SEQ ID NO: 26075
  source 1..120: mol_type = other DNA

SEQ ID NO: 98836 - DNA, 120 bp, synthetic construct; identical to SEQ ID NO: 26076
  source 1..120: mol_type = other DNA

SEQ ID NO: 98837 - DNA, 120 bp, synthetic construct; identical to SEQ ID NO: 26084
  source 1..120: mol_type = other DNA

SEQ ID NO: 98838 - DNA, 120 bp, synthetic construct; identical to SEQ ID NO: 26085
  source 1..120: mol_type = other DNA

SEQ ID NO: 98839 - DNA, 120 bp, synthetic construct; identical to SEQ ID NO: 26063
  source 1..120: mol_type = other DNA

SEQ ID NO: 98840 - DNA, 120 bp, synthetic construct; identical to SEQ ID NO: 26064
  source 1..120: mol_type = other DNA

SEQ ID NO: 98841 - DNA, 120 bp, synthetic construct; identical to SEQ ID NO: 26065
  source 1..120: mol_type = other DNA

SEQ ID NO: 98842 - DNA, 120 bp, synthetic construct
  source 1..120: mol_type = other DNA
tccttcttctctctgaatttctttattttaagaaaaaaattagagatggagtctcactgtcttgctcaggctggtctcaaactcctaggctcaagtgatcctcctgcctcagcctatact

SEQ ID NO: 98843 - DNA, 120 bp, synthetic construct
  source 1..120: mol_type = other DNA
ctgagatagcgccactgcactccagcctggggggcagtgagactccatctcaaaaaaaaaaaaaaaaaagaatagaataacccttgtttaggtgttaacaaaatccaggccagacaaatc

SEQ ID NO: 98844 - DNA, 120 bp, synthetic construct; identical to SEQ ID NO: 26066
  source 1..120: mol_type = other DNA

SEQ ID NO: 98845 - DNA, 120 bp, synthetic construct; identical to SEQ ID NO: 26067
  source 1..120: mol_type = other DNA

SEQ ID NO: 98846 - DNA, 120 bp, synthetic construct; identical to SEQ ID NO: 26068
  source 1..120: mol_type = other DNA

SEQ ID NO: 98847 - DNA, 120 bp, synthetic construct
  source 1..120: mol_type = other DNA
gattgagggtcgtgcagctggagaaccagacaggagctgatgttatagattgagcattgtgcagctgaagactcggggatgagctgatgttgttcgctttgagggtctttcagctgaaga

SEQ ID NO: 98848 - DNA, 120 bp, synthetic construct; identical to SEQ ID NO: 26071
  source 1..120: mol_type = other DNA

SEQ ID NO: 98849 - DNA, 120 bp, synthetic construct; identical to SEQ ID NO: 26072
  source 1..120: mol_type = other DNA

SEQ ID NO: 98850 - DNA, 120 bp, synthetic construct
  source 1..120: mol_type = other DNA
cttataaatgcaaatagactaaacagtacattaaaaagcagtgatttcagacttaaatgtccctgtctgacagctctgaagagagcagtggttctcccagcacgtagctggagatctgag

SEQ ID NO: 98851 - DNA, 120 bp, synthetic construct
  source 1..120: mol_type = other DNA
tccccaacctagcaaggcaggccaacgttcaggttcaggaaatacagagaacgccacaaagatactcctcgagaagagcaactccaagacacataattgtcagattcaccaaagttgaaa

SEQ ID NO: 98852 - DNA, 120 bp, synthetic construct
  source 1..120: mol_type = other DNA
catctacagaactctccaccccaaatcaacagaatatacatttttttcagcacgacaccacacctattccaaaattgaccacatacttggaagtaaagctctcctcagcaaatgtaaaag

SEQ ID NO: 98853 - DNA, 120 bp, synthetic construct
  source 1..120: mol_type = other DNA
tctaccagagtacaaggaggaactggtaccattccttctgaaactattccaatcaatagaaaaagagggaatcctccctaactcattttatgaggccagcatcatcctgataccaaagcc

SEQ ID NO: 98854 - DNA, 120 bp, synthetic construct
  source 1..120: mol_type = other DNA
aatccaacttacaagggacgtgaaggacctcttcaaggagaacgacaaaccactgctcaatgaaataaaagaggatacacacaaatggaagaacattccatgctcatgggtaggaagaat

SEQ ID NO: 98855 - DNA, 120 bp, synthetic construct
  source 1..120: mol_type = other DNA
tctcaaaagaagacatttatgcagccaaaagacacatgaaaaaatgctcatcatgactggccatcagagaaatgcaaatcaaaaccacaatgagataccatctcacaccagttagaatgg

SEQ ID NO: 98856 - DNA, 120 bp, synthetic construct; identical to SEQ ID NO: 28545
  source 1..120: mol_type = other DNA

SEQ ID NO: 98857 - DNA, 120 bp, synthetic construct
  source 1..120: mol_type = other DNA
cccagtaatgggatggctgggtcaaatggtatttctagttctagatccctgaggaatcgccacactgtcttccacaatggttgaactagtttaaagtcccaccaacagtgtaaaagtgtt

SEQ ID NO: 98858 - DNA, 120 bp, synthetic construct; identical to SEQ ID NO: 28546
  source 1..120: mol_type = other DNA

SEQ ID NO: 98859 - DNA, 120 bp, synthetic construct; identical to SEQ ID NO: 28547
  source 1..120: mol_type = other DNA

SEQ ID NO: 98860 - DNA, 120 bp, synthetic construct; identical to SEQ ID NO: 21829
  source 1..120: mol_type = other DNA

SEQ ID NO: 98861 - DNA, 120 bp, synthetic construct
  source 1..120: mol_type = other DNA
tgctggaaaggatgtggagaaataggaacatttttacactgttggtgggactgtaaactagttcaaccattgtggaagtcagtgtggtgattcctcagggatctagaactagaaatacca

SEQ ID NO: 98862 - DNA, 120 bp, synthetic construct; identical to SEQ ID NO: 21830
  source 1..120: mol_type = other DNA

SEQ ID NO: 98863 - DNA, 120 bp, synthetic construct
  source 1..120: mol_type = other DNA
tgattgctagcacagcagtctgagatcaaactgcaaggcggcaacgaggctgggggaggggcgcccgccattgtccaggcttgcttaggtaaacaaagcagccaggaagctcgaactggg

SEQ ID NO: 98864 - DNA, 120 bp, synthetic construct
  source 1..120: mol_type = other DNA
aagtgatgtggagaatggaaccaagttggaaaacactctgcaggatattatccaggagaacttccccaatctagcaaggcaggccaacgttcagattcaggaaatacagagaacgccaca

SEQ ID NO: 98865 - DNA, 120 bp, synthetic construct
  source 1..120: mol_type = other DNA
ctcagtgacctacaaagagacttagactcccatacattaataatgggagactttaacaccccactgtcaacattagacagatcaacgagacagaaagtcaacaaggatacccaggaattg

SEQ ID NO: 98866 - DNA, 120 bp, synthetic construct
  source 1..120: mol_type = other DNA
tacgcaaataaactagaaaatctagaagaaatggatacattcctcgacacatacactctcccaagactaaatcaggaagaagttgaatctctgaatagaccaataacaggctctgaaatt

SEQ ID NO: 98867 - DNA, 120 bp, synthetic construct
  source 1..120: mol_type = other DNA
acagagagccaaatcatgggtaaactcccattcacaattgcttcagagaataaaatacctaggaatccaacttacaagggatgtgaaggacctcttcaaggagaactacaaaccactgct

SEQ ID NO: 98868 - DNA, 120 bp, synthetic construct
  source 1..120: mol_type = other DNA
acaatgaactcaaacaaatttacaagaaaaaaacaaacaaccccatcaaaaagtgggcgaaggacatgaacagacacttctcaaaagaagacatttatgcagccaaaaaacacatgaaga

SEQ ID NO: 98869 - DNA, 120 bp, synthetic construct; identical to SEQ ID NO: 21831
  source 1..120: mol_type = other DNA

SEQ ID NO: 98870 - DNA, 120 bp, synthetic construct
  source 1..120: mol_type = other DNA
atatgccaaattataaagaccatcgatgctaggaagaaactgcatcaactaacgggcaaaataaccagctaacatcataatgacaggatcaaattcacacataacaatattaaccttaaa

SEQ ID NO: 98871 - DNA, 120 bp, synthetic construct
  source 1..120: mol_type = other DNA
aggagaaagcaggaaagatctaaaattgaccccctaacatcacaattaaaagaactagagaagcaagagcaaacacattcaaaagctagcagaaggcaagaaataactaagatcagagca

SEQ ID NO: 98872 - DNA, 120 bp, synthetic construct
  source 1..120: mol_type = other DNA
aatgcaaaaaaaaaaaaaaaaaaacaaaaaaaaaaacaacctaggcgtggtggcacatgcctcacatgcctgtaatcctagctacttgggaggctgaggcaggagaatcgcttgaaccca

SEQ ID NO: 98873 - DNA, 120 bp, synthetic construct; identical to SEQ ID NO: 21821
  source 1..120: mol_type = other DNA

SEQ ID NO: 98874 - DNA, 120 bp, synthetic construct; identical to SEQ ID NO: 21822
  source 1..120: mol_type = other DNA

SEQ ID NO: 98875 - DNA, 120 bp, synthetic construct
  source 1..120: mol_type = other DNA
ctcactagggagtgccagacagtgggtgcaggacagtaggtgcagtgcaccatgcatgagccgaagtagggcgaggcattgcctcactcgggaagcacaaggggtcagggagttcccttt

SEQ ID NO: 98876 - DNA, 120 bp, synthetic construct
  source 1..120: mol_type = other DNA
aataaccaatacagagaagtgcttaaaggagctgatggagctgaaagccaaagctcaagaactacgtgaagaatgcagaagcctcaggagccgatgcgatcaactggaagaaagggtatc

SEQ ID NO: 98877 - DNA, 120 bp, synthetic construct
  source 1..120: mol_type = other DNA
aacaaagatcaaaagcgacaaagaaggccatcacataatggtaaagggatcaattcaacaagaaaagctaactatcctaaatatatatgcacccaatacaggagcacccagattcataaa

SEQ ID NO: 98878 - DNA, 120 bp, synthetic construct
  source 1..120: mol_type = other DNA
aatactacaaacaactctactcaaataaactagaaaatctaggagaaatggataaattcctcgacacatacactctcccaagactaaaccaggaagaagttgaatctctgaatagaccaa

SEQ ID NO: 98879 - DNA, 120 bp, synthetic construct
  source 1..120: mol_type = other DNA
caccaataacagacaaacagagagccaaatcatgagtgaactcccattcacagctgcttcaaagagaataaaatacctaggaacccaacttacaagggatgtgaaagacctcttcaagga

SEQ ID NO: 98880 - DNA, 120 bp, synthetic construct
  source 1..120: mol_type = other DNA
agaaaatttttgcaacctactcatctgacaaagggctaatatccagaatctacaataaactcaaacaaatttacaagaaaaaaacaaacaaccccatcaaaaagtgggcgaaggatatga

SEQ ID NO: 98881 - DNA, 120 bp, synthetic construct; identical to SEQ ID NO: 21823
  source 1..120: mol_type = other DNA

SEQ ID NO: 98882 - DNA, 120 bp, synthetic construct; identical to SEQ ID NO: 21824
  source 1..120: mol_type = other DNA

SEQ ID NO: 98883 - DNA, 120 bp, synthetic construct; identical to SEQ ID NO: 21825
  source 1..120: mol_type = other DNA

SEQ ID NO: 98884 - DNA, 120 bp, synthetic construct; identical to SEQ ID NO: 21826
  source 1..120: mol_type = other DNA

SEQ ID NO: 98885 - DNA, 120 bp, synthetic construct
  source 1..120: mol_type = other DNA
ctcctcacttcccagatggggtggctgccgggcggaggggctcctcacttctcagacggggcggttgccaggcagagggtctcctcacttctcagacggggcggccgggcagagtcgctc

SEQ ID NO: 98886 - DNA, 120 bp, synthetic construct; identical to SEQ ID NO: 21827
  source 1..120: mol_type = other DNA

SEQ ID NO: 98887 - DNA, 120 bp, synthetic construct
  source 1..120: mol_type = other DNA
tccagcctgggcgacagagcgagactccatctcaaaaaaaaaacaaaaaaacctaggaatccaacttacaaggaatgtgaaggacctcttcaaggagaactaaaaccactgctcaatgaa

SEQ ID NO: 98888 - DNA, 120 bp, synthetic construct
  source 1..120: mol_type = other DNA
tgggcgaaggatatgaacagacacttctcaaaggaagaaatttatgcagccaacagacacatgaaaaaatgctcatcatcactggccatcagagaaatgcaaatcaaaaccacaatgaga

SEQ ID NO: 98889 - DNA, 120 bp, synthetic construct
  source 1..120: mol_type = other DNA
ttaacttttaagttcaggggtacatgttcagggcatgcaggtttgttacataggtaaacatgcgtcatgggggtttgttgtatggattatttcatcacccaggtattaagcccagtaacc

SEQ ID NO: 98890 - DNA, 120 bp, synthetic construct; identical to SEQ ID NO: 98888
  source 1..120: mol_type = other DNA

SEQ ID NO: 98891 - DNA, 120 bp, synthetic construct; identical to SEQ ID NO: 21828
  source 1..120: mol_type = other DNA

SEQ ID NO: 98892 - DNA, 120 bp, synthetic construct
  source 1..120: mol_type = other DNA
ccccgtctgaaaagtgaggagcccctccgcccggcagccgccccgtctgggaggtgaggagcctctccgcccggcagccaccccatctgggaggtgaggagcgtctccgcccggcagcca

SEQ ID NO: 98893 - DNA, 120 bp, synthetic construct
  source 1..120: mol_type = other DNA
ttgtttatctgctgaccttccctccactattgtcccatgaccctgccaaatccccctctgtgagaaacacccaagaattatcaataaaaaaataaatttaaaaaaataaaaaaataaaaa

SEQ ID NO: 98894 - DNA, 120 bp, synthetic construct
  source 1..120: mol_type = other DNA
attgtgaacagtgctgcaataaacatacgtgtgtatgtatctttatagtagaatgatttataatcctttgggtacataccactgtcttccacaatggttgaactaatttaccctcccacc

SEQ ID NO: 98895 - DNA, 120 bp, synthetic construct
  source 1..120: mol_type = other DNA
acccatgagcatggaatgttcttccatttgtttgtatcctcttttatttccttgagcagtggtttgtagttccctttgaagaggtccttcacatcccttgtaagttggattcctaggtat

SEQ ID NO: 98896 - DNA, 120 bp, synthetic construct
  source 1..120: mol_type = other DNA
ataaaatgagttatggaggattccctctttttctattgattggaatagtttcggaaggaatggcaccagtttctccttgtacctctggtagaattcggctgtgaatccatctggtcctgg

SEQ ID NO: 98897 - DNA, 120 bp, synthetic construct
  source 1..120: mol_type = other DNA
gctagcacagcagtctgagatcaaactgcaaggcggcagggaggccaggggaggggcgcctgccattgcccagccttgattaggtaaacaaagcagccgggaagctcgaactgggtggag

SEQ ID NO: 98898 - DNA, 120 bp, synthetic construct
  source 1..120: mol_type = other DNA
tacgtgaagaatgcagaagcctcaggagccgatgtgatcaactggaagaaagggtatcagcgatggaagatgaaatgaatgaaatgaagcgagaagggaagtttagagaaaaaagaataa

SEQ ID NO: 98899 - DNA, 120 bp, synthetic construct
  source 1..120: mol_type = other DNA
aactttaaatgtaaatggactaaatgctccaatgaaaagacacagactggcaaattggataaagagtcaagacccatcagtgtgaggtattcaggaaacccatctcacatgcagagacac

SEQ ID NO: 98900 - DNA, 120 bp, synthetic construct
  source 1..120: mol_type = other DNA
atccaaaattgacaccctaacctcacaattaaaagaactagaaaagcaagagcaaacgcattcaaaagctagcagaaggcaagaaataactaagatcagagcagaactgaaggaaataga

SEQ ID NO: 98901 - DNA, 120 bp, synthetic construct
  source 1..120: mol_type = other DNA
cttcatgctaaaaactctccataaattaggtattgatgggacatatttcaaaatagtaagagctatctatgacaaacccacagccaatatcatactgaatgggcaaaaactggaagcatt

SEQ ID NO: 98902 - DNA, 120 bp, synthetic construct
  source 1..120: mol_type = other DNA
agccatatgtagaaagctgaaactggatcccttccttataccttatacaaaaatcaattcaagatggattaaagacttaaatgttagacctaaaaccataaaaaccctagaagaaaacct

SEQ ID NO: 98903 - DNA, 120 bp, synthetic construct
  source 1..120: mol_type = other DNA
cagtgcaccagcatggcacatgtatacatatgtaactaacctgcacaatgtgcacatgttccctaaaacttaaagtataataaaaaattaaaaaaacaagaaaaaaaagaatacaatgca

SEQ ID NO: 98904 - DNA, 120 bp, synthetic construct; identical to SEQ ID NO: 21858
  source 1..120: mol_type = other DNA

SEQ ID NO: 98905 - DNA, 120 bp, synthetic construct; identical to SEQ ID NO: 21859
  source 1..120: mol_type = other DNA

SEQ ID NO: 98906 - DNA, 120 bp, synthetic construct
  source 1..120: mol_type = other DNA
agaaagaagaagaaagaaagaaagaaagaagaaaaaaagaaagaaaagaaagaaagaaagaaaaaagaaagagctctccctctccctcctctccctctccctcctctccctctccctcct

SEQ ID NO: 98907 - DNA, 120 bp, synthetic construct; identical to SEQ ID NO: 28996
  source 1..120: mol_type = other DNA

SEQ ID NO: 98908 - DNA, 120 bp, synthetic construct; identical to SEQ ID NO: 28997
  source 1..120: mol_type = other DNA

SEQ ID NO: 98909 - DNA, 120 bp, synthetic construct; identical to SEQ ID NO: 28998
  source 1..120: mol_type = other DNA

SEQ ID NO: 98910 - DNA, 120 bp, synthetic construct; identical to SEQ ID NO: 28999
  source 1..120: mol_type = other DNA

SEQ ID NO: 98911 - DNA, 120 bp, synthetic construct; identical to SEQ ID NO: 29000
  source 1..120: mol_type = other DNA

SEQ ID NO: 98912 - DNA, 120 bp, synthetic construct; identical to SEQ ID NO: 29001
  source 1..120: mol_type = other DNA

SEQ ID NO: 98913 - DNA, 120 bp, synthetic construct
  source 1..120: mol_type = other DNA
cagctctgcaccaagcagacctaatagacatctacagaactctctaccctaaatcaacagagtatacattcttttcagcatcacaacacacctattccaaaattgaccacatagttggaa

SEQ ID NO: 98914 - DNA, 120 bp, synthetic construct
  source 1..120: mol_type = other DNA
ataaagagggaatcctccctaactctttttatgaggccagcatcatcctgataccaaagcctggcagagacacaacaaacaagagaattttagaccaatatccttgatgaacattgatga

SEQ ID NO: 98915 - DNA, 120 bp, synthetic construct
  source 1..120: mol_type = other DNA
tgactttcttcacagaattggaaaaaactactttaaagttcatatggaaccaaaaaagagcccgcatcgccaggtcaatcctaagccaaaagaacaaagctggaggcatcatgctacctg

SEQ ID NO: 98916 - DNA, 120 bp, synthetic construct; identical to SEQ ID NO: 12085
  source 1..120: mol_type = other DNA

SEQ ID NO: 98917 - DNA, 120 bp, synthetic construct; identical to SEQ ID NO: 12086
  source 1..120: mol_type = other DNA

SEQ ID NO: 98918 - DNA, 120 bp, synthetic construct
  source 1..120: mol_type = other DNA
agttaatgggtgcagcacaccaacatggcacatgtatacatatggaacaaagctgcacgttgtgtacaagtaccctagaacttaaagtataatacaaagtattatattaattattaatta

SEQ ID NO: 98919 - DNA, 120 bp, synthetic construct; identical to SEQ ID NO: 12730
  source 1..120: mol_type = other DNA

SEQ ID NO: 98920 - DNA, 120 bp, synthetic construct; identical to SEQ ID NO: 12731
  source 1..120: mol_type = other DNA

SEQ ID NO: 98921 - DNA, 120 bp, synthetic construct; identical to SEQ ID NO: 12732
  source 1..120: mol_type = other DNA

SEQ ID NO: 98922 - DNA, 120 bp, synthetic construct; identical to SEQ ID NO: 12733
  source 1..120: mol_type = other DNA

SEQ ID NO: 98923 - DNA, 120 bp, synthetic construct; identical to SEQ ID NO: 12734
  source 1..120: mol_type = other DNA

SEQ ID NO: 98924 - DNA, 120 bp, synthetic construct; identical to SEQ ID NO: 12735
  source 1..120: mol_type = other DNA

SEQ ID NO: 98925 - DNA, 120 bp, synthetic construct; identical to SEQ ID NO: 12736
  source 1..120: mol_type = other DNA

SEQ ID NO: 98926 - DNA, 120 bp, synthetic construct
  source 1..120: mol_type = other DNA
ttttgatggggttgtttgtttttttcttgtaaatttgtttgagttcattgtagattctggatattagccctttgtcagatgagtaggttgcaaaaattttctcctaaaaccataaaaacc

SEQ ID NO: 98927 - DNA, 120 bp, synthetic construct
  source 1..120: mol_type = other DNA
tagagattttggaattgtttttcctgtttttctgaataatgtattggtattttaaaaataaagattgcgggggaggagccaagatggccgaacaggaacagctccggtctacagctccca

SEQ ID NO: 98928 - DNA, 120 bp, synthetic construct
  source 1..120: mol_type = other DNA
aaaaaacagaacagaaaaactggaaactctaaaaagcagagcaccaatcctcctccaaaggaacgcagttcctcaccagcaacggaacaaagctagatggagaatgactttgacgagctg

SEQ ID NO: 98929 - DNA, 120 bp, synthetic construct
  source 1..120: mol_type = other DNA
acaaccagtaccagctgctgcaaaatcatgccaagatgtaaagaccatcgagactaggaagaaactacataaactaacgagcaaaataaccagctaacatcataatgacaggatcaaatt

SEQ ID NO: 98930 - DNA, 120 bp, synthetic construct
  source 1..120: mol_type = other DNA
ctttgaaaccaaggagaacaaagacacaacataccagaatctctgggacgcattcaaagcagtgtgtagagggaaatttatagcactaaatgcccacaagagaaagcaggaaagatccaa

SEQ ID NO: 98931 - DNA, 120 bp, synthetic construct
  source 1..120: mol_type = other DNA
gttcaatatacgcaaatcaataaatgtaatccagcatataaacagagccaaagacaaaaaccaaatgattatctcaatagatgcagaaaaagcctttgacaaaattcaacaacccttcat

SEQ ID NO: 98932 - DNA, 120 bp, synthetic construct
  source 1..120: mol_type = other DNA
agaatggaacagaacagagccctcagaaataacgctgcatatctacaactatctgatctttgacaaacctgagaaaaacaagcaatggggaaaggattccctatttaataaatggtgctg

SEQ ID NO: 98933 - DNA, 120 bp, synthetic construct
  source 1..120: mol_type = other DNA
caccatggaatactatgcagccataaaaaatgatgagttcatgtcctttgtagggacatggatgaaattggaaaacatcattctcagtaaactattgcaagaacaaaaaaccaaagaccg

SEQ ID NO: 98934 - DNA, 120 bp, synthetic construct
  source 1..120: mol_type = other DNA
ctggccagaacttccaacgctatgttgaataggagtggtgagagagggcattgcgacactattaacagtagcaaagacttggaaccaagccaaatgtccaacaatgatagactggattaa

SEQ ID NO: 98935 - DNA, 120 bp, synthetic construct
  source 1..120: mol_type = other DNA
acaccaaaaacccatctgtacatcaccatcatcaaagaccaaaagtagataaaaccacaaagatggggaaaaaacagaacagaaaaactggaaactctaaaacgcagagcgcctctcctc

SEQ ID NO: 98936 - DNA, 120 bp, synthetic construct
  source 1..120: mol_type = other DNA
caacccagaatttcatatccagccaaagtaagcttcataagtgaaggagaaataaaatactttacagacaagcaaatgctgagagattttgtcaccaccaggcctgccctaaaagagctc

SEQ ID NO: 98937 - DNA, 120 bp, synthetic construct
  source 1..120: mol_type = other DNA
atagttggaagtaaagctctcctcagcaaatgtaaaagaacagaaattatagcaaactatctctcagaccacagtgcaatcaaactagaactcaggattaagaatctcactcaaaaccgc

SEQ ID NO: 98938 - DNA, 120 bp, synthetic construct
  source 1..120: mol_type = other DNA
catcattctgataccaaagctgggcagagacacaaccaaaaaagagaattttagaccaatatccttgatgaacattgatgcaaaaatcctcaataaaatactggcaaaccgaatccagca

SEQ ID NO: 98939 - DNA, 120 bp, synthetic construct
  source 1..120: mol_type = other DNA
gcttgtagtatagtttgaagtcaggtagtgtgatgcctccagctttgttcttttggcttaggattgacttggcgatgcgggctcttttttggttccatatgaactttaaagtagacattt

SEQ ID NO: 98940 - DNA, 120 bp, synthetic construct
  source 1..120: mol_type = other DNA
gtaaactagtacaaccattgtggaagtcagtgtggcgattcctcagggatctagaactagaaataccatttgacccagccatcccattactgggtatatacccaaaggactataaatcat

SEQ ID NO: 98941 - DNA, 120 bp, synthetic construct; identical to SEQ ID NO: 11706
  source 1..120: mol_type = other DNA

SEQ ID NO: 98942 - DNA, 120 bp, synthetic construct
  source 1..120: mol_type = other DNA
atcaaactgcaaggcggcagttaggctggggaaggggcgcctgccatttccgaggcttgcttaggtaaacaaagcagcaggtaagctcgaactgggtggaacccaccacggttcaaggag

SEQ ID NO: 98943 - DNA, 120 bp, synthetic construct
  source 1..120: mol_type = other DNA
taaaggagcagatggagctgaaagccaaggctcaagaactacatgaagaatgcagaagccttaggagctgatgcgatcaactggaagaaagggtatcagtgatggaagatgaaatgaatg

SEQ ID NO: 98944 - DNA, 120 bp, synthetic construct
  source 1..120: mol_type = other DNA
ctcccacacaataataatgggagactttaacaccccactgtcaacattagatcaacaagacagaaagttaacaaggatacccaggaattgaactcatctctgcaccaagcggacctaata

SEQ ID NO: 98945 - DNA, 120 bp, synthetic construct
  source 1..120: mol_type = other DNA
aattcggctgtgaatccatctggtcctggactctttttggttggtaagctattgattattgccacaatttcagagcctgttattggtgtattcagagattcaacttcttcctggtttggt

SEQ ID NO: 98946 - DNA, 120 bp, synthetic construct
  source 1..120: mol_type = other DNA
acaagcattcttatacaccaataacagacaaacagagagccaaatcatgagtgaactcccattcacaattgcttcattcacaatttgattcctggaataaaatacctaggaatccaactt

SEQ ID NO: 98947 - DNA, 120 bp, synthetic construct
  source 1..120: mol_type = other DNA
ttgcatttctctgatggccagtgatgatgagcattttttcatgtgttttttggctgcataaatgtcttcttttgagaagtgtctgttcatgtccttcacccacttgttgatggggttgtg

SEQ ID NO: 98948 - DNA, 120 bp, synthetic construct
  source 1..120: mol_type = other DNA
catcattctcagcaaactgtcgcaaggacaaaaaaccaaacactgcatgttctcactgataggtgggaattgaacaatgagaacacatggacacaggaaggggaacatgacacaacgggg

SEQ ID NO: 98949 - DNA, 120 bp, synthetic construct; identical to SEQ ID NO: 11707
  source 1..120: mol_type = other DNA

SEQ ID NO: 98950 - DNA, 120 bp, synthetic construct; identical to SEQ ID NO: 11708
  source 1..120: mol_type = other DNA

SEQ ID NO: 98951 - DNA, 120 bp, synthetic construct
  source 1..120: mol_type = other DNA
accattcaggagataggcatgggcaaggacttcatgtctaaaacaccagaagcaatggcaacaaaagccaaaattgacaaatgggatctaattaaactcaagagcttctgcacagcaaaa

SEQ ID NO: 98952 - DNA, 120 bp, synthetic construct; identical to SEQ ID NO: 11709
  source 1..120: mol_type = other DNA

SEQ ID NO: 98953 - DNA, 120 bp, synthetic construct; identical to SEQ ID NO: 98947
  source 1..120: mol_type = other DNA

SEQ ID NO: 98954 - DNA, 120 bp, synthetic construct
  source 1..120: mol_type = other DNA
ccttgtaagttggattcctaggtattttattgtctttgaagcaattgtgaatgggagttcactcatgatttggctctctgtttgtctgttgttggtgtataagaatgcttgtgatttttg

SEQ ID NO: 98955 - DNA, 120 bp, synthetic construct; identical to SEQ ID NO: 11710
  source 1..120: mol_type = other DNA

SEQ ID NO: 98956 - DNA, 120 bp, synthetic construct
  source 1..120: mol_type = other DNA
tgccattctaactggtgtgagatggtatctcattgtggttttgatttgcatttctcggatggccagtgatgatgagcattttttcatgtgttttttggctgcataaatgtcttcttttga

SEQ ID NO: 98957 - DNA, 120 bp, synthetic construct
  source 1..120: mol_type = other DNA
tccttgagcagtggtttgtagttctccttgaagaggtccctcacgtcccttgtaagttggattcctaggtattttattctctttgaagcaattgtgaatgggagttcactcatgatttgg

SEQ ID NO: 98958 - DNA, 120 bp, synthetic construct; identical to SEQ ID NO: 11711
  source 1..120: mol_type = other DNA

SEQ ID NO: 98959 - DNA, 120 bp, synthetic construct; identical to SEQ ID NO: 11712
  source 1..120: mol_type = other DNA

SEQ ID NO: 98960 - DNA, 120 bp, synthetic construct
  source 1..120: mol_type = other DNA
cgctgattgctagcacagcagtctgagatcaaactgcaaggcagcagcaaggctggggaaagggcgcccgccattgcccaggcttgcttaggtaaacaaagcagctgggaagctcgaact

SEQ ID NO: 98961 - DNA, 120 bp, synthetic construct
  source 1..120: mol_type = other DNA
agtgcttaaaggagctgatggagctgaaagccaaggctcgaaaactacgtgaagaatgcagaagcctcaggagccgatgtgatcaaccggaagaaagggtttcggtgatggaagatgaaa

SEQ ID NO: 98962 - DNA, 120 bp, synthetic construct
  source 1..120: mol_type = other DNA
aactagctaacatcataatgacaggatcaaattcacacataacaatattaactttaaatgtaaatggactaaatgctccaattaaaagatacagactggcaaattggataaagagtcaag

SEQ ID NO: 98963 - DNA, 120 bp, synthetic construct
  source 1..120: mol_type = other DNA
aatcaatgaatccaggagctggttttttgaaaggatcaacaaaattgatagaccgctagcaagactaataaagaaaagagagaagaatcaaatagacgcaataaaaaatgataaagggga

SEQ ID NO: 98964 - DNA, 120 bp, synthetic construct
  source 1..120: mol_type = other DNA
caatatcatactgaatgggcaaaaactggaagcattccctttgaaaactggcacaagacagggatgccctctctcaccactcctattcaacatagtgttggaagttcgggccagggcaat

SEQ ID NO: 98965 - DNA, 120 bp, synthetic construct
  source 1..120: mol_type = other DNA
ttcaagatggattaaagacttaaacgttagacctaaaaccataaaaaccctagaagaaaacctaggcattaccattcaggagataggcatgggcaaggacttcatgtctaaaacaccaga

SEQ ID NO: 98966 - DNA, 120 bp, synthetic construct; identical to SEQ ID NO: 11713
  source 1..120: mol_type = other DNA

SEQ ID NO: 98967 - DNA, 120 bp, synthetic construct; identical to SEQ ID NO: 19542
  source 1..120: mol_type = other DNA

SEQ ID NO: 98968 - DNA, 120 bp, synthetic construct
  source 1..120: mol_type = other DNA
ctcttattattttgagatatgtcccatcaatacctaatttattgagagtttttagtatgaaggttgttgaattttgtcaaaggccttttctgcatctgttgagataatcatgtagttttg

SEQ ID NO: 98969 - DNA, 120 bp, synthetic construct
  source 1..120: mol_type = other DNA
aaagtgtttgctcttgcttttctagttcttttaattgtgatgttggggtgtcaattttagatctttcctgctttctcttgtgggcatttagtgctataaatttccctctacacactgctt

SEQ ID NO: 98970 - DNA, 120 bp, synthetic construct
  source 1..120: mol_type = other DNA
atgtgtgaatttgatcctgtcattatgatgttagctgggtattttgctcattagttgacgcagtttcttcctatcctcgatggactttacaatttggcatgtctttgcagtggctggtac

SEQ ID NO: 98971 - DNA, 120 bp, synthetic construct; identical to SEQ ID NO: 7698
  source 1..120: mol_type = other DNA

SEQ ID NO: 98972 - DNA, 120 bp, synthetic construct
  source 1..120: mol_type = other DNA
agtggggttttctagatatacaatcatgtcatctgcaaacagggagaatttacttcctcttttcctaactaaataccctttatttccttctcctacctaattgccctggccagaacttcc

SEQ ID NO: 98973 - DNA, 120 bp, synthetic construct
  source 1..120: mol_type = other DNA
gttgatcctttcaaaaaaccagctcctggattcattgatttttttgaagggttttctgtgtctctatttccttcagttctgctctgattttagttatttcttgccttctgctagcttttg

SEQ ID NO: 98974 - DNA, 120 bp, synthetic construct
  source 1..120: mol_type = other DNA
ttattttgctcattagttgatgcagtttcttcctagccttgatggtctttataatttggcatgtttttgcagtggctgataccggttgttcatttccatgtttagtgcttccttcaggag

SEQ ID NO: 98975 - DNA, 120 bp, synthetic construct; identical to SEQ ID NO: 7699
  source 1..120: mol_type = other DNA

SEQ ID NO: 98976 - DNA, 120 bp, synthetic construct
  source 1..120: mol_type = other DNA
ttaaaaatttatttatttatttatttattttttgagatggagtttcgctctgtcacccaggctggagtgcagtggtgcatctcggctcactccaacctctgcctctcgggttcaagcaat

SEQ ID NO: 98977 - DNA, 120 bp, synthetic construct; identical to SEQ ID NO: 7691
  source 1..120: mol_type = other DNA

SEQ ID NO: 98978 - DNA, 120 bp, synthetic construct; identical to SEQ ID NO: 7692
  source 1..120: mol_type = other DNA

SEQ ID NO: 98979 - DNA, 120 bp, synthetic construct; identical to SEQ ID NO: 7693
  source 1..120: mol_type = other DNA

SEQ ID NO: 98980 - DNA, 120 bp, synthetic construct
  source 1..120: mol_type = other DNA
gattaaagatttaaacgttagacctaaaaccataaaaaccctagaagaaaacctaggctaatattaccattcaggacataggcatgggcaaggacttcatgtccaaaacaccaaaagcaa

SEQ ID NO: 98981 - DNA, 120 bp, synthetic construct
  source 1..120: mol_type = other DNA
aaaaaagcaaacaccgcatattctcactcataggtgggaactgaacaatgagatcacatggacacaggaaggggaacatcacactctggggactgtggtggggtggggggaggggggagg

SEQ ID NO: 98982 - DNA, 120 bp, synthetic construct
  source 1..120: mol_type = other DNA
gactaacaatcatatgcttcataggttaagagaattagatgagactcctgttatgaaaatgctttgtcttggaaatgcgggctcttttttggttccatatgaactttaaagtagtttttt

SEQ ID NO: 98983 - DNA, 120 bp, synthetic construct
  source 1..120: mol_type = other DNA
taaaattctcttttttggttgtgtctctgccaggctttggtatcaggatgatgctggcctcataaaatgagttagggaggattccctcgttttctattgattggaatagtttcagaagga

SEQ ID NO: 98984 - DNA, 120 bp, synthetic construct; identical to SEQ ID NO: 7694
  source 1..120: mol_type = other DNA

SEQ ID NO: 98985 - DNA, 120 bp, synthetic construct
  source 1..120: mol_type = other DNA
cacatttttttctcattttgtctttctgggctgcattctgataattgtttctaatctgccttccagtttgctaatttttttttttttttgagacggagtctcgctctgtcgcccaggctg

SEQ ID NO: 98986 - DNA, 120 bp, synthetic construct; identical to SEQ ID NO: 7695
  source 1..120: mol_type = other DNA

SEQ ID NO: 98987 - DNA, 120 bp, synthetic construct; identical to SEQ ID NO: 7696
  source 1..120: mol_type = other DNA

SEQ ID NO: 98988 - DNA, 120 bp, synthetic construct
  source 1..120: mol_type = other DNA
caaaagaaactaccatcagagtgaacaggcaacctacaaaatgggagaaaattttcgcaacctactcatctgacaaagggctaatatccagaatctacaatgaactcaaacaaatgtaca

SEQ ID NO: 98989 - DNA, 120 bp, synthetic construct
  source 1..120: mol_type = other DNA
ggagttcactcatgattggctctctgtttgtctgttattggtgtataagaatgcttgtgatttttgtacattgattttgtatcctgagactttgctgaagttgcttatcagcttaaggag

SEQ ID NO: 98990 - DNA, 120 bp, synthetic construct
  source 1..120: mol_type = other DNA
ttctctgatggtagtttgtatttctgtgggatcggtggtgatatcccctttatcattttttattgcatctatttgattcttctctcttttcttctttattagtcttgctagcattctgtc

SEQ ID NO: 98991 - DNA, 120 bp, synthetic construct; identical to SEQ ID NO: 7697
  source 1..120: mol_type = other DNA

SEQ ID NO: 98992 - DNA, 120 bp, synthetic construct; identical to SEQ ID NO: 26592
  source 1..120: mol_type = other DNA

SEQ ID NO: 98993 - DNA, 120 bp, synthetic construct; identical to SEQ ID NO: 26593
  source 1..120: mol_type = other DNA

SEQ ID NO: 98994 - DNA, 120 bp, synthetic construct; identical to SEQ ID NO: 26594
  source 1..120: mol_type = other DNA

SEQ ID NO: 98995 - DNA, 120 bp, synthetic construct
  source 1..120: mol_type = other DNA
ccgtaaagggtctgtgctgaggaggattagtataagaggaaggcatgcctcttgcagttgagacaagaggaaggcatctgtctcctgcccctccctgggcaatggaatgtctcactataa

SEQ ID NO: 98996 - DNA, 120 bp, synthetic construct
  source 1..120: mol_type = other DNA
aggagaaccgcttgaaactgggaggcagaggttgcagtgggatgacatcacaccactgcactccagcctggacaacaaagggagactctgtctcaaaaaaaaatatatatatatatatat

SEQ ID NO: 98997 - DNA, 120 bp, synthetic construct
  source 1..120: mol_type = other DNA
ttgcaccactgcactccagcctggacagagtccagagtgagaccctgcctcaagaaaaaaaagaagaagaagaagaaagaagaagaagaagaagaaagaagaaagaagaagaagaaagaa

SEQ ID NO: 98998 - DNA, 120 bp, synthetic construct
  source 1..120: mol_type = other DNA
cttacaaagagacttagactcccacacaataataaagagagactgtaacaccccactgtcaacatcggatagatcaacgagacagaaagttaacaaggttatccaggaattgaactcagc

SEQ ID NO: 98999 - DNA, 120 bp, synthetic construct
  source 1..120: mol_type = other DNA
ggaacaccacacaccggggtctgtcatggagtggggggaggggggagggatagcattagtagatatacgtaatgtaaatgacaagttaacgggtgcagcacaccaacatggcacatgtat

SEQ ID NO: 99000 - DNA, 120 bp, synthetic construct; identical to SEQ ID NO: 5530
  source 1..120: mol_type = other DNA

SEQ ID NO: 99001 - DNA, 120 bp, synthetic construct; identical to SEQ ID NO: 26584
  source 1..120: mol_type = other DNA

SEQ ID NO: 99002 - DNA, 120 bp, synthetic construct; identical to SEQ ID NO: 26585
  source 1..120: mol_type = other DNA

SEQ ID NO: 99003 - DNA, 120 bp, synthetic construct
  source 1..120: mol_type = other DNA
ccaccatgtacaatggctatgttcaaacagatgaatgataacaagtgttggcaaggatgtggagaaaagggagcccttctacactgttggtgggaatgtaaattagaaccaccattattg

SEQ ID NO: 99004 - DNA, 120 bp, synthetic construct; identical to SEQ ID NO: 26586
  source 1..120: mol_type = other DNA

SEQ ID NO: 99005 - DNA, 120 bp, synthetic construct
  source 1..120: mol_type = other DNA
ttccataccttattcttgctggtcttttgttgtgaggtaatcctcaatcctcccctaaccacatggaaagcattatgttcttcaaatttatcagggagcatttcctaggtagagccactg

SEQ ID NO: 99006 - DNA, 120 bp, synthetic construct
  source 1..120: mol_type = other DNA
atgcacacacacgtatgtacacacatgcatgtacacacacgtatgcacacatacatgtatgtagacatacatgtatgcacacacatacatgcatgtagacatacatgtatgtacacgtat

SEQ ID NO: 99007 - DNA, 120 bp, synthetic construct; identical to SEQ ID NO: 26587
  source 1..120: mol_type = other DNA

SEQ ID NO: 99008 - DNA, 120 bp, synthetic construct; identical to SEQ ID NO: 26588
  source 1..120: mol_type = other DNA

SEQ ID NO: 99009 - DNA, 120 bp, synthetic construct; identical to SEQ ID NO: 26589
  source 1..120: mol_type = other DNA

SEQ ID NO: 99010 - DNA, 120 bp, synthetic construct; identical to SEQ ID NO: 26590
  source 1..120: mol_type = other DNA

SEQ ID NO: 99011 - DNA, 120 bp, synthetic construct
  source 1..120: mol_type = other DNA
caggcattaccattcaggacacaggcatgggcaaggacttcacgtctaaaacaccaaaagcaatggcaacaaaagccaaaattgataaatgggatctaattaaactaaagagcttctgca

SEQ ID NO: 99012 - DNA, 120 bp, synthetic construct
  source 1..120: mol_type = other DNA
taaatgacgagttaatgggtgcagcacaccggcatggcacatgtaccctaaaacttaaagtataataataataatttaaaaaaaaaagaggttctgttttgttgtgtttccaggatttgt

SEQ ID NO: 99013 - DNA, 120 bp, synthetic construct
  source 1..120: mol_type = other DNA
cctcctcaagtgggtctctgacccctgacccccgagcagcctaactgggaggctccagcaggggcaggctgacacctcacactgcagggtactccaacagacctgcagctgagggtcctg

SEQ ID NO: 99014 - DNA, 120 bp, synthetic construct
  source 1..120: mol_type = other DNA
agaagagagtgggggccaatattcaacattcttaaagaaaagaattctcaacccagaatttcatatccagccaaactaagcttcataagtgaaggagaaataaaatcctttacagacaag

SEQ ID NO: 99015 - DNA, 120 bp, synthetic construct
  source 1..120: mol_type = other DNA
actatctctcagaccacagtgcaatcaaattagaactcaggattaagaatctcactcaaaaccgctcaactacatggaaaccgaacaacctgctcctgaatgactactgggtacataatg

SEQ ID NO: 99016 - DNA, 120 bp, synthetic construct
  source 1..120: mol_type = other DNA
gctggttcaatatacacaaatcagtaaatgtaatccagcatataaacagagccaaagacaaaaaccacatgattatctcaatagatgcagaaaaggcctttgacaaaattcaacaaccct

SEQ ID NO: 99017 - DNA, 120 bp, synthetic construct
  source 1..120: mol_type = other DNA
gattccctatttaataaacggttctgggaaaactggctagccatatttagaaagctgaaactggatcccttccttacaccttatacaaaaattaattcaagatggattaaagacttacat

SEQ ID NO: 99018 - DNA, 120 bp, synthetic construct
  source 1..120: mol_type = other DNA
acaccgcatattctcactcataggtgggaattgaacaatgagatcacatggacacaggaaggggaacatcacactctggggactgctgtggggtggggggaggggggagggatagcattg

SEQ ID NO: 99019 - DNA, 120 bp, synthetic construct; identical to SEQ ID NO: 8569
  source 1..120: mol_type = other DNA

SEQ ID NO: 99020 - DNA, 120 bp, synthetic construct; identical to SEQ ID NO: 8570
  source 1..120: mol_type = other DNA

SEQ ID NO: 99021 - DNA, 120 bp, synthetic construct; identical to SEQ ID NO: 8571
  source 1..120: mol_type = other DNA

SEQ ID NO: 99022 - DNA, 120 bp, synthetic construct; identical to SEQ ID NO: 8572
  source 1..120: mol_type = other DNA

SEQ ID NO: 99023 - DNA, 120 bp, synthetic construct; identical to SEQ ID NO: 8573
  source 1..120: mol_type = other DNA

SEQ ID NO: 99024 - DNA, 120 bp, synthetic construct; identical to SEQ ID NO: 8574
  source 1..120: mol_type = other DNA

SEQ ID NO: 99025 - DNA, 120 bp, synthetic construct; identical to SEQ ID NO: 8575
  source 1..120: mol_type = other DNA

SEQ ID NO: 99026 - DNA, 120 bp, synthetic construct
  source 1..120: mol_type = other DNA
tctactaaaaacacaaaaaaaattagccgggcgtggtggcgggcgcctgtagtaccagctacttgggaggctgaggtaggagaatggcgtgaacccgggaagcggagcttgcagtgagcc

SEQ ID NO: 99027 - DNA, 120 bp, synthetic construct
  source 1..120: mol_type = other DNA
gcatgttcagatttagtaaatactgccagattgtttttttttaaacagattacaaaagagatttctaaagcgggtatccaggccaggcgcggtggctcacgcctgtaatcccagcacttt

SEQ ID NO: 99028 - DNA, 120 bp, synthetic construct
  source 1..120: mol_type = other DNA
catctctactaaaaatacaaaaattagccgggtgtggtgcctgcacctgtagtcccagctacttaggagcctgaggcaggagaatcccttgaacccgggaggcggatgttgcagtgagct

SEQ ID NO: 99029 - DNA, 120 bp, synthetic construct; identical to SEQ ID NO: 8576
  source 1..120: mol_type = other DNA

SEQ ID NO: 99030 - DNA, 120 bp, synthetic construct; identical to SEQ ID NO: 8577
  source 1..120: mol_type = other DNA

SEQ ID NO: 99031 - DNA, 120 bp, synthetic construct; identical to SEQ ID NO: 8578
  source 1..120: mol_type = other DNA

SEQ ID NO: 99032 - DNA, 120 bp, synthetic construct
  source 1..120: mol_type = other DNA
gtcaggagttcgagaccagcctggccaacatgttgaaaccccatctctactaaagatacaaaaattagtgggcatggtggggggtgcctgtaatcccagctaatcgggagaccgaggaat

SEQ ID NO: 99033 - DNA, 120 bp, synthetic construct; identical to SEQ ID NO: 8579
  source 1..120: mol_type = other DNA

SEQ ID NO: 99034 - DNA, 120 bp, synthetic construct; identical to SEQ ID NO: 8580
  source 1..120: mol_type = other DNA

SEQ ID NO: 99035 - DNA, 120 bp, synthetic construct; identical to SEQ ID NO: 8581
  source 1..120: mol_type = other DNA

SEQ ID NO: 99036 - DNA, 120 bp, synthetic construct; identical to SEQ ID NO: 8582
  source 1..120: mol_type = other DNA

SEQ ID NO: 99037 - DNA, 120 bp, synthetic construct; identical to SEQ ID NO: 8583
  source 1..120: mol_type = other DNA

SEQ ID NO: 99038 - DNA, 120 bp, synthetic construct; identical to SEQ ID NO: 8584
  source 1..120: mol_type = other DNA

SEQ ID NO: 99039 - DNA, 120 bp, synthetic construct; identical to SEQ ID NO: 8585
  source 1..120: mol_type = other DNA

SEQ ID NO: 99040 - DNA, 120 bp, synthetic construct; identical to SEQ ID NO: 8586
  source 1..120: mol_type = other DNA

SEQ ID NO: 99041 - DNA, 120 bp, synthetic construct; identical to SEQ ID NO: 8587
  source 1..120: mol_type = other DNA

SEQ ID NO: 99042 - DNA, 120 bp, synthetic construct; identical to SEQ ID NO: 8588
  source 1..120: mol_type = other DNA

SEQ ID NO: 99043 - DNA, 120 bp, synthetic construct; identical to SEQ ID NO: 8589
  source 1..120: mol_type = other DNA

SEQ ID NO: 99044 - DNA, 120 bp, synthetic construct
  source 1..120: mol_type = other DNA
tggcccacgcctgtaatcccagctacacaggaggctgaggcaggataatctcttgaacccggaaggcagaggttgcagtgagctgagatcgtggcactgtactccagcctgggtgataga

SEQ ID NO: 99045 - DNA, 120 bp, synthetic construct
  source 1..120: mol_type = other DNA
atcattttttctaattacatttatttatttatttatttttgagacagagtcttgctctgtcacccaggctggagtgcagtggtgccgtctcggctcactgcaacctccgcctcccaggtt

SEQ ID NO: 99046 - DNA, 120 bp, synthetic construct; identical to SEQ ID NO: 8590
  source 1..120: mol_type = other DNA

SEQ ID NO: 99047 - DNA, 120 bp, synthetic construct; identical to SEQ ID NO: 8591
  source 1..120: mol_type = other DNA

SEQ ID NO: 99048 - DNA, 120 bp, synthetic construct; identical to SEQ ID NO: 8592
  source 1..120: mol_type = other DNA

SEQ ID NO: 99049 - DNA, 120 bp, synthetic construct; identical to SEQ ID NO: 8593
  source 1..120: mol_type = other DNA

SEQ ID NO: 99050 - DNA, 120 bp, synthetic construct
  source 1..120: mol_type = other DNA
agtctgtacaagagagcatgtctactgggatttaaatagcccagaaacaggcagccggaatttcttatactcttgtgctctaaaaaaaaaaaaaaaaaaaaaaaaggaagaaagaaatag

SEQ ID NO: 99051 - DNA, 120 bp, synthetic construct; identical to SEQ ID NO: 8594
  source 1..120: mol_type = other DNA

SEQ ID NO: 99052 - DNA, 120 bp, synthetic construct; identical to SEQ ID NO: 8595
  source 1..120: mol_type = other DNA

SEQ ID NO: 99053 - DNA, 120 bp, synthetic construct
  source 1..120: mol_type = other DNA
ggagacataggaacgcttttacactgctggtgggagtgtaaattagttcaaccattgtaaaagacagtgtgacaattcttcaaggatctagaactagaaatgccatttgacccagcaatc

SEQ ID NO: 99054 - DNA, 120 bp, synthetic construct; identical to SEQ ID NO: 8596
  source 1..120: mol_type = other DNA

SEQ ID NO: 99055 - DNA, 120 bp, synthetic construct; identical to SEQ ID NO: 8597
  source 1..120: mol_type = other DNA

SEQ ID NO: 99056 - DNA, 120 bp, synthetic construct; identical to SEQ ID NO: 8598
  source 1..120: mol_type = other DNA

SEQ ID NO: 99057 - DNA, 120 bp, synthetic construct; identical to SEQ ID NO: 8599
  source 1..120: mol_type = other DNA

SEQ ID NO: 99058 - DNA, 120 bp, synthetic construct
  source 1..120: mol_type = other DNA
ggcaggagaatcgcttgaacccaggaggcagaggttgcagtgagccgagattgccactgtactccagcctgggtgacagagctagactccgtctcaaaaaaaacaaaaaaaaagaaaatg

SEQ ID NO: 99059 - DNA, 120 bp, synthetic construct; identical to SEQ ID NO: 8600
  source 1..120: mol_type = other DNA

SEQ ID NO: 99060 - DNA, 120 bp, synthetic construct; identical to SEQ ID NO: 8601
  source 1..120: mol_type = other DNA

SEQ ID NO: 99061 - DNA, 120 bp, synthetic construct; identical to SEQ ID NO: 8602
  source 1..120: mol_type = other DNA

SEQ ID NO: 99062 - DNA, 120 bp, synthetic construct; identical to SEQ ID NO: 8603
  source 1..120: mol_type = other DNA

SEQ ID NO: 99063 - DNA, 120 bp, synthetic construct; identical to SEQ ID NO: 8604
  source 1..120: mol_type = other DNA

SEQ ID NO: 99064 - DNA, 120 bp, synthetic construct; identical to SEQ ID NO: 8605
  source 1..120: mol_type = other DNA

SEQ ID NO: 99065 - DNA, 120 bp, synthetic construct; identical to SEQ ID NO: 8606
  source 1..120: mol_type = other DNA

SEQ ID NO: 99066 - DNA, 120 bp, synthetic construct
  source 1..120: mol_type = other DNA
cctttgagacaagctaaagtgccaattctctgtggtaccttctctggccacctctccttcctaatttttatagtttttactttttttttttctgagacggagtcttgctctgtcacccag

SEQ ID NO: 99067 - DNA, 120 bp, synthetic construct; identical to SEQ ID NO: 8607
  source 1..120: mol_type = other DNA

SEQ ID NO: 99068 - DNA, 120 bp, synthetic construct; identical to SEQ ID NO: 8608
  source 1..120: mol_type = other DNA

SEQ ID NO: 99069 - DNA, 120 bp, synthetic construct; identical to SEQ ID NO: 8609
  source 1..120: mol_type = other DNA

SEQ ID NO: 99070 - DNA, 120 bp, synthetic construct; identical to SEQ ID NO: 8610
  source 1..120: mol_type = other DNA

SEQ ID NO: 99071 - DNA, 120 bp, synthetic construct; identical to SEQ ID NO: 8611
  source 1..120: mol_type = other DNA

SEQ ID NO: 99072 - DNA, 120 bp, synthetic construct; identical to SEQ ID NO: 8612
  source 1..120: mol_type = other DNA

SEQ ID NO: 99073 - DNA, 120 bp, synthetic construct; identical to SEQ ID NO: 8613
  source 1..120: mol_type = other DNA

SEQ ID NO: 99074 - DNA, 120 bp, synthetic construct; identical to SEQ ID NO: 8614
  source 1..120: mol_type = other DNA

SEQ ID NO: 99075 - DNA, 120 bp, synthetic construct; identical to SEQ ID NO: 8615
  source 1..120: mol_type = other DNA

SEQ ID NO: 99076 - DNA, 120 bp, synthetic construct; identical to SEQ ID NO: 8616
  source 1..120: mol_type = other DNA

SEQ ID NO: 99077 - DNA, 120 bp, synthetic construct; identical to SEQ ID NO: 8617
  source 1..120: mol_type = other DNA

SEQ ID NO: 99078 - DNA, 120 bp, synthetic construct; identical to SEQ ID NO: 8618
  source 1..120: mol_type = other DNA

SEQ ID NO: 99079 - DNA, 120 bp, synthetic construct; identical to SEQ ID NO: 8619
  source 1..120: mol_type = other DNA

SEQ ID NO: 99080 - DNA, 120 bp, synthetic construct
  source 1..120: mol_type = other DNA
aaatggcaaattttattatatgtatattttaacacacacacacaaaatgtttaggcctggcatgttggcgcatgtcagtaatcccagcacttcgcaaggccaaggtgggaggatcacttg

SEQ ID NO: 99081 - DNA, 120 bp, synthetic construct
  source 1..120: mol_type = other DNA
taacataacaagaaatgggaaaaggcatttcttttttcttcttttttttttttttttgagatggagtctcactttgtggcccaggctggagtgcagtggcgccatcttggcttgctgcaa

SEQ ID NO: 99082 - DNA, 120 bp, synthetic construct; identical to SEQ ID NO: 8620
  source 1..120: mol_type = other DNA

SEQ ID NO: 99083 - DNA, 120 bp, synthetic construct; identical to SEQ ID NO: 8621
  source 1..120: mol_type = other DNA

SEQ ID NO: 99084 - DNA, 120 bp, synthetic construct; identical to SEQ ID NO: 8622
  source 1..120: mol_type = other DNA

SEQ ID NO: 99085 - DNA, 120 bp, synthetic construct
  source 1..120: mol_type = other DNA
ttctaattagcctttccaaaggaggcaatcagatatgcatttatctcagtgagcagagagataactttgaatagaatgggaggcaggtttgccctaaacagtttccagcttgagttttcc

SEQ ID NO: 99086 - DNA, 120 bp, synthetic construct
  source 1..120: mol_type = other DNA
gtatatcttcttttgagaactgtctattcatatccttagcccactttatgatgggattgtttgtttttttcttgctgatttgtttgagtttgttgtagattctggatgttagtcctttgt

SEQ ID NO: 99087 - DNA, 120 bp, synthetic construct
  source 1..120: mol_type = other DNA
aggggttgagttcttgatttgattctcagcttggtcgctgttggtgtatagaagagctactgattcgcatgcattaattttgtatccagaaattttgctgaattgttttatcagttctag

SEQ ID NO: 99088 - DNA, 120 bp, synthetic construct
  source 1..120: mol_type = other DNA
ggtttttttttttttttttttttttgagatggagtcttgctctgtcgcctaggctggagtgcagtggtgcgatctcggctcactacaagctccgcctcccgggttcatgccattctcctg

SEQ ID NO: 99089 - DNA, 120 bp, synthetic construct
  source 1..120: mol_type = other DNA
atttcctttcttctgctggtttgggtttggtttgttcttgtttctctagttccttgaagtgtgacctttgattgtctgtttgtgctcttttagactttttgatgtaggtgtttaggaata

SEQ ID NO: 99090 - DNA, 120 bp, synthetic construct
  source 1..120: mol_type = other DNA
aaattagctgggcatggtggtgcacacctgtagttccagctacttgggaagctgacacaggagaattgcttgaacctgggaggcggaggttgcagtgtgccaagatcgcgccattgcact

SEQ ID NO: 99091 - DNA, 120 bp, synthetic construct
  source 1..120: mol_type = other DNA
tgttctttgtgcttcttgtatttgtttaggtctctagcaaggttggggaaattttcctcaattattcccccaaatatgtttttcaaacttttagatttctcttcttcctcagcaatgcca

SEQ ID NO: 99092 - DNA, 120 bp, synthetic construct; identical to SEQ ID NO: 8623
  source 1..120: mol_type = other DNA

SEQ ID NO: 99093 - DNA, 120 bp, synthetic construct; identical to SEQ ID NO: 8624
  source 1..120: mol_type = other DNA

SEQ ID NO: 99094 - DNA, 120 bp, synthetic construct
  source 1..120: mol_type = other DNA
cgctgttggtgagaaggtaaattagttcagtcactgcggaaagcagtttggtgatttctcaaagaatttaaaagagaactaccatttgacccaggaatcccattactggatatataccca

SEQ ID NO: 99095 - DNA, 120 bp, synthetic construct; identical to SEQ ID NO: 8625
  source 1..120: mol_type = other DNA

SEQ ID NO: 99096 - DNA, 120 bp, synthetic construct
  source 1..120: mol_type = other DNA
gagatatcttggggatgggacccaagtctaaacatgaaatttatttatgtttcatatacaccttgtacacatagcctgaaggtaattatgtttttctcttggggatgctgaataaactgg

SEQ ID NO: 99097 - DNA, 120 bp, synthetic construct; identical to SEQ ID NO: 8626
  source 1..120: mol_type = other DNA

SEQ ID NO: 99098 - DNA, 120 bp, synthetic construct; identical to SEQ ID NO: 8627
  source 1..120: mol_type = other DNA

SEQ ID NO: 99099 - DNA, 120 bp, synthetic construct; identical to SEQ ID NO: 8628
  source 1..120: mol_type = other DNA

SEQ ID NO: 99100 - DNA, 120 bp, synthetic construct; identical to SEQ ID NO: 8629
  source 1..120: mol_type = other DNA

SEQ ID NO: 99101 - DNA, 120 bp, synthetic construct; identical to SEQ ID NO: 8630
  source 1..120: mol_type = other DNA

SEQ ID NO: 99102 - DNA, 120 bp, synthetic construct; identical to SEQ ID NO: 8631
  source 1..120: mol_type = other DNA

SEQ ID NO: 99103 - DNA, 120 bp, synthetic construct; identical to SEQ ID NO: 8632
  source 1..120: mol_type = other DNA

SEQ ID NO: 99104 - DNA, 120 bp, synthetic construct; identical to SEQ ID NO: 8633
  source 1..120: mol_type = other DNA

SEQ ID NO: 99105 - DNA, 120 bp, synthetic construct; identical to SEQ ID NO: 8634
  source 1..120: mol_type = other DNA

SEQ ID NO: 99106 - DNA, 120 bp, synthetic construct
  source 1..120: mol_type = other DNA
caaagtgctggaattacaggtgtgagcccccgcgcccagccaaaagtgagaatgtcttttaaagacttcagataaaaagttttccacataatctcacagcattatctattaccttctcac

SEQ ID NO: 99107 - DNA, 120 bp, synthetic construct; identical to SEQ ID NO: 8635
  source 1..120: mol_type = other DNA

SEQ ID NO: 99108 - DNA, 120 bp, synthetic construct; identical to SEQ ID NO: 8636
  source 1..120: mol_type = other DNA

SEQ ID NO: 99109 - DNA, 120 bp, synthetic construct; identical to SEQ ID NO: 8637
  source 1..120: mol_type = other DNA

SEQ ID NO: 99110 - DNA, 120 bp, synthetic construct; identical to SEQ ID NO: 8638
  source 1..120: mol_type = other DNA

SEQ ID NO: 99111 - DNA, 120 bp, synthetic construct; identical to SEQ ID NO: 8639
  source 1..120: mol_type = other DNA

SEQ ID NO: 99112 - DNA, 120 bp, synthetic construct; identical to SEQ ID NO: 8640
  source 1..120: mol_type = other DNA

SEQ ID NO: 99113 - DNA, 120 bp, synthetic construct; identical to SEQ ID NO: 8641
  source 1..120: mol_type = other DNA

SEQ ID NO: 99114 - DNA, 120 bp, synthetic construct
  source 1..120: mol_type = other DNA
taaagaaatcatagatgacacaaacaaatggaaaaacattccatgctcatggattggaagaatcaatatcattaaaatggccatattgccgaaggtaatctacagattcaacactattcc

SEQ ID NO: 99115 - DNA, 120 bp, synthetic construct; identical to SEQ ID NO: 8642
  source 1..120: mol_type = other DNA

SEQ ID NO: 99116 - DNA, 120 bp, synthetic construct; identical to SEQ ID NO: 8643
  source 1..120: mol_type = other DNA

SEQ ID NO: 99117 - DNA, 120 bp, synthetic construct; identical to SEQ ID NO: 8644
  source 1..120: mol_type = other DNA

SEQ ID NO: 99118 - DNA, 120 bp, synthetic construct
  source 1..120: mol_type = other DNA
tctgttgcccagggtggagtacagtggcaagatctcggctcactgcaacctctgcctcccaggttcaaccgattttcctgcctcagcctcccgagtagctgggattacaggcgtgcacca

SEQ ID NO: 99119 - DNA, 120 bp, synthetic construct
  source 1..120: mol_type = other DNA
tacactgggtcttcatgcctttgttcctttgttcaatctcctccttctgagcctggaaaaccacccaagtctttgctattgtaaatagtgtgcagtgaacatttgcatgcatatgtcttc

SEQ ID NO: 99120 - DNA, 120 bp, synthetic construct; identical to SEQ ID NO: 8645
  source 1..120: mol_type = other DNA

SEQ ID NO: 99121 - DNA, 120 bp, synthetic construct; identical to SEQ ID NO: 8646
  source 1..120: mol_type = other DNA

SEQ ID NO: 99122 - DNA, 120 bp, synthetic construct; identical to SEQ ID NO: 8647
  source 1..120: mol_type = other DNA

SEQ ID NO: 99123 - DNA, 120 bp, synthetic construct; identical to SEQ ID NO: 8648
  source 1..120: mol_type = other DNA

SEQ ID NO: 99124 - DNA, 120 bp, synthetic construct; identical to SEQ ID NO: 8649
  source 1..120: mol_type = other DNA

SEQ ID NO: 99125 - DNA, 120 bp, synthetic construct; identical to SEQ ID NO: 8650
  source 1..120: mol_type = other DNA

SEQ ID NO: 99126 - DNA, 120 bp, synthetic construct; identical to SEQ ID NO: 8651
  source 1..120: mol_type = other DNA

SEQ ID NO: 99127 - DNA, 120 bp, synthetic construct; identical to SEQ ID NO: 8652
  source 1..120: mol_type = other DNA

SEQ ID NO: 99128 - DNA, 120 bp, synthetic construct; identical to SEQ ID NO: 8653
  source 1..120: mol_type = other DNA

SEQ ID NO: 99129 - DNA, 120 bp, synthetic construct; identical to SEQ ID NO: 8654
  source 1..120: mol_type = other DNA

SEQ ID NO: 99130 - DNA, 120 bp, synthetic construct
  source 1..120: mol_type = other DNA
gagttcaaggccagcctggccaacacggtgaaacctcatctctattgaaaaaaataaataaataaataacaaaattagctgggtgtggtggcgcatgcctataatcccagctactcagga

SEQ ID NO: 99131 - DNA, 120 bp, synthetic construct; identical to SEQ ID NO: 8655
  source 1..120: mol_type = other DNA

SEQ ID NO: 99132 - DNA, 120 bp, synthetic construct
  source 1..120: mol_type = other DNA
gggaggcagaggttgcagtgagccgagattgtgccactgcactccagcctgggtgacacagtgagtctccgtctcaaaaaaaaaaaaaaactcatatggataggcttaagtttttaattt

SEQ ID NO: 99133 - DNA, 120 bp, synthetic construct; identical to SEQ ID NO: 8656
  source 1..120: mol_type = other DNA

SEQ ID NO: 99134 - DNA, 120 bp, synthetic construct; identical to SEQ ID NO: 8657
  source 1..120: mol_type = other DNA

SEQ ID NO: 99135 - DNA, 120 bp, synthetic construct; identical to SEQ ID NO: 8658
  source 1..120: mol_type = other DNA

SEQ ID NO: 99136 - DNA, 120 bp, synthetic construct; identical to SEQ ID NO: 8659
  source 1..120: mol_type = other DNA

SEQ ID NO: 99137 - DNA, 120 bp, synthetic construct; identical to SEQ ID NO: 8660
  source 1..120: mol_type = other DNA

SEQ ID NO: 99138 - DNA, 120 bp, synthetic construct; identical to SEQ ID NO: 8661
  source 1..120: mol_type = other DNA

SEQ ID NO: 99139 - DNA, 120 bp, synthetic construct; identical to SEQ ID NO: 8662
  source 1..120: mol_type = other DNA

SEQ ID NO: 99140 - DNA, 120 bp, synthetic construct; identical to SEQ ID NO: 8663
  source 1..120: mol_type = other DNA

SEQ ID NO: 99141 - DNA, 120 bp, synthetic construct; identical to SEQ ID NO: 8664
  source 1..120: mol_type = other DNA

SEQ ID NO: 99142 - DNA, 120 bp, synthetic construct; identical to SEQ ID NO: 8665
  source 1..120: mol_type = other DNA

SEQ ID NO: 99143 - DNA, 120 bp, synthetic construct; identical to SEQ ID NO: 8666
  source 1..120: mol_type = other DNA

SEQ ID NO: 99144 - DNA, 120 bp, synthetic construct; identical to SEQ ID NO: 8667
  source 1..120: mol_type = other DNA

SEQ ID NO: 99145 - DNA, 120 bp, synthetic construct; identical to SEQ ID NO: 8668
  source 1..120: mol_type = other DNA

SEQ ID NO: 99146 - DNA, 120 bp, synthetic construct; identical to SEQ ID NO: 8669
  source 1..120: mol_type = other DNA

SEQ ID NO: 99147 - DNA, 120 bp, synthetic construct
  source 1..120: mol_type = other DNA
aagagagaccacattcacgtaacttttcttttttgagacagagtctcgctctgtcgccaaggttggagtgcagtggcgcgatctccgctcactgcaacctccgcctcctgtattcatgcc

SEQ ID NO: 99148 - DNA, 120 bp, synthetic construct
  source 1..120: mol_type = other DNA
agattacaggcgtgagccactgcgcccggcctctttctttccttctttctctctctctctttcttttcttttctttctttctttcattttttttttttttgagacagagttttgctcttg

SEQ ID NO: 99149 - DNA, 120 bp, synthetic construct; identical to SEQ ID NO: 8670
  source 1..120: mol_type = other DNA

SEQ ID NO: 99150 - DNA, 120 bp, synthetic construct; identical to SEQ ID NO: 8671
  source 1..120: mol_type = other DNA

SEQ ID NO: 99151 - DNA, 120 bp, synthetic construct; identical to SEQ ID NO: 8672
  source 1..120: mol_type = other DNA

SEQ ID NO: 99152 - DNA, 120 bp, synthetic construct; identical to SEQ ID NO: 8673
  source 1..120: mol_type = other DNA

SEQ ID NO: 99153 - DNA, 120 bp, synthetic construct; identical to SEQ ID NO: 8674
  source 1..120: mol_type = other DNA

SEQ ID NO: 99154 - DNA, 120 bp, synthetic construct
  source 1..120: mol_type = other DNA
caatatttaagaagtaaattcttttttttttttttttttgagatggcatctccctctgtcacccagctggagtgcgatggcgcaatcttggctcactgcaacctctgcctcctgggttca

SEQ ID NO: 99155 - DNA, 120 bp, synthetic construct; identical to SEQ ID NO: 8675
  source 1..120: mol_type = other DNA

SEQ ID NO: 99156 - DNA, 120 bp, synthetic construct
  source 1..120: mol_type = other DNA
cgtcactacacattttatgcgtgtatggtgaaaccacttaagatctactctcttagcaaatttcaagtaaataatacagtattattaactaaagtcaccatgctatcattggatccccaa

SEQ ID NO: 99157 - DNA, 120 bp, synthetic construct; identical to SEQ ID NO: 8676
  source 1..120: mol_type = other DNA

SEQ ID NO: 99158 - DNA, 120 bp, synthetic construct
  source 1..120: mol_type = other DNA
tcctcggcctcccaaagtactgagattacagatgtgagccactgcgcccagccgcttctaggcccttttaagagaacagaactagcaatgaatatttttaagtatgtatgtgtgtatttg

SEQ ID NO: 99159 - DNA, 120 bp, synthetic construct; identical to SEQ ID NO: 8677
  source 1..120: mol_type = other DNA

SEQ ID NO: 99160 - DNA, 120 bp, synthetic construct; identical to SEQ ID NO: 8678
  source 1..120: mol_type = other DNA

SEQ ID NO: 99161 - DNA, 120 bp, synthetic construct; identical to SEQ ID NO: 8679
  source 1..120: mol_type = other DNA

SEQ ID NO: 99162 - DNA, 120 bp, synthetic construct
  source 1..120: mol_type = other DNA
ctcagcctcccaaagtgctgggattacaggtgtgagctaccacgcctggcctattatgatttttaatgaagtttgtcataaccaagtacttgtcattttctgatgagaacactgaaagtt

SEQ ID NO: 99163 - DNA, 120 bp, synthetic construct; identical to SEQ ID NO: 8680
  source 1..120: mol_type = other DNA

SEQ ID NO: 99164 - DNA, 120 bp, synthetic construct; identical to SEQ ID NO: 8681
  source 1..120: mol_type = other DNA

SEQ ID NO: 99165 - DNA, 120 bp, synthetic construct; identical to SEQ ID NO: 8682
  source 1..120: mol_type = other DNA

SEQ ID NO: 99166 - DNA, 120 bp, synthetic construct; identical to SEQ ID NO: 8683
  source 1..120: mol_type = other DNA

SEQ ID NO: 99167 - DNA, 120 bp, synthetic construct; identical to SEQ ID NO: 8684
  source 1..120: mol_type = other DNA

SEQ ID NO: 99168 - DNA, 120 bp, synthetic construct; identical to SEQ ID NO: 8685
  source 1..120: mol_type = other DNA

SEQ ID NO: 99169 - DNA, 120 bp, synthetic construct; identical to SEQ ID NO: 8686
  source 1..120: mol_type = other DNA

SEQ ID NO: 99170 - DNA, 120 bp, synthetic construct
  source 1..120: mol_type = other DNA
actccaccagcctctagtaaccaccattctactctttgcttctatgagttcaacttcattagattccacatataggtgagcctatgtggtatgtgtgcctggcttatttcactaagcata

SEQ ID NO: 99171 - DNA, 120 bp, synthetic construct; identical to SEQ ID NO: 8687
  source 1..120: mol_type = other DNA

SEQ ID NO: 99172 - DNA, 120 bp, synthetic construct; identical to SEQ ID NO: 8688
  source 1..120: mol_type = other DNA

SEQ ID NO: 99173 - DNA, 120 bp, synthetic construct; identical to SEQ ID NO: 8689
  source 1..120: mol_type = other DNA

SEQ ID NO: 99174 - DNA, 120 bp, synthetic construct; identical to SEQ ID NO: 8690
  source 1..120: mol_type = other DNA

SEQ ID NO: 99175 - DNA, 120 bp, synthetic construct; identical to SEQ ID NO: 8691
  source 1..120: mol_type = other DNA

SEQ ID NO: 99176 - DNA, 120 bp, synthetic construct
  source 1..120: mol_type = other DNA
cccaggggtggaggttgcagtgagccaagatctcaccactgcactccagcctgggtgacagagtgagactctgtctcaaaaaaaaaaaataaataaataaaaattaaaaaatcacctgtg

SEQ ID NO: 99177 - DNA, 120 bp, synthetic construct; identical to SEQ ID NO: 8692
  source 1..120: mol_type = other DNA

SEQ ID NO: 99178 - DNA, 120 bp, synthetic construct; identical to SEQ ID NO: 8693
  source 1..120: mol_type = other DNA

SEQ ID NO: 99179 - DNA, 120 bp, synthetic construct; identical to SEQ ID NO: 8694
  source 1..120: mol_type = other DNA

SEQ ID NO: 99180 - DNA, 120 bp, synthetic construct; identical to SEQ ID NO: 8695
  source 1..120: mol_type = other DNA

SEQ ID NO: 99181 - DNA, 120 bp, synthetic construct; identical to SEQ ID NO: 8696
  source 1..120: mol_type = other DNA

SEQ ID NO: 99182 - DNA, 120 bp, synthetic construct
  source 1..120: mol_type = other DNA
ggcaccactgcactccagcctgggtgacagagcaagagtctgtctcggaaaaaaaaaaaaaagaattaatacaagtgcttagaatagtgcctagcatatgttaagctctcaatgctattt

SEQ ID NO: 99183 - DNA, 120 bp, synthetic construct; identical to SEQ ID NO: 8697
  source 1..120: mol_type = other DNA

SEQ ID NO: 99184 - DNA, 120 bp, synthetic construct; identical to SEQ ID NO: 8698
  source 1..120: mol_type = other DNA

SEQ ID NO: 99185 - DNA, 120 bp, synthetic construct; identical to SEQ ID NO: 8699
  source 1..120: mol_type = other DNA

SEQ ID NO: 99186 - DNA, 120 bp, synthetic construct; identical to SEQ ID NO: 8700
  source 1..120: mol_type = other DNA

SEQ ID NO: 99187 - DNA, 120 bp, synthetic construct; identical to SEQ ID NO: 8701
  source 1..120: mol_type = other DNA

SEQ ID NO: 99188 - DNA, 120 bp, synthetic construct; identical to SEQ ID NO: 8702
  source 1..120: mol_type = other DNA

SEQ ID NO: 99189 - DNA, 120 bp, synthetic construct; identical to SEQ ID NO: 8703
  source 1..120: mol_type = other DNA

SEQ ID NO: 99190 - DNA, 120 bp, synthetic construct; identical to SEQ ID NO: 8704
  source 1..120: mol_type = other DNA

SEQ ID NO: 99191 - DNA, 120 bp, synthetic construct; identical to SEQ ID NO: 8705
  source 1..120: mol_type = other DNA

SEQ ID NO: 99192 - DNA, 120 bp, synthetic construct; identical to SEQ ID NO: 8706
  source 1..120: mol_type = other DNA

SEQ ID NO: 99193 - DNA, 120 bp, synthetic construct; identical to SEQ ID NO: 8707
  source 1..120: mol_type = other DNA

SEQ ID NO: 99194 - DNA, 120 bp, synthetic construct; identical to SEQ ID NO: 8708
  source 1..120: mol_type = other DNA

SEQ ID NO: 99195 - DNA, 120 bp, synthetic construct; identical to SEQ ID NO: 8709
  source 1..120: mol_type = other DNA

SEQ ID NO: 99196 - DNA, 120 bp, synthetic construct; identical to SEQ ID NO: 8710
  source 1..120: mol_type = other DNA

SEQ ID NO: 99197 - DNA, 120 bp, synthetic construct; identical to SEQ ID NO: 8711
  source 1..120: mol_type = other DNA

SEQ ID NO: 99198 - DNA, 120 bp, synthetic construct; identical to SEQ ID NO: 8712
  source 1..120: mol_type = other DNA

SEQ ID NO: 99199 - DNA, 120 bp, synthetic construct; identical to SEQ ID NO: 8713
  source 1..120: mol_type = other DNA

SEQ ID NO: 99200 - DNA, 120 bp, synthetic construct; identical to SEQ ID NO: 8714
  source 1..120: mol_type = other DNA

SEQ ID NO: 99201 - DNA, 120 bp, synthetic construct; identical to SEQ ID NO: 8715
  source 1..120: mol_type = other DNA

SEQ ID NO: 99202 - DNA, 120 bp, synthetic construct; identical to SEQ ID NO: 8716
  source 1..120: mol_type = other DNA

SEQ ID NO: 99203 - DNA, 120 bp, synthetic construct; identical to SEQ ID NO: 8717
  source 1..120: mol_type = other DNA

SEQ ID NO: 99204 - DNA, 120 bp, synthetic construct; identical to SEQ ID NO: 8718
  source 1..120: mol_type = other DNA

SEQ ID NO: 99205 - DNA, 120 bp, synthetic construct; identical to SEQ ID NO: 8719
  source 1..120: mol_type = other DNA

SEQ ID NO: 99206 - DNA, 120 bp, synthetic construct; identical to SEQ ID NO: 8720
  source 1..120: mol_type = other DNA

SEQ ID NO: 99207 - DNA, 120 bp, synthetic construct; identical to SEQ ID NO: 8721
  source 1..120: mol_type = other DNA

SEQ ID NO: 99208 - DNA, 120 bp, synthetic construct; identical to SEQ ID NO: 8722
  source 1..120: mol_type = other DNA

SEQ ID NO: 99209 - DNA, 120 bp, synthetic construct; identical to SEQ ID NO: 8723
  source 1..120: mol_type = other DNA

SEQ ID NO: 99210 - DNA, 120 bp, synthetic construct; identical to SEQ ID NO: 8724
  source 1..120: mol_type = other DNA

SEQ ID NO: 99211 - DNA, 120 bp, synthetic construct; identical to SEQ ID NO: 8725
  source 1..120: mol_type = other DNA

SEQ ID NO: 99212 - DNA, 120 bp, synthetic construct
  source 1..120: mol_type = other DNA
ggtgtacgtgtgccatgttggtttgctgcacccatcaactcatcatttacattaggtatttctcctaacgctatccctcccccagcctcctaccccacaacaggccccggtgtgtgatgt

SEQ ID NO: 99213 - DNA, 120 bp, synthetic construct
  source 1..120: mol_type = other DNA
ttttctcccattctgtaggttgcctgttcactctgatggtagtttgttttgctgtgcagaagctttttagtttaattagatcccatttgtcaattttggcttttgttgctattgcttttg

SEQ ID NO: 99214 - DNA, 120 bp, synthetic construct
  source 1..120: mol_type = other DNA
tctgcaaacagggacaatttgacttcctcttttcctaattgaggaaaagactatttctttctcctgcctgattgccctggccagaacttccaacactatgttgaataggagtggtgggag

SEQ ID NO: 99215 - DNA, 120 bp, synthetic construct
  source 1..120: mol_type = other DNA
ttgtatttctgtgggatcagtggtgatatcccctttatcattttttattgtgtctatgtgattctgctctcttttcttctttattagtcttgctggcagtctataaattttgttgatctt

SEQ ID NO: 99216 - DNA, 120 bp, synthetic construct
  source 1..120: mol_type = other DNA
ttaaatgtaaatgggctaaatgctccaattaaaagacacagactggcaaattggataaagagtcaagacccatcagtgtgctgtattcaggaaacccatctcaagtgcagagacatacat

SEQ ID NO: 99217 - DNA, 120 bp, synthetic construct
  source 1..120: mol_type = other DNA
atctctgggacacattcaaagcagtgtgtagagggaaatttatggcactaaatgcccacaagaggaagcaggaaagatctaaaattgacaccctaacaccacaattaaaagaacaagaga

SEQ ID NO: 99218 - DNA, 120 bp, synthetic construct
  source 1..120: mol_type = other DNA
ccagcatataaacagaaccaatgacaaaaaccatatgattatctcaatagatgcagaaaacgcctttgacaaatttcaacaacccttcatgctaaaaactctcaataaattaggtattga

SEQ ID NO: 99219 - DNA, 120 bp, synthetic construct
  source 1..120: mol_type = other DNA
tttgacaaacctgacaaaaacaagcaatggggaaatgatcccctatttaataaatggtgctgggaaaactggctagccatatgtagaaagctgaaactggatcccttccttacaccttat

SEQ ID NO: 99220 - DNA, 120 bp, synthetic construct
  source 1..120: mol_type = other DNA
agccatacaaaatgatgagttcatgtcctttgtagggacatggataaagctggaaaccatcattctcagcaaactatcacaaggacaaaaaaaccaaacactgcatgttctcactcatag

SEQ ID NO: 99221 - DNA, 120 bp, synthetic construct
  source 1..120: mol_type = other DNA
cctgcctcagcctcccaaagtgttgggattacaggcatgagccactgtgcccagcctcatgtcacattttgaaaagctcgctctgaaattttttttttttaggttttttttttattattg

SEQ ID NO: 99222 - DNA, 120 bp, synthetic construct; identical to SEQ ID NO: 25104
  source 1..120: mol_type = other DNA

SEQ ID NO: 99223 - DNA, 120 bp, synthetic construct; identical to SEQ ID NO: 25105
  source 1..120: mol_type = other DNA

SEQ ID NO: 99224 - DNA, 120 bp, synthetic construct; identical to SEQ ID NO: 25106
  source 1..120: mol_type = other DNA

SEQ ID NO: 99225 - DNA, 120 bp, synthetic construct; identical to SEQ ID NO: 25107
  source 1..120: mol_type = other DNA

SEQ ID NO: 99226 - DNA, 120 bp, synthetic construct; identical to SEQ ID NO: 25108
  source 1..120: mol_type = other DNA

SEQ ID NO: 99227 - DNA, 120 bp, synthetic construct; identical to SEQ ID NO: 25109
  source 1..120: mol_type = other DNA

SEQ ID NO: 99228 - DNA, 120 bp, synthetic construct
  source 1..120: mol_type = other DNA
tgcctgtggctatttgctacaagaggttaggaagcccaagaaaatgactgaagatcattctggatattttaatttttttttttttttttttttgagatggagtcttgctctgtcacccag

SEQ ID NO: 99229 - DNA, 120 bp, synthetic construct
  source 1..120: mol_type = other DNA
accacgcctggctaaatttgtatttttagtagagacaggtttctccatgtttgtcaggctggtctcaaactcgcgatcctagggggctactttggcaggtattaaaacttttttttaggc

SEQ ID NO: 99230 - DNA, 120 bp, synthetic construct; identical to SEQ ID NO: 28340
  source 1..120: mol_type = other DNA

SEQ ID NO: 99231 - DNA, 120 bp, synthetic construct
  source 1..120: mol_type = other DNA
ctgaggcaggagaattgcttgaacccaggaggtggaggttgcagttagctgagattgcaccattgcactccagcctggagacaagagtgaaactctgtctcaaaaaaaaaaatatatata

SEQ ID NO: 99232 - DNA, 120 bp, synthetic construct
  source 1..120: mol_type = other DNA
ttttataagcttttttctattttcaatttttttaacttttgaaacttgtgttaaaaaccgagacacattgattttgtatcctgagactttgctgaagttgcttatcagcttaaggagatt

SEQ ID NO: 99233 - DNA, 120 bp, synthetic construct
  source 1..120: mol_type = other DNA
gatcctgttattggtctattcagagattcaacttcttcctggattagtcttgggagagtgtatgtgtaaaaatcacaagtattcttatacaccaacaacagacaaacagagagccaaatc

SEQ ID NO: 99234 - DNA, 120 bp, synthetic construct
  source 1..120: mol_type = other DNA
aatgggagaaaattttcacaacctactcatctgacaaagggctaatatccagcatctacaatgaactcaaacaaatttacaagaaacaaccccatcaaagagtgggcgaaggacatgaac

SEQ ID NO: 99235 - DNA, 120 bp, synthetic construct
  source 1..120: mol_type = other DNA
aatttcaaaaaaaaaaaaccgagacacaaatgcacacagtgatgttgatcatcttgaccctgggtaggcctagggtcaagatgatcaatatcactgtcttccacctccacatttttccca

SEQ ID NO: 99236 - DNA, 120 bp, synthetic construct
  source 1..120: mol_type = other DNA
ctgtaatatagtttgaagtcaagtaacatgatgcctgtagctttgttctttttgcttaagattgccttggctaaggaggcctgcctgcctctgtaggctccacctctgggggcagggcac

SEQ ID NO: 99237 - DNA, 120 bp, synthetic construct
  source 1..120: mol_type = other DNA
agagaagtttagagaaaaaagaataaaaagaaatgaacaaagcctccaagaaatatgggactatgtgaaaagaccaaatctacatctgactggtgtacctgaaagtgatggggagaatgg

SEQ ID NO: 99238 - DNA, 120 bp, synthetic construct
  source 1..120: mol_type = other DNA
tatgcacccaatacaggagcacccagattcataaagcaagtccctagtgacctacaaagagacttagactcccacaaattaataatgggagactttaacaccccactgtcaacattagac

SEQ ID NO: 99239 - DNA, 120 bp, synthetic construct
  source 1..120: mol_type = other DNA
ttgtggcaataatcaatagcttaccaacaaaaaatagtccaggaccagatggattcacagccgaattctaccagaggtacaaggaggaactggtaccattccttctgaaactattccaat

SEQ ID NO: 99240 - DNA, 120 bp, synthetic construct
  source 1..120: mol_type = other DNA
agtggaagaacattccatgttcatgggtaggaagaatcaatatcgtgaaaatggccatactgcccaaggtaatttatagattcaatgccatccccatcaagctaccaatgactttcttca

SEQ ID NO: 99241 - DNA, 120 bp, synthetic construct
  source 1..120: mol_type = other DNA
aacctactcatctgacaaagggctaatatccagaatctacaatgaactccaacaaatttacaagaaaaagacaaacaaccccattgaaaagtgggtgaaggacacgaacagacacttctc

SEQ ID NO: 99242 - DNA, 120 bp, synthetic construct; identical to SEQ ID NO: 28341
  source 1..120: mol_type = other DNA

SEQ ID NO: 99243 - DNA, 120 bp, synthetic construct
  source 1..120: mol_type = other DNA
cacttttcgatggggttgtttgtttgtttcttgtaaatttgttggagttcattgtagattctggatattagccctttgtcagatgagtagattgcaaaaattttctcccattctgtaggt

SEQ ID NO: 99244 - DNA, 120 bp, synthetic construct
  source 1..120: mol_type = other DNA
ttcctactcatgagcatggaatgttcttccatttgtctgtatcctcttttatttccttgagcagtggtttgtagttctccttgaagaggtccttcacatcccttgtaagttggattccta

SEQ ID NO: 99245 - DNA, 120 bp, synthetic construct; identical to SEQ ID NO: 28342
  source 1..120: mol_type = other DNA

SEQ ID NO: 99246 - DNA, 120 bp, synthetic construct
  source 1..120: mol_type = other DNA
ttatgtcagacctgtcccaaggcacaagctgggtcctatcccattggctccactgaatggtctctatgctaataaagacatacttgagactgggtaatttataaaggaaagaggtttaat

SEQ ID NO: 99247 - DNA, 120 bp, synthetic construct
  source 1..120: mol_type = other DNA
gttaagctagtttacagtcccaccaacattgtaaaagtgttcctatttctccacatcctctccagcacctgttgtttcctgactttttaatgattgccattctaactggtgtgagatggt

SEQ ID NO: 99248 - DNA, 120 bp, synthetic construct
  source 1..120: mol_type = other DNA
gcatttctctgatggccagtgatgacgagcattttttcacgtgtcttttggctgcataaatgtcttcttttgagaagtgtctgttcatatccttcgcccacttgttgatggggttgtttg

SEQ ID NO: 99249 - DNA, 120 bp, synthetic construct; identical to SEQ ID NO: 28343
  source 1..120: mol_type = other DNA

SEQ ID NO: 99250 - DNA, 120 bp, synthetic construct
  source 1..120: mol_type = other DNA
cactgacttccacaagggttgaactagtttacagtcccaccaacagtgtaaaagtgttcctatttctccacaccctctccagcacctgttgtttcctgactttttaatgattgccattct

SEQ ID NO: 99251 - DNA, 120 bp, synthetic construct
  source 1..120: mol_type = other DNA
atgactttcttcacagaattggaaaaaactactttaaagttcatatcgaaccaaaaagagcccgcattgccaagtcaatcctaagccaaaagaacaaagctggaggcatcatgctacctg

SEQ ID NO: 99252 - DNA, 120 bp, synthetic construct; identical to SEQ ID NO: 15614
  source 1..120: mol_type = other DNA

SEQ ID NO: 99253 - DNA, 120 bp, synthetic construct
  source 1..120: mol_type = other DNA
attgaacaatgagaacacatggacacaggaaggggaacatcacactctgggggctgttgtgggttggggggaggggggagggatggcattaggagatatacctaatgctaaatgacgagt

SEQ ID NO: 99254 - DNA, 120 bp, synthetic construct
  source 1..120: mol_type = other DNA
ttattgtgtgggagtctaagtctctttgtaggtctctaaggacttgccttatgaatctgggtgctcctgtattgggtgcatatatatttaggatagttagctcttcttgttgaattgatc

SEQ ID NO: 99255 - DNA, 120 bp, synthetic construct; identical to SEQ ID NO: 26834
  source 1..120: mol_type = other DNA

SEQ ID NO: 99256 - DNA, 120 bp, synthetic construct; identical to SEQ ID NO: 26835
  source 1..120: mol_type = other DNA

SEQ ID NO: 99257 - DNA, 120 bp, synthetic construct; identical to SEQ ID NO: 26836
  source 1..120: mol_type = other DNA

SEQ ID NO: 99258 - DNA, 120 bp, synthetic construct
  source 1..120: mol_type = other DNA
gtttcctttgctgtgcagaagctttttaacttgatatgatcccatttatccattcttgctttgttgcctgtgcttgtggggtattactcaagaaatctttgcccagtccaatgttctgga

SEQ ID NO: 99259 - DNA, 120 bp, synthetic construct; identical to SEQ ID NO: 26837
  source 1..120: mol_type = other DNA

SEQ ID NO: 99260 - DNA, 120 bp, synthetic construct
  source 1..120: mol_type = other DNA
aggacagaaataaaatcgccatttcagctccgggcgcagctggaggaggctgacgccccctagttaggggaaggctgtgggtgaccgagaaggaacttttcccgttttctattcaaatga

SEQ ID NO: 99261 - DNA, 120 bp, synthetic construct; identical to SEQ ID NO: 23133
  source 1..120: mol_type = other DNA

SEQ ID NO: 99262 - DNA, 120 bp, synthetic construct; identical to SEQ ID NO: 28654
  source 1..120: mol_type = other DNA

SEQ ID NO: 99263 - DNA, 120 bp, synthetic construct; identical to SEQ ID NO: 28655
  source 1..120: mol_type = other DNA

SEQ ID NO: 99264 - DNA, 120 bp, synthetic construct
  source 1..120: mol_type = other DNA
tatgttacaaaaggtcccccaccaggggcaagagaggaggtagatgccacccccatattctcacacacaaagcctcccagacactaggagaatcctattcagaccccaaaacctctcacg

SEQ ID NO: 99265 - DNA, 120 bp, synthetic construct; identical to SEQ ID NO: 23817
  source 1..120: mol_type = other DNA

SEQ ID NO: 99266 - DNA, 120 bp, synthetic construct; identical to SEQ ID NO: 23818
  source 1..120: mol_type = other DNA

SEQ ID NO: 99267 - DNA, 120 bp, synthetic construct; identical to SEQ ID NO: 25888
  source 1..120: mol_type = other DNA

SEQ ID NO: 99268 - DNA, 120 bp, synthetic construct
  source 1..120: mol_type = other DNA
tttgtgttcaaagagtgaagtaaggccattttcacgatattgattcttcctacccgtgagcatggagaactagaaataccatttgacccagccatcccattactgggtatatacccaaag

SEQ ID NO: 99269 - DNA, 120 bp, synthetic construct; identical to SEQ ID NO: 12318
  source 1..120: mol_type = other DNA

SEQ ID NO: 99270 - DNA, 120 bp, synthetic construct; identical to SEQ ID NO: 12319
  source 1..120: mol_type = other DNA

SEQ ID NO: 99271 - DNA, 120 bp, synthetic construct
  source 1..120: mol_type = other DNA
ctgcataaatgccttcttttgagaagtgtctgttcatatccttcacccactttttgatggggttctttgtttttttcttgtaaatttgtttgagttcattgtagattctggatattagcc

SEQ ID NO: 99272 - DNA, 120 bp, synthetic construct
  source 1..120: mol_type = other DNA
ctctctgtttgtctgttattggtgtataggaatgcttgtgatttttgtacattgattttgtatcctgagactttgctgaaattgcttatcagcttgaggagattttgggctgagatgatg

SEQ ID NO: 99273 - DNA, 120 bp, synthetic construct
  source 1..120: mol_type = other DNA
taatgcttttgaatttcaaaagaaacacctctaagcattcaaaagaaagacaaaggggtttgttaagattcataaaacagtaatgaggccgggcgcggtggctcacgcctgtaatcccag

SEQ ID NO: 99274 - DNA, 120 bp, synthetic construct
  source 1..120: mol_type = other DNA
ttcttgtaaatttgtttgagttcattgtagattctggatattatccctttgtcagatgagtaggttgcaaaaattttctcccattttatagtttgcctgttcactctgatggtagtttct

SEQ ID NO: 99275 - DNA, 120 bp, synthetic construct; identical to SEQ ID NO: 12321
  source 1..120: mol_type = other DNA

SEQ ID NO: 99276 - DNA, 120 bp, synthetic construct
  source 1..120: mol_type = other DNA
gaatttttttaacacatatgctaattctagactaagggccaatttcttttcttttcttttctttctttttctttttcgagacagagtctcacactgttgcctggactggagtgcagtggt

SEQ ID NO: 99277 - DNA, 120 bp, synthetic construct
  source 1..120: mol_type = other DNA
gagaggggacatccttgccttgctcttcattttagtaagcaagtgtctaatcattgatatcccattgctaacttgctatggtatagtatttaatgctatactcacctcctcaccatctcc

SEQ ID NO: 99278 - DNA, 120 bp, synthetic construct; identical to SEQ ID NO: 12322
  source 1..120: mol_type = other DNA

SEQ ID NO: 99279 - DNA, 120 bp, synthetic construct; identical to SEQ ID NO: 12323
  source 1..120: mol_type = other DNA

SEQ ID NO: 99280 - DNA, 120 bp, synthetic construct
  source 1..120: mol_type = other DNA
gaaatgaatgaaatgaaatgagaagggaagtttaaagaaaaaagaataaaaagaaacgaacaaagcctccaagaaatatgggactatgtgaaaagaccaaatctacgtctgattggtgta

SEQ ID NO: 99281 - DNA, 120 bp, synthetic construct
  source 1..120: mol_type = other DNA
caatattagacagatcaacgagacaaaaagttaacaaagatagccaggaattgaactcagctctgcaccaagcggacctaatagacatctacagaactctccaccccaaatcaacagaat

SEQ ID NO: 99282 - DNA, 120 bp, synthetic construct
  source 1..120: mol_type = other DNA
ttctctgaatagaccaataacaggctctgaaattgtggcaataatcagtagcttaccaaccaaaaagagtccaggaccagatggattcacagccgaattctaccagaggtacaaggagga

SEQ ID NO: 99283 - DNA, 120 bp, synthetic construct
  source 1..120: mol_type = other DNA
caatgtacaaaaatcacaagcattcttatacaccaataacagacaaacagccaaatcgtgagtgaactcccattcacaattgcttcaaagagaataaaatacctaggaatccaacttaca

SEQ ID NO: 99284 - DNA, 120 bp, synthetic construct
  source 1..120: mol_type = other DNA
tgacaaagggctaatatccagactctacaatgaactttaacaaatttacaggaaaaaaacaaacaaccccatcaaaaagtgggcaaaggacatgaacagacacttctcaaaagaagacat

SEQ ID NO: 99285 - DNA, 120 bp, synthetic construct
  source 1..120: mol_type = other DNA
agttgaatcctaagctataatataattttaagaacctccttgcctttcaagccaaataaccaagggactttctctctctctttccctccctcccttccttccttccttccttcttctctc

SEQ ID NO: 99286 - DNA, 120 bp, synthetic construct; identical to SEQ ID NO: 31370
  source 1..120: mol_type = other DNA

SEQ ID NO: 99287 - DNA, 120 bp, synthetic construct
  source 1..120: mol_type = other DNA
gtgccattgcactacggcctgggcgacaagagcaagactccgtattttaaaaaaaaaaaaaaaaaaaaaaaaaaaaaagcgttccctttagggatatctgtgggtagagggctgtaccgg

SEQ ID NO: 99288 - DNA, 120 bp, synthetic construct; identical to SEQ ID NO: 33549
  source 1..120: mol_type = other DNA

SEQ ID NO: 99289 - DNA, 120 bp, synthetic construct; identical to SEQ ID NO: 11834
  source 1..120: mol_type = other DNA

SEQ ID NO: 99290 - DNA, 120 bp, synthetic construct
  source 1..120: mol_type = other DNA
cctatttctccacatcctctccagcaccttttgtttcctgactttttttttttttttttttttttttgagacgcagtcttgctctttggcccaggtgggagtgcagtggcgcaatctcgg

SEQ ID NO: 99291 - DNA, 120 bp, synthetic construct
  source 1..120: mol_type = other DNA
aaagcttatccaccatgaccaagtgggcttcatccctgggatgcaaggctggttcaagatacgcaaatcaataaatgtaatccaacatatacacagaaccaaagacaaaaaccacatgat

SEQ ID NO: 99292 - DNA, 120 bp, synthetic construct
  source 1..120: mol_type = other DNA
accactaagaagtatgcgcctgtggatgggggccctgtcaccgcagcgtccatcactgctttctgccatgcagtcctcaacggccaagtcaaggtccgctgcagactgctcataatggaa

SEQ ID NO: 99293 - DNA, 120 bp, synthetic construct
  source 1..120: mol_type = other DNA
ttgacgaaaccaagaatgtgtttgtcaagttctgtgagtgttgagggaggcaggggtggtgtgggctgggcaggggctgcccagatggctgtgctcaacggctcccatcctagatgcccc

SEQ ID NO: 99294 - DNA, 120 bp, synthetic construct; identical to SEQ ID NO: 30265
  source 1..120: mol_type = other DNA

SEQ ID NO: 99295 - DNA, 120 bp, synthetic construct; identical to SEQ ID NO: 24610
  source 1..120: mol_type = other DNA

SEQ ID NO: 99296 - DNA, 120 bp, synthetic construct; identical to SEQ ID NO: 24611
  source 1..120: mol_type = other DNA

SEQ ID NO: 99297 - DNA, 120 bp, synthetic construct
  source 1..120: mol_type = other DNA
ctcggcctcccaaagtgctgggattacaggcgtgagccaccgtgcccggccctgtgtcctagtttttgacaaaaaagtttaaaaaactaaaacaaactttaaaaacgaaaaaaacctacg

SEQ ID NO: 99298 - DNA, 120 bp, synthetic construct
  source 1..120: mol_type = other DNA
tacattgattttgtatccaaaagcaatggcaacaaaagacaaaattgacaaatggatctaattaaactaaagagcttctgcacagcaaaagaaactaccatcagagtgaacaggcaacct

SEQ ID NO: 99299 - DNA, 120 bp, synthetic construct
  source 1..120: mol_type = other DNA
aaaaaaaacgaaaaaaaccttacagaatacggatataaaagaaaatactggccaggtgctatgggtcatgcttgtaatcccagcactttgggaggccaaggcaggcagatcgcttgagct

SEQ ID NO: 99300 - DNA, 120 bp, synthetic construct; identical to SEQ ID NO: 16286
  source 1..120: mol_type = other DNA

SEQ ID NO: 99301 - DNA, 120 bp, synthetic construct; identical to SEQ ID NO: 33611
  source 1..120: mol_type = other DNA

SEQ ID NO: 99302 - DNA, 120 bp, synthetic construct
  source 1..120: mol_type = other DNA
ctacatccatccgtttagacagtttatcttatgtacctatagatatatacatgcacatgtgcacacacacacacacacacacacacacacacacacacacacacgcttgtgcctatgtta

SEQ ID NO: 99303 - DNA, 120 bp, synthetic construct
  source 1..120: mol_type = other DNA
aggcctgggctgtaagtcaggcctctggttctgcaccaggcaagcccagactccagtctcttaattttttttttttttttttttttgagacagagtctcgctctgttgccaggctggagt

SEQ ID NO: 99304 - DNA, 120 bp, synthetic construct
  source 1..120: mol_type = other DNA
ctcctctgagtctcaggagctctgcttgggagcccggggcagcatcctccctgggcaggctgggggtggccctggcacacactgtccctttcccactttcagcttccagagtctggcatg

SEQ ID NO: 99305 - DNA, 120 bp, synthetic construct
  source 1..120: mol_type = other DNA
tctcaaaagtctgttttatttttttaatagctttgttagtgaatgcatgtgttggcacaggagttgcaatgtcaaatgcctacaggggccaggcacgtgttttggctcctctcaaaatcc

SEQ ID NO: 99306 - DNA, 120 bp, synthetic construct
  source 1..120: mol_type = other DNA
gtttgttgcatcgagtggcataattgtttgaatacaaaactaaagaaattcagggaatttctccctaacatgcactgtaatagttaaaacacatacagacaactgcagattatgttagaa

SEQ ID NO: 99307 - DNA, 120 bp, synthetic construct
  source 1..120: mol_type = other DNA
caagtactttatagaaaatttgtaggatcctacttcatgatctttccccatcgtttctttgaagagggagacatgatggagacaagaccaacccctctgcaaaagattctgcttttgacg

SEQ ID NO: 99308 - DNA, 120 bp, synthetic construct
  source 1..120: mol_type = other DNA
tgccatggagatgttagaattatcttggttgacttgatcctgcactagcaagtgtggctatttaaacataaggtccctgccgggcacggtggctcacacttgtaatcccagcactttggg

SEQ ID NO: 99309 - DNA, 120 bp, synthetic construct
  source 1..120: mol_type = other DNA
tctattttaaagtgtgcactttaacctgaagttgcatctgcaccgtcattccgagaggggcaggactgatgcaatcataagggacgctgttctgaaatagggcattatagaatggaatta

SEQ ID NO: 99310 - DNA, 120 bp, synthetic construct
  source 1..120: mol_type = other DNA
aggcagaggttgcagtgagccaagattgtgccactcactctagcctgggcaacagagcaagactccatctcaaaaaagaaaaaaaaaaaaataaagaatctgtttgagtccctgctttca

SEQ ID NO: 99311 - DNA, 120 bp, synthetic construct
  source 1..120: mol_type = other DNA
ggcctctatcaatacgtttcagcaggtgtcagcggctgctcaccagagccatcgtccaccattccctggagcactctgaaggagcccgactggcgaggctgtgtgggctcattccgattg

SEQ ID NO: 99312 - DNA, 120 bp, synthetic construct
  source 1..120: mol_type = other DNA
ttattccctatgtcatatttgcaaatggctttgagatatcttacactactattagttcaatgtgttcatcccaagagatagctttgggatatcactatttaacactctgaagcattataa

SEQ ID NO: 99313 - DNA, 120 bp, synthetic construct
  source 1..120: mol_type = other DNA
cctggagtgtttccataatattgtcatctgagtacaactgcataggtgtattaaactgagcatgtacaatcttcacaccaggaagttccatttccaaaggaatgttaggggccagcttag

SEQ ID NO: 99314 - DNA, 120 bp, synthetic construct
  source 1..120: mol_type = other DNA
caatttcagaagcacgcatctattcccaggcatatttcccttttccttttaaagatacatttcagggacttattaaaacatcaaaggccagtcatgcacatcgaagaactagggagattg

SEQ ID NO: 99315 - DNA, 120 bp, synthetic construct
  source 1..120: mol_type = other DNA
tttgactcctccaaaacttaactaccaatagcctactgttgaaccgaagttttacagataaacagtctattagcacacaaatagactactacctatgtgtattgtatacattcatggcaa

SEQ ID NO: 99316 - DNA, 120 bp, synthetic construct
  source 1..120: mol_type = other DNA
cctccagcttcaagtgattctcatgcctcagcctcctgaatagctgcaattacaggcatgtgccaccatgcccagctaatttttctatttttagtagagatggggtttcatcacgttggc

SEQ ID NO: 99317 - DNA, 120 bp, synthetic construct
  source 1..120: mol_type = other DNA
gggattacaggtgtgagccatcgcaccaggccttataattctttaagatttgtgcactggcatctgttttttaagcaaaccttctcatttctgtttctctccttctctcttccaaattca

SEQ ID NO: 99318 - DNA, 120 bp, synthetic construct
  source 1..120: mol_type = other DNA
tatcacaagaattgtctggcatattttgagacaatcacctggctctgcctgtagcttcctgaaaggtctggacatggaaatcatacataagggatgacctgctatccgcagcttatgaca

SEQ ID NO: 99319 - DNA, 120 bp, synthetic construct
  source 1..120: mol_type = other DNA
tcgcaatgagaaaagccactccaaacatctaccagttacttttcttgatgattagtaagaactgatttaagaagcatgcactgcaaactccacagtctcagcgcttatgacctgcttcgg

SEQ ID NO: 99320 - DNA, 120 bp, synthetic construct
  source 1..120: mol_type = other DNA
agattgacggaaagattagaggaggagttagccataaacttttccatggttttctctgagctttacatgtgctatattcaccgatcaaatgttaaggtgaaaaggaactgaccttattta

SEQ ID NO: 99321 - DNA, 120 bp, synthetic construct
  source 1..120: mol_type = other DNA
ccagagtgctgggattataggcatgagccaccgcgcccagtcccaaatctttctatttggcagaattagtaagataaatctttctaacagtattttcccttacacattcacatcaacttc

SEQ ID NO: 99322 - DNA, 120 bp, synthetic construct
  source 1..120: mol_type = other DNA
caatggccatgattcaagcctttttgatatgagagaagacagcacactaattgcctaactgcctagttaagttttggtggattacaagtctctcaggctaattaaagaatcaggcagtac

SEQ ID NO: 99323 - DNA, 120 bp, synthetic construct
  source 1..120: mol_type = other DNA
agcagtctcccatgtccttggaatgacctcagacatgacagcagtcaaaggcttcacctttcaacttcttacttggagactgctcacagataaagattcagataatctttataattctga

SEQ ID NO: 99324 - DNA, 120 bp, synthetic construct
  source 1..120: mol_type = other DNA
actcagagaaacaaaacttagctatttgatgatagcatggaaaaattattattattattatttgtgagacggagtcttactctgttgcccaggctggagtgcagtggtgcgatcttggct

SEQ ID NO: 99325 - DNA, 120 bp, synthetic construct
  source 1..120: mol_type = other DNA
ggtttacgctaaaggatttttggatagcaggagatacactgcaatttagttatttttgtgtagggaatgtctgtcctgaagtaccaagttacataaactggccgtgcagaaatctggcct

SEQ ID NO: 99326 - DNA, 120 bp, synthetic construct
  source 1..120: mol_type = other DNA
tttcttctagcaaagaaaatgttgactagaggtgtcattattcaccagcccacctagtatgtcagggggagtcgccatcagcattcagatcccttctcattatatttattatctgtgcca

SEQ ID NO: 99327 - DNA, 120 bp, synthetic construct
  source 1..120: mol_type = other DNA
actgaaaataaagctttgttccatttgtcacgaccctcgtaatagcaatgaagaaggcattcctagcctctaggatgtcctatcatgtaggcagctaactatctcaccagcaagaaacgc

SEQ ID NO: 99328 - DNA, 120 bp, synthetic construct
  source 1..120: mol_type = other DNA
tgagatctgggtgaagacctcgaaggactgaaattcacagtaaccgtagattggagacacctgtttcaaatggtagaccttatttttgctttgctttgttttaacaacttaaactcctta

SEQ ID NO: 99329 - DNA, 120 bp, synthetic construct
  source 1..120: mol_type = other DNA
aagtcgtacatttttaatgtccttttgggtatggcagactagataaaaattgcctggagtacactgcacagtttctggaggaaggaggcctgcaaggcatgtgggaaacaggagagggag

SEQ ID NO: 99330 - DNA, 120 bp, synthetic construct
  source 1..120: mol_type = other DNA
aaagtcagccaaaatactaggtctgtggccctccttgctgggaggatgaagttatttatagttctggttcaggttctcctgcaaaacagatcagatttaagcaccattagttaagaagca

SEQ ID NO: 99331 - DNA, 120 bp, synthetic construct
  source 1..120: mol_type = other DNA
ataacaagtgaggtgtctgcaacccagaagagtttcctcaccagaacccaaccatgctggtatcctaaccttggatttccggtctccagaacagtgagaaataaatttatgttacttata

SEQ ID NO: 99332 - DNA, 120 bp, synthetic construct
  source 1..120: mol_type = other DNA
tatacacctctgtctagacctcacatgggtcttaccttgcctacttctctcatatcatcttacattattcctgctctccctcatccatggtgctgtggccattctgatttccttttagtt

SEQ ID NO: 99333 - DNA, 120 bp, synthetic construct
  source 1..120: mol_type = other DNA
atttttaaatgtctaagactagaataattttctttgagttaaaacacagggccaggcatgatgcctcatgcctgtaatcccagtgctttgggaggctgaggtggaaggattgcttgaggc

SEQ ID NO: 99334 - DNA, 120 bp, synthetic construct
  source 1..120: mol_type = other DNA
gccagatcccacttctcattttgtattcaacctggttattgctgtcctgagacctctaaggagacagttgatgagaaaaaggaaatagagagaggaatgagagagaaggagaaaacatga

SEQ ID NO: 99335 - DNA, 120 bp, synthetic construct
  source 1..120: mol_type = other DNA
ctgtgttcagaagtcacatgggcggctttaacatgctgccagggctgggaaccatcaccgtattactattgagaactattatctcacataattcttaagacaatcttacaacatagttat

SEQ ID NO: 99336 - DNA, 120 bp, synthetic construct
  source 1..120: mol_type = other DNA
gcctacaaatagtaattggaatatttgagaagtaaacaactcataagtgttaaattgcagctgtgctgagtagcgcgatgaagtcttactctgtcccacctgggtcatggatcatccctt

SEQ ID NO: 99337 - DNA, 120 bp, synthetic construct
  source 1..120: mol_type = other DNA
atttgtatagtgtgaggcggggagtgaagggtatagcttgtaggaggacaaaagctgatttaatggggactcgattaaacacatctcgtttatgggactttttgtggctttaagtgtaga

SEQ ID NO: 99338 - DNA, 120 bp, synthetic construct
  source 1..120: mol_type = other DNA
tgtgcaatctggtgggatacagatgcagtggaacatctggtacaggcatgacataaggaggggttatacaggccgaaagctacagtaatcaaccggatgagatggttgttactgaaagaa

SEQ ID NO: 99339 - DNA, 120 bp, synthetic construct
  source 1..120: mol_type = other DNA
ggctttggggacacttgggatacaaaaatgatttggttttacctgctgtcctagaattaattaaagagaaaagccataatcaagtgaaatcatatttggtcataaactgttattgaacca

SEQ ID NO: 99340 - DNA, 120 bp, synthetic construct
  source 1..120: mol_type = other DNA
cttgttttctcattagacagtagagaacaccaagtaaagcttgactttgacattaaagcattattttccgttttaggctgagtggtttactttgcatcaggtaaactaaactgtctgcca

SEQ ID NO: 99341 - DNA, 120 bp, synthetic construct
  source 1..120: mol_type = other DNA
gctggttgaagtctatgccccctgagagcctgaagccccagggcgcagggcccgggaggatcaccgtctggggcatgccgccttcctcccgcccaccgggctctaagtgtccccgcgcag

SEQ ID NO: 99342 - DNA, 120 bp, synthetic construct; identical to SEQ ID NO: 25648
  source 1..120: mol_type = other DNA

SEQ ID NO: 99343 - DNA, 120 bp, synthetic construct; identical to SEQ ID NO: 25649
  source 1..120: mol_type = other DNA

SEQ ID NO: 99344 - DNA, 120 bp, synthetic construct; identical to SEQ ID NO: 25650
  source 1..120: mol_type = other DNA

SEQ ID NO: 99345 - DNA, 120 bp, synthetic construct; identical to SEQ ID NO: 27296
  source 1..120: mol_type = other DNA

SEQ ID NO: 99346 - DNA, 120 bp, synthetic construct; identical to SEQ ID NO: 27297
  source 1..120: mol_type = other DNA

SEQ ID NO: 99347 - DNA, 120 bp, synthetic construct
  source 1..120: mol_type = other DNA
atcattgctttttgtcactagatttcattcattttgcagtcaattacaaaagtagaaaagatgtcataccaagccgggtgcagtggctcatgcctgtaatcccagcactttgggaggctg

SEQ ID NO: 99348 - DNA, 120 bp, synthetic construct
  source 1..120: mol_type = other DNA
ctccccggttcaagcgattctcctgcctcagcctcatgagtagctgggattacaggctcctgccaccatgctgggctaatttgtgtatttttagtagagatggggtttcaccatgttggc

SEQ ID NO: 99349 - DNA, 120 bp, synthetic construct
  source 1..120: mol_type = other DNA
tgaatatagattttcttggtgaacgcattgcgttctcattccgtaaaaagtcggaagctcaaaatgatgcttaaaaaaaaatcttagcaagctctcctgtgcagatgctgctggcgctga

SEQ ID NO: 99350 - DNA, 120 bp, synthetic construct
  source 1..120: mol_type = other DNA
ttccttgtttgtcatcagcttggtacttttgaggagtcctggtcaggtattttgcagaatgtgccttcatttgggtttgtttgatgtcttgtggttggacaggttgtggggttaggaaga

SEQ ID NO: 99351 - DNA, 120 bp, synthetic construct
  source 1..120: mol_type = other DNA
atgttggtcaggctggtctccaattcctgacctcaggtgatcctcccaaagtgctgggatcacaggcgtgagccaccgcaactggcctaggagtaacttcttaatgaatattttaataat

SEQ ID NO: 99352 - DNA, 120 bp, synthetic construct
  source 1..120: mol_type = other DNA
ggaagggaacaaagcctccttgcagagaaatcttgtactttggtgtttcatcatctgtttgtgtgacaaatatacaacgttaatgttgaagatgtgggttagtgaaattgagacctggcg

SEQ ID NO: 99353 - DNA, 120 bp, synthetic construct
  source 1..120: mol_type = other DNA
acagcatcttgaccataggaggcgccctgatttccatctttttttttttttttttttgtttttagacggagtttcgctttttttacccaggctggaatgcggtgacgcaatctctgctca

SEQ ID NO: 99354 - DNA, 120 bp, synthetic construct; identical to SEQ ID NO: 661
  source 1..120: mol_type = other DNA

SEQ ID NO: 99355 - DNA, 120 bp, synthetic construct
  source 1..120: mol_type = other DNA
ttacaggcatgagccaccacgcctagcccatttcattagggaggacaaggatagtagacaggtgcacctagggtcttattactgtaaattgttccagagatttaaatttcagaagctgtt

SEQ ID NO: 99356 - DNA, 120 bp, synthetic construct
  source 1..120: mol_type = other DNA
agccggtgatcggctggctttgagaggttccttcaggaggtgcctggaccctgatggacagcccccagcctcacgctcccccttgaggtttgcagagggtgccagaagtgaccccagaaa

SEQ ID NO: 99357 - DNA, 120 bp, synthetic construct
  source 1..120: mol_type = other DNA
gggaagctgaggcaggcagatcacttgagttcaggagttcgaaaccagccgggacaacaagcaaaaccccatctctattttttcaaaatttgtgtatataaaatttttgtatgaaagctg

SEQ ID NO: 99358 - DNA, 120 bp, synthetic construct
  source 1..120: mol_type = other DNA
tgaagcgattctcctgcctcagcctcccaagtagctggcattacaggcatgcgccaacaagcccggctagtttttttgtatttttagtagagacgggatttctccatgtggtcaggctgg

SEQ ID NO: 99359 - DNA, 120 bp, synthetic construct
  source 1..120: mol_type = other DNA
attatagtcttgccagcactgggcgtctctgtgtattgtaaacacatgcgatcatcactcttatctctccatcccccccacaattaaagatgtgccgtgctatctctgctcaggttacct

SEQ ID NO: 99360 - DNA, 120 bp, synthetic construct
  source 1..120: mol_type = other DNA
gtagatgagaacgttagacacatctcttgatggtctgcggaggttttttctgatgtagttaatttcattttaacctggcatcagcaagttacattctgtgtccttgtgtctcactggcag

SEQ ID NO: 99361 - DNA, 120 bp, synthetic construct
  source 1..120: mol_type = other DNA
cagctaattgtaaaattttttgtagagacagggtctcactttgttgcccagactggtcttgaactcctaggctcgagtgattctctcctcagccttgcaaagtgttgggattacaggcgt

SEQ ID NO: 99362 - DNA, 120 bp, synthetic construct
  source 1..120: mol_type = other DNA
tgtagagtccccagaatccaacttcattcttcttgagtgccacaaggcgtctcacatggtgctttccaggatctcttctgacgtgtcccatcaggagtcctgccccgattgcggctcaca

SEQ ID NO: 99363 - DNA, 120 bp, synthetic construct
  source 1..120: mol_type = other DNA
actcgtcaggcccagtgtcctggttattacattgtgtgtttctttttctccttttctttcccaaccaggttgtcctggctcgagaactggcaacctccagagaatatgcgagtgagtatg

SEQ ID NO: 99364 - DNA, 120 bp, synthetic construct
  source 1..120: mol_type = other DNA
ccagcacccggctcttctgtgttagagcttcgttctggcctgctcccactctcagcaccatcctgcagctccttcggctgccggcggagtgtgtgtgctctctctgtttggaggtgcttg

SEQ ID NO: 99365 - DNA, 120 bp, synthetic construct
  source 1..120: mol_type = other DNA
atctgccctgtgccagttgttgatggtgggtaggcagtttcttggggggactgttcaaggaagagtaagaggtgaggaaatggaaacgacgcaaggtgcttccctgggattttgcctagg

SEQ ID NO: 99366 - DNA, 120 bp, synthetic construct; identical to SEQ ID NO: 662
  source 1..120: mol_type = other DNA

SEQ ID NO: 99367 - DNA, 120 bp, synthetic construct; identical to SEQ ID NO: 663
  source 1..120: mol_type = other DNA

SEQ ID NO: 99368 - DNA, 120 bp, synthetic construct
  source 1..120: mol_type = other DNA
aaaaatgatagattttacttcgttaaaaaacgacttagaatgacatggagatgtgaggtggtgaatccctactgtgtccagccaacacttgttgcttgtgagctttaggcctgtagccct

SEQ ID NO: 99369 - DNA, 120 bp, synthetic construct
  source 1..120: mol_type = other DNA
gatgcccttcaggtgcttattgggtagaaatcacaaactctggaggtgtaaagaaaggcagctgaaattctgaagagtgctcccgagtgctgggtagagagaagataaagccttgggatg

SEQ ID NO: 99370 - DNA, 120 bp, synthetic construct
  source 1..120: mol_type = other DNA
cagtgaactaggatgatcccactgcactccagcctggggaacagagcgatcaactgttaaaaaatagtagtaataaataaaaaataaaagaagcctgtaatcccagcactttgggaggtc

SEQ ID NO: 99371 - DNA, 120 bp, synthetic construct
  source 1..120: mol_type = other DNA
tgtgacgtgggtagagtttctttggaatctggtatttggcacagggatagtcttgttgccctgtagccacttaaaaaaaacgggcatttaagtgcgctgatgaaatagtgaaatagcttg

SEQ ID NO: 99372 - DNA, 120 bp, synthetic construct
  source 1..120: mol_type = other DNA
ggtgtccttggaggttcagacttggagtagggtttggaaacctgtgttctgacctgtgcaggcctttctggcatgcagccaggtgtggaggcagcactcaccaaacaggaaggagaggaa

SEQ ID NO: 99373 - DNA, 120 bp, synthetic construct; identical to SEQ ID NO: 664
  source 1..120: mol_type = other DNA

SEQ ID NO: 99374 - DNA, 120 bp, synthetic construct
  source 1..120: mol_type = other DNA
acactattgcactccagcctgggcaacaagagcgaaacgccatctcaaaaaaaaaaaaaaaaaaaaccaaaaaaaaaaacttagccaggtgactcctgtaatcccagctacttgcgaggc

SEQ ID NO: 99375 - DNA, 120 bp, synthetic construct
  source 1..120: mol_type = other DNA
aagttcctcaacgttattagtcattaggaaaatgcaaatcaaaaccacagggtgatactacctcacacccaccaggagggctgtgatgagaagacagataataacaaacgttagcaacga

SEQ ID NO: 99376 - DNA, 120 bp, synthetic construct
  source 1..120: mol_type = other DNA
aattttcttcccttttttttcctttttctgtttttattttttttttttttgagacggaatttcgctcttgttgcccaagctggagtgcggtggcgcgatctcggctcactgcaacctccg

SEQ ID NO: 99377 - DNA, 120 bp, synthetic construct
  source 1..120: mol_type = other DNA
tttgtattttgaaccaaccttgcactgtgtcatacatcctcttggtcatgatgcctagtcctttctagacgttgctgcatttggtttgctggtgtttcgtccaaagggtagtcacgtttt

SEQ ID NO: 99378 - DNA, 120 bp, synthetic construct
  source 1..120: mol_type = other DNA
ctgtctgtctctggattaaactaaggacaggtgtccttttccaagggggtgactttgcgtatgcccagaggctcggagtcccaccttcaggaaggtgtggcagaggaatcgagggtgagg

SEQ ID NO: 99379 - DNA, 120 bp, synthetic construct
  source 1..120: mol_type = other DNA
tgtccttggtgttcttggcaggatcactgagggtcctggcaggatgcaaatgcagccatgaagtgtttgttttttgtttattatttgagacagggtctggctctattgcctaggctagag

SEQ ID NO: 99380 - DNA, 120 bp, synthetic construct; identical to SEQ ID NO: 665
  source 1..120: mol_type = other DNA

SEQ ID NO: 99381 - DNA, 120 bp, synthetic construct; identical to SEQ ID NO: 666
  source 1..120: mol_type = other DNA

SEQ ID NO: 99382 - DNA, 120 bp, synthetic construct; identical to SEQ ID NO: 667
  source 1..120: mol_type = other DNA

SEQ ID NO: 99383 - DNA, 120 bp, synthetic construct; identical to SEQ ID NO: 668
  source 1..120: mol_type = other DNA

SEQ ID NO: 99384 - DNA, 120 bp, synthetic construct
  source 1..120: mol_type = other DNA
aagttcagacctttgggctcttggatgcataatataccagcttgtggcaggactcccaccattccgagctgggtaaggagacggcgttgcctgggccttggagcctgttggggtgcaccc

SEQ ID NO: 99385 - DNA, 120 bp, synthetic construct
  source 1..120: mol_type = other DNA
gcccctcaaggctcggcccctttcctcgcacaggtgaaaaggaatctcagtctcaaaacacaatgaacagcagcaaggattcttttacagtgtatagttaaaaatcctaaaacaagaaac

SEQ ID NO: 99386 - DNA, 120 bp, synthetic construct
  source 1..120: mol_type = other DNA
agtgctgggatgacaggcatgagccaccgtgcccggctaccaggtttgggtttctttggtcagaatcacgttttcaccctggcagtgacttgtcttgattgttacttaaggttttagatg

SEQ ID NO: 99387 - DNA, 120 bp, synthetic construct
  source 1..120: mol_type = other DNA
ccatttttctggtttgacttctgtcgccatggcttattctaactggcaccgtgtacggagttccactttccatgactgaggaagtccagattttgtttgttttgagacagggtcttggtg

SEQ ID NO: 99388 - DNA, 120 bp, synthetic construct
  source 1..120: mol_type = other DNA
tgcggcgggcggcggcctggccgggggcgctgacagacgcgcggagggcgggggaggccgggaggtgtcacccggcccagcggggtggaagtgcctggaaagtttgttttcggcttggcg

SEQ ID NO: 99389 - DNA, 120 bp, synthetic construct; identical to SEQ ID NO: 15861
  source 1..120: mol_type = other DNA

SEQ ID NO: 99390 - DNA, 120 bp, synthetic construct; identical to SEQ ID NO: 15862
  source 1..120: mol_type = other DNA

SEQ ID NO: 99391 - DNA, 120 bp, synthetic construct; identical to SEQ ID NO: 15863
  source 1..120: mol_type = other DNA

SEQ ID NO: 99392 - DNA, 120 bp, synthetic construct; identical to SEQ ID NO: 15864
  source 1..120: mol_type = other DNA

SEQ ID NO: 99393 - DNA, 120 bp, synthetic construct
  source 1..120: mol_type = other DNA
cctccgtctttcaggttgaagcaattctcctacttcagcctcctgagtagctgggattacaggcacgtgccaccgcacccggctaattttttttttttttttttgtaattttagtagaga

SEQ ID NO: 99394 - DNA, 120 bp, synthetic construct; identical to SEQ ID NO: 15899
  source 1..120: mol_type = other DNA

SEQ ID NO: 99395 - DNA, 120 bp, synthetic construct; identical to SEQ ID NO: 15900
  source 1..120: mol_type = other DNA

SEQ ID NO: 99396 - DNA, 120 bp, synthetic construct; identical to SEQ ID NO: 15901
  source 1..120: mol_type = other DNA

SEQ ID NO: 99397 - DNA, 120 bp, synthetic construct; identical to SEQ ID NO: 15902
  source 1..120: mol_type = other DNA

SEQ ID NO: 99398 - DNA, 120 bp, synthetic construct
  source 1..120: mol_type = other DNA
ttctcccgcctcagcctcccaaagtgctgggattacaggcgtgagccactgcgctcggccaacttgtgttaatttcttaaacttgcgtgatcacctggtgtacttgttgaaaaatacagc

SEQ ID NO: 99399 - DNA, 120 bp, synthetic construct
  source 1..120: mol_type = other DNA
catctccctggttgaagcaattttcctgtctcagcctcctgagtagctgggactacaggtgcaagccacgacacctggctaatttttctgtttttagtagagacggggtttcaccatgct

SEQ ID NO: 99400 - DNA, 120 bp, synthetic construct; identical to SEQ ID NO: 16566
  source 1..120: mol_type = other DNA

SEQ ID NO: 99401 - DNA, 120 bp, synthetic construct; identical to SEQ ID NO: 16567
  source 1..120: mol_type = other DNA

SEQ ID NO: 99402 - DNA, 120 bp, synthetic construct; identical to SEQ ID NO: 16568
  source 1..120: mol_type = other DNA

SEQ ID NO: 99403 - DNA, 120 bp, synthetic construct
  source 1..120: mol_type = other DNA
tacacacatacacacacacacaccagtttagactcatggatttctattttatgcagtggatagttttttttttgagacagagtcttgctttgtcacccaggctggagtgcagtgacgtga

SEQ ID NO: 99404 - DNA, 120 bp, synthetic construct
  source 1..120: mol_type = other DNA
caggctggcctcaaactcctgggctcaagtgatccgcccacctcaacctcccaaagtactggggttacaggtgtgggccgccacacttggcctcataatgcttccttgatgtcaaagtct

SEQ ID NO: 99405 - DNA, 120 bp, synthetic construct; identical to SEQ ID NO: 16569
  source 1..120: mol_type = other DNA

SEQ ID NO: 99406 - DNA, 120 bp, synthetic construct
  source 1..120: mol_type = other DNA
gttgaccaggctggtcgtaaacccctgtcctcaagcagtcctcagtcctcctaccttggcctcctaaagtgctgggattataagtgtgagccactgtgcccagcttgtttccatcttttg

SEQ ID NO: 99407 - DNA, 120 bp, synthetic construct
  source 1..120: mol_type = other DNA
gagatcgagaccatcctggctaacatggtgaaaccccgtctctactaagaaattaagaaaatatgtaaattatccttactgtacttcttttgaaaataagataccaaattgcttcaactc

SEQ ID NO: 99408 - DNA, 120 bp, synthetic construct; identical to SEQ ID NO: 2397
  source 1..120: mol_type = other DNA

SEQ ID NO: 99409 - DNA, 120 bp, synthetic construct
  source 1..120: mol_type = other DNA
cggcctccctaagtgctgggattacaggcgtgagccactgtgccctgccaattaatgccctttggacttaaggtaatattttccgccacaggacttgagaagctcaaggtgaaaacacac

SEQ ID NO: 99410 - DNA, 120 bp, synthetic construct; identical to SEQ ID NO: 16572
  source 1..120: mol_type = other DNA

SEQ ID NO: 99411 - DNA, 120 bp, synthetic construct; identical to SEQ ID NO: 16573
  source 1..120: mol_type = other DNA

SEQ ID NO: 99412 - DNA, 120 bp, synthetic construct; identical to SEQ ID NO: 16574
  source 1..120: mol_type = other DNA

SEQ ID NO: 99413 - DNA, 120 bp, synthetic construct
  source 1..120: mol_type = other DNA
agatcgtgccaccacactccagccggggcgacagagtgagactccatctcaaaaaaaaaaaaaaaaaaaatcaagaggttttctgaaaggggagagtgtaaaaaagtagaggggttgaaa

SEQ ID NO: 99414 - DNA, 120 bp, synthetic construct
  source 1..120: mol_type = other DNA
ttcaggctattctcctacctcagcctcccgagtagctgggattagaggtgtgtgccaagacatctggctaatttttctatttttagtagagacagggtttcaccatgttagccaggctgg

SEQ ID NO: 99415 - DNA, 120 bp, synthetic construct
  source 1..120: mol_type = other DNA
tcactttgaaacttttttttttctgtagagacggggtcttactatgttgcccaggctggtctcaaactcctgacttcaagcaatctcctgcctcagcctcccaaagttctgggattacag

SEQ ID NO: 99416 - DNA, 120 bp, synthetic construct; identical to SEQ ID NO: 16576
  source 1..120: mol_type = other DNA

SEQ ID NO: 99417 - DNA, 120 bp, synthetic construct; identical to SEQ ID NO: 16577
  source 1..120: mol_type = other DNA

SEQ ID NO: 99418 - DNA, 120 bp, synthetic construct
  source 1..120: mol_type = other DNA
aaaaagcccaccagattatgtaccctactgggagaagatgccttgtcttttttcttttttttttttttgagacagggtctcactttgttacccaggctggagtgcagtgatgcgatcatg

SEQ ID NO: 99419 - DNA, 120 bp, synthetic construct
  source 1..120: mol_type = other DNA
cgaggttggaggatcactaggtcaggagttcgagaccaacctggactatatggtgaaaccccgtctctactagaaatacaaaaattagctgggcgtggtggcacacacctgtaatcccag

SEQ ID NO: 99420 - DNA, 120 bp, synthetic construct; identical to SEQ ID NO: 16579
  source 1..120: mol_type = other DNA

SEQ ID NO: 99421 - DNA, 120 bp, synthetic construct
  source 1..120: mol_type = other DNA
atatttatttatttatttatttatttatttattttgagacagagtttcactcttgttgcacaggctggcgtgcaatggtgcgatctcggctcactgcaacctccacttcccgggttcagg

SEQ ID NO: 99422 - DNA, 120 bp, synthetic construct; identical to SEQ ID NO: 16580
  source 1..120: mol_type = other DNA

SEQ ID NO: 99423 - DNA, 120 bp, synthetic construct
  source 1..120: mol_type = other DNA
gaggaaataatatcttcaagccattcttactgagataaattaccaatttcatttaatagttgagccgtaattccagcactttgggaggccaaggtgggcgaatcacgaggtcaggagttc

SEQ ID NO: 99424 - DNA, 120 bp, synthetic construct
  source 1..120: mol_type = other DNA
ccaacttgatcatggtggataagctttttgatgtgctgctggatttggttggccagtattttagaggatttttgcatcgatgttcatcagggatattggtctaaaattctctttttttgt

SEQ ID NO: 99425 - DNA, 120 bp, synthetic construct; identical to SEQ ID NO: 13637
  source 1..120: mol_type = other DNA

SEQ ID NO: 99426 - DNA, 120 bp, synthetic construct
  source 1..120: mol_type = other DNA
cgccccgtttgggagggaggtggggggggtcagccccccgcccggccagctgccccgtttgggaggtgaggggcgcttttgcccagccgcccctactgggaagtgaggggcccctctgcc

SEQ ID NO: 99427 - DNA, 120 bp, synthetic construct
  source 1..120: mol_type = other DNA
ccccctctgcgagaaacacccaagaatgatcaataaaaaaaaaaaaaaataaataaatcaataaattaaaaaaaaaaaaaaagcaccaatgtaagttgtgtcttgagggagatatttcaa

SEQ ID NO: 99428 - DNA, 120 bp, synthetic construct; identical to SEQ ID NO: 13638
  source 1..120: mol_type = other DNA

SEQ ID NO: 99429 - DNA, 120 bp, synthetic construct
  source 1..120: mol_type = other DNA
ttggctgcagacgggcagacacccgaagtgtccgcgccggcagccggaccgcaagcgaggaagagcgaaccgcgctcccgggcctggccgaagcgcttcctgtgccaggtttccggctcc

SEQ ID NO: 99430 - DNA, 120 bp, synthetic construct
  source 1..120: mol_type = other DNA
tgagcccttctgcgctttgtaatgattctcagtgtgccatggggtaggcccatgctattagcataaccgtgcaaaatctatggactcactgttacttaagtttatttgaatttagtactc

SEQ ID NO: 99431 - DNA, 120 bp, synthetic construct
  source 1..120: mol_type = other DNA
caaactccacctcccaggttcaagcgattctcctgctgcagactcccaagtagctgggattacaggcgtacaccacgacccccagctaatttttgtatttttagtagagacggcatttca

SEQ ID NO: 99432 - DNA, 120 bp, synthetic construct
  source 1..120: mol_type = other DNA
ccctttagctcaggagttcgagaccagcctgggccacttagtgagacctcctgatatggtttggctctgtgtgcccacccacatctatctcgaattgtaatccccaattatatttgggga

SEQ ID NO: 99433 - DNA, 120 bp, synthetic construct
  source 1..120: mol_type = other DNA
aagatgtgatagaaaagaattttctggggaggaattcaagctggctgcagacatttgcataagtaacaaggagccgaatgttaatagccaagagaatggggaaaatgtctccagagcatg

SEQ ID NO: 99434 - DNA, 120 bp, synthetic construct
  source 1..120: mol_type = other DNA
tggacttgcatgaggcctgtaagccccttcgttttggccaatttctaccatttggaatgggaacatttaaccaatacctgtactcccattgtatcttggatgtaacgtaacttgtttttg

SEQ ID NO: 99435 - DNA, 120 bp, synthetic construct
  source 1..120: mol_type = other DNA
ttgactttcagagagtgtgtgagggaaaggtaagaaacaaaatcggaattagaaaatgactgttgcccctctcttttcattcttcactgcttttctgagcacctctcacctccctttgaa

SEQ ID NO: 99436 - DNA, 120 bp, synthetic construct
  source 1..120: mol_type = other DNA
ggggaaagaatgaaactcaggccaactactttgactggtgtctggcaaagtcaactttcattgtcattttaatatggcgccgggcgcggtggctcacgcctgtaatcccagcactttggg

SEQ ID NO: 99437 - DNA, 120 bp, synthetic construct
  source 1..120: mol_type = other DNA
caactactaaaattatccatttttaaatttattgttgtttaaaaaattttttttgtagcgatggggagctcactgtgttgcccaggctggtcttgaactgctggcctcaagctatcctcc

SEQ ID NO: 99438 - DNA, 120 bp, synthetic construct
  source 1..120: mol_type = other DNA
acctacccaccttggcctcccaaagtgctgggattacaaaaaaacagtgcaggttttcagatctgtacaatgcagtttgcaatcttgattgacgtatggtcaagtttcaaatgtttcttg

SEQ ID NO: 99439 - DNA, 120 bp, synthetic construct
  source 1..120: mol_type = other DNA
tggttttgcttgggtcactgatagcttccctgtgctaaatccaatggatgtgttaccagcagcaaatttgtacaggtctgcagcaacctcaattcttgcctcctcagaagaaagaattcg

SEQ ID NO: 99440 - DNA, 120 bp, synthetic construct
  source 1..120: mol_type = other DNA
ttcctttaattttgccattccctggggttccgtgggccccctcctctctctcttccttatatatctgtgtccatacttacgtctctcaaataatatcactactccaggttgaatcacatc

SEQ ID NO: 99441 - DNA, 120 bp, synthetic construct
  source 1..120: mol_type = other DNA
gttcacgctaccactgtattcgtcattgattgtttcatatttgcaaaatgtttctctccccagttcagttgtaggctccttgtaatccggcagcccatgccttatatgggctctatgcgc

SEQ ID NO: 99442 - DNA, 120 bp, synthetic construct
  source 1..120: mol_type = other DNA
atcgttccattgcactccagtctgggcaacaagagcgaaactccgtctcaaaaaaaaaaagaaatcctgttggctttctgtgcagttttttgatgccattgtgacacagagaaactttat

SEQ ID NO: 99443 - DNA, 120 bp, synthetic construct
  source 1..120: mol_type = other DNA
gcctcccaaagtgctgggattacaggcgtgagccactgtgcccagcccataaagctcttttttgatctgggttctttaataaaatgagcttgggttttgctgagctctgttgcaagttag

SEQ ID NO: 99444 - DNA, 120 bp, synthetic construct
  source 1..120: mol_type = other DNA
tttgtagcaagcagtgaaatctctggcattgacctttaaccattgtcaggaccactttcactttaccggaaggcagagcagcaaaaacgctccctctgagccaaacttgaaataacatct

SEQ ID NO: 99445 - DNA, 120 bp, synthetic construct
  source 1..120: mol_type = other DNA
cagaaaacataggagaatataacaaaagccattgctagtttaaatagtaagttcactactgccctctccagggaatgtcagagctgcagccttattctccctataagtgattggagcagg

SEQ ID NO: 99446 - DNA, 120 bp, synthetic construct
  source 1..120: mol_type = other DNA
agtgagccgagatcacgccattgcattccatcctgggaacagagcaagactccgtctcaaaaaaaccaaacaaaacaaaaaacatgggggatttttaaaacaaaactttggaggggattt

SEQ ID NO: 99447 - DNA, 120 bp, synthetic construct
  source 1..120: mol_type = other DNA
cagcactttgggaggccaaggtgggtggatcacatgagttcaggagtttgaggctagcctggccaacatggtgaaaccccatctctacaaaaaatataaaaattagccagtcgtggtgac

SEQ ID NO: 99448 - DNA, 120 bp, synthetic construct
  source 1..120: mol_type = other DNA
gctaccaaaggaaatggttttgtctttcacctaggagatggttctgtggatatgtccatagtcactgttaaaacggatctttgaagtacattctacagtaagggacacccattaagctgg

SEQ ID NO: 99449 - DNA, 120 bp, synthetic construct
  source 1..120: mol_type = other DNA
ctgcactctgccattccttagattggaggcgcccttgatacagatccctccctacacactgggggtttacttgcaatttaagacttcacattttatattagtatgaacagggaaaatata

SEQ ID NO: 99450 - DNA, 120 bp, synthetic construct
  source 1..120: mol_type = other DNA
gtcaacaatttagccatgcaaaatgacattttttattctatttatttatttattcggagacagagtctcgctctaccccccaggctggagtacagtggtgcaagtctcagctcactgcaa

SEQ ID NO: 99451 - DNA, 120 bp, synthetic construct
  source 1..120: mol_type = other DNA
attttctcatttactgaagtttattggggtttttggtttttttgtgtttttttgaaatgaagtctctgtcacccaggctggagtgcagtggcataatctcggctcactgcaacctccact

SEQ ID NO: 99452 - DNA, 120 bp, synthetic construct
  source 1..120: mol_type = other DNA
gatttccaggctgagagcagttgaaagggtctagggtttagttctaaggctgctggtaagaggagccagcgtgacatcatattttaaaattatatgtaaagcaagatcaaaagctttcct

SEQ ID NO: 99453 - DNA, 120 bp, synthetic construct
  source 1..120: mol_type = other DNA
taaacacctgaccaagaacactgttataaagatgattcttcagcccaataagatcagccagacttctgatcgtttactgtttttttggctaatggtacaatttctacttcttcaatgggg

SEQ ID NO: 99454 - DNA, 120 bp, synthetic construct
  source 1..120: mol_type = other DNA
tttgaggatgcatagatcctgggttgaaggatgagaataaagttgaacagatgagaatgaaaatgcacaggcatccatcgccatcaccacacacgtgctctacaaacaaaaagtttgtgc

SEQ ID NO: 99455 - DNA, 120 bp, synthetic construct
  source 1..120: mol_type = other DNA
catgtgccgccttcacctgcctctttcagttctgacagccatctgcttagcacagggctacttgccagttcctacctgtttctgcctctgacccacaactgctatgttaccggtacaaaa

SEQ ID NO: 99456 - DNA, 120 bp, synthetic construct
  source 1..120: mol_type = other DNA
tttcacttggagccaaaattctttggtttaatttttattgaaaataacatgtatcgtgccatgctctggggtgtgctcagtactagctgagatgattcctagtctgagctcccactccac

SEQ ID NO: 99457 - DNA, 120 bp, synthetic construct
  source 1..120: mol_type = other DNA
gactcctttccttctttataggtgaatttcttcagctcgggtcaaaagaaaatgagaatgaaagatttgcacactaccttgagaagacattcaagaagaccgccagcctgatagccaaca

SEQ ID NO: 99458 - DNA, 120 bp, synthetic construct
  source 1..120: mol_type = other DNA
ccaccttggccctgcaaagtactgggattacaggcatgagccattgcacctggccaatacattgcacctggccaatccttctaatatttttacatgaaatataaacaagtcctatttctt

SEQ ID NO: 99459 - DNA, 120 bp, synthetic construct
  source 1..120: mol_type = other DNA
gcccttgatggcccaactctccctgaaggtcaggatccatcctcttaacacattagggtgccttaatattacttactaatatttatccttaagaggatgtgttaagtgaggctcattgat

SEQ ID NO: 99460 - DNA, 120 bp, synthetic construct
  source 1..120: mol_type = other DNA
atggctatttttacgtactcttggtatttaaaatgcaaagccatgcgagctccaaataaatgcatgcaaagcaaattagacacaccaaaaagaggggaggaggagaactgaaagagcaga

SEQ ID NO: 99461 - DNA, 120 bp, synthetic construct
  source 1..120: mol_type = other DNA
ttgcatattgtgggtcacattagcagaacactctttttttttttttttaattcatttttttgagatggagtctcgctctgttgcccaggctggagcgcagtggcatgatctcagctcact

SEQ ID NO: 99462 - DNA, 120 bp, synthetic construct
  source 1..120: mol_type = other DNA
ttgcaccattgcactcaagcctgggcaacaagagtgaaactccatctcaaaaaaaaaagatactgtctgccaggtttcttcaatctaaaattactattttaacctattttgggcaaagta

SEQ ID NO: 99463 - DNA, 120 bp, synthetic construct
  source 1..120: mol_type = other DNA
tccaaggagcccacattccttttggtggaaaatggtgttaagaaaccagaatttgagtactgggtgtcatcgtttctagacccactcaatggacagagctaggaaatacatgtatgtatt

SEQ ID NO: 99464 - DNA, 120 bp, synthetic construct
  source 1..120: mol_type = other DNA
tgagccaccgcgcccagcctagttggattcatttttattccactttagggattccctctcattcttgctgatttcgtgttttggttttgagcgttttgttattgttgctgttgttttgaa

SEQ ID NO: 99465 - DNA, 120 bp, synthetic construct
  source 1..120: mol_type = other DNA
cgggaggctgaggcacaagaatagcttgaacccgggaggtggaggttgtagtgagccaagatcacgtcactgcactccagcatgggcgacaaagtgagactccatctcaaaaaaattaat

SEQ ID NO: 99466 - DNA, 120 bp, synthetic construct
  source 1..120: mol_type = other DNA
aaagatgtgaggcatccctctgatgctgagcgcaagtctgtgcacctctttgccttcttgtatgttgtgctatgttgcgtccaatttgtggcagttgttttctgttttcctgctacagat

SEQ ID NO: 99467 - DNA, 120 bp, synthetic construct
  source 1..120: mol_type = other DNA
gattacagtgagcccagatcgtgccgctgcactctagcctgggtgacagagagactccgtctccaaaaaaagaaatagatttttagaaaatctttcacttttcaggaagaaagcttatag

SEQ ID NO: 99468 - DNA, 120 bp, synthetic construct
  source 1..120: mol_type = other DNA
ataataatagcaaacacacattgagttctaaccaggtgccaggcagtatactgagggcttaaatgcagcatcatgtctgtttctcacagcaaccctacaaggtaagtgcttgtgatttct

SEQ ID NO: 99469 - DNA, 120 bp, synthetic construct
  source 1..120: mol_type = other DNA
aaagcaggggttggagaaggagaattttcttagaatttaacaacacaatctgagactgaaattcttgactggaaatgcggttttgtacatgcttggtgtccctctgatgtcagcatctcc

SEQ ID NO: 99470 - DNA, 120 bp, synthetic construct
  source 1..120: mol_type = other DNA
gatctttgtgtcttgtggtgtgccataggcatttgaggtagcatcgtgattatttccatatattttggccactggcaaagtgaacggtttctaagtcttgattataggactggactttgg

SEQ ID NO: 99471 - DNA, 120 bp, synthetic construct
  source 1..120: mol_type = other DNA
actttggaggctgaggtaagaagtgaaaggtatgctgtaaataggtcctctctcccaatgaggcttacttgccagcccaaaatcaaagagtataatacatgtgcccagttttgacaaaaa

SEQ ID NO: 99472 - DNA, 120 bp, synthetic construct
  source 1..120: mol_type = other DNA
gctggttaaaaaaagcaagcaaaaggaaaaaaaaagattactgtacccgaagccatggttttatgtgtgctttgctgggaaatcccagtcatgaggcacctactcatgctcaccagacag

SEQ ID NO: 99473 - DNA, 120 bp, synthetic construct
  source 1..120: mol_type = other DNA
gtgggttgtcttggagtttactccagccagcacttgacagaaactccctgtcttttggaattcctttatttttaacatctctcttaaggggtttcctgataacagttggttcagaggatt

SEQ ID NO: 99474 - DNA, 120 bp, synthetic construct
  source 1..120: mol_type = other DNA
gagagaatcacatcagtgtcaacgataaaaccttctagatatccagtattggtatgtggtattaaaaaactaaaacaggctgtgtgtagtggctcacgtccataatcccagcactctggg

SEQ ID NO: 99475 - DNA, 120 bp, synthetic construct
  source 1..120: mol_type = other DNA
ttttcttctaggattactaataccatggtcatggttacaggacaacttatttcatccttcaggttcactgccagggaaaaactggcagctgctgtaagcactgacgtggccaaaatcaaa

SEQ ID NO: 99476 - DNA, 120 bp, synthetic construct
  source 1..120: mol_type = other DNA
ctgctcagatccactctacacactgcttaaggcagagctctgcacataatgccctctgctcagaaacctcagtagctttcagttggtaatcaatttagaacttagagtagaatgcctaat

SEQ ID NO: 99477 - DNA, 120 bp, synthetic construct
  source 1..120: mol_type = other DNA
ttctcttctagactacttacgaaatgttttgttttaactggtcttaggtaaggcacagacattaatatcttttaaaaggtacctaagtgattgtggtgaactgttagtgttgaaacccag

SEQ ID NO: 99478 - DNA, 120 bp, synthetic construct
  source 1..120: mol_type = other DNA
agaggaaacaaaaatccacgggaatgttctctgaacaaattctccaaaattctagctccctgttcacccacagagcttctaggcctattccctcattaaatatgaatagacaactcaggg

SEQ ID NO: 99479 - DNA, 120 bp, synthetic construct
  source 1..120: mol_type = other DNA
aatatgtcatgttttgagcaactggtatagaaaatcagatgtatttcaaccacaatgttaggaatattccatttctaaatgtcagaggggtccgggcgcagtggctcacacctgtaatcg

SEQ ID NO: 99480 - DNA, 120 bp, synthetic construct
  source 1..120: mol_type = other DNA
cctcatcttaacaaaaaggtaacaggtaataactaaaattggtaatcaagaaataaaaactaggctgggcacggtggctcacacctgtaatcccagcactttgggaggccaaggcaggca

SEQ ID NO: 99481 - DNA, 120 bp, synthetic construct
  source 1..120: mol_type = other DNA
tggcagctatcttaccagactgtgcctaaagaattttgtggaatacactttgtttgcttcatgtgcagataaccaaaaatcattttaaaagatatcaaacttattgatgggcaatttatt

SEQ ID NO: 99482 - DNA, 120 bp, synthetic construct
  source 1..120: mol_type = other DNA
tttggttactttagccttgtagtatagtttgaaatcaggtagcatgatgcctccagctttgttcttttggcttaggattgtcttggcaatgcaggctcttttttggttccatatgaactt

SEQ ID NO: 99483 - DNA, 120 bp, synthetic construct
  source 1..120: mol_type = other DNA
tgttaacagtggggtggtaaagtctcccattattattgtgtgggagtctaagtctctttgtaggtctctaaggacttgctttatgaatctgggtgctcctgtattgggtgcatatatatt

SEQ ID NO: 99484 - DNA, 120 bp, synthetic construct
  source 1..120: mol_type = other DNA
tcttggagttgctcttctcgaggagtatctttgtggcgttctctgtatttcctgaatttgaatgctggcctgcctcgctaggttggggaagttctcctggataatatcctgcagagtgtt

SEQ ID NO: 99485 - DNA, 120 bp, synthetic construct
  source 1..120: mol_type = other DNA
tgaacaaagaatcaatttaagttaattaaggtaacatagccaaaaataatgaattagtccattacttaagaaaaatcttggttgggtatggtggctcatgcccggggtggggggggtggg

SEQ ID NO: 99486 - DNA, 120 bp, synthetic construct
  source 1..120: mol_type = other DNA
gaaaaagcatttgacaaaattcaacatccatttatgataaaagacagtacactagccagttttcagagcaccatttattaaatagggaatcctttccccattgcttgtttttctcaggtc

SEQ ID NO: 99487 - DNA, 120 bp, synthetic construct
  source 1..120: mol_type = other DNA
acttccaacactatgttgaataggagtggtgagagagggcatccctgtcttcctatgtagaaagctgaaactggatcccttccttacaccttatacaaaaattaattcaagatggattaa

SEQ ID NO: 99488 - DNA, 120 bp, synthetic construct
  source 1..120: mol_type = other DNA
aacaatgagaacacatggacacaggaaggggaacatcacactctggggactgttgtggggtaggggtaagggggagggatagcattaggagatatacctaatgctaaatgacgagttaat

SEQ ID NO: 99489 - DNA, 120 bp, synthetic construct
  source 1..120: mol_type = other DNA
acaaggaacctgggtggaaacaaaacaaattcatctatatgttttgtttgtttgttttttgagctggagtcttgctttgttgcccaggctggagtgcagtggcacgatctcggctcacta

SEQ ID NO: 99490 - DNA, 120 bp, synthetic construct; identical to SEQ ID NO: 16099
  source 1..120: mol_type = other DNA

SEQ ID NO: 99491 - DNA, 120 bp, synthetic construct
  source 1..120: mol_type = other DNA
ctgattgagccctggagatcaaggctgcagtgagctatgatcacaccactgcactgcagcctgggcgacagaatgaaaacgaaacctgtcacaaaaaataataataataatgtggttctt

SEQ ID NO: 99492 - DNA, 120 bp, synthetic construct
  source 1..120: mol_type = other DNA
gcatgtaaatatttcttgttcaaagttctgggagaaagtgctgggttgtctgtcccagcatttgtgtgcagatgaaatcagatgaaaaggaacaccactgtcagcatgggatcagaaaag

SEQ ID NO: 99493 - DNA, 120 bp, synthetic construct; identical to SEQ ID NO: 16102
  source 1..120: mol_type = other DNA

SEQ ID NO: 99494 - DNA, 120 bp, synthetic construct; identical to SEQ ID NO: 16103
  source 1..120: mol_type = other DNA

SEQ ID NO: 99495 - DNA, 120 bp, synthetic construct
  source 1..120: mol_type = other DNA
cttccttatcacaaggacagagggattaatgtatcccaggttcttgtcttggtgtaccggaagaatgggatcacatgtgggcttggagaatgagtgcaaggttttattgaatgaaagtag

SEQ ID NO: 99496 - DNA, 120 bp, synthetic construct; identical to SEQ ID NO: 16104
  source 1..120: mol_type = other DNA

SEQ ID NO: 99497 - DNA, 120 bp, synthetic construct; identical to SEQ ID NO: 16086
  source 1..120: mol_type = other DNA

SEQ ID NO: 99498 - DNA, 120 bp, synthetic construct; identical to SEQ ID NO: 16087
  source 1..120: mol_type = other DNA

SEQ ID NO: 99499 - DNA, 120 bp, synthetic construct; identical to SEQ ID NO: 16088
  source 1..120: mol_type = other DNA

SEQ ID NO: 99500 - DNA, 120 bp, synthetic construct; identical to SEQ ID NO: 16089
  source 1..120: mol_type = other DNA

SEQ ID NO: 99501 - DNA, 120 bp, synthetic construct
  source 1..120: mol_type = other DNA
tatttttgtccttttcttttgtttcttttttttttttgagatggagttttgctcttgttgcccaggctggactgcagtggtgcgatcttggttcactgtaacctctgcctctgggttcaa

SEQ ID NO: 99502 - DNA, 120 bp, synthetic construct
  source 1..120: mol_type = other DNA
ttcgcctgggaggaaaagaaatgctttttgcagagatgaaggttgaatgatgatcactattcaggatttaccttgttcagaaagctgtgggaggcaagagtagttaagttaggaacagct

SEQ ID NO: 99503 - DNA, 120 bp, synthetic construct
  source 1..120: mol_type = other DNA
acccattttaattatatagtttgtgttttggaagttgtatatagtgatattaccaccagcatgatcaagatacaaagcattgacctggtgcagtggctcacacctgtaatttcaacactt

SEQ ID NO: 99504 - DNA, 120 bp, synthetic construct
  source 1..120: mol_type = other DNA
ctccgcctcccgggttcaaacgattctcctgcctcagcctcctgagtagctggggttacaggcacaccaccacgcccaggtaattttttgtatctttagtagagacgagatttcaccatg

SEQ ID NO: 99505 - DNA, 120 bp, synthetic construct
  source 1..120: mol_type = other DNA
agagcgtcaggttcacggtgaggccagacggcctgtgggtgtcagtgatcttcatttccactcctgggctgaagagctgagcccagaggagctggtggtcttgaagcagctccgccgctg

SEQ ID NO: 99506 - DNA, 120 bp, synthetic construct
  source 1..120: mol_type = other DNA
ccggaccccccaaaccacagaagcagcagtaggaggccaagcaggcagaggaggcggcgggcccagctgctcgacagcagtcccggcagccccttgagcccctgctgtagccacatcggg

SEQ ID NO: 99507 - DNA, 120 bp, synthetic construct
  source 1..120: mol_type = other DNA
tgccttggcctcccaaagaattttttttttcttttcaatgacactttaaaaaaaaattttttttttaattttttaaaattatactttaatttttagggtacgtgtgcacaacatgcaggt

SEQ ID NO: 99508 - DNA, 120 bp, synthetic construct
  source 1..120: mol_type = other DNA
cattgtagattctggatattagccctttgtcaggtgagtagactgcaaaaattttctcccattctgtagattgcctgttcactctgatggtagtttcttttgctttgcagaagctcttta

SEQ ID NO: 99509 - DNA, 120 bp, synthetic construct
  source 1..120: mol_type = other DNA
ggtattttattctctttgaagcaattgtgaatgggagttcactcatgatttggctctctgtttgtctgttattggtgtataagaatgcttgtgatttttgcactttgattttgtatcctg

SEQ ID NO: 99510 - DNA, 120 bp, synthetic construct
  source 1..120: mol_type = other DNA
aatttaatagatgctaagtacagtgggtcacatctgtaatcccagcactttgggaggccaaggacagaggatcacttgagcccaggagttcaaggttacagcgatctgtgattgtaccac

SEQ ID NO: 99511 - DNA, 120 bp, synthetic construct; identical to SEQ ID NO: 16093
  source 1..120: mol_type = other DNA

SEQ ID NO: 99512 - DNA, 120 bp, synthetic construct; identical to SEQ ID NO: 16094
  source 1..120: mol_type = other DNA

SEQ ID NO: 99513 - DNA, 120 bp, synthetic construct; identical to SEQ ID NO: 16095
  source 1..120: mol_type = other DNA

SEQ ID NO: 99514 - DNA, 120 bp, synthetic construct; identical to SEQ ID NO: 16096
  source 1..120: mol_type = other DNA

SEQ ID NO: 99515 - DNA, 120 bp, synthetic construct
  source 1..120: mol_type = other DNA
gcaccactgcaccccagcttgggcatcaagagggagactccatctcagaaaaaaaaatatatttttttctccatctcaaaaaatagaaaaaattctcaccaaactatcactactgtttat

SEQ ID NO: 99516 - DNA, 120 bp, synthetic construct
  source 1..120: mol_type = other DNA
gttcaagcgattctcctgcctcagtctcctgagtagctgggactacaggcactcaccaccacacctcgcaattagtagagacagttgtttcaccatgttagctaggctagtctcaaaact

SEQ ID NO: 99517 - DNA, 120 bp, synthetic construct; identical to SEQ ID NO: 16098
  source 1..120: mol_type = other DNA

SEQ ID NO: 99518 - DNA, 120 bp, synthetic construct
  source 1..120: mol_type = other DNA
caccactgcactccagccttggtgacagagtgagactctgtttctgtaaaaaataaataagtaaataaataaaacttgccaggtgtggtggtgggcacctgtagtcccagctacttgaga

SEQ ID NO: 99519 - DNA, 120 bp, synthetic construct
  source 1..120: mol_type = other DNA
cctcggcctcctaaagtgctgggattacaggcatgagccactgcacctggccgcaaaaaaagttaaagtgctaactttaactttttagattagtaagactgctaacgtgtttcattagtt

SEQ ID NO: 99520 - DNA, 120 bp, synthetic construct
  source 1..120: mol_type = other DNA
tcgggccaagggcaggttgtatacacctgggctgaggcctctttctcattcacatctatctcttgctcaggagttgatctaagacaggctctaattgcaccttaataagcttgttgggga

SEQ ID NO: 99521 - DNA, 120 bp, synthetic construct
  source 1..120: mol_type = other DNA
gcctgggagttcaaggctgcagtgagctatggttgaaccactgcactctggactaggggacagaatgagaccctgtctcaaaataaataagattaaagtgtcatatgcttattactgaaa

SEQ ID NO: 99522 - DNA, 120 bp, synthetic construct
  source 1..120: mol_type = other DNA
attctccccctaaaggttatacgagggacaagtcgttcctggccatggtggtggacattgtgcaggagctgaagcagcagaaccccaggctggtgtacggtaggcaggggcccaccctcg

SEQ ID NO: 99523 - DNA, 120 bp, synthetic construct
  source 1..120: mol_type = other DNA
cttatttaatttaattttattattattattatatttgagacagactctcattctgtcttgcccaggctggagtgcagtggtgtgatctcaggtcactgcagcctccacctccccggttca

SEQ ID NO: 99524 - DNA, 120 bp, synthetic construct
  source 1..120: mol_type = other DNA
tatcatcatcaactaattatttaaacacattaaaaagcaatacgtcccgtacacagaacaggagcgaagctatgaaatacacttaccaggctgggcgaggtggctcacgcctgtaatcct

SEQ ID NO: 99525 - DNA, 120 bp, synthetic construct; identical to SEQ ID NO: 26474
  source 1..120: mol_type = other DNA

SEQ ID NO: 99526 - DNA, 120 bp, synthetic construct
  source 1..120: mol_type = other DNA
ggcagatcatctgaggtcaggagttccagacctgcctggccaacatggtgaaaccccgtctctactaaaaatacaaaaattagccgggcatggtggcacgtgcctgtagtcccagctggt

SEQ ID NO: 99527 - DNA, 120 bp, synthetic construct; identical to SEQ ID NO: 26475
  source 1..120: mol_type = other DNA

SEQ ID NO: 99528 - DNA, 120 bp, synthetic construct; identical to SEQ ID NO: 26476
  source 1..120: mol_type = other DNA

SEQ ID NO: 99529 - DNA, 120 bp, synthetic construct
  source 1..120: mol_type = other DNA
gtgattcttctgcctcggcctgccgagtgcctgggattccaggcactgcgcccccactcctgattggtttttgtatttttggtggagacggggtttcgccgcgttgaccgggctggtctc

SEQ ID NO: 99530 - DNA, 120 bp, synthetic construct
  source 1..120: mol_type = other DNA
aggaagtgaggagcacctccgcctggctgccaccccatctgggaagtggggagagcctctgcctggctgccctgtctaggaagtgagaagcgcctctgcccagccgccccgtctgggagg

SEQ ID NO: 99531 - DNA, 120 bp, synthetic construct
  source 1..120: mol_type = other DNA
aatggattaagggcggtgcaagatgtgctttgttgttaaacaaatgcttgaaggcagcatgctcgttaagagtcatcaccactccctaatctcaagtacccagggacacaaacactgcgg

SEQ ID NO: 99532 - DNA, 120 bp, synthetic construct
  source 1..120: mol_type = other DNA
tttatctgatctaccttttaaaaaataataataataagagatggggtttcaccatgttgcccaggctagtctcgaactcctgggctcaagccatctgcttagtccccccaaaagtgttga

SEQ ID NO: 99533 - DNA, 120 bp, synthetic construct; identical to SEQ ID NO: 35583
  source 1..120: mol_type = other DNA

SEQ ID NO: 99534 - DNA, 120 bp, synthetic construct; identical to SEQ ID NO: 35584
  source 1..120: mol_type = other DNA

SEQ ID NO: 99535 - DNA, 120 bp, synthetic construct; identical to SEQ ID NO: 7589
  source 1..120: mol_type = other DNA

SEQ ID NO: 99536 - DNA, 120 bp, synthetic construct; identical to SEQ ID NO: 7590
  source 1..120: mol_type = other DNA

SEQ ID NO: 99537 - DNA, 120 bp, synthetic construct; identical to SEQ ID NO: 12869
  source 1..120: mol_type = other DNA

SEQ ID NO: 99538 - DNA, 120 bp, synthetic construct
  source 1..120: mol_type = other DNA
atgctgtgcagaagctctttagtttaattagatcccatttgtcaattatggcttttgttggtcaatggcaagttttctatagaaagtgttcaagaaacaatataagtgaataatgttaaa

SEQ ID NO: 99539 - DNA, 120 bp, synthetic construct; identical to SEQ ID NO: 3481
  source 1..120: mol_type = other DNA

SEQ ID NO: 99540 - DNA, 120 bp, synthetic construct; identical to SEQ ID NO: 12871
  source 1..120: mol_type = other DNA

SEQ ID NO: 99541 - DNA, 120 bp, synthetic construct; identical to SEQ ID NO: 12872
  source 1..120: mol_type = other DNA

SEQ ID NO: 99542 - DNA, 120 bp, synthetic construct; identical to SEQ ID NO: 12873
  source 1..120: mol_type = other DNA

SEQ ID NO: 99543 - DNA, 120 bp, synthetic construct; identical to SEQ ID NO: 12874
  source 1..120: mol_type = other DNA

SEQ ID NO: 99544 - DNA, 120 bp, synthetic construct
  source 1..120: mol_type = other DNA
caataaacatacgtgtgcatgtgtctttatagcagcatgatttataatcctttgggtatatacccagtaatgggatggctgggtcaaatggtatttctagttctagatgcctgaggcatc

SEQ ID NO: 99545 - DNA, 120 bp, synthetic construct
  source 1..120: mol_type = other DNA
acatatggctagccagttttcccagcaccatttattaaatagggaatcctttcaccattgcttgtttttgtcaggtttgtcaaagatcggatggttgtagatatgtggcgttatttctga

SEQ ID NO: 99546 - DNA, 120 bp, synthetic construct
  source 1..120: mol_type = other DNA
ttggctgtgggtttgtcatagatagctcttattattttgagatttgtcccatcaatacctcatttattgagagtttttagcatgaagggttgttgaattttgtcaaaggccttttctgta

SEQ ID NO: 99547 - DNA, 120 bp, synthetic construct
  source 1..120: mol_type = other DNA
atctttcctgctttctcttgtgggcatttagtgctataaatttccctctatgcactgctttgaatgtgtcccagagattctggtatgttgtgtctttgttctcattggtttcaaagaaca

SEQ ID NO: 99548 - DNA, 120 bp, synthetic construct
  source 1..120: mol_type = other DNA
ttatccaatttgccagtctgtgtcttttaattggagcatttagcccatttatatttaaagttaatattgttatgtgtgaatttgatcctgtcattatgatgttagctggttattttgctc

SEQ ID NO: 99549 - DNA, 120 bp, synthetic construct; identical to SEQ ID NO: 15523
  source 1..120: mol_type = other DNA

SEQ ID NO: 99550 - DNA, 120 bp, synthetic construct
  source 1..120: mol_type = other DNA
tagacaacccacaaaatgggagaaaattttcacaacctattcatctgacaaagggctaatatccagaatctacaatgaactcaaacaaatttacaagaaaaaaacaaacaaccccatcaa

SEQ ID NO: 99551 - DNA, 120 bp, synthetic construct; identical to SEQ ID NO: 15524
  source 1..120: mol_type = other DNA

SEQ ID NO: 99552 - DNA, 120 bp, synthetic construct; identical to SEQ ID NO: 15525
  source 1..120: mol_type = other DNA

SEQ ID NO: 99553 - DNA, 120 bp, synthetic construct
  source 1..120: mol_type = other DNA
ggtatctcatagtggttttgatttgcatttctctgatagccagtgatgatgagcattttttcatgtgttttttggctgcataaatgtcttcttttgagaagtgtctgttcatgtccttcg

SEQ ID NO: 99554 - DNA, 120 bp, synthetic construct
  source 1..120: mol_type = other DNA
atacagagaacgtcataaagatactcctccagaagagcaactctaagacacataattgtcagattcaccaaagttgaaatgaaggaaaaaatgttaagggcagccagagagaaaggtcgg

SEQ ID NO: 99555 - DNA, 120 bp, synthetic construct
  source 1..120: mol_type = other DNA
cagaaagttaacaaggatacgcaggaattgaactcagctctgcaccaagcagacctaatagacatctacagaactctccaccccaaatcaacagaatatacatttttttcagcaccacac

SEQ ID NO: 99556 - DNA, 120 bp, synthetic construct
  source 1..120: mol_type = other DNA
acccttcatgctaaaaactctcaataaattaggtattgatgggacgtatctcaaaataataagagctatctgtgacaaacccacagccaacatcatactgaatgggcaaaaactggaagc

SEQ ID NO: 99557 - DNA, 120 bp, synthetic construct
  source 1..120: mol_type = other DNA
aaacgttagacctaaaaccataaaaaccctagaagaaaacccaggcattaccattcaggacataggcatgggcaaggacttcatgtctaaaacaccaaaagcaatggcaacaaaagccaa

SEQ ID NO: 99558 - DNA, 120 bp, synthetic construct
  source 1..120: mol_type = other DNA
aggaaagatctaaaattgacactctaacatcacaattaaacgaactagagaagcaagagcaaacacattcaaaagctagcagaaggcaagaaataactaagatcagagcagaactgaagg

SEQ ID NO: 99559 - DNA, 120 bp, synthetic construct
  source 1..120: mol_type = other DNA
tggaagcgttccctttgaaaactggcacaagacagggatgccctctctcaccactcctattcaacatagtgttggaagttctggccagggcaatcaggcaggagaaggaaataaagggta

SEQ ID NO: 99560 - DNA, 120 bp, synthetic construct; identical to SEQ ID NO: 19383
  source 1..120: mol_type = other DNA

SEQ ID NO: 99561 - DNA, 120 bp, synthetic construct; identical to SEQ ID NO: 19384
  source 1..120: mol_type = other DNA

SEQ ID NO: 99562 - DNA, 120 bp, synthetic construct; identical to SEQ ID NO: 31405
  source 1..120: mol_type = other DNA

SEQ ID NO: 99563 - DNA, 120 bp, synthetic construct
  source 1..120: mol_type = other DNA
gctgaatcaaaaattaaagttactgagaaaatacactttaaattttgcattcaagactaggcacggtggctcatgcctataatctcagctctttgggaggctggggtgggagcatcactt

SEQ ID NO: 99564 - DNA, 120 bp, synthetic construct
  source 1..120: mol_type = other DNA
acagagattgcagtgagccgagattgctccactgcactccagcctgggcaacaagaatgaaactccttaagctagcagaaggcaagaaataactaaaatcagagcagaactgaaggaaat

SEQ ID NO: 99565 - DNA, 120 bp, synthetic construct
  source 1..120: mol_type = other DNA
ttcaattaggaaaagaggaagtcaaattgtccctgtttgcagatgacatgattggatatctagaaaaccccattgtctcagcccaaaatctccttaagctgataagcaacttcagcaaag

SEQ ID NO: 99566 - DNA, 120 bp, synthetic construct
  source 1..120: mol_type = other DNA
attcaggacataggcatgggcaaggacttcatgtctaaaacaccaaaagcaatggcaacaaaagccaaaattgacaaatgggctctaattaaactaaagagtttctgcacagcaaaagaa

SEQ ID NO: 99567 - DNA, 120 bp, synthetic construct; identical to SEQ ID NO: 18407
  source 1..120: mol_type = other DNA

SEQ ID NO: 99568 - DNA, 120 bp, synthetic construct; identical to SEQ ID NO: 29732
  source 1..120: mol_type = other DNA

SEQ ID NO: 99569 - DNA, 120 bp, synthetic construct; identical to SEQ ID NO: 14356
  source 1..120: mol_type = other DNA

SEQ ID NO: 99570 - DNA, 120 bp, synthetic construct; identical to SEQ ID NO: 17382
  source 1..120: mol_type = other DNA

SEQ ID NO: 99571 - DNA, 120 bp, synthetic construct; identical to SEQ ID NO: 19684
  source 1..120: mol_type = other DNA

SEQ ID NO: 99572 - DNA, 120 bp, synthetic construct; identical to SEQ ID NO: 19685
  source 1..120: mol_type = other DNA

SEQ ID NO: 99573 - DNA, 120 bp, synthetic construct; identical to SEQ ID NO: 19686
  source 1..120: mol_type = other DNA

SEQ ID NO: 99574 - DNA, 120 bp, synthetic construct; identical to SEQ ID NO: 19687
  source 1..120: mol_type = other DNA

SEQ ID NO: 99575 - DNA, 120 bp, synthetic construct; identical to SEQ ID NO: 22168
  source 1..120: mol_type = other DNA

SEQ ID NO: 99576 - DNA, 120 bp, synthetic construct; identical to SEQ ID NO: 22169
  source 1..120: mol_type = other DNA

SEQ ID NO: 99577 - DNA, 120 bp, synthetic construct
  source 1..120: mol_type = other DNA
cccaaacctgttttccaggcgtctggggtatgcggatctgacgtcctcacagcccaggtggcaaaagctacaaacaccaggcacatgtcattctggctgaaggcaaatgatgggacaggc

SEQ ID NO: 99578 - DNA, 120 bp, synthetic construct
  source 1..120: mol_type = other DNA
cgaccaaccccgggaaccgcctcccaatccccccaaccccaggaaccgcctcccaaccccccccaaccccaggaaccgcctcccaaccccccccaaccccaggaactgcctgccccggga

SEQ ID NO: 99579 - DNA, 120 bp, synthetic construct; identical to SEQ ID NO: 12647
  source 1..120: mol_type = other DNA

SEQ ID NO: 99580 - DNA, 120 bp, synthetic construct; identical to SEQ ID NO: 12648
  source 1..120: mol_type = other DNA

SEQ ID NO: 99581 - DNA, 120 bp, synthetic construct
  source 1..120: mol_type = other DNA
cccgttctcaatgagctattgggtacacctcccagacggggtggtggccaggcagaggggctcctcacttcccagtaggggcggccgggcagaggcgcccctcaccttctggacggggcg

SEQ ID NO: 99582 - DNA, 120 bp, synthetic construct
  source 1..120: mol_type = other DNA
ggctgaagcaggagaatcaggcagggaggttgcagggagccgagatggcagcagtacagtccagcttcggctcggcatcagagggagaccgtggaaagagagggggagagagaccgtagg

SEQ ID NO: 99583 - DNA, 120 bp, synthetic construct; identical to SEQ ID NO: 3439
  source 1..120: mol_type = other DNA

SEQ ID NO: 99584 - DNA, 120 bp, synthetic construct
  source 1..120: mol_type = other DNA
gttccaagtctttgttattgtgcatagcgccgcagtaaacatacatatgcatgtctttatagcagcatgatttataatctttgggtatatatccagtaaatggaatggctgggtcaaatg

SEQ ID NO: 99585 - DNA, 120 bp, synthetic construct
  source 1..120: mol_type = other DNA
ttgaagtcaggtagcttgatgcctccagctttgttcttttggcctaggattgtcttggcaatgtgggctcttttttggttccataggaactttaaaatagttttttccaattctgtgaag

SEQ ID NO: 99586 - DNA, 120 bp, synthetic construct; identical to SEQ ID NO: 28352
  source 1..120: mol_type = other DNA

SEQ ID NO: 99587 - DNA, 120 bp, synthetic construct
  source 1..120: mol_type = other DNA
tagtcctttgggtatatacccagtaatgggatggctgggtcaaatggtatttctagttctagatccctgaggaattgccacactgacttccacaatggttgaactagtttacagtcccac

SEQ ID NO: 99588 - DNA, 120 bp, synthetic construct
  source 1..120: mol_type = other DNA
ctgctcaaggaaataaaagaggacacaaacaaatggaagaacattccatgctcatgggtaggaagaatcaatatcgtgaaaatggccatactgcccaaggtaatttacagattcaatgcc

SEQ ID NO: 99589 - DNA, 120 bp, synthetic construct; identical to SEQ ID NO: 27060
  source 1..120: mol_type = other DNA

SEQ ID NO: 99590 - DNA, 120 bp, synthetic construct; identical to SEQ ID NO: 27061
  source 1..120: mol_type = other DNA

SEQ ID NO: 99591 - DNA, 120 bp, synthetic construct; identical to SEQ ID NO: 33998
  source 1..120: mol_type = other DNA

SEQ ID NO: 99592 - DNA, 120 bp, synthetic construct
  source 1..120: mol_type = other DNA
ccagtaatgggatggctgggtcaaatggcatttctagttctagatccctgaggaatcgccacactgaattccacaatggttgaactagtttccagtcccaccaacagtgtaaaagtgttc

SEQ ID NO: 99593 - DNA, 120 bp, synthetic construct; identical to SEQ ID NO: 33999
  source 1..120: mol_type = other DNA

SEQ ID NO: 99594 - DNA, 120 bp, synthetic construct
  source 1..120: mol_type = other DNA
cagtctcccaaagtgctgggattataggcatgagccactgcagccggcccaaaatctatttttaaaaacctttctagtaccaataagcaagtttatcaagttcacaggatacaatgtcaa

SEQ ID NO: 99595 - DNA, 120 bp, synthetic construct
  source 1..120: mol_type = other DNA
cttcacccactttttgatggggttgtttgtttttttcttgtcgatttgtttgagttcattgtagattctggatattagccctttgtcagatgagtaggttgtgaaaattttctcccattt

SEQ ID NO: 99596 - DNA, 120 bp, synthetic construct
  source 1..120: mol_type = other DNA
ctacccatgagcatggaatgttcttccatttgtttgtgtcctcttttatttcattgagcagtggtttgtagttctccttgaagaagtccttcacatcccttgtaagttggattcctaggt

SEQ ID NO: 99597 - DNA, 120 bp, synthetic construct; identical to SEQ ID NO: 10037
  source 1..120: mol_type = other DNA

SEQ ID NO: 99598 - DNA, 120 bp, synthetic construct
  source 1..120: mol_type = other DNA
gatgggcggccgggcagagatgctcctcactgcctagatgggatggcggccaggaagaggcgctcctcactttccagactgggcagccaggcagagggggtcctcacatcccagacgatg

SEQ ID NO: 99599 - DNA, 120 bp, synthetic construct; identical to SEQ ID NO: 10038
  source 1..120: mol_type = other DNA

SEQ ID NO: 99600 - DNA, 120 bp, synthetic construct; identical to SEQ ID NO: 10039
  source 1..120: mol_type = other DNA

SEQ ID NO: 99601 - DNA, 120 bp, synthetic construct; identical to SEQ ID NO: 10040
  source 1..120: mol_type = other DNA

SEQ ID NO: 99602 - DNA, 120 bp, synthetic construct; identical to SEQ ID NO: 23268
  source 1..120: mol_type = other DNA

SEQ ID NO: 99603 - DNA, 120 bp, synthetic construct; identical to SEQ ID NO: 9998
  source 1..120: mol_type = other DNA

SEQ ID NO: 99604 - DNA, 120 bp, synthetic construct; identical to SEQ ID NO: 9999
  source 1..120: mol_type = other DNA

SEQ ID NO: 99605 - DNA, 120 bp, synthetic construct; identical to SEQ ID NO: 10000
  source 1..120: mol_type = other DNA

SEQ ID NO: 99606 - DNA, 120 bp, synthetic construct; identical to SEQ ID NO: 10001
  source 1..120: mol_type = other DNA

SEQ ID NO: 99607 - DNA, 120 bp, synthetic construct; identical to SEQ ID NO: 10002
  source 1..120: mol_type = other DNA

SEQ ID NO: 99608 - DNA, 120 bp, synthetic construct; identical to SEQ ID NO: 10003
  source 1..120: mol_type = other DNA

SEQ ID NO: 99609 - DNA, 120 bp, synthetic construct; identical to SEQ ID NO: 10004
  source 1..120: mol_type = other DNA

SEQ ID NO: 99610 - DNA, 120 bp, synthetic construct; identical to SEQ ID NO: 17388
  source 1..120: mol_type = other DNA

SEQ ID NO: 99611 - DNA, 120 bp, synthetic construct; identical to SEQ ID NO: 11062
  source 1..120: mol_type = other DNA

SEQ ID NO: 99612 - DNA, 120 bp, synthetic construct; identical to SEQ ID NO: 11063
  source 1..120: mol_type = other DNA

SEQ ID NO: 99613 - DNA, 120 bp, synthetic construct
  source 1..120: mol_type = other DNA
acagttacgagatcttcatctgtcacgccaacgtcatccgctacatcgtgtgcaggtaggcagctgctgggctgggcgtggtctaaaataatttcagacttagagaaaagcatgaggaag

SEQ ID NO: 99614 - DNA, 120 bp, synthetic construct
  source 1..120: mol_type = other DNA
tggtttggagtcactggggaatatttctcacttaactacaaacaaaattttcatcaaaattaagataatgcgggagggaggagccaagatggccgaataggaacagctccggtctacagc

SEQ ID NO: 99615 - DNA, 120 bp, synthetic construct
  source 1..120: mol_type = other DNA
gacatctacaccgaaaacccatctgtacatcaccatcatcaaagaccaaaagtagataaagccacaaagatggggaaaaaacagaacagaaaaactggaaactctaaaacgcagagtgcc

SEQ ID NO: 99616 - DNA, 120 bp, synthetic construct
  source 1..120: mol_type = other DNA
agagctcctgaaggaagcgctaaacatggaaaggaacaaccggtaccagccactgcaaaatcatgccaaaatgtaaagaccatcgagactaggaagaaactgcatcaactaatgagcaaa

SEQ ID NO: 99617 - DNA, 120 bp, synthetic construct
  source 1..120: mol_type = other DNA
agatgttctttgaaaccaacgagaacaaagacaccacataccagaatctctgggacgcattcaaagcagtgtgtagagggaaatttatagcactaaatgcctacaagagaaagcaggaaa

SEQ ID NO: 99618 - DNA, 120 bp, synthetic construct
  source 1..120: mol_type = other DNA
gcatataaacagagccaaagacaaaaaccacatgattatctcaatagatgcagaaatggcctttgacaaaattcaacaacccttcatgctaaaaactctcaataaattaggtattgatgg

SEQ ID NO: 99619 - DNA, 120 bp, synthetic construct
  source 1..120: mol_type = other DNA
agatatagatcaatggaacagaacagagccctcagaaataatgccgcatatctacaactatctgatctttgacaaacctgacaaaaacaagcaatggggaaaggattccctatttaataa

SEQ ID NO: 99620 - DNA, 120 bp, synthetic construct
  source 1..120: mol_type = other DNA
acacatgcacacgtatgtttattgaggcactattcacaatagcaaagacttggaaccaacccaaatgtccaacaatgatagactggattaagaaaatgtggcacatatacaccatggaat

SEQ ID NO: 99621 - DNA, 120 bp, synthetic construct
  source 1..120: mol_type = other DNA
cagccagatcctctgctgtccctccccagatggcctacatcccaccctcctggcatctgggtcttttcacagctgccgcctcactgcagcagcttccaaacaagccgcagggtacctcag

SEQ ID NO: 99622 - DNA, 120 bp, synthetic construct
  source 1..120: mol_type = other DNA
cttgggcatccttccctccctgggtcccagccttctcctgggtaggtcagggcggagggcacatccctttgggggcccctccctccgaggttaattaacgacaaaggcttcagaaggaaa

SEQ ID NO: 99623 - DNA, 120 bp, synthetic construct
  source 1..120: mol_type = other DNA
ttaatccattcaaccctgagtggacacagcacatgtttcagagagcacagggttgggggtaaggtcacagatcaacaggatcccaaggcagaagaagttttcttagtacagaacaaaacg

SEQ ID NO: 99624 - DNA, 120 bp, synthetic construct; identical to SEQ ID NO: 9435
  source 1..120: mol_type = other DNA

SEQ ID NO: 99625 - DNA, 120 bp, synthetic construct; identical to SEQ ID NO: 9436
  source 1..120: mol_type = other DNA

SEQ ID NO: 99626 - DNA, 120 bp, synthetic construct; identical to SEQ ID NO: 9437
  source 1..120: mol_type = other DNA

SEQ ID NO: 99627 - DNA, 120 bp, synthetic construct; identical to SEQ ID NO: 9438
  source 1..120: mol_type = other DNA

SEQ ID NO: 99628 - DNA, 120 bp, synthetic construct; identical to SEQ ID NO: 9439
  source 1..120: mol_type = other DNA

SEQ ID NO: 99629 - DNA, 120 bp, synthetic construct; identical to SEQ ID NO: 9440
  source 1..120: mol_type = other DNA

SEQ ID NO: 99630 - DNA, 120 bp, synthetic construct; identical to SEQ ID NO: 9441
  source 1..120: mol_type = other DNA

SEQ ID NO: 99631 - DNA, 120 bp, synthetic construct; identical to SEQ ID NO: 9442
  source 1..120: mol_type = other DNA

SEQ ID NO: 99632 - DNA, 120 bp, synthetic construct; identical to SEQ ID NO: 27756
  source 1..120: mol_type = other DNA

SEQ ID NO: 99633 - DNA, 120 bp, synthetic construct; identical to SEQ ID NO: 12103
  source 1..120: mol_type = other DNA

SEQ ID NO: 99634 - DNA, 120 bp, synthetic construct; identical to SEQ ID NO: 12104
  source 1..120: mol_type = other DNA

SEQ ID NO: 99635 - DNA, 120 bp, synthetic construct
  source 1..120: mol_type = other DNA
aatgtaaatgggctaaatgctccaattaaaagacacagactggcaaattggataaagagtcaagacccatcagtgtgctgtattcaggagacgcatctcacgtgcagatacacacatagg

SEQ ID NO: 99636 - DNA, 120 bp, synthetic construct
  source 1..120: mol_type = other DNA
tgacaaaattcaacagcccttcatgctaaaaactctcaataaattaggtattaatgggatgtatttcgaaataataagagctatttatgacaaacccacagccaatatcatactgaatgg

SEQ ID NO: 99637 - DNA, 120 bp, synthetic construct
  source 1..120: mol_type = other DNA
ttaattcaagatggattaaagacttaaatgttagacctaaaaccgtaaaaatcccagaagaaaacctaggcaataccattcaggacataggcatgggcaaggacttcatgtctaaaacac

SEQ ID NO: 99638 - DNA, 120 bp, synthetic construct; identical to SEQ ID NO: 32548
  source 1..120: mol_type = other DNA

SEQ ID NO: 99639 - DNA, 120 bp, synthetic construct; identical to SEQ ID NO: 32549
  source 1..120: mol_type = other DNA

SEQ ID NO: 99640 - DNA, 120 bp, synthetic construct; identical to SEQ ID NO: 32550
  source 1..120: mol_type = other DNA

SEQ ID NO: 99641 - DNA, 120 bp, synthetic construct; identical to SEQ ID NO: 32551
  source 1..120: mol_type = other DNA

SEQ ID NO: 99642 - DNA, 120 bp, synthetic construct; identical to SEQ ID NO: 32552
  source 1..120: mol_type = other DNA

SEQ ID NO: 99643 - DNA, 120 bp, synthetic construct; identical to SEQ ID NO: 32553
  source 1..120: mol_type = other DNA

SEQ ID NO: 99644 - DNA, 120 bp, synthetic construct; identical to SEQ ID NO: 32554
  source 1..120: mol_type = other DNA

SEQ ID NO: 99645 - DNA, 120 bp, synthetic construct; identical to SEQ ID NO: 32555
  source 1..120: mol_type = other DNA

SEQ ID NO: 99646 - DNA, 120 bp, synthetic construct; identical to SEQ ID NO: 32556
  source 1..120: mol_type = other DNA

SEQ ID NO: 99647 - DNA, 120 bp, synthetic construct; identical to SEQ ID NO: 32557
  source 1..120: mol_type = other DNA

SEQ ID NO: 99648 - DNA, 120 bp, synthetic construct; identical to SEQ ID NO: 32558
  source 1..120: mol_type = other DNA

SEQ ID NO: 99649 - DNA, 120 bp, synthetic construct; identical to SEQ ID NO: 32559
  source 1..120: mol_type = other DNA

SEQ ID NO: 99650 - DNA, 120 bp, synthetic construct; identical to SEQ ID NO: 32560
  source 1..120: mol_type = other DNA

SEQ ID NO: 99651 - DNA, 120 bp, synthetic construct; identical to SEQ ID NO: 32561
  source 1..120: mol_type = other DNA

SEQ ID NO: 99652 - DNA, 120 bp, synthetic construct; identical to SEQ ID NO: 32562
  source 1..120: mol_type = other DNA

SEQ ID NO: 99653 - DNA, 120 bp, synthetic construct
  source 1..120: mol_type = other DNA
ggtttaaaatcacagaaatttattctctcacagttctggaggccagaagtcaaaatcaaggtatcggcatggccacactctgtagatgctctagggagaatctgctcccgcctcttccag

SEQ ID NO: 99654 - DNA, 120 bp, synthetic construct; identical to SEQ ID NO: 32563
  source 1..120: mol_type = other DNA

SEQ ID NO: 99655 - DNA, 120 bp, synthetic construct; identical to SEQ ID NO: 32564
  source 1..120: mol_type = other DNA

SEQ ID NO: 99656 - DNA, 120 bp, synthetic construct; identical to SEQ ID NO: 32565
  source 1..120: mol_type = other DNA

SEQ ID NO: 99657 - DNA, 120 bp, synthetic construct
  source 1..120: mol_type = other DNA
gatttccatactaaatcatcccaaggccactttgcttttgagctgtgtgtgtgtgtgtgtgtgtgtgtgtgtgtgtgtgtgtgtgtgtgtgttttgatctcttctgtatctttttttccc

SEQ ID NO: 99658 - DNA, 120 bp, synthetic construct
  source 1..120: mol_type = other DNA
ctaacccctcgattatcagaagcagatgtttcaaactactgaagatcaatgaggcatatcctatttacaggttaataattgactactagatgcaggtgcaccaaatggtcttagagacat

SEQ ID NO: 99659 - DNA, 120 bp, synthetic construct
  source 1..120: mol_type = other DNA
attgaacacacaaaaaaatagggagaataagaaatagataacatgtacccattatcttgtttttctattttgcttatctttttttctgaagaattttaaagcaaattatagcacgagaac

SEQ ID NO: 99660 - DNA, 120 bp, synthetic construct
  source 1..120: mol_type = other DNA
aataggcatatattgaaagtaaagggatagaaggagatatgccatgaaaacagttaccaaaagagagcagggatgcctatacttatatcagataaaacagacttccagtaaaaagctgtt

SEQ ID NO: 99661 - DNA, 120 bp, synthetic construct
  source 1..120: mol_type = other DNA
aaaaatggtcataagggattattatgaacaattttatgccaacaaattggaggacctagaagaaatggataaatttctagaaaaactaacccaacaagattgaattgggaagaaacaaaa

SEQ ID NO: 99662 - DNA, 120 bp, synthetic construct
  source 1..120: mol_type = other DNA
cagtagcatttctatacataaataatgacccagctgaaaataatcaagaaaacaatgccatttatgatagcatcaaaaaaatacttaggaataaatttaaccaaggggtgaaagtatact

SEQ ID NO: 99663 - DNA, 120 bp, synthetic construct; identical to SEQ ID NO: 32573
  source 1..120: mol_type = other DNA

SEQ ID NO: 99664 - DNA, 120 bp, synthetic construct; identical to SEQ ID NO: 32574
  source 1..120: mol_type = other DNA

SEQ ID NO: 99665 - DNA, 120 bp, synthetic construct; identical to SEQ ID NO: 32575
  source 1..120: mol_type = other DNA

SEQ ID NO: 99666 - DNA, 120 bp, synthetic construct; identical to SEQ ID NO: 32576
  source 1..120: mol_type = other DNA

SEQ ID NO: 99667 - DNA, 120 bp, synthetic construct; identical to SEQ ID NO: 32577
  source 1..120: mol_type = other DNA

SEQ ID NO: 99668 - DNA, 120 bp, synthetic construct; identical to SEQ ID NO: 32578
  source 1..120: mol_type = other DNA

SEQ ID NO: 99669 - DNA, 120 bp, synthetic construct; identical to SEQ ID NO: 32579
  source 1..120: mol_type = other DNA

SEQ ID NO: 99670 - DNA, 120 bp, synthetic construct; identical to SEQ ID NO: 32580
  source 1..120: mol_type = other DNA

SEQ ID NO: 99671 - DNA, 120 bp, synthetic construct; identical to SEQ ID NO: 32581
  source 1..120: mol_type = other DNA

SEQ ID NO: 99672 - DNA, 120 bp, synthetic construct; identical to SEQ ID NO: 32582
  source 1..120: mol_type = other DNA

SEQ ID NO: 99673 - DNA, 120 bp, synthetic construct; identical to SEQ ID NO: 32583
  source 1..120: mol_type = other DNA

SEQ ID NO: 99674 - DNA, 120 bp, synthetic construct; identical to SEQ ID NO: 32584
  source 1..120: mol_type = other DNA

SEQ ID NO: 99675 - DNA, 120 bp, synthetic construct; identical to SEQ ID NO: 32585
  source 1..120: mol_type = other DNA

SEQ ID NO: 99676 - DNA, 120 bp, synthetic construct; identical to SEQ ID NO: 32586
  source 1..120: mol_type = other DNA

SEQ ID NO: 99677 - DNA, 120 bp, synthetic construct; identical to SEQ ID NO: 32587
  source 1..120: mol_type = other DNA

SEQ ID NO: 99678 - DNA, 120 bp, synthetic construct; identical to SEQ ID NO: 32588
  source 1..120: mol_type = other DNA

SEQ ID NO: 99679 - DNA, 120 bp, synthetic construct; identical to SEQ ID NO: 32589
  source 1..120: mol_type = other DNA

SEQ ID NO: 99680 - DNA, 120 bp, synthetic construct; identical to SEQ ID NO: 32590
  source 1..120: mol_type = other DNA

SEQ ID NO: 99681 - DNA, 120 bp, synthetic construct; identical to SEQ ID NO: 32591
  source 1..120: mol_type = other DNA

SEQ ID NO: 99682 - DNA, 120 bp, synthetic construct; identical to SEQ ID NO: 32592
  source 1..120: mol_type = other DNA

SEQ ID NO: 99683 - DNA, 120 bp, synthetic construct
  source 1..120: mol_type = other DNA
aataaagtgcacaataaatggaatgttctcgaatcatccccaaatcatcctcctcccccagtctgtggaaaaattgtcttccacaaaaccggtccctggtgccaaaaaggttggggacca

SEQ ID NO: 99684 - DNA, 120 bp, synthetic construct; identical to SEQ ID NO: 32593
  source 1..120: mol_type = other DNA

SEQ ID NO: 99685 - DNA, 120 bp, synthetic construct; identical to SEQ ID NO: 32594
  source 1..120: mol_type = other DNA

SEQ ID NO: 99686 - DNA, 120 bp, synthetic construct
  source 1..120: mol_type = other DNA
tatatatatatatatatatatatatatatatatatatatatatatatgtatatagtgcttacagcagtgccagtccacagtatgcgttcaatgaagttagctattattgtcatggcgatg

SEQ ID NO: 99687 - DNA, 120 bp, synthetic construct; identical to SEQ ID NO: 32595
  source 1..120: mol_type = other DNA

SEQ ID NO: 99688 - DNA, 120 bp, synthetic construct
  source 1..120: mol_type = other DNA
tcccattttgtaagttgcctgttcactctgatggtagtttcttttgctgtgcagaagctctttagttgaattagatcccatttgtcaattttggcttttcttgccattgcttttggtgtt

SEQ ID NO: 99689 - DNA, 120 bp, synthetic construct
  source 1..120: mol_type = other DNA
tatacaccatggaatactatgcagccataaaaaatgatgagttcatgacctttgtagggacatggatgaaattggaaatcatcattctcagtaaactatcgcaagaacaaaaaaccaaac

SEQ ID NO: 99690 - DNA, 120 bp, synthetic construct; identical to SEQ ID NO: 32596
  source 1..120: mol_type = other DNA

SEQ ID NO: 99691 - DNA, 120 bp, synthetic construct
  source 1..120: mol_type = other DNA
agaggctgaggctggaggattgcttgagcccaggagttcaagaccaccctgggcaacatagagacatacagcgaccctatctctttaaaaagtatatataaatatatatatacacacaca

SEQ ID NO: 99692 - DNA, 120 bp, synthetic construct; identical to SEQ ID NO: 32597
  source 1..120: mol_type = other DNA

SEQ ID NO: 99693 - DNA, 120 bp, synthetic construct; identical to SEQ ID NO: 32598
  source 1..120: mol_type = other DNA

SEQ ID NO: 99694 - DNA, 120 bp, synthetic construct; identical to SEQ ID NO: 32599
  source 1..120: mol_type = other DNA

SEQ ID NO: 99695 - DNA, 120 bp, synthetic construct; identical to SEQ ID NO: 32600
  source 1..120: mol_type = other DNA

SEQ ID NO: 99696 - DNA, 120 bp, synthetic construct; identical to SEQ ID NO: 15667
  source 1..120: mol_type = other DNA

SEQ ID NO: 99697 - DNA, 120 bp, synthetic construct; identical to SEQ ID NO: 15668
  source 1..120: mol_type = other DNA

SEQ ID NO: 99698 - DNA, 120 bp, synthetic construct; identical to SEQ ID NO: 15669
  source 1..120: mol_type = other DNA

SEQ ID NO: 99699 - DNA, 120 bp, synthetic construct; identical to SEQ ID NO: 25784
  source 1..120: mol_type = other DNA

SEQ ID NO: 99700 - DNA, 120 bp, synthetic construct; identical to SEQ ID NO: 27490
  source 1..120: mol_type = other DNA

SEQ ID NO: 99701 - DNA, 120 bp, synthetic construct; identical to SEQ ID NO: 27491
  source 1..120: mol_type = other DNA

SEQ ID NO: 99702 - DNA, 120 bp, synthetic construct; identical to SEQ ID NO: 27492
  source 1..120: mol_type = other DNA

SEQ ID NO: 99703 - DNA, 120 bp, synthetic construct; identical to SEQ ID NO: 27493
  source 1..120: mol_type = other DNA

SEQ ID NO: 99704 - DNA, 120 bp, synthetic construct
  source 1..120: mol_type = other DNA
tgactagccagttttcccagcaccatttattaaatagggaatcctttccccatttcttctttttgtcaggtttgtcaaagatcagatagttgtagatatgcggcattatttctgagggct

SEQ ID NO: 99705 - DNA, 120 bp, synthetic construct; identical to SEQ ID NO: 27494
  source 1..120: mol_type = other DNA

SEQ ID NO: 99706 - DNA, 120 bp, synthetic construct
  source 1..120: mol_type = other DNA
ttatgttaaatcaccaaacctaagaataattggcattccctgaggaagaagagaaatctaaaagtctggaaaacttatttgagggaataattgaggaaaacttccctggccttgctagag

SEQ ID NO: 99707 - DNA, 120 bp, synthetic construct; identical to SEQ ID NO: 27495
  source 1..120: mol_type = other DNA

SEQ ID NO: 99708 - DNA, 120 bp, synthetic construct
  source 1..120: mol_type = other DNA
gggatgtgaggagcccctctgcccggccgcccagtctgggaagtgaggagcgtctctgcccagccgccatcccatctaggaagtgaggagcgcctcttcccggccgccatcccgtctagg

SEQ ID NO: 99709 - DNA, 120 bp, synthetic construct; identical to SEQ ID NO: 27496
  source 1..120: mol_type = other DNA

SEQ ID NO: 99710 - DNA, 120 bp, synthetic construct
  source 1..120: mol_type = other DNA
ctgagcaacaaagtaaaaccccatctctacataaaatcaaaaattagcgagatgtggtggcacatgcctgtggtcccggctacatgggaggttaaggcaagaggatggcttgagcacagg

SEQ ID NO: 99711 - DNA, 120 bp, synthetic construct; identical to SEQ ID NO: 28371
  source 1..120: mol_type = other DNA

SEQ ID NO: 99712 - DNA, 120 bp, synthetic construct
  source 1..120: mol_type = other DNA
cctcggcctcctaaagtcctgggattacaggcgtgagcaaccgtgcctggcctagaagtgcttttatttatcattcaccctcacatcatattggaggaagaggaaggaatctttcctttt

SEQ ID NO: 99713 - DNA, 120 bp, synthetic construct; identical to SEQ ID NO: 22595
  source 1..120: mol_type = other DNA

SEQ ID NO: 99714 - DNA, 120 bp, synthetic construct; identical to SEQ ID NO: 22596
  source 1..120: mol_type = other DNA

SEQ ID NO: 99715 - DNA, 120 bp, synthetic construct; identical to SEQ ID NO: 22597
  source 1..120: mol_type = other DNA

SEQ ID NO: 99716 - DNA, 120 bp, synthetic construct; identical to SEQ ID NO: 22598
  source 1..120: mol_type = other DNA

SEQ ID NO: 99717 - DNA, 120 bp, synthetic construct
  source 1..120: mol_type = other DNA
tgttatgacataacaagaaggccccttgttatgctggtaccttgctgttggacttcccagcctccaaaactgtgagccaataaatttctgttcaatgtaaattacccagtcttgggtatt

SEQ ID NO: 99718 - DNA, 120 bp, synthetic construct; identical to SEQ ID NO: 22599
  source 1..120: mol_type = other DNA

SEQ ID NO: 99719 - DNA, 120 bp, synthetic construct
  source 1..120: mol_type = other DNA
atatttctttgagaaaaatgagaaaatatggcataaaggagaaaattttaaggccaggtgcaatggctcacacctgtaatctcaggactttgggaggctgaggcagtggatcacctgagg

SEQ ID NO: 99720 - DNA, 120 bp, synthetic construct
  source 1..120: mol_type = other DNA
aaaacatatataaagtgatacatgtatgtgtgtgtgtatatatacacacacacactttttttgagatgaagtctacctctgcctcctgggttcaagcgattctcctgcctcagcctgccg

SEQ ID NO: 99721 - DNA, 120 bp, synthetic construct; identical to SEQ ID NO: 16533
  source 1..120: mol_type = other DNA

SEQ ID NO: 99722 - DNA, 120 bp, synthetic construct; identical to SEQ ID NO: 12671
  source 1..120: mol_type = other DNA

SEQ ID NO: 99723 - DNA, 120 bp, synthetic construct; identical to SEQ ID NO: 12672
  source 1..120: mol_type = other DNA

SEQ ID NO: 99724 - DNA, 120 bp, synthetic construct; identical to SEQ ID NO: 12673
  source 1..120: mol_type = other DNA

SEQ ID NO: 99725 - DNA, 120 bp, synthetic construct
  source 1..120: mol_type = other DNA
tcatcattaatgtcctgttgctatctccccagtactgctcagtttgggggttatcatttctatttcttttttccttttgtagcagctagggcagacactgtggagagtgtacactcaaat

SEQ ID NO: 99726 - DNA, 120 bp, synthetic construct
  source 1..120: mol_type = other DNA
agaattgcatgaacctgggaggcagaggttgcagtgagccaagatagcaccactgcactccagtccgggcaacagagagagactccagctcaaaaaaaaaaaaaaaaaaaaaaaaaaaaa

SEQ ID NO: 99727 - DNA, 120 bp, synthetic construct
  source 1..120: mol_type = other DNA
tccatctcaaaacaaacaaacacacaaaaacaaaaaacaaaaaatagctgggcatggtgacatgtgtctgtaatcccagctacttgagaggctgaggtaggagaatcgcgtgaacctggg

SEQ ID NO: 99728 - DNA, 120 bp, synthetic construct; identical to SEQ ID NO: 33586
  source 1..120: mol_type = other DNA

SEQ ID NO: 99729 - DNA, 120 bp, synthetic construct
  source 1..120: mol_type = other DNA
tgccattgcactccagcctgggcgacaagagcgagactccgtctcaaaaaagaaaatgaaggttaagttttggcaaagtgatttgtatagatctgtaatacatcatgttctaatgaggtc

SEQ ID NO: 99730 - DNA, 120 bp, synthetic construct; identical to SEQ ID NO: 6549
  source 1..120: mol_type = other DNA

SEQ ID NO: 99731 - DNA, 120 bp, synthetic construct
  source 1..120: mol_type = other DNA
cgctgagcgaacgcgcgcttctgcaggcccctccgaggccaactctctcggccccgggcgcgttccgtcccacggctggcctaggaggaggcgttttggggacaagcttgtcaagcaggg

SEQ ID NO: 99732 - DNA, 120 bp, synthetic construct; identical to SEQ ID NO: 13720
  source 1..120: mol_type = other DNA

SEQ ID NO: 99733 - DNA, 120 bp, synthetic construct
  source 1..120: mol_type = other DNA
gtccactcagggttaaatggattaagggcggtgcaagatgtgctttgttaaacagatgcttgaaggcagcatgctcgttaagagtcatcaccactccccaatctcaagtacccagggaca

SEQ ID NO: 99734 - DNA, 120 bp, synthetic construct
  source 1..120: mol_type = other DNA
tttcagtctcaaggctcccccagctcaccttcgcgcccgcggacccctgggtctaccttcagccttgggggcccttctcggcctatcttccaccttcgagatccccccacccgccttctc

SEQ ID NO: 99735 - DNA, 120 bp, synthetic construct; identical to SEQ ID NO: 32771
  source 1..120: mol_type = other DNA

SEQ ID NO: 99736 - DNA, 120 bp, synthetic construct; identical to SEQ ID NO: 32772
  source 1..120: mol_type = other DNA

SEQ ID NO: 99737 - DNA, 120 bp, synthetic construct; identical to SEQ ID NO: 32773
  source 1..120: mol_type = other DNA

SEQ ID NO: 99738 - DNA, 120 bp, synthetic construct; identical to SEQ ID NO: 32774
  source 1..120: mol_type = other DNA

SEQ ID NO: 99739 - DNA, 120 bp, synthetic construct; identical to SEQ ID NO: 32775
  source 1..120: mol_type = other DNA

SEQ ID NO: 99740 - DNA, 120 bp, synthetic construct; identical to SEQ ID NO: 32776
  source 1..120: mol_type = other DNA

SEQ ID NO: 99741 - DNA, 120 bp, synthetic construct; identical to SEQ ID NO: 22470
  source 1..120: mol_type = other DNA

SEQ ID NO: 99742 - DNA, 120 bp, synthetic construct
  source 1..120: mol_type = other DNA
gctcatgcctataatcccagcactttgggaggccgaggcaggcggatcatgaggttatgagatcgagaccattctggctaacacggtaaaaccccatctctactaaaaatacaaaaaatt

SEQ ID NO: 99743 - DNA, 120 bp, synthetic construct
  source 1..120: mol_type = other DNA
tccaatccactgttgatggacacctaggttgattccatgtctttgctactgtgaatagtgtggcaatgaacatacaagtgcaagtgtactttttggtagactgaggtattttcctttggg

SEQ ID NO: 99744 - DNA, 120 bp, synthetic construct; identical to SEQ ID NO: 11871
  source 1..120: mol_type = other DNA

SEQ ID NO: 99745 - DNA, 120 bp, synthetic construct; identical to SEQ ID NO: 23911
  source 1..120: mol_type = other DNA

SEQ ID NO: 99746 - DNA, 120 bp, synthetic construct
  source 1..120: mol_type = other DNA
atctgtgtaaaactccccctctaaaccccgttgttcctaagtgaaccccctgctctcccaggtccctctgccaggccagcaggcccccagctgtgttggatccgccccggctcccccttc

SEQ ID NO: 99747 - DNA, 120 bp, synthetic construct
  source 1..120: mol_type = other DNA
cctggctcgctctctccacaactaccccccggtacaggtccgtctgccgtagacaatacccagaccccctcttctccccacaactacctgcccacctctccgacaatcaccgggcattct

SEQ ID NO: 99748 - DNA, 120 bp, synthetic construct
  source 1..120: mol_type = other DNA
taagagtaggtgttagtccctttgttgttgtttacttgctgccaccttttggatctactgtatagaatctagagtgtttttgctcaagtctgtagaatgacttagaatgtcaggtgcata

SEQ ID NO: 99749 - DNA, 120 bp, synthetic construct
  source 1..120: mol_type = other DNA
gaaaatgcacctgtcatgcaggttgcaattttcctattctaatccttgtgtaagaatataaatttattagaaagggcatgtttggaaataattttgatccttctctttgatttcatgcac

SEQ ID NO: 99750 - DNA, 120 bp, synthetic construct; identical to SEQ ID NO: 23834
  source 1..120: mol_type = other DNA

SEQ ID NO: 99751 - DNA, 120 bp, synthetic construct; identical to SEQ ID NO: 23835
  source 1..120: mol_type = other DNA

SEQ ID NO: 99752 - DNA, 120 bp, synthetic construct; identical to SEQ ID NO: 35315
  source 1..120: mol_type = other DNA

SEQ ID NO: 99753 - DNA, 120 bp, synthetic construct
  source 1..120: mol_type = other DNA
tgaacccgggaggcggagattgcagtgagccaagatcccgccactgcactctagcctgggacagagctagactccatttaaaaaaaatttaaaaaaaaatttaaaaaattgtacacacat

SEQ ID NO: 99754 - DNA, 120 bp, synthetic construct; identical to SEQ ID NO: 33978
  source 1..120: mol_type = other DNA

SEQ ID NO: 99755 - DNA, 120 bp, synthetic construct
  source 1..120: mol_type = other DNA
gcaaccgccccatctgagaagtgaggagaccctccgcccggcagctgccccgtctgagaagtgaggagcccctccgcccggcagccaccccgtctgggaagtgaggagcgtctctgcctg

SEQ ID NO: 99756 - DNA, 120 bp, synthetic construct; identical to SEQ ID NO: 33979
  source 1..120: mol_type = other DNA

SEQ ID NO: 99757 - DNA, 120 bp, synthetic construct; identical to SEQ ID NO: 33980
  source 1..120: mol_type = other DNA

SEQ ID NO: 99758 - DNA, 120 bp, synthetic construct
  source 1..120: mol_type = other DNA
tagctactgggtactatgttcactacttgggtgatgggaccatttgcaccccaaacctcacacatgcaatatacccacgtaaacaaacctgcacatgtacttcctgaatctaaaatcaaa

SEQ ID NO: 99759 - DNA, 120 bp, synthetic construct; identical to SEQ ID NO: 33981
  source 1..120: mol_type = other DNA

SEQ ID NO: 99760 - DNA, 120 bp, synthetic construct
  source 1..120: mol_type = other DNA
actataagcatgtgccacccaccctgctaatttttgtatttcttgtagagacggggttttaccatgttgcccaggctggttttgaactcttgggcttaagcaatccaccagccttggcct

SEQ ID NO: 99761 - DNA, 120 bp, synthetic construct; identical to SEQ ID NO: 28105
  source 1..120: mol_type = other DNA

SEQ ID NO: 99762 - DNA, 120 bp, synthetic construct
  source 1..120: mol_type = other DNA
acagaaaaactggaaactctaaaaatcagagcacctctcctcctccaaaggaacacagctcctcaccagcaatggaacaaagctggacgcagaatgactttgatgagctgagagaagaag

SEQ ID NO: 99763 - DNA, 120 bp, synthetic construct
  source 1..120: mol_type = other DNA
tacaagagctcctgaaggaagcgctaaacatggaaaggaaaaaccggtaccagccgctgcaaaatcatgccaaaatgtaaagaccatcgagactaggaagaaactgcatcaactaatgag

SEQ ID NO: 99764 - DNA, 120 bp, synthetic construct
  source 1..120: mol_type = other DNA
acaaactatctctcagaccacagagcaatcaaactagaattcaggattaagaatctcactcaaaaccgctcaactacatggaaactgaacaacctgctcctgaatgactactgggtacat

SEQ ID NO: 99765 - DNA, 120 bp, synthetic construct
  source 1..120: mol_type = other DNA
attttatgaggccagcatcattctgataccaaagctgggcagagacacaaccaaaaaagataattttagaccaatatccttgatgaacattgatgcaaaaatcctcaataaaatactggc

SEQ ID NO: 99766 - DNA, 120 bp, synthetic construct
  source 1..120: mol_type = other DNA
ccccatcaagctaccaatgcctttcttcacagaattggaaaaaactactttaaagttcatatggaaccaaaaaagggcccgcattgccaagtcaatcctaagccaaaagaacaaagctgg

SEQ ID NO: 99767 - DNA, 120 bp, synthetic construct
  source 1..120: mol_type = other DNA
actgcccatcagagaaatgcaaatcaaaaccacaatgagataccatctcacaccagttagaatggcaatcattaaaaagtcaggaaacaacaggtgctggagaggatgtggagaaatagg

SEQ ID NO: 99768 - DNA, 120 bp, synthetic construct; identical to SEQ ID NO: 28106
  source 1..120: mol_type = other DNA

SEQ ID NO: 99769 - DNA, 120 bp, synthetic construct
  source 1..120: mol_type = other DNA
gaaggctgcagtgagccatgatgatgccactgcactccagcctgggcaacagagcgagacctcacttcaaaatcaaaaaaagaagatgagatataactgataccacagaaattaaaagaa

SEQ ID NO: 99770 - DNA, 120 bp, synthetic construct
  source 1..120: mol_type = other DNA
tatagaaagactttttcctacacttttttttttttttttttttttttgagacagagtctcgctctgttacctaggctggggtgcaatggcttgatctcggctcactgcaagctccgcctc

SEQ ID NO: 99771 - DNA, 120 bp, synthetic construct; identical to SEQ ID NO: 34150
  source 1..120: mol_type = other DNA

SEQ ID NO: 99772 - DNA, 120 bp, synthetic construct
  source 1..120: mol_type = other DNA
caaaaacaggaagcattccctttgaaaactggaacaagacagggatgccctctctgaccactcctattcaacatagtgttggaagttctggccagggcaatcaggcaggagaaggaaata

SEQ ID NO: 99773 - DNA, 120 bp, synthetic construct
  source 1..120: mol_type = other DNA
tggggaaaggattccctatttaataaatggtgctgggaaaactggctagccatatgtagaaagctgaaactggatcccttccttacaccttatacaaaaattaattcaaaatggattaaa

SEQ ID NO: 99774 - DNA, 120 bp, synthetic construct
  source 1..120: mol_type = other DNA
aagtgctgggattacaggcatgagccaccatgcccagccataaaagaaacttttaaaagcagacagcagaaaaaggcacattcatgtagcggaacaaacataaggttgacaacaaatttg

SEQ ID NO: 99775 - DNA, 120 bp, synthetic construct
  source 1..120: mol_type = other DNA
catctaggaagtgaggagcgtctctgcccggccgcccatcgtctgagatgtggggagcgcctctgccccgccgccccatctgggatgtgaggagcgcctctgcccggccaagaccccgtc

SEQ ID NO: 99776 - DNA, 120 bp, synthetic construct
  source 1..120: mol_type = other DNA
agataactgtccaattaacagaaataaaaaataatgtgttggtcacaaaggaggagggtggttagtaagaagtggaaaacaggccaggtgtggtggctcatgcctgtaatcctagcactt

SEQ ID NO: 99777 - DNA, 120 bp, synthetic construct; identical to SEQ ID NO: 34151
  source 1..120: mol_type = other DNA

SEQ ID NO: 99778 - DNA, 120 bp, synthetic construct; identical to SEQ ID NO: 34152
  source 1..120: mol_type = other DNA

SEQ ID NO: 99779 - DNA, 120 bp, synthetic construct; identical to SEQ ID NO: 6535
  source 1..120: mol_type = other DNA

SEQ ID NO: 99780 - DNA, 120 bp, synthetic construct
  source 1..120: mol_type = other DNA
cactggaacctgggaggcagaggctgcagtgagctgagatcatgccactgtacaccagccagggtgacagagcgagactctgtttaaaaataaataaataaacaaaataaataaaaaaat

SEQ ID NO: 99781 - DNA, 120 bp, synthetic construct
  source 1..120: mol_type = other DNA
ttcgtggtttagtcttgggagggtgtatgtgtcaaggaatttatccatttcagaaatatagatcaatggaacagaacagagccctcagaaataatgccgcgtatctacaactacttgatc

SEQ ID NO: 99782 - DNA, 120 bp, synthetic construct
  source 1..120: mol_type = other DNA
tgcatgttctcactcataggtgggacttgaacaatgagaacacatggacacaggaaggggaacatcactctggggactgttgtggggtcgggggaggggggagggatagcattaggagat

SEQ ID NO: 99783 - DNA, 120 bp, synthetic construct; identical to SEQ ID NO: 4033
  source 1..120: mol_type = other DNA

SEQ ID NO: 99784 - DNA, 120 bp, synthetic construct
  source 1..120: mol_type = other DNA
agcttgcaatgagcctagatcgctccactgcgctccagcctgggcgacagggcaaaactctgtctcaaaaaaataaataaataaaaataaaactacttagactagggctcaatacaattg

SEQ ID NO: 99785 - DNA, 120 bp, synthetic construct
  source 1..120: mol_type = other DNA
gtcagtgtggcgattcctcagggatctagaactagaaataccatttgacccagccatcccattactgggtatatacccaaaggattataaatcatgctgctataaagtcatatgcacacg

SEQ ID NO: 99786 - DNA, 120 bp, synthetic construct
  source 1..120: mol_type = other DNA
gaaaaaagtttgagttcattgtagattctggatattaaccctttgtcagatgagtaggttgcgaaaattttctcccatgttgtaggttgcctgttcactctgatggtagtttcttttgct

SEQ ID NO: 99787 - DNA, 120 bp, synthetic construct; identical to SEQ ID NO: 70124
  source 1..120: mol_type = other DNA

SEQ ID NO: 99788 - DNA, 120 bp, synthetic construct; identical to SEQ ID NO: 16453
  source 1..120: mol_type = other DNA

SEQ ID NO: 99789 - DNA, 120 bp, synthetic construct
  source 1..120: mol_type = other DNA
tgtggttttgatttgcatttctctgatggccagtgatcatgagcattttttcatgtgttttttggctgcataaatgtcttcttttgagaagtgtctgttcatgtccttcgcccacttttt

SEQ ID NO: 99790 - DNA, 120 bp, synthetic construct
  source 1..120: mol_type = other DNA
tgaatctataaattaccttgggcactatggccattttcacgatattgattcttcctactcatgagcatggaatgttcttccatttgtttgtgtcctcttttatttcattgagcagtggtt

SEQ ID NO: 99791 - DNA, 120 bp, synthetic construct; identical to SEQ ID NO: 16429
  source 1..120: mol_type = other DNA

SEQ ID NO: 99792 - DNA, 120 bp, synthetic construct
  source 1..120: mol_type = other DNA
gctcatgcctgtaatcccagcattttgggaggctgaggcaggtggatcacctgaggttagtagtttcaagaccagcctggacaacatggcgaaaccccgtctctactaaaatacaaaaaa

SEQ ID NO: 99793 - DNA, 120 bp, synthetic construct; identical to SEQ ID NO: 12392
  source 1..120: mol_type = other DNA

SEQ ID NO: 99794 - DNA, 120 bp, synthetic construct; identical to SEQ ID NO: 12393
  source 1..120: mol_type = other DNA

SEQ ID NO: 99795 - DNA, 120 bp, synthetic construct
  source 1..120: mol_type = other DNA
taagtatttctcctaatgctatcccgcccctagccccccacaccctgacaagccatggtgtgtgatattcccctccctgtgtccatgtgttctcgttgatcaactcccacttatgagtga

SEQ ID NO: 99796 - DNA, 120 bp, synthetic construct
  source 1..120: mol_type = other DNA
ttttagtcatgaagtctttgcccatgcctatttcctgaatggtattgcctaggttttcttctagggtttttatggttttaggtcttacgtttaagtctttaatccatcttgagttaattt

SEQ ID NO: 99797 - DNA, 120 bp, synthetic construct
  source 1..120: mol_type = other DNA
tgcagatggtgtgagaggtttgtttaccaacccaataaacttagtggctcaagacttttgaaaggatcttgagaaacaatggctctcttcctatactctgagctagaatggccattgtca

SEQ ID NO: 99798 - DNA, 120 bp, synthetic construct
  source 1..120: mol_type = other DNA
tgcatagtattccatggtgtatatgtgccacattttcttaatccagtctatcattgttggacatttgggttggttccaagtctttgctattgtgagtaatgccgcaataaacatacatgt

SEQ ID NO: 99799 - DNA, 120 bp, synthetic construct; identical to SEQ ID NO: 19817
  source 1..120: mol_type = other DNA

SEQ ID NO: 99800 - DNA, 120 bp, synthetic construct
  source 1..120: mol_type = other DNA
ctgcttaagtagatctacagggtaaagcatgtagtttttaagatgcatgtgttctcaaaaagggtaagtgacataaaatatttgtacagaaaaggggccgggcgcagtggctcacgcctg

SEQ ID NO: 99801 - DNA, 120 bp, synthetic construct; identical to SEQ ID NO: 19102
  source 1..120: mol_type = other DNA

SEQ ID NO: 99802 - DNA, 120 bp, synthetic construct; identical to SEQ ID NO: 19103
  source 1..120: mol_type = other DNA

SEQ ID NO: 99803 - DNA, 120 bp, synthetic construct
  source 1..120: mol_type = other DNA
caccattgcactccagcctggatgatagattgagattctgtctcaaaaaaaaaaaaaaaaaaaatctaccaggcatggtgaatggtggttcatgcctgtaatcccaacactttgggaggc

SEQ ID NO: 99804 - DNA, 120 bp, synthetic construct
  source 1..120: mol_type = other DNA
ttcaatcataattatgcaagatgtgtcagtacttagctattgggaaaatattacagttaaatttttattgggggaggagccaagatggccgaataggaacagctccggtctacagctccc

SEQ ID NO: 99805 - DNA, 120 bp, synthetic construct
  source 1..120: mol_type = other DNA
gcctcctcaagtgggtccctgacacctgacccccgagcagcctaactgggaggcaccccccagcaggggcacactgacacctcacacggcagggtattccaacagacctgcagctgaggg

SEQ ID NO: 99806 - DNA, 120 bp, synthetic construct
  source 1..120: mol_type = other DNA
gcccatcagactaacagcggatctctcggcagaaaccctacaagccagaagagagtgggggccaatattcaacattcttaaagaaaagaattttcaaaccagaatttcatatccagccaa

SEQ ID NO: 99807 - DNA, 120 bp, synthetic construct
  source 1..120: mol_type = other DNA
ccgctcaactacatggaaactgaacaacctgctcctgaatgactactgggtacgtaacgaaatgaaggcagaaataaagatgttctttgaaaccaacgagaacaaagacaccacatacca

SEQ ID NO: 99808 - DNA, 120 bp, synthetic construct
  source 1..120: mol_type = other DNA
caatatccttgatgaacattgacgcaaaaatcctcaataaaatactggcaaaccgaatccagcagcacatcaaaaagcttatccaccatgatcaagtgggcttcatccctgggatgcaag

SEQ ID NO: 99809 - DNA, 120 bp, synthetic construct
  source 1..120: mol_type = other DNA
tttacagattcaatgccatccccatcaagctaccaatgactttcttcacagaattggaaaaaactactttaaagttcatatggaaccaaaaaagagcccacatcgccaagtcaatcctaa

SEQ ID NO: 99810 - DNA, 120 bp, synthetic construct
  source 1..120: mol_type = other DNA
gtcagtgtggtgattcctcagggatctagaactagaaataccatttgacccagccatcccattactgggtatatacccaaaggactataaatcatgctgctataaagacacatgcacacg

SEQ ID NO: 99811 - DNA, 120 bp, synthetic construct
  source 1..120: mol_type = other DNA
tgggatttgcgtacatggatgcatataaatatcttgaacagttcttttctttttttgtttttttgagatggagtctcgctctgttgcctaggctggagtgcagtggcgcaatcttggctc

SEQ ID NO: 99812 - DNA, 120 bp, synthetic construct; identical to SEQ ID NO: 4053
  source 1..120: mol_type = other DNA

SEQ ID NO: 99813 - DNA, 120 bp, synthetic construct
  source 1..120: mol_type = other DNA
cctgcattaaagagtgtttccaaggtggaagggaggccgtttgaacgcctcgagacccccggctgcaaggagtggcaccttcctcacttcagtcatttctttcccgctctggtctcagtg

SEQ ID NO: 99814 - DNA, 120 bp, synthetic construct; identical to SEQ ID NO: 11538
  source 1..120: mol_type = other DNA

SEQ ID NO: 99815 - DNA, 120 bp, synthetic construct
  source 1..120: mol_type = other DNA
accatgttggccaggctggtctcaaacccctgacctcaggtgatccacctgcctcagcctcccaaagtactaggattacaggcttgagccaccacgcctggcaattttttgtacttttag

SEQ ID NO: 99816 - DNA, 120 bp, synthetic construct
  source 1..120: mol_type = other DNA
atggtttcaagcttcatccatgtgcctacaaaggacatgaactcatcattttttttttttttttttttttttgagacggagtctcgctctgccacccagactggagtgcagtggcgggat

SEQ ID NO: 99817 - DNA, 120 bp, synthetic construct
  source 1..120: mol_type = other DNA
aatgggagaaaattttcgcaatctactcatctgacaaagggctaatatccagaatctacaatgaactcaaacaaatttacaagaaaaaaacaaacaaccacatcaaaaagtgggcgaagg

SEQ ID NO: 99818 - DNA, 120 bp, synthetic construct; identical to SEQ ID NO: 10769
  source 1..120: mol_type = other DNA

SEQ ID NO: 99819 - DNA, 120 bp, synthetic construct; identical to SEQ ID NO: 11065
  source 1..120: mol_type = other DNA

SEQ ID NO: 99820 - DNA, 120 bp, synthetic construct
  source 1..120: mol_type = other DNA
cttgatctcttgacattgtgatccgcctggcttggcctcccaaagtgctgggattacaggtatgagccaccgtgtcaggccgacagagtgtgttctaaatacccagcaggtcaaggtgag

SEQ ID NO: 99821 - DNA, 120 bp, synthetic construct
  source 1..120: mol_type = other DNA
gcagctgaaatcccagctacttaggaggctgaggtaggagaattgcttgaacctgggagagaggttgcagtgagcagagatcacgccactgcactccagcctgggcgacagagtgagact

SEQ ID NO: 99822 - DNA, 120 bp, synthetic construct; identical to SEQ ID NO: 23536
  source 1..120: mol_type = other DNA

SEQ ID NO: 99823 - DNA, 120 bp, synthetic construct; identical to SEQ ID NO: 23537
  source 1..120: mol_type = other DNA

SEQ ID NO: 99824 - DNA, 120 bp, synthetic construct; identical to SEQ ID NO: 23538
  source 1..120: mol_type = other DNA

SEQ ID NO: 99825 - DNA, 120 bp, synthetic construct; identical to SEQ ID NO: 23539
  source 1..120: mol_type = other DNA

SEQ ID NO: 99826 - DNA, 120 bp, synthetic construct
  source 1..120: mol_type = other DNA
caaagtggcttacagatgccctggtgttttttttttaaatggagtctcgctctgtcgccaggctggagtgcagtggcatgatcttggctcactgcaacctctgcctcctgggttcaagag

SEQ ID NO: 99827 - DNA, 120 bp, synthetic construct; identical to SEQ ID NO: 23540
  source 1..120: mol_type = other DNA

SEQ ID NO: 99828 - DNA, 120 bp, synthetic construct; identical to SEQ ID NO: 23541
  source 1..120: mol_type = other DNA

SEQ ID NO: 99829 - DNA, 120 bp, synthetic construct; identical to SEQ ID NO: 23542
  source 1..120: mol_type = other DNA

SEQ ID NO: 99830 - DNA, 120 bp, synthetic construct
  source 1..120: mol_type = other DNA
ggttcaagtgattcttgttctcagcctcccaagtagctgggattacaggcacgcgccaccatgcctggttagttttttttttttgagaccaagtcttgcactgtcatccaggctggagcg

SEQ ID NO: 99831 - DNA, 120 bp, synthetic construct
  source 1..120: mol_type = other DNA
cctgtaatcctagcactttgggaggccgaggcgggcagatcacaaggtcaggagattgaggccatcctggctaacacggtgaaactctgactccactaaaaatacaaaaaaattagccgg

SEQ ID NO: 99832 - DNA, 120 bp, synthetic construct
  source 1..120: mol_type = other DNA
gtccttcatctcgtgggttagaagctgccagcactgctattctcagcacccagcccagaaaaggacctcaaagtgaccaaggtcagagcagtgtaagcactggagacagcccagccagcg

SEQ ID NO: 99833 - DNA, 120 bp, synthetic construct; identical to SEQ ID NO: 23545
  source 1..120: mol_type = other DNA

SEQ ID NO: 99834 - DNA, 120 bp, synthetic construct; identical to SEQ ID NO: 23546
  source 1..120: mol_type = other DNA

SEQ ID NO: 99835 - DNA, 120 bp, synthetic construct; identical to SEQ ID NO: 23547
  source 1..120: mol_type = other DNA

SEQ ID NO: 99836 - DNA, 120 bp, synthetic construct; identical to SEQ ID NO: 23548
  source 1..120: mol_type = other DNA

SEQ ID NO: 99837 - DNA, 120 bp, synthetic construct; identical to SEQ ID NO: 23549
  source 1..120: mol_type = other DNA

SEQ ID NO: 99838 - DNA, 120 bp, synthetic construct; identical to SEQ ID NO: 23550
  source 1..120: mol_type = other DNA

SEQ ID NO: 99839 - DNA, 120 bp, synthetic construct; identical to SEQ ID NO: 23551
  source 1..120: mol_type = other DNA

SEQ ID NO: 99840 - DNA, 120 bp, synthetic construct; identical to SEQ ID NO: 23552
  source 1..120: mol_type = other DNA

SEQ ID NO: 99841 - DNA, 120 bp, synthetic construct
  source 1..120: mol_type = other DNA
tttttgagacggagtctcgctctgtcgcccaggctggagtgcagtggcgcgatctcagctcactacaagctccacctcctgggttcatgccattctcctgcctcagcctcctgagtagct

SEQ ID NO: 99842 - DNA, 120 bp, synthetic construct
  source 1..120: mol_type = other DNA
agtaccagcaccaggataaaaaagataattgggaacgtggtccagaatgaaacatacaggacataaggatttaatatatgataaaagaagcacacatatccatagggaagggaaagttta

SEQ ID NO: 99843 - DNA, 120 bp, synthetic construct
  source 1..120: mol_type = other DNA
ggcagagatgctcctcacctcccagacggggtcgcggccggatgctctcacatcccagacggggccgcggggcagaggcgctccccacatctcaggcgatgggcggccgggcagagacgc

SEQ ID NO: 99844 - DNA, 120 bp, synthetic construct
  source 1..120: mol_type = other DNA
ttgtagcagactggaggaaatatttgtagcaaatttccagggttttaatattcttgtatatgaaacccttatgcaaatacataaataggcataggacaaggctggacaattagttaaata

SEQ ID NO: 99845 - DNA, 120 bp, synthetic construct; identical to SEQ ID NO: 18990
  source 1..120: mol_type = other DNA

SEQ ID NO: 99846 - DNA, 120 bp, synthetic construct; identical to SEQ ID NO: 19423
  source 1..120: mol_type = other DNA

SEQ ID NO: 99847 - DNA, 120 bp, synthetic construct; identical to SEQ ID NO: 19424
  source 1..120: mol_type = other DNA

SEQ ID NO: 99848 - DNA, 120 bp, synthetic construct; identical to SEQ ID NO: 19425
  source 1..120: mol_type = other DNA

SEQ ID NO: 99849 - DNA, 120 bp, synthetic construct; identical to SEQ ID NO: 19426
  source 1..120: mol_type = other DNA

SEQ ID NO: 99850 - DNA, 120 bp, synthetic construct
  source 1..120: mol_type = other DNA
cacaatagcaaagacttggaaccaacccaaatgtccaacaatggtagactggattgagaaagtgtggcacgtgtacaccatgggatactatgcagccataaaaaatgatgagttcatgtc

SEQ ID NO: 99851 - DNA, 120 bp, synthetic construct
  source 1..120: mol_type = other DNA
atgttttaccataagccaggataaactttaaaccaatcaaagatctatatgtttgaaaaagaaaagaggctgggcacagtgactcacgcctgtaatcccagcactttgggaggccgaggc

SEQ ID NO: 99852 - DNA, 120 bp, synthetic construct
  source 1..120: mol_type = other DNA
catgcctataatcccagcactttgggaggccaaggctggagaatcacttaaggccaggagtgagagaccagcctgagcaacatagtaagacctcatctctaccaaaaatttaaaaattag

SEQ ID NO: 99853 - DNA, 120 bp, synthetic construct; identical to SEQ ID NO: 22036
  source 1..120: mol_type = other DNA

SEQ ID NO: 99854 - DNA, 120 bp, synthetic construct; identical to SEQ ID NO: 22037
  source 1..120: mol_type = other DNA

SEQ ID NO: 99855 - DNA, 120 bp, synthetic construct; identical to SEQ ID NO: 22038
  source 1..120: mol_type = other DNA

SEQ ID NO: 99856 - DNA, 120 bp, synthetic construct
  source 1..120: mol_type = other DNA
caatcattaaaaagtcaggaaacaacaggtgctggagaggatgtggagacatgggaacacttttacactgttggtgggactgtaaactagttcaccccttgtggaagtcagtatggcgat

SEQ ID NO: 99857 - DNA, 120 bp, synthetic construct; identical to SEQ ID NO: 22039
  source 1..120: mol_type = other DNA

SEQ ID NO: 99858 - DNA, 120 bp, synthetic construct; identical to SEQ ID NO: 22040
  source 1..120: mol_type = other DNA

SEQ ID NO: 99859 - DNA, 120 bp, synthetic construct; identical to SEQ ID NO: 22041
  source 1..120: mol_type = other DNA

SEQ ID NO: 99860 - DNA, 120 bp, synthetic construct; identical to SEQ ID NO: 17080
  source 1..120: mol_type = other DNA

SEQ ID NO: 99861 - DNA, 120 bp, synthetic construct; identical to SEQ ID NO: 17081
  source 1..120: mol_type = other DNA

SEQ ID NO: 99862 - DNA, 120 bp, synthetic construct; identical to SEQ ID NO: 17082
  source 1..120: mol_type = other DNA

SEQ ID NO: 99863 - DNA, 120 bp, synthetic construct; identical to SEQ ID NO: 17083
  source 1..120: mol_type = other DNA

SEQ ID NO: 99864 - DNA, 120 bp, synthetic construct; identical to SEQ ID NO: 17084
  source 1..120: mol_type = other DNA

SEQ ID NO: 99865 - DNA, 120 bp, synthetic construct; identical to SEQ ID NO: 17085
  source 1..120: mol_type = other DNA

SEQ ID NO: 99866 - DNA, 120 bp, synthetic construct; identical to SEQ ID NO: 17086
  source 1..120: mol_type = other DNA

SEQ ID NO: 99867 - DNA, 120 bp, synthetic construct; identical to SEQ ID NO: 17087
  source 1..120: mol_type = other DNA

SEQ ID NO: 99868 - DNA, 120 bp, synthetic construct; identical to SEQ ID NO: 18796
  source 1..120: mol_type = other DNA

SEQ ID NO: 99869 - DNA, 120 bp, synthetic construct
  source 1..120: mol_type = other DNA
gccagtgcactccagcctgggtaacagagtaagtccctgtctcaacaaaatttaaaaaaaaagaaagaaaaaaagaaaaagaaaggaaaagaaaagaaaatgcatggacctaccagcaca

SEQ ID NO: 99870 - DNA, 120 bp, synthetic construct
  source 1..120: mol_type = other DNA
caggagaatcacttgaacatggaggcagaggttgcagtgagtcaagatcatgccattgcactctagcctgggcgacaagagcaaaactccatcttgaaaaaacaaaacaaaacaaaacaa

SEQ ID NO: 99871 - DNA, 120 bp, synthetic construct; identical to SEQ ID NO: 18799
  source 1..120: mol_type = other DNA

SEQ ID NO: 99872 - DNA, 120 bp, synthetic construct; identical to SEQ ID NO: 18800
  source 1..120: mol_type = other DNA

SEQ ID NO: 99873 - DNA, 120 bp, synthetic construct; identical to SEQ ID NO: 18801
  source 1..120: mol_type = other DNA

SEQ ID NO: 99874 - DNA, 120 bp, synthetic construct; identical to SEQ ID NO: 18802
  source 1..120: mol_type = other DNA

SEQ ID NO: 99875 - DNA, 120 bp, synthetic construct
  source 1..120: mol_type = other DNA
tctatcatgcaaatggaaaacaaaaaaaggcaggggttgcaatcctagtctctgataaaacagactttaaaccaacaaagatcaaaagagacaaagaaggccattacataatggtaaagg

SEQ ID NO: 99876 - DNA, 120 bp, synthetic construct
  source 1..120: mol_type = other DNA
gaagcaagagcaaacacattcaaaagctagcagaaggcaagaaataactaagatcagagcagaactgaaggagatagagaccaaaaaacccttcaaaaaatcaatgaatccaggagctgg

SEQ ID NO: 99877 - DNA, 120 bp, synthetic construct
  source 1..120: mol_type = other DNA
aggaagtcaaattgttcctgtttgcagatgacatgattgtatatctagaaaaccgaatcgtctcagcccacaatctccttaagctgataggcaacttcagcaaagtctcaggatacaaaa

SEQ ID NO: 99878 - DNA, 120 bp, synthetic construct
  source 1..120: mol_type = other DNA
gacaaagggctaatatccagaatctacaatgaacccaaacaaatttacaagaaaaaaacaaacaaccccatcaaaaagtgggtgaaggatatgaagaggcacttctcaaaagaggacatt

SEQ ID NO: 99879 - DNA, 120 bp, synthetic construct; identical to SEQ ID NO: 25103
  source 1..120: mol_type = other DNA

SEQ ID NO: 99880 - DNA, 120 bp, synthetic construct; identical to SEQ ID NO: 7758
  source 1..120: mol_type = other DNA

SEQ ID NO: 99881 - DNA, 120 bp, synthetic construct; identical to SEQ ID NO: 7759
  source 1..120: mol_type = other DNA

SEQ ID NO: 99882 - DNA, 120 bp, synthetic construct
  source 1..120: mol_type = other DNA
atcaacagcatcgcaaggcagaagaatttttcttagtacagaacaaaatgaagtctcccaggtctacctccttctacacagacacagcaacaatctgatttctctatcttttccccacct

SEQ ID NO: 99883 - DNA, 120 bp, synthetic construct
  source 1..120: mol_type = other DNA
gggatggcggccgggaagaggcgctcctcacttcccagactgggcggccgggcagaggggctcctcacatcccagacgatgggtggccaggcagagacgctcctcacttcccagacgggg

SEQ ID NO: 99884 - DNA, 120 bp, synthetic construct; identical to SEQ ID NO: 17562
  source 1..120: mol_type = other DNA

SEQ ID NO: 99885 - DNA, 120 bp, synthetic construct; identical to SEQ ID NO: 19095
  source 1..120: mol_type = other DNA

SEQ ID NO: 99886 - DNA, 120 bp, synthetic construct; identical to SEQ ID NO: 19096
  source 1..120: mol_type = other DNA

SEQ ID NO: 99887 - DNA, 120 bp, synthetic construct
  source 1..120: mol_type = other DNA
tgtcttcttttgagaagtgtctgtccatgtccttcgcccactttttgatggggttgtttttttcttgtaaatttgtttgagttcattgtagattctggatattagccctttgtcagatga

SEQ ID NO: 99888 - DNA, 120 bp, synthetic construct
  source 1..120: mol_type = other DNA
gtcatctgcaaacagggacaatttgacttcctcttttcctaattgaataccctttacttccttctcctgcctaattgccctggccagaacttccaacactatgttgaataggagtggtga

SEQ ID NO: 99889 - DNA, 120 bp, synthetic construct
  source 1..120: mol_type = other DNA
tcttttctagttcgttcaattgtgatgttaaggtgtcaattttggatctttcctgctttctcttgtgggcatttagtgctataaatttccctctacacactgctttgaatgtgtcccaga

SEQ ID NO: 99890 - DNA, 120 bp, synthetic construct
  source 1..120: mol_type = other DNA
actctttatccaatttgccagtctgtgtcttttaattggagcatttagtccatttacctttaaagttaatattgttatgtgtgaatttgatcctgtcattatgatgttagctggttattt

SEQ ID NO: 99891 - DNA, 120 bp, synthetic construct; identical to SEQ ID NO: 19097
  source 1..120: mol_type = other DNA

SEQ ID NO: 99892 - DNA, 120 bp, synthetic construct
  source 1..120: mol_type = other DNA
gattgcaccactgcactccagcctgggtgacaagagtgaaactccatcttaaaaaaaaaagttactgtagaagctctgaataatctagtatcatttatggcatttattgttttgtgacct

SEQ ID NO: 99893 - DNA, 120 bp, synthetic construct
  source 1..120: mol_type = other DNA
tggcaacaaaagacaaaattgacaaatgggatctaattaaactaaagagcttctgcacagcaaaagaaactaccatcagagtgaacaggcaacctacaacatgggagaaaattttcgcaa

SEQ ID NO: 99894 - DNA, 120 bp, synthetic construct; identical to SEQ ID NO: 15735
  source 1..120: mol_type = other DNA

SEQ ID NO: 99895 - DNA, 120 bp, synthetic construct; identical to SEQ ID NO: 15736
  source 1..120: mol_type = other DNA

SEQ ID NO: 99896 - DNA, 120 bp, synthetic construct; identical to SEQ ID NO: 15737
  source 1..120: mol_type = other DNA

SEQ ID NO: 99897 - DNA, 120 bp, synthetic construct; identical to SEQ ID NO: 15738
  source 1..120: mol_type = other DNA

SEQ ID NO: 99898 - DNA, 120 bp, synthetic construct; identical to SEQ ID NO: 22459
  source 1..120: mol_type = other DNA

SEQ ID NO: 99899 - DNA, 120 bp, synthetic construct; identical to SEQ ID NO: 22460
  source 1..120: mol_type = other DNA

SEQ ID NO: 99900 - DNA, 120 bp, synthetic construct; identical to SEQ ID NO: 22461
  source 1..120: mol_type = other DNA

SEQ ID NO: 99901 - DNA, 120 bp, synthetic construct
  source 1..120: mol_type = other DNA
gggcagtgcctctgccccaccgccccgtctgggatgtgaggagcgcctctgcccagccgcgaccccatctgggaggtgaggagcgtctctgcccagccgccccgtctgagaagtgaggag

SEQ ID NO: 99902 - DNA, 120 bp, synthetic construct
  source 1..120: mol_type = other DNA
ttttgtggaatagaaaggggggaaaggtggggaaaagattgagaaatcggatggtggccgtgtctgtatagaaagaagtagacatgggagacttttcattttgttctgtactaagaaaaa

SEQ ID NO: 99903 - DNA, 120 bp, synthetic construct
  source 1..120: mol_type = other DNA
gtttggagggcagataactgaaaccacataaggctttggaatcctgagaaacaagaaatccaccaacggagaaggatttatcatctgtttcctttaaggagggtgcaaagttgttctaac

SEQ ID NO: 99904 - DNA, 120 bp, synthetic construct
  source 1..120: mol_type = other DNA
ccctggagttctggcgggagggaagctgtcaaatggaagccggtagaaatgagacagacgcccggagaagcggggagccccgcccctccgccatagcagcctcgggcgccgcctcttcct

SEQ ID NO: 99905 - DNA, 120 bp, synthetic construct
  source 1..120: mol_type = other DNA
ggttgagtatgcccatttccgtgatttctctcgattcagcgagtcatacgttggaaacgtttagattcacaaactatcgttactgtctggggctttcagaagcttgcctttgaaccgaat

SEQ ID NO: 99906 - DNA, 120 bp, synthetic construct
  source 1..120: mol_type = other DNA
taatttaacagaccagctgaacacacatcagagagctaagctagagtgtggagtcattatggtcttctagtatggttttatgccccactttggggactctggtttgggacctagtttatt

SEQ ID NO: 99907 - DNA, 120 bp, synthetic construct
  source 1..120: mol_type = other DNA
actttagagctgaaaagttgtcaggaatcttagaaacacggtctgttgatcttgttttacccatgaagcagcagaggcccagaaaggttaagtgacatccccaaagccacatagcaagat

SEQ ID NO: 99908 - DNA, 120 bp, synthetic construct
  source 1..120: mol_type = other DNA
tgctgcaagtcagcatccaggatagggaaccaggacagctgggctctaattcgggtggtaattttggaaacagtatatttcctctaggcagttcattcaaccaccaaaaatttttaaagt

SEQ ID NO: 99909 - DNA, 120 bp, synthetic construct
  source 1..120: mol_type = other DNA
attgttttcctaaatgacaactcagaacaatagaaggcattagaagagaccttccatatgcgcccatcacattcttcagcctacctatgtctgcacctttgtgctttcagtactgaaggt

SEQ ID NO: 99910 - DNA, 120 bp, synthetic construct
  source 1..120: mol_type = other DNA
cagctaatttttatttttttatttctagtagagacaaggtcttgctacgttgcccaggctggtcttaaactcctcggctcaagtgatccttccacctcagcctcccaaagtgccgggata

SEQ ID NO: 99911 - DNA, 120 bp, synthetic construct
  source 1..120: mol_type = other DNA
gaaatgaaccgccttggtgcttctgggatgttccactaatatacagctatatccaggatgtctactggaatgttggctttttgaaatactatgagctcaagcaggtgcccaattttctac

SEQ ID NO: 99912 - DNA, 120 bp, synthetic construct
  source 1..120: mol_type = other DNA
atctcagctcactgcaacctgtgtctcctgggttcaagcgactcttctgcctcaatctcccgagtagctggaattccaggcgcctgccaccaccgcctagctaatttttgtatttttagt

SEQ ID NO: 99913 - DNA, 120 bp, synthetic construct
  source 1..120: mol_type = other DNA
ggacatcttttttccccatgccgacctcttagcagtttcttcctgttggagttgcacattggctgtttctaaaattctccaagctgtatggataagagacacagaggaaatagaaagtag

SEQ ID NO: 99914 - DNA, 120 bp, synthetic construct
  source 1..120: mol_type = other DNA
gaaagtaaaaatacacattggaactgcctctgctgccctgggatcattactgtgtccattataatctttctctttctctttgaaagctggtcaggaatgggagaagtgtcagacactaga

SEQ ID NO: 99915 - DNA, 120 bp, synthetic construct
  source 1..120: mol_type = other DNA
agttaaaataatataaatcagctgggggaaaaaagggtaagaagaaggcatcaggaaccctggattctagtcctctcagtaaaaccccatttaccagccatgtgacttgggagagttttc

SEQ ID NO: 99916 - DNA, 120 bp, synthetic construct
  source 1..120: mol_type = other DNA
tttcagctctttattgccgaggtaggagcactgggttcttcgctctcctctttgcctccttttgggggataatcaggactgattattcctctactggaagaggtgactcagaccccacag

SEQ ID NO: 99917 - DNA, 120 bp, synthetic construct; identical to SEQ ID NO: 25045
  source 1..120: mol_type = other DNA

SEQ ID NO: 99918 - DNA, 120 bp, synthetic construct; identical to SEQ ID NO: 11059
  source 1..120: mol_type = other DNA

SEQ ID NO: 99919 - DNA, 120 bp, synthetic construct; identical to SEQ ID NO: 11722
  source 1..120: mol_type = other DNA

SEQ ID NO: 99920 - DNA, 120 bp, synthetic construct; identical to SEQ ID NO: 11723
  source 1..120: mol_type = other DNA

SEQ ID NO: 99921 - DNA, 120 bp, synthetic construct; identical to SEQ ID NO: 9188
  source 1..120: mol_type = other DNA

SEQ ID NO: 99922 - DNA, 120 bp, synthetic construct; identical to SEQ ID NO: 9189
  source 1..120: mol_type = other DNA

SEQ ID NO: 99923 - DNA, 120 bp, synthetic construct; identical to SEQ ID NO: 12723
  source 1..120: mol_type = other DNA

SEQ ID NO: 99924 - DNA, 120 bp, synthetic construct; identical to SEQ ID NO: 12724
  source 1..120: mol_type = other DNA

SEQ ID NO: 99925 - DNA, 120 bp, synthetic construct; identical to SEQ ID NO: 12725
  source 1..120: mol_type = other DNA

SEQ ID NO: 99926 - DNA, 120 bp, synthetic construct; identical to SEQ ID NO: 12726
  source 1..120: mol_type = other DNA

SEQ ID NO: 99927 - DNA, 120 bp, synthetic construct
  source 1..120: mol_type = other DNA
gaacaatgagaacacttggacacaggaaggagaacatcacacactggggcctgtcatggggtggggggaggggggagggatagcattagcagatatacctaatgtaaatgacaagttaat

SEQ ID NO: 99928 - DNA, 120 bp, synthetic construct; identical to SEQ ID NO: 12727
  source 1..120: mol_type = other DNA

SEQ ID NO: 99929 - DNA, 120 bp, synthetic construct; identical to SEQ ID NO: 12728
  source 1..120: mol_type = other DNA

SEQ ID NO: 99930 - DNA, 120 bp, synthetic construct
  source 1..120: mol_type = other DNA
acatgaagtccttgcccatgcctatatcccgaatggtaatgcctaggttttcttctagggttttatggttttaggtctaacgtttaagtctttaatccatcttgaattgatttttgtata

SEQ ID NO: 99931 - DNA, 120 bp, synthetic construct
  source 1..120: mol_type = other DNA
atagcactgggagatatacctaatgctagatgacgagttagtgggtgcagcacaccagcatggcacatgtatacatatgcaactaacctgcacattgtgtacatgtaccctaaaacttaa

SEQ ID NO: 99932 - DNA, 120 bp, synthetic construct; identical to SEQ ID NO: 24909
  source 1..120: mol_type = other DNA

SEQ ID NO: 99933 - DNA, 120 bp, synthetic construct; identical to SEQ ID NO: 24910
  source 1..120: mol_type = other DNA

SEQ ID NO: 99934 - DNA, 120 bp, synthetic construct; identical to SEQ ID NO: 24911
  source 1..120: mol_type = other DNA

SEQ ID NO: 99935 - DNA, 120 bp, synthetic construct; identical to SEQ ID NO: 24754
  source 1..120: mol_type = other DNA

SEQ ID NO: 99936 - DNA, 120 bp, synthetic construct
  source 1..120: mol_type = other DNA
ctctccagcacctgttgtttcctgactttttaatgattgccattctaactggtgtgagatggtatcccactgtggttttgatttgcatttctctgatggccagtgatgatgagcattttt

SEQ ID NO: 99937 - DNA, 120 bp, synthetic construct
  source 1..120: mol_type = other DNA
gtggtccttgtgaaaacttttttctaactgcttattttatatcaagtaataaataaaatttctgtgggtatgaagatgagttttagggccgcctatttctctaggaccgcccccccgccc

SEQ ID NO: 99938 - DNA, 120 bp, synthetic construct; identical to SEQ ID NO: 26635
  source 1..120: mol_type = other DNA

SEQ ID NO: 99939 - DNA, 120 bp, synthetic construct; identical to SEQ ID NO: 26636
  source 1..120: mol_type = other DNA

SEQ ID NO: 99940 - DNA, 120 bp, synthetic construct; identical to SEQ ID NO: 26637
  source 1..120: mol_type = other DNA

SEQ ID NO: 99941 - DNA, 120 bp, synthetic construct; identical to SEQ ID NO: 26638
  source 1..120: mol_type = other DNA

SEQ ID NO: 99942 - DNA, 120 bp, synthetic construct; identical to SEQ ID NO: 7555
  source 1..120: mol_type = other DNA

SEQ ID NO: 99943 - DNA, 120 bp, synthetic construct; identical to SEQ ID NO: 17413
  source 1..120: mol_type = other DNA

SEQ ID NO: 99944 - DNA, 120 bp, synthetic construct; identical to SEQ ID NO: 17414
  source 1..120: mol_type = other DNA

SEQ ID NO: 99945 - DNA, 120 bp, synthetic construct; identical to SEQ ID NO: 17415
  source 1..120: mol_type = other DNA

SEQ ID NO: 99946 - DNA, 120 bp, synthetic construct
  source 1..120: mol_type = other DNA
actgcactccagcctgggtgaaagagtgaaactccatctcaaaaacaaacaaacaaaaaaccccaggatgttgatgtcgatacattttattccgatttccccagtttcacctgtacttgt

SEQ ID NO: 99947 - DNA, 120 bp, synthetic construct
  source 1..120: mol_type = other DNA
tttttaattgaaagtaaaattcccctttgggaggctgaggcaggcggatcacaagatcagggatcgagaccatcctagctaacatggtgaaaccccgtctctactaaaaatacaaaaaat

SEQ ID NO: 99948 - DNA, 120 bp, synthetic construct; identical to SEQ ID NO: 21946
  source 1..120: mol_type = other DNA

SEQ ID NO: 99949 - DNA, 120 bp, synthetic construct
  source 1..120: mol_type = other DNA
ttttaatgattgccattctaactggtgtgagatggtatctcattgtggttttgatttgcatttctctgatgaaaaaaccactttaaagttcgtatggaaccaaaaaagagcccgcatcgc

SEQ ID NO: 99950 - DNA, 120 bp, synthetic construct
  source 1..120: mol_type = other DNA
atgtgtggcccaatacaattcttcttccagtgaggcccagggaagtcaaaagattggacacccctgatttagatagtaatggagtcctgtgtgtgctttttccctatgatatttaactta

SEQ ID NO: 99951 - DNA, 120 bp, synthetic construct
  source 1..120: mol_type = other DNA
gagtattccatggtgtgtatgtgccacattttcttttttatttttattttattttttattttattattattagtagtagtatactttaagttttagggtacatgtgcacaatgtgcaggt

SEQ ID NO: 99952 - DNA, 120 bp, synthetic construct; identical to SEQ ID NO: 27725
  source 1..120: mol_type = other DNA

SEQ ID NO: 99953 - DNA, 120 bp, synthetic construct
  source 1..120: mol_type = other DNA
accaagtttatctctcccaccttccttagccctgggctctccgttctcaggcatcaggactcatcactccaagtcctgagttctagatttcctgataccccaggcccacaatcttcctat

SEQ ID NO: 99954 - DNA, 120 bp, synthetic construct; identical to SEQ ID NO: 31264
  source 1..120: mol_type = other DNA

SEQ ID NO: 99955 - DNA, 120 bp, synthetic construct; identical to SEQ ID NO: 31265
  source 1..120: mol_type = other DNA

SEQ ID NO: 99956 - DNA, 120 bp, synthetic construct; identical to SEQ ID NO: 31266
  source 1..120: mol_type = other DNA

SEQ ID NO: 99957 - DNA, 120 bp, synthetic construct; identical to SEQ ID NO: 31267
  source 1..120: mol_type = other DNA

SEQ ID NO: 99958 - DNA, 120 bp, synthetic construct; identical to SEQ ID NO: 31268
  source 1..120: mol_type = other DNA

SEQ ID NO: 99959 - DNA, 120 bp, synthetic construct; identical to SEQ ID NO: 10140
  source 1..120: mol_type = other DNA

SEQ ID NO: 99960 - DNA, 120 bp, synthetic construct; identical to SEQ ID NO: 10141
  source 1..120: mol_type = other DNA

SEQ ID NO: 99961 - DNA, 120 bp, synthetic construct; identical to SEQ ID NO: 10142
  source 1..120: mol_type = other DNA

SEQ ID NO: 99962 - DNA, 120 bp, synthetic construct; identical to SEQ ID NO: 32601
  source 1..120: mol_type = other DNA

SEQ ID NO: 99963 - DNA, 120 bp, synthetic construct; identical to SEQ ID NO: 19419
  source 1..120: mol_type = other DNA

SEQ ID NO: 99964 - DNA, 120 bp, synthetic construct; identical to SEQ ID NO: 19420
  source 1..120: mol_type = other DNA

SEQ ID NO: 99965 - DNA, 120 bp, synthetic construct; identical to SEQ ID NO: 19421
  source 1..120: mol_type = other DNA

SEQ ID NO: 99966 - DNA, 120 bp, synthetic construct; identical to SEQ ID NO: 19422
  source 1..120: mol_type = other DNA

SEQ ID NO: 99967 - DNA, 120 bp, synthetic construct; identical to SEQ ID NO: 33490
  source 1..120: mol_type = other DNA

SEQ ID NO: 99968 - DNA, 120 bp, synthetic construct; identical to SEQ ID NO: 33491
  source 1..120: mol_type = other DNA

SEQ ID NO: 99969 - DNA, 120 bp, synthetic construct; identical to SEQ ID NO: 33492
  source 1..120: mol_type = other DNA

SEQ ID NO: 99970 - DNA, 120 bp, synthetic construct; identical to SEQ ID NO: 33493
  source 1..120: mol_type = other DNA

SEQ ID NO: 99971 - DNA, 120 bp, synthetic construct; identical to SEQ ID NO: 33494
  source 1..120: mol_type = other DNA

SEQ ID NO: 99972 - DNA, 120 bp, synthetic construct
  source 1..120: mol_type = other DNA
tgcccaatagagtagccactagcgacatgcagctatttaagtttaaattaattaaaattaaataaaattggctgggtgcggtggctcacacctgtaatcccagcactttgggaggccaag

SEQ ID NO: 99973 - DNA, 120 bp, synthetic construct; identical to SEQ ID NO: 17320
  source 1..120: mol_type = other DNA

SEQ ID NO: 99974 - DNA, 120 bp, synthetic construct
  source 1..120: mol_type = other DNA
tcaggcaaggtcggcctttatttatttatttatttatttattttagagacagagtctccctctgtcacccaggctagagtgcagtggtgccatcatagttcactgcagccttgaacttct

SEQ ID NO: 99975 - DNA, 120 bp, synthetic construct; identical to SEQ ID NO: 18474
  source 1..120: mol_type = other DNA

SEQ ID NO: 99976 - DNA, 120 bp, synthetic construct; identical to SEQ ID NO: 18475
  source 1..120: mol_type = other DNA

SEQ ID NO: 99977 - DNA, 120 bp, synthetic construct
  source 1..120: mol_type = other DNA
gtcaaggctgcaatgagctacggtcatacctctgcactccagcctggatgacagagcgagaccctgtctctaaaaaaataagaaagaaaaggaaaaaaaaaggcaagtgaagttaatttt

SEQ ID NO: 99978 - DNA, 120 bp, synthetic construct; identical to SEQ ID NO: 18476
  source 1..120: mol_type = other DNA

SEQ ID NO: 99979 - DNA, 120 bp, synthetic construct; identical to SEQ ID NO: 4240
  source 1..120: mol_type = other DNA

SEQ ID NO: 99980 - DNA, 120 bp, synthetic construct
  source 1..120: mol_type = other DNA
ccaagtcctccaaagccagcatagacatcacctctcaagtgaagcattcagggagtccaaattaattccttcattcttagtgctatgtctgaatcatgactacattctaatcatccatcc

SEQ ID NO: 99981 - DNA, 120 bp, synthetic construct
  source 1..120: mol_type = other DNA
tgacatggttctgcgcaggtggttgcgcttccgcaggaactctggctgcgcgtgcagcccgaagctgcccttgcgcaggatcatgcgcgagttgttcttctttgggcgtgagcggtggct

SEQ ID NO: 99982 - DNA, 120 bp, synthetic construct
  source 1..120: mol_type = other DNA
aacctggtgaaaccctgtctactaaaaatacaaaaattagacaggcgtggtggtgggcacgtatttagctgtaatcctagctacctgggagactgaggcaggagaatcacttaaacctgg

SEQ ID NO: 99983 - DNA, 120 bp, synthetic construct
  source 1..120: mol_type = other DNA
ttccgccgttactgggcgtatggcgtacagacacgaggccggcgcccgggaggcggtgttcatccgcccgggaaaagagcgcctgttgctcgctgcccgcgtgtccctggctctctcggg

SEQ ID NO: 99984 - DNA, 120 bp, synthetic construct
  source 1..120: mol_type = other DNA
aggtttgggagatgcaggagcctggggtgcaggggccggggtgcgggggcgatgtatcaggtgtggggggtgcggggccggggggaagcgctgaggcccgacttgccggggctgtagggc

SEQ ID NO: 99985 - DNA, 120 bp, synthetic construct
  source 1..120: mol_type = other DNA
gtgataggaagcaagttgtgtttgctggagtctcaagcggatgctttcagattgatttgtagatcagcagtccccagtctttttggcaccagggaccgatttcctggaagacaatttttc

SEQ ID NO: 99986 - DNA, 120 bp, synthetic construct; identical to SEQ ID NO: 13398
  source 1..120: mol_type = other DNA

SEQ ID NO: 99987 - DNA, 120 bp, synthetic construct
  source 1..120: mol_type = other DNA
cctttatgcaaaaacagagttcacagagaagactgaaataaaacacttcctttatttaaataattcaaatatgcttaagatttattgggtccctccccctccccctccccctccccctcc

SEQ ID NO: 99988 - DNA, 120 bp, synthetic construct
  source 1..120: mol_type = other DNA
cgccgccccatctgggatgtgaggagcgcctctgcccggccgagaccccgtctgggaggtgaggagcatctctgcccggccgccccgtctgagaagtgaggagaccctctgccgggcaac

SEQ ID NO: 99989 - DNA, 120 bp, synthetic construct; identical to SEQ ID NO: 26936
  source 1..120: mol_type = other DNA

SEQ ID NO: 99990 - DNA, 120 bp, synthetic construct; identical to SEQ ID NO: 26937
  source 1..120: mol_type = other DNA

SEQ ID NO: 99991 - DNA, 120 bp, synthetic construct; identical to SEQ ID NO: 29128
  source 1..120: mol_type = other DNA

SEQ ID NO: 99992 - DNA, 120 bp, synthetic construct; identical to SEQ ID NO: 29129
  source 1..120: mol_type = other DNA

SEQ ID NO: 99993 - DNA, 120 bp, synthetic construct
  source 1..120: mol_type = other DNA
ctgatgctcttgactgaaatgagaaaatatagtaaagaagtggatttgtggggcaggcaaacaattcagtttaatttgacatacttggaggcatctagctccagatagggagcagtggag

SEQ ID NO: 99994 - DNA, 120 bp, synthetic construct; identical to SEQ ID NO: 11102
  source 1..120: mol_type = other DNA

SEQ ID NO: 99995 - DNA, 120 bp, synthetic construct
  source 1..120: mol_type = other DNA
tgtccatgtattctcgttgttcaacttccacttatgagtgagagcatgcgatgtttggttttctgttcctgtgttagtttgctgagaatgaagagggattttcacattctctatgttatt

SEQ ID NO: 99996 - DNA, 120 bp, synthetic construct
  source 1..120: mol_type = other DNA
gaaaagaaaagaaaagaaaatatagcaacaccccatctctacaaaaaatttaacattagcagggtgtggtggtgtgtccctgtagtcccagctacttgagaggttgaagtgggaggattg

SEQ ID NO: 99997 - DNA, 120 bp, synthetic construct; identical to SEQ ID NO: 27820
  source 1..120: mol_type = other DNA

SEQ ID NO: 99998 - DNA, 120 bp, synthetic construct; identical to SEQ ID NO: 27821
  source 1..120: mol_type = other DNA

SEQ ID NO: 99999 - DNA, 120 bp, synthetic construct; identical to SEQ ID NO: 27822
  source 1..120: mol_type = other DNA

SEQ ID NO: 100000 - DNA, 120 bp, synthetic construct; identical to SEQ ID NO: 27823
  source 1..120: mol_type = other DNA

SEQ ID NO: 100001 - DNA, 120 bp, synthetic construct; identical to SEQ ID NO: 27816
  source 1..120: mol_type = other DNA

SEQ ID NO: 100002 - DNA, 120 bp, synthetic construct
  source 1..120: mol_type = other DNA
acagcagggtattccaacagacctgcagctgagggtcctgtctgttagaaggaaaactaacaaccagaaaggacatctacaccgaaaacccatctgtacatcaccatcatcaaagaccaa

SEQ ID NO: 100003 - DNA, 120 bp, synthetic construct
  source 1..120: mol_type = other DNA
ctaaacatggaaaggaacaaccggtaccagccgctgcaaaatcatgccaaaatgtaaagaccatcgagactaggaggaaactgcatcaactaatgagcaaaatcaccagctaacatcata

SEQ ID NO: 100004 - DNA, 120 bp, synthetic construct
  source 1..120: mol_type = other DNA
aatctcactcaaagccgctcaactccatggaaactgaacaacctgctcctgaatgactactgggtacataacgaaatgaaggcagaaataaagatgttctttgaaaccaacaagaacaaa

SEQ ID NO: 100005 - DNA, 120 bp, synthetic construct
  source 1..120: mol_type = other DNA
atccagcagcacatcaaaaagcttatccaccatgatcaagtgggcttcatccctgggatgcaaggctggttcaatatacgcaaatcaataaatgtaatccagcatataaacatagccaaa

SEQ ID NO: 100006 - DNA, 120 bp, synthetic construct
  source 1..120: mol_type = other DNA
ctgatctttgacaaacctgagaaaaacaagcaatggggaaaggattccctatttaataaatggtgctgggaaaactggctagccatatgtagaaggctgaaactggatcccttccttaca

SEQ ID NO: 100007 - DNA, 120 bp, synthetic construct
  source 1..120: mol_type = other DNA
cacatgcacacgtatgtttattgcggcactattcacaatagcaaagacttggaaccaacccaaatgtccaacaatgatagactggattaagcaaatgtggcacatatacaccatggaata

SEQ ID NO: 100008 - DNA, 120 bp, synthetic construct; identical to SEQ ID NO: 27817
  source 1..120: mol_type = other DNA

SEQ ID NO: 100009 - DNA, 120 bp, synthetic construct; identical to SEQ ID NO: 27809
  source 1..120: mol_type = other DNA

SEQ ID NO: 100010 - DNA, 120 bp, synthetic construct; identical to SEQ ID NO: 27810
  source 1..120: mol_type = other DNA

SEQ ID NO: 100011 - DNA, 120 bp, synthetic construct; identical to SEQ ID NO: 27811
  source 1..120: mol_type = other DNA

SEQ ID NO: 100012 - DNA, 120 bp, synthetic construct; identical to SEQ ID NO: 27812
  source 1..120: mol_type = other DNA

SEQ ID NO: 100013 - DNA, 120 bp, synthetic construct
  source 1..120: mol_type = other DNA
tatggctccatagtattccatggtgtatacgtgccacattttcttaatccagtctatcattgttggacatttgggttggttccaagtctttgctattgtgaataatgccgcaataaacat

SEQ ID NO: 100014 - DNA, 120 bp, synthetic construct
  source 1..120: mol_type = other DNA
tttcccagcaccatttattaaatagggaatcctttccccattgcttgtttttctcaggtttgtcaaagatcagatagttgtagatacgcggcgttatttctgagggctctgttctgttcc

SEQ ID NO: 100015 - DNA, 120 bp, synthetic construct
  source 1..120: mol_type = other DNA
ttgaaccagccttgcatcccagggatgaagtccacttgatcatgggggataagctgtttgatgtgctgctggattcgttttgccagtattttattgaggatttttgcatcaatgttcatc

SEQ ID NO: 100016 - DNA, 120 bp, synthetic construct
  source 1..120: mol_type = other DNA
tcgttacgtacccagtagtcattcaggagcaggttgttcagtttccatgtagttgagcggttttgagtgagattcttaatcctgagttctagtttgattgcactgtggtctgagagatag

SEQ ID NO: 100017 - DNA, 120 bp, synthetic construct
  source 1..120: mol_type = other DNA
gttagttcatgcagtttcttcctagtctcgatggtctttacaatttggcatgattttgcagaggctggtaccagttgtgcctttccatgtttggtgcttccttcaggagctcttttaggg

SEQ ID NO: 100018 - DNA, 120 bp, synthetic construct
  source 1..120: mol_type = other DNA
gtccagctttgttccattgctggtgaggaactgcgttcctttggaggaggagaggcgctctgctttttagagtttccagtttctgtgctctgttttttccccatcttggtggttttatct

SEQ ID NO: 100019 - DNA, 120 bp, synthetic construct; identical to SEQ ID NO: 27813
  source 1..120: mol_type = other DNA

SEQ ID NO: 100020 - DNA, 120 bp, synthetic construct; identical to SEQ ID NO: 27814
  source 1..120: mol_type = other DNA

SEQ ID NO: 100021 - DNA, 120 bp, synthetic construct; identical to SEQ ID NO: 27815
  source 1..120: mol_type = other DNA

SEQ ID NO: 100022 - DNA, 120 bp, synthetic construct
  source 1..120: mol_type = other DNA
ggaggaggggcgcccaccattgcccaggctcgcttaggtaaacaaagcagcccggaagctcgaactgggtggagcccaccacagctcaaggaggcctgcctgcctctgtaggctccacct

SEQ ID NO: 100023 - DNA, 120 bp, synthetic construct
  source 1..120: mol_type = other DNA
agaacttccccaatctagcaaggcaggccaacgttcagattcaggaaatagagagaacgccacaaagatattcatcgagaagagcaactccaagacacataattgtcagattcaccaaag

SEQ ID NO: 100024 - DNA, 120 bp, synthetic construct
  source 1..120: mol_type = other DNA
tcaacattagacagatcaacgagacagaaagtcaacaaggatacccaggaattgaattcagctctgcaccaagcgaacctaatagacatctacagaactctccacctcaaatcaacagaa

SEQ ID NO: 100025 - DNA, 120 bp, synthetic construct
  source 1..120: mol_type = other DNA
aatccatagaaaaagagggaatcctccctaactcaatttatgaggccagcatcattctgatacctaagccgggcagagacacaaccaaaaaagagaactttacaccaatatccttgatga

SEQ ID NO: 100026 - DNA, 120 bp, synthetic construct
  source 1..120: mol_type = other DNA
ggtaatttacagattcagtgccatccccatcaagctaccaaggactttcttcacagaattggaaaaaaaactactttaaagttcatatggaaccaaaaaaagagcccgcatcgccaagtc

SEQ ID NO: 100027 - DNA, 120 bp, synthetic construct
  source 1..120: mol_type = other DNA
agccaaaaaacacataaaaaaatgctcatcatcactggccatcagagaaatgcaaatcaaaaccacaatgagataccatctcacaccagttagaatggcaatcattaaaaagtcaggaaa

SEQ ID NO: 100028 - DNA, 120 bp, synthetic construct
  source 1..120: mol_type = other DNA
ctcctttttagttatccccacctgcccagttcccttattaggccgagacattttaattgaattatctgcttccctcactgttcctagattacagccacacctcactgctgccctttaccc

SEQ ID NO: 100029 - DNA, 120 bp, synthetic construct
  source 1..120: mol_type = other DNA
ttcagtcaagcccaaatttcttcctcatctgttacctatcatggcgtaattctcataaaacgtgttttccctgccgatcgtgtcctactgatctctcaaaccccaccaccttctacaaaa

SEQ ID NO: 100030 - DNA, 120 bp, synthetic construct; identical to SEQ ID NO: 27818
  source 1..120: mol_type = other DNA

SEQ ID NO: 100031 - DNA, 120 bp, synthetic construct
  source 1..120: mol_type = other DNA
caaccccgtctgggaggtgaggagcgtctctgcccggccgccccgtctgagaagtgaggaaaccctctgcctggcaaccgccccgtctgagaagtgaggagcccctccgtccggcagcca

SEQ ID NO: 100032 - DNA, 120 bp, synthetic construct; identical to SEQ ID NO: 27819
  source 1..120: mol_type = other DNA

SEQ ID NO: 100033 - DNA, 120 bp, synthetic construct
  source 1..120: mol_type = other DNA
aagttgcttatcagcttaaggagattttgggctgagacgactgggttatctagatatacaatctcgtcatctgcaaacagggacaatttgacttcctcttttcctaattgaatgcccttt

SEQ ID NO: 100034 - DNA, 120 bp, synthetic construct
  source 1..120: mol_type = other DNA
gctagcggtctatcaattttgttgatcttttcaaaaaaccagctcctggattcagtgattttttgaagggttttttgtgtctctatttccttcagttctgctctgatcttagttatttct

SEQ ID NO: 100035 - DNA, 120 bp, synthetic construct
  source 1..120: mol_type = other DNA
cccccctcagcctcccaaagtgctgggattacagacgtgagccaccacgcctggccaggaatacatttttaaatgtgttaaagttttagtttaaatgtgttaaattttcagtttcacaaa

SEQ ID NO: 100036 - DNA, 120 bp, synthetic construct; identical to SEQ ID NO: 31724
  source 1..120: mol_type = other DNA

SEQ ID NO: 100037 - DNA, 120 bp, synthetic construct
  source 1..120: mol_type = other DNA
gtgtctgttcatgtcctttgcccactttttgatggggttgtttgtttttttcttgtaaatttgtttgagttcattgtagattctggatattagccctttgtcagatgagtaggtcgcgaa

SEQ ID NO: 100038 - DNA, 120 bp, synthetic construct
  source 1..120: mol_type = other DNA
gtccttcacatcccttgtaagttggattcctaggtattttattttctttgaagcaattatgaatgggagttcactcatgatttggctctctgtttgtctgttattggtgtataagaatgc

SEQ ID NO: 100039 - DNA, 120 bp, synthetic construct; identical to SEQ ID NO: 28257
  source 1..120: mol_type = other DNA

SEQ ID NO: 100040 - DNA, 120 bp, synthetic construct
  source 1..120: mol_type = other DNA
agttgttcctttccatgtttagtgcttccttcaggagctcttgttaggcaggcctggtggtgacagaatctctcagcatttgcttgtctgtaaagtattttatttctccttcacttatga

SEQ ID NO: 100041 - DNA, 120 bp, synthetic construct; identical to SEQ ID NO: 7787
  source 1..120: mol_type = other DNA

SEQ ID NO: 100042 - DNA, 120 bp, synthetic construct
  source 1..120: mol_type = other DNA
aaaaaaaaaaaaaaatactggcttctatatttacttatgtagttaattttacctgcgtttgtcttccttttttcctttctctctccctccctccccctccccctaccccctcccccttgc

SEQ ID NO: 100043 - DNA, 120 bp, synthetic construct
  source 1..120: mol_type = other DNA
agtttcaagtttgaaagtcctggcggagggtctgcggcttccgggaccggagtggctgagagaagggccccaagcggccggagcggcgccatggaggagggggcgccgcggcaggtgaac

SEQ ID NO: 100044 - DNA, 120 bp, synthetic construct
  source 1..120: mol_type = other DNA
ccgcaaagagcggaaaggaggtggtgtgtgtgtccatgttggagttccaacccagggcagacgggaccatgggggtgttgcggggtgcgtgtagactccttgagcgcccaagccagtcgt

SEQ ID NO: 100045 - DNA, 120 bp, synthetic construct
  source 1..120: mol_type = other DNA
gatcacctgaggtcaggattcaagaccagcctgacgaacatggagaaaccccgtccctactaaaaatacaaaattagccgggcttagtggcgtgtgcctgtaatcccagctactcaggag

SEQ ID NO: 100046 - DNA, 120 bp, synthetic construct
  source 1..120: mol_type = other DNA
cactgtggcgagaccacctcatttcctgcctatagatcagtaggggaaggaggaaaggccacagtgggggtctcggctctgggtgagggactcctgtgctcgatacccccgtgcacagag

SEQ ID NO: 100047 - DNA, 120 bp, synthetic construct
  source 1..120: mol_type = other DNA
tgaaagaggaaatttgaccccagcccttgttggtcagatggaaaaggctcccctgacccaccaactagtccaacaagggaggcttgactttagtgtttggcctagaggtttcactttaac

SEQ ID NO: 100048 - DNA, 120 bp, synthetic construct
  source 1..120: mol_type = other DNA
aaactgacattccttcttcaaacctcagtttatccatctgtaaaatgtggatgatatagcacctacctcatagggttgctgtgttgcacgtgatgtgctaagcacagtgcctagcacagt

SEQ ID NO: 100049 - DNA, 120 bp, synthetic construct
  source 1..120: mol_type = other DNA
acctataatcctggcactttgagaggctgaggtgggaagattgcttgagctcaggagtttttttgagacccagtctcaaaaaaaaaagaaaaaaagaaagttttcttggctgggcacagt

SEQ ID NO: 100050 - DNA, 120 bp, synthetic construct
  source 1..120: mol_type = other DNA
acagcgagactctgtctcaaaaaaaaataaaaaaataaaaaaattagccaggtatgatggtacgtacctgtagtcccagctacttgggaggctgaggtgggaggattgcttgagcccagg

SEQ ID NO: 100051 - DNA, 120 bp, synthetic construct
  source 1..120: mol_type = other DNA
ccaaaaaagttaattttcttatcttgcactgagatctgtctccttgtagcagcagccaaatcatcatcaacaaataatctgagagcatgggctttgaagctgtatcccaccgagatacag

SEQ ID NO: 100052 - DNA, 120 bp, synthetic construct
  source 1..120: mol_type = other DNA
aaagtgctgggattacaggcgtgagccacctcgccccacctcttttttttttttttttggagacagagtcttgctctgtcgcccaggccggattgcagtggtgtgatttcggctcactgc

SEQ ID NO: 100053 - DNA, 120 bp, synthetic construct
  source 1..120: mol_type = other DNA
tcgtgtcctcaaaagctgctagatccccactgctttctctaccctttgagggacaaccctctagtgacgtgacacatgaacttactccgttgacaaaacacgtttcatatccattgggag

SEQ ID NO: 100054 - DNA, 120 bp, synthetic construct
  source 1..120: mol_type = other DNA
ctggctgtgctaaaggtggacaaccgtgttgtggggcagacgggctgggggcaggtggccgaacagtcctgggaccagacctttgtcatcccactggagcgagtaaggctggcctttgtg

SEQ ID NO: 100055 - DNA, 120 bp, synthetic construct
  source 1..120: mol_type = other DNA
agactgcatgctcctctgtggcggcttcctgactccagatccaggcggtatctgtctgtctgtctgcattgctcagcccgctaaccctctgtccatctcactttgggttggtgtgtccat

SEQ ID NO: 100056 - DNA, 120 bp, synthetic construct
  source 1..120: mol_type = other DNA
gcacaacctctctctggccccaggtcctcctggtccagttcaaggggacagggaaatactacgccatcaaagcactgaagaagcaggaggtgctcagccgggacgagatagagaggtgtg

SEQ ID NO: 100057 - DNA, 120 bp, synthetic construct
  source 1..120: mol_type = other DNA
tcaaaaaaaaaaaaaaaaaaggctgggcgcactggctcacacttgtaatcccagcattctggaaggccgaagcaggtggataacttgaggccaagagttcgagaccagcctgggcaacac

SEQ ID NO: 100058 - DNA, 120 bp, synthetic construct
  source 1..120: mol_type = other DNA
tcctgtctaattttgtatttttagtagagacgaggtttctccatgttggtcaggttggtctctaactcctgacctcaagtgatccgcccacctcggccttccaaagtgctgagattacag

SEQ ID NO: 100059 - DNA, 120 bp, synthetic construct
  source 1..120: mol_type = other DNA
tccctggtgtgtgtcttgggcctgagttctcccataaccacccctgcagcttctacgtggcttgtgttgtcctggggctgcagttcttacacgagaagaagatcatttacaggtgacttt

SEQ ID NO: 100060 - DNA, 120 bp, synthetic construct
  source 1..120: mol_type = other DNA
gcctccaaggttcaagagattctcctgcctcagcctcccgagtacctgcgattacaggcacatgccaccacacccagcttattttttgtatttttagtagagacggggtttcaccatgtt

SEQ ID NO: 100061 - DNA, 120 bp, synthetic construct
  source 1..120: mol_type = other DNA
ctgaatgccctaagtgagcgcctgtcctattgcccagctcctccagaagtgcccggagaagcgcctcggggcaggtgagcaggatgccgaggagatcaaggtccagccattcttcagggt

SEQ ID NO: 100062 - DNA, 120 bp, synthetic construct
  source 1..120: mol_type = other DNA
gggtcccgattgctgcagccgcttgtcagtgtgatgaagattggcacccaggtaagctgtcactcaaccgctccgccgccgccgccgccgctctcgccgccgccgtccctatcaatcaca

SEQ ID NO: 100063 - DNA, 120 bp, synthetic construct; identical to SEQ ID NO: 23134
  source 1..120: mol_type = other DNA

SEQ ID NO: 100064 - DNA, 120 bp, synthetic construct; identical to SEQ ID NO: 23135
  source 1..120: mol_type = other DNA

SEQ ID NO: 100065 - DNA, 120 bp, synthetic construct
  source 1..120: mol_type = other DNA
gtttctttgtactcttatctctcgcattgtagagaatttgcaaagttcagaaaattctgaaagaacaggaaaaaagtcactcataaccaccccctgccacccacacacacacacacacac

SEQ ID NO: 100066 - DNA, 120 bp, synthetic construct; identical to SEQ ID NO: 12434
  source 1..120: mol_type = other DNA

SEQ ID NO: 100067 - DNA, 120 bp, synthetic construct; identical to SEQ ID NO: 12435
  source 1..120: mol_type = other DNA

SEQ ID NO: 100068 - DNA, 120 bp, synthetic construct; identical to SEQ ID NO: 12436
  source 1..120: mol_type = other DNA

SEQ ID NO: 100069 - DNA, 120 bp, synthetic construct; identical to SEQ ID NO: 12437
  source 1..120: mol_type = other DNA

SEQ ID NO: 100070 - DNA, 120 bp, synthetic construct; identical to SEQ ID NO: 12438
  source 1..120: mol_type = other DNA

SEQ ID NO: 100071 - DNA, 120 bp, synthetic construct; identical to SEQ ID NO: 3400
  source 1..120: mol_type = other DNA

SEQ ID NO: 100072 - DNA, 120 bp, synthetic construct
  source 1..120: mol_type = other DNA
tcatttctggatggtcttgacacattcttacatcttcttcaacatgacttcttcacttttcttctctagagttttcttgagttaaaataatggcttgaagaagatcatatgagatctagt

SEQ ID NO: 100073 - DNA, 120 bp, synthetic construct
  source 1..120: mol_type = other DNA
taccataagccctaataacaaagaccactatttgtcgagcctgtggccggtatctactggtggcaaacttgcaaaggtcttctggaagactcataaaattatgttctatttgttttctgg

SEQ ID NO: 100074 - DNA, 120 bp, synthetic construct
  source 1..120: mol_type = other DNA
gtttttgttttctttttaaaccactagcacagtgctaataaataaatagtttataggccaggtggggtggctcacgcctgtaatcccagcacttttgggaggctgaggtgggtagatcac

SEQ ID NO: 100075 - DNA, 120 bp, synthetic construct
  source 1..120: mol_type = other DNA
agattctttttccccccatatcacaggcatttgtaaacataaaaccaaaaccagagagtgcaaagatgtacggagaagagcatggtgtgttccttcaagagtgaaaagtctttctcctcc

SEQ ID NO: 100076 - DNA, 120 bp, synthetic construct
  source 1..120: mol_type = other DNA
ggcctaaattgggtggggctgtagtagaggtaacatgtacatccctgtacagccaagcacacatttcttcagtacaggtgaagtcatctgctttgtaactcattaaaactaggctatcat

SEQ ID NO: 100077 - DNA, 120 bp, synthetic construct
  source 1..120: mol_type = other DNA
ctgctgttattaaatcacagctgtggctttgggaaactaattcattaggccaatacaatgctggaatgcacaaccaagagaagttctggagtctgaccctctgttgatactttagaagag

SEQ ID NO: 100078 - DNA, 120 bp, synthetic construct
  source 1..120: mol_type = other DNA
ctcccaaagtgctgggattacaggcgtgagacactgcgcccggccaagaactttcttaaaaagaaacacagctggttaacaacacatggaaagatgtaatttccctaataacaaattttt

SEQ ID NO: 100079 - DNA, 120 bp, synthetic construct
  source 1..120: mol_type = other DNA
agaaacctgaggaaaaatgttaataggagctgtttttctacaacaatattaatagtgaactaaaatctttttttttttttgaaacagagtcttgctctgtcacccaggctggagtgcagt

SEQ ID NO: 100080 - DNA, 120 bp, synthetic construct
  source 1..120: mol_type = other DNA
gcccgcctcagcctcccaaactgctgggattacaggcgtgagccactgcgcctggcctactattttaaaaagagaaataaactattttaaatgtacttttctactatgtatataacttct

SEQ ID NO: 100081 - DNA, 120 bp, synthetic construct
  source 1..120: mol_type = other DNA
taaagaactaaaagtagaactaccatttgatccagcaataccactactgggtatctacccaaaggaaaagaagtcattatatgaaaaagacacttgtacatgcatgtttatagcagcaca

SEQ ID NO: 100082 - DNA, 120 bp, synthetic construct
  source 1..120: mol_type = other DNA
caataaaaggcactgaatgatatgtcatcataatacctggacctgattgacaggtaagacataccttttgctcacaggcctgaacactttccttttgactgtggttcaagcacacagcat

SEQ ID NO: 100083 - DNA, 120 bp, synthetic construct
  source 1..120: mol_type = other DNA
ttctctgttatccttaaagtgaagtttatcaacagaatcctctaatataaaccatgtggctacagctataccttcccgacatttaggggactgcagaacctgaggccaacagcatttctg

SEQ ID NO: 100084 - DNA, 120 bp, synthetic construct
  source 1..120: mol_type = other DNA
tttttcaaatgttctagaattgtggtgcttaagagagccacagagagaacattctgaaagacaactatatggattagaaagacttcattggatggtgtgactgagggtgccacccagtga

SEQ ID NO: 100085 - DNA, 120 bp, synthetic construct
  source 1..120: mol_type = other DNA
ctgcctcagcctcctaaagtgttgggattacaggcgtgaaccaccatgcccagccgaagatgttttaaaaattagaactgtgatggaactagtctaaaggtattttctttaaactcttat

SEQ ID NO: 100086 - DNA, 120 bp, synthetic construct
  source 1..120: mol_type = other DNA
ttgtaataattctgtgcatgaaatagtttatatacgaggagccactggaaagcaaaggtgtcactaactcagccacccatgtggacaatctgtggttgtttggcatcaccattattcctg

SEQ ID NO: 100087 - DNA, 120 bp, synthetic construct
  source 1..120: mol_type = other DNA
gtcaaatggtatttctgcctctagatctttgagaaagcaccacactgttctccacaatggttgaactaatttgcactcccaccaatggtggaaaagcattcttttttctctgcaaccttg

SEQ ID NO: 100088 - DNA, 120 bp, synthetic construct
  source 1..120: mol_type = other DNA
ttttggttatggtagccctgtaacacagtttgaagtcaggtagcatgatgcctctagctttgatctttttgcttaggactgtcttggctattcggctctttttcaattccatatgaattt

SEQ ID NO: 100089 - DNA, 120 bp, synthetic construct
  source 1..120: mol_type = other DNA
gtgtgtgtgtgtctgtatctccttcagttccactctgatcttggctatttcttgccttggggtttgtttggtctggttttctagttcttttagttgtgatgttaggttgataccttgaga

SEQ ID NO: 100090 - DNA, 120 bp, synthetic construct
  source 1..120: mol_type = other DNA
gacttgtttatgtggttgcttcatactgtcactggtctgtgtacttcagtgtgttttcatagtggctggtaatggtttttcctttccacatttagtgcttccttcaggagcttttgcatg

SEQ ID NO: 100091 - DNA, 120 bp, synthetic construct
  source 1..120: mol_type = other DNA
ttcacctggagaagaggcactctgtctttttgagtttcagcgtttttgcattgattctttctcatctttgtgggcttatctaccttcgacctttgaggctgctgacttctgaaaaggttt

SEQ ID NO: 100092 - DNA, 120 bp, synthetic construct
  source 1..120: mol_type = other DNA
tcctaggggaaggtacaaagggatctgtcaccttgctggaaattccggggccggagtatgtaaaactcttgtctctgtgtgtacctgtgctgagactccgcacagctctgtttattggac

SEQ ID NO: 100093 - DNA, 120 bp, synthetic construct; identical to SEQ ID NO: 12837
  source 1..120: mol_type = other DNA

SEQ ID NO: 100094 - DNA, 120 bp, synthetic construct; identical to SEQ ID NO: 12838
  source 1..120: mol_type = other DNA

SEQ ID NO: 100095 - DNA, 120 bp, synthetic construct
  source 1..120: mol_type = other DNA
tgcctcagtctcctgagtagctgggactacaggcgcccaccaccatgcctggctaattttttgtatttttagtagagacggggtttcaccatgttagccaggctggtcttgaactcctga

SEQ ID NO: 100096 - DNA, 120 bp, synthetic construct
  source 1..120: mol_type = other DNA
tgtttttataatttagtcagtatctttttttcaatattaaaaatagtaggaagaagctgggcctggtggctcatgcctgtaattccagcactttgggaggctgaggcaggaggattgctt

SEQ ID NO: 100097 - DNA, 120 bp, synthetic construct
  source 1..120: mol_type = other DNA
tgctctccctccctccctcctaccatgtttctcttcagcctcatcaagaactttagttcctttacctaaccttcattccttacacctcaagttatcaattctctcctgtcttaaatttct

SEQ ID NO: 100098 - DNA, 120 bp, synthetic construct
  source 1..120: mol_type = other DNA
ctcctaaactgcctatctctcctactagaccattcattagcctcttgaaagaacatatcttatccatcttttctccacctcagtgccttgtatggtaccttccacatgataggtcctata

SEQ ID NO: 100099 - DNA, 120 bp, synthetic construct
  source 1..120: mol_type = other DNA
aatggcttccagatgcatccatgttgctgcaaaggacatgattttactcttttttcatggctgcatatcattgcagggtgcatatgtaccacattttctttatccaatccaccacggatg

SEQ ID NO: 100100 - DNA, 120 bp, synthetic construct
  source 1..120: mol_type = other DNA
ttttgctgtgcagaagctctttagcttaattaggtcccagaatagacaacccagcaatgaagctccacacctacagccatctggtctttgacaaagttgacaaaaataagcaatggggaa

SEQ ID NO: 100101 - DNA, 120 bp, synthetic construct
  source 1..120: mol_type = other DNA
catgagggatctaggctgtgtgctccttataagaatctaattgatctaagatggaacagtttcatcctgaaactatctctccccagcctagtctgtgaaaaaactgtcttccatgaaacc

SEQ ID NO: 100102 - DNA, 120 bp, synthetic construct
  source 1..120: mol_type = other DNA
attaaaaaaacacatatgtcaaaattttaaaaagcatcccgtaacttaaaagaataaagggaggctgagtgcggtggctcacacctataatcccagcactctgggaggctgaggctggtg

SEQ ID NO: 100103 - DNA, 120 bp, synthetic construct
  source 1..120: mol_type = other DNA
caaagtaagagaaatggttttgggaaacctagcataggaaaatggggaataacgtgattcattagtgtccctgtgtcattaagggctccctggtagttcccagtttctttctcaatgtac

SEQ ID NO: 100104 - DNA, 120 bp, synthetic construct
  source 1..120: mol_type = other DNA
aagaaggcccaccctggagttttcagtgccataagccaaaaatttcctcttttttgcttaaaccagcttgaggcaggattctgagatctgtaactgaaagagtactgacttgacttgtca

SEQ ID NO: 100105 - DNA, 120 bp, synthetic construct
  source 1..120: mol_type = other DNA
caccagggttctaaatttaccagctggtttccacaaataccacgatactcagagaaggaggggaggttacattctcttagttttcatatcagtatggaaataaatatgtattccttccta

SEQ ID NO: 100106 - DNA, 120 bp, synthetic construct
  source 1..120: mol_type = other DNA
tctaaagagtgtgtccagaacaactgtatagcttagatacgtaacttactagccatgttgagctggagaaggggaggagatactgtttatagggaccaactaggaggctattgcaataat

SEQ ID NO: 100107 - DNA, 120 bp, synthetic construct
  source 1..120: mol_type = other DNA
gtgctgggattacaggcgtgagccaccatgcctggcctaggttttaatatttctaaggatgaatggaagatcttaggctcagtaaatgaatcagtgaataaacctaaaaccaagcggcta

SEQ ID NO: 100108 - DNA, 120 bp, synthetic construct
  source 1..120: mol_type = other DNA
tttttccaaaaatgtcaatacctcagtcaacaagaatgacaaaaaatagggccttcaggttttaagaacttgagaatcacctctattcccaactttaattgctaagaactgtccctataa

SEQ ID NO: 100109 - DNA, 120 bp, synthetic construct
  source 1..120: mol_type = other DNA
aagtgatttccaaaaggccttctgcctcaaaatactgctttcagtgcatatttgtcaaagaaacaaaggtgcctaagcattacatcaagaactaaaggtggctgggtgtggtggcttaca

SEQ ID NO: 100110 - DNA, 120 bp, synthetic construct
  source 1..120: mol_type = other DNA
caaatcccagctagcattcattcagtctgcaaataccatatgtccccaactacatgatgttatcatatgtttaaaagcttccctttggccttttcaacctctggccaggataaatggcag

SEQ ID NO: 100111 - DNA, 120 bp, synthetic construct
  source 1..120: mol_type = other DNA
tatctgcagacctttaagaaaactaaaactgcatactgttatatactgaaatttaaaaacaggtccttaggggttgaaggcaaggggccagggccttaggagaagtagagtgaggaagga

SEQ ID NO: 100112 - DNA, 120 bp, synthetic construct
  source 1..120: mol_type = other DNA
aaacaatgagctgaaggagatggttaaagtaaaaggctacagttagtttccaggacatgagaatggccgggaacaataacgtctgagtgcatcttttcaagacacttcaccaccatacaa

SEQ ID NO: 100113 - DNA, 120 bp, synthetic construct
  source 1..120: mol_type = other DNA
acagtttatgtgcatgtattgtatacaaggcctggtggctgtgggaccagtcttttattttattttattttttttgagatggagtctcactgtgttgcccaggctggagtgcagtggcga

SEQ ID NO: 100114 - DNA, 120 bp, synthetic construct
  source 1..120: mol_type = other DNA
aatggaaaaaagctatgttgtcatctgttccacaccaagaaactagaaggtggtagaggagaaaatctatccttaaaaatcctttagctctggccaggcacggtggctcatgcctgtaat

SEQ ID NO: 100115 - DNA, 120 bp, synthetic construct
  source 1..120: mol_type = other DNA
aagatggtattaaaagtatctgagaaagacattcttgtgaattcttttttctgcccaagactcaactcataagctaaccgattaagaaagcccagcaaaaagagtccacttgatataatg

SEQ ID NO: 100116 - DNA, 120 bp, synthetic construct
  source 1..120: mol_type = other DNA
actgaggctgaagttgatgattcagttgtctttctatttttgggaaagccaatctctggggtgaactatctagatactttcatcaagtttccattttgtttgcactatctcatctagcat

SEQ ID NO: 100117 - DNA, 120 bp, synthetic construct
  source 1..120: mol_type = other DNA
ccttaactctgtgactaattagaaacaagactgatagttatagcctttctttccaaaggtatggtttgcttcctctgacaactccccactccagctagatttccagtgtaagagacaatg

SEQ ID NO: 100118 - DNA, 120 bp, synthetic construct
  source 1..120: mol_type = other DNA
tgcggaagagtcttggggacttaatttcttcacctgaagaatgaggccactaacagaagctccctagatgtgtttgtttttgacctaaatgttttccaaaacttgactctcactgctctt

SEQ ID NO: 100119 - DNA, 120 bp, synthetic construct
  source 1..120: mol_type = other DNA
tggaagagcaatctgataactgcaatacatattttaactaagttatacttcttactccaagtaaataaaggaggctgtgaaaaaaaaagatattttagcagcttttctccactgaagaag

SEQ ID NO: 100120 - DNA, 120 bp, synthetic construct
  source 1..120: mol_type = other DNA
tgcagagcagatttactcagcaccattgccacatgcagaccagaaatgatctcaatgtcaagtctagtaaacggagaaagttcactgttgtatgcacaagtttttctccaaaatggatgg

SEQ ID NO: 100121 - DNA, 120 bp, synthetic construct
  source 1..120: mol_type = other DNA
tgtatctagcatactgactaagaccttcgaatttgaagacaagcttccggcatttgagtttcaactctgtctactactagccatatgactttaggaaaatcactcaacctctctgaggct

SEQ ID NO: 100122 - DNA, 120 bp, synthetic construct
  source 1..120: mol_type = other DNA
gactggataaggagaatgtggtatacatacaccatggaatactacacagccaagaaaaagaatgaaatcgtgtccttggcagcaacatggatgcagctggaggccattattctaagcaaa

SEQ ID NO: 100123 - DNA, 120 bp, synthetic construct
  source 1..120: mol_type = other DNA
tggtaatgaaggttgtggatagactgaaaaaggctgtgtatgctgtgatggaccaagatgtcttccatttttgtttggttcacccactaagttcttccaccccttttcttatggtaacag

SEQ ID NO: 100124 - DNA, 120 bp, synthetic construct
  source 1..120: mol_type = other DNA
tggccagctttgagaactgctgctctaacacatttcattgtagctgtcttctagttcacttgcttatctgtgtcccctgctccactaaacatttcttacggatattcttgttttatattt

SEQ ID NO: 100125 - DNA, 120 bp, synthetic construct
  source 1..120: mol_type = other DNA
tatatcctgacttccttggggctacctaattttttattgcatcttctatcagggcagggtacaggtagcattaccttaggcatccagtgacgttgtagaatatgtcaaaatcgagcaaac

SEQ ID NO: 100126 - DNA, 120 bp, synthetic construct
  source 1..120: mol_type = other DNA
caatttattctggctacctcatgtatccttattttatagtttggcagtgaaggagagacaacagcatcttccctattggccaacttgcatggcctaagtactgctcaaagattagtaccc

SEQ ID NO: 100127 - DNA, 120 bp, synthetic construct
  source 1..120: mol_type = other DNA
tgactcttccctttctaccctatccttctcactgcccaggcaacaattcctacttcttttttctcccccgagatggagtactgctttgttgccaaggctgaagtgcggtggcgcaatctc

SEQ ID NO: 100128 - DNA, 120 bp, synthetic construct
  source 1..120: mol_type = other DNA
agatttctggcttatgaggaggtattttcctgatcaaactagcatttggggttaaggagcagtgtccctcagccacaggttttgcaatacaatgacttcattcctcctgcttctccttaa

SEQ ID NO: 100129 - DNA, 120 bp, synthetic construct
  source 1..120: mol_type = other DNA
tcattttccatgactagaggaggcaaaaccagaaccgatgagtggaaattctaaagaaggagattttggctcactgaaagtataaacttctaagagagctttgaagaaaacagaaagaac

SEQ ID NO: 100130 - DNA, 120 bp, synthetic construct
  source 1..120: mol_type = other DNA
cccgggaggcggagcttgcagtgagccgagatcatgccactgtactccagcctcggcaacagagcgagactccgtctcaaaaaaataaataaaaataataataaaaaaattaatgacctc

SEQ ID NO: 100131 - DNA, 120 bp, synthetic construct
  source 1..120: mol_type = other DNA
agaatcgcttgaatctgggaggcagaggttgcagtgagccaagactgcgccattgcactccagcctgggtaacaagaatgaaacttcttctcaaaaaaaaaaaaaaaaaagaagagagag

SEQ ID NO: 100132 - DNA, 120 bp, synthetic construct
  source 1..120: mol_type = other DNA
aaagcctattccttttttaaggtccacaatgaaacataaccccttcaggaagtatttcctgactataaaactagtagatggagaaacaaaatccaacgcgggtgcagtggcatgtccctg

SEQ ID NO: 100133 - DNA, 120 bp, synthetic construct
  source 1..120: mol_type = other DNA
tattctcacttacaaatgggagctaaacattgggtatacatggacttaaagatgaataaaagagggaggaaaggacgggggcaagggttgaaaaactatctgttgggtactatgctgagt

SEQ ID NO: 100134 - DNA, 120 bp, synthetic construct
  source 1..120: mol_type = other DNA
ctgatggtgatggcagggagagtgcttattctggaacatcaacaaatcatcttctcttttatcatacgactgttcatttaaatgaaagtagccccttctcttcatgcttagaggacatat

SEQ ID NO: 100135 - DNA, 120 bp, synthetic construct
  source 1..120: mol_type = other DNA
tcactgcacctcagcctgggtgatagagcaagattctgtctcaaaaaaaaaaaaaaggaattcgaatgtggctcaaatctggagtctaagccagcaggtaacaatgttcctttaaagcct

SEQ ID NO: 100136 - DNA, 120 bp, synthetic construct
  source 1..120: mol_type = other DNA
aacagaaataaaaatgcatttaccatgtcagcctcagtagtaatgcaaactaaccctaaattcttttttgtttgagatgcagtctggctctgtcacccaggctggaatgcagtggcggga

SEQ ID NO: 100137 - DNA, 120 bp, synthetic construct
  source 1..120: mol_type = other DNA
gccaggggcagatttgcatattttctatgtaccaagttctagcctccctttcatagacaggtaaatggtatttaggacacagccctccaatattacatattcctttgacaggattggaga

SEQ ID NO: 100138 - DNA, 120 bp, synthetic construct
  source 1..120: mol_type = other DNA
tgctccaagggagtaattcagatcttggatttttggattaggaatgctcaaccaatgtaatgcgaatattccaaaatctgaaaaaccctaaattcaaaatactcctggtctcaagcattt

SEQ ID NO: 100139 - DNA, 120 bp, synthetic construct
  source 1..120: mol_type = other DNA
agagaactacagacataccagtgcttagataaaggccgaaatccggctacagctctacttactgtataacttgactccctagtgtctggcacttatcccaagcttaaaaatagattttag

SEQ ID NO: 100140 - DNA, 120 bp, synthetic construct
  source 1..120: mol_type = other DNA
aaaatagtgactacatcttttgtaatagcagaaaataagaaaccattaacatccagcaatgggggaagactggttgatggttgtcacatacccacatgttgaggtatccacgggagaggc

SEQ ID NO: 100141 - DNA, 120 bp, synthetic construct
  source 1..120: mol_type = other DNA
gcagtgactacttcagtgatgagatatgaaacaggcatgaaaataagaccacgttaagaagggtcttacagactaaattaagggatttgtcttttatcctgcaggcaatgggggcagtta

SEQ ID NO: 100142 - DNA, 120 bp, synthetic construct
  source 1..120: mol_type = other DNA
tgagctcagaaggttgaggctgcagtgagccatgatagtgctactgcactccagcctgggcaacagagtgagaacatgtctcaaaaaaaaagaaaaaagagagagagagagagatcaaca

SEQ ID NO: 100143 - DNA, 120 bp, synthetic construct
  source 1..120: mol_type = other DNA
actgcactccagcctgggcaacagaacaacaccctgtctcaaacaaacaaacaaaacgccccaaaaaaccaggaataaaaaaagatttaaagatttatctctgactagctattaaaggat

SEQ ID NO: 100144 - DNA, 120 bp, synthetic construct
  source 1..120: mol_type = other DNA
tcattttaaaaaatatttttctcagtaacttttttttttgtgtgtgtgtgtgtgacagagtctctctctgttgcccaggctgaagtacactggcatgatcttggctcactgcaacctctg

SEQ ID NO: 100145 - DNA, 120 bp, synthetic construct
  source 1..120: mol_type = other DNA
aaatgctgctctggttccacttaacaaatcttaaaagtagaatttgagggcaaggagagggaaagcattaggacaaatacctaatgcacgcggggcttaaaacctagatgacaggttgat

SEQ ID NO: 100146 - DNA, 120 bp, synthetic construct
  source 1..120: mol_type = other DNA
atctatgaagctcagtgaactcccaagcacaaaaaactaagagaaactacactaaagcacatgtgaccaaactgatcaacaccagtaagaaagagaaaatcttaaaagcagccagaggtg

SEQ ID NO: 100147 - DNA, 120 bp, synthetic construct
  source 1..120: mol_type = other DNA
tcaaaaagaaaagaaaagaaaagaaaattcttcagatcatctgggcacggtggctcacacctctaatccctgcactttgggaggtagatcacttcaggaggacccaagtggatcactttg

SEQ ID NO: 100148 - DNA, 120 bp, synthetic construct
  source 1..120: mol_type = other DNA
tcccttgaaagactcccttgaaagacacaaattaccaaagctcactaaaaaagccactgatagtctaaacagccccacagcagttcaagaaactgaatttgcagctaagaaccttctcac

SEQ ID NO: 100149 - DNA, 120 bp, synthetic construct
  source 1..120: mol_type = other DNA
ctaaatagatgttaacatgtaccatggtcatgggtcacaagactcaatattgttaagatgtcaattctctccatattgatctacagattcagtgcaatctctaacaaaatcccagcaatt

SEQ ID NO: 100150 - DNA, 120 bp, synthetic construct
  source 1..120: mol_type = other DNA
tgaggcaagaagttcaagaccagcctggccaacatgatgaaacctcgactccactaaaaaaaaaatacaaaaattagccatgtatggtgacacatgcctataatcccagctacttgggag

SEQ ID NO: 100151 - DNA, 120 bp, synthetic construct
  source 1..120: mol_type = other DNA
ccgagaggtggaggttgcaatgagccaaaattgtgccactgcactccagcctgggcaacagaggcagatcctttctcaaaaaaaaaaaaaaaaaaaaaaaaaaaaaagttcaaccccttt

SEQ ID NO: 100152 - DNA, 120 bp, synthetic construct
  source 1..120: mol_type = other DNA
gggctggagggattatatggattacacaggggcacaagaaaacgctggaggtaatggatatatttgttatcttgattgtgatgatggttttagtgtcaaacctgtcaaaactatgtcaga

SEQ ID NO: 100153 - DNA, 120 bp, synthetic construct
  source 1..120: mol_type = other DNA
tggctaatttttgtatttttttttagtagagttggggtttcatcatttggccaggctggtcttgaactccttgcctcaagtgatctgcccaccttggcctcccaaagtgctgggattaca

SEQ ID NO: 100154 - DNA, 120 bp, synthetic construct
  source 1..120: mol_type = other DNA
gtcattcgattgaattataccatataccaaagaaagaagctgaacttttaaaaataaatatgaggctgaggtgggcggatcacttgaggtcaggagttcaagaccagcctggccaacatg

SEQ ID NO: 100155 - DNA, 120 bp, synthetic construct
  source 1..120: mol_type = other DNA
tgttctttggcttcaaagagggttatacctgattcattccaggtaacattccagacacattcattccagacactggagacatcctgagaaggagttttccaatatctactagcaagcata

SEQ ID NO: 100156 - DNA, 120 bp, synthetic construct
  source 1..120: mol_type = other DNA
ccaatcacaccaggcttttaatccttctctaaacactgccaccttcttcacaagccaccttctttgacttttccaggaagcttatcatactacctaattctcacccattcttcaagactc

SEQ ID NO: 100157 - DNA, 120 bp, synthetic construct
  source 1..120: mol_type = other DNA
tatcagtataaatttaaaaatgtaagagaaagcagtgtaaactaccactggtcagaatacgagacattacagggggagaaaaaaacccagtaacttggccgggcggtggtggctcatacc

SEQ ID NO: 100158 - DNA, 120 bp, synthetic construct
  source 1..120: mol_type = other DNA
ctgtcaatcctagagaagatccaccctctctgcttagtctccctcaactaatcccagagcacgatgctcttgtgggttttgtttgttttgctttgagacagggtctcactctgttgccca

SEQ ID NO: 100159 - DNA, 120 bp, synthetic construct
  source 1..120: mol_type = other DNA
agaacatcggtttcatcagtttgtctctctcacactccaagtctcagtttttagctgcattagtaactgtttaaccagccattcttcttttggaaagccaggtccattgtttaatacctt

SEQ ID NO: 100160 - DNA, 120 bp, synthetic construct
  source 1..120: mol_type = other DNA
ctcccaaagtgctaggattacagatgtgagccactgtgctggcctcatcatatatttatacagtgcctactataggcctacttccattttagggtgctgagaatataaagatgattgagc

SEQ ID NO: 100161 - DNA, 120 bp, synthetic construct
  source 1..120: mol_type = other DNA
tataggtccagaatttggcatcaaggatggaattgcagacaaaactttgagaaccataaggataaaagtgaggtacacagagcctctctggaagagcatcaagacttggaatagaagggt

SEQ ID NO: 100162 - DNA, 120 bp, synthetic construct
  source 1..120: mol_type = other DNA
tgctgggattacaggcctgggccactgctcccggcttatttttcctctttgtaagtatgctcatattgcctaaggtctgcttactataagaaatgttagaaatctcatggtgaattttac

SEQ ID NO: 100163 - DNA, 120 bp, synthetic construct
  source 1..120: mol_type = other DNA
aagtcattattttaatcacttatctctggaagcccttctctcaagccccagaagtgccagctcatgctgtcagggctgtgggaacagaatgtgctggcaatgactgaactgcagagtcag

SEQ ID NO: 100164 - DNA, 120 bp, synthetic construct
  source 1..120: mol_type = other DNA
tatttgcactaggatgtaagaatgtttcacatccctagttttccatggtatcctcataaatatcaattttctcaaaactcatttaggaaatgataatacttgggaaaagtaaacactcaa

SEQ ID NO: 100165 - DNA, 120 bp, synthetic construct
  source 1..120: mol_type = other DNA
cgcttgaacccaggaggtggaggttgcagtgaagctgagattgcgccattgcactacagcctgagcaacaagagtgaaactctgtctcaaaaaaaaaaaaaaaaagttttcaaaatgaaa

SEQ ID NO: 100166 - DNA, 120 bp, synthetic construct
  source 1..120: mol_type = other DNA
gcattttttagaaatcagagggaaaatatactcaattaactcttctaggcttcagagactcatgaaagatgttgagaatacaacaacacagggtgctcctttccagtacaatgggaacac

SEQ ID NO: 100167 - DNA, 120 bp, synthetic construct
  source 1..120: mol_type = other DNA
aaggaattctcctgcctcagcctctgtgagccaccgtgtctggcctcatattattattttatgttggctgaggctcgcgcctaggctaaccctttatcctctactctgcactccttctct

SEQ ID NO: 100168 - DNA, 120 bp, synthetic construct
  source 1..120: mol_type = other DNA
aaattgcaaagagatttaatagtcagggttgattattaaatcaacctgggttcctcctttcccctggtctctgctgtctgactgcaaggtggctactatgacattgtcatttatcaaggc

SEQ ID NO: 100169 - DNA, 120 bp, synthetic construct
  source 1..120: mol_type = other DNA
tgtctggacaaatcagttagatgcctgtttcccgtaattccagctactaataggactgctgagagagagggtttacctgagaaagcatagactcaaacgctttcaaaattgtgaagtgat

SEQ ID NO: 100170 - DNA, 120 bp, synthetic construct
  source 1..120: mol_type = other DNA
tttgttatgcttttctctttttaatctgtcttttgttataggggtctcaggcataaacctggtgacgggtaagaaaagaaaacttttctcctctacacaagcaatatgcaaaaatgagat

SEQ ID NO: 100171 - DNA, 120 bp, synthetic construct
  source 1..120: mol_type = other DNA
agactgtgccactgcactccagcctgggcaacagagcaagattccgtcccccccccaaaaaaaaaactaagttgattttcataatcacagttttgtgaacaattttattatgtaattggt

SEQ ID NO: 100172 - DNA, 120 bp, synthetic construct
  source 1..120: mol_type = other DNA
gaacaaccagatattgatggaaatcacaacagcccaagtaagcatttgcttaggctggaaaataagtagaatttgttggtttagaaaactatagttggctgggcagggtggctcacacta

SEQ ID NO: 100173 - DNA, 120 bp, synthetic construct
  source 1..120: mol_type = other DNA
tacccgcctcgggctcccaaagtgccagcgctttaggcgtgagccattaaatggcccttttatatcacaggtgttcatgtcatattttgtttgaggtattagaatatgtaattgtagaat

SEQ ID NO: 100174 - DNA, 120 bp, synthetic construct
  source 1..120: mol_type = other DNA
caagtagctgggattacaggcatgcgccaccacgcccagcttattttttctgtacttttagtagagacagggtttctccatgttgatcaggctagtctcaaactcccgacctcagatgat

SEQ ID NO: 100175 - DNA, 120 bp, synthetic construct
  source 1..120: mol_type = other DNA
tcaccagaatggaactaaaatgtgagtatgatagtcacatacatgcttttgtcttggggtagatggaaggtgctcaaatagtttcgactgttctctgtcattctgggtatacggagagga

SEQ ID NO: 100176 - DNA, 120 bp, synthetic construct
  source 1..120: mol_type = other DNA
tctttaaacactttaagaacattacaactgtttttatgtccaatatccaattaccagaaatggcattatagaaaagatacacaggccgggtgcggtggctcacgcctgagatcccagcac

SEQ ID NO: 100177 - DNA, 120 bp, synthetic construct
  source 1..120: mol_type = other DNA
ctaccctctgttcccatgactgtggaactcttagcacagggcatacagataacaacagtcttttaaaagcctaaatgaacagtcttccttcctttaaggtaatttcctgcgtcttatctg

SEQ ID NO: 100178 - DNA, 120 bp, synthetic construct
  source 1..120: mol_type = other DNA
ctgcgcccagcccagaattcactttgatcacagatattgaaaagcagcttcaccaaggaaatcacctaagataatagtgtgcctcaagttttgtggtggatttccaaagaggttgtaaat

SEQ ID NO: 100179 - DNA, 120 bp, synthetic construct
  source 1..120: mol_type = other DNA
tccttagttggaacagccagtcaagtagttgacccaagcattatagcagaaggaccaagatagtgccctttgttctaccatatcaactctgtgaactgtgaaatattcattctgttccct

SEQ ID NO: 100180 - DNA, 120 bp, synthetic construct
  source 1..120: mol_type = other DNA
cagcaacattcccttttcttctgttcatggctccattccctccatttatggaagagttgtatctgcttgctctcttcctagctggccattctcagaggataagaaagaatatctaatatg

SEQ ID NO: 100181 - DNA, 120 bp, synthetic construct
  source 1..120: mol_type = other DNA
tcctcttctttttgctataagccaacatagtgcttttataatgcaaactcacatacacagcaacaagaagtaaaacaagggtcactgagttgatcccatcacctgacttcagcaggggag

SEQ ID NO: 100182 - DNA, 120 bp, synthetic construct
  source 1..120: mol_type = other DNA
taccgaagacggcgagcaacaggtgggcagaacacggggtcccgcactcccagcacgcggggtgagggcgggataggaggaggtgaccgggtgtggggcagggggcggcgccggggagcg

SEQ ID NO: 100183 - DNA, 120 bp, synthetic construct
  source 1..120: mol_type = other DNA
agctgactgggtagaccccactctgtctggagccccctcagcagaggaagagcagaaggatacaatttggatacaccagtatcacctgcatcacctccgtacccccacatatacctcatc

SEQ ID NO: 100184 - DNA, 120 bp, synthetic construct
  source 1..120: mol_type = other DNA
gtacccccgcacacacctccgtcacctccctaccgccgcacacacctccgtcacctccctatacggctgcatcccctgcatatctacatctacgcacctggacacagctgcacacaggtg

SEQ ID NO: 100185 - DNA, 120 bp, synthetic construct
  source 1..120: mol_type = other DNA
tccgtccctttgtaccttttgccggccgtgtttctacttgggcctccactgcccgcctctttcctggacccccggccaccctgtcctgtggttttgtctccttggagccgcctgcactgc

SEQ ID NO: 100186 - DNA, 120 bp, synthetic construct
  source 1..120: mol_type = other DNA
aggaacctcagctcagcctctcaggccactcgccagaagatgcgggagtgccacgggctggtggacgccctggtcacctctatcaaccacgccctggacgcgggcaaatgcgaggacaag

SEQ ID NO: 100187 - DNA, 120 bp, synthetic construct; identical to SEQ ID NO: 21717
  source 1..120: mol_type = other DNA

SEQ ID NO: 100188 - DNA, 120 bp, synthetic construct
  source 1..120: mol_type = other DNA
agacgatcaaattactctgagctacgggaggacattcaaaccaaaggcaaagaagttaaaaactttgaaaaaaatttagaagaatgtataactagaataaccaatacagagaagtgctta

SEQ ID NO: 100189 - DNA, 120 bp, synthetic construct
  source 1..120: mol_type = other DNA
ttcaggaaacccatctcacgtgcagagacacacataggctgaaaataaaaggatggaggaagatctaccaagcaaatggaaaacaaaaaaaggcaggggttgcaatcctagtctctgata

SEQ ID NO: 100190 - DNA, 120 bp, synthetic construct
  source 1..120: mol_type = other DNA
agacacagaaaacccttcaaaaaatcaatgaatccaggagctggttttttgaaaggatcatcaaaattgatagaccgctagcaagactaataaagaaaaaaagagaggagaatcaaatag

SEQ ID NO: 100191 - DNA, 120 bp, synthetic construct
  source 1..120: mol_type = other DNA
gccctctctcaccgctcctattcaacatagtgttggaagttctggccagggcgatcaggcaggagaaggaaataaagggtattcaattaggaaaagaggaagtcaaattgtccctgtttg

SEQ ID NO: 100192 - DNA, 120 bp, synthetic construct
  source 1..120: mol_type = other DNA
ataggcgtgggcaaggacttcatgtccaaaacaccaaaagcaatggcaacagaagccaaaattgacaaatgggatctaattaaactaaagagcttctgcacagcaaaagaaactaccatc

SEQ ID NO: 100193 - DNA, 120 bp, synthetic construct; identical to SEQ ID NO: 21718
  source 1..120: mol_type = other DNA

SEQ ID NO: 100194 - DNA, 120 bp, synthetic construct
  source 1..120: mol_type = other DNA
ctgtagctgggattataggcgtccactaccatgcctggctaattttcttgtatttttaatagagacggagttttgccatgttggccaggctggtattgaactcctgattgtttatgttta

SEQ ID NO: 100195 - DNA, 120 bp, synthetic construct
  source 1..120: mol_type = other DNA
tagggtacatgtgcacaacgtgtaggctacataggtatatatttgccatggtggtttgctgcacctattaactcatcatttacattaggtatttctgctaatgctatcccttccccagcc

SEQ ID NO: 100196 - DNA, 120 bp, synthetic construct
  source 1..120: mol_type = other DNA
tgcctctgacacttggatcctaggcatacctagggtatatctgacgactatgtacatggatcctatggttagactcatccaaaaagctcctaggtctaatgaatgaattcagtagagttt

SEQ ID NO: 100197 - DNA, 120 bp, synthetic construct
  source 1..120: mol_type = other DNA
gaaactagatagaggtgatggttgtacaacactgtgaatgcattgaatgccagtcaattattcacttttcaaaatggttaattttggggccagacgcggtggctcacacctgtaatccca

SEQ ID NO: 100198 - DNA, 120 bp, synthetic construct; identical to SEQ ID NO: 21728
  source 1..120: mol_type = other DNA

SEQ ID NO: 100199 - DNA, 120 bp, synthetic construct; identical to SEQ ID NO: 21729
  source 1..120: mol_type = other DNA

SEQ ID NO: 100200 - DNA, 120 bp, synthetic construct; identical to SEQ ID NO: 21730
  source 1..120: mol_type = other DNA

SEQ ID NO: 100201 - DNA, 120 bp, synthetic construct
  source 1..120: mol_type = other DNA
tgtgttttttggctgcataaatgtcttcttttgagaagtgtctgttcatgtccttcacccactaagcaacttcagcaaagtctcaggatacaaaatcaatgtacaaaaatcacaagcatt

SEQ ID NO: 100202 - DNA, 120 bp, synthetic construct; identical to SEQ ID NO: 21731
  source 1..120: mol_type = other DNA

SEQ ID NO: 100203 - DNA, 120 bp, synthetic construct; identical to SEQ ID NO: 21732
  source 1..120: mol_type = other DNA

SEQ ID NO: 100204 - DNA, 120 bp, synthetic construct; identical to SEQ ID NO: 11983
  source 1..120: mol_type = other DNA

SEQ ID NO: 100205 - DNA, 120 bp, synthetic construct; identical to SEQ ID NO: 11984
  source 1..120: mol_type = other DNA

SEQ ID NO: 100206 - DNA, 120 bp, synthetic construct; identical to SEQ ID NO: 11985
  source 1..120: mol_type = other DNA

SEQ ID NO: 100207 - DNA, 120 bp, synthetic construct
  source 1..120: mol_type = other DNA
cgaaggatatgaacagacacttctcaaaggagacatttatgcagccaaaagacacatgaaaaaatgctcatcatcactggccatcagagaaatgcaaatcaaaaccacaatgagatacca

SEQ ID NO: 100208 - DNA, 120 bp, synthetic construct; identical to SEQ ID NO: 11986
  source 1..120: mol_type = other DNA

SEQ ID NO: 100209 - DNA, 120 bp, synthetic construct
  source 1..120: mol_type = other DNA
gagaagccaattacaaagggcagcatgaggggatttggggggtaatggaactgttctatatcatgattgtggtggcagttacatgactttatgtatttgcctaaactcatagagctgtac

SEQ ID NO: 100210 - DNA, 120 bp, synthetic construct
  source 1..120: mol_type = other DNA
cactgcactccagcctgggcgacagagcaagactccgtctcaaaacaaaaaaaacaaaacaacaaaaaaaaattgcttcagctatctggggtcttttgtggttccacacaaattttagaa

SEQ ID NO: 100211 - DNA, 120 bp, synthetic construct
  source 1..120: mol_type = other DNA
ctggcacgttcttggctcactgcaacctccacctcccgggttcaagcgattctcgtgcctcagcctcccaagcagctgggactacaggtacaagccaccatgcccagcttatttttgtat

SEQ ID NO: 100212 - DNA, 120 bp, synthetic construct; identical to SEQ ID NO: 31490
  source 1..120: mol_type = other DNA

SEQ ID NO: 100213 - DNA, 120 bp, synthetic construct
  source 1..120: mol_type = other DNA
gctgatctctgctaggcctcttctgttatttgagtcgaactctgtctttttctagagttaaccttgcctccacccccaccccaacaaggagcctgctctattttatttcaattaattaat

SEQ ID NO: 100214 - DNA, 120 bp, synthetic construct
  source 1..120: mol_type = other DNA
tgggttcaagtaattctcctgcttcagccttccaagtagctgggattacaggcacctaccaccgtgcctggctaacttttttttttttttttttagtagagatgaggtttcaccatgttg

SEQ ID NO: 100215 - DNA, 120 bp, synthetic construct; identical to SEQ ID NO: 22333
  source 1..120: mol_type = other DNA

SEQ ID NO: 100216 - DNA, 120 bp, synthetic construct
  source 1..120: mol_type = other DNA
ggaagggatccagtttcagctgtctacatatggctagcaggttttcccagcaccgtttattaaatagggaatcttttccccatttcttgtttttgtcaggtttgtcaaagatcagatggt

SEQ ID NO: 100217 - DNA, 120 bp, synthetic construct
  source 1..120: mol_type = other DNA
cctcaataaaatgctggcaaaccgaatccagcagcacatcaaaaagcttatacaccatgatcaagtgggcttcatccctgggatgcaaggctggttcaacatatgcaaatcaataaacgt

SEQ ID NO: 100218 - DNA, 120 bp, synthetic construct; identical to SEQ ID NO: 22325
  source 1..120: mol_type = other DNA

SEQ ID NO: 100219 - DNA, 120 bp, synthetic construct; identical to SEQ ID NO: 22326
  source 1..120: mol_type = other DNA

SEQ ID NO: 100220 - DNA, 120 bp, synthetic construct; identical to SEQ ID NO: 22327
  source 1..120: mol_type = other DNA

SEQ ID NO: 100221 - DNA, 120 bp, synthetic construct
  source 1..120: mol_type = other DNA
gagttcattgtagattctggatattagccctttgtcagatgagtaggttgcggaaattttctcccattttgtaggttgcctgttcactctgatggtagtttcttttgctgtgcagaagct

SEQ ID NO: 100222 - DNA, 120 bp, synthetic construct; identical to SEQ ID NO: 22328
  source 1..120: mol_type = other DNA

SEQ ID NO: 100223 - DNA, 120 bp, synthetic construct
  source 1..120: mol_type = other DNA
cggttgaactagtttacagtcccaccaacagtgtaaaagtgttcctatttctccacatcctctccagcacctgttgttccctgactttttaatgattgccattctaactggtgtgagatg

SEQ ID NO: 100224 - DNA, 120 bp, synthetic construct
  source 1..120: mol_type = other DNA
gtagccttgtagtatagtttgaagtcaggtagtgtgatgcctccagcttcgttcttttggcttaggattgccttggcgatgcgggctctttttttggttccatatgaactttaaagtagt

SEQ ID NO: 100225 - DNA, 120 bp, synthetic construct
  source 1..120: mol_type = other DNA
tttgccagtattttattgaggatttttgcatcaatgttcatcaaggatattggtctaaaattctcttttttggttgtgtctctgcccggctttggtattagaatgatgctagcctcataa

SEQ ID NO: 100226 - DNA, 120 bp, synthetic construct
  source 1..120: mol_type = other DNA
tctgttcttttacatttgctgaggagagctttacttccaagtatgtggtcaattttggaataggtgtggtgtggtgctgaaaaaaatgtatattctgttgatttggcgtggagacttctg

SEQ ID NO: 100227 - DNA, 120 bp, synthetic construct
  source 1..120: mol_type = other DNA
agctcgttattttgctcgttagttgatgcagtttcttcctagtctcgatggtctttacattttggcatgattttgcagcagctggtaccggttgttcctttccatgtttagcgcttcctt

SEQ ID NO: 100228 - DNA, 120 bp, synthetic construct
  source 1..120: mol_type = other DNA
tgaggaactgcgttcctttggaggaggagaggcgctctgcgttttagagtttcccgtttttctgttctgttttttccccatctttgtggttttatctacttttggtctttgatgatggtg

SEQ ID NO: 100229 - DNA, 120 bp, synthetic construct; identical to SEQ ID NO: 22329
  source 1..120: mol_type = other DNA

SEQ ID NO: 100230 - DNA, 120 bp, synthetic construct; identical to SEQ ID NO: 22330
  source 1..120: mol_type = other DNA

SEQ ID NO: 100231 - DNA, 120 bp, synthetic construct
  source 1..120: mol_type = other DNA
ctccgcccggcagccgccccgtctgagaagtgaggagcccctccgcctggcagctgccctgtctgagaagtgaggagcccctctgcccggcagccaacctgtctgggaagtgaggagcgt

SEQ ID NO: 100232 - DNA, 120 bp, synthetic construct
  source 1..120: mol_type = other DNA
gggtcacttcagctttaaggcatgtacacaaaaacggactcatgatagctgccttgttttaggataaagggagattgtgcctgtttatgtttagttcagcgcacactagtcattcagtaa

SEQ ID NO: 100233 - DNA, 120 bp, synthetic construct
  source 1..120: mol_type = other DNA
aagggtggtgagagtgggcatccttgttttgttcccgttctcaggaagaatgctttcagcttttccccattcagtattaagttggctgtgggtttgtcataggtggcttttaattcatta

SEQ ID NO: 100234 - DNA, 120 bp, synthetic construct; identical to SEQ ID NO: 22331
  source 1..120: mol_type = other DNA

SEQ ID NO: 100235 - DNA, 120 bp, synthetic construct
  source 1..120: mol_type = other DNA
agagatcaaagctatcttgagtagaggtaaaagaaaaatttttttagttaaaaaatatatttaaggccgggtgcggtggctcatgcctgtaaacccagcactttgggaggctgaggtggg

SEQ ID NO: 100236 - DNA, 120 bp, synthetic construct; identical to SEQ ID NO: 22334
  source 1..120: mol_type = other DNA

SEQ ID NO: 100237 - DNA, 120 bp, synthetic construct; identical to SEQ ID NO: 22335
  source 1..120: mol_type = other DNA

SEQ ID NO: 100238 - DNA, 120 bp, synthetic construct; identical to SEQ ID NO: 22336
  source 1..120: mol_type = other DNA

SEQ ID NO: 100239 - DNA, 120 bp, synthetic construct; identical to SEQ ID NO: 22337
  source 1..120: mol_type = other DNA

SEQ ID NO: 100240 - DNA, 120 bp, synthetic construct; identical to SEQ ID NO: 22338
  source 1..120: mol_type = other DNA

SEQ ID NO: 100241 - DNA, 120 bp, synthetic construct; identical to SEQ ID NO: 22339
  source 1..120: mol_type = other DNA

SEQ ID NO: 100242 - DNA, 120 bp, synthetic construct; identical to SEQ ID NO: 22340
  source 1..120: mol_type = other DNA

SEQ ID NO: 100243 - DNA, 120 bp, synthetic construct; identical to SEQ ID NO: 22341
  source 1..120: mol_type = other DNA

SEQ ID NO: 100244 - DNA, 120 bp, synthetic construct
  source 1..120: mol_type = other DNA
tgctgcacccagtaactcgtcatttaacattaggtatctctccaaatgctatcccgcccccctccccccaacatccctgcattttcaaacttcttagatagttttcaaaatatttctgta

SEQ ID NO: 100245 - DNA, 120 bp, synthetic construct; identical to SEQ ID NO: 22343
  source 1..120: mol_type = other DNA

SEQ ID NO: 100246 - DNA, 120 bp, synthetic construct
  source 1..120: mol_type = other DNA
gggtcaaatggtatttctagttctagatccctgaggaatcaccacactgacttccacaatggttgaactagtccacagtcccaccaacagtgcaaaagtgttcccacccctccacatcct

SEQ ID NO: 100247 - DNA, 120 bp, synthetic construct
  source 1..120: mol_type = other DNA
aacggagggagaccgaagaaaggagggagggggagggggagagggagagggagagggtaaattagctttatttgatgtaaaagttcaaaaatttagttctctgagagtagaaattattaa

SEQ ID NO: 100248 - DNA, 120 bp, synthetic construct
  source 1..120: mol_type = other DNA
tccaactatgtggtcaattttggaataggtgtggtgtggtgctgaaaagaatgtatattctgttgatttggggtggagagttttgtagatgtctattaggtccgcttcgtgcagagctga

SEQ ID NO: 100249 - DNA, 120 bp, synthetic construct
  source 1..120: mol_type = other DNA
gccactgcactccagcctggatgacatagcaagacttcatctcaaaaaaaaaaggtatgctatgtaacactacacctttcccacctacatccaggaaccctctttgattttaaccataac

SEQ ID NO: 100250 - DNA, 120 bp, synthetic construct; identical to SEQ ID NO: 16999
  source 1..120: mol_type = other DNA

SEQ ID NO: 100251 - DNA, 120 bp, synthetic construct; identical to SEQ ID NO: 17000
  source 1..120: mol_type = other DNA

SEQ ID NO: 100252 - DNA, 120 bp, synthetic construct; identical to SEQ ID NO: 17001
  source 1..120: mol_type = other DNA

SEQ ID NO: 100253 - DNA, 120 bp, synthetic construct; identical to SEQ ID NO: 24814
  source 1..120: mol_type = other DNA

SEQ ID NO: 100254 - DNA, 120 bp, synthetic construct
  source 1..120: mol_type = other DNA
tatctcatagtggttttgatttgcatttctctgatggccagtgatgatgagcattttttcatgtgttttttggctgcataaatgtcttcttttgagaagtgtctgttcatgtcctttgcc

SEQ ID NO: 100255 - DNA, 120 bp, synthetic construct
  source 1..120: mol_type = other DNA
aagaatgcttgtgatttttgtacattgattttgtatcctgagactttgctgaagttgcttatcagcttaaggagattttgggctgagatgatggggttttctagataaacaatcatgtcg

SEQ ID NO: 100256 - DNA, 120 bp, synthetic construct
  source 1..120: mol_type = other DNA
ttagtcttgggagagtgtatgtgtcgaggaatgtatccatttcttctagattttctagtttatttgcgtagaggtgtttgtagtattctcttatggtagtttgcatttctgtgcgatcag

SEQ ID NO: 100257 - DNA, 120 bp, synthetic construct
  source 1..120: mol_type = other DNA
aagggatcaattcaacaagaggagctaactatcctaaatatttatgcacccaatacaggagcacccagattcataaagcaagtcctgagtgacctacaaagagacttagactcccacaca

SEQ ID NO: 100258 - DNA, 120 bp, synthetic construct
  source 1..120: mol_type = other DNA
tcaggtacaccaatcatacgtagatttggtcttttcacatagtcccatatttcttggaggctttgctcatttctttttattcttttttctctaaacttcccttctcgcttcatttcattc

SEQ ID NO: 100259 - DNA, 120 bp, synthetic construct
  source 1..120: mol_type = other DNA
gcgcaatattcaggtgggagtgacccgattttccaggtgcgtccgtcacccctttctttgactcggaaagggaactccctgaccccttgcgcttcccaggtgaggcaatgcctcgccctc

SEQ ID NO: 100260 - DNA, 120 bp, synthetic construct
  source 1..120: mol_type = other DNA
cagactgacacctcacacagccgggtactcctctgagacaaaacttccagagaaacaaccagacagcagcatttgcggttcacgaaaatctgctgttctgcagccactgctgctggtacc

SEQ ID NO: 100261 - DNA, 120 bp, synthetic construct
  source 1..120: mol_type = other DNA
gagaaaagcaactacaagacacataattgtcagattcaccaaagttgaaatgacggaaaaaatgttaagggcagccagagagaaaggtcgggttacccacaaagggaagcccatcagact

SEQ ID NO: 100262 - DNA, 120 bp, synthetic construct
  source 1..120: mol_type = other DNA
ctaatagacatctacagaactctccacctcaaatcaacagaatataaatttttttcagcaccacaccacacctattccaaaattgaccacatacttggaagtaaagctctcctcagcaaa

SEQ ID NO: 100263 - DNA, 120 bp, synthetic construct
  source 1..120: mol_type = other DNA
caaaaccaaaaaagagaattttagaccaatatccttgatgaacatcaatgcaaaaattctcaataaaatactggcaaaccgaatccagcagcacatcaaaaagcttatccaccatgatca

SEQ ID NO: 100264 - DNA, 120 bp, synthetic construct
  source 1..120: mol_type = other DNA
gacttcaaactatactacaaggctacagtaaccaaaacagcatggtactggtaccaaaacagagatatagatcaatggaacagaacagagccctcagaaataacgccccatgtctacaac

SEQ ID NO: 100265 - DNA, 120 bp, synthetic construct
  source 1..120: mol_type = other DNA
ctataactagaaataccatttgacccaccaatcccattactgggtatatacccaaacgactataaatcatgctgctataaagacacatgcacatgtatgtttactgtggcattattcaca

SEQ ID NO: 100266 - DNA, 120 bp, synthetic construct; identical to SEQ ID NO: 24816
  source 1..120: mol_type = other DNA

SEQ ID NO: 100267 - DNA, 120 bp, synthetic construct
  source 1..120: mol_type = other DNA
ttcctatttctccacatcctctccagtactttttttttgatggaatctcattctgttgcccaggctggagtgcaaaggcatgatctcggctcactgcaacctctgcctcctgggttcaag

SEQ ID NO: 100268 - DNA, 120 bp, synthetic construct; identical to SEQ ID NO: 24817
  source 1..120: mol_type = other DNA

SEQ ID NO: 100269 - DNA, 120 bp, synthetic construct; identical to SEQ ID NO: 24818
  source 1..120: mol_type = other DNA

SEQ ID NO: 100270 - DNA, 120 bp, synthetic construct
  source 1..120: mol_type = other DNA
taaaaagcaccctagcagattcaaatgtataaccagatatgagaatcactacttagtcaatggtttttaaatcactttaagaaagcacagacttgccgggcgcggtggctcacgcctgta

SEQ ID NO: 100271 - DNA, 120 bp, synthetic construct; identical to SEQ ID NO: 2717
  source 1..120: mol_type = other DNA

SEQ ID NO: 100272 - DNA, 120 bp, synthetic construct; identical to SEQ ID NO: 21893
  source 1..120: mol_type = other DNA

SEQ ID NO: 100273 - DNA, 120 bp, synthetic construct
  source 1..120: mol_type = other DNA
ggcgcccgctaccacgcccggctaattttttgtatttttagtagagacggggtttcaccgtgttagccaggatggtctcgatctcctgacctcgtgatccgcccgcctcggcctcccaaa

SEQ ID NO: 100274 - DNA, 120 bp, synthetic construct; identical to SEQ ID NO: 21894
  source 1..120: mol_type = other DNA

SEQ ID NO: 100275 - DNA, 120 bp, synthetic construct; identical to SEQ ID NO: 21895
  source 1..120: mol_type = other DNA

SEQ ID NO: 100276 - DNA, 120 bp, synthetic construct; identical to SEQ ID NO: 21896
  source 1..120: mol_type = other DNA

SEQ ID NO: 100277 - DNA, 120 bp, synthetic construct
  source 1..120: mol_type = other DNA
tttctattccacaaagccgccattgtcatcctggcccgttctcaatgagctgttgggcacacctcccagacggggtggtggccgggcagaggggctccttacttcccagtaggggcagcc

SEQ ID NO: 100278 - DNA, 120 bp, synthetic construct; identical to SEQ ID NO: 21897
  source 1..120: mol_type = other DNA

SEQ ID NO: 100279 - DNA, 120 bp, synthetic construct; identical to SEQ ID NO: 21898
  source 1..120: mol_type = other DNA

SEQ ID NO: 100280 - DNA, 120 bp, synthetic construct
  source 1..120: mol_type = other DNA
tatcacaagaacaaaaaaccaaacaccgcatattctcactcataggtgggaattgaacaatgagatcacatggacacatgaaggggaataccacactctggggactgtggtggggtgggg

SEQ ID NO: 100281 - DNA, 120 bp, synthetic construct; identical to SEQ ID NO: 24124
  source 1..120: mol_type = other DNA

SEQ ID NO: 100282 - DNA, 120 bp, synthetic construct
  source 1..120: mol_type = other DNA
cacatgactacgtcctgaatggtaatgcctaggttttcttctagggtttgtatggttttaggtctaacatgtaagtctttaatccatcttgaattaatttttgtataaggtgtaaggaag

SEQ ID NO: 100283 - DNA, 120 bp, synthetic construct
  source 1..120: mol_type = other DNA
ttgagatacgtcccatcaatacctaatttattgagagtttttagcatgaagggctgttgaattttgtcaaaggccttttctgcatctattgagataatcatgtggtttttgtttttggtt

SEQ ID NO: 100284 - DNA, 120 bp, synthetic construct
  source 1..120: mol_type = other DNA
agcttttgcatgtgtttgctgttgcttttctagttcttttaattgtgatgttagggtgtcaattttggatctttcctgctttctcttgtgggcatttagtgctataaatttccctctaca

SEQ ID NO: 100285 - DNA, 120 bp, synthetic construct
  source 1..120: mol_type = other DNA
ggtagcgtgatgcctccagctttgttcttttggcttaggattctcttggcaatgcgggctcttttttggttccatatgaactttaaagtagttttttccaattctgtgaagaaagtcatt

SEQ ID NO: 100286 - DNA, 120 bp, synthetic construct
  source 1..120: mol_type = other DNA
ctcttattattttgagatacatcccatcaatactgaacttattgagagtttttagcatgaaaggctgttgaattttgtcaaaggccttttctgcatctattgagataatcatgtggtttt

SEQ ID NO: 100287 - DNA, 120 bp, synthetic construct
  source 1..120: mol_type = other DNA
taagtgagaacatgcggtgtttggttttttgttcttgtaatagtttactgagaatgatgatttccaatttcatccatgtccctacaaaggacatgaactcatcattttttatggctgcat

SEQ ID NO: 100288 - DNA, 120 bp, synthetic construct
  source 1..120: mol_type = other DNA
agtttgaagtcaggtagcgtgatgcctccagctttgttcttttggcttaggattgacttggcaatgcgggctcttttttggttccatatgaactttaaagtagttttttctaattctgtg

SEQ ID NO: 100289 - DNA, 120 bp, synthetic construct
  source 1..120: mol_type = other DNA
gccatgtgcaaataagaagaatgtatattctgttgttttggggtggagagttctgtagatgtctgttaagtgttaagttcaagttccgaatatctttgttagttccctgccttgatgatc

SEQ ID NO: 100290 - DNA, 120 bp, synthetic construct; identical to SEQ ID NO: 24125
  source 1..120: mol_type = other DNA

SEQ ID NO: 100291 - DNA, 120 bp, synthetic construct
  source 1..120: mol_type = other DNA
ggggctgaccaccccacctccctcccggacggggcagctggccgggtgggggggctgaccccctcacctccctcctggactgagtggctggccgggcagaggggctcctcacttcccagt

SEQ ID NO: 100292 - DNA, 120 bp, synthetic construct
  source 1..120: mol_type = other DNA
ccgtggaaagagagggagagggagactcgggggagagggagagggagaggcaaatcactttcaaccatgattgtgataatttatatttactagaaatatgctcattaatcaataatatat

SEQ ID NO: 100293 - DNA, 120 bp, synthetic construct
  source 1..120: mol_type = other DNA
tctgcctggtggctttccataggtccagcaggcaatgctctggccacataagctaagagccacactctgtaagaatattaggactcttttggcttaaatccacaatttaaaaatttctaa

SEQ ID NO: 100294 - DNA, 120 bp, synthetic construct
  source 1..120: mol_type = other DNA
agccgagatcgcgccatttcactgcagcctgggcaacaagagcgaaactgcgtctcaaaaaaaaaaaaaccaaggcgagaaggcagaaagaagtggctcccctggactgagacagaggga

SEQ ID NO: 100295 - DNA, 120 bp, synthetic construct
  source 1..120: mol_type = other DNA
aaggcaggaggatcacttgagtttaggagtttgagagcagcctgggcaacatagtgaggccccatctctgcaaatatgtatatacacacacacatttatatgtaagtgtacatatttata

SEQ ID NO: 100296 - DNA, 120 bp, synthetic construct; identical to SEQ ID NO: 33276
  source 1..120: mol_type = other DNA

SEQ ID NO: 100297 - DNA, 120 bp, synthetic construct; identical to SEQ ID NO: 33277
  source 1..120: mol_type = other DNA

SEQ ID NO: 100298 - DNA, 120 bp, synthetic construct
  source 1..120: mol_type = other DNA
tcacatggggattaggacgtggacatctttggggctgttattctgtctcccacatggggattaggacgtggacatctttggggacattattctgtctatcacatggggattaggacgtgg

SEQ ID NO: 100299 - DNA, 120 bp, synthetic construct
  source 1..120: mol_type = other DNA
acatggggattaggacgtggacatctttggggacattattctgtctatcacatggggatcaggacgtggacatctttggggccattatcctgtctatcacatggggattaggacgtggac

SEQ ID NO: 100300 - DNA, 120 bp, synthetic construct
  source 1..120: mol_type = other DNA
ccccagagtgtgatgttccccctcctgtgtccatgtgttctcattgttcaattcccacctatgagtgagaatatgcggtgtttggttttttgttcttgtgatagtttactgagaatcatg

SEQ ID NO: 100301 - DNA, 120 bp, synthetic construct
  source 1..120: mol_type = other DNA
tatgaagtccttgcccatgcctatgtcctgaatggtaatgcttaggttttcttctagggtgtttatggttttaggtctaacgtttaagtctttaatccatcttgaattaatttttgtata

SEQ ID NO: 100302 - DNA, 120 bp, synthetic construct
  source 1..120: mol_type = other DNA
gaataccctttatttccttctcctgcctaattgccctggccagaacttctaacactatgttgaataggagtggtgagagagggcatccctgtcttgtgccagttttcaaagggaatgctt

SEQ ID NO: 100303 - DNA, 120 bp, synthetic construct
  source 1..120: mol_type = other DNA
ttgtttgaagggttttttgtgtctctatttccttcagttccgctctgattttagttatttcttgccttctgctagcttttgaatgtgtttgctcttgcttttctagttcttttaattgtg

SEQ ID NO: 100304 - DNA, 120 bp, synthetic construct
  source 1..120: mol_type = other DNA
ttttattttgagcctatgtgtgtctctgcacgtgagatggatttactgcatacagcacactgatgggtcttgactctttatccaatttgccagtctgtgtcttttaattggagcatttag

SEQ ID NO: 100305 - DNA, 120 bp, synthetic construct
  source 1..120: mol_type = other DNA
aaggttcggcaataaaagtgaagctgttattgcaggaggggatttgctaacgcaggagtgggctcctgatttaaaagaagaagaagaaaagaagaagaagaagaagaagaagaggaagag

SEQ ID NO: 100306 - DNA, 120 bp, synthetic construct
  source 1..120: mol_type = other DNA
tccattcccacatccttccatccccattccccagaggaaaacagcattaatcttagtgttgttattttccgacacttaggctttttcccgctgttaacaaaaatcatatggcattatata

SEQ ID NO: 100307 - DNA, 120 bp, synthetic construct; identical to SEQ ID NO: 26536
  source 1..120: mol_type = other DNA

SEQ ID NO: 100308 - DNA, 120 bp, synthetic construct
  source 1..120: mol_type = other DNA
attcgattaggaaaagaggaagccaaattgtccctgtttgcagatgacatgattgtatatctagaaaaccccattgtctcagcccaaaatctccttaagctgataagcaacttcagcaaa

SEQ ID NO: 100309 - DNA, 120 bp, synthetic construct
  source 1..120: mol_type = other DNA
gcatgagcaaggacttcatgtctaaaacacgaaaagcaatggcaacaaaagccaaaattgacaaatgggatctaattcaactaaagagcttctgcacagcaaaagaaactaccatcagag

SEQ ID NO: 100310 - DNA, 120 bp, synthetic construct
  source 1..120: mol_type = other DNA
cacattgtgcacatgtaccctagaacttaaagtataataataataaaataatataaaataaaagacaaaaacaaacaaacaaacaaacaaacaaaaacgtcaatggcttgtgactgcccg

SEQ ID NO: 100311 - DNA, 120 bp, synthetic construct; identical to SEQ ID NO: 26537
  source 1..120: mol_type = other DNA

SEQ ID NO: 100312 - DNA, 120 bp, synthetic construct; identical to SEQ ID NO: 26538
  source 1..120: mol_type = other DNA

SEQ ID NO: 100313 - DNA, 120 bp, synthetic construct; identical to SEQ ID NO: 26539
  source 1..120: mol_type = other DNA

SEQ ID NO: 100314 - DNA, 120 bp, synthetic construct
  source 1..120: mol_type = other DNA
aaactactgtcatcttacatataaaggctaaatgattaaccaaacaaaaataataactacaacatcttttcaagaccttcccttcccttcccttcccttcccctcccctcccgtcccctc

SEQ ID NO: 100315 - DNA, 120 bp, synthetic construct; identical to SEQ ID NO: 26540
  source 1..120: mol_type = other DNA

SEQ ID NO: 100316 - DNA, 120 bp, synthetic construct
  source 1..120: mol_type = other DNA
gtgagcattttttcatgtggtttttggctgcataaatgtcttcttttgagaagtgtctgttcatgtcctttgcccactttttgatggggttgtttgtttttttcttgtaaatttgtttga

SEQ ID NO: 100317 - DNA, 120 bp, synthetic construct
  source 1..120: mol_type = other DNA
catcccttgtaagttggattcctaggtattttattctctttgaagcaattgtgtgtgaatgggagttcactcatgatttggctctctgtttgtctgttattggtgtataagaatgcttgt

SEQ ID NO: 100318 - DNA, 120 bp, synthetic construct
  source 1..120: mol_type = other DNA
attcaacttcttccttgtttagtcttgggagggtgtatgtgtcgaggaatttatccatttcttctagattttctagtttatttgcatagaggtgattgtagtattctctgatggtagttt

SEQ ID NO: 100319 - DNA, 120 bp, synthetic construct
  source 1..120: mol_type = other DNA
ctttagcattatgtaatgtccttctttgtctcttttgatctttgttggtttaaagtctgttttatcagagactaggattgcaacccctgcctttttttgttttccatttgcttggtagat

SEQ ID NO: 100320 - DNA, 120 bp, synthetic construct
  source 1..120: mol_type = other DNA
ttttcacatagtcccatatttcttggaggctttgttcgtttctttttattctttttttctctaaacttcccttctcgcttcatttcattcatcttccgtcactgataccctttcttccag

SEQ ID NO: 100321 - DNA, 120 bp, synthetic construct
  source 1..120: mol_type = other DNA
tagcaggtaacggtcacaatgctgccaaacattctgcaatgcacaggacagcccccaacaacaaagaattatctgacttaaaaaatgaaaagtttgagaaaccctgctgtaagtcatgac

SEQ ID NO: 100322 - DNA, 120 bp, synthetic construct
  source 1..120: mol_type = other DNA
agccaaggctcgagaactacatgaagaacgcagaagcctcaagagccgatgcgatcaactggaagaaagggtatcagtgatggaagacaaaatgaatgaaatgaagcgagaagggaagtt

SEQ ID NO: 100323 - DNA, 120 bp, synthetic construct
  source 1..120: mol_type = other DNA
tgcacccaatacaggagcacccagattcataaagcaagtcctgagtgacctgcaaagagacttagactcccacacaataataatgggagactttaacaccccctgtcaacattagacaga

SEQ ID NO: 100324 - DNA, 120 bp, synthetic construct
  source 1..120: mol_type = other DNA
cgaagactaaaccaggaagaagttgaatctctgaacagaccaataagaggctctgaaattgtggcaataatcaatagtttaccaaccaaaaagagtccaggaccagatggattcacagcc

SEQ ID NO: 100325 - DNA, 120 bp, synthetic construct
  source 1..120: mol_type = other DNA
acagaaacccaaatcatgagtgaactcccattcacaattgcttcaaagagaataaaatacctaggaatccaacttacaagggacgtgaaggacctcttcaaggagaactacaaaccactg

SEQ ID NO: 100326 - DNA, 120 bp, synthetic construct
  source 1..120: mol_type = other DNA
aaacaaccccatcaaaaagtgggcaaaggacatgaacagacacttctcaaaagaagacatttatgcagccaaaaaacacatgaaaaaatgctcaccatcactggctatcagagaaatgca

SEQ ID NO: 100327 - DNA, 120 bp, synthetic construct; identical to SEQ ID NO: 24873
  source 1..120: mol_type = other DNA

SEQ ID NO: 100328 - DNA, 120 bp, synthetic construct
  source 1..120: mol_type = other DNA
tttaccaacctaggagaaatggaaatataatttcatacatcattactaaaatgggtgatcaaagctcactgtagcgttgaactcctggcctcaagcaatcctcccacctcagcctcccaa

SEQ ID NO: 100329 - DNA, 120 bp, synthetic construct; identical to SEQ ID NO: 24874
  source 1..120: mol_type = other DNA

SEQ ID NO: 100330 - DNA, 120 bp, synthetic construct; identical to SEQ ID NO: 9557
  source 1..120: mol_type = other DNA

SEQ ID NO: 100331 - DNA, 120 bp, synthetic construct; identical to SEQ ID NO: 9558
  source 1..120: mol_type = other DNA

SEQ ID NO: 100332 - DNA, 120 bp, synthetic construct
  source 1..120: mol_type = other DNA
tccctcggcctcccaaagttctgggattataggcatgagccactgtgcccgacctcactcatcatttttttaataagaaataacaaaagccccttggcttttaaacatcaccaatataaa

SEQ ID NO: 100333 - DNA, 120 bp, synthetic construct; identical to SEQ ID NO: 9559
  source 1..120: mol_type = other DNA

SEQ ID NO: 100334 - DNA, 120 bp, synthetic construct; identical to SEQ ID NO: 9560
  source 1..120: mol_type = other DNA

SEQ ID NO: 100335 - DNA, 120 bp, synthetic construct; identical to SEQ ID NO: 9561
  source 1..120: mol_type = other DNA

SEQ ID NO: 100336 - DNA, 120 bp, synthetic construct; identical to SEQ ID NO: 9562
  source 1..120: mol_type = other DNA

SEQ ID NO: 100337 - DNA, 120 bp, synthetic construct; identical to SEQ ID NO: 9563
  source 1..120: mol_type = other DNA

SEQ ID NO: 100338 - DNA, 120 bp, synthetic construct; identical to SEQ ID NO: 9564
  source 1..120: mol_type = other DNA

SEQ ID NO: 100339 - DNA, 120 bp, synthetic construct; identical to SEQ ID NO: 9565
  source 1..120: mol_type = other DNA

SEQ ID NO: 100340 - DNA, 120 bp, synthetic construct; identical to SEQ ID NO: 9566
  source 1..120: mol_type = other DNA

SEQ ID NO: 100341 - DNA, 120 bp, synthetic construct
  source 1..120: mol_type = other DNA
ggtgaaaccccatccctactaaaaatacaaaaattagcttggtgtggtggcaggtgcctgcaatcccagctactcaggaggctgtggcaggagaatcgcttgaacccgggaagtagaggt

SEQ ID NO: 100342 - DNA, 120 bp, synthetic construct; identical to SEQ ID NO: 9567
  source 1..120: mol_type = other DNA

SEQ ID NO: 100343 - DNA, 120 bp, synthetic construct; identical to SEQ ID NO: 9568
  source 1..120: mol_type = other DNA

SEQ ID NO: 100344 - DNA, 120 bp, synthetic construct; identical to SEQ ID NO: 9569
  source 1..120: mol_type = other DNA

SEQ ID NO: 100345 - DNA, 120 bp, synthetic construct; identical to SEQ ID NO: 9570
  source 1..120: mol_type = other DNA

SEQ ID NO: 100346 - DNA, 120 bp, synthetic construct; identical to SEQ ID NO: 9571
  source 1..120: mol_type = other DNA

SEQ ID NO: 100347 - DNA, 120 bp, synthetic construct; identical to SEQ ID NO: 9572
  source 1..120: mol_type = other DNA

SEQ ID NO: 100348 - DNA, 120 bp, synthetic construct; identical to SEQ ID NO: 9573
  source 1..120: mol_type = other DNA

SEQ ID NO: 100349 - DNA, 120 bp, synthetic construct
  source 1..120: mol_type = other DNA
gaaaattgcttgaactctgaaggccgaggttgcagtgagccaagagcgtgacactgcactccagcccgggtgacagagtgagactccttctcaaaaaaaaaaaaaaaaaaaaaaaggaaa

SEQ ID NO: 100350 - DNA, 120 bp, synthetic construct; identical to SEQ ID NO: 9574
  source 1..120: mol_type = other DNA

SEQ ID NO: 100351 - DNA, 120 bp, synthetic construct; identical to SEQ ID NO: 9575
  source 1..120: mol_type = other DNA

SEQ ID NO: 100352 - DNA, 120 bp, synthetic construct
  source 1..120: mol_type = other DNA
tttttaaaacattattattattattattattattattagagacagaatcttggctcttgccacccaggctggagtgcaatggtgagatcttggctcactgcaacctccacctcccgggtt

SEQ ID NO: 100353 - DNA, 120 bp, synthetic construct
  source 1..120: mol_type = other DNA
catttaacattaggtatatctcctaacgctatccctcctccttccccctccccctccccacaacagcccccggtgtgtgatgttccccttcctgtgtctgtgtgttctcatttttcaatt

SEQ ID NO: 100354 - DNA, 120 bp, synthetic construct
  source 1..120: mol_type = other DNA
tttgctgtgcagaagctctttagttaaattagatcccatttgtcaattttggcatttgttgccattgcttttggtgttttagacatgaagtccttgcccatgcctatgtcctgaatggta

SEQ ID NO: 100355 - DNA, 120 bp, synthetic construct; identical to SEQ ID NO: 9576
  source 1..120: mol_type = other DNA

SEQ ID NO: 100356 - DNA, 120 bp, synthetic construct
  source 1..120: mol_type = other DNA
cacacacacacacacacacacacacacacacacacaccccacttacgcaaacaaactctttgtaggtacaggtgctaaaaacagaaaacccatataaagctaaacccattccatgaaaca

SEQ ID NO: 100357 - DNA, 120 bp, synthetic construct; identical to SEQ ID NO: 9577
  source 1..120: mol_type = other DNA

SEQ ID NO: 100358 - DNA, 120 bp, synthetic construct
  source 1..120: mol_type = other DNA
tcggcctcccaaagtgctgggattacaggcatgagccactgcacttggcctattttttttataattcaaactttgttacaggaaatacttctccttccaattctctcctgtccatgattc

SEQ ID NO: 100359 - DNA, 120 bp, synthetic construct; identical to SEQ ID NO: 9578
  source 1..120: mol_type = other DNA

SEQ ID NO: 100360 - DNA, 120 bp, synthetic construct; identical to SEQ ID NO: 9579
  source 1..120: mol_type = other DNA

SEQ ID NO: 100361 - DNA, 120 bp, synthetic construct; identical to SEQ ID NO: 9580
  source 1..120: mol_type = other DNA

SEQ ID NO: 100362 - DNA, 120 bp, synthetic construct; identical to SEQ ID NO: 9581
  source 1..120: mol_type = other DNA

SEQ ID NO: 100363 - DNA, 120 bp, synthetic construct
  source 1..120: mol_type = other DNA
gccgtccttaactcctaggctcaagtgatcctcctgccttgacgtcccaaagtgctgggattacgggcatgagccacttcatctaggctataacttttttaaattgtgggaatgttgctt

SEQ ID NO: 100364 - DNA, 120 bp, synthetic construct; identical to SEQ ID NO: 9582
  source 1..120: mol_type = other DNA

SEQ ID NO: 100365 - DNA, 120 bp, synthetic construct; identical to SEQ ID NO: 9583
  source 1..120: mol_type = other DNA

SEQ ID NO: 100366 - DNA, 120 bp, synthetic construct; identical to SEQ ID NO: 9584
  source 1..120: mol_type = other DNA

SEQ ID NO: 100367 - DNA, 120 bp, synthetic construct; identical to SEQ ID NO: 9585
  source 1..120: mol_type = other DNA

SEQ ID NO: 100368 - DNA, 120 bp, synthetic construct
  source 1..120: mol_type = other DNA
caaggaacctaaatgtctttcaaatcaacaaaggactagttgaattatttatatcatattcatacaatgagtgccatgcagccatggatctatctgtcttaatacgtaaaggcgtggaaa

SEQ ID NO: 100369 - DNA, 120 bp, synthetic construct
  source 1..120: mol_type = other DNA
gccaagaccatgccattgcactccagccagggcaacgagagcaaaacaccgtctcaaataaataaataagcaagcaaatcatataatacctcactttgtaaagcactttgcagtcttcta

SEQ ID NO: 100370 - DNA, 120 bp, synthetic construct
  source 1..120: mol_type = other DNA
tagggcctcttcctgacaaggcagctgaaacaggttgtctgtggaaaacacagctatactttctgttttcaacactactcatgattatcagatatgattgtgcccataagggttcaatga

SEQ ID NO: 100371 - DNA, 120 bp, synthetic construct; identical to SEQ ID NO: 9589
  source 1..120: mol_type = other DNA

SEQ ID NO: 100372 - DNA, 120 bp, synthetic construct; identical to SEQ ID NO: 9590
  source 1..120: mol_type = other DNA

SEQ ID NO: 100373 - DNA, 120 bp, synthetic construct
  source 1..120: mol_type = other DNA
cagtggcaagagaaaatgagagagaagcaaaaacagaaactcctgataaacccatcagatctcgtgagacttattccctatcacgagaatagcactggaaagatggcccccatgattcaa

SEQ ID NO: 100374 - DNA, 120 bp, synthetic construct
  source 1..120: mol_type = other DNA
tgtaatgtctgagaatgcagaacagaaacacagggcacagggcaagaagctgcagaggaaagacctagaggtgatgtatgtttcagaaaagatctcccccccccccatatatacaaccat

SEQ ID NO: 100375 - DNA, 120 bp, synthetic construct; identical to SEQ ID NO: 9549
  source 1..120: mol_type = other DNA

SEQ ID NO: 100376 - DNA, 120 bp, synthetic construct; identical to SEQ ID NO: 9594
  source 1..120: mol_type = other DNA

SEQ ID NO: 100377 - DNA, 120 bp, synthetic construct; identical to SEQ ID NO: 9595
  source 1..120: mol_type = other DNA

SEQ ID NO: 100378 - DNA, 120 bp, synthetic construct; identical to SEQ ID NO: 9596
  source 1..120: mol_type = other DNA

SEQ ID NO: 100379 - DNA, 120 bp, synthetic construct; identical to SEQ ID NO: 9597
  source 1..120: mol_type = other DNA

SEQ ID NO: 100380 - DNA, 120 bp, synthetic construct; identical to SEQ ID NO: 9598
  source 1..120: mol_type = other DNA

SEQ ID NO: 100381 - DNA, 120 bp, synthetic construct; identical to SEQ ID NO: 9599
  source 1..120: mol_type = other DNA

SEQ ID NO: 100382 - DNA, 120 bp, synthetic construct; identical to SEQ ID NO: 9600
  source 1..120: mol_type = other DNA

SEQ ID NO: 100383 - DNA, 120 bp, synthetic construct; identical to SEQ ID NO: 9601
  source 1..120: mol_type = other DNA

SEQ ID NO: 100384 - DNA, 120 bp, synthetic construct; identical to SEQ ID NO: 9602
  source 1..120: mol_type = other DNA

SEQ ID NO: 100385 - DNA, 120 bp, synthetic construct; identical to SEQ ID NO: 9603
  source 1..120: mol_type = other DNA

SEQ ID NO: 100386 - DNA, 120 bp, synthetic construct
  source 1..120: mol_type = other DNA
gtttaaacccaggaggcggaggttgcagtgagccaagatcttgccactgcactccagcctggttgatagagcaagactctgtctcaataaagaaaagaaaggaaaaagaaaagaagagaa

SEQ ID NO: 100387 - DNA, 120 bp, synthetic construct; identical to SEQ ID NO: 9604
  source 1..120: mol_type = other DNA

SEQ ID NO: 100388 - DNA, 120 bp, synthetic construct
  source 1..120: mol_type = other DNA
tatatgagtatataagtatttttaggcagggccgcagtggctcacgcctgtattctcagcactttgggaggccgaggcgggtggattacctgaagtcaggagttcgagaccagcctggcc

SEQ ID NO: 100389 - DNA, 120 bp, synthetic construct; identical to SEQ ID NO: 9605
  source 1..120: mol_type = other DNA

SEQ ID NO: 100390 - DNA, 120 bp, synthetic construct
  source 1..120: mol_type = other DNA
cataacgaaatgaaggcagaaataaagatgttctttgaaaccaatgagaacaaagacacaacataccagaatctctgggacacattcaaagccatgtgtagagggaaatttatagcacta

SEQ ID NO: 100391 - DNA, 120 bp, synthetic construct
  source 1..120: mol_type = other DNA
acccacagccaatatcatactgaatgggcaaaaactggaagcattccctttgaaaactggcacaagacagggatgccctctctcaccactcctattcaacatagtgttggaagttctggc

SEQ ID NO: 100392 - DNA, 120 bp, synthetic construct
  source 1..120: mol_type = other DNA
ctacagaatgggagaaaatgtttgcaatctactcatctgacaaagggctaatatccagaatctacaagaactcaaacaaatttacaagaaaaaaacaaccccatcaaaaagtgggcgaag

SEQ ID NO: 100393 - DNA, 120 bp, synthetic construct
  source 1..120: mol_type = other DNA
aaaggattacaaatcatgctgctataaagacacatgcacacgtatgtttattgtggcactattcacaatagcaaagacttggaaccaacccaaatgtccaacaatgatagactggattaa

SEQ ID NO: 100394 - DNA, 120 bp, synthetic construct; identical to SEQ ID NO: 9550
  source 1..120: mol_type = other DNA

SEQ ID NO: 100395 - DNA, 120 bp, synthetic construct
  source 1..120: mol_type = other DNA
ttaaagttcatatggaaccaaaaaagagcctgcattgccaagacaatcctaagccaaaagtacaaagctggaggcatcatgctacctgacttcaaactatactacaagactacagtaacc

SEQ ID NO: 100396 - DNA, 120 bp, synthetic construct
  source 1..120: mol_type = other DNA
agccaacagacacatgaaaaaatgctcatcatcactggccatcagagaattgcaaatcaaaaccacaatgggataccacctcacaccagttagaatggcgatcattaaaaagtcaggaaa

SEQ ID NO: 100397 - DNA, 120 bp, synthetic construct
  source 1..120: mol_type = other DNA
tgggatgctttgctcctgcaagaagctgctcacagatcttccaacaccccatgcttctttctgactctgtatctttgttcactctgttccttctacttagaatacttttctttttttccc

SEQ ID NO: 100398 - DNA, 120 bp, synthetic construct; identical to SEQ ID NO: 9551
  source 1..120: mol_type = other DNA

SEQ ID NO: 100399 - DNA, 120 bp, synthetic construct; identical to SEQ ID NO: 9552
  source 1..120: mol_type = other DNA

SEQ ID NO: 100400 - DNA, 120 bp, synthetic construct; identical to SEQ ID NO: 9553
  source 1..120: mol_type = other DNA

SEQ ID NO: 100401 - DNA, 120 bp, synthetic construct; identical to SEQ ID NO: 9554
  source 1..120: mol_type = other DNA

SEQ ID NO: 100402 - DNA, 120 bp, synthetic construct; identical to SEQ ID NO: 9555
  source 1..120: mol_type = other DNA

SEQ ID NO: 100403 - DNA, 120 bp, synthetic construct; identical to SEQ ID NO: 9556
  source 1..120: mol_type = other DNA

SEQ ID NO: 100404 - DNA, 120 bp, synthetic construct; identical to SEQ ID NO: 31927
  source 1..120: mol_type = other DNA

SEQ ID NO: 100405 - DNA, 120 bp, synthetic construct; identical to SEQ ID NO: 31928
  source 1..120: mol_type = other DNA

SEQ ID NO: 100406 - DNA, 120 bp, synthetic construct
  source 1..120: mol_type = other DNA
acactagttctgttctctcttctagaaccacacagatgaagactcacctcctatgacagcccctacactgaagagggaaatgcccaggctttaaaatcagtcccatctgaacacaaaccc

SEQ ID NO: 100407 - DNA, 120 bp, synthetic construct
  source 1..120: mol_type = other DNA
tcttccttgattcctccatgccttgcaaatgtcttggcacatgatgggcccttgataaataatttattgggagactttttttttttttttgaggagtctcattctgtcacccaggctgga

SEQ ID NO: 100408 - DNA, 120 bp, synthetic construct
  source 1..120: mol_type = other DNA
tggcctcccaaagtgctaggattacatgcatgagccaccatgcccggtccctgttttgtttggccttgctgaacatcttctcataccattaaatttctgtaaaacatatttttaatgacg

SEQ ID NO: 100409 - DNA, 120 bp, synthetic construct; identical to SEQ ID NO: 14432
  source 1..120: mol_type = other DNA

SEQ ID NO: 100410 - DNA, 120 bp, synthetic construct
  source 1..120: mol_type = other DNA
atacacacaacccatacaccagacacacaccatacacacatgcacacacaccccatatacacacaccacacacacattatacacacacatgcacacacatgcacacacatcccatacaca

SEQ ID NO: 100411 - DNA, 120 bp, synthetic construct; identical to SEQ ID NO: 6209
  source 1..120: mol_type = other DNA

SEQ ID NO: 100412 - DNA, 120 bp, synthetic construct; identical to SEQ ID NO: 21833
  source 1..120: mol_type = other DNA

SEQ ID NO: 100413 - DNA, 120 bp, synthetic construct; identical to SEQ ID NO: 4709
  source 1..120: mol_type = other DNA

SEQ ID NO: 100414 - DNA, 120 bp, synthetic construct; identical to SEQ ID NO: 12729
  source 1..120: mol_type = other DNA

SEQ ID NO: 100415 - DNA, 120 bp, synthetic construct
  source 1..120: mol_type = other DNA
gagccaagatcacatcgctgcactccagcctgggtggccgagtgagactcagcctcaaaaaaaatgaaaggaaaagaaaaatagttcaaagttagtagtaaccagagaaatgcaaataaa

SEQ ID NO: 100416 - DNA, 120 bp, synthetic construct; identical to SEQ ID NO: 9187
  source 1..120: mol_type = other DNA

SEQ ID NO: 100417 - DNA, 120 bp, synthetic construct
  source 1..120: mol_type = other DNA
tccctgcctgattctcctgcctcagcctgcccagtgcctgggattgcaggcgcgcaccaccacgcctgactggctttcgtatttttttggtggagacggggtttcgctgtgttggccggg

SEQ ID NO: 100418 - DNA, 120 bp, synthetic construct
  source 1..120: mol_type = other DNA
ttgttgctgtgtctgtgtagagggaagtagacataggagactccattttgttctgtactaagaaaaattcttctgccttgggatgctgttaatctataaccttacccccaaccccgtgct

SEQ ID NO: 100419 - DNA, 120 bp, synthetic construct; identical to SEQ ID NO: 11718
  source 1..120: mol_type = other DNA

SEQ ID NO: 100420 - DNA, 120 bp, synthetic construct
  source 1..120: mol_type = other DNA
ctgagaagtgaggagcccctctgcccggcagccactccgtctgggaagcgaggagcgtctccgcccggcagccaccctgtctgggagggaggtgggggtcagccccccgcccggccagcc

SEQ ID NO: 100421 - DNA, 120 bp, synthetic construct
  source 1..120: mol_type = other DNA
gattacaggcatgtgccaccatgcccaggtaatttttgtatttttagtagagatggtgtttcaccacgttggccagaatggtctcaaactcctgacctcaggtgatccacccggctcagc

SEQ ID NO: 100422 - DNA, 120 bp, synthetic construct; identical to SEQ ID NO: 11719
  source 1..120: mol_type = other DNA

SEQ ID NO: 100423 - DNA, 120 bp, synthetic construct
  source 1..120: mol_type = other DNA
ttttggctgcataaaggtcttcttttgagaagtgtctgttcatgtccttcgcccacttgttaatggggttgtttgttttttcttgtaaatttgagttcattgtagattctggatattagc

SEQ ID NO: 100424 - DNA, 120 bp, synthetic construct; identical to SEQ ID NO: 11720
  source 1..120: mol_type = other DNA

SEQ ID NO: 100425 - DNA, 120 bp, synthetic construct; identical to SEQ ID NO: 11721
  source 1..120: mol_type = other DNA

SEQ ID NO: 100426 - DNA, 120 bp, synthetic construct
  source 1..120: mol_type = other DNA
aaccccatccccatatgtatgggttaattttccttctttcctgaaagtagaagtatcaatgccagtaaaacgaggtgagatacattatattcacggggttgtagagcagcagagatacac

SEQ ID NO: 100427 - DNA, 120 bp, synthetic construct
  source 1..120: mol_type = other DNA
aaagtgctggaattacagatatgagccattgcgcccagcctatttggtagtttctgcacagctcaggtagtcaagtggatgcttgggtatcacttagtggtcagttaggcaagtgcagtg

SEQ ID NO: 100428 - DNA, 120 bp, synthetic construct; identical to SEQ ID NO: 21535
  source 1..120: mol_type = other DNA

SEQ ID NO: 100429 - DNA, 120 bp, synthetic construct
  source 1..120: mol_type = other DNA
ttgatgaagataagagggatagggtcagtaagaaaagtaaggggtaaaggagtgagggagtgcacaagagaacactattttgttttttgagatggagtttcgctcttgttgcccaggcta

SEQ ID NO: 100430 - DNA, 120 bp, synthetic construct; identical to SEQ ID NO: 31660
  source 1..120: mol_type = other DNA

SEQ ID NO: 100431 - DNA, 120 bp, synthetic construct; identical to SEQ ID NO: 31661
  source 1..120: mol_type = other DNA

SEQ ID NO: 100432 - DNA, 120 bp, synthetic construct
  source 1..120: mol_type = other DNA
tacttgctaaagaaataagaaatcactggtgttaaaattttatatttaggctgggcacagtggcttatgcctataatcccagcactttgggaggttgaggtgggtggatcacttgaggtc

SEQ ID NO: 100433 - DNA, 120 bp, synthetic construct; identical to SEQ ID NO: 28418
  source 1..120: mol_type = other DNA

SEQ ID NO: 100434 - DNA, 120 bp, synthetic construct; identical to SEQ ID NO: 28419
  source 1..120: mol_type = other DNA

SEQ ID NO: 100435 - DNA, 120 bp, synthetic construct; identical to SEQ ID NO: 26038
  source 1..120: mol_type = other DNA

SEQ ID NO: 100436 - DNA, 120 bp, synthetic construct; identical to SEQ ID NO: 26039
  source 1..120: mol_type = other DNA

SEQ ID NO: 100437 - DNA, 120 bp, synthetic construct; identical to SEQ ID NO: 26040
  source 1..120: mol_type = other DNA

SEQ ID NO: 100438 - DNA, 120 bp, synthetic construct
  source 1..120: mol_type = other DNA
gtacactggcagaactcaggggtcagatcctctgccctggagcattcagatttgtgcctctacgttatggaaaccaggggcccgtccgggtgcaacgtggcatccacaaaatggcaggtc

SEQ ID NO: 100439 - DNA, 120 bp, synthetic construct
  source 1..120: mol_type = other DNA
tcatcgccaaaactgagagttgctaagttactcttcagctcaaaccggtgggacagaacagtgatctgtggtggcccggaacaaagagaatttttacttaaaaataccaagattgacttt

SEQ ID NO: 100440 - DNA, 120 bp, synthetic construct; identical to SEQ ID NO: 26041
  source 1..120: mol_type = other DNA

SEQ ID NO: 100441 - DNA, 120 bp, synthetic construct; identical to SEQ ID NO: 26042
  source 1..120: mol_type = other DNA

SEQ ID NO: 100442 - DNA, 120 bp, synthetic construct
  source 1..120: mol_type = other DNA
tgtggggaccccaaactgtgtcccagtagagggtcccggctgcaccaaagaggaaggtaaatgctccccacgccctcccctgcgcacccccacaacctcccctacacatcccacaatctc

SEQ ID NO: 100443 - DNA, 120 bp, synthetic construct; identical to SEQ ID NO: 26043
  source 1..120: mol_type = other DNA

SEQ ID NO: 100444 - DNA, 120 bp, synthetic construct; identical to SEQ ID NO: 26044
  source 1..120: mol_type = other DNA

SEQ ID NO: 100445 - DNA, 120 bp, synthetic construct; identical to SEQ ID NO: 26045
  source 1..120: mol_type = other DNA

SEQ ID NO: 100446 - DNA, 120 bp, synthetic construct; identical to SEQ ID NO: 26046
  source 1..120: mol_type = other DNA

SEQ ID NO: 100447 - DNA, 120 bp, synthetic construct
  source 1..120: mol_type = other DNA
tttgggatgaaactgctccacttcagctcaccaggcattagttagattctcataaggagcacgaaacctagatccctcacatgtgcagtagtgttcgtgcttctccgagactctaatgct

SEQ ID NO: 100448 - DNA, 120 bp, synthetic construct; identical to SEQ ID NO: 1333
  source 1..120: mol_type = other DNA

SEQ ID NO: 100449 - DNA, 120 bp, synthetic construct
  source 1..120: mol_type = other DNA
gtgacggggcggagctcacacagtaatgctgtgacggggcggagctcacactaatgctctgacggggcggggctcacagtactcctctgacggggcggagctcacactaatgctctgacg

SEQ ID NO: 100450 - DNA, 120 bp, synthetic construct; identical to SEQ ID NO: 26050
  source 1..120: mol_type = other DNA

SEQ ID NO: 100451 - DNA, 120 bp, synthetic construct; identical to SEQ ID NO: 26051
  source 1..120: mol_type = other DNA

SEQ ID NO: 100452 - DNA, 120 bp, synthetic construct
  source 1..120: mol_type = other DNA
ggaattataggcatgagccactgcgcctggccaatttcatgcttttttatggctgcatggtattctatggtgtgtgtgtgtgtgtgtgtgtgtgtgtgtgtgtgtatatatatatataca

SEQ ID NO: 100453 - DNA, 120 bp, synthetic construct
  source 1..120: mol_type = other DNA
atacaccacattccatggtgtgtgtatgtgtacacataccacattccatggtgtttatatgtgtgtgtatataccacattttctttatctaatcaaccattgatagacacttaggtcagt

SEQ ID NO: 100454 - DNA, 120 bp, synthetic construct; identical to SEQ ID NO: 20499
  source 1..120: mol_type = other DNA

SEQ ID NO: 100455 - DNA, 120 bp, synthetic construct
  source 1..120: mol_type = other DNA
agtcccaccaacagtataaaagtgttcctatttctccacatcctctccagcacctgttgtttcctgactttttaatgattgccattctaactggtgtgagatggtatctcattgtggttt

SEQ ID NO: 100456 - DNA, 120 bp, synthetic construct
  source 1..120: mol_type = other DNA
gtcattggtagcttgatggggatggcattgaatctgtaaattaccttgggcagtatggccattttcacgatattgattcttcctacccatgagcatggaatgttcttccatttgtttgta

SEQ ID NO: 100457 - DNA, 120 bp, synthetic construct
  source 1..120: mol_type = other DNA
ggtaccagttcctccttgtacctctggtagaattcggctgtgaatccatctggtcctggactctttttggttggtaaactattgattattgccacaatttcagctcctgttattggtcta

SEQ ID NO: 100458 - DNA, 120 bp, synthetic construct
  source 1..120: mol_type = other DNA
gtgctgaaaaaaacatatattctgttgatttggggtggagagttctgtagatgtctattaggtccgcttggtgcagagatgagttcaattcctgggtatccttgttgactttctgtctca

SEQ ID NO: 100459 - DNA, 120 bp, synthetic construct
  source 1..120: mol_type = other DNA
ttctttaagaatgttgaatattggcccccactctcttctggcttgtagggtttctgctgagagatccgctgttagtctgatgggcttccctttgagggtaacccgacctttctctctggc

SEQ ID NO: 100460 - DNA, 120 bp, synthetic construct
  source 1..120: mol_type = other DNA
gcctcccagttaggctgctccggggtcaggggtcagggacccacttgaggaggcagtctgcccgttctcagatctccagctgcgtgctgggagaaccactgctctcttcaaagctgtcag

SEQ ID NO: 100461 - DNA, 120 bp, synthetic construct; identical to SEQ ID NO: 20500
  source 1..120: mol_type = other DNA

SEQ ID NO: 100462 - DNA, 120 bp, synthetic construct
  source 1..120: mol_type = other DNA
ctgtatttaactcatctccagtgaactagtttaaaatatccaaactgatgatgactttatgagtttttttttttttaattgatcattcttgggtgtttctcgcagagggggatttggcag

SEQ ID NO: 100463 - DNA, 120 bp, synthetic construct
  source 1..120: mol_type = other DNA
acgctcctcacctcccagacggggtcgcggccgggcagaggcgctcctcacattccagaccgggcggcggggcagaggcgctccccacatctcagaagatgggtggccgggcagagaggc

SEQ ID NO: 100464 - DNA, 120 bp, synthetic construct; identical to SEQ ID NO: 20501
  source 1..120: mol_type = other DNA

SEQ ID NO: 100465 - DNA, 120 bp, synthetic construct
  source 1..120: mol_type = other DNA
aacctgggaggtggagtttgtagtgagtcaagattgtgccactgcactccagcctgggcagcagagggagactccgtctcaaaaaaacaaaaaaacaaaaaaacaaaaaaacaaacaaaa

SEQ ID NO: 100466 - DNA, 120 bp, synthetic construct
  source 1..120: mol_type = other DNA
tttataactggattatttgtctttttattgttgagttataagtgttctttatacattctggatactagacccttatcagatatttgatttgcaaatattttctcccattctgtgggttgt

SEQ ID NO: 100467 - DNA, 120 bp, synthetic construct
  source 1..120: mol_type = other DNA
gctgaagggctgaatggaaatccttggtcttcaggttactgatcttaaattcccactgcttttcataaatctccatcttatcaccaataaggtgatctagaaaagacagggtctcctcag

SEQ ID NO: 100468 - DNA, 120 bp, synthetic construct
  source 1..120: mol_type = other DNA
agtaaaaagtaccactggaacggcttcaaaaggggagggctcccttgctacacttctgctcctcatttgggcttcgagggtctggcttgagcagcacagacagggacgtgtctaaccggg

SEQ ID NO: 100469 - DNA, 120 bp, synthetic construct; identical to SEQ ID NO: 18059
  source 1..120: mol_type = other DNA

SEQ ID NO: 100470 - DNA, 120 bp, synthetic construct
  source 1..120: mol_type = other DNA
cactccagccggggcagcaaagcaagaataaataaataaataaataatttatggcatggcgccgtggctcacgcctgtaatcccagcactttgggaggccgaggccggcggatcacgagg

SEQ ID NO: 100471 - DNA, 120 bp, synthetic construct; identical to SEQ ID NO: 18060
  source 1..120: mol_type = other DNA

SEQ ID NO: 100472 - DNA, 120 bp, synthetic construct; identical to SEQ ID NO: 18061
  source 1..120: mol_type = other DNA

SEQ ID NO: 100473 - DNA, 120 bp, synthetic construct; identical to SEQ ID NO: 18062
  source 1..120: mol_type = other DNA

SEQ ID NO: 100474 - DNA, 120 bp, synthetic construct; identical to SEQ ID NO: 18063
  source 1..120: mol_type = other DNA

SEQ ID NO: 100475 - DNA, 120 bp, synthetic construct
  source 1..120: mol_type = other DNA
gtctttttgtgtgtttgttttgtgtttttgagacagagtctcactctgtctcccagcctggagtgcagtggcgtgatcttggctcactccaacctctgcctcctgggttcaagtgattct

SEQ ID NO: 100476 - DNA, 120 bp, synthetic construct
  source 1..120: mol_type = other DNA
gaacagaggaatcactggcccattttatagacgggaaagctggacccggagaagtgaagcaactttcctgactcacagtgggtgagggcctcccacactctttcccctgccccatgctgt

SEQ ID NO: 100477 - DNA, 120 bp, synthetic construct; identical to SEQ ID NO: 18032
  source 1..120: mol_type = other DNA

SEQ ID NO: 100478 - DNA, 120 bp, synthetic construct; identical to SEQ ID NO: 18033
  source 1..120: mol_type = other DNA

SEQ ID NO: 100479 - DNA, 120 bp, synthetic construct; identical to SEQ ID NO: 18034
  source 1..120: mol_type = other DNA

SEQ ID NO: 100480 - DNA, 120 bp, synthetic construct; identical to SEQ ID NO: 18035
  source 1..120: mol_type = other DNA

SEQ ID NO: 100481 - DNA, 120 bp, synthetic construct; identical to SEQ ID NO: 18036
  source 1..120: mol_type = other DNA

SEQ ID NO: 100482 - DNA, 120 bp, synthetic construct
  source 1..120: mol_type = other DNA
tagcgcctatctctacagggttgttatgagacttaaatgagataatccaaataaagcagctggcccagtgcccagcacagaagtattagatttgatgatgaggaagacatagcagatgta

SEQ ID NO: 100483 - DNA, 120 bp, synthetic construct
  source 1..120: mol_type = other DNA
gtgatgattttgaagaaggatgggcccccaaggctggtgtctggcaggatgtcccggatggtctccacgccgtggctgtcactcagcatcttctcattgttcctgatgcggaaacatttc

SEQ ID NO: 100484 - DNA, 120 bp, synthetic construct
  source 1..120: mol_type = other DNA
tcgggaggctgaggtgggtggatcacttgaggtcaggagtttgagaccagcttggtgaacacggtgaaaccccgtctctactaaaaatacaaaaattagccaggtgtggtgagcacctgt

SEQ ID NO: 100485 - DNA, 120 bp, synthetic construct; identical to SEQ ID NO: 18040
  source 1..120: mol_type = other DNA

SEQ ID NO: 100486 - DNA, 120 bp, synthetic construct
  source 1..120: mol_type = other DNA
attgcactccagcctgggcaacaaaagggaaactccacctcaaaaaaaaaaaaaaattagccaggtgtggtggcaggtacctgtaatcccagctatttgggaggctgagacaggagaatt

SEQ ID NO: 100487 - DNA, 120 bp, synthetic construct
  source 1..120: mol_type = other DNA
tttaaagtttttttgttttgagacggagtctcgctctgttgcccaggctggagtgcaatcgcgcaacctcggctcactgcaacctctgactcctgggttcaagcgattctcctgccccag

SEQ ID NO: 100488 - DNA, 120 bp, synthetic construct; identical to SEQ ID NO: 18041
  source 1..120: mol_type = other DNA

SEQ ID NO: 100489 - DNA, 120 bp, synthetic construct
  source 1..120: mol_type = other DNA
cactcctggactcaagtgatccgcccacccttgcctcccaaagtgctgaggtcacaggcatgagccacctgcccagcaatgtctgtttttgttttttgttttgttgttgttgttattgtt

SEQ ID NO: 100490 - DNA, 120 bp, synthetic construct; identical to SEQ ID NO: 18042
  source 1..120: mol_type = other DNA

SEQ ID NO: 100491 - DNA, 120 bp, synthetic construct; identical to SEQ ID NO: 18043
  source 1..120: mol_type = other DNA

SEQ ID NO: 100492 - DNA, 120 bp, synthetic construct
  source 1..120: mol_type = other DNA
atgagctggcaggctattcagtggcacctggtgactacctactgaataagcagtgaatgaatccacaacttccctgtgagacagacacaggacgggggcaggatccgagattctcacatc

SEQ ID NO: 100493 - DNA, 120 bp, synthetic construct
  source 1..120: mol_type = other DNA
cacttgaggccaggagtttgagaccagcctggtcaacatggtgaaaccccataattttgtaaaaatacaaaaattagctgggcatggtggtaggcatctgtaatcccagctacttgggag

SEQ ID NO: 100494 - DNA, 120 bp, synthetic construct
  source 1..120: mol_type = other DNA
tctcttaaatgggacaaaaaccaagcaaaccataaacaaaaagactgataaactgcacatcattaaaagaacctctgttcaataaaaatactattaggaggtttaaaagtcaagccttat

SEQ ID NO: 100495 - DNA, 120 bp, synthetic construct
  source 1..120: mol_type = other DNA
tagtattttctaaaaacattaatttaataggctgagtgcaccagctcatgcctgtaatcccagcacttcaggaggcccaggcaagaagatcgagaccagcctggccaacatgatgaaacc

SEQ ID NO: 100496 - DNA, 120 bp, synthetic construct
  source 1..120: mol_type = other DNA
aataccctagaagttttaaacaaagaaacctgtgtgacaggttgtctgcgataatgcccaaggcaactggggcagagggaagaatgcaaaactgctgttttatgatttaaaacaacccac

SEQ ID NO: 100497 - DNA, 120 bp, synthetic construct
  source 1..120: mol_type = other DNA
gcttagggaaatgaggattttagaattcaagttgcttacctgattgtctttccagtgagctctgcaccatcttaaccccaaacaacatttcaagacattatggtcaagaataggtggcca

SEQ ID NO: 100498 - DNA, 120 bp, synthetic construct
  source 1..120: mol_type = other DNA
gggacggggaggctgcagtgagccgagatcacaccactgcactccagcctgggcaacaaagtgaaactctgtttcaaaaaacaaaaataaaaaacgtttgtgtggtttttttttttttta

SEQ ID NO: 100499 - DNA, 120 bp, synthetic construct
  source 1..120: mol_type = other DNA
tgtaatcccagcactttgagaggctgagccaggcggatcacctgaggtcaggagttcacctggccaacatagtgaaaccctttctctacaacaagtacaaaaattagctgggtgtggtgg

SEQ ID NO: 100500 - DNA, 120 bp, synthetic construct
  source 1..120: mol_type = other DNA
gccctgtgcctgggtcacactgcaggcctgtcatgccatggtcccagtggtcacaggaggcagacactgttcctccccaatgtattctatctaaattcctccatttaacatttgaaaact

SEQ ID NO: 100501 - DNA, 120 bp, synthetic construct
  source 1..120: mol_type = other DNA
atatactgcctttgtaggagagaaagtaataaataaggaagaaattttaaaaatcttttatttttttttttttgggacagagtctcactctgtcacccaggctggagtgcagtggcacga

SEQ ID NO: 100502 - DNA, 120 bp, synthetic construct
  source 1..120: mol_type = other DNA
gctgcaaaaaaatgtttaaaaggctgtgtgaagaaggctctgcccagttctctcttcagcctagttcatctgccccacatactcttccacacatctgtctgtccccacctgtccaccacc

SEQ ID NO: 100503 - DNA, 120 bp, synthetic construct
  source 1..120: mol_type = other DNA
ttatggcccgagtgatggacttcgatgtcttcagagcctgaagaatgggaaatggaatccagagattccttccgctgtagttctgcaccagaggtagagagagggtccagctcagaaagc

SEQ ID NO: 100504 - DNA, 120 bp, synthetic construct
  source 1..120: mol_type = other DNA
aaaaaaaaaaaacgcaaattgatgtagtaataaacatacaaaaagtttagcttcacaaataaaaaatagaggccgggcgcggtggctcacgcctgtaatcctagcactttgggaggccga

SEQ ID NO: 100505 - DNA, 120 bp, synthetic construct; identical to SEQ ID NO: 21942
  source 1..120: mol_type = other DNA

SEQ ID NO: 100506 - DNA, 120 bp, synthetic construct; identical to SEQ ID NO: 11163
  source 1..120: mol_type = other DNA

SEQ ID NO: 100507 - DNA, 120 bp, synthetic construct; identical to SEQ ID NO: 11164
  source 1..120: mol_type = other DNA

SEQ ID NO: 100508 - DNA, 120 bp, synthetic construct
  source 1..120: mol_type = other DNA
aaatgattctccagtttgaacatagggaatatgaaacaaagagggtgctcagttctttctgaggatgttgagcataagtggtgtgtgtgtgtgtgtgtgtgtgtgtgtgaaaagggggta

SEQ ID NO: 100509 - DNA, 120 bp, synthetic construct
  source 1..120: mol_type = other DNA
tggggtatgtatgtgtgtgtgctgtgagcgtgtgtgtggtgtgtgtgatatgtatgtgagtgtggtgtgtgtgtgatatgtggtgtgtggtatgtatgtgtgtgtggtgtgtgagcgtat

SEQ ID NO: 100510 - DNA, 120 bp, synthetic construct
  source 1..120: mol_type = other DNA
gtgagccaagattgtgccactgcactccagcctgggtgacagagtgagactctatgtgagaaagaaagaaagaaggaaagaaggaaagaaggaagaaaagaaagagaaagaaagaaagaa

SEQ ID NO: 100511 - DNA, 120 bp, synthetic construct; identical to SEQ ID NO: 32047
  source 1..120: mol_type = other DNA

SEQ ID NO: 100512 - DNA, 120 bp, synthetic construct
  source 1..120: mol_type = other DNA
cgtctgggaagtgggcgcctctgcctggccaccccgtctgggaggtgaggagcacctctgcccggccgccccatttgggaggtgaggggcgtctctgcctggccgccaccccgtctggga

SEQ ID NO: 100513 - DNA, 120 bp, synthetic construct
  source 1..120: mol_type = other DNA
aaccccctgctctctgaaacatgtgctgtgtcaactcagggttaaatggattaagggtggtgcaagatgtgctttgttaaacagatgcttgaagacagcatgctcgttaagagtcaccac

SEQ ID NO: 100514 - DNA, 120 bp, synthetic construct; identical to SEQ ID NO: 19437
  source 1..120: mol_type = other DNA

SEQ ID NO: 100515 - DNA, 120 bp, synthetic construct; identical to SEQ ID NO: 19438
  source 1..120: mol_type = other DNA

SEQ ID NO: 100516 - DNA, 120 bp, synthetic construct; identical to SEQ ID NO: 19439
  source 1..120: mol_type = other DNA

SEQ ID NO: 100517 - DNA, 120 bp, synthetic construct
  source 1..120: mol_type = other DNA
caggtaacccaggtgctcaggggctgggtgacctaagccggggataaccccaaatccccatccaaagggtttcactccagaccggctgccggcccactcctgccacagtccccccatctt

SEQ ID NO: 100518 - DNA, 120 bp, synthetic construct
  source 1..120: mol_type = other DNA
cacacatgtacatacatgtgcaaacaccacctcctatgggcacacctgtgcacccagacaacacacacgcacccagtgggtgcaggtgaacacctgcctctgtcaagcacgtacaccttc

SEQ ID NO: 100519 - DNA, 120 bp, synthetic construct
  source 1..120: mol_type = other DNA
gataccatctcatgccagttagaatggcaatcgctaaagtctggaaataacggatgctggtgaggatacggagaaataggaacgcttttacgctgctggtgggagtgtaaattatttcaa

SEQ ID NO: 100520 - DNA, 120 bp, synthetic construct
  source 1..120: mol_type = other DNA
gtctgagaagtgaggaaaccctctgcctggcaaccgccccgtctgagaagtgaggagcccctccgtccggcaaccaccctgtctgggaagtgaggagcgtctccgcccggaagccacccc

SEQ ID NO: 100521 - DNA, 120 bp, synthetic construct
  source 1..120: mol_type = other DNA
ctgcgagaaacacccaagaatgatcaataaaaaaaaaataataataataataataataaaaaaagaaaatgtggcatatatacaccatgaaatactatgcagccatgaaaaagaatgagt

SEQ ID NO: 100522 - DNA, 120 bp, synthetic construct; identical to SEQ ID NO: 26571
  source 1..120: mol_type = other DNA

SEQ ID NO: 100523 - DNA, 120 bp, synthetic construct
  source 1..120: mol_type = other DNA
caagaccaaactggccaacatggtaaaaccccatctctgctaaaaaaaaatacaaaaattagtctggcatggtagcatgtgcacctgtaatcccagctactcaggaggctgaagcagaat

SEQ ID NO: 100524 - DNA, 120 bp, synthetic construct
  source 1..120: mol_type = other DNA
aaagccagggatggtggtgcacgcctgttgtcccagctacttgggaggctgaggcaggaggagaagcgcttgaacccaggagatggaggttgcagtgagccgagattgtgccactccact

SEQ ID NO: 100525 - DNA, 120 bp, synthetic construct
  source 1..120: mol_type = other DNA
aataaaaaggaaaaaaagaaacttcaggaatcagaatattttttaagaaagcaagctggtcaggcgatgcagctcaagcctataatcccagcaatttgggaggctgaggtgggtggatca

SEQ ID NO: 100526 - DNA, 120 bp, synthetic construct; identical to SEQ ID NO: 19286
  source 1..120: mol_type = other DNA

SEQ ID NO: 100527 - DNA, 120 bp, synthetic construct
  source 1..120: mol_type = other DNA
ctaaagccagtctcttttccttcctccacctccctccttcctagaactgaggtggagatacaggtcaatgaaaagatgcctgacatcacagtgtaataataatgacaatgaaatagtgta

SEQ ID NO: 100528 - DNA, 120 bp, synthetic construct
  source 1..120: mol_type = other DNA
tgaaaaccagcacctttgtcccgaagaatggggaagcagatatgggttctgtaccactatccactacagttgcagaaagacctttcacttttatatgtgagggggaaacagaatttgtaa

SEQ ID NO: 100529 - DNA, 120 bp, synthetic construct
  source 1..120: mol_type = other DNA
ggcgacagagtgactccatctcaaaataaataaataaataaataaatctcttggccatttctgctagtacttgctccagtctatttcctttttgctctcctctatcttcattccctcctg

SEQ ID NO: 100530 - DNA, 120 bp, synthetic construct; identical to SEQ ID NO: 32875
  source 1..120: mol_type = other DNA

SEQ ID NO: 100531 - DNA, 120 bp, synthetic construct; identical to SEQ ID NO: 55238
  source 1..120: mol_type = other DNA

SEQ ID NO: 100532 - DNA, 120 bp, synthetic construct
  source 1..120: mol_type = other DNA
ctgtttgtctgttgttggtgtataagaatgcttgtgatttttgtacattgattttgtctcctgagactttgctgaagttgcttatcagcttaaggagattttgggctgagacgatggggt

SEQ ID NO: 100533 - DNA, 120 bp, synthetic construct
  source 1..120: mol_type = other DNA
ttgggagagtgtatgtgtcgaggaatgtatccatttcttctagattttctagtttatttgcgtagaggtgtttgtagtattctctgatggtagtttgtatttctgtgggattggtggtga

SEQ ID NO: 100534 - DNA, 120 bp, synthetic construct
  source 1..120: mol_type = other DNA
gtggggtgttaaagtctcccattattaatgtgtgggagtctaagtctctttgtaggtcactcaggacttgctttatgaatctgggtgctcctgtattcggtgcataaatatttaggatag

SEQ ID NO: 100535 - DNA, 120 bp, synthetic construct
  source 1..120: mol_type = other DNA
tctctggctgcccttaacattttttccttcatttcaactttggtgaatctgacaattatgtgtctgggagttgctcttctcgaggagtatctttgtggcgttctctgtatttcctgaatc

SEQ ID NO: 100536 - DNA, 120 bp, synthetic construct
  source 1..120: mol_type = other DNA
gaaccactgctctcttcaaagctgtcagacagggacacttaagtctgcagaggttactgctgtctttttgtttgtctgtgccctgcccctagaggtggagcctacagaggcaggcaggcc

SEQ ID NO: 100537 - DNA, 120 bp, synthetic construct; identical to SEQ ID NO: 32876
  source 1..120: mol_type = other DNA

SEQ ID NO: 100538 - DNA, 120 bp, synthetic construct
  source 1..120: mol_type = other DNA
ttagaggtattcataatattctctgatggtagtctgtatttctgtgggatcagtggtgatatcccctcaagtatctagaactagaaatatcatttgacccagccatcccattactgggta

SEQ ID NO: 100539 - DNA, 120 bp, synthetic construct
  source 1..120: mol_type = other DNA
aacccgcacccgtgacaacagcattaatccattcacaagggcagagcccccatgacctaatcacctcttaaaggccctacctctcaacattgttgcattggggactaaatttcttttctc

SEQ ID NO: 100540 - DNA, 120 bp, synthetic construct; identical to SEQ ID NO: 32877
  source 1..120: mol_type = other DNA

SEQ ID NO: 100541 - DNA, 120 bp, synthetic construct
  source 1..120: mol_type = other DNA
caaggctcgagaactacgtgaagaatgcagaagcctcaggagccgacgcaatcaactggaagaaagggtatcagcaatggaaaatgaaatgaatgaaatgaagtgagaaggaaaatttag

SEQ ID NO: 100542 - DNA, 120 bp, synthetic construct
  source 1..120: mol_type = other DNA
gcaaattggatagagtcaagacccatcagtgtgctgtattcaggaaacccatctcatgtgcagagacacacataggctcaaaataaaaggatggaggaagatctaccaagcaaatggaaa

SEQ ID NO: 100543 - DNA, 120 bp, synthetic construct
  source 1..120: mol_type = other DNA
tccaggagctgattttttgaaaggatcaacaaaattgatagaccgctagcaagactaataaagaagaaaagagaagaatcaaatagatgcaataaaaaatgataaaggggatatcaccac

SEQ ID NO: 100544 - DNA, 120 bp, synthetic construct
  source 1..120: mol_type = other DNA
gtctactactcctattcgacatagtgttggaagttctggccagggcaattaggcaggagaaggaaataaagggtattcaattaggaaaagaggaagtcaaattgtccctgtttgcagatg

SEQ ID NO: 100545 - DNA, 120 bp, synthetic construct
  source 1..120: mol_type = other DNA
actcatctgacaaagggctaatatccagaatctacaatgaactcaaacaaatttacaagaaaaaaacaaccccatcaaaaagtaggcgaaggacatgaacagacacttctcaaaagaaga

SEQ ID NO: 100546 - DNA, 120 bp, synthetic construct; identical to SEQ ID NO: 7840
  source 1..120: mol_type = other DNA

SEQ ID NO: 100547 - DNA, 120 bp, synthetic construct; identical to SEQ ID NO: 7837
  source 1..120: mol_type = other DNA

SEQ ID NO: 100548 - DNA, 120 bp, synthetic construct; identical to SEQ ID NO: 7838
  source 1..120: mol_type = other DNA

SEQ ID NO: 100549 - DNA, 120 bp, synthetic construct; identical to SEQ ID NO: 7839
  source 1..120: mol_type = other DNA

SEQ ID NO: 100550 - DNA, 120 bp, synthetic construct; identical to SEQ ID NO: 24777
  source 1..120: mol_type = other DNA

SEQ ID NO: 100551 - DNA, 120 bp, synthetic construct; identical to SEQ ID NO: 24778
  source 1..120: mol_type = other DNA

SEQ ID NO: 100552 - DNA, 120 bp, synthetic construct
  source 1..120: mol_type = other DNA
gagaagtgtctgttcatgtccttcacccactttttgatggggttgtttgtttttttcttgtaaatttgtttgagttcattgtaggttctggatattagccctttgtcagacgagtaggtt

SEQ ID NO: 100553 - DNA, 120 bp, synthetic construct
  source 1..120: mol_type = other DNA
gtctgttataaaaactgttttttaaagagatgagggtcttgctatgccacccaatatagatcactgtaacctcaaactcctgggatcaagtgatcctccaacctcagcttcctgagttgt

SEQ ID NO: 100554 - DNA, 120 bp, synthetic construct
  source 1..120: mol_type = other DNA
aaaaaaaaaaaaaaaaagaaataaaaattaaaaattagccgagtatggtggtgcatgcttgtagtcctagctactgggggtgggaggtgctgaagcaggaggatcacttgaggccaggag

SEQ ID NO: 100555 - DNA, 120 bp, synthetic construct; identical to SEQ ID NO: 35190
  source 1..120: mol_type = other DNA

SEQ ID NO: 100556 - DNA, 120 bp, synthetic construct; identical to SEQ ID NO: 35191
  source 1..120: mol_type = other DNA

SEQ ID NO: 100557 - DNA, 120 bp, synthetic construct; identical to SEQ ID NO: 35192
  source 1..120: mol_type = other DNA

SEQ ID NO: 100558 - DNA, 120 bp, synthetic construct; identical to SEQ ID NO: 35193
  source 1..120: mol_type = other DNA

SEQ ID NO: 100559 - DNA, 120 bp, synthetic construct
  source 1..120: mol_type = other DNA
ctgagtagctggaattacaggcatccaccaccacgcctggttaatttttgtatttttaggagagacagggtttcaccatcttggtcagactggtctcaaactcctgacctcatgatctgc

SEQ ID NO: 100560 - DNA, 120 bp, synthetic construct; identical to SEQ ID NO: 35194
  source 1..120: mol_type = other DNA

SEQ ID NO: 100561 - DNA, 120 bp, synthetic construct; identical to SEQ ID NO: 24787
  source 1..120: mol_type = other DNA

SEQ ID NO: 100562 - DNA, 120 bp, synthetic construct
  source 1..120: mol_type = other DNA
gtgtgcatgtgtctttatagcagcatgatttataatcctttgggtatatacccagtaatgggatggctgggtcaaatggtatttctagttctagatccttgaggaattgccacactgtct

SEQ ID NO: 100563 - DNA, 120 bp, synthetic construct
  source 1..120: mol_type = other DNA
taatctttattatttcctacctcttggcttggttttcccttaaggtggaaagtttgattactgatttgatatcttccttttttttttttttttttttttgagacggagtctcgctctgtc

SEQ ID NO: 100564 - DNA, 120 bp, synthetic construct
  source 1..120: mol_type = other DNA
tagagatcaagagacagagtgtttgtctttcaggaactcaatctaatggataattccatgtcaaggtgttaaaatgaggctgtaggagtgtagactatgggtgtcaaggagggcttcttg

SEQ ID NO: 100565 - DNA, 120 bp, synthetic construct
  source 1..120: mol_type = other DNA
taggcacctttccaagtgctacaactttccaggtatcctcggggcagtcattgctgccacttgggtctccttttctccaagactgctactttttatttattgagcacctctttttttttt

SEQ ID NO: 100566 - DNA, 120 bp, synthetic construct
  source 1..120: mol_type = other DNA
tacagtaccaactggtttagtcctcaaaacaagcccaaggagtgggcactattaggatttgcactaatttatagatgaggaaaatgaggccctgcaaggttaagtaatttgcctgaagtc

SEQ ID NO: 100567 - DNA, 120 bp, synthetic construct
  source 1..120: mol_type = other DNA
ctactcaggaagctgaggcagaattgcctaaacccgggaggcagaggtggcagtgagtcaagaccacgctattgcactccagcctgggcaacaagagcgaaactccttctcaaaaaaaaa

SEQ ID NO: 100568 - DNA, 120 bp, synthetic construct
  source 1..120: mol_type = other DNA
tgcatctagccttcatgcctttgccacacaaagaaacaggaatgtgttcttctctttctgcttcctaaatacatctcaatattcaggtctatctccaatccagactctttgtggatgtcc

SEQ ID NO: 100569 - DNA, 120 bp, synthetic construct
  source 1..120: mol_type = other DNA
tgactaaaaatttatttttcaatagagacagtgtctcactgtgttgcccaggctggtctcaaactcctgggctcaagcaattttcctaccttgacctctcaaagttctcagagtataggc

SEQ ID NO: 100570 - DNA, 120 bp, synthetic construct
  source 1..120: mol_type = other DNA
aatgctcccaaagtaggtggccctcagcagcatgtccaggtcgtggggcacctgaacaggggaatcaggagtgagggagtgagctctgtcacagaccttctcttgcccatcccacaaaca

SEQ ID NO: 100571 - DNA, 120 bp, synthetic construct
  source 1..120: mol_type = other DNA
tccacattcctaaaattaggatgatgttagtacctgactcacagggttgtgagagaatgaaatgagattatttgtatagaaatttatgtccagctccttcgggggagttggggaaaggcc

SEQ ID NO: 100572 - DNA, 120 bp, synthetic construct
  source 1..120: mol_type = other DNA
agactccatctcaaaaaaaaaaaaaaaaaaaaaagatggcatgaggttcctttcccttggtttctcctacctcctccttcgcttcccatgcctgtgtgttaggtgtgatgggaaaatacc

SEQ ID NO: 100573 - DNA, 120 bp, synthetic construct
  source 1..120: mol_type = other DNA
ggtccaggagaaatcagtgactagggaaatagtggcagtaggagtcctcagcttcagcctgaataacagctcctccacgtaggttttccaagaaccaggcccaaattccctctccagtct

SEQ ID NO: 100574 - DNA, 120 bp, synthetic construct
  source 1..120: mol_type = other DNA
gataccaattattgagaatccagtacatggccaaatgtgcatatcagatagtcctcacagttactcttatctaagtggccagcacttaaatatacatttatcatatgccaggtgctgttc

SEQ ID NO: 100575 - DNA, 120 bp, synthetic construct
  source 1..120: mol_type = other DNA
taataaggtttcacctctttccacacatcctaccaaaccttcctatcaactcgtatgaaatgcatatgcctgtttctgttacacagatgaagaaacggaaactcaggaaggctaaggggg

SEQ ID NO: 100576 - DNA, 120 bp, synthetic construct
  source 1..120: mol_type = other DNA
tacacccggtcttttaatagagtccgttcactttgcctccatcacctaagctccgtctcacatctcaattccttattccccctccctcatcctaaaccatacttagagccttcagtttct

SEQ ID NO: 100577 - DNA, 120 bp, synthetic construct
  source 1..120: mol_type = other DNA
ctccagataactcttcggggaacttggaaccaataatcttgcctccatatggcagatgtggaaactgaggctcagagaggcgatgcgacttgcgttctggctcccagaggatttgggaca

SEQ ID NO: 100578 - DNA, 120 bp, synthetic construct
  source 1..120: mol_type = other DNA
ggaggtggagatcgcaccactgcactccagcctgggtgacagggtgagactccatctcacaaaaaaaaaaaaaaaaaaaaaaagatgctcaatatcagtattcattagggaaatgcaaat

SEQ ID NO: 100579 - DNA, 120 bp, synthetic construct; identical to SEQ ID NO: 10120
  source 1..120: mol_type = other DNA

SEQ ID NO: 100580 - DNA, 120 bp, synthetic construct; identical to SEQ ID NO: 10121
  source 1..120: mol_type = other DNA

SEQ ID NO: 100581 - DNA, 120 bp, synthetic construct
  source 1..120: mol_type = other DNA
ccgcagtaaatatatgtgtgcatgtgtctttatagcagcatgatttatagtcctttgggtatatacccagtaatgggatggctgggtcaaatggtatttctagttctagatccctgagga

SEQ ID NO: 100582 - DNA, 120 bp, synthetic construct
  source 1..120: mol_type = other DNA
attgaatctataaattaccttgggcagtatggccattttcatgatattgattcttcctacccatgagcatggaatgttcttccatttgtttgtatcctgttttatttcattgaggattgg

SEQ ID NO: 100583 - DNA, 120 bp, synthetic construct; identical to SEQ ID NO: 3052
  source 1..120: mol_type = other DNA

SEQ ID NO: 100584 - DNA, 120 bp, synthetic construct; identical to SEQ ID NO: 10123
  source 1..120: mol_type = other DNA

SEQ ID NO: 100585 - DNA, 120 bp, synthetic construct
  source 1..120: mol_type = other DNA
gcttcgagcgggattaggggtggcgtgggaacctagagtgggagagattaagatgaaggaagattttgtggtaaggggtgatattgtggattgttagaagaaacatttgtcatttagaat

SEQ ID NO: 100586 - DNA, 120 bp, synthetic construct
  source 1..120: mol_type = other DNA
gtgtagggaagggagggggcctgaataatccctgaggagtagtagaatagcagatggaacactgagaagttatttccttgaggatagatttccaccatggaaaggaaatgaaaggttcta

SEQ ID NO: 100587 - DNA, 120 bp, synthetic construct; identical to SEQ ID NO: 10124
  source 1..120: mol_type = other DNA

SEQ ID NO: 100588 - DNA, 120 bp, synthetic construct; identical to SEQ ID NO: 10125
  source 1..120: mol_type = other DNA

SEQ ID NO: 100589 - DNA, 120 bp, synthetic construct; identical to SEQ ID NO: 10126
  source 1..120: mol_type = other DNA

SEQ ID NO: 100590 - DNA, 120 bp, synthetic construct; identical to SEQ ID NO: 10127
  source 1..120: mol_type = other DNA

SEQ ID NO: 100591 - DNA, 120 bp, synthetic construct; identical to SEQ ID NO: 9305
  source 1..120: mol_type = other DNA

SEQ ID NO: 100592 - DNA, 120 bp, synthetic construct; identical to SEQ ID NO: 9306
  source 1..120: mol_type = other DNA

SEQ ID NO: 100593 - DNA, 120 bp, synthetic construct; identical to SEQ ID NO: 9307
  source 1..120: mol_type = other DNA

SEQ ID NO: 100594 - DNA, 120 bp, synthetic construct; identical to SEQ ID NO: 30049
  source 1..120: mol_type = other DNA

SEQ ID NO: 100595 - DNA, 120 bp, synthetic construct; identical to SEQ ID NO: 30050
  source 1..120: mol_type = other DNA

SEQ ID NO: 100596 - DNA, 120 bp, synthetic construct; identical to SEQ ID NO: 30051
  source 1..120: mol_type = other DNA

SEQ ID NO: 100597 - DNA, 120 bp, synthetic construct; identical to SEQ ID NO: 30052
  source 1..120: mol_type = other DNA

SEQ ID NO: 100598 - DNA, 120 bp, synthetic construct; identical to SEQ ID NO: 30053
  source 1..120: mol_type = other DNA

SEQ ID NO: 100599 - DNA, 120 bp, synthetic construct; identical to SEQ ID NO: 30054
  source 1..120: mol_type = other DNA

SEQ ID NO: 100600 - DNA, 120 bp, synthetic construct; identical to SEQ ID NO: 30055
  source 1..120: mol_type = other DNA

SEQ ID NO: 100601 - DNA, 120 bp, synthetic construct
  source 1..120: mol_type = other DNA
tcaaactcccaaagtgctgggattacaagcatgagccactgcacctggctaaaaacacattatttataaaaggaggtccagtcacatctctcccattacctctgcagatgactgcagaga

SEQ ID NO: 100602 - DNA, 120 bp, synthetic construct; identical to SEQ ID NO: 30057
  source 1..120: mol_type = other DNA

SEQ ID NO: 100603 - DNA, 120 bp, synthetic construct; identical to SEQ ID NO: 30058
  source 1..120: mol_type = other DNA

SEQ ID NO: 100604 - DNA, 120 bp, synthetic construct
  source 1..120: mol_type = other DNA
tctcctcctcctccttctcctcctccttctccttcctcctcctcctcttcctcctcctcctcctccttctcctcctctttctcctcctcctccttctcctactccttctcctcttcatcc

SEQ ID NO: 100605 - DNA, 120 bp, synthetic construct
  source 1..120: mol_type = other DNA
tctttctcctcctccttctcctcctcctccttctcttcctcctcctcctcctccttctcctcctcctcttctttctcctcctccttctcctcctcctccttctcctcctccttctcctct

SEQ ID NO: 100606 - DNA, 120 bp, synthetic construct
  source 1..120: mol_type = other DNA
accctacctcgtcatagtacttctgcgtgtattggtagagctggtggagtgccacgagggtgttcaaggagtccgtgtgcgcctggggggtgacgggacagtcagggtggaaaaggggct

SEQ ID NO: 100607 - DNA, 120 bp, synthetic construct; identical to SEQ ID NO: 24001
  source 1..120: mol_type = other DNA

SEQ ID NO: 100608 - DNA, 120 bp, synthetic construct; identical to SEQ ID NO: 24002
  source 1..120: mol_type = other DNA

SEQ ID NO: 100609 - DNA, 120 bp, synthetic construct
  source 1..120: mol_type = other DNA
caatccacccgccttggcctcccaaagtgctggaattacaggcgtgagccaccacacccagccagactgaccattcttaatgctaaaatcaaaccagcacaaagcagtcaggcccagtgg

SEQ ID NO: 100610 - DNA, 120 bp, synthetic construct
  source 1..120: mol_type = other DNA
ctccagagtggcgctcaggcctggctggtcacctgaccctatcggacgaagacttgacctccgtgacccaaaaccactggaagagactcaacaccttgcaacactacaaggtgtgagcag

SEQ ID NO: 100611 - DNA, 120 bp, synthetic construct; identical to SEQ ID NO: 13133
  source 1..120: mol_type = other DNA

SEQ ID NO: 100612 - DNA, 120 bp, synthetic construct; identical to SEQ ID NO: 24685
  source 1..120: mol_type = other DNA

SEQ ID NO: 100613 - DNA, 120 bp, synthetic construct; identical to SEQ ID NO: 9195
  source 1..120: mol_type = other DNA

SEQ ID NO: 100614 - DNA, 120 bp, synthetic construct; identical to SEQ ID NO: 9196
  source 1..120: mol_type = other DNA

SEQ ID NO: 100615 - DNA, 120 bp, synthetic construct
  source 1..120: mol_type = other DNA
caacagagtgagactctatctcaaaaaaataaataaaataaaataaaatcagtgtaaaggaatagagagcagctgacacgctgtcctctggcgacctgtcgctggagaggttgggactct

SEQ ID NO: 100616 - DNA, 120 bp, synthetic construct
  source 1..120: mol_type = other DNA
tccattctacctttcctgaagattgaggactgtaagggatatgaaggttccactgaatactaagagcctgagaaactgcttgggtgatttgactagtaaaggctggtccgttatcagact

SEQ ID NO: 100617 - DNA, 120 bp, synthetic construct
  source 1..120: mol_type = other DNA
aaaacagtaaggtcaagttgtttggacagaaaggctacagggtgtggtcctggctgttgtgtaagaattctgaccgcactaaccatgcctaggaaggaagggagttgttgttttgtaagg

SEQ ID NO: 100618 - DNA, 120 bp, synthetic construct; identical to SEQ ID NO: 100616
  source 1..120: mol_type = other DNA

SEQ ID NO: 100619 - DNA, 120 bp, synthetic construct
  source 1..120: mol_type = other DNA
ggaagggagttgttgttttggaagggattgaggtttgggagattaatcagacaagatcaacaggcagagcacgtgtgtttttatgagaattatgccgagataggtaacagatgaggatga

SEQ ID NO: 100620 - DNA, 120 bp, synthetic construct
  source 1..120: mol_type = other DNA
taaaatgtatattgagaataagacggccttttgaccttttagggtctaggggctgaggaagaattggaacctagctcggcctggcgaggaggggagaggtcagatgggtctgtagaaaag

SEQ ID NO: 100621 - DNA, 120 bp, synthetic construct; identical to SEQ ID NO: 21872
  source 1..120: mol_type = other DNA

SEQ ID NO: 100622 - DNA, 120 bp, synthetic construct; identical to SEQ ID NO: 21873
  source 1..120: mol_type = other DNA

SEQ ID NO: 100623 - DNA, 120 bp, synthetic construct; identical to SEQ ID NO: 8837
  source 1..120: mol_type = other DNA

SEQ ID NO: 100624 - DNA, 120 bp, synthetic construct
  source 1..120: mol_type = other DNA
accagcctgggcaacataatgagactcccatctctacaaaaaaaaattttaaacttagccaggcatagtggcatgcacctgtattcctagctacttgggaagctcaagtgggaggatcac

SEQ ID NO: 100625 - DNA, 120 bp, synthetic construct
  source 1..120: mol_type = other DNA
gtctgtaatcactccttggccttttggctaagatcaagtatatttaagttcgtttttttttttctttttgagagagtctcactctgtcgcccaggctggagtgcaatggggcgatctcgg

SEQ ID NO: 100626 - DNA, 120 bp, synthetic construct; identical to SEQ ID NO: 22002
  source 1..120: mol_type = other DNA

SEQ ID NO: 100627 - DNA, 120 bp, synthetic construct
  source 1..120: mol_type = other DNA
atgtggcccagccagtgcccctgccccctgctatccccaacagtacctgtagccatacatgaccatgtctgacacggggatatgagaggagtccgtcatctctcgaaactgtggggaaca

SEQ ID NO: 100628 - DNA, 120 bp, synthetic construct
  source 1..120: mol_type = other DNA
gatcaaaggctgggagctcgaagccggctgctggccacttgagaaagaactcctcaggcgtggcgaagggcaggccaaggttgagggcaaactaggggttgaggacgaacatcagacaca

SEQ ID NO: 100629 - DNA, 120 bp, synthetic construct
  source 1..120: mol_type = other DNA
cctcgccgtgagggccctgctggagcaggccgtcccgctcactgataccttcagctcaagaatgcgctaaacttcagaacaaatgcacacacaaacgaatgaacgaaggaatgaacagct

SEQ ID NO: 100630 - DNA, 120 bp, synthetic construct
  source 1..120: mol_type = other DNA
cctggtgtcaccaaggaaagacaaacagcagcactgtgatacctctgaccctcctcactcacaggctgactcacaccaaccctgccaggcagggtgttatcactgccatctcacagatgg

SEQ ID NO: 100631 - DNA, 120 bp, synthetic construct
  source 1..120: mol_type = other DNA
acctcttcactttggaacgggctttggaacggttacaggttttcagccttgtccgaatcttttttttttttttttttttttttcccctggagatataggcttgttttgtcgcccaggctg

SEQ ID NO: 100632 - DNA, 120 bp, synthetic construct
  source 1..120: mol_type = other DNA
tttgcatccttgtgtgattgggtccctcatttctggggagtgtggcctgcttcaggctatagcatccagggagtaagaggcagtttatttctacatgggattggctccttgacatgcagt

SEQ ID NO: 100633 - DNA, 120 bp, synthetic construct
  source 1..120: mol_type = other DNA
cactagaaagtttccccaccattaactgctccggaagtcccacccgctcgccttccgcgggtcgacccgtttcccaggcgacgacgcgtgctccatccctccccgagttgcaatccccac

SEQ ID NO: 100634 - DNA, 120 bp, synthetic construct
  source 1..120: mol_type = other DNA
ctccactggggcctcctgcaccattgttctttcccctttcctgttgcccagttactaagatcttacctgtccatgcttagatttgcaccttaaagatatgtcctcagtacatttaaaaaa

SEQ ID NO: 100635 - DNA, 120 bp, synthetic construct
  source 1..120: mol_type = other DNA
ccagaagggaccttgccctgggagaaggtaacagacccacctggggagggagacgctgggccccgggagactccgccgcccctcgcctgtccgccctatcagaactgaagcagcctgcag

SEQ ID NO: 100636 - DNA, 120 bp, synthetic construct; identical to SEQ ID NO: 35548
  source 1..120: mol_type = other DNA

SEQ ID NO: 100637 - DNA, 120 bp, synthetic construct; identical to SEQ ID NO: 35549
  source 1..120: mol_type = other DNA

SEQ ID NO: 100638 - DNA, 120 bp, synthetic construct; identical to SEQ ID NO: 35550
  source 1..120: mol_type = other DNA

SEQ ID NO: 100639 - DNA, 120 bp, synthetic construct; identical to SEQ ID NO: 35551
  source 1..120: mol_type = other DNA

SEQ ID NO: 100640 - DNA, 120 bp, synthetic construct; identical to SEQ ID NO: 35552
  source 1..120: mol_type = other DNA

SEQ ID NO: 100641 - DNA, 120 bp, synthetic construct; identical to SEQ ID NO: 35553
  source 1..120: mol_type = other DNA

SEQ ID NO: 100642 - DNA, 120 bp, synthetic construct; identical to SEQ ID NO: 35554
  source 1..120: mol_type = other DNA

SEQ ID NO: 100643 - DNA, 120 bp, synthetic construct; identical to SEQ ID NO: 35555
  source 1..120: mol_type = other DNA

SEQ ID NO: 100644 - DNA, 120 bp, synthetic construct; identical to SEQ ID NO: 35579
  source 1..120: mol_type = other DNA

SEQ ID NO: 100645 - DNA, 120 bp, synthetic construct; identical to SEQ ID NO: 11543
  source 1..120: mol_type = other DNA

SEQ ID NO: 100646 - DNA, 120 bp, synthetic construct; identical to SEQ ID NO: 33417
  source 1..120: mol_type = other DNA

SEQ ID NO: 100647 - DNA, 120 bp, synthetic construct; identical to SEQ ID NO: 33213
  source 1..120: mol_type = other DNA

SEQ ID NO: 100648 - DNA, 120 bp, synthetic construct; identical to SEQ ID NO: 33214
  source 1..120: mol_type = other DNA

SEQ ID NO: 100649 - DNA, 120 bp, synthetic construct; identical to SEQ ID NO: 33215
  source 1..120: mol_type = other DNA

SEQ ID NO: 100650 - DNA, 120 bp, synthetic construct; identical to SEQ ID NO: 33216
  source 1..120: mol_type = other DNA

SEQ ID NO: 100651 - DNA, 120 bp, synthetic construct
  source 1..120: mol_type = other DNA
acatcaggtgtgtaaacccccagtccacagtgatgatgaaataaaaataagaagccccacccagcatctttggaaaatgatcgaaaaacaaaccattaaacttcccaaaccctgacggtg

SEQ ID NO: 100652 - DNA, 120 bp, synthetic construct
  source 1..120: mol_type = other DNA
ttgcagtgaactgagatggcaccactgcactccaggctggatgacaaagtgagacactgtttccaaaaaagaagaaggaaggaggagggagaaggagaagaaagaaagaaggagaatgag

SEQ ID NO: 100653 - DNA, 120 bp, synthetic construct
  source 1..120: mol_type = other DNA
gaagaagaagagaagaagacggaagaagaaggaagaaggaagaagaagaggaagaagaagagagatttttttttttcctttgggacagagtttcactcttgttgcccaggctggtgtgca

SEQ ID NO: 100654 - DNA, 120 bp, synthetic construct; identical to SEQ ID NO: 33217
  source 1..120: mol_type = other DNA

SEQ ID NO: 100655 - DNA, 120 bp, synthetic construct; identical to SEQ ID NO: 33218
  source 1..120: mol_type = other DNA

SEQ ID NO: 100656 - DNA, 120 bp, synthetic construct
  source 1..120: mol_type = other DNA
atccaaacaatttgggaggccaaggtgggaggatcacttgagaccaggagttcaagaccaccctggaccacgtagtaagatgccatctttacaaaaatttaaaaataaaagtaaatgagc

SEQ ID NO: 100657 - DNA, 120 bp, synthetic construct; identical to SEQ ID NO: 33219
  source 1..120: mol_type = other DNA

SEQ ID NO: 100658 - DNA, 120 bp, synthetic construct; identical to SEQ ID NO: 33220
  source 1..120: mol_type = other DNA

SEQ ID NO: 100659 - DNA, 120 bp, synthetic construct; identical to SEQ ID NO: 33221
  source 1..120: mol_type = other DNA

SEQ ID NO: 100660 - DNA, 120 bp, synthetic construct; identical to SEQ ID NO: 33222
  source 1..120: mol_type = other DNA

SEQ ID NO: 100661 - DNA, 120 bp, synthetic construct; identical to SEQ ID NO: 33223
  source 1..120: mol_type = other DNA

SEQ ID NO: 100662 - DNA, 120 bp, synthetic construct; identical to SEQ ID NO: 33224
  source 1..120: mol_type = other DNA

SEQ ID NO: 100663 - DNA, 120 bp, synthetic construct; identical to SEQ ID NO: 33225
  source 1..120: mol_type = other DNA

SEQ ID NO: 100664 - DNA, 120 bp, synthetic construct; identical to SEQ ID NO: 29932
  source 1..120: mol_type = other DNA

SEQ ID NO: 100665 - DNA, 120 bp, synthetic construct
  source 1..120: mol_type = other DNA
cagggcaattaggcaggagaaggaaataaagggtattcaattaggaaaagaggaagtcaaattgtccctgtttgcagacgacatgattgtatatctagaaaaccccattgtctcagccca

SEQ ID NO: 100666 - DNA, 120 bp, synthetic construct
  source 1..120: mol_type = other DNA
acttcatgtccaaaacaccaaaagcaatggcaacaaaaaacaaaattgacaaatgggatctaattaaactaaagagcttctgcacagcaaaagaaactaccatcagagtgaacaggcaac

SEQ ID NO: 100667 - DNA, 120 bp, synthetic construct; identical to SEQ ID NO: 29933
  source 1..120: mol_type = other DNA

SEQ ID NO: 100668 - DNA, 120 bp, synthetic construct; identical to SEQ ID NO: 20547
  source 1..120: mol_type = other DNA

SEQ ID NO: 100669 - DNA, 120 bp, synthetic construct
  source 1..120: mol_type = other DNA
ctactgggaagtgaggagcccctctgcccggccagccgccccgtctgggaggtgaggggcgcctctgcccggccgcccctactgggaagtgaggagcccctctgcccggccaccaccccg

SEQ ID NO: 100670 - DNA, 120 bp, synthetic construct; identical to SEQ ID NO: 20548
  source 1..120: mol_type = other DNA

SEQ ID NO: 100671 - DNA, 120 bp, synthetic construct; identical to SEQ ID NO: 7299
  source 1..120: mol_type = other DNA

SEQ ID NO: 100672 - DNA, 120 bp, synthetic construct; identical to SEQ ID NO: 7300
  source 1..120: mol_type = other DNA

SEQ ID NO: 100673 - DNA, 120 bp, synthetic construct
  source 1..120: mol_type = other DNA
aagtaaagcacaactcagcaaatgtaaaagaacagaaatgataacaaactgtctctcagaccacaatgcaatcaaactagaactcaggattaagaaactcactcaaaaccgctcaactac

SEQ ID NO: 100674 - DNA, 120 bp, synthetic construct
  source 1..120: mol_type = other DNA
cagaaaatgagagaatcctccctaactcattttatgaggacagcatcatcctgataccaaagcctggcagagacacaacgaaaaaagaatattttagaccaatatccctgatgaacagcg

SEQ ID NO: 100675 - DNA, 120 bp, synthetic construct; identical to SEQ ID NO: 13115
  source 1..120: mol_type = other DNA

SEQ ID NO: 100676 - DNA, 120 bp, synthetic construct
  source 1..120: mol_type = other DNA
aaataaaaaaattattcatttttgtgaaaaaaagacatctatccctatccctatccctatccctatccctctctccccacggtctccctctccctctctttccacagtctccctctgatg

SEQ ID NO: 100677 - DNA, 120 bp, synthetic construct
  source 1..120: mol_type = other DNA
cgccccatccaggaggtggggggcgcctctgcccggccgccccttctgggaagtgaggagcccctctgcccggccaccaccccatctgggaggtgtacccaacagctcattgagaacggg

SEQ ID NO: 100678 - DNA, 120 bp, synthetic construct
  source 1..120: mol_type = other DNA
ttgaagagagcagtggttctcccagcacgcagctggagatctgagaacgggcagcctgcctcaagtgggtccctgacccctgacctccgagcagcctaactgggaggcaccccccagcag

SEQ ID NO: 100679 - DNA, 120 bp, synthetic construct
  source 1..120: mol_type = other DNA
gggttaccctcaaagggaagcccatcagactaacagctgatctctcagcagaaactctacaagccagaagagagtgggggccaatattcaacattcttaaagaaaagaattttcaaccca

SEQ ID NO: 100680 - DNA, 120 bp, synthetic construct
  source 1..120: mol_type = other DNA
catttttttcagcaccacaccacacctattccaaaattgaccacatacttggaagtaaagctctcctcagcaaatgtaaaagaacagaaattataacaaactatctctcagaccacatgc

SEQ ID NO: 100681 - DNA, 120 bp, synthetic construct
  source 1..120: mol_type = other DNA
aaaaaagagaattttagaccaatatccttgatgaacattgatgcaaaaatcctcaacaaaatactggcaaaccgaatccagcagcacatcaaaaagcttatccaccatgatcaagtgggc

SEQ ID NO: 100682 - DNA, 120 bp, synthetic construct
  source 1..120: mol_type = other DNA
actactttaaagttcatatggaaccaaaaaagagcccgcatcaccaagtcaatcctgagccaaaagaacaaagctggaggcatcacactacctgacttcaaactatactacaaggctaca

SEQ ID NO: 100683 - DNA, 120 bp, synthetic construct
  source 1..120: mol_type = other DNA
gatctagaactacaaataccatttgacccagccatcccattacggggtatatacccaaaggactataaatcatgcggctataaagacacatgcacacgtatgtttattgcggcattattc

SEQ ID NO: 100684 - DNA, 120 bp, synthetic construct
  source 1..120: mol_type = other DNA
ttattcacttcttccttcaggatttgagaccaggcaggtaacaggggtgggggggggggggtgctgattatttaaaaatgagctagtaagtatggtcagatctcaaaaattgtttcttaa

SEQ ID NO: 100685 - DNA, 120 bp, synthetic construct; identical to SEQ ID NO: 19578
  source 1..120: mol_type = other DNA

SEQ ID NO: 100686 - DNA, 120 bp, synthetic construct; identical to SEQ ID NO: 19579
  source 1..120: mol_type = other DNA

SEQ ID NO: 100687 - DNA, 120 bp, synthetic construct; identical to SEQ ID NO: 30047
  source 1..120: mol_type = other DNA

SEQ ID NO: 100688 - DNA, 120 bp, synthetic construct; identical to SEQ ID NO: 30048
  source 1..120: mol_type = other DNA

SEQ ID NO: 100689 - DNA, 120 bp, synthetic construct
  source 1..120: mol_type = other DNA
tgtaaccccaacactttgagaggtcatcatgggatgattgcttgagaccaggaatttgaggccagcctgggcaacatagtgagaatacaaagaactaaaaaaaaaaccatgcttaaggaa

SEQ ID NO: 100690 - DNA, 120 bp, synthetic construct; identical to SEQ ID NO: 34276
  source 1..120: mol_type = other DNA

SEQ ID NO: 100691 - DNA, 120 bp, synthetic construct
  source 1..120: mol_type = other DNA
tattaatgcaaaaatcctcaataaaatactggcaaaccgaatccagcagcacatcaaaaagcttatccaccatgatcaagtgggcttcatccctgggatgcaaggctggttcaatatatg

SEQ ID NO: 100692 - DNA, 120 bp, synthetic construct
  source 1..120: mol_type = other DNA
atggtaccggtaccaaaagagagatatagatcaatggaacagaacagagccctcagaaataatgccacatatctacaactatctgatctttgacaaacctgagaaaaacaagcaatgggg

SEQ ID NO: 100693 - DNA, 120 bp, synthetic construct
  source 1..120: mol_type = other DNA
atctacattaactcttaaaatgagacatttgctcatatctgccctgttacctggggggagggaggagggatagcattaggagatagacctaatgtaaatgacgagttaatgggtgcagca

SEQ ID NO: 100694 - DNA, 120 bp, synthetic construct; identical to SEQ ID NO: 23315
  source 1..120: mol_type = other DNA

SEQ ID NO: 100695 - DNA, 120 bp, synthetic construct
  source 1..120: mol_type = other DNA
tctgggaggggtacccaacagctcattgagaacaggccaggatgacaatggcggctttgtggaatagaaaggcgggaaaggtggggaaaagattgagaaatcggatggttgccgtgtctg

SEQ ID NO: 100696 - DNA, 120 bp, synthetic construct
  source 1..120: mol_type = other DNA
ggctgttaactgacagcttttccacaggaggcctggtagtgtcagagcctttaatggcaatcgacacttgggactgacaagacctccatccctgtggcaacatccaaatgcatgaaaaga

SEQ ID NO: 100697 - DNA, 120 bp, synthetic construct
  source 1..120: mol_type = other DNA
aggttgcagtgagccaagatcgtgccactgcactccagcctgggtgacaggaataaacaaaacaaaaccatagagaaaaatatcaaccaagtcccagtgaagaaaaattagcaggaaaat

SEQ ID NO: 100698 - DNA, 120 bp, synthetic construct
  source 1..120: mol_type = other DNA
cagacggggcagctgccgggcggaggggctcctcacttctcagacggggtggttgccaggcagagggtctcctcacttctcagacggggcggccgggcagagacgctcctcacctcccag

SEQ ID NO: 100699 - DNA, 120 bp, synthetic construct; identical to SEQ ID NO: 33615
  source 1..120: mol_type = other DNA

SEQ ID NO: 100700 - DNA, 120 bp, synthetic construct; identical to SEQ ID NO: 6552
  source 1..120: mol_type = other DNA

SEQ ID NO: 100701 - DNA, 120 bp, synthetic construct; identical to SEQ ID NO: 33617
  source 1..120: mol_type = other DNA

SEQ ID NO: 100702 - DNA, 120 bp, synthetic construct; identical to SEQ ID NO: 33618
  source 1..120: mol_type = other DNA

SEQ ID NO: 100703 - DNA, 120 bp, synthetic construct
  source 1..120: mol_type = other DNA
tcttttgtctgcataaatgtcttattttgagaattgtctgttcatatcctccgcccacttcttaatggggttgtttgcttatttcttgtaaatttgtttgagttctttgtagattctgga

SEQ ID NO: 100704 - DNA, 120 bp, synthetic construct
  source 1..120: mol_type = other DNA
cttaaggagattttgggctgagacaatggggttttctagatatacaatcatgtcatctgcaaacagggacaatttgacttcctcttttcctaattgaataccctttatttatttccttct

SEQ ID NO: 100705 - DNA, 120 bp, synthetic construct; identical to SEQ ID NO: 33620
  source 1..120: mol_type = other DNA

SEQ ID NO: 100706 - DNA, 120 bp, synthetic construct; identical to SEQ ID NO: 33621
  source 1..120: mol_type = other DNA

SEQ ID NO: 100707 - DNA, 120 bp, synthetic construct; identical to SEQ ID NO: 33622
  source 1..120: mol_type = other DNA

SEQ ID NO: 100708 - DNA, 120 bp, synthetic construct; identical to SEQ ID NO: 33623
  source 1..120: mol_type = other DNA

SEQ ID NO: 100709 - DNA, 120 bp, synthetic construct
  source 1..120: mol_type = other DNA
aattgatatagggacataagggaatgcagtttgaaactatgaattttaaaatagctatccaagggctgcgtgtggtggctcatgcctgtaatcctagcactttgggagaccgaggcaggt

SEQ ID NO: 100710 - DNA, 120 bp, synthetic construct; identical to SEQ ID NO: 31491
  source 1..120: mol_type = other DNA

SEQ ID NO: 100711 - DNA, 120 bp, synthetic construct; identical to SEQ ID NO: 31492
  source 1..120: mol_type = other DNA

SEQ ID NO: 100712 - DNA, 120 bp, synthetic construct
  source 1..120: mol_type = other DNA
atggagtctcctatgtctacttctttctacacagacacagcaacaatctgatctctctttcctttcccatttcccccttttctattcgacaaaaccgccatcgtcatcatggcccgttct

SEQ ID NO: 100713 - DNA, 120 bp, synthetic construct
  source 1..120: mol_type = other DNA
tgagccgagatggcggcagcacagtccagcctcagctcggcatcagagggagactgagaggggggagggggagggggagggagagggagaggtctttttttttcccactcccccgctctt

SEQ ID NO: 100714 - DNA, 120 bp, synthetic construct
  source 1..120: mol_type = other DNA
tgcctgtaatcccaacactttgggaggccaaggcgggcagatcgcttgagcccaggtgttcgaaaccagcctgggcaacatggcaaaaccctgtctctacaaaagatacaaaaaaaattc

SEQ ID NO: 100715 - DNA, 120 bp, synthetic construct
  source 1..120: mol_type = other DNA
cgccctgttcgggaggtggggggcgcctccacccagccaccaccccgtctgggaagtgaggagcccctctgcccggccgccaccccgtctgggaggtgtacccaacagctcattgagaac

SEQ ID NO: 100716 - DNA, 120 bp, synthetic construct; identical to SEQ ID NO: 13487
  source 1..120: mol_type = other DNA

SEQ ID NO: 100717 - DNA, 120 bp, synthetic construct; identical to SEQ ID NO: 13488
  source 1..120: mol_type = other DNA

SEQ ID NO: 100718 - DNA, 120 bp, synthetic construct; identical to SEQ ID NO: 13485
  source 1..120: mol_type = other DNA

SEQ ID NO: 100719 - DNA, 120 bp, synthetic construct; identical to SEQ ID NO: 13486
  source 1..120: mol_type = other DNA

SEQ ID NO: 100720 - DNA, 120 bp, synthetic construct; identical to SEQ ID NO: 14332
  source 1..120: mol_type = other DNA

SEQ ID NO: 100721 - DNA, 120 bp, synthetic construct
  source 1..120: mol_type = other DNA
aattatctggtaaatatccagcgcttcacctgaaagatagtgcaaattggttaggatgccacctcaagaactgtaactgagagctcagaagtgagcaaaggagcttaatgctaaggtcaa

SEQ ID NO: 100722 - DNA, 120 bp, synthetic construct
  source 1..120: mol_type = other DNA
taaactgaaattagcctagaatatagcctgagtcaagagtggattctctggggccccaagtttcctgttctccaagacccactttctagtccacctcagatcctatgtgtaatgaggaac

SEQ ID NO: 100723 - DNA, 120 bp, synthetic construct
  source 1..120: mol_type = other DNA
atgaaatgagaaaaggcttctgtcatttgattttccaaatagaaaagcgtgagtaccacccttcggaacaattcccctaacctcactgcttccctcaatgatcagtcttggtatttcaca

SEQ ID NO: 100724 - DNA, 120 bp, synthetic construct
  source 1..120: mol_type = other DNA
cagaaacagagggcagactttgtctttcagcatctcaaagctaaaaaacaaagcatccaagctcttctggggcaagcccagacccctccctccatccttaacacaaagaaggttcttact

SEQ ID NO: 100725 - DNA, 120 bp, synthetic construct
  source 1..120: mol_type = other DNA
tcacggtatgagccttacccgacctcactttatccactggacgatactcagctccccttccctgcatttatagtcatcaaccactatatcatttatcacatacttaacttttagttgttg

SEQ ID NO: 100726 - DNA, 120 bp, synthetic construct
  source 1..120: mol_type = other DNA
gctcttcctgccctgcagtgtcatccacccaaaggctgtgcagcctggaagacaagcaggagtgagaaaagcagctcaggaacattctgcccaatgttcatcagaactgtcaatatgctg

SEQ ID NO: 100727 - DNA, 120 bp, synthetic construct
  source 1..120: mol_type = other DNA
tcacctgcccacctccaggactgctatactccattacccagcctcactaactggactcaaggtgagccctggctcagccaagaactggggccctatgatacaccaatcaagagcataaac

SEQ ID NO: 100728 - DNA, 120 bp, synthetic construct
  source 1..120: mol_type = other DNA
acatgccccctaagacacacagacacaagcaaacctggctccctgcataataacaaatcggaaaaacctatcacgtaccagatgtcgtaccaaacatacgacgtgccccatgtcatttaa

SEQ ID NO: 100729 - DNA, 120 bp, synthetic construct; identical to SEQ ID NO: 15640
  source 1..120: mol_type = other DNA

SEQ ID NO: 100730 - DNA, 120 bp, synthetic construct
  source 1..120: mol_type = other DNA
tgagagagtgagtgagagagtgagtgagtgagagagagagtgagtgagtgagtgagagagagagaaagagagagagagagggtgtgtgtgtgtgtgttaatttttttcctgttttccctt

SEQ ID NO: 100731 - DNA, 120 bp, synthetic construct; identical to SEQ ID NO: 15641
  source 1..120: mol_type = other DNA

SEQ ID NO: 100732 - DNA, 120 bp, synthetic construct
  source 1..120: mol_type = other DNA
agcctcagttctttcatctataaaatgggaacaatatcatcccatcctcaggggtaatgtgggaaatatagatggcaaaagtgaaaatggctgccacacgtggagtaatgactctgtgcc

SEQ ID NO: 100733 - DNA, 120 bp, synthetic construct
  source 1..120: mol_type = other DNA
ccatacctggaagttctcacgaatgtccttcatggtgcccttcacaaacagttctcgaggctccttctctaagggaggcccccctacataaagtctgtgcacctctgccagactgttgac

SEQ ID NO: 100734 - DNA, 120 bp, synthetic construct
  source 1..120: mol_type = other DNA
tatgagatttctgttatgtctgcctttttataaaaaaggaaactaagacttagagatgttaaggcgctcacagtagtcatcggtggttaaggcaggaagtgagcccaggctgtggctcaa

SEQ ID NO: 100735 - DNA, 120 bp, synthetic construct
  source 1..120: mol_type = other DNA
ggcaaaaaaaaaaaaaatgacaaatgctgctgcacacatgtacaggatgaatcatctcacggctgaaaagattctgggggacaaagagcaaatcacacaccttggagaagcaaccaccct

SEQ ID NO: 100736 - DNA, 120 bp, synthetic construct
  source 1..120: mol_type = other DNA
gtagggatccatgccattaatactagttttactgtgaatcttagaaaaatgctgatggccagagagacgtccctctagcctgatggccgaagcccttaccaacaccctttgggaagaagc

SEQ ID NO: 100737 - DNA, 120 bp, synthetic construct
  source 1..120: mol_type = other DNA
ggtagcacttagaaagttatttaaaaagaaaagagagattggatatacttgtttgggaccaaaatgcctgcttggaaggctgggggaaggaagcaatgtttctcaactaggggtggtcaa

SEQ ID NO: 100738 - DNA, 120 bp, synthetic construct
  source 1..120: mol_type = other DNA
gcggcctcgccaggcatctcccctccttgcccgaagatttgctcgtgcagccctctcgagagcatctggatgtccaatgggttgtgccgcagctgcccgccctccgaggatagcacttgc

SEQ ID NO: 100739 - DNA, 120 bp, synthetic construct
  source 1..120: mol_type = other DNA
gcgctcggcaaatggtggctgccattaccgcgaccggcgcgggcctagcgtcgagaggtgccagcgcccggattcgaacccgcagggtgggccgccgtcccccgggacccacacccacac

SEQ ID NO: 100740 - DNA, 120 bp, synthetic construct
  source 1..120: mol_type = other DNA
ggagagtggtgttcccagggagggcatgccttgccatgtgtatctcttcatctgtatatcctttataataaactagtaaatttgattacctgagttctgtgagccactctggcaaattaa

SEQ ID NO: 100741 - DNA, 120 bp, synthetic construct
  source 1..120: mol_type = other DNA
tacacagacacggcaaccatccgatttctcaatcttttccccacctttcccgcctttctattccacaaagccgccattgtcatcatggcccgttctcaatgagctgttgggcacacctcc

SEQ ID NO: 100742 - DNA, 120 bp, synthetic construct
  source 1..120: mol_type = other DNA
cttctagggcctccggcgccgcgacctcctctcaagatcgagtgaaagaatcttaaaaactgttttttccactcagggtatccctaatctgaaatttgaaatcttccaaaatccaaaaaa

SEQ ID NO: 100743 - DNA, 120 bp, synthetic construct; identical to SEQ ID NO: 26819
  source 1..120: mol_type = other DNA

SEQ ID NO: 100744 - DNA, 120 bp, synthetic construct
  source 1..120: mol_type = other DNA
ttttgtgtccctgggtacttgagattagggagtggtgatgactcttaaggagcatgctgccttcaagcatctgtttaacaaagcacatcctgcaccgcccttaatccattcaactctgag

SEQ ID NO: 100745 - DNA, 120 bp, synthetic construct
  source 1..120: mol_type = other DNA
tttctcaatagatgtagaaaaggcctttgacaaaattcaacaaccttcatgctaaaaactctcaataaattaggtattgatgggacgtatctcaaaataataagagctatctatgacaaa

SEQ ID NO: 100746 - DNA, 120 bp, synthetic construct
  source 1..120: mol_type = other DNA
gccatatgtagaaagctgaaactagatcccttccttacaccttatacaaaaattaattcaagatggattaaagacttacatgttagacctaaaaccataaaaaccctagaagaaaaccta

SEQ ID NO: 100747 - DNA, 120 bp, synthetic construct
  source 1..120: mol_type = other DNA
tcgcaaggacaaaaaaccaaacactgcatgttctcactcataggtgggaattgaacaaagagaacacatggacacaggaaggggaacatcacacaccggggactgttgcagggtgggggg

SEQ ID NO: 100748 - DNA, 120 bp, synthetic construct
  source 1..120: mol_type = other DNA
caaggtctggagtggacatctagcaaactccaacagacctgcagctgagggtcctgtctgttagaaggaaaactaacaaacagaaaggacatccacaccaaaaacccatctgtacatcac

SEQ ID NO: 100749 - DNA, 120 bp, synthetic construct
  source 1..120: mol_type = other DNA
agtaaaaagaaacgaccaaagcctccaagaaatatgagattatgtgaaaagaccaaatctatgtctcactggtgtatctgaaagtgacagggagaatggaaccaagttggaaaacactct

SEQ ID NO: 100750 - DNA, 120 bp, synthetic construct
  source 1..120: mol_type = other DNA
aaacatatatgtacccaatacaggagcacccagattcataaagcaagtcctgagtgaccttcaagagacttagactcccacacaataataatgggagactttaacaccccactatcaaca

SEQ ID NO: 100751 - DNA, 120 bp, synthetic construct
  source 1..120: mol_type = other DNA
tggataaattccacgacacacacacgctcccaagactaaaccaggaagaagttgaatctctgaatagaccaataacaggctctgaaattgtggcaataatcaatagcttaccaaccaaaa

SEQ ID NO: 100752 - DNA, 120 bp, synthetic construct
  source 1..120: mol_type = other DNA
ttaggaaaagaggaagtcaaattgtccctgtttgcagatgacatgactgtatatccagaaaaccccattgtctcagcccaaaatctccttaagctcatgagcaacttcagcaaagtctca

SEQ ID NO: 100753 - DNA, 120 bp, synthetic construct
  source 1..120: mol_type = other DNA
caaaattgacaaatgggatctaattaaactaacgagcttctgcacagcaaaagaagctaccatcagagtgaacaggcaacctacagaatgggagaaaattttcgcaacctactcatctga

SEQ ID NO: 100754 - DNA, 120 bp, synthetic construct; identical to SEQ ID NO: 24595
  source 1..120: mol_type = other DNA

SEQ ID NO: 100755 - DNA, 120 bp, synthetic construct; identical to SEQ ID NO: 20653
  source 1..120: mol_type = other DNA

SEQ ID NO: 100756 - DNA, 120 bp, synthetic construct; identical to SEQ ID NO: 20654
  source 1..120: mol_type = other DNA

SEQ ID NO: 100757 - DNA, 120 bp, synthetic construct; identical to SEQ ID NO: 20655
  source 1..120: mol_type = other DNA

SEQ ID NO: 100758 - DNA, 120 bp, synthetic construct; identical to SEQ ID NO: 15342
  source 1..120: mol_type = other DNA

SEQ ID NO: 100759 - DNA, 120 bp, synthetic construct; identical to SEQ ID NO: 15343
  source 1..120: mol_type = other DNA

SEQ ID NO: 100760 - DNA, 120 bp, synthetic construct
  source 1..120: mol_type = other DNA
cagaagataccgctctaaaaatgaaattgttaggtgaaagtgtttttgagaatttttatatatattactcactgcagagatcatgttcatttacattcccattagcaatatatccaatgc

SEQ ID NO: 100761 - DNA, 120 bp, synthetic construct; identical to SEQ ID NO: 10876
  source 1..120: mol_type = other DNA

SEQ ID NO: 100762 - DNA, 120 bp, synthetic construct
  source 1..120: mol_type = other DNA
tctactaagcaaatggaaaacaaaaaaaggcaggggtggcaatcctagtctctgataaaacagactttaaaccaacaaagatcaaaagagacaaagaaggccattacataatggtaaagg

SEQ ID NO: 100763 - DNA, 120 bp, synthetic construct
  source 1..120: mol_type = other DNA
ccttcaaaaaattaatgaatccaggagctggttttttgaaaagatcaacaaaattgacagaccgctagcaagactaataaagaagaaaagagagaagaatcaaatagatgcaataaaaaa

SEQ ID NO: 100764 - DNA, 120 bp, synthetic construct
  source 1..120: mol_type = other DNA
tcaagcagaaggaaataaagggcattcaattaggaaaagaggaagtcaaattgtccctgtttgcagatgacatgattgtatagctagaaaacccaatcgtttcagcccaaaatctcctca

SEQ ID NO: 100765 - DNA, 120 bp, synthetic construct; identical to SEQ ID NO: 13198
  source 1..120: mol_type = other DNA

SEQ ID NO: 100766 - DNA, 120 bp, synthetic construct; identical to SEQ ID NO: 13199
  source 1..120: mol_type = other DNA

SEQ ID NO: 100767 - DNA, 120 bp, synthetic construct
  source 1..120: mol_type = other DNA
ccagatggattctaccagaggtacaaggaggagctggtaccattccttctgaaactgttccaatcaatagaaaaagagggaatcctccctaactcattttatgaggccagcatcatcctg

SEQ ID NO: 100768 - DNA, 120 bp, synthetic construct
  source 1..120: mol_type = other DNA
tttaaagttcatatggaaccaaaaaagagcccgcatcgccaagtcaattctaagcccaaagaacaaagctggaggcatcacgctacctgacttcaaactaccacaagtctacagtaacca

SEQ ID NO: 100769 - DNA, 120 bp, synthetic construct
  source 1..120: mol_type = other DNA
tgggcaaaggatatgaaccgacacttctcaaaagaagacatttatgcagccaaaagacacatgaaaaaatgctcatcatcactggccatcagagaaatgcaaatcaaaaccacaatgaga

SEQ ID NO: 100770 - DNA, 120 bp, synthetic construct; identical to SEQ ID NO: 13200
  source 1..120: mol_type = other DNA

SEQ ID NO: 100771 - DNA, 120 bp, synthetic construct
  source 1..120: mol_type = other DNA
ttattgtattcaataatgttgatttaaaagaaaattgaggccaggtactgtggttcatgcctgtaatttcagcactttgggaggctgaggcaggcggatcacttgaggttgaggagttca

SEQ ID NO: 100772 - DNA, 120 bp, synthetic construct; identical to SEQ ID NO: 13202
  source 1..120: mol_type = other DNA

SEQ ID NO: 100773 - DNA, 120 bp, synthetic construct
  source 1..120: mol_type = other DNA
caccaacagtgtaaaagtgttcctatttcttcacatcctctccagcacctgttgtttcctgactttttaatgattgccattctaactggtgtgagatgatatctcatagtgcttttgatt

SEQ ID NO: 100774 - DNA, 120 bp, synthetic construct
  source 1..120: mol_type = other DNA
atggggatggcattgaatctgtaaattaccttgggcagtatggccattttcacgatattgattcttcctacccatgagcatggaatgttcttccatttgtttgtatcctcttttatttcc

SEQ ID NO: 100775 - DNA, 120 bp, synthetic construct
  source 1..120: mol_type = other DNA
aaactattgattattgccacaatttcagctcctgttattggtctattcagagattcaacttcttcctggtttagtcttgggagagtgtaggtgtcgaggaatgtatccatttcttctaga

SEQ ID NO: 100776 - DNA, 120 bp, synthetic construct
  source 1..120: mol_type = other DNA
tggagagttttgtagatgtctattaggtccgcttggtgcagagctgagttcaattcctgggtatccttgttgactttctgtctcattgatctgtctaatgttgacagtggggtgttaaat

SEQ ID NO: 100777 - DNA, 120 bp, synthetic construct
  source 1..120: mol_type = other DNA
tctgtatttcctgaatctgaacgttggcctgccttgctagattggggaagttctcctggataatatcctgcagagtgttttccaacttggttccattctcctcatcactttcaggtacac

SEQ ID NO: 100778 - DNA, 120 bp, synthetic construct
  source 1..120: mol_type = other DNA
tttgtttacctaagcaagcctgggcaatggcgggcgcccctcccccagcctcgctgccgccttgccgtttgatctcagactgctgtgctagcaatcagcgagactccgtgggcgtaggac

SEQ ID NO: 100779 - DNA, 120 bp, synthetic construct; identical to SEQ ID NO: 13203
  source 1..120: mol_type = other DNA

SEQ ID NO: 100780 - DNA, 120 bp, synthetic construct; identical to SEQ ID NO: 16344
  source 1..120: mol_type = other DNA

SEQ ID NO: 100781 - DNA, 120 bp, synthetic construct; identical to SEQ ID NO: 4026
  source 1..120: mol_type = other DNA

SEQ ID NO: 100782 - DNA, 120 bp, synthetic construct
  source 1..120: mol_type = other DNA
ccaagaagcctttctagactaaattgttccttttttcctgacagagaagaggagctgtgtcatcattccagttcttcaactccattggcagcagacagggagtcccagggagaaaagggt

SEQ ID NO: 100783 - DNA, 120 bp, synthetic construct
  source 1..120: mol_type = other DNA
ctgacctcaagtgatccagctggcttggcctcccaaagtgctgagattaccggtgtgagccaccatgcctagccttcccgttttttctgattggcctgacttcttctttttcactttggt

SEQ ID NO: 100784 - DNA, 120 bp, synthetic construct
  source 1..120: mol_type = other DNA
cccacgtttaacagcgccagagcccgcatcaggaagtgttagagaaggggtgctgcgacgctcaggatctgaagcctggctcgtagctgccctgagcctcgccttcctcatctgtcagat

SEQ ID NO: 100785 - DNA, 120 bp, synthetic construct; identical to SEQ ID NO: 29483
  source 1..120: mol_type = other DNA

SEQ ID NO: 100786 - DNA, 120 bp, synthetic construct
  source 1..120: mol_type = other DNA
cgtacgtgcctacgcccatccatcctatctttggcggtgccacgcactcggcgtttgggttgaaagccacggcttcggccttcggcgctcccgccagctcacagcccgcctttggcggct

SEQ ID NO: 100787 - DNA, 120 bp, synthetic construct
  source 1..120: mol_type = other DNA
gtgagccaagatcatgccactgtactccggcctgggtgacagagcaagactctgtctcaaaaaacaaaccgtaagctgaatatgggggtgggcacagcacaagtggacatgcctttcagg

SEQ ID NO: 100788 - DNA, 120 bp, synthetic construct
  source 1..120: mol_type = other DNA
agccatccctgcagaggggctgccagagagggcctcgggcaggcagccagagccagtcagggcaaggccggggaagggaggggaccacggggcatcacaaaagacgcgggacggacaaac

SEQ ID NO: 100789 - DNA, 120 bp, synthetic construct
  source 1..120: mol_type = other DNA
caggggctcgacagcgactgcaggcccgaaggcagcacacccgcaaaaagtagcctttgtcccctgtccctgttccccccaccccttccctaaatctggaccttggcacctgctaggaag

SEQ ID NO: 100790 - DNA, 120 bp, synthetic construct
  source 1..120: mol_type = other DNA
tctgtgtattgctctttgaatcgagtttggaggaagagttgagttgtatgagtggcggcatgttggtagtgccggacttcctgtttcaagttttctggggcctcgctaattgaatgtgga

SEQ ID NO: 100791 - DNA, 120 bp, synthetic construct
  source 1..120: mol_type = other DNA
atgagtgtggatgtgtacagtacacgcactggacggcagcgggaggctgggactttccattacaaatagagacttcattcctgttgagtctagttggaatttttagtatgaatgtgagat

SEQ ID NO: 100792 - DNA, 120 bp, synthetic construct
  source 1..120: mol_type = other DNA
ggacctctgagtccctcagccacgccttctcaccatctcacccgagccactgcaggaaggatccagcaggacatagtggacctcacgatagcgcggatctaagggggagaccgccaggaa

SEQ ID NO: 100793 - DNA, 120 bp, synthetic construct
  source 1..120: mol_type = other DNA
tcaacagggtgataagggaatccgggatccgcagttgagggaatgggttgtcaagccagacttatgggtcaggagccccctctactgtttaccagcagtgggagcctgggcaagtgattc

SEQ ID NO: 100794 - DNA, 120 bp, synthetic construct
  source 1..120: mol_type = other DNA
acaattggttggctgagatgctgttaatttgtgactttgccccaaatttgagctcacaaaaacatgtgttgtatggaatcaaggtttaaaggatctagggctgtgcaggacatgccttgt

SEQ ID NO: 100795 - DNA, 120 bp, synthetic construct
  source 1..120: mol_type = other DNA
gcactccatccagcctgggaaacaagagcaaaactctctcaaaaaaaaaaaaaaaaaaaaaaggcttagcagaggagtaatgcatcagatctgcctttagagcttcctacagtcaacctc

SEQ ID NO: 100796 - DNA, 120 bp, synthetic construct
  source 1..120: mol_type = other DNA
acttctcttcccagtaccccagacacctccctagatgaggacagccagggctctaagctctcacctggaagcccgaccctgataggagaaaccttgtctcttgaaataactacataaacg

SEQ ID NO: 100797 - DNA, 120 bp, synthetic construct
  source 1..120: mol_type = other DNA
acaccaaaaatgtcggtttataattactttgatcctagtaacacgcaatttctttttttttttttttgccggagtcttactcttgtcgcccaggctggagcacagtggtgcgaccttgac

SEQ ID NO: 100798 - DNA, 120 bp, synthetic construct
  source 1..120: mol_type = other DNA
atttggttattgtagctctgggcttttaccaatttcacaggttaaaaatagtatctaagacaggcgtggcagctcatgcctgtaatcccagcactttgagaggccgaggaaggcagatca

SEQ ID NO: 100799 - DNA, 120 bp, synthetic construct; identical to SEQ ID NO: 29296
  source 1..120: mol_type = other DNA

SEQ ID NO: 100800 - DNA, 120 bp, synthetic construct; identical to SEQ ID NO: 29297
  source 1..120: mol_type = other DNA

SEQ ID NO: 100801 - DNA, 120 bp, synthetic construct
  source 1..120: mol_type = other DNA
cacctgcctctgcctcccaaagtgctgagattacaggcgtgagccacggcgcctggccctaggtatatgctattctaaatagtgccttcatatatgctattctaaatagtgccttcaaaa

SEQ ID NO: 100802 - DNA, 120 bp, synthetic construct
  source 1..120: mol_type = other DNA
ctggagcacattgtgaagaaaaatgcaaggtttatggtttttattgttttaattttattactttaactacaggtaaggtcttgctatgttgcccaggctggtccgaaactcctgggctca

SEQ ID NO: 100803 - DNA, 120 bp, synthetic construct
  source 1..120: mol_type = other DNA
aagatggtgttttcatctctgcttcctccacagaccagcagcaaagtagatggcacagagcggacactgcaaatagtctcgtaagtgctgagcctaattacaaagccactaaactgtcac

SEQ ID NO: 100804 - DNA, 120 bp, synthetic construct
  source 1..120: mol_type = other DNA
gtccctctcagggacttagtttctttgattctccaagtcacagcagcacaaagcctaagagccaggttcgtttcccacctttcctcacccccttctgtccacgtagcaaatgaaaactgc

SEQ ID NO: 100805 - DNA, 120 bp, synthetic construct
  source 1..120: mol_type = other DNA
catgatcttcgctcactgccacctccacctcctgggttgaaacattcttctgcctcagcctcccgagcagctgggattacaggtgggtaccaccatgcccggctaattttttggtatttt

SEQ ID NO: 100806 - DNA, 120 bp, synthetic construct; identical to SEQ ID NO: 29482
  source 1..120: mol_type = other DNA

SEQ ID NO: 100807 - DNA, 120 bp, synthetic construct; identical to SEQ ID NO: 29483
  source 1..120: mol_type = other DNA

SEQ ID NO: 100808 - DNA, 120 bp, synthetic construct; identical to SEQ ID NO: 29484
  source 1..120: mol_type = other DNA

SEQ ID NO: 100809 - DNA, 120 bp, synthetic construct
  source 1..120: mol_type = other DNA
gagccactgaactccagcctgggtgacagagggatgttgtctcaaaaaacaaaaacaaaaataagttagaaaaaaaaacagaagaaacttgtccttagcgttcctaagacttaggagagc

SEQ ID NO: 100810 - DNA, 120 bp, synthetic construct; identical to SEQ ID NO: 29485
  source 1..120: mol_type = other DNA

SEQ ID NO: 100811 - DNA, 120 bp, synthetic construct; identical to SEQ ID NO: 29486
  source 1..120: mol_type = other DNA

SEQ ID NO: 100812 - DNA, 120 bp, synthetic construct
  source 1..120: mol_type = other DNA
attctgctcttttatatgcctgtaatcccatgttttttaaaccattgtgctctggcctttcttgctgtttgagcgtaacttcaactgttattgccgtgagcagtcttctcaagctcctcc

SEQ ID NO: 100813 - DNA, 120 bp, synthetic construct
  source 1..120: mol_type = other DNA
cctaggctggtctcaaaactcttgggctcaagtgatcctcccaccttggcctcccaaagtgttgggattacaggcatgcaccaccacacctggctaatttttgtattccttttttttttt

SEQ ID NO: 100814 - DNA, 120 bp, synthetic construct
  source 1..120: mol_type = other DNA
ctgagatcgggccactgcactccagcctgggggacagagacagactccaactcaaaaaaaaaaaaaaaaagacactagaactggtggttacccaaataactgaacaccacaaaattccga

SEQ ID NO: 100815 - DNA, 120 bp, synthetic construct
  source 1..120: mol_type = other DNA
atactgggtctgatggatcggatagcgtcttcgaggtgttattacaaaccgatctggtaaagtcccacgatccctgcagagaatgcgagacaaatcatggaaacaaagtataaaagaatg

SEQ ID NO: 100816 - DNA, 120 bp, synthetic construct
  source 1..120: mol_type = other DNA
gccgcggtagtccccacggccagccaggccagcgcagccgcagcaggcacgaggtacagtaggaggccgaccagcgacaggccgagaagcgccgccccggccggccctgacactcgctat

SEQ ID NO: 100817 - DNA, 120 bp, synthetic construct
  source 1..120: mol_type = other DNA
ctgtttagtaaggaagatgtgtaagtaaaagattgcaattcaatgttatcagtgtgataacgggaacaaaaaaagaggccagacgcagtggctcatgcctgtattcccagcacttcgaag

SEQ ID NO: 100818 - DNA, 120 bp, synthetic construct
  source 1..120: mol_type = other DNA
agccctcggggcactcctgtgtttagaggtaaagagatgaatacacaaagggcacaagtcatgtaggaaatatagataaatatgactacattaaaagttagtacttctgggccgggagtg

SEQ ID NO: 100819 - DNA, 120 bp, synthetic construct; identical to SEQ ID NO: 1606
  source 1..120: mol_type = other DNA

SEQ ID NO: 100820 - DNA, 120 bp, synthetic construct
  source 1..120: mol_type = other DNA
cacgcctgtaatcccagcactttggggggccgaggtgggtggatcatgaggtcaggagatcgagaccatcctggctaccacggtgaaacgccatctctattaaaatacaaaaaattagcc

SEQ ID NO: 100821 - DNA, 120 bp, synthetic construct
  source 1..120: mol_type = other DNA
cccagagttcgagaacagcctgggcaacatagtgagaccctgtctctaaaaaaaaaaacaaaaattaggccaggagcagtggctcacgcctgtaatcccagcactttgggaggccgaggc

SEQ ID NO: 100822 - DNA, 120 bp, synthetic construct
  source 1..120: mol_type = other DNA
agccgagatggcgccactgcactccagcctgggcaacaagagtgaaactctgtctcaaaaaaaaaaaaccaaataattattagaaacaactctgaaaaacagccaaagccttacaacaac

SEQ ID NO: 100823 - DNA, 120 bp, synthetic construct
  source 1..120: mol_type = other DNA
cctataatcccagcactttgggaggctgaggcaggcagatcgcctgaagttaggagttcgagaccagcctggccaacatggccaggcccgtctctactaaaaatacaaaaattagccagg

SEQ ID NO: 100824 - DNA, 120 bp, synthetic construct; identical to SEQ ID NO: 1607
  source 1..120: mol_type = other DNA

SEQ ID NO: 100825 - DNA, 120 bp, synthetic construct
  source 1..120: mol_type = other DNA
ctgcatagcaaaagaaactagcatccaagtgaacaggcagcctacagaacgagagaaaatttttgcaatctacccatctgacaaaggtcagatccagaatcttgtatattcttgtagatc

SEQ ID NO: 100826 - DNA, 120 bp, synthetic construct; identical to SEQ ID NO: 1608
  source 1..120: mol_type = other DNA

SEQ ID NO: 100827 - DNA, 120 bp, synthetic construct
  source 1..120: mol_type = other DNA
gaggttgtggtgagccgagatcatgccatcgcactccagcctgggcaacaagagcaaaactcggactcaaaaaaaaaaaaaaaagacacagtctcattccttaatgagtataaagaagta

SEQ ID NO: 100828 - DNA, 120 bp, synthetic construct
  source 1..120: mol_type = other DNA
ccggacccccttagaagaggagcagcctccagtcagcggtgtcccaggaacacagaggctggagaggacaatggcagccaatccctgctcccaatctggtgacagtagggaaaagctgca

SEQ ID NO: 100829 - DNA, 120 bp, synthetic construct
  source 1..120: mol_type = other DNA
ctcccaagtagctgggactacaggcatgcaccaccatgcccggctaattttgtgtgtgtattttagtggagatggggtttcaccatgttggccaggatggtctcgatctcctgacttcat

SEQ ID NO: 100830 - DNA, 120 bp, synthetic construct; identical to SEQ ID NO: 1609
  source 1..120: mol_type = other DNA

SEQ ID NO: 100831 - DNA, 120 bp, synthetic construct; identical to SEQ ID NO: 1610
  source 1..120: mol_type = other DNA

SEQ ID NO: 100832 - DNA, 120 bp, synthetic construct
  source 1..120: mol_type = other DNA
ctgcagtgagctatgactgggccattgcactccagccagggcaacagagcaagaccctgtctccaaacaacaacaaaaacaaaaacaaattggcctctgggttgcacaaaggtgggggag

SEQ ID NO: 100833 - DNA, 120 bp, synthetic construct
  source 1..120: mol_type = other DNA
caggagaatcacttgaaccagggaggtggaggttgcagtgagctgagatcacaccagtgcactccagcctgggcgatggagtgagactctgtctcaaaaaaaaaaaaaaaaaaaaagaaa

SEQ ID NO: 100834 - DNA, 120 bp, synthetic construct
  source 1..120: mol_type = other DNA
gagctagaaagagtgattggaatcagctcttttggaattctgaaacatgaccaggaactcctaacaaccagagacatacttaaacaatgaagagagaggctgctgatcttcacgagtgag

SEQ ID NO: 100835 - DNA, 120 bp, synthetic construct
  source 1..120: mol_type = other DNA
aggtgcaatcggcttactgcaacctccgcctcctgggttcaagcaattttcctgcctcagcttccaagtagctgggattacaggcatgcaccaccacgcctggctaatttttgtgttttt

SEQ ID NO: 100836 - DNA, 120 bp, synthetic construct
  source 1..120: mol_type = other DNA
gaagagggtacttgcttcttgttagctttccaccatgattgtaagtctcctgaggcctccccagccaagtggaactgtgagtcaattaaacctcctttctttataaattacccaggctca

SEQ ID NO: 100837 - DNA, 120 bp, synthetic construct
  source 1..120: mol_type = other DNA
acctgggaggcagaggctgcagtgagccaagatcgtgccattgtacttcagcctaggcgacagggcaagactccacctcaaaaaaataaataaaaagttgtacacagactggctaagccc

SEQ ID NO: 100838 - DNA, 120 bp, synthetic construct
  source 1..120: mol_type = other DNA
agtgctgggattacaggcgtgaggcaccacgcctggactctttttttctttttaattttactttttctttttttggggaaaagggattagaggtgtgagtcactgtgcctgactccaatt

SEQ ID NO: 100839 - DNA, 120 bp, synthetic construct
  source 1..120: mol_type = other DNA
atgaaactatcctgtctacagttcttttttttttttttggatggagtttcactcttgttgtctaagctggggtgcaatggcgtgatctcagctcattgaaacctctgcctaccgggttca

SEQ ID NO: 100840 - DNA, 120 bp, synthetic construct
  source 1..120: mol_type = other DNA
catttgacacatatattttatttggtttattattgttactttttgagacagtgtcttgctctgttgcccaggatggagtacagtggcacaatctcggctcactgcaaccttagcctccca

SEQ ID NO: 100841 - DNA, 120 bp, synthetic construct; identical to SEQ ID NO: 29504
  source 1..120: mol_type = other DNA

SEQ ID NO: 100842 - DNA, 120 bp, synthetic construct
  source 1..120: mol_type = other DNA
tgccaggatggtctcgatctcctgacctcgtgatccgcccacctcggcctcccaaagtgctgggattacaggcatgagccaccgtgcctggccatgttacgtgtttttttaaccacaatt

SEQ ID NO: 100843 - DNA, 120 bp, synthetic construct; identical to SEQ ID NO: 29505
  source 1..120: mol_type = other DNA

SEQ ID NO: 100844 - DNA, 120 bp, synthetic construct
  source 1..120: mol_type = other DNA
ctcctgaccttgtgatccgcccgcctcggcctcctaaagtgctgggattacaggcgttagccaccgcgcccggccaagtccaaggtatttttaaagcaaggaaggaaagaaaatggaaga

SEQ ID NO: 100845 - DNA, 120 bp, synthetic construct; identical to SEQ ID NO: 29506
  source 1..120: mol_type = other DNA

SEQ ID NO: 100846 - DNA, 120 bp, synthetic construct; identical to SEQ ID NO: 29507
  source 1..120: mol_type = other DNA

SEQ ID NO: 100847 - DNA, 120 bp, synthetic construct; identical to SEQ ID NO: 29508
  source 1..120: mol_type = other DNA

SEQ ID NO: 100848 - DNA, 120 bp, synthetic construct; identical to SEQ ID NO: 29509
  source 1..120: mol_type = other DNA

SEQ ID NO: 100849 - DNA, 120 bp, synthetic construct; identical to SEQ ID NO: 29510
  source 1..120: mol_type = other DNA

SEQ ID NO: 100850 - DNA, 120 bp, synthetic construct
  source 1..120: mol_type = other DNA
acccctgcactccagcctgggggacagagtgagactctgtctctaaataaataaataaataaataaataaataaataaatacagtttaattaacaacaacgtaatagatagtgtgtggca

SEQ ID NO: 100851 - DNA, 120 bp, synthetic construct; identical to SEQ ID NO: 29511
  source 1..120: mol_type = other DNA

SEQ ID NO: 100852 - DNA, 120 bp, synthetic construct; identical to SEQ ID NO: 29512
  source 1..120: mol_type = other DNA

SEQ ID NO: 100853 - DNA, 120 bp, synthetic construct
  source 1..120: mol_type = other DNA
gcctataatcctagcactttgggacaccgaggcgggcagactgcctgagctcaggagttcgacatgcatgacacggtgaaagccagtctctactaaaatacaaaaaaaattagcgaggtg

SEQ ID NO: 100854 - DNA, 120 bp, synthetic construct; identical to SEQ ID NO: 29513
  source 1..120: mol_type = other DNA

SEQ ID NO: 100855 - DNA, 120 bp, synthetic construct
  source 1..120: mol_type = other DNA
gggtttcaccatgttggccaggctggtctcaaattctggcctcaagtgatccgcctgcctgggccaacatggcaaaaccccgtctctacttaaaaataacaaaaaaaattagccaggcat

SEQ ID NO: 100856 - DNA, 120 bp, synthetic construct; identical to SEQ ID NO: 29514
  source 1..120: mol_type = other DNA

SEQ ID NO: 100857 - DNA, 120 bp, synthetic construct
  source 1..120: mol_type = other DNA
gaaatgaatgaaatgaagcgtgaagagaagtttagagaaaaaataataagaaatgaacaaagcctctaagaaatgtgggactatgtgaaaagaccaaatctacgtctgattggtgtacct

SEQ ID NO: 100858 - DNA, 120 bp, synthetic construct
  source 1..120: mol_type = other DNA
taaacttcccttcttgcttcatttctttcatttcgtcttccatcactgataccctttcttccagttgattgcatcgactcctgaggcttcttcactcttcatgtagttctcgagccttgg

SEQ ID NO: 100859 - DNA, 120 bp, synthetic construct
  source 1..120: mol_type = other DNA
ggctgctttgtttacctaagcaagcctgagcaatggcgggcacccctcccccaggctcgctgcggccttgcagtttgatctcagactgctgtgctagcaatcagtgagactccgtgggcg

SEQ ID NO: 100860 - DNA, 120 bp, synthetic construct; identical to SEQ ID NO: 33035
  source 1..120: mol_type = other DNA

SEQ ID NO: 100861 - DNA, 120 bp, synthetic construct; identical to SEQ ID NO: 33036
  source 1..120: mol_type = other DNA

SEQ ID NO: 100862 - DNA, 120 bp, synthetic construct; identical to SEQ ID NO: 14506
  source 1..120: mol_type = other DNA

SEQ ID NO: 100863 - DNA, 120 bp, synthetic construct
  source 1..120: mol_type = other DNA
tgtaatcccagcactttgggaggccgaggggggcgaatcacgaggtcaagagttcaaggtgactatagggagaaaaattatatttcaatagaaaaacgatagtttacctgttattatagt

SEQ ID NO: 100864 - DNA, 120 bp, synthetic construct; identical to SEQ ID NO: 29584
  source 1..120: mol_type = other DNA

SEQ ID NO: 100865 - DNA, 120 bp, synthetic construct
  source 1..120: mol_type = other DNA
tcactgcaacctccatctcctgggttcaagtgattctcctgcctcagcttccccagtggctgggactacaggcacccaccacacacctgactaatttttatatttttagtagagatgggg

SEQ ID NO: 100866 - DNA, 120 bp, synthetic construct
  source 1..120: mol_type = other DNA
ctcagccccctgaaacctctgcctctcccgggttcaggcaattctcctgcttcagcctcccagctagctgggattacaggcacccaccacgatgcccagctaattttttgtatttttagt

SEQ ID NO: 100867 - DNA, 120 bp, synthetic construct; identical to SEQ ID NO: 29585
  source 1..120: mol_type = other DNA

SEQ ID NO: 100868 - DNA, 120 bp, synthetic construct; identical to SEQ ID NO: 29586
  source 1..120: mol_type = other DNA

SEQ ID NO: 100869 - DNA, 120 bp, synthetic construct
  source 1..120: mol_type = other DNA
catcatcttttttgtagagacagggtcttgctatgttgcccaggctggtcgagaactcatggggctcaagcgatttccctggcctcagcctccccaagtgctaggattataggcacaacc

SEQ ID NO: 100870 - DNA, 120 bp, synthetic construct; identical to SEQ ID NO: 29587
  source 1..120: mol_type = other DNA

SEQ ID NO: 100871 - DNA, 120 bp, synthetic construct; identical to SEQ ID NO: 29588
  source 1..120: mol_type = other DNA

SEQ ID NO: 100872 - DNA, 120 bp, synthetic construct
  source 1..120: mol_type = other DNA
caccaggctagtttttgtatttgtagtagagatggggtttccccatgttggccaggcttgtcttgaactcctggcctcaagtgatccacctgccttggcctcacaaagtgctgggattat

SEQ ID NO: 100873 - DNA, 120 bp, synthetic construct
  source 1..120: mol_type = other DNA
gctacttgggaggctggaatggaagaattgcttgaacctgggagatgggaagttgcagtgagctgagattacgccattgcactctagcctgggcaacaagagtgacactccatttccccc

SEQ ID NO: 100874 - DNA, 120 bp, synthetic construct; identical to SEQ ID NO: 29589
  source 1..120: mol_type = other DNA

SEQ ID NO: 100875 - DNA, 120 bp, synthetic construct; identical to SEQ ID NO: 29590
  source 1..120: mol_type = other DNA

SEQ ID NO: 100876 - DNA, 120 bp, synthetic construct; identical to SEQ ID NO: 29591
  source 1..120: mol_type = other DNA

SEQ ID NO: 100877 - DNA, 120 bp, synthetic construct; identical to SEQ ID NO: 29592
  source 1..120: mol_type = other DNA

SEQ ID NO: 100878 - DNA, 120 bp, synthetic construct
  source 1..120: mol_type = other DNA
cctaaagtgctgagattacaggcatgagccaccacgcctgactgaatttttaaagatttagagagggctgtcagctgggcgcagtggctcatgcctctaatcccagcactttgggaggcc

SEQ ID NO: 100879 - DNA, 120 bp, synthetic construct
  source 1..120: mol_type = other DNA
tgatatcttgtctcttaaaaaaaaaaagggccgggtgcggtgtctcatgcctgtaatcctagcactttgggaggccgaggcgggcggatcacaaggtcaggagatcaagaccatcctggc

SEQ ID NO: 100880 - DNA, 120 bp, synthetic construct
  source 1..120: mol_type = other DNA
agtagctgggattacaggcgcccgccaccacgtccggctaatttttttttttgtatttttaatagagatggggtttcaccatgttggctgcaaagctatcttgcttttctttgttgtgca

SEQ ID NO: 100881 - DNA, 120 bp, synthetic construct
  source 1..120: mol_type = other DNA
ataaataaataaataaataaaacaggttgcagtgaagaagccggttaaaacccaccaagaccaagatggcgacgagagtgacctctggtcgtcctcactgctacactcccaccagcttca

SEQ ID NO: 100882 - DNA, 120 bp, synthetic construct
  source 1..120: mol_type = other DNA
gcagtagctggatcatatctcactgcagcctccaactcctgggctcaagtgatcctcccacctcagcctctggagctgggaatacaggcactcaccaccatgcctggctaattttcatat

SEQ ID NO: 100883 - DNA, 120 bp, synthetic construct; identical to SEQ ID NO: 29593
  source 1..120: mol_type = other DNA

SEQ ID NO: 100884 - DNA, 120 bp, synthetic construct; identical to SEQ ID NO: 29594
  source 1..120: mol_type = other DNA

SEQ ID NO: 100885 - DNA, 120 bp, synthetic construct; identical to SEQ ID NO: 29595
  source 1..120: mol_type = other DNA

SEQ ID NO: 100886 - DNA, 120 bp, synthetic construct; identical to SEQ ID NO: 29596
  source 1..120: mol_type = other DNA

SEQ ID NO: 100887 - DNA, 120 bp, synthetic construct; identical to SEQ ID NO: 29597
  source 1..120: mol_type = other DNA

SEQ ID NO: 100888 - DNA, 120 bp, synthetic construct; identical to SEQ ID NO: 29598
  source 1..120: mol_type = other DNA

SEQ ID NO: 100889 - DNA, 120 bp, synthetic construct; identical to SEQ ID NO: 29599
  source 1..120: mol_type = other DNA

SEQ ID NO: 100890 - DNA, 120 bp, synthetic construct
  source 1..120: mol_type = other DNA
aaagtactgggattataggcatgagccactgtgcccagcctctttatttttttgtagagatgggggtcgccacaaatcagactggaaaaactcacaatttatagggctctgtgtggagta

SEQ ID NO: 100891 - DNA, 120 bp, synthetic construct; identical to SEQ ID NO: 29600
  source 1..120: mol_type = other DNA

SEQ ID NO: 100892 - DNA, 120 bp, synthetic construct
  source 1..120: mol_type = other DNA
ttaaaatataattgaggactgatatcagcaaaagggcagagtagacagctccaagctcccatcacccaacagaaacagaaaaaaaaaaaaaaaaaggccaggcgcagtggttcacaccta

SEQ ID NO: 100893 - DNA, 120 bp, synthetic construct
  source 1..120: mol_type = other DNA
catggatgaagctggaaaccatcattctcagcaaactattgcaaggacaaaaaaccaaacaccgcatgttctcactcataggtgggaattgaacaatgagaacacgtggacacgggaagg

SEQ ID NO: 100894 - DNA, 120 bp, synthetic construct; identical to SEQ ID NO: 29522
  source 1..120: mol_type = other DNA

SEQ ID NO: 100895 - DNA, 120 bp, synthetic construct; identical to SEQ ID NO: 29523
  source 1..120: mol_type = other DNA

SEQ ID NO: 100896 - DNA, 120 bp, synthetic construct; identical to SEQ ID NO: 31499
  source 1..120: mol_type = other DNA

SEQ ID NO: 100897 - DNA, 120 bp, synthetic construct
  source 1..120: mol_type = other DNA
ctgatggccagtgatgatgagcactttttcatgtgttttttggctgcataaatgttttcttctgagaagcgtcttttcatctcctttgcccactttttgatgaggttgtttgtttttttc

SEQ ID NO: 100898 - DNA, 120 bp, synthetic construct
  source 1..120: mol_type = other DNA
cattttcacgatattgattcttcctacccatgagcatggaatgttcttccatttgtttgtatcctcttttatttccttgagcagtggtttgtagttctcctggaagaggtccttcacatc

SEQ ID NO: 100899 - DNA, 120 bp, synthetic construct
  source 1..120: mol_type = other DNA
ttcttctagattttctagtttatttgcgtagaggtgtttgtagtattctctgatggtagtttgtatttctgtgggaccggtggtgatatcccctttatcattttttattgcatctatttg

SEQ ID NO: 100900 - DNA, 120 bp, synthetic construct
  source 1..120: mol_type = other DNA
acacactcgactctttatccaatttgccagtctgtgtcttttaattggaccatttagtccatttacatttaaagttaatattgttatgtgtgaatttgatcctgtcattatgatgttagc

SEQ ID NO: 100901 - DNA, 120 bp, synthetic construct
  source 1..120: mol_type = other DNA
gctggtgaggaactgtgttcctttagaggaggagaggcgctctgcattttagagtttccagtttttctgttctgtttttttccccatctttgtggttttatctacttttggtctttgatg

SEQ ID NO: 100902 - DNA, 120 bp, synthetic construct
  source 1..120: mol_type = other DNA
atgctatccctctcccttccccccaccccacaacagtccccagagtgtgatgttccccttcctgtgtccatgtgttctcattgttcaattcccacctatgagtgagaatatgcagtgttt

SEQ ID NO: 100903 - DNA, 120 bp, synthetic construct
  source 1..120: mol_type = other DNA
taggttgcctgttcactctgatggtagtttcttttgctgtgcaggagctctttagtttaattagatcccatttgtcaattttgtcttttgttgccattgcttttggtgttttagacatga

SEQ ID NO: 100904 - DNA, 120 bp, synthetic construct
  source 1..120: mol_type = other DNA
aggttgttcagtttccatgtacttgagcggttttgagtgagtttcttaatcctgagttctggtttgattgcactgtggtctgacagacagtttgttataatttctgatcttttacatttg

SEQ ID NO: 100905 - DNA, 120 bp, synthetic construct
  source 1..120: mol_type = other DNA
agggcaggcctggtggtgacaaaatctctcagcatttgcttgtctgtaaagtattttatttctcctttgcttatgaagcttagtttggctggatatgaaattctgggttgaaaattcttt

SEQ ID NO: 100906 - DNA, 120 bp, synthetic construct
  source 1..120: mol_type = other DNA
aaagtagtaggtttccaaacttgcctctgtataaagtctttattttttaaaaaagtgcaggattcatgttctcactcataggtgggaattgaacaatgagaacacatggacacaggaagg

SEQ ID NO: 100907 - DNA, 120 bp, synthetic construct
  source 1..120: mol_type = other DNA
tctcagcaaactaacacaagaacagaaaaccaaacaccacatgatctcactcataagtaggacctgaacaatgagaacacatggacacaggaagggaaacatcacacacaagggcctgtc

SEQ ID NO: 100908 - DNA, 120 bp, synthetic construct
  source 1..120: mol_type = other DNA
tgctctccatcatcacggaagcaggaaaacttgccttgttggaaataagtaaaacttcagaaaaggagttgtatagcaaaatcaaccttagatctcaaccaaattttgggagatcaggga

SEQ ID NO: 100909 - DNA, 120 bp, synthetic construct; identical to SEQ ID NO: 540
  source 1..120: mol_type = other DNA

SEQ ID NO: 100910 - DNA, 120 bp, synthetic construct
  source 1..120: mol_type = other DNA
tcttgcacagtctttttctcatctttatgggcttatccaccttcaatctttgaggctgctgacctttggacagggtatttttcctttattatatctgatgaccttgaggatttgattgtg

SEQ ID NO: 100911 - DNA, 120 bp, synthetic construct
  source 1..120: mol_type = other DNA
ttttttaagcaagtccccctttttaggaagagaactcttagacctgatctgtgctgggcaatcttgcacgtgagatggggctggtctgacctcagcactccttaagtgctgggataaagt

SEQ ID NO: 100912 - DNA, 120 bp, synthetic construct
  source 1..120: mol_type = other DNA
gtttgttctctggaaagaagtccctttcagctatctgactttgatcacaatcatgtagagcagtagtcagtctacaatgacatgattgaatttccatttccagtgtttcctagctgtgtc

SEQ ID NO: 100913 - DNA, 120 bp, synthetic construct
  source 1..120: mol_type = other DNA
ttgcagtgaactgagtttgtgccattgcactccagcgtgggtgacagtgcaagactccatctagaatacacacacacacacacacacacacacatatatatatgcaacgtgcaagatttt

SEQ ID NO: 100914 - DNA, 120 bp, synthetic construct
  source 1..120: mol_type = other DNA
accatcagatgtcattcacacaatgtatatctgcacattaatccaagacaaggcaaaggggcctcacatctgttaaccctgctctcccagtcatgttggcaccagggactagttttgtgg

SEQ ID NO: 100915 - DNA, 120 bp, synthetic construct
  source 1..120: mol_type = other DNA
ttttccagttatcctttgatagatcactcacctccttcattaagtatattcctaggtattttactgttttgcagccattgtaaaaagaattggattcttgatatgactctcagcttggtt

SEQ ID NO: 100916 - DNA, 120 bp, synthetic construct
  source 1..120: mol_type = other DNA
cagaagctcaaacaaatcagcaggaaaaatacaaacaattccattaaaaagtgggcacatgacatgaatagacatttttcaaaagaagatgtacaaatggtgaacaagaatataaaaaca

SEQ ID NO: 100917 - DNA, 120 bp, synthetic construct; identical to SEQ ID NO: 528
  source 1..120: mol_type = other DNA

SEQ ID NO: 100918 - DNA, 120 bp, synthetic construct
  source 1..120: mol_type = other DNA
taaatagtgaataaccacaatattgggcttttctctctaaataaaaaaataatataaagaatgtagcttattataaagagccaaaacaatttttaaaatgcatgtaattaccgggcaaaa

SEQ ID NO: 100919 - DNA, 120 bp, synthetic construct; identical to SEQ ID NO: 529
  source 1..120: mol_type = other DNA

SEQ ID NO: 100920 - DNA, 120 bp, synthetic construct; identical to SEQ ID NO: 530
  source 1..120: mol_type = other DNA

SEQ ID NO: 100921 - DNA, 120 bp, synthetic construct
  source 1..120: mol_type = other DNA
tagagtcaattagctgggtgtgatgttgcacacttggggtcccagctaatagagaggctgaggtgggaggatcactagagcccagaaagtcaaggctgtagtgagctgtgatcacacaat

SEQ ID NO: 100922 - DNA, 120 bp, synthetic construct
  source 1..120: mol_type = other DNA
ctccatgacacagtgtacctatataataaacctacacatgaacttctgaagctaaaataaaagttcattaaaaagaaaaggaaatgccttttccctcacatttgccaatgccggttattt

SEQ ID NO: 100923 - DNA, 120 bp, synthetic construct; identical to SEQ ID NO: 531
  source 1..120: mol_type = other DNA

SEQ ID NO: 100924 - DNA, 120 bp, synthetic construct; identical to SEQ ID NO: 535
  source 1..120: mol_type = other DNA

SEQ ID NO: 100925 - DNA, 120 bp, synthetic construct
  source 1..120: mol_type = other DNA
aatattattcaagcaaagaaaacaacgttaaatcaaaaatttaaacttaaaattttccatgcctctggctggctattttcactgactttaagcctttgtgactcttcctctgatgtcagc

SEQ ID NO: 100926 - DNA, 120 bp, synthetic construct
  source 1..120: mol_type = other DNA
tattatgacaaatttattttcatttttctttttttttgttttagctggggtcttgctctgtcaccaggctggagtgcagtggcacaatctcagctcactgcaacctctgactccctggtt

SEQ ID NO: 100927 - DNA, 120 bp, synthetic construct
  source 1..120: mol_type = other DNA
agggctaaagatgtagaatagggcagaagtcagattatgaaagccttatgtgtacctttaagatgcttagacattaacgttcaagagtggtccctggtcctatctgtattaagatgtaga

SEQ ID NO: 100928 - DNA, 120 bp, synthetic construct
  source 1..120: mol_type = other DNA
catattgactatacctctcttctgcctctgctttatattaccacttccactgagaacataaacatttacaaaatggcttttattacaaaaaagccttccaactattaatgttatttctta

SEQ ID NO: 100929 - DNA, 120 bp, synthetic construct
  source 1..120: mol_type = other DNA
caaagcattctacctggtaaatttcccatggcccacagggtaagacctactcatttctatagtattaaaaaagtctatcataaacttgccttagctaagtattcacctcattcccaaact

SEQ ID NO: 100930 - DNA, 120 bp, synthetic construct; identical to SEQ ID NO: 541
  source 1..120: mol_type = other DNA

SEQ ID NO: 100931 - DNA, 120 bp, synthetic construct; identical to SEQ ID NO: 536
  source 1..120: mol_type = other DNA

SEQ ID NO: 100932 - DNA, 120 bp, synthetic construct
  source 1..120: mol_type = other DNA
tttaggatatgtgccgccaaagcaggcacaaagccctacttttacacatgatttgtgatgagtcatgggcaaggcttggctcttgtccatgactcatcactacttacttaacccacttga

SEQ ID NO: 100933 - DNA, 120 bp, synthetic construct
  source 1..120: mol_type = other DNA
ctgcatcagccagaaatcagacaaaaagcaagacaagttagaagtaccaatgggtgcaggattctttacctcaggacttttaagacctttatccttagagatcccaatattgttcatttc

SEQ ID NO: 100934 - DNA, 120 bp, synthetic construct
  source 1..120: mol_type = other DNA
tgacaacatattgggtggtaaatcacgttcccaatgtcacacacgtagcaagtaagaaagttaggaattaaacccagtcttgtgtgaatccaaagcgtagctcttttctctttatcaccc

SEQ ID NO: 100935 - DNA, 120 bp, synthetic construct
  source 1..120: mol_type = other DNA
ctcactcttctgtactttcccacatgccactccttcccttggaaacatcccttctctgcctcaccacattaaatctgatcatctcaaaaactcactttaaacatttactgtttccaagac

SEQ ID NO: 100936 - DNA, 120 bp, synthetic construct
  source 1..120: mol_type = other DNA
ggagcctgaggtgggtgattcacttgagcccaggagttcaagatcagcctgagaaacatggcaaaaacctcatctctactaaaaaaaaaaaaaatacaaaaacagattggaggaccacca

SEQ ID NO: 100937 - DNA, 120 bp, synthetic construct; identical to SEQ ID NO: 542
  source 1..120: mol_type = other DNA

SEQ ID NO: 100938 - DNA, 120 bp, synthetic construct
  source 1..120: mol_type = other DNA
tctggaatattttgatcagcgccatgttccagcaacattaacacacattcatcttcctggcattgtacggcctgtcagtattagaccaaaaacaaattattaagtcctaggaattcaaaa

SEQ ID NO: 100939 - DNA, 120 bp, synthetic construct; identical to SEQ ID NO: 999
  source 1..120: mol_type = other DNA

SEQ ID NO: 100940 - DNA, 120 bp, synthetic construct; identical to SEQ ID NO: 537
  source 1..120: mol_type = other DNA

SEQ ID NO: 100941 - DNA, 120 bp, synthetic construct
  source 1..120: mol_type = other DNA
atgcacctgtaatcctagctactcaggaggctgaggcaggagaattgcttgaaccagggagacggaggttgcagtgagctgagattgcaccactacactccagctgggtgatggagtgag

SEQ ID NO: 100942 - DNA, 120 bp, synthetic construct; identical to SEQ ID NO: 543
  source 1..120: mol_type = other DNA

SEQ ID NO: 100943 - DNA, 120 bp, synthetic construct
  source 1..120: mol_type = other DNA
cagaagtgcccacattgctcgtgccgctccccctgcagcaggggaagcggtggtggcaccacttgcccatcttgctcctgagatcaaatggcttcttcacagcagaggcagcgggcattg

SEQ ID NO: 100944 - DNA, 120 bp, synthetic construct; identical to SEQ ID NO: 544
  source 1..120: mol_type = other DNA

SEQ ID NO: 100945 - DNA, 120 bp, synthetic construct; identical to SEQ ID NO: 545
  source 1..120: mol_type = other DNA

SEQ ID NO: 100946 - DNA, 120 bp, synthetic construct; identical to SEQ ID NO: 539
  source 1..120: mol_type = other DNA

SEQ ID NO: 100947 - DNA, 120 bp, synthetic construct; identical to SEQ ID NO: 14733
  source 1..120: mol_type = other DNA

SEQ ID NO: 100948 - DNA, 120 bp, synthetic construct
  source 1..120: mol_type = other DNA
gtcatatatacagatgactcccttctatacaccattctgccattagttgatgtatattttacttttgcttttcccttcccatttcactactagataaaaatcctaatcttgagttctaaa

SEQ ID NO: 100949 - DNA, 120 bp, synthetic construct
  source 1..120: mol_type = other DNA
tgtcagggttgggggctagaaaagggatggcattagatcatgggttggtgcatgcagcaagccaccacagcatgtgtatacgtatgtaacaaacctgcacgttctgcacatgtaccccag

SEQ ID NO: 100950 - DNA, 120 bp, synthetic construct; identical to SEQ ID NO: 100908
  source 1..120: mol_type = other DNA

SEQ ID NO: 100951 - DNA, 120 bp, synthetic construct
  source 1..120: mol_type = other DNA
atgatgcttaattttgctggacatgaaattccgggttgaaatttcttttctttaagatgttgaatatcttttctggcttgtacagtttcagttgagaggtctgctaagtctgatggaatt

SEQ ID NO: 100952 - DNA, 120 bp, synthetic construct; identical to SEQ ID NO: 100910
  source 1..120: mol_type = other DNA

SEQ ID NO: 100953 - DNA, 120 bp, synthetic construct; identical to SEQ ID NO: 100911
  source 1..120: mol_type = other DNA

SEQ ID NO: 100954 - DNA, 120 bp, synthetic construct; identical to SEQ ID NO: 100912
  source 1..120: mol_type = other DNA

SEQ ID NO: 100955 - DNA, 120 bp, synthetic construct; identical to SEQ ID NO: 100913
  source 1..120: mol_type = other DNA

SEQ ID NO: 100956 - DNA, 120 bp, synthetic construct; identical to SEQ ID NO: 100914
  source 1..120: mol_type = other DNA

SEQ ID NO: 100957 - DNA, 120 bp, synthetic construct; identical to SEQ ID NO: 100915
  source 1..120: mol_type = other DNA

SEQ ID NO: 100958 - DNA, 120 bp, synthetic construct; identical to SEQ ID NO: 100916
  source 1..120: mol_type = other DNA

SEQ ID NO: 100959 - DNA, 120 bp, synthetic construct; identical to SEQ ID NO: 528
  source 1..120: mol_type = other DNA

SEQ ID NO: 100960 - DNA, 120 bp, synthetic construct; identical to SEQ ID NO: 100918
  source 1..120: mol_type = other DNA

SEQ ID NO: 100961 - DNA, 120 bp, synthetic construct; identical to SEQ ID NO: 529
  source 1..120: mol_type = other DNA

SEQ ID NO: 100962 - DNA, 120 bp, synthetic construct; identical to SEQ ID NO: 530
  source 1..120: mol_type = other DNA

SEQ ID NO: 100963 - DNA, 120 bp, synthetic construct; identical to SEQ ID NO: 100921
  source 1..120: mol_type = other DNA

SEQ ID NO: 100964 - DNA, 120 bp, synthetic construct; identical to SEQ ID NO: 100922
  source 1..120: mol_type = other DNA

SEQ ID NO: 100965 - DNA, 120 bp, synthetic construct; identical to SEQ ID NO: 531
  source 1..120: mol_type = other DNA

SEQ ID NO: 100966 - DNA, 120 bp, synthetic construct; identical to SEQ ID NO: 535
  source 1..120: mol_type = other DNA

SEQ ID NO: 100967 - DNA, 120 bp, synthetic construct; identical to SEQ ID NO: 100925
  source 1..120: mol_type = other DNA

SEQ ID NO: 100968 - DNA, 120 bp, synthetic construct; identical to SEQ ID NO: 100926
  source 1..120: mol_type = other DNA

SEQ ID NO: 100969 - DNA, 120 bp, synthetic construct; identical to SEQ ID NO: 100927
  source 1..120: mol_type = other DNA

SEQ ID NO: 100970 - DNA, 120 bp, synthetic construct; identical to SEQ ID NO: 100928
  source 1..120: mol_type = other DNA

SEQ ID NO: 100971 - DNA, 120 bp, synthetic construct; identical to SEQ ID NO: 100929
  source 1..120: mol_type = other DNA

SEQ ID NO: 100972 - DNA, 120 bp, synthetic construct; identical to SEQ ID NO: 532
  source 1..120: mol_type = other DNA

SEQ ID NO: 100973 - DNA, 120 bp, synthetic construct; identical to SEQ ID NO: 536
  source 1..120: mol_type = other DNA

SEQ ID NO: 100974 - DNA, 120 bp, synthetic construct; identical to SEQ ID NO: 100932
  source 1..120: mol_type = other DNA

SEQ ID NO: 100975 - DNA, 120 bp, synthetic construct; identical to SEQ ID NO: 100933
  source 1..120: mol_type = other DNA

SEQ ID NO: 100976 - DNA, 120 bp, synthetic construct
  source 1..120: mol_type = other DNA
gggtggtaaataacgttcccaatgtcacacacgtagcaagtaagaaagttaggaattaaatccagtcttgtgtgaatccaaagcctagctcttttctctctcttttttttttttccatgc

SEQ ID NO: 100977 - DNA, 120 bp, synthetic construct; identical to SEQ ID NO: 100935
  source 1..120: mol_type = other DNA

SEQ ID NO: 100978 - DNA, 120 bp, synthetic construct; identical to SEQ ID NO: 100936
  source 1..120: mol_type = other DNA

SEQ ID NO: 100979 - DNA, 120 bp, synthetic construct; identical to SEQ ID NO: 542
  source 1..120: mol_type = other DNA

SEQ ID NO: 100980 - DNA, 120 bp, synthetic construct
  source 1..120: mol_type = other DNA
tttccatactcatcttgaatatttccatcagcgccatgttccagcaacattaacacacattcatcttcctggcattgtacggcctgtcagtattagaccaaaaacaaattataagtccta

SEQ ID NO: 100981 - DNA, 120 bp, synthetic construct
  source 1..120: mol_type = other DNA
tgaaacgatacaattaaacctacactttcaggtacattttaaagattacaggtagcgctgtactgtattttattgagtctaagatggtcattgtctccatgttttaacatttcttacacg

SEQ ID NO: 100982 - DNA, 120 bp, synthetic construct; identical to SEQ ID NO: 533
  source 1..120: mol_type = other DNA

SEQ ID NO: 100983 - DNA, 120 bp, synthetic construct; identical to SEQ ID NO: 534
  source 1..120: mol_type = other DNA

SEQ ID NO: 100984 - DNA, 120 bp, synthetic construct
  source 1..120: mol_type = other DNA
tgcctgtaatcccagctacttggtaggctgaggcaaagaattacttgaaccaggaaccagaggttgtagtgagctgatattgcaccactgcactccagcctgggctatggagtgagagtc

SEQ ID NO: 100985 - DNA, 120 bp, synthetic construct
  source 1..120: mol_type = other DNA
gacttaattttgcgagttaaatcactttaaaaccgtctattagtgttctataagggaaattataattggattggaaatcagctaaagttttgtttttgtgttgctgtttataaagggacc

SEQ ID NO: 100986 - DNA, 120 bp, synthetic construct
  source 1..120: mol_type = other DNA
aaggccaagcgaggaacgcaaagcgaagcgtacccgttacaggtaagccaagccgttatgcgcgtgcggggcgcgcgtgcggggcgcgcgtgaggcgtgcgcgcctcagacgttacgcgg

SEQ ID NO: 100987 - DNA, 120 bp, synthetic construct
  source 1..120: mol_type = other DNA
tgggaggctgaggcgggtggatcataaggtcaggagataaagaccatcctggctaacacggtgaaacctcatctctactaaaaatacaaaatactagcgggcatggtcgtgggcgcctgt

SEQ ID NO: 100988 - DNA, 120 bp, synthetic construct
  source 1..120: mol_type = other DNA
agtgtgcttgctgtttagcactattcacaatagcaaagacatggaatcaacctaaatgcccattggtaatagactggatgaagaaaatgcagtacccatacaacatggaatactatgcag

SEQ ID NO: 100989 - DNA, 120 bp, synthetic construct; identical to SEQ ID NO: 14745
  source 1..120: mol_type = other DNA

SEQ ID NO: 100990 - DNA, 120 bp, synthetic construct; identical to SEQ ID NO: 14759
  source 1..120: mol_type = other DNA

SEQ ID NO: 100991 - DNA, 120 bp, synthetic construct; identical to SEQ ID NO: 14746
  source 1..120: mol_type = other DNA

SEQ ID NO: 100992 - DNA, 120 bp, synthetic construct
  source 1..120: mol_type = other DNA
cggcagcgagtgatgtttgtggctggtccacctgctcctggcacacccttgcagaggtggctggtttctctttgagccagcttggccttgcccagcatgcacaagtctcagtgcaacaac

SEQ ID NO: 100993 - DNA, 120 bp, synthetic construct
  source 1..120: mol_type = other DNA
aagctggctcaaagagcaaccagccacctctgcaagggtgtgccaggagcaggtggaccagccaccaacatcactcgctgccagacatggtacctcagttcttctatcctaaaggtaggg

SEQ ID NO: 100994 - DNA, 120 bp, synthetic construct
  source 1..120: mol_type = other DNA
gttactgtagccttgtagaatagtttgaagtcaggtaccgtgatgcctccagctttgttgtttttgcttagattgtcttggctacgcgagctcttttttggctccatatgaaatttaaag

SEQ ID NO: 100995 - DNA, 120 bp, synthetic construct
  source 1..120: mol_type = other DNA
agggacatggatgaagctggaaactgtcattctcagcaaactaacacaagaacagaaaaccaaacaccacatgatctcactcataagtaggacctgaacaatgagaacacatggacacag

SEQ ID NO: 100996 - DNA, 120 bp, synthetic construct; identical to SEQ ID NO: 100908
  source 1..120: mol_type = other DNA

SEQ ID NO: 100997 - DNA, 120 bp, synthetic construct; identical to SEQ ID NO: 100951
  source 1..120: mol_type = other DNA

SEQ ID NO: 100998 - DNA, 120 bp, synthetic construct; identical to SEQ ID NO: 100910
  source 1..120: mol_type = other DNA

SEQ ID NO: 100999 - DNA, 120 bp, synthetic construct; identical to SEQ ID NO: 100911
  source 1..120: mol_type = other DNA

SEQ ID NO: 101000 - DNA, 120 bp, synthetic construct; identical to SEQ ID NO: 100912
  source 1..120: mol_type = other DNA

SEQ ID NO: 101001 - DNA, 120 bp, synthetic construct; identical to SEQ ID NO: 100913
  source 1..120: mol_type = other DNA

SEQ ID NO: 101002 - DNA, 120 bp, synthetic construct; identical to SEQ ID NO: 100914
  source 1..120: mol_type = other DNA

SEQ ID NO: 101003 - DNA, 120 bp, synthetic construct; identical to SEQ ID NO: 100915
  source 1..120: mol_type = other DNA

SEQ ID NO: 101004 - DNA, 120 bp, synthetic construct; identical to SEQ ID NO: 100916
  source 1..120: mol_type = other DNA

SEQ ID NO: 101005 - DNA, 120 bp, synthetic construct; identical to SEQ ID NO: 528
  source 1..120: mol_type = other DNA

SEQ ID NO: 101006 - DNA, 120 bp, synthetic construct; identical to SEQ ID NO: 100918
  source 1..120: mol_type = other DNA

SEQ ID NO: 101007 - DNA, 120 bp, synthetic construct; identical to SEQ ID NO: 529
  source 1..120: mol_type = other DNA

SEQ ID NO: 101008 - DNA, 120 bp, synthetic construct; identical to SEQ ID NO: 530
  source 1..120: mol_type = other DNA

SEQ ID NO: 101009 - DNA, 120 bp, synthetic construct; identical to SEQ ID NO: 100921
  source 1..120: mol_type = other DNA

SEQ ID NO: 101010 - DNA, 120 bp, synthetic construct; identical to SEQ ID NO: 100922
  source 1..120: mol_type = other DNA

SEQ ID NO: 101011 - DNA, 120 bp, synthetic construct; identical to SEQ ID NO: 531
  source 1..120: mol_type = other DNA

SEQ ID NO: 101012 - DNA, 120 bp, synthetic construct; identical to SEQ ID NO: 535
  source 1..120: mol_type = other DNA

SEQ ID NO: 101013 - DNA, 120 bp, synthetic construct
  source 1..120: mol_type = other DNA
atcgttaaagcaaagaaaacaacattaaatcaaaaatttaaatttaaaattttccatgcctctggctggctattttcactgactttaagcctttgtgactcttcctctgatgttagcttt

SEQ ID NO: 101014 - DNA, 120 bp, synthetic construct; identical to SEQ ID NO: 100926
  source 1..120: mol_type = other DNA

SEQ ID NO: 101015 - DNA, 120 bp, synthetic construct; identical to SEQ ID NO: 100927
  source 1..120: mol_type = other DNA

SEQ ID NO: 101016 - DNA, 120 bp, synthetic construct; identical to SEQ ID NO: 100928
  source 1..120: mol_type = other DNA

SEQ ID NO: 101017 - DNA, 120 bp, synthetic construct; identical to SEQ ID NO: 100929
  source 1..120: mol_type = other DNA

SEQ ID NO: 101018 - DNA, 120 bp, synthetic construct; identical to SEQ ID NO: 541
  source 1..120: mol_type = other DNA

SEQ ID NO: 101019 - DNA, 120 bp, synthetic construct; identical to SEQ ID NO: 536
  source 1..120: mol_type = other DNA

SEQ ID NO: 101020 - DNA, 120 bp, synthetic construct; identical to SEQ ID NO: 100932
  source 1..120: mol_type = other DNA

SEQ ID NO: 101021 - DNA, 120 bp, synthetic construct; identical to SEQ ID NO: 100933
  source 1..120: mol_type = other DNA

SEQ ID NO: 101022 - DNA, 120 bp, synthetic construct; identical to SEQ ID NO: 100934
  source 1..120: mol_type = other DNA

SEQ ID NO: 101023 - DNA, 120 bp, synthetic construct; identical to SEQ ID NO: 100935
  source 1..120: mol_type = other DNA

SEQ ID NO: 101024 - DNA, 120 bp, synthetic construct; identical to SEQ ID NO: 100936
  source 1..120: mol_type = other DNA

SEQ ID NO: 101025 - DNA, 120 bp, synthetic construct
  source 1..120: mol_type = other DNA
agataaattttaggaggcctctgaggaaccagattggcagtgaatatgtggtaatgtattgggaacccttgagtagaaggaataacaagtaattaaccaacttagtatcctattctggta

SEQ ID NO: 101026 - DNA, 120 bp, synthetic construct
  source 1..120: mol_type = other DNA
ccacagctttcaccaactagttatatttaaatgagaaaactcatttttatgctatctattgaaatcaaacccatctcacgctgatatagttgactactgcatacctttatcagagctgtc

SEQ ID NO: 101027 - DNA, 120 bp, synthetic construct; identical to SEQ ID NO: 999
  source 1..120: mol_type = other DNA

SEQ ID NO: 101028 - DNA, 120 bp, synthetic construct; identical to SEQ ID NO: 537
  source 1..120: mol_type = other DNA

SEQ ID NO: 101029 - DNA, 120 bp, synthetic construct
  source 1..120: mol_type = other DNA
agtatttcattcctttatatttatttatttatttttatttatttatttttttgagatggagtctcactccatcacccaggctggagtgtagtggtgcaatctcagctcactgcaacctcc

SEQ ID NO: 101030 - DNA, 120 bp, synthetic construct
  source 1..120: mol_type = other DNA
agatatcaaaatgtgcatgtgttatttccacaaattgtttactaacagctgaaaagatataaatgaacagaacagaataggaaatccagaaatacccaaatatatgtaagaatttagcac

SEQ ID NO: 101031 - DNA, 120 bp, synthetic construct
  source 1..120: mol_type = other DNA
ataaaggagttgtcatggtctccagaagtgcccacattgctcgtgccgctccccctgcagcaggggaagcagtggtggcaacacttgcccatcttgctcctgagcgtcttcataaaggag

SEQ ID NO: 101032 - DNA, 120 bp, synthetic construct; identical to SEQ ID NO: 538
  source 1..120: mol_type = other DNA

SEQ ID NO: 101033 - DNA, 120 bp, synthetic construct; identical to SEQ ID NO: 545
  source 1..120: mol_type = other DNA

SEQ ID NO: 101034 - DNA, 120 bp, synthetic construct; identical to SEQ ID NO: 539
  source 1..120: mol_type = other DNA

SEQ ID NO: 101035 - DNA, 120 bp, synthetic construct; identical to SEQ ID NO: 14733
  source 1..120: mol_type = other DNA

SEQ ID NO: 101036 - DNA, 120 bp, synthetic construct; identical to SEQ ID NO: 100948
  source 1..120: mol_type = other DNA

SEQ ID NO: 101037 - DNA, 120 bp, synthetic construct
  source 1..120: mol_type = other DNA
tactttaggagatatggcattcaggcacagaaatgtccttgtgttaggcaataccattcaggacataggcatgggcgaagacttcatcactagaacaccaaaagcgatggcaacaaaagc

SEQ ID NO: 101038 - DNA, 120 bp, synthetic construct
  source 1..120: mol_type = other DNA
aaacctgcacgttctgcacatgtaccccagaacttaaagtataatttaaaaaaaagaaatttgcttttaattaatcttttcatcatagaacttgtaaagaaaatacttctgaatcttcta

SEQ ID NO: 101039 - DNA, 120 bp, synthetic construct
  source 1..120: mol_type = other DNA
tctcccaaaatttggttgacatctaaggttgattgccatacaactccttttctgaagttttacttatttccaacaaggcaagttttcctgcttccatgatgatggagagcaggcacctcc

SEQ ID NO: 101040 - DNA, 120 bp, synthetic construct
  source 1..120: mol_type = other DNA
tttagtgcttccttcaggagctcttgtaaggtaggtctggtgataacgaattccctcagcatttgcttgtctgaaaacgatcttgtttctccttcacttatgatgcttaattttgctgga

SEQ ID NO: 101041 - DNA, 120 bp, synthetic construct
  source 1..120: mol_type = other DNA
tgggtaggaacaaagttcattgcgtgaaagaagtatgttgtaatccaatacaaggaagctaaaaatcattgtaaaacattgcaggaagtaacagacaaaagagcaagtataaagaagaaa

SEQ ID NO: 101042 - DNA, 120 bp, synthetic construct
  source 1..120: mol_type = other DNA
gtgcgtggctgtagaggtcaccttgctgcagctctccactgatcaggcacggtccgcttgtacagaagctatggtgtgggcacccgaaagtgccctctaagcaggtgtggcctggctggg

SEQ ID NO: 101043 - DNA, 120 bp, synthetic construct
  source 1..120: mol_type = other DNA
tgctgataccttcagccactggaaaatacgaggcaattggcgactggagtggacccccagcataccacggcagccccacagaaaagtggccagactgttatgtgggtgcccatttccata

SEQ ID NO: 101044 - DNA, 120 bp, synthetic construct
  source 1..120: mol_type = other DNA
ttgcccaaacaggaaagatggtggcctgcctcatcttttctctcagaatttatcctgtgtgatggagcttaatttttaggttgttaattttactgtcagcgttagagttgttcagaaaga

SEQ ID NO: 101045 - DNA, 120 bp, synthetic construct
  source 1..120: mol_type = other DNA
tcactagaggatttttaagaatttcagaattggaaaagcctttctctgaattacaaaaaacccagaggcataaaatagaagattaatacatttggctacattttttaaattgggtttaca

SEQ ID NO: 101046 - DNA, 120 bp, synthetic construct
  source 1..120: mol_type = other DNA
gcatttgcctgcaacagtcgagtagtgaccttcacaatggcctcaatccaaaggaaaagcatttgatatttttcataagaattgattatctttccaatatcaaaaataagttttgctact

SEQ ID NO: 101047 - DNA, 120 bp, synthetic construct
  source 1..120: mol_type = other DNA
ggtaatgtgagtgacagagagtggctgtaaacagatgaagcttcacttgctccctaccactaacctcttgctgtgtggcccaggtcctaacaggccagggactggtactggtctgtggcc

SEQ ID NO: 101048 - DNA, 120 bp, synthetic construct
  source 1..120: mol_type = other DNA
ccacgatgtttgttactgtggccttagagtataatttgaagtcaggtaatgtgatgccaacatgtttgttccttttgcttggcatgtctgttgctattcaggctcttttgtggttctaca

SEQ ID NO: 101049 - DNA, 120 bp, synthetic construct
  source 1..120: mol_type = other DNA
tatcagccagtgtccatcaactgatgagtggaataaagaaaattttatatatatatatatatatatatatatatatatatatacctatacctgagactgggtaattcataaaggaaagag

SEQ ID NO: 101050 - DNA, 120 bp, synthetic construct
  source 1..120: mol_type = other DNA
catggctgtatttcagaagcaagctgctcacattgatattggttggtgagcaagagcagtggtcattgattgactagatttcaaactggctttgtgtggcttcttgttaccattggtaca

SEQ ID NO: 101051 - DNA, 120 bp, synthetic construct
  source 1..120: mol_type = other DNA
tctctaagaaatgatgacataaggttaacagcgttgatgtcaagatacaaatgggtttgaagttagagatgataaatcactttgtttcactgaaccttcccttcgttacgttagagagca

SEQ ID NO: 101052 - DNA, 120 bp, synthetic construct
  source 1..120: mol_type = other DNA
acagtagaaaaagtcatgaggggccgggtgcagtggctcacacctgtaatcccaacactttgtgaggccaaggcagacagatcacctgaggtcaggagtttgaaaccaggctggccaaca

SEQ ID NO: 101053 - DNA, 120 bp, synthetic construct
  source 1..120: mol_type = other DNA
cttgaagcttttagtttttcttggtctttatgtataagcatgaacaaaataataatcagcttctgtaatctagaaatggtcaaggcaacttttagttctatagttttaagaatttaacac

SEQ ID NO: 101054 - DNA, 120 bp, synthetic construct
  source 1..120: mol_type = other DNA
taggaaataccccgaaaataatacagtatgcaaccattttttacaaatgaggttagatctagagtatactgattattcacaattaaaatatttaaagcatttagtttggtaacacatctt

SEQ ID NO: 101055 - DNA, 120 bp, synthetic construct
  source 1..120: mol_type = other DNA
ctttgtggaattaatccatcatcaccattgccagcactggcaccattagtcaggttttctggtaatcccacaggattacttccatgcttctttatttcttcttcaaccttgagtggaagt

SEQ ID NO: 101056 - DNA, 120 bp, synthetic construct
  source 1..120: mol_type = other DNA
agaaacatttgaacataaaggtatacctctctatcacagtccttatttatttctggttcttgagacattttctgcagatgcaaaaatagaaggttaatttgcttgttgtatttccgtgta

SEQ ID NO: 101057 - DNA, 120 bp, synthetic construct; identical to SEQ ID NO: 23005
  source 1..120: mol_type = other DNA

SEQ ID NO: 101058 - DNA, 120 bp, synthetic construct; identical to SEQ ID NO: 996
  source 1..120: mol_type = other DNA

SEQ ID NO: 101059 - DNA, 120 bp, synthetic construct; identical to SEQ ID NO: 997
  source 1..120: mol_type = other DNA

SEQ ID NO: 101060 - DNA, 120 bp, synthetic construct
  source 1..120: mol_type = other DNA
aaagtaacataaaaataacaaaaaagagtaagagaaagagtgttttttgtataggctagcatttaacttaaacttgagagcgagtactaggattatacttagaatttatggactcggtag

SEQ ID NO: 101061 - DNA, 120 bp, synthetic construct
  source 1..120: mol_type = other DNA
aaatttgagtattaaggcattctggttatggtgtaaaacgggttagcaagctttttctgtaaatggccaggtgggcaatattttagactatgtggtctctgtcatatctacttaaccctg

SEQ ID NO: 101062 - DNA, 120 bp, synthetic construct
  source 1..120: mol_type = other DNA
gatctttaaggtgctcatagtagagctgtctctatttcatttctgtgctttttcaacagaatttacaaagaaaacctttctatgttttcacttgtccacttaacaaataactattaaatg

SEQ ID NO: 101063 - DNA, 120 bp, synthetic construct
  source 1..120: mol_type = other DNA
ccccagcccatggaaacactgtcttccacaaaactggtccctgctgccaaaaacattgtggacaactgacctaaagtaattcattatcacaagtcttacctggattgctgttttcagaag

SEQ ID NO: 101064 - DNA, 120 bp, synthetic construct
  source 1..120: mol_type = other DNA
gagctgaataatgtgttcggtgcaaaatatattaagtatgtatgtcaaaaattagagaatgtcaatttgcagcttcttcatgaaaactgaaaaaaaataaaagtagagttttggtctccc

SEQ ID NO: 101065 - DNA, 120 bp, synthetic construct
  source 1..120: mol_type = other DNA
aactggttctgctgcctggtaattgttgacctttgacaccaagatgcccttactgattcagatccctcaagtcttcatggggattcatacagtgactttgaagttacaacattttttttt

SEQ ID NO: 101066 - DNA, 120 bp, synthetic construct; identical to SEQ ID NO: 998
  source 1..120: mol_type = other DNA

SEQ ID NO: 101067 - DNA, 120 bp, synthetic construct
  source 1..120: mol_type = other DNA
aagaagaaaaaaagctgttgaacccacagtatgtgggaatagcaattaattgtcatgtggcgataagctaacattaatattcttcaaagaaagcaacttaaagcagagtcgttgaaaaga

SEQ ID NO: 101068 - DNA, 120 bp, synthetic construct
  source 1..120: mol_type = other DNA
ggataatatagagataaaagatacagcccctgccctcaagaagctttttgtttaaatgaaaagaaaaatcatccaaaagtgccatgccaaatgctcgtttagaaacaaagagtcttggaa

SEQ ID NO: 101069 - DNA, 120 bp, synthetic construct
  source 1..120: mol_type = other DNA
atgtattcagtggttaagcaggagtgtatccggattttgagaaatttgttgttgttgttgttagagacagggtctcattatgctgaccaggctagactagaactcctaagctcaagcaat

SEQ ID NO: 101070 - DNA, 120 bp, synthetic construct
  source 1..120: mol_type = other DNA
cgaatgaacaacaataacaacacacacacacacacacacacacacacacacacacacaaaaaaaaaaaaaaacaaaaaaaaacctcttcatggtcttttcccccattacctaatttccaa

SEQ ID NO: 101071 - DNA, 120 bp, synthetic construct; identical to SEQ ID NO: 101026
  source 1..120: mol_type = other DNA

SEQ ID NO: 101072 - DNA, 120 bp, synthetic construct; identical to SEQ ID NO: 999
  source 1..120: mol_type = other DNA

SEQ ID NO: 101073 - DNA, 120 bp, synthetic construct; identical to SEQ ID NO: 537
  source 1..120: mol_type = other DNA

SEQ ID NO: 101074 - DNA, 120 bp, synthetic construct; identical to SEQ ID NO: 1000
  source 1..120: mol_type = other DNA

SEQ ID NO: 101075 - DNA, 120 bp, synthetic construct
  source 1..120: mol_type = other DNA
ttgattttttttaacagaatggaaaaagacttgcttttccagatatcaaaatgtgcatgtgttatttccacaaattgtttactaacagctgaaaagatataaatgaacagaacagaatag

SEQ ID NO: 101076 - DNA, 120 bp, synthetic construct; identical to SEQ ID NO: 18854
  source 1..120: mol_type = other DNA

SEQ ID NO: 101077 - DNA, 120 bp, synthetic construct; identical to SEQ ID NO: 538
  source 1..120: mol_type = other DNA

SEQ ID NO: 101078 - DNA, 120 bp, synthetic construct; identical to SEQ ID NO: 18855
  source 1..120: mol_type = other DNA

SEQ ID NO: 101079 - DNA, 120 bp, synthetic construct
  source 1..120: mol_type = other DNA
ctctcctctccctcccccatccacaggccccagtgtgtgttgcttacttccctgtgtccatgtgttctcattgttcagctcctacttataagtgagaacgttagaagtttggctttctgt

SEQ ID NO: 101080 - DNA, 120 bp, synthetic construct; identical to SEQ ID NO: 18856
  source 1..120: mol_type = other DNA

SEQ ID NO: 101081 - DNA, 120 bp, synthetic construct; identical to SEQ ID NO: 18857
  source 1..120: mol_type = other DNA

SEQ ID NO: 101082 - DNA, 120 bp, synthetic construct; identical to SEQ ID NO: 18857
  source 1..120: mol_type = other DNA

SEQ ID NO: 101083 - DNA, 120 bp, synthetic construct; identical to SEQ ID NO: 18856
  source 1..120: mol_type = other DNA

SEQ ID NO: 101084 - DNA, 120 bp, synthetic construct
  source 1..120: mol_type = other DNA
attagagatttttcccgatgctctcctctccctcccccatccacaggccccagtgtgtgttgcttacttccctgtgtccatgtgttctcattgttcagctcctacttataagtgagaacg

SEQ ID NO: 101085 - DNA, 120 bp, synthetic construct
  source 1..120: mol_type = other DNA
agtttacttttttgtactattttgatatcagagtaatgttagcttcataaaatgaattgggaaagattctctattttcagaaaagattgtgtgtattggtgtcaattctttaagcagtac

SEQ ID NO: 101086 - DNA, 120 bp, synthetic construct; identical to SEQ ID NO: 1239
  source 1..120: mol_type = other DNA

SEQ ID NO: 101087 - DNA, 120 bp, synthetic construct
  source 1..120: mol_type = other DNA
aactggttggtagacgcgatctgttcgctactaccggcctcccctggctgttaaaagcagatggtggctgaggtttgttcaatgcccactgcctctactgtgaagaagccatttgatctc

SEQ ID NO: 101088 - DNA, 120 bp, synthetic construct
  source 1..120: mol_type = other DNA
cctattcaaagatatgaaccatacttcccatttcagtttccttttaaggttactcagtaaagaacgtgtttacatagggtacacatcgatataaaatccatattggattttatttgaaaa

SEQ ID NO: 101089 - DNA, 120 bp, synthetic construct
  source 1..120: mol_type = other DNA
aggcaagtggatcacgaggtcaggagtttgatactagcctggccagcatggtgaaacccgtttctactaaaaatacaaagaattagctgggcatggtggcatgcacctgtaatcctagct

SEQ ID NO: 101090 - DNA, 120 bp, synthetic construct
  source 1..120: mol_type = other DNA
tataataaaatgtatatacaataaaatctaccagaagaggtaaacagaagccctctacttctgaagagggtaaaagttcacagaagatagccatccacaggtataaaaataaataataga

SEQ ID NO: 101091 - DNA, 120 bp, synthetic construct
  source 1..120: mol_type = other DNA
actaggcttaacacctgggtaatgaaataatctgtacaaccaacccccttggcacacgtttacctatgttaaccaacctgcacatcctgcacctgtatccccgaatgtaaaagttgagaa

SEQ ID NO: 101092 - DNA, 120 bp, synthetic construct
  source 1..120: mol_type = other DNA
gcactagctaatgccacattaatgattcatgtagttgcaaacactgaatagcctattactctgccttcaaaacaaactcaattttcctttgaagaaagcacactacttattacctctcat

SEQ ID NO: 101093 - DNA, 120 bp, synthetic construct
  source 1..120: mol_type = other DNA
tattacctaatttccaaattggccttgatatttctgattgctctcttttccgctttccacttctgcctcatgagcaatcagaaatatcttaagccttgccactgacaggcgcatcacctt

SEQ ID NO: 101094 - DNA, 120 bp, synthetic construct
  source 1..120: mol_type = other DNA
atggcaaaaacctcatctctactaaaaaaaaaatacaaaaacagattggaggaccaccagagcttagggatgtcaaggctgtggtgatctgtgaccgcatcactgcactccagcctgggg

SEQ ID NO: 101095 - DNA, 120 bp, synthetic construct
  source 1..120: mol_type = other DNA
aaactcactttaacatttactgtttccaagactctttgtttctaaacgagcatttggcatggcacttttggatgattttttttttcatttaaacaaaaagcttcttgagggcgggggctg

SEQ ID NO: 101096 - DNA, 120 bp, synthetic construct
  source 1..120: mol_type = other DNA
gggactgtggtggggtggggggaggggggagggatagctttgggagatatacctaatgctagatgacgagttagtgggtgcagcgcaccagcatggcacatgtatacatatgtaactaac

SEQ ID NO: 101097 - DNA, 120 bp, synthetic construct
  source 1..120: mol_type = other DNA
ttctgcacggacaggcaagatgttaaattggtaaagtatatcaaattagcttttaaaataactttattactgttcctatctctgtcattttagaactgctctcatacttgctgtatgttg

SEQ ID NO: 101098 - DNA, 120 bp, synthetic construct
  source 1..120: mol_type = other DNA
aacccacatcttagccaagaattagctgagaccttcatggtaagagatcctttgaggccgttgttggtcttttctctagcagatattaggtaggcttgttctaaagggtcagaggagttc

SEQ ID NO: 101099 - DNA, 120 bp, synthetic construct
  source 1..120: mol_type = other DNA
atctctcattaaagtagataatgtgattgtccactattacggagttgaccaatttgttgtgctaagggcagaaaaaccaatggatgttaagacctggcttggagcaatgatccttctcta

SEQ ID NO: 101100 - DNA, 120 bp, synthetic construct
  source 1..120: mol_type = other DNA
gaaataattatacaacttaccataatgtagaatccgtggaaactctgagcttatttttctgcaactagatggtctcatctgggggcaaagtgagacagtgacatatcatcaggcattaga

SEQ ID NO: 101101 - DNA, 120 bp, synthetic construct; identical to SEQ ID NO: 1240
  source 1..120: mol_type = other DNA

SEQ ID NO: 101102 - DNA, 120 bp, synthetic construct
  source 1..120: mol_type = other DNA
tatcttccatcaatcccagcaaactataggccacaggacaaatccaatctgccttttggctttgtaaataaagttttataggagctcagtcatgcctgtttgcttacatataatcatggt

SEQ ID NO: 101103 - DNA, 120 bp, synthetic construct
  source 1..120: mol_type = other DNA
ttggaaagtcaattctataataagtcatagaaattataataaatcacttaatatttgggaaggtgctttataaagttatagtgtatatgaatataactaatagttgtgaattcagagctg

SEQ ID NO: 101104 - DNA, 120 bp, synthetic construct
  source 1..120: mol_type = other DNA
gatcaggaccatcctggccaatggtgaaaccccatctctactaaaaatacaaaaattagctgggcatgatggtgtgtgcctgtaatcccagcttctcaggagaatgagacagaagaatca

SEQ ID NO: 101105 - DNA, 120 bp, synthetic construct; identical to SEQ ID NO: 18851
  source 1..120: mol_type = other DNA

SEQ ID NO: 101106 - DNA, 120 bp, synthetic construct; identical to SEQ ID NO: 18850
  source 1..120: mol_type = other DNA

SEQ ID NO: 101107 - DNA, 120 bp, synthetic construct
  source 1..120: mol_type = other DNA
ccaaaaactcttcagaatcttatatatgaatttaccccatttgactcgtgggaacacaaaaataaaacgacatagacacaaaatgtgtcttctgtctttaccacctagattttacattaa

SEQ ID NO: 101108 - DNA, 120 bp, synthetic construct
  source 1..120: mol_type = other DNA
ctacatatccttactatgttatatatatgtgtgtgaatatgctactaaattaatgttcaaaatgtatttaccaacagtgtatgaaatgtctttttcaatgagaccatttcctttgcagca

SEQ ID NO: 101109 - DNA, 120 bp, synthetic construct
  source 1..120: mol_type = other DNA
ctgacccgtgtgctaaaaggaaggtgctgctaatgcagtaacacttatttgtaaaagtgccctgcatgtgtgacattatctttcctttgagaaaaggatatatttcagtattcacctcac

SEQ ID NO: 101110 - DNA, 120 bp, synthetic construct
  source 1..120: mol_type = other DNA
ctcggctcactacaacctctgcctcctgggttcaagcgattctcctgcttcagcctcctgagtagctggcattacaggtgcatgccaccatgctcagctgatttttgtatttttagtaga

SEQ ID NO: 101111 - DNA, 120 bp, synthetic construct
  source 1..120: mol_type = other DNA
cccctttctaagaagaagaggaaaaagggtaaaaagaaacacattaaggaacaaccactttctgaggaagaacggtgtgctacccagacgcgtcatgcttaaggttcaattgggtgccta

SEQ ID NO: 101112 - DNA, 120 bp, synthetic construct
  source 1..120: mol_type = other DNA
ttccaactctgtctctttatttcaaataccaaaggttcataatcccttgaaaagaattttcaagtccattaaatgtgccaccctaattttttttttttttaaaataaaatactagtggcc

SEQ ID NO: 101113 - DNA, 120 bp, synthetic construct
  source 1..120: mol_type = other DNA
gtgtaactgtgaatcaattaagcctctttcctttatgaattacccagtctcaggtatatatatatatttttttttttttttctttattccactcatcagttggtggacactggctgataa

SEQ ID NO: 101114 - DNA, 120 bp, synthetic construct; identical to SEQ ID NO: 1241
  source 1..120: mol_type = other DNA

SEQ ID NO: 101115 - DNA, 120 bp, synthetic construct
  source 1..120: mol_type = other DNA
gcacttcatttctattattactaatatataatgaaataattatataactcgccatcatgtagaatcagtgggagccctcagcttgttttcctgcaactagatggtctcatctaggggtga

SEQ ID NO: 101116 - DNA, 120 bp, synthetic construct; identical to SEQ ID NO: 1242
  source 1..120: mol_type = other DNA

SEQ ID NO: 101117 - DNA, 120 bp, synthetic construct
  source 1..120: mol_type = other DNA
atgctgttttcacgcaagagatcttcttctttcttatgactaagagaaagctaagtaaacaaagggaacttttagttagcactcaatagaatgacatatcatgatttcttctaaaattaa

SEQ ID NO: 101118 - DNA, 120 bp, synthetic construct; identical to SEQ ID NO: 18842
  source 1..120: mol_type = other DNA

SEQ ID NO: 101119 - DNA, 120 bp, synthetic construct; identical to SEQ ID NO: 18841
  source 1..120: mol_type = other DNA

SEQ ID NO: 101120 - DNA, 120 bp, synthetic construct
  source 1..120: mol_type = other DNA
tcaaagaaggcaccttcactggccagccacccaccccaaaccagcactacctccagtgcaacagcacacacagcaggggccccctggcccacaccccagctgttttgcctccaccactgg

SEQ ID NO: 101121 - DNA, 120 bp, synthetic construct
  source 1..120: mol_type = other DNA
atataatcccatatttctcagatgttttgttcattccctttcattcttttttcccccattcttgtttgcctgttttatttcagaaagccagtttccaggttctgggattctttcctcttc

SEQ ID NO: 101122 - DNA, 120 bp, synthetic construct
  source 1..120: mol_type = other DNA
aaaaaaagagggctgggcgcggtggtttacgcctgtaatcccagcactttcggaggctgagacggatggatcacaaggtcaggagatcgagaccatcctggctaacacggtgaaaccctg

SEQ ID NO: 101123 - DNA, 120 bp, synthetic construct; identical to SEQ ID NO: 1243
  source 1..120: mol_type = other DNA

SEQ ID NO: 101124 - DNA, 120 bp, synthetic construct
  source 1..120: mol_type = other DNA
tgtagatccttgaggaatcatcacattgtcttccacgatggttgaactgatttatactcccaccaacagtgtaaaagcattcctatttctccacatcctctccagcatctgttgtttcct

SEQ ID NO: 101125 - DNA, 120 bp, synthetic construct
  source 1..120: mol_type = other DNA
caagcaatggggaaaggattccttattcaataaatggtgttaggaaaactggctagccatatgcagaaaactgaaactgggccacttccttacactttatacaaaaattaacttaagatg

SEQ ID NO: 101126 - DNA, 120 bp, synthetic construct
  source 1..120: mol_type = other DNA
catggctcagggctcgtatggcactgcggacttcttggttgccaagaggcagaccacaggctgtcttgaggaggactttatgttcgagtacagaaagcagcaggattaccacccagggga

SEQ ID NO: 101127 - DNA, 120 bp, synthetic construct
  source 1..120: mol_type = other DNA
caggcagggcaacctcactcggagcagtgtgtcagtagctggggcctgtgcatgccaggcaaggccaaggtggctcgaagagcaaccagccacctctgcaagggtgcacctggagcaggt

SEQ ID NO: 101128 - DNA, 120 bp, synthetic construct; identical to SEQ ID NO: 21536
  source 1..120: mol_type = other DNA

SEQ ID NO: 101129 - DNA, 120 bp, synthetic construct
  source 1..120: mol_type = other DNA
taattacatctttgcttttgttgcttgtgcttttgacaagtttaatgtaattacatctttgcttttgttgcttgtgcttttgatgtctatttgaaaattccttgtcctaaccagtttcat

SEQ ID NO: 101130 - DNA, 120 bp, synthetic construct; identical to SEQ ID NO: 21537
  source 1..120: mol_type = other DNA

SEQ ID NO: 101131 - DNA, 120 bp, synthetic construct
  source 1..120: mol_type = other DNA
cccaacccctgcccccacaggcgggcagtacatccccggataactcacctacaccaggacatttctaccactctggccgagctgcagtgtcccacgtcaccaccaaacacagcaaggcga

SEQ ID NO: 101132 - DNA, 120 bp, synthetic construct; identical to SEQ ID NO: 21538
  source 1..120: mol_type = other DNA

SEQ ID NO: 101133 - DNA, 120 bp, synthetic construct
  source 1..120: mol_type = other DNA
atcctggctaacactgtgaaaccccatctctactaaaaatacaaaaataaaattggctgggcgtggtggcaggcgcctgtagtcccagctactagggaggctgaggcaggaggatggtgt

SEQ ID NO: 101134 - DNA, 120 bp, synthetic construct
  source 1..120: mol_type = other DNA
ctaactttgtgtttttaatagagatgggttttctctatgttggtcaggctggtcttgaactcccgacttcaagtgatccacctgtctcagcttcccaaagtgctgggattggaggtgtga

SEQ ID NO: 101135 - DNA, 120 bp, synthetic construct
  source 1..120: mol_type = other DNA
ggtagctcatggcccccttggaacttagaacctgggtttcattcctgctctacggctatataattcaacaattttcctttgaatttgttggactctaaccctgtatatctcaaattttat

SEQ ID NO: 101136 - DNA, 120 bp, synthetic construct; identical to SEQ ID NO: 21539
  source 1..120: mol_type = other DNA

SEQ ID NO: 101137 - DNA, 120 bp, synthetic construct; identical to SEQ ID NO: 21540
  source 1..120: mol_type = other DNA

SEQ ID NO: 101138 - DNA, 120 bp, synthetic construct
  source 1..120: mol_type = other DNA
caccatgattttagaacatttttatgctccttaaaagaaactttgcacccattagcaatctttccctattttccccattcttcctttaaacctctcccagccctaggcaatcatccatct

SEQ ID NO: 101139 - DNA, 120 bp, synthetic construct; identical to SEQ ID NO: 1155
  source 1..120: mol_type = other DNA

SEQ ID NO: 101140 - DNA, 120 bp, synthetic construct
  source 1..120: mol_type = other DNA
cagtctattagtgttctatgagggaaattatgattggaaatcagctaaagttttgtttttgtgttgctgttcataaagggccctgtaccctgacctctctgaggtttccacatccagggt

SEQ ID NO: 101141 - DNA, 120 bp, synthetic construct; identical to SEQ ID NO: 21541
  source 1..120: mol_type = other DNA

SEQ ID NO: 101142 - DNA, 120 bp, synthetic construct
  source 1..120: mol_type = other DNA
gccactacattccagcctgggtgatagagtgagactccatctcaaaaaaaaaaaaagaaaaaaaaaaaggaatgaaatactgttttctgtccacaaagtttgtgaggatgaagaacagtg

SEQ ID NO: 101143 - DNA, 120 bp, synthetic construct
  source 1..120: mol_type = other DNA
aatgcaccaattttaaatctctcatcttgctcaagcccagcagataaacatgaagttttcaaaggtggaaggatcctgagagatagtagaatatgcctgccacataataggtgtctggct

SEQ ID NO: 101144 - DNA, 120 bp, synthetic construct; identical to SEQ ID NO: 21542
  source 1..120: mol_type = other DNA

SEQ ID NO: 101145 - DNA, 120 bp, synthetic construct
  source 1..120: mol_type = other DNA
agggaaaaaacatcctaggagggaaaaattgaaaaatagtaagtattatcttttacaaattcagtgttttcaaaaaaagtatttaccacaagtgcattaaaaaaaaaaactgtaccctct

SEQ ID NO: 101146 - DNA, 120 bp, synthetic construct
  source 1..120: mol_type = other DNA
gattatttaaacattttcctcaggttactgggatgcacaattctagctgaaagctagtgcaacagacaattacttcagtctcatttctcacccatatgaccagttccctttctcatttga

SEQ ID NO: 101147 - DNA, 120 bp, synthetic construct
  source 1..120: mol_type = other DNA
tctgctcttaatgacttactgacctaagcacttgaatgactgaacaaagagacacaaaatcctgagagggccatcctctacttattgaaagactgctcacagcaaactactaaagacctt

SEQ ID NO: 101148 - DNA, 120 bp, synthetic construct
  source 1..120: mol_type = other DNA
aaaaatgtcacataacaaataacatcagtcaatataataagagaagatgaatcctactaaaactgttctttatgttgcccagcccaagtaattgtttttctacctaactgatttgtgttg

SEQ ID NO: 101149 - DNA, 120 bp, synthetic construct
  source 1..120: mol_type = other DNA
tctaaaatgacagagataggaactgtaataaagttatttttaaagctaatttgatatactttaccaatgtaacatcttgcctgtctgtgcagaatcaaacatttacatgcactaaaagac

SEQ ID NO: 101150 - DNA, 120 bp, synthetic construct
  source 1..120: mol_type = other DNA
acagtacagatctggtagcaaagaggaaacagacactgacctccttctgccacattatttgaacccctctcaccctttagaacaagcccacctaacatctgccagagaaaagaccaacaa

SEQ ID NO: 101151 - DNA, 120 bp, synthetic construct; identical to SEQ ID NO: 21543
  source 1..120: mol_type = other DNA

SEQ ID NO: 101152 - DNA, 120 bp, synthetic construct
  source 1..120: mol_type = other DNA
tccgtggaagctctgaactaatttttctgcaactggatggtctcatctgggggcaaagtgagacagtgacagatcatcaggcattagattctcatacgaagcacacaacctagatccctc

SEQ ID NO: 101153 - DNA, 120 bp, synthetic construct; identical to SEQ ID NO: 21519
  source 1..120: mol_type = other DNA

SEQ ID NO: 101154 - DNA, 120 bp, synthetic construct; identical to SEQ ID NO: 21544
  source 1..120: mol_type = other DNA

SEQ ID NO: 101155 - DNA, 120 bp, synthetic construct; identical to SEQ ID NO: 21545
  source 1..120: mol_type = other DNA

SEQ ID NO: 101156 - DNA, 120 bp, synthetic construct
  source 1..120: mol_type = other DNA
tgcctacaataggaggatgagtgagtagggcattgccagcagctcagtaatgccagagaaagggcacacagggaaaaggcctaaagatggagagtggggcagaagtcagattatgaaagc

SEQ ID NO: 101157 - DNA, 120 bp, synthetic construct; identical to SEQ ID NO: 21546
  source 1..120: mol_type = other DNA

SEQ ID NO: 101158 - DNA, 120 bp, synthetic construct
  source 1..120: mol_type = other DNA
ttcatcatgttcgggtgttgtaaaaataaaagaacaaagttctgcaatttgtttttgcctctattccaaaaggaaagattagctataagctaatcaaaaaggcagatgagagtattttaa

SEQ ID NO: 101159 - DNA, 120 bp, synthetic construct
  source 1..120: mol_type = other DNA
ctacttacatgataggatcatgtatgcctacacttactacattttgttaaacaacataatgtaaaaatctaattcaacagaaacatttgaatatgaaggtatacctctctatcaccatcc

SEQ ID NO: 101160 - DNA, 120 bp, synthetic construct
  source 1..120: mol_type = other DNA
attagtcaggttttctagtaatcccacattattactttcatgcttcttcatttcttcttcaaccttgagtgggatattaaggatagttatcactttattgaataaaaagaacctttttaa

SEQ ID NO: 101161 - DNA, 120 bp, synthetic construct; identical to SEQ ID NO: 21522
  source 1..120: mol_type = other DNA

SEQ ID NO: 101162 - DNA, 120 bp, synthetic construct; identical to SEQ ID NO: 21547
  source 1..120: mol_type = other DNA

SEQ ID NO: 101163 - DNA, 120 bp, synthetic construct
  source 1..120: mol_type = other DNA
gggccgggtgcagtggctcacacctgtaatcccaacactttgtgaggccaaggcagacagatcacctgaggtcaggagtttgaaaccaggctggccaacatgggggaatgctgtgtctac

SEQ ID NO: 101164 - DNA, 120 bp, synthetic construct
  source 1..120: mol_type = other DNA
accttagagagcattccttgtatgctgccaattgcatcttaagcatgatgcgtctgggtagtacacggttcttcctcagaaagtggatgttccttaatgtgtttctttttaccctttgtc

SEQ ID NO: 101165 - DNA, 120 bp, synthetic construct
  source 1..120: mol_type = other DNA
gtcattatggtaaactgagtcagaggaattgcaaactttactattttattttattttattttatttttttgagatggagtctcgctgtatcgcccaggctggagtgcagtggcgcgatct

SEQ ID NO: 101166 - DNA, 120 bp, synthetic construct; identical to SEQ ID NO: 21548
  source 1..120: mol_type = other DNA

SEQ ID NO: 101167 - DNA, 120 bp, synthetic construct; identical to SEQ ID NO: 21549
  source 1..120: mol_type = other DNA

SEQ ID NO: 101168 - DNA, 120 bp, synthetic construct
  source 1..120: mol_type = other DNA
gccaaatgtcattcctctgcttctttccctgaaaaattcttctcactctgcatgcttacattaaatcctgcctcctttctttctaaagctttcactcctcatcacatatgtctggcacac

SEQ ID NO: 101169 - DNA, 120 bp, synthetic construct
  source 1..120: mol_type = other DNA
tggtcctttaaagaaaaagcttgctaacccattttacaccataaccagaatgccttaatactcaaatttaatcttgtggctcccctgctcaaatttctccaatgagccccctccagcaca

SEQ ID NO: 101170 - DNA, 120 bp, synthetic construct; identical to SEQ ID NO: 21550
  source 1..120: mol_type = other DNA

SEQ ID NO: 101171 - DNA, 120 bp, synthetic construct
  source 1..120: mol_type = other DNA
atttgcctacaatagaaggatgagtgagtagggcactgccagcagttcagtaatgccagagacagggcacacagggaaaagggctaaagatggagagtggggcagaagtcagattatgaa

SEQ ID NO: 101172 - DNA, 120 bp, synthetic construct; identical to SEQ ID NO: 1163
  source 1..120: mol_type = other DNA

SEQ ID NO: 101173 - DNA, 120 bp, synthetic construct
  source 1..120: mol_type = other DNA
ctctttaaccatgaatccagctcagggaatcagtgttacattgttcataattcctattgcttaataatatgattcaatcattgatgttactttctttatcatgttagggtgttgtaaaaa

SEQ ID NO: 101174 - DNA, 120 bp, synthetic construct; identical to SEQ ID NO: 21551
  source 1..120: mol_type = other DNA

SEQ ID NO: 101175 - DNA, 120 bp, synthetic construct
  source 1..120: mol_type = other DNA
ttaccaacagtatatgaaatgtctttttcaatgaaaccatttcccctgcagcaacacggatggagctggaggccattatcctaagaaaactcatgcaggaacagaaaatcaaatgccaca

SEQ ID NO: 101176 - DNA, 120 bp, synthetic construct; identical to SEQ ID NO: 21449
  source 1..120: mol_type = other DNA

SEQ ID NO: 101177 - DNA, 120 bp, synthetic construct
  source 1..120: mol_type = other DNA
tctcatagttttttttttttttttttttttaagacagagtctcgctttgtcccccaggctggagttcagtggcatgatcttggctcattgcaacctctgcctcatgagttccagcacttc

SEQ ID NO: 101178 - DNA, 120 bp, synthetic construct
  source 1..120: mol_type = other DNA
ttcagtgtggctgaaacacagcaatagagataagaaacagaagtttcagcaggagaggtaacatgccagatggtttactgcctttcagttattaggaggaactctgccacatactcagag

SEQ ID NO: 101179 - DNA, 120 bp, synthetic construct
  source 1..120: mol_type = other DNA
aagaatagtgaataaccacaatattgggcttttctccctaagtgaaaaaatattaatataaagaatgtagcttattataaaaagccgaaagaatttttaaaatacatataattaccaggc

SEQ ID NO: 101180 - DNA, 120 bp, synthetic construct
  source 1..120: mol_type = other DNA
cagttcatgtatgtatatgatagtcatattctgtgtttttaaattccttttcttgttcacttttttctctgtacaatactagtgatattgttatgcatttttatctcattaaaaagttgt

SEQ ID NO: 101181 - DNA, 120 bp, synthetic construct
  source 1..120: mol_type = other DNA
tatggaaaacagtatggagatttctcaaagaactaaaagtagatcctaccattttatccagcattctcatttccagatatctacataaaataaaagaaatcatactctcaaaaggacacc

SEQ ID NO: 101182 - DNA, 120 bp, synthetic construct
  source 1..120: mol_type = other DNA
catggactgaaagaactgatatagtgaaaatgaccatagtgcccaaagcagtctacacattctatacaatacctaccaaagtaccaatgtcattcttcacagaattattttaaaatgctg

SEQ ID NO: 101183 - DNA, 120 bp, synthetic construct; identical to SEQ ID NO: 1156
  source 1..120: mol_type = other DNA

SEQ ID NO: 101184 - DNA, 120 bp, synthetic construct
  source 1..120: mol_type = other DNA
ccagctatacatttcctactttcttatcagtaaaaataatcaattgacttctctattaacattttttaaaaaactaatgtccaaaaacgagaaaatctgttttcagtagcaaaacttatt

SEQ ID NO: 101185 - DNA, 120 bp, synthetic construct; identical to SEQ ID NO: 1148
  source 1..120: mol_type = other DNA

SEQ ID NO: 101186 - DNA, 120 bp, synthetic construct
  source 1..120: mol_type = other DNA
tgatcctgatcttcatcatgctaggcgccagggcagcgatctccttctgcattctgtgggccatgccagggtacatggtggtgccgccagacagcactgtgttggtgtacaggtctttgc

SEQ ID NO: 101187 - DNA, 120 bp, synthetic construct; identical to SEQ ID NO: 21490
  source 1..120: mol_type = other DNA

SEQ ID NO: 101188 - DNA, 120 bp, synthetic construct
  source 1..120: mol_type = other DNA
ggaagctctgtcccaggaactgcagagttgctactggcttgatagctccagtggtgggctggctagagacccaggccaggaggatctgcccatcaagtagagagcctggccacttttctg

SEQ ID NO: 101189 - DNA, 120 bp, synthetic construct
  source 1..120: mol_type = other DNA
ggtgtgtgctgcactcccgtgtgctctcagggcaagtaaagcaaaacccacccgtgtaaacacacacagcaaagtgatttaggaagtttccaaataaagggctgccgtatggagaggcaa

SEQ ID NO: 101190 - DNA, 120 bp, synthetic construct
  source 1..120: mol_type = other DNA
tgatcacccagtctgagccttatttccaggtaagtagcagaattagagttttgtcttaaaatttttgtttaatgactaaaatttaagattacccatcagctgcttttaattcctccttac

SEQ ID NO: 101191 - DNA, 120 bp, synthetic construct
  source 1..120: mol_type = other DNA
gcaaacggctaatatgcagaatctacaaagaacttaaacaaatttacaagaaaaaaaacaaccccatcaaaaaatgggcaaaacatatgaacagacacttcccaaataagacatttatgc

SEQ ID NO: 101192 - DNA, 120 bp, synthetic construct
  source 1..120: mol_type = other DNA
ctggagccccaaaggcagtgcacaccatggtcttgagcctgctgctcatttcctctatgtggctccatttatagcacagttattcactgatgcttgtgcatgctgggcaaggccaagctg

SEQ ID NO: 101193 - DNA, 120 bp, synthetic construct
  source 1..120: mol_type = other DNA
ctttgtcagttttgtcaaagatctggtggttttacatgtgtggtgtcatttctgtggcctctgttccattccattggtctatatacctggtttggtaccagtaccatgctgtttccgtta

SEQ ID NO: 101194 - DNA, 120 bp, synthetic construct
  source 1..120: mol_type = other DNA
cttggaaccaatccaaatgcccatcaatgatagactggataatgtggcatatatacactatggaatgctatgcacccataaaaaaggatgagttcatgtcctttgcagggacatcgatga

SEQ ID NO: 101195 - DNA, 120 bp, synthetic construct; identical to SEQ ID NO: 21531
  source 1..120: mol_type = other DNA

SEQ ID NO: 101196 - DNA, 120 bp, synthetic construct
  source 1..120: mol_type = other DNA
aaagaagtctagccatgtttgtgtagagcagctgtgctgtgctgggggttcacttttgagagagttctcctctgagacctgatctctggaggctgggcagtcttgcacttgagatggggc

SEQ ID NO: 101197 - DNA, 120 bp, synthetic construct
  source 1..120: mol_type = other DNA
cagctgtgctgtgctgggggttcacttcagcccctggtccgcctcagacactctgaagccctaaggctgaaatgcctgggtcgccccaacagcaaagatgacaatctggtcctccccctg

SEQ ID NO: 101198 - DNA, 120 bp, synthetic construct
  source 1..120: mol_type = other DNA
agccactctcagggagaccaaaagccttcatacaccccaagttggggtacaaaagaggggggccacgaaggctgatcattcaaaataaaacaaaattaaaaagtattaaggcgaagattc

SEQ ID NO: 101199 - DNA, 120 bp, synthetic construct; identical to SEQ ID NO: 1147
  source 1..120: mol_type = other DNA

SEQ ID NO: 101200 - DNA, 120 bp, synthetic construct; identical to SEQ ID NO: 1148
  source 1..120: mol_type = other DNA

SEQ ID NO: 101201 - DNA, 120 bp, synthetic construct
  source 1..120: mol_type = other DNA
gtacagctgggtcagaggccacattgtggataccattatccttacttttgcagagaggaacagtttgctccaagtagtttctcatttcaatgtaaagaggtttgaaaacaatgacatgcc

SEQ ID NO: 101202 - DNA, 120 bp, synthetic construct; identical to SEQ ID NO: 1149
  source 1..120: mol_type = other DNA

SEQ ID NO: 101203 - DNA, 120 bp, synthetic construct
  source 1..120: mol_type = other DNA
gatatgtctgttgctgttcaggctcttttgtggttctacatgaatgtcagcattttaaaataattctgtgaagaatgacattggtactttggtaggtattgtatagaatgtgtagactgc

SEQ ID NO: 101204 - DNA, 120 bp, synthetic construct
  source 1..120: mol_type = other DNA
gatacatgtatgtgatgtgagatatatatatatgtatatacgtccattttctttattccacgcatcagttgatggacactggttgattccatatctttgcatattgtgaattgtgctgca

SEQ ID NO: 101205 - DNA, 120 bp, synthetic construct; identical to SEQ ID NO: 1150
  source 1..120: mol_type = other DNA

SEQ ID NO: 101206 - DNA, 120 bp, synthetic construct; identical to SEQ ID NO: 1151
  source 1..120: mol_type = other DNA

SEQ ID NO: 101207 - DNA, 120 bp, synthetic construct; identical to SEQ ID NO: 1152
  source 1..120: mol_type = other DNA

SEQ ID NO: 101208 - DNA, 120 bp, synthetic construct; identical to SEQ ID NO: 1171
  source 1..120: mol_type = other DNA

SEQ ID NO: 101209 - DNA, 120 bp, synthetic construct; identical to SEQ ID NO: 1170
  source 1..120: mol_type = other DNA

SEQ ID NO: 101210 - DNA, 120 bp, synthetic construct; identical to SEQ ID NO: 1153
  source 1..120: mol_type = other DNA

SEQ ID NO: 101211 - DNA, 120 bp, synthetic construct
  source 1..120: mol_type = other DNA
tttggtagatttaacacataacaaattaaatttagtccaaacaaatagtgagaaagttaagtttgctggttcatgtttttcttctccctttgtctaaggtgaattatttttcacatgtta

SEQ ID NO: 101212 - DNA, 120 bp, synthetic construct
  source 1..120: mol_type = other DNA
ccaggagagggagcttgcagtgagccgacatccaccactacactccagcctgggtgacagagcgagactccatgtgaaaaaaaaaaaaaaaaattttaatagattcttaaaatttattgt

SEQ ID NO: 101213 - DNA, 120 bp, synthetic construct
  source 1..120: mol_type = other DNA
tattttctttttttcttttttctttttttttttttatgagctagagtcttcctctgtcaccaggctggaatgcagtggtgtgatcagctcactgcaacctccgcgaccctggttcaagtg

SEQ ID NO: 101214 - DNA, 120 bp, synthetic construct
  source 1..120: mol_type = other DNA
tccacatgagctatctgtcaccttgtcttaatgaataattgttcactaggaatattggttttggcattgaaatgatctatatctaaatgcagataggacccgggaccacttttgaacatt

SEQ ID NO: 101215 - DNA, 120 bp, synthetic construct
  source 1..120: mol_type = other DNA
caaagagcagcaggtcagcaggaatgactaatgtttttcgatgcatgtttaatggaatattcgtgtagggtattttgagtaggtaattggataatcagcatttataactcgcatcctact

SEQ ID NO: 101216 - DNA, 120 bp, synthetic construct
  source 1..120: mol_type = other DNA
tggcagaaaaaacataagtctattgggatatttaatatcccaatccccctcctcagcctcagaaagaaatgtttattctaagctaatcagatatttaccttcccagtgcctggtttggga

SEQ ID NO: 101217 - DNA, 120 bp, synthetic construct
  source 1..120: mol_type = other DNA
agcttctgtaagttaggttttataagttgcaggagacaagatggaatagatgtagttttaatctttaaggtgctcacaacagaagtgtttctatttcatttctgtggtttttcaacagaa

SEQ ID NO: 101218 - DNA, 120 bp, synthetic construct
  source 1..120: mol_type = other DNA
taacaaataaaattactgttttaaaatactgatctggaaacttaccaaatgtaaaattcttagagtatttcaaacaatatcagaatatcagaacttaacagtattatcccatccacttat

SEQ ID NO: 101219 - DNA, 120 bp, synthetic construct; identical to SEQ ID NO: 1169
  source 1..120: mol_type = other DNA

SEQ ID NO: 101220 - DNA, 120 bp, synthetic construct
  source 1..120: mol_type = other DNA
tgccttatctgtctgttgttattgtgtgtttttctcactgtcatgaatagggtttttatttttcactaccatatcttcactgcttagaaaaaggcttagcatattggatgtagctaccta

SEQ ID NO: 101221 - DNA, 120 bp, synthetic construct
  source 1..120: mol_type = other DNA
attgctctgccaaaaatgtcagtgtcattcttgactcatctgtccctctgacacctcatatctaatctttcagtaaatcttgtcaggtctacctgaagaatatgtccagaagccagtcat

SEQ ID NO: 101222 - DNA, 120 bp, synthetic construct
  source 1..120: mol_type = other DNA
gaagaaaattacaacattctcagtcatgactcctaagcatgatgtccttaaaagaactgtccacactcacgaactcaaattttcttttcattcactcttaatctcacaccggcgtcttca

SEQ ID NO: 101223 - DNA, 120 bp, synthetic construct
  source 1..120: mol_type = other DNA
tggtcccaactagtagagaggctgaggtgggaagatcactagagctcagaaagtcaagacttcagtgagccatgatcacacaactgcactccagcctgggaaacagagtgagaccctgtc

SEQ ID NO: 101224 - DNA, 120 bp, synthetic construct
  source 1..120: mol_type = other DNA
tactgggaactaaataatgagaactcatggacacaaagaggagaataacaggcaccaagggtctacttgaaggtggagcgtcgcgggagggagacgaccaaaaaactaacttttggtgtt

SEQ ID NO: 101225 - DNA, 120 bp, synthetic construct
  source 1..120: mol_type = other DNA
cacagtgtgtcatcctctaaatctgactgtttaatgtaaaatctaggtggtaaagacggaagaggacacattttgcatctttgtctttttatttgtgtgttcccatgaatcaaatggggt

SEQ ID NO: 101226 - DNA, 120 bp, synthetic construct
  source 1..120: mol_type = other DNA
gcccaatgaagaaaaaaaacgtgaaccagcaaacttaatttggtcaccatttgtttggactaaacttaatttgttatgtgttaaatctaccaaaaatgaatcagcagatgatttgtagtg

SEQ ID NO: 101227 - DNA, 120 bp, synthetic construct
  source 1..120: mol_type = other DNA
aggcagtgaaaatagccagccagaggcatgggaaattttaaatttaaatttttgatttaatgttgttttctttgctttaataatattagatagtccaaatgaaattacctttcagactag

SEQ ID NO: 101228 - DNA, 120 bp, synthetic construct
  source 1..120: mol_type = other DNA
ctaaaaacatgaaaattagctgggcatgatggtacatgcctgtaatcccagcttctccggagactgagacaggagaatcgcttgaaccagggagtgtcagaggttgcagtgagctgagat

SEQ ID NO: 101229 - DNA, 120 bp, synthetic construct
  source 1..120: mol_type = other DNA
tatagatcactttaaatgccaaaaccaatattcctactgaacaattattcattaagacaaggtgacagatagctcatgtggacagagctgagatgatactatgtagcaatttctcaataa

SEQ ID NO: 101230 - DNA, 120 bp, synthetic construct
  source 1..120: mol_type = other DNA
tacctattcaaaatatcctacatgaattttccattaaacgtgcatagaaaaacattagtcattcctgctgacctgctgctctttgctcttctgtattcaccagaaaatttcctccttcgt

SEQ ID NO: 101231 - DNA, 120 bp, synthetic construct
  source 1..120: mol_type = other DNA
tgttttattcacgtctcctttcgtggttggctaatccgcagcagctccaaacatcttgttctcacaacacaacatcgcaagggctgcttttcttcacgtgtgtcttttaaacagggagga

SEQ ID NO: 101232 - DNA, 120 bp, synthetic construct; identical to SEQ ID NO: 1154
  source 1..120: mol_type = other DNA

SEQ ID NO: 101233 - DNA, 120 bp, synthetic construct
  source 1..120: mol_type = other DNA
actttctgactacaaagaaaaacagatgctaaaaatctcttctgaaaacagcaatccaggtaagacttgtgatagtgaattactttagtcagttgtccccaacctttttgacaccaggga

SEQ ID NO: 101234 - DNA, 120 bp, synthetic construct
  source 1..120: mol_type = other DNA
ctaaaaaaaaataaaagtagacttttggtctcccatgtcagctggaattgaacatcaatataaagcattatcctaacagacatctactggctgagagtttgagtctgtagagaaggatcg

SEQ ID NO: 101235 - DNA, 120 bp, synthetic construct
  source 1..120: mol_type = other DNA
ataggtatgggaattaaaaaacatcaaagtcactgtatgaatcgccatgaagacttgagggatctgaatctactgattcatcttaaggcagcaggaccagtttgagtggccacaaagcag

SEQ ID NO: 101236 - DNA, 120 bp, synthetic construct
  source 1..120: mol_type = other DNA
cacttatctgaggtggacaaagatttaagtgaagattttgtcacagcttccctagactgacatgctgtaatagaaaatcagctagggggtaagagaaataagagctctctgcatgctcaa

SEQ ID NO: 101237 - DNA, 120 bp, synthetic construct
  source 1..120: mol_type = other DNA
tgagtgactgctgtccatctacaacacacagattaaaagaaagaactataccttccatatctatccagtgcatttaaattcgcttttttcttaattaaaaatttcacgacttgctgtttt

SEQ ID NO: 101238 - DNA, 120 bp, synthetic construct
  source 1..120: mol_type = other DNA
aggtattattctgtaagctgatacatactaccaataatattcattttaaggtctcaaccacagagataaaagtcagactaggtcaggaatggtggctcacacctgtaatcctagcatttg

SEQ ID NO: 101239 - DNA, 120 bp, synthetic construct
  source 1..120: mol_type = other DNA
tctgctttcaaatctagagtgtctggatgggaagggggaagataaacaagtaacaagatcaagttggattttgagttgactagaccctgttcttctcttaccggggaaaatcatgtggtg

SEQ ID NO: 101240 - DNA, 120 bp, synthetic construct
  source 1..120: mol_type = other DNA
gctggaacatggcactgatccaaatattccagatgagtatggaaataccactctgcactacgctatctataatgaagataaattaatggccaaagcactgctcttatatggtgctgatat

SEQ ID NO: 101241 - DNA, 120 bp, synthetic construct
  source 1..120: mol_type = other DNA
aattctcttattgaggcataaaataatggggcatcacacaatccctggtgtcttacatgaagtagaatatgttataacaggtccggggcggttccagtcagatgaccagcatttagataa

SEQ ID NO: 101242 - DNA, 120 bp, synthetic construct
  source 1..120: mol_type = other DNA
gaaaatactgaactcccaagctgtgttcatccattctttcaatccatttagtcatcagacataagccagacacctattatgtggcaggcatattctactatctctcaggatccttccacc

SEQ ID NO: 101243 - DNA, 120 bp, synthetic construct
  source 1..120: mol_type = other DNA
tgttttctgtccacaaagtttgtgaggatgaagaacagtggtacttacgtagtcatttaaagtttaaattgctacagcttttcaaacaaacactttagtggtaagaaccacattttaaaa

SEQ ID NO: 101244 - DNA, 120 bp, synthetic construct
  source 1..120: mol_type = other DNA
aggcagaggttgcagtgagccgagatcgcactactgcactccagccggggcagcagagtcagactccatccaaaaaaaagtatatatataaatatatatctgcatatataaataggcatt

SEQ ID NO: 101245 - DNA, 120 bp, synthetic construct
  source 1..120: mol_type = other DNA
ctcgtagaacactaatagactgttttaaagtgatttaacttgcaaaattaattaagtcaatgcagcagattatttttaatctacagattttaaaacaatgttctatacattatagaaaag

SEQ ID NO: 101246 - DNA, 120 bp, synthetic construct; identical to SEQ ID NO: 1155
  source 1..120: mol_type = other DNA

SEQ ID NO: 101247 - DNA, 120 bp, synthetic construct
  source 1..120: mol_type = other DNA
tgctaatgggtgcaaagtttcttttaaggagcataaaaatgttctaaaatcgtggtgattgtttaactagttaatacacttaaaaaactgaattttatactttaaatgagtgaattaaat

SEQ ID NO: 101248 - DNA, 120 bp, synthetic construct; identical to SEQ ID NO: 21540
  source 1..120: mol_type = other DNA

SEQ ID NO: 101249 - DNA, 120 bp, synthetic construct
  source 1..120: mol_type = other DNA
aattgatgctttgactttggaaaatagttttgtttacctggtttggagccgttagatttctaggtaaggtctccggacaggtggagttagccatgtctcctagctatgctggaaggagtc

SEQ ID NO: 101250 - DNA, 120 bp, synthetic construct
  source 1..120: mol_type = other DNA
gagttggcaaaattatttaagagagtgagctgtggatcctaattatgtgaacatgaatttttgaactgcatggtgcctcagtttatccatcattacagtggggacagtagtaagtttttc

SEQ ID NO: 101251 - DNA, 120 bp, synthetic construct; identical to SEQ ID NO: 101134
  source 1..120: mol_type = other DNA

SEQ ID NO: 101252 - DNA, 120 bp, synthetic construct
  source 1..120: mol_type = other DNA
tttttccttcttttttgttgtgatggtcttggactttttcaaattttgtgaattggggaggggataaaaggtgtcataataggccttctaattcctgcacctgttctttttgctttttct

SEQ ID NO: 101253 - DNA, 120 bp, synthetic construct
  source 1..120: mol_type = other DNA
gacgggcaaagccagaaaagcctagaatgggatgcagggagtggtaacgttagagcctcaccttgtcatgctggccactgggtggcagggaccagcttcagctaaggcactcagacccac

SEQ ID NO: 101254 - DNA, 120 bp, synthetic construct
  source 1..120: mol_type = other DNA
ccccaccccaccacaggtagcgcagctcctgatagcgcaccctgagtaagggcagtgcagcacccgacaacactcctaaaccaccccccgctgccagcattgtagctccaaataaccacc

SEQ ID NO: 101255 - DNA, 120 bp, synthetic construct
  source 1..120: mol_type = other DNA
atacaggaggattcctgactgcatgttctgattggatgagaaaaaccctccagggttacttggattggactttattatcatgttctgattggatgagagccagtcttaagacaaccaatc

SEQ ID NO: 101256 - DNA, 120 bp, synthetic construct
  source 1..120: mol_type = other DNA
aaaacagttttcgggtagatgaagggcgaaaaagtggtgagcagcaggagtgaggagaagggtttgggaaaagacgggagaaaatgtttttgcttagatgaaggagcaaaagagggtgat

SEQ ID NO: 101257 - DNA, 120 bp, synthetic construct
  source 1..120: mol_type = other DNA
aataggaaaaaaaaatcctaaaattcacatggaaacgcaaaatacctcagatagacaaaagaatctggaataaaaagaaaagctggaggcatcacacctgacttcaaaacatactacaaa

SEQ ID NO: 101258 - DNA, 120 bp, synthetic construct
  source 1..120: mol_type = other DNA
gtttgtttgttttttgggttttttgttgttgttgttgttgttgttgttgttgttttgcctttttttgttttttttggggttttttcttttggcttttttgtgttttttgtttttgttttt

SEQ ID NO: 101259 - DNA, 120 bp, synthetic construct
  source 1..120: mol_type = other DNA
cactacaaaaatgcagtgaagaacgcagtgaattacgcagtccagtgatgctaaaaaccaaccacatacgttaagtctgcaaaataaccagctgacagcatgacgacaggataaaatcca

SEQ ID NO: 101260 - DNA, 120 bp, synthetic construct
  source 1..120: mol_type = other DNA
cttccaggagcaaatgaaatcctttctgccactgcctttgcagtgaactgcccttgctatcctcagaagatatatcacgggagcaaagaccctaagtgccatatcaacacctccaataag

SEQ ID NO: 101261 - DNA, 120 bp, synthetic construct
  source 1..120: mol_type = other DNA
tagacagtaaaatcaacaggctaaaaattaagttccatgaaacaagataaaactctgagagaaaagatggggcaggccgccatctttcccgttcgggcaacttagtcattccagcctgag

SEQ ID NO: 101262 - DNA, 120 bp, synthetic construct; identical to SEQ ID NO: 14196
  source 1..120: mol_type = other DNA

SEQ ID NO: 101263 - DNA, 120 bp, synthetic construct
  source 1..120: mol_type = other DNA
ctatgtgggcaatgaggcccagagcaagagaggcatcctgaccctgaagtaccccatggagcacggcatcatcaccaactgggacgacatggagaagatctggcaccacaccttctacaa

SEQ ID NO: 101264 - DNA, 120 bp, synthetic construct
  source 1..120: mol_type = other DNA
aggatcactagaagtagcatcagcagacctggggaaaatcctgcatcttgtatatattttttgacttctccttttaagaatcacgatcttaaatgagttcagtgttgtatgtaggagtgc

SEQ ID NO: 101265 - DNA, 120 bp, synthetic construct; identical to SEQ ID NO: 14198
  source 1..120: mol_type = other DNA

SEQ ID NO: 101266 - DNA, 120 bp, synthetic construct; identical to SEQ ID NO: 14199
  source 1..120: mol_type = other DNA

SEQ ID NO: 101267 - DNA, 120 bp, synthetic construct; identical to SEQ ID NO: 14200
  source 1..120: mol_type = other DNA

SEQ ID NO: 101268 - DNA, 120 bp, synthetic construct
  source 1..120: mol_type = other DNA
catattgtcatattgtctttttaaattcctttttatgttcacttttttctctgtacaataatagtgatgttgttatacatttttatctcattaaaaagtagttacagtattctgctggca

SEQ ID NO: 101269 - DNA, 120 bp, synthetic construct
  source 1..120: mol_type = other DNA
ctggctatattgtttgattgattctcacttaaaaagtgtttgacagagttcattttaacaattttgcctggtaattatatgtatttttaaaattcttttggctttttataatctacattc

SEQ ID NO: 101270 - DNA, 120 bp, synthetic construct
  source 1..120: mol_type = other DNA
cctcccatttcatgctgagtatgtgtcagagttcctcctaataactaaaaggcagtcaaccatctggcatgttatctctcctgcttaaacttctgtttcttatctcttttgctctgtttc

SEQ ID NO: 101271 - DNA, 120 bp, synthetic construct
  source 1..120: mol_type = other DNA
aggttatcactacttttttctgtaaataaatctatgcattttttcttacacctcattttatttaatctgtcagcaatatttgagccaatggagggcatcttctccctaacggcgtcttca

SEQ ID NO: 101272 - DNA, 120 bp, synthetic construct
  source 1..120: mol_type = other DNA
ctaaaccaagagttggccagctttttctgcaaagaaccaattagtaaatattttaggctttgtggactacatatatttattttcttgagacagggtctggctctgtttcccaggctggag

SEQ ID NO: 101273 - DNA, 120 bp, synthetic construct
  source 1..120: mol_type = other DNA
taaactgtatcatggaggtttgggtacagattatttcatcagccacataataagcaaaatactcgaatggtagttttttggtcgtctccctcctgccactctccaccctcaagtaggccc

SEQ ID NO: 101274 - DNA, 120 bp, synthetic construct; identical to SEQ ID NO: 14189
  source 1..120: mol_type = other DNA

SEQ ID NO: 101275 - DNA, 120 bp, synthetic construct; identical to SEQ ID NO: 14201
  source 1..120: mol_type = other DNA

SEQ ID NO: 101276 - DNA, 120 bp, synthetic construct
  source 1..120: mol_type = other DNA
tttgagactaggctttgagaatcaatagattctttttttaagaatcttttggctgggggggtggctcatgcctgtaatctcagcactttgagaggctgaggtgggcggatcatgaggtca

SEQ ID NO: 101277 - DNA, 120 bp, synthetic construct; identical to SEQ ID NO: 14188
  source 1..120: mol_type = other DNA

SEQ ID NO: 101278 - DNA, 120 bp, synthetic construct; identical to SEQ ID NO: 14187
  source 1..120: mol_type = other DNA

SEQ ID NO: 101279 - DNA, 120 bp, synthetic construct; identical to SEQ ID NO: 14202
  source 1..120: mol_type = other DNA

SEQ ID NO: 101280 - DNA, 120 bp, synthetic construct; identical to SEQ ID NO: 14203
  source 1..120: mol_type = other DNA

SEQ ID NO: 101281 - DNA, 120 bp, synthetic construct
  source 1..120: mol_type = other DNA
acaggtgaagcttccttggcttgcctagtgctcacctcctcctgtgtggtgtggttcataatagtccgtggactggtatgagtctgtggcctgggagttgaggacccctgctctgggtgg

SEQ ID NO: 101282 - DNA, 120 bp, synthetic construct; identical to SEQ ID NO: 14204
  source 1..120: mol_type = other DNA

SEQ ID NO: 101283 - DNA, 120 bp, synthetic construct; identical to SEQ ID NO: 23409
  source 1..120: mol_type = other DNA

SEQ ID NO: 101284 - DNA, 120 bp, synthetic construct; identical to SEQ ID NO: 23408
  source 1..120: mol_type = other DNA

SEQ ID NO: 101285 - DNA, 120 bp, synthetic construct
  source 1..120: mol_type = other DNA
aagtggatacacttttcctttaatgaagacaagccgtaggtgggtgataaagagaaaaaagttaggctttagattcacacaatactggttttaattcctaactttcttacttgctaggtg

SEQ ID NO: 101286 - DNA, 120 bp, synthetic construct; identical to SEQ ID NO: 23407
  source 1..120: mol_type = other DNA

SEQ ID NO: 101287 - DNA, 120 bp, synthetic construct
  source 1..120: mol_type = other DNA
acctcaacctcagttttttttttctttctttctttttatttttatttttatttttatttttttttagtagagatgaggtttttgccatgtttctcaggctggtcttgaactcctgggctc

SEQ ID NO: 101288 - DNA, 120 bp, synthetic construct; identical to SEQ ID NO: 504
  source 1..120: mol_type = other DNA

SEQ ID NO: 101289 - DNA, 120 bp, synthetic construct; identical to SEQ ID NO: 14205
  source 1..120: mol_type = other DNA

SEQ ID NO: 101290 - DNA, 120 bp, synthetic construct; identical to SEQ ID NO: 503
  source 1..120: mol_type = other DNA

SEQ ID NO: 101291 - DNA, 120 bp, synthetic construct; identical to SEQ ID NO: 502
  source 1..120: mol_type = other DNA

SEQ ID NO: 101292 - DNA, 120 bp, synthetic construct
  source 1..120: mol_type = other DNA
tttaaattagaagaggaatgaaatactgttttctatttaagttagaggaggaatgaaaggccaggtgcagtggcttacgcctgttaccccagcactttaggaggctgaggcaggtggatc

SEQ ID NO: 101293 - DNA, 120 bp, synthetic construct
  source 1..120: mol_type = other DNA
gctgtcttttattattgtgctaagttaatttttttgtagcagaatggacaaaggcttgcttttccagatgtcaaaatgtgcatgttatttatttccacaaattgtttactaacagctgaa

SEQ ID NO: 101294 - DNA, 120 bp, synthetic construct
  source 1..120: mol_type = other DNA
atctcatcgtcatgctcaaggacactgacatgaacaagaaggacaagcaaaagaggtaaccaggcctgggctgggaggaggtgggatgtgggaggatgatggggacataccctcctggcc

SEQ ID NO: 101295 - DNA, 120 bp, synthetic construct; identical to SEQ ID NO: 14206
  source 1..120: mol_type = other DNA

SEQ ID NO: 101296 - DNA, 120 bp, synthetic construct
  source 1..120: mol_type = other DNA
aggagcaggtatcgaaggcacctcaggcaggtgctgggctcagtgggcgtcttgtgctccatgattttttttcaaattttattattattatactttaagttttagggtacatgtgcataa

SEQ ID NO: 101297 - DNA, 120 bp, synthetic construct
  source 1..120: mol_type = other DNA
aggtgtctacctgctcctgcttgtgtttgactgttacagcacctcatgccagggccaccagctcccatccctcctgtcaggaaggacacagacagcaagcgtctgggggtaaggcatttg

SEQ ID NO: 101298 - DNA, 120 bp, synthetic construct; identical to SEQ ID NO: 14207
  source 1..120: mol_type = other DNA

SEQ ID NO: 101299 - DNA, 120 bp, synthetic construct
  source 1..120: mol_type = other DNA
tttcccattggccaaaatggcctcaaatgacagggacagaacaaggcacaagtgcccattagagtgtctgagcccacctgctgtctgctcccacacatctcctgagaggtcccagcaggc

SEQ ID NO: 101300 - DNA, 120 bp, synthetic construct; identical to SEQ ID NO: 14178
  source 1..120: mol_type = other DNA

SEQ ID NO: 101301 - DNA, 120 bp, synthetic construct; identical to SEQ ID NO: 1266
  source 1..120: mol_type = other DNA

SEQ ID NO: 101302 - DNA, 120 bp, synthetic construct; identical to SEQ ID NO: 1267
  source 1..120: mol_type = other DNA

SEQ ID NO: 101303 - DNA, 120 bp, synthetic construct; identical to SEQ ID NO: 14179
  source 1..120: mol_type = other DNA

SEQ ID NO: 101304 - DNA, 120 bp, synthetic construct
  source 1..120: mol_type = other DNA
ggtggtgctgttgtgcatggccgctgctgcagctcagagcaccggctggcggagctggctgcaaatggcctcaaaatcacggagcatgttctcactcacaggtgggaatggaacgagaac

SEQ ID NO: 101305 - DNA, 120 bp, synthetic construct; identical to SEQ ID NO: 1268
  source 1..120: mol_type = other DNA

SEQ ID NO: 101306 - DNA, 120 bp, synthetic construct; identical to SEQ ID NO: 1269
  source 1..120: mol_type = other DNA

SEQ ID NO: 101307 - DNA, 120 bp, synthetic construct
  source 1..120: mol_type = other DNA
accagaagaaaacacaagtgcctatttacatatgcagatacatatatatatatatatatatataaatttctttttttttttgatggagtctcactctgttgcccaggctggagtgcagtg

SEQ ID NO: 101308 - DNA, 120 bp, synthetic construct; identical to SEQ ID NO: 514
  source 1..120: mol_type = other DNA

SEQ ID NO: 101309 - DNA, 120 bp, synthetic construct
  source 1..120: mol_type = other DNA
aggccccagtgtgtgttgcttccctctaggtatctgtgtgttgacatcatttagctcccacctataagtgagaacatacagtatttggttttctcttcctatgttagtttgctaaggata

SEQ ID NO: 101310 - DNA, 120 bp, synthetic construct; identical to SEQ ID NO: 14182
  source 1..120: mol_type = other DNA

SEQ ID NO: 101311 - DNA, 120 bp, synthetic construct; identical to SEQ ID NO: 14183
  source 1..120: mol_type = other DNA

SEQ ID NO: 101312 - DNA, 120 bp, synthetic construct
  source 1..120: mol_type = other DNA
ggctgtagtcccaactgttagggaggctgaggtgggaggattgcttgagctcaggagttcgagtctagccttgtcaacataatgagcccctgtctctaaaaacgacagcaacaataacaa

SEQ ID NO: 101313 - DNA, 120 bp, synthetic construct; identical to SEQ ID NO: 513
  source 1..120: mol_type = other DNA

SEQ ID NO: 101314 - DNA, 120 bp, synthetic construct
  source 1..120: mol_type = other DNA
gcccagtccaaataattgtttttctaccgaactgatttgtgttcatactgatcactatatcccaataagtatacattaatcttatttaatatttatgacttgagtgactgctatccatct

SEQ ID NO: 101315 - DNA, 120 bp, synthetic construct; identical to SEQ ID NO: 14184
  source 1..120: mol_type = other DNA

SEQ ID NO: 101316 - DNA, 120 bp, synthetic construct; identical to SEQ ID NO: 14185
  source 1..120: mol_type = other DNA

SEQ ID NO: 101317 - DNA, 120 bp, synthetic construct
  source 1..120: mol_type = other DNA
ggaccaatgagccttctctacagactcaaactctgagcccgcagatgttggttacaatgatgctttatattgatgttcaattccggctgacatgggagaccaaaagtctacttttatttt

SEQ ID NO: 101318 - DNA, 120 bp, synthetic construct; identical to SEQ ID NO: 14186
  source 1..120: mol_type = other DNA

SEQ ID NO: 101319 - DNA, 120 bp, synthetic construct
  source 1..120: mol_type = other DNA
caaataatgaaaatgacaatgataataacaagctcctgtctctacttttaattgtttgtgctctgtagcattagaaaaaatggctagtatctaaaagacatttgatagttatctgttaag

SEQ ID NO: 101320 - DNA, 120 bp, synthetic construct; identical to SEQ ID NO: 1270
  source 1..120: mol_type = other DNA

SEQ ID NO: 101321 - DNA, 120 bp, synthetic construct; identical to SEQ ID NO: 14187
  source 1..120: mol_type = other DNA

SEQ ID NO: 101322 - DNA, 120 bp, synthetic construct; identical to SEQ ID NO: 14188
  source 1..120: mol_type = other DNA

SEQ ID NO: 101323 - DNA, 120 bp, synthetic construct; identical to SEQ ID NO: 101276
  source 1..120: mol_type = other DNA

SEQ ID NO: 101324 - DNA, 120 bp, synthetic construct
  source 1..120: mol_type = other DNA
aatgtaagaatttgcatctctttctgtttggtgttgatttcggctcctaataatttaaagtgtgcctacaatccagttaggaatcttttgaaaaagcacttcagtgcactgtaggggctc

SEQ ID NO: 101325 - DNA, 120 bp, synthetic construct; identical to SEQ ID NO: 14189
  source 1..120: mol_type = other DNA

SEQ ID NO: 101326 - DNA, 120 bp, synthetic construct; identical to SEQ ID NO: 101273
  source 1..120: mol_type = other DNA

SEQ ID NO: 101327 - DNA, 120 bp, synthetic construct; identical to SEQ ID NO: 101272
  source 1..120: mol_type = other DNA

SEQ ID NO: 101328 - DNA, 120 bp, synthetic construct
  source 1..120: mol_type = other DNA
cttactggcattgagatcaagagtgaatggaaagaaaatttgagttcgtgagtgtagacagttacttaaaggacaacatacttaacactcacgactgagaatgatgtaattttcatccac

SEQ ID NO: 101329 - DNA, 120 bp, synthetic construct
  source 1..120: mol_type = other DNA
gatttcaggaaggccatcagtagcccaattttggatctgacaagtgtgtgatactcaacagctaatcaaataactatttattaggtagctacgtctgataggctaggcctgtcaagtagc

SEQ ID NO: 101330 - DNA, 120 bp, synthetic construct
  source 1..120: mol_type = other DNA
cgattgtatcaccaggacgcatcaggcttaagattcaattgggagcataccagggattctctctaacgtaattgagggaaggttcaatgaaacagtgatttatcatctctaacttcaaac

SEQ ID NO: 101331 - DNA, 120 bp, synthetic construct
  source 1..120: mol_type = other DNA
cctgaggagatgggattacaggcgcgtgccatgaggcccggctaattttcgtatttttagtagagacggggtttcaccctgttggtcaggctggtctcgaactcctgacctcaggcaatc

SEQ ID NO: 101332 - DNA, 120 bp, synthetic construct
  source 1..120: mol_type = other DNA
ttgaggaaagaccagctgggaggtgattggctcatggggtcggtttcctccgtgctgttcttgtgatagtgagtgagttctcacaagagctgacggtttcataaggggctctttcccctt

SEQ ID NO: 101333 - DNA, 120 bp, synthetic construct
  source 1..120: mol_type = other DNA
gtgctgggaaaaaaagagagccacatgtggaggaatgaaactggatctctatctctcaacatatacaaaaattaattcaagatggatgaaaggcccaaacctaagacctgaaaacattgg

SEQ ID NO: 101334 - DNA, 120 bp, synthetic construct; identical to SEQ ID NO: 14199
  source 1..120: mol_type = other DNA

SEQ ID NO: 101335 - DNA, 120 bp, synthetic construct; identical to SEQ ID NO: 14198
  source 1..120: mol_type = other DNA

SEQ ID NO: 101336 - DNA, 120 bp, synthetic construct; identical to SEQ ID NO: 101264
  source 1..120: mol_type = other DNA

SEQ ID NO: 101337 - DNA, 120 bp, synthetic construct; identical to SEQ ID NO: 101263
  source 1..120: mol_type = other DNA

SEQ ID NO: 101338 - DNA, 120 bp, synthetic construct
  source 1..120: mol_type = other DNA
ggggcttcctgaaacaatgcatctcacaatatttggaatgactattgaaaagaaaaacaatgtacgatcaaagtcctcagccacattgtagaactttgggggaagctcactccaaccaac

SEQ ID NO: 101339 - DNA, 120 bp, synthetic construct
  source 1..120: mol_type = other DNA
catctttcccgttcgggcaacttagtcattccagcctgagggctttggagagtacaaactgaccagggaaagaagagatcccagagcacagcatagctgctttaccaaatcatggccaga

SEQ ID NO: 101340 - DNA, 120 bp, synthetic construct
  source 1..120: mol_type = other DNA
atctcccacaggtaccacacacactccactactcatcaccagacagggaaccctggcttgggcccacagcacagaccctccatcctgggccgattacactgagtgattgctaactcacat

SEQ ID NO: 101341 - DNA, 120 bp, synthetic construct
  source 1..120: mol_type = other DNA
taacgtatgtggttggtttttagcatcactggactgcgtaattcactgcgttcttcactgcatttttgtagtggctggtgatggttttttctttccatatttagtgcttccttcaggagc

SEQ ID NO: 101342 - DNA, 120 bp, synthetic construct
  source 1..120: mol_type = other DNA
ttttgttgttgttgttgttgttgttgttgttgttttgcctttttttgttttttttggggttttttcttttggcttttttgtgttttttgtttttgtttttcattttttgtgtgtgtttat

SEQ ID NO: 101343 - DNA, 120 bp, synthetic construct
  source 1..120: mol_type = other DNA
aaattctaagtctggacagggccacagaaggctgagtcccttggatggtaatcctggctgccttctgcacttgaacatgaagtcctcctcaagacggcctgtggtctgcctcttggcaac

SEQ ID NO: 101344 - DNA, 120 bp, synthetic construct
  source 1..120: mol_type = other DNA
actggtccagttgcaccattgcagaggtggctggttgctctttgagccagcttggccttgcctggcatgcataggtcccagctactgacacgctgctccgagtgagcttgtcctgccttg

SEQ ID NO: 101345 - DNA, 120 bp, synthetic construct
  source 1..120: mol_type = other DNA
gagccagcctggccttccctggcatgcacaggccccaggtaccaacacgctgctccgagtgagcttgccatgccttgacacaaattctaagtctggccacggccacagaaggccaagtcc

SEQ ID NO: 101346 - DNA, 120 bp, synthetic construct
  source 1..120: mol_type = other DNA
ctaattaagctaaagagtgtctgcagagcaaaagaaactatcatcagagtgaacaggcaacccacagaatgggagaaaatttttgcaatctatccatctggcaaacggctaatatgcaga

SEQ ID NO: 101347 - DNA, 120 bp, synthetic construct
  source 1..120: mol_type = other DNA
ttttaaaaaatttccaactggatttttttttgttttttgtggtttttttttttgttgtttttttgttttgttttgtttttgtttttgttttgcagccccaggagttttagccaattcaga

SEQ ID NO: 101348 - DNA, 120 bp, synthetic construct; identical to SEQ ID NO: 21444
  source 1..120: mol_type = other DNA

SEQ ID NO: 101349 - DNA, 120 bp, synthetic construct; identical to SEQ ID NO: 21445
  source 1..120: mol_type = other DNA

SEQ ID NO: 101350 - DNA, 120 bp, synthetic construct; identical to SEQ ID NO: 21490
  source 1..120: mol_type = other DNA

SEQ ID NO: 101351 - DNA, 120 bp, synthetic construct; identical to SEQ ID NO: 21491
  source 1..120: mol_type = other DNA

SEQ ID NO: 101352 - DNA, 120 bp, synthetic construct; identical to SEQ ID NO: 21492
  source 1..120: mol_type = other DNA

SEQ ID NO: 101353 - DNA, 120 bp, synthetic construct
  source 1..120: mol_type = other DNA
gaaattccttctgtccaaatatatgcatagctaaggctcttaggatggtgtggttgataggttagatatcagagtgtaaacctaatcttaaaaatgtagtcaaattgttaatcttatatt

SEQ ID NO: 101354 - DNA, 120 bp, synthetic construct; identical to SEQ ID NO: 21493
  source 1..120: mol_type = other DNA

SEQ ID NO: 101355 - DNA, 120 bp, synthetic construct
  source 1..120: mol_type = other DNA
agcaattgggcaagagaaataaagggcatccaaattggaaaagaggaagtcaaactatctcttcaccaatgatattatcctatacctagaaaaccctaaagactcctacaaaacactcct

SEQ ID NO: 101356 - DNA, 120 bp, synthetic construct; identical to SEQ ID NO: 21494
  source 1..120: mol_type = other DNA

SEQ ID NO: 101357 - DNA, 120 bp, synthetic construct
  source 1..120: mol_type = other DNA
atgagatcattttgttttcaaacaaaatcataagtaataaaaattgctattttgaattataaataatgacatttagatattttaaaaataaggatacccccccccaatagtttggctttg

SEQ ID NO: 101358 - DNA, 120 bp, synthetic construct
  source 1..120: mol_type = other DNA
tgccatgacacccggctaatttttgtatttttagtagagacggggtttcatcctgtttgtcaggctggtcttgaactcctgacctcaggcagtccacccacctgggtggattacaggtgt

SEQ ID NO: 101359 - DNA, 120 bp, synthetic construct
  source 1..120: mol_type = other DNA
tatccctagtgcttaaagactccaggcacacctctgcacttagcagttccctgtgtctggaatgctttttccccagatattcttctagcttactgtttccattacttcagctctttactt

SEQ ID NO: 101360 - DNA, 120 bp, synthetic construct
  source 1..120: mol_type = other DNA
atgagccaagatcatgccactgaactccagcctgggggacaaagcgagactctgtcttaaaaaaaaaaaaaaaaaaaaaaaaaaaaccatgagaaagaagattgaggactgagccatgag

SEQ ID NO: 101361 - DNA, 120 bp, synthetic construct; identical to SEQ ID NO: 21449
  source 1..120: mol_type = other DNA

SEQ ID NO: 101362 - DNA, 120 bp, synthetic construct; identical to SEQ ID NO: 101175
  source 1..120: mol_type = other DNA

SEQ ID NO: 101363 - DNA, 120 bp, synthetic construct; identical to SEQ ID NO: 21450
  source 1..120: mol_type = other DNA

SEQ ID NO: 101364 - DNA, 120 bp, synthetic construct; identical to SEQ ID NO: 21451
  source 1..120: mol_type = other DNA

SEQ ID NO: 101365 - DNA, 120 bp, synthetic construct; identical to SEQ ID NO: 21452
  source 1..120: mol_type = other DNA

SEQ ID NO: 101366 - DNA, 120 bp, synthetic construct
  source 1..120: mol_type = other DNA
tcctccacgtctgtcccctctgctccaagactgcaggggagagtcttgcacatcatctttgtaaaaacagtctttgttttactcagaaatattttattgagtcctgctaaatacatgcta

SEQ ID NO: 101367 - DNA, 120 bp, synthetic construct
  source 1..120: mol_type = other DNA
gtttttccctcttgccgcctgcagccaatcagaattttttagcaggacataatgaaaagaagtaagagaaagagtgtttttttgtatgggatagtatttaacgtaaacttgagagtgagt

SEQ ID NO: 101368 - DNA, 120 bp, synthetic construct; identical to SEQ ID NO: 21495
  source 1..120: mol_type = other DNA

SEQ ID NO: 101369 - DNA, 120 bp, synthetic construct
  source 1..120: mol_type = other DNA
tgcccatttgggaggaagagcagcaagtgcagaagacaagatgcttgagtgaacatggcagggtttctgagcagttcacttttggtattaccaaaagtgtgagataccagaggttgggag

SEQ ID NO: 101370 - DNA, 120 bp, synthetic construct; identical to SEQ ID NO: 21496
  source 1..120: mol_type = other DNA

SEQ ID NO: 101371 - DNA, 120 bp, synthetic construct; identical to SEQ ID NO: 21497
  source 1..120: mol_type = other DNA

SEQ ID NO: 101372 - DNA, 120 bp, synthetic construct
  source 1..120: mol_type = other DNA
tattataaagagccaaaacgattttaaaaatgcagacaattaccaggcaaaactgttagaaagaaccatgtcaaacttgtttttttttttttgagacggagtcttgctctgtcacccagg

SEQ ID NO: 101373 - DNA, 120 bp, synthetic construct
  source 1..120: mol_type = other DNA
cctctgtgcttggcagttccctgtgtctgggatgctttttccccagatatcctcctagcttactctttccattccttcagttctttatttaaaaccacctttctaagaagaagaaaaggg

SEQ ID NO: 101374 - DNA, 120 bp, synthetic construct
  source 1..120: mol_type = other DNA
atcacttaaacccaagaggcagaagttgtagtgagctgagatcacaccactgaactccagcctgggggacagagtcaaactccgtctcaaaaaaagaaaaagaaaaagtcaggagaaaga

SEQ ID NO: 101375 - DNA, 120 bp, synthetic construct
  source 1..120: mol_type = other DNA
caattctaggacaactgatactcatcaaatatacaaagtaattgatcacagcaaaatactgggttctattaacaggaataaagtgggagaaatgcagacaataatcttattttataaatg

SEQ ID NO: 101376 - DNA, 120 bp, synthetic construct; identical to SEQ ID NO: 21522
  source 1..120: mol_type = other DNA

SEQ ID NO: 101377 - DNA, 120 bp, synthetic construct
  source 1..120: mol_type = other DNA
caggagataactatgtgctgtcaaactaaccctagtttgggctaatattcatgatgaacaaattttatagttttactaggatattcagccttgcccattaatcagaaaaatgaaaatcag

SEQ ID NO: 101378 - DNA, 120 bp, synthetic construct
  source 1..120: mol_type = other DNA
atcatcagtgaaaaagttaatatttaactcagaaagaattctgtacattgagttttcaagagatacaaagcctagagatattctttgattattatggaacaatcctgaatggtgctataa

SEQ ID NO: 101379 - DNA, 120 bp, synthetic construct; identical to SEQ ID NO: 21456
  source 1..120: mol_type = other DNA

SEQ ID NO: 101380 - DNA, 120 bp, synthetic construct
  source 1..120: mol_type = other DNA
ctctgggatgtctggagcccatacctgtgggctctagcttctcaggcagggtcaccacgacctttcctgggccctgcttgttactatccttagagtcagactagctaagtgcgggaaaac

SEQ ID NO: 101381 - DNA, 120 bp, synthetic construct
  source 1..120: mol_type = other DNA
tgacatgctttattttaattgtttttaaaccctaatgcctagcatgtatttagcaggactcaataagaaatttctgagtaaaatgtgagtaagatgatgtgcaagactgtcctctgcagt

SEQ ID NO: 101382 - DNA, 120 bp, synthetic construct
  source 1..120: mol_type = other DNA
tccaagaatctgaaagttgatgataaatgtccatgtgtatcaccatcaatgatcaaaagttagcatccacaacatagaatgggacagatgaacttaatggataaagatgaatatcggagt

SEQ ID NO: 101383 - DNA, 120 bp, synthetic construct
  source 1..120: mol_type = other DNA
ctgggaaggtaaatacctgattagcttagaataatcatttctgtttctgaggctgaggagggggattgggataataaatatcccaatagacttggatttcttcttcaagaaagaataagg

SEQ ID NO: 101384 - DNA, 120 bp, synthetic construct; identical to SEQ ID NO: 21498
  source 1..120: mol_type = other DNA

SEQ ID NO: 101385 - DNA, 120 bp, synthetic construct
  source 1..120: mol_type = other DNA
ttatggctcatattaccgcctgtactctgcctccagtcagatcagtgatagcattagatactcattggagcatgaacctgttgtgaactgcccatctgagggatctaggttgtgtgcttc

SEQ ID NO: 101386 - DNA, 120 bp, synthetic construct; identical to SEQ ID NO: 21543
  source 1..120: mol_type = other DNA

SEQ ID NO: 101387 - DNA, 120 bp, synthetic construct
  source 1..120: mol_type = other DNA
caaataatgtggcagaaagaggtcagtgtttgtttcctctttgctaccagatctgtactgtgaggcacctttatatcctgtatagaacccagtagaaagtcccatatgaaccttgccctg

SEQ ID NO: 101388 - DNA, 120 bp, synthetic construct; identical to SEQ ID NO: 21499
  source 1..120: mol_type = other DNA

SEQ ID NO: 101389 - DNA, 120 bp, synthetic construct; identical to SEQ ID NO: 21518
  source 1..120: mol_type = other DNA

SEQ ID NO: 101390 - DNA, 120 bp, synthetic construct; identical to SEQ ID NO: 21500
  source 1..120: mol_type = other DNA

SEQ ID NO: 101391 - DNA, 120 bp, synthetic construct
  source 1..120: mol_type = other DNA
ttgaagccaggcatggtggtacatggctgtagtcccagctgctagggaggctgaggtgggaggattgcttgagctcaggagttcgagtctagcctggtcaacataatgagaccctgtctc

SEQ ID NO: 101392 - DNA, 120 bp, synthetic construct
  source 1..120: mol_type = other DNA
atgaagtcttagataattaggtcatttcaaaatatttccattcaggttatgcttgagcttccaaatatggaagactggcccttacacaggtcaatgttaaaatgaatgcatttcagtatt

SEQ ID NO: 101393 - DNA, 120 bp, synthetic construct
  source 1..120: mol_type = other DNA
atcatctcagttcaaatgttgtctttagtggtattagtaaaaattaaaatatctaacaattattgagctgttatttgtgttaggaactattctatatctttggtgcagagtctcatttaa

SEQ ID NO: 101394 - DNA, 120 bp, synthetic construct
  source 1..120: mol_type = other DNA
ttctggaggtagaaaatagtaatagataacctttaactgcccttttgaaaatttatgtcttggggaaaagactgttttagttgttttaagaactaaaatgtggtacataaacagcatgga

SEQ ID NO: 101395 - DNA, 120 bp, synthetic construct
  source 1..120: mol_type = other DNA
caaagtttgtgaggatgaagaacagtggtacttatgtagttgtttaaagtttaagttgctgcagcttttcaaacagacactttagtggtaagaactacattttaaaaatgtgtatgcttt

SEQ ID NO: 101396 - DNA, 120 bp, synthetic construct
  source 1..120: mol_type = other DNA
tatgtgtgtgtgtgtgtatatatatatatatatatatatatacttttttttttggtggagtctcactctgtagcccaagctggagtgcagtggtgtgatctcggctcactgcaacctctg

SEQ ID NO: 101397 - DNA, 120 bp, synthetic construct
  source 1..120: mol_type = other DNA
tagccctgaagttgatgtgttatggggcttcgttcttagttctcaatatacacttttctataatgtatagaacattgttttaaaatctgtagattaaaaataatctgctgcattgactta

SEQ ID NO: 101398 - DNA, 120 bp, synthetic construct; identical to SEQ ID NO: 21501
  source 1..120: mol_type = other DNA

SEQ ID NO: 101399 - DNA, 120 bp, synthetic construct
  source 1..120: mol_type = other DNA
cgctgatggcctcgtgttctgggtgcagagcaaagaggaccaggtgtcaaaggcacctcaggcaggcgctgggctcagtgggcatcttgtgctccgggattttgaggccatttgcagcca

SEQ ID NO: 101400 - DNA, 120 bp, synthetic construct; identical to SEQ ID NO: 21502
  source 1..120: mol_type = other DNA

SEQ ID NO: 101401 - DNA, 120 bp, synthetic construct
  source 1..120: mol_type = other DNA
aagctgagggcccgttgcagggcagcagagtgataggtaaatagggggagcatattcattcattctctcaacaattaaatattaaatacgtctgtgctaccagggatacaaaggtaaaca

SEQ ID NO: 101402 - DNA, 120 bp, synthetic construct
  source 1..120: mol_type = other DNA
tcacgttttctgctataaacagcatataacagactaagacaggtgctgcttgggttcaatgctaaacacgtgatttctctaacttagcaaatcgccaaaagctagggttcagtccagtgt

SEQ ID NO: 101403 - DNA, 120 bp, synthetic construct
  source 1..120: mol_type = other DNA
ttgactttgtgtttgagctgcaaataactattgtcacacaactgtttatgaacaatagctgcttagggatttcctgaaatctctccagcaggtgcacctctgttgacattgctgcacgct

SEQ ID NO: 101404 - DNA, 120 bp, synthetic construct
  source 1..120: mol_type = other DNA
tgtgaagctttgacttattaatgaagtggcttgaaattcacccaggaaattgctgaggtcttatcagaactgagtcctttgctgggtctgcagtcatttggatcaagcatgaccttattc

SEQ ID NO: 101405 - DNA, 120 bp, synthetic construct; identical to SEQ ID NO: 21514
  source 1..120: mol_type = other DNA

SEQ ID NO: 101406 - DNA, 120 bp, synthetic construct
  source 1..120: mol_type = other DNA
ctcctcatcctccatcgtccccaaggtgaagtctgaccaccatggcctgtcgtcagcaagaatcctattgggccagattagccagagtcctttaactctgaatcaccttttagtcatttt

SEQ ID NO: 101407 - DNA, 120 bp, synthetic construct
  source 1..120: mol_type = other DNA
gctaggagcgtctcctccgtttttccacttgatgctcatagacaccacctctcgcccttccttcacagtcagctccaaacaaaacagtctccgtttcagttcatggctcctcaggacgga

SEQ ID NO: 101408 - DNA, 120 bp, synthetic construct; identical to SEQ ID NO: 21515
  source 1..120: mol_type = other DNA

SEQ ID NO: 101409 - DNA, 120 bp, synthetic construct; identical to SEQ ID NO: 21516
  source 1..120: mol_type = other DNA

SEQ ID NO: 101410 - DNA, 120 bp, synthetic construct
  source 1..120: mol_type = other DNA
ctattagtgttctacgagggaaattataatttgattggaaatcagctaaagttttttttgtgtgtgttgctgttcataaaggggcctgtgccctgacctctctgaggtttccacaaccag

SEQ ID NO: 101411 - DNA, 120 bp, synthetic construct
  source 1..120: mol_type = other DNA
atgaattatgaacaatccatcttttttaaataatacaaaacatcaccattatcaagtgctaaattcttacatatatttgggtatttctaaatttcctattctgttctattcattgatgtc

SEQ ID NO: 101412 - DNA, 120 bp, synthetic construct
  source 1..120: mol_type = other DNA
ggaggttgcagtgagccgagatcgcgccactacattccagcctgagtgatagagtgagactccatctcaaaaaaaaaagaaaaaaaaaaaaaaaaggaatgaaatactgttttctatcca

SEQ ID NO: 101413 - DNA, 120 bp, synthetic construct
  source 1..120: mol_type = other DNA
ggacttaatctcaattgaagcttttcctccctcctttcaaacaaaagcatttctggaggtagaaaatagtaatagataacctttaactgcccttttgaaaatttatgtcttggggaaaag

SEQ ID NO: 101414 - DNA, 120 bp, synthetic construct
  source 1..120: mol_type = other DNA
taacacaaataacagctcaataattgttagatattttaatttttactaataccactaaagacaacatttgaattgagatgatacaattatacctgcactttcaggtgtgttttaaatatt

SEQ ID NO: 101415 - DNA, 120 bp, synthetic construct; identical to SEQ ID NO: 21517
  source 1..120: mol_type = other DNA

SEQ ID NO: 101416 - DNA, 120 bp, synthetic construct; identical to SEQ ID NO: 101146
  source 1..120: mol_type = other DNA

SEQ ID NO: 101417 - DNA, 120 bp, synthetic construct; identical to SEQ ID NO: 21500
  source 1..120: mol_type = other DNA

SEQ ID NO: 101418 - DNA, 120 bp, synthetic construct; identical to SEQ ID NO: 21518
  source 1..120: mol_type = other DNA

SEQ ID NO: 101419 - DNA, 120 bp, synthetic construct; identical to SEQ ID NO: 101149
  source 1..120: mol_type = other DNA

SEQ ID NO: 101420 - DNA, 120 bp, synthetic construct
  source 1..120: mol_type = other DNA
ttttctctggcagatgttaggtgggcttgttctaaagggtgagaggggttcaaataatgtggcagaaagaggtcagtgtttgtttcctctttgctaccagatctgtactgtgaggcacct

SEQ ID NO: 101421 - DNA, 120 bp, synthetic construct; identical to SEQ ID NO: 21543
  source 1..120: mol_type = other DNA

SEQ ID NO: 101422 - DNA, 120 bp, synthetic construct; identical to SEQ ID NO: 101152
  source 1..120: mol_type = other DNA

SEQ ID NO: 101423 - DNA, 120 bp, synthetic construct; identical to SEQ ID NO: 21519
  source 1..120: mol_type = other DNA

SEQ ID NO: 101424 - DNA, 120 bp, synthetic construct; identical to SEQ ID NO: 101383
  source 1..120: mol_type = other DNA

SEQ ID NO: 101425 - DNA, 120 bp, synthetic construct; identical to SEQ ID NO: 21520
  source 1..120: mol_type = other DNA

SEQ ID NO: 101426 - DNA, 120 bp, synthetic construct; identical to SEQ ID NO: 101156
  source 1..120: mol_type = other DNA

SEQ ID NO: 101427 - DNA, 120 bp, synthetic construct; identical to SEQ ID NO: 21521
  source 1..120: mol_type = other DNA

SEQ ID NO: 101428 - DNA, 120 bp, synthetic construct; identical to SEQ ID NO: 101158
  source 1..120: mol_type = other DNA

SEQ ID NO: 101429 - DNA, 120 bp, synthetic construct; identical to SEQ ID NO: 101159
  source 1..120: mol_type = other DNA

SEQ ID NO: 101430 - DNA, 120 bp, synthetic construct
  source 1..120: mol_type = other DNA
acaccattactcaggttttctagtaatcccacattattactttcatgcttcttcatttcttcttcaaccttgagtgggatattaaggatagttatcactttattgaataaaaagaacctt

SEQ ID NO: 101431 - DNA, 120 bp, synthetic construct; identical to SEQ ID NO: 21522
  source 1..120: mol_type = other DNA

SEQ ID NO: 101432 - DNA, 120 bp, synthetic construct
  source 1..120: mol_type = other DNA
tcttgcttgataaaatcagccaattctaggacaactgatactcatcaaatatacaaagtaattgatcacagcaaaatactgggttctattaacaggaataaagtgggagaaatgcagaca

SEQ ID NO: 101433 - DNA, 120 bp, synthetic construct
  source 1..120: mol_type = other DNA
aaatgctgtctctactaaaaatacaaaaattagccaggcatggtggcacacacctgtaatgccagctactcaggaggctgaggcaggagaatcacttaaacccaagaggcagaagttgta

SEQ ID NO: 101434 - DNA, 120 bp, synthetic construct; identical to SEQ ID NO: 21523
  source 1..120: mol_type = other DNA

SEQ ID NO: 101435 - DNA, 120 bp, synthetic construct; identical to SEQ ID NO: 21524
  source 1..120: mol_type = other DNA

SEQ ID NO: 101436 - DNA, 120 bp, synthetic construct
  source 1..120: mol_type = other DNA
gatctggaaacttaccaaatgtaaaattcttagagtatttcaaacaatatcagaatatcagaacttaacagtattatcccatccacttatgcgtacgttctacaaacttctcatgaagct

SEQ ID NO: 101437 - DNA, 120 bp, synthetic construct
  source 1..120: mol_type = other DNA
ggtgtcctcatacagtttggattgtaccatgtattaggtgtccacatccaggtagcatactagcatttttgttactgtgaaacatttttatatttttattataatctgctgacccttgca

SEQ ID NO: 101438 - DNA, 120 bp, synthetic construct
  source 1..120: mol_type = other DNA
cgtgagtaaaacactgtcaacagcacagctgaaagagggacaggtgggatcctaggatatcaatgaataaaaaaacaactctggttcctactgttttagccactgctcatctagtatttg

SEQ ID NO: 101439 - DNA, 120 bp, synthetic construct; identical to SEQ ID NO: 21525
  source 1..120: mol_type = other DNA

SEQ ID NO: 101440 - DNA, 120 bp, synthetic construct; identical to SEQ ID NO: 21526
  source 1..120: mol_type = other DNA

SEQ ID NO: 101441 - DNA, 120 bp, synthetic construct
  source 1..120: mol_type = other DNA
catgcagaatgaaggaagacttcacatagcattgtttcaaaagatgaaaataaggccaggtgtggtggctcacacctgtaatcccagcactttcagaggggatcacgaggtcaggagatc

SEQ ID NO: 101442 - DNA, 120 bp, synthetic construct
  source 1..120: mol_type = other DNA
atagtccaaatgaaattacctttcagactaggctttgagaatcagtagattgtttttttaagaatcttttggccaggcaaggtggctcacgcctgtaatcccagcactttgagaggctga

SEQ ID NO: 101443 - DNA, 120 bp, synthetic construct; identical to SEQ ID NO: 21527
  source 1..120: mol_type = other DNA

SEQ ID NO: 101444 - DNA, 120 bp, synthetic construct
  source 1..120: mol_type = other DNA
ttagctcaaattaggattagtttgacagcacaaagttacctcctgttcaatgttgccataggcttacctgtgatactcttcattctcagtgtcaggaaattgctggctttcaggtgttct

SEQ ID NO: 101445 - DNA, 120 bp, synthetic construct
  source 1..120: mol_type = other DNA
gaaaaagctggccaactcctggtttagtagatcaaagattctttgatgtattttaataaaagttttaccaaatatactgaaatgtttatattaaatatagatccccatgtacaatcgctt

SEQ ID NO: 101446 - DNA, 120 bp, synthetic construct; identical to SEQ ID NO: 1171
  source 1..120: mol_type = other DNA

SEQ ID NO: 101447 - DNA, 120 bp, synthetic construct; identical to SEQ ID NO: 1152
  source 1..120: mol_type = other DNA

SEQ ID NO: 101448 - DNA, 120 bp, synthetic construct; identical to SEQ ID NO: 1151
  source 1..120: mol_type = other DNA

SEQ ID NO: 101449 - DNA, 120 bp, synthetic construct; identical to SEQ ID NO: 1150
  source 1..120: mol_type = other DNA

SEQ ID NO: 101450 - DNA, 120 bp, synthetic construct
  source 1..120: mol_type = other DNA
gaaatcgtactctcaaaaggacacccgcacacatatgtttactgcagcacaattcacaatatgcaaagatatggaatcaaccagtgtccatcaactgatgagtggaataaagaaaatgga

SEQ ID NO: 101451 - DNA, 120 bp, synthetic construct; identical to SEQ ID NO: 21528
  source 1..120: mol_type = other DNA

SEQ ID NO: 101452 - DNA, 120 bp, synthetic construct
  source 1..120: mol_type = other DNA
tctgtgtcctgtaacccatactctttatgtttattgtttggaaacactttctacttatattcttgattcctatgtattttataaacaacttagaaattccttttagaacaagacagggta

SEQ ID NO: 101453 - DNA, 120 bp, synthetic construct
  source 1..120: mol_type = other DNA
ccaaaaacgagaaaatctgttttcagtagcaaaacttatttctgatgtggaaagatcatcaattcttatgaaaaatatcaaatacttctcctttggattgaggccattgtgcaggtcact

SEQ ID NO: 101454 - DNA, 120 bp, synthetic construct; identical to SEQ ID NO: 21529
  source 1..120: mol_type = other DNA

SEQ ID NO: 101455 - DNA, 120 bp, synthetic construct; identical to SEQ ID NO: 1147
  source 1..120: mol_type = other DNA

SEQ ID NO: 101456 - DNA, 120 bp, synthetic construct; identical to SEQ ID NO: 21530
  source 1..120: mol_type = other DNA

SEQ ID NO: 101457 - DNA, 120 bp, synthetic construct; identical to SEQ ID NO: 101197
  source 1..120: mol_type = other DNA

SEQ ID NO: 101458 - DNA, 120 bp, synthetic construct
  source 1..120: mol_type = other DNA
attgcccagcctccagagatcaggtctcagaggagaactctctcaaaagtgaacccccagcacagcacagccgctctacacaaacgtggctagacttcttttattaagcaagtctccttt

SEQ ID NO: 101459 - DNA, 120 bp, synthetic construct; identical to SEQ ID NO: 21531
  source 1..120: mol_type = other DNA

SEQ ID NO: 101460 - DNA, 120 bp, synthetic construct
  source 1..120: mol_type = other DNA
atgatttccagcttcatccatgtccctgcaaaggacatgaactcatccttttttatgggtgcatagcattccatagtgtatatatgccacattatccagtctatcattgattggcgtttg

SEQ ID NO: 101461 - DNA, 120 bp, synthetic construct
  source 1..120: mol_type = other DNA
ttgtcagttttgtcaaagatgtggtggttttacatgtgtggtgccatttctgtggcctctgttctattccattggtctatatatctggtttggtaccagtaccatgctgtttccgttact

SEQ ID NO: 101462 - DNA, 120 bp, synthetic construct; identical to SEQ ID NO: 14178
  source 1..120: mol_type = other DNA

SEQ ID NO: 101463 - DNA, 120 bp, synthetic construct
  source 1..120: mol_type = other DNA
ggaggaaagggagaaagagacatgacaaaagcaagacagaagaaatgcagcaaaagcacacacacacacacacacacacacacacacactgacactcatctggggcaggccatcctgtca

SEQ ID NO: 101464 - DNA, 120 bp, synthetic construct; identical to SEQ ID NO: 1267
  source 1..120: mol_type = other DNA

SEQ ID NO: 101465 - DNA, 120 bp, synthetic construct; identical to SEQ ID NO: 14179
  source 1..120: mol_type = other DNA

SEQ ID NO: 101466 - DNA, 120 bp, synthetic construct; identical to SEQ ID NO: 14180
  source 1..120: mol_type = other DNA

SEQ ID NO: 101467 - DNA, 120 bp, synthetic construct; identical to SEQ ID NO: 1268
  source 1..120: mol_type = other DNA

SEQ ID NO: 101468 - DNA, 120 bp, synthetic construct; identical to SEQ ID NO: 14181
  source 1..120: mol_type = other DNA

SEQ ID NO: 101469 - DNA, 120 bp, synthetic construct
  source 1..120: mol_type = other DNA
atatatacacaaaatttcttttttttttttgatggagtctcactctgttgcccaggctggagtgcagtggtgcgatctcggctcactgcaacctctgcctcataggttcaagcaattctc

SEQ ID NO: 101470 - DNA, 120 bp, synthetic construct; identical to SEQ ID NO: 514
  source 1..120: mol_type = other DNA

SEQ ID NO: 101471 - DNA, 120 bp, synthetic construct; identical to SEQ ID NO: 101309
  source 1..120: mol_type = other DNA

SEQ ID NO: 101472 - DNA, 120 bp, synthetic construct; identical to SEQ ID NO: 14182
  source 1..120: mol_type = other DNA

SEQ ID NO: 101473 - DNA, 120 bp, synthetic construct; identical to SEQ ID NO: 14183
  source 1..120: mol_type = other DNA

SEQ ID NO: 101474 - DNA, 120 bp, synthetic construct
  source 1..120: mol_type = other DNA
gattttgatacagtaagtctaataaagcttggatatgtatatttaaaaatgtttccttgaagccaggcatgttggtgcatggctgtagtcccaactgttagggaggctgaggtgggagga

SEQ ID NO: 101475 - DNA, 120 bp, synthetic construct; identical to SEQ ID NO: 513
  source 1..120: mol_type = other DNA

SEQ ID NO: 101476 - DNA, 120 bp, synthetic construct; identical to SEQ ID NO: 101314
  source 1..120: mol_type = other DNA

SEQ ID NO: 101477 - DNA, 120 bp, synthetic construct; identical to SEQ ID NO: 14184
  source 1..120: mol_type = other DNA

SEQ ID NO: 101478 - DNA, 120 bp, synthetic construct; identical to SEQ ID NO: 14185
  source 1..120: mol_type = other DNA

SEQ ID NO: 101479 - DNA, 120 bp, synthetic construct; identical to SEQ ID NO: 101317
  source 1..120: mol_type = other DNA

SEQ ID NO: 101480 - DNA, 120 bp, synthetic construct; identical to SEQ ID NO: 14186
  source 1..120: mol_type = other DNA

SEQ ID NO: 101481 - DNA, 120 bp, synthetic construct; identical to SEQ ID NO: 101319
  source 1..120: mol_type = other DNA

SEQ ID NO: 101482 - DNA, 120 bp, synthetic construct; identical to SEQ ID NO: 1270
  source 1..120: mol_type = other DNA

SEQ ID NO: 101483 - DNA, 120 bp, synthetic construct; identical to SEQ ID NO: 14187
  source 1..120: mol_type = other DNA

SEQ ID NO: 101484 - DNA, 120 bp, synthetic construct; identical to SEQ ID NO: 14188
  source 1..120: mol_type = other DNA

SEQ ID NO: 101485 - DNA, 120 bp, synthetic construct; identical to SEQ ID NO: 101276
  source 1..120: mol_type = other DNA

SEQ ID NO: 101486 - DNA, 120 bp, synthetic construct; identical to SEQ ID NO: 101324
  source 1..120: mol_type = other DNA

SEQ ID NO: 101487 - DNA, 120 bp, synthetic construct; identical to SEQ ID NO: 14189
  source 1..120: mol_type = other DNA

SEQ ID NO: 101488 - DNA, 120 bp, synthetic construct; identical to SEQ ID NO: 101273
  source 1..120: mol_type = other DNA

SEQ ID NO: 101489 - DNA, 120 bp, synthetic construct; identical to SEQ ID NO: 101272
  source 1..120: mol_type = other DNA

SEQ ID NO: 101490 - DNA, 120 bp, synthetic construct; identical to SEQ ID NO: 101328
  source 1..120: mol_type = other DNA

SEQ ID NO: 101491 - DNA, 120 bp, synthetic construct; identical to SEQ ID NO: 14190
  source 1..120: mol_type = other DNA

SEQ ID NO: 101492 - DNA, 120 bp, synthetic construct; identical to SEQ ID NO: 14191
  source 1..120: mol_type = other DNA

SEQ ID NO: 101493 - DNA, 120 bp, synthetic construct; identical to SEQ ID NO: 14192
  source 1..120: mol_type = other DNA

SEQ ID NO: 101494 - DNA, 120 bp, synthetic construct; identical to SEQ ID NO: 14193
  source 1..120: mol_type = other DNA

SEQ ID NO: 101495 - DNA, 120 bp, synthetic construct; identical to SEQ ID NO: 14194
  source 1..120: mol_type = other DNA

SEQ ID NO: 101496 - DNA, 120 bp, synthetic construct
  source 1..120: mol_type = other DNA
taatagaaataaagtgcacaatgaatgtaatgtacttgaatcatcctggaaccatcccaaacctcaggttcctggaaaaattatcttccgcaaaaccagtccctggtgccagcatggttg

SEQ ID NO: 101497 - DNA, 120 bp, synthetic construct
  source 1..120: mol_type = other DNA
atggtaagtaagatgcaacttatagagattttcttagaaatcatgagattatttgtcattgtgataacttttatttcctctttataatgtttgaaacagtagtaactgtgaaatagggga

SEQ ID NO: 101498 - DNA, 120 bp, synthetic construct; identical to SEQ ID NO: 14195
  source 1..120: mol_type = other DNA

SEQ ID NO: 101499 - DNA, 120 bp, synthetic construct; identical to SEQ ID NO: 14196
  source 1..120: mol_type = other DNA

SEQ ID NO: 101500 - DNA, 120 bp, synthetic construct
  source 1..120: mol_type = other DNA
ctaaaaattaagttccatgaaacaagataaaactctgagagaaaagatggggcaggccgccatctttcccgttcgggcaacttagtcattccagcctgagggctttggagagtacaaact

SEQ ID NO: 101501 - DNA, 120 bp, synthetic construct
  source 1..120: mol_type = other DNA
gatctgcccatcaagtacagagtctggccacttttctgaagggctgctgtggaatgctgggggtcccctcaagtccctaattgactcgtattttccagggaagatgatagcctacccctt

SEQ ID NO: 101502 - DNA, 120 bp, synthetic construct
  source 1..120: mol_type = other DNA
atggttttttctttccatatttagtgcttccttcaggagctcttgtaaggtagatctggtgatattgaattccctcagcatttgcttgtctgaaaaggatcttatttctccttcacttat

SEQ ID NO: 101503 - DNA, 120 bp, synthetic construct
  source 1..120: mol_type = other DNA
taagattacccaccagctgcttttaatttctccttagcattagaacactcagtaatcatatgaattgtgcatttgtttgttttgcttaactctttctgtttgtttatgtttggggtttta

SEQ ID NO: 101504 - DNA, 120 bp, synthetic construct
  source 1..120: mol_type = other DNA
tgtccatgtgttctcatttttcaactcccacttatgagtgagaacatgtgtttctgttcttgtgttagtttgctgagaatgatggtttccagcttcatccatgtccctgcaaaggacatg

SEQ ID NO: 101505 - DNA, 120 bp, synthetic construct
  source 1..120: mol_type = other DNA
tccccatcaagataccactgacttttttcaaaaaattagaaaaactaccttaaatttcatatggaatcaaaaaagagtccgcatagccaagacaatcctaagcaaaaagaacaaagctgg

SEQ ID NO: 101506 - DNA, 120 bp, synthetic construct; identical to SEQ ID NO: 14197
  source 1..120: mol_type = other DNA

SEQ ID NO: 101507 - DNA, 120 bp, synthetic construct
  source 1..120: mol_type = other DNA
tgcctttggggctccagtccatgcctcaggcgtcatatggcactgtgggcttcttggttgccaagaggcagaccacaggctgtctagaggaggactttatgttcaagtgtagaaagcagc

SEQ ID NO: 101508 - DNA, 120 bp, synthetic construct
  source 1..120: mol_type = other DNA
cacaggccgtcttgaggaggactttatgttcaggtgcagaacgcagccaggattaccatccaggggggccttctgtagccctggccagaccttgcagaggtggctggttgctctttgagc

SEQ ID NO: 101509 - DNA, 120 bp, synthetic construct
  source 1..120: mol_type = other DNA
ggcaagggaagagccctctgccctgctcatgcctgtctacctattgtaacagtaactggcccccttatcttcttcttaatcttaaaggaaatgcttttaatttttcaccataaactatga

SEQ ID NO: 101510 - DNA, 120 bp, synthetic construct; identical to SEQ ID NO: 12396
  source 1..120: mol_type = other DNA

SEQ ID NO: 101511 - DNA, 120 bp, synthetic construct
  source 1..120: mol_type = other DNA
gagaggagagagcggacaagagaaggagcgggccggttgctggtcatccgtaatttggctaaggaagaaaggagcagcttctttctttgttatctcccgtgaaaccttcacttagcaggt

SEQ ID NO: 101512 - DNA, 120 bp, synthetic construct
  source 1..120: mol_type = other DNA
accaaaaaaaccacaaaaccaaaagagcaaaacaaaacaacagaagaaacacacacacaggccggaaagcacagcatgcgaagggcaaacacaaagcaaccaaaataacaacgggtttgg

SEQ ID NO: 101513 - DNA, 120 bp, synthetic construct; identical to SEQ ID NO: 12933
  source 1..120: mol_type = other DNA

SEQ ID NO: 101514 - DNA, 120 bp, synthetic construct; identical to SEQ ID NO: 12934
  source 1..120: mol_type = other DNA

SEQ ID NO: 101515 - DNA, 120 bp, synthetic construct; identical to SEQ ID NO: 29079
  source 1..120: mol_type = other DNA

SEQ ID NO: 101516 - DNA, 120 bp, synthetic construct
  source 1..120: mol_type = other DNA
gggttgttttttcttgtaaatttgtttgagttcattgtagattctggatatttgccctttgtcagatgagtaggttgcgaaaattttctcccattttgtaggttgcctgttcactctgat

SEQ ID NO: 101517 - DNA, 120 bp, synthetic construct
  source 1..120: mol_type = other DNA
ctgaataccctttatttccttctcctgcctaattgccctggccaaaacttccaacactatgttgaataggagtggtgagagagggcatccctgtcttgtgccagttttcaaagggaatgc

SEQ ID NO: 101518 - DNA, 120 bp, synthetic construct
  source 1..120: mol_type = other DNA
tctctttttttctttattagtcttgctagtggtctatgaattttgttgatcctttcaaaaaaccagctcctggattcattaattttttgaagggttttttgtgtctctatttccttcagt

SEQ ID NO: 101519 - DNA, 120 bp, synthetic construct
  source 1..120: mol_type = other DNA
ttgcttggtagatcttcttccatccttttattttgagcctatgtgtgtctctgcacgtgagatgggtttcctgaatacagcacactgatgggtcttgactctttatccaatttgccagtc

SEQ ID NO: 101520 - DNA, 120 bp, synthetic construct
  source 1..120: mol_type = other DNA
gataccctttcttccagttgatcacatcggctcctgagtcttctgcattcttcacgtagttctcgagccttggttttcagctccatcagctcctttaagcacttctctgtattggttatt

SEQ ID NO: 101521 - DNA, 120 bp, synthetic construct
  source 1..120: mol_type = other DNA
cagatggaaatgcagaaatcacccgtcttctgcgtcgctcacgctgggagctgtggactggagctgttcctatgcggccatcttggctcctccctagataggtactttttaaaaatgggg

SEQ ID NO: 101522 - DNA, 120 bp, synthetic construct
  source 1..120: mol_type = other DNA
tacagcatccatgtgtttgatcactaaactaggacatgggacagaaaggaagacacagtttctgctccaaaaagctcatagtcccattagagagaaaaaacaagatggtaaaataaaagc

SEQ ID NO: 101523 - DNA, 120 bp, synthetic construct; identical to SEQ ID NO: 29080
  source 1..120: mol_type = other DNA

SEQ ID NO: 101524 - DNA, 120 bp, synthetic construct
  source 1..120: mol_type = other DNA
tggattcgttttgccagtattttattgaggatttttgcatcaatgtttatcaaggatattagtctaaaattctcttttttggttgtgtctctgtccagctttggtatcaggatgatgctg

SEQ ID NO: 101525 - DNA, 120 bp, synthetic construct; identical to SEQ ID NO: 101516
  source 1..120: mol_type = other DNA

SEQ ID NO: 101526 - DNA, 120 bp, synthetic construct; identical to SEQ ID NO: 29081
  source 1..120: mol_type = other DNA

SEQ ID NO: 101527 - DNA, 120 bp, synthetic construct; identical to SEQ ID NO: 29082
  source 1..120: mol_type = other DNA

SEQ ID NO: 101528 - DNA, 120 bp, synthetic construct
  source 1..120: mol_type = other DNA
tcatcctgataccaaagccaggcagagacacaaccaaaaaagagaattttagaccaatatccttgatgaacattgatgcaaaaatcctcaataaaatactggcaaaccgaatccagcagc

SEQ ID NO: 101529 - DNA, 120 bp, synthetic construct
  source 1..120: mol_type = other DNA
caaaaaagagcccgcattgccaagtcaatcctaagccaaaagaacaaagctggaggcatcgtgctacctgacttcaaactatactacaaggctacagtaaccaaaacagcatggtacagg

SEQ ID NO: 101530 - DNA, 120 bp, synthetic construct
  source 1..120: mol_type = other DNA
acacatgcacacgtatgtttattgcggcactattcacaatagcaaagacttggacccaacccaaatgtccaacaatgatagactggattaagaaaatgtggcacatatacaccatggaat

SEQ ID NO: 101531 - DNA, 120 bp, synthetic construct; identical to SEQ ID NO: 29083
  source 1..120: mol_type = other DNA

SEQ ID NO: 101532 - DNA, 120 bp, synthetic construct
  source 1..120: mol_type = other DNA
aggggaggggaggggaggggaggggaggagaggacgaaagaaactgagattgaatgctttgtaattctcactgaaatagctaagaaatgtgaattgagaaacatatctttcttaattgga

SEQ ID NO: 101533 - DNA, 120 bp, synthetic construct
  source 1..120: mol_type = other DNA
tgcaattatgcttataaaaagtactttttttttttttttttgagacaaggtctcactctgccacctaggctggagtgcagtggtatgagcttgactcactgaagcctcaaccaccctggc

SEQ ID NO: 101534 - DNA, 120 bp, synthetic construct; identical to SEQ ID NO: 25722
  source 1..120: mol_type = other DNA

SEQ ID NO: 101535 - DNA, 120 bp, synthetic construct
  source 1..120: mol_type = other DNA
aaaaactctctataaaactataacgtatatacttagctttgagtatttttctgaactatctcaaatttaaaatattggccgggcgcggtggctcacgcctgtaatcccagcactttggga

SEQ ID NO: 101536 - DNA, 120 bp, synthetic construct; identical to SEQ ID NO: 27710
  source 1..120: mol_type = other DNA

SEQ ID NO: 101537 - DNA, 120 bp, synthetic construct
  source 1..120: mol_type = other DNA
tctgcccggcaaccaccccgtctgagaagtgaggagaccctccacccggcagctgccccgtctgagaaatgaggagcctctccgcccggcagccaccccgtctgggaagtgaggagcgtc

SEQ ID NO: 101538 - DNA, 120 bp, synthetic construct; identical to SEQ ID NO: 27711
  source 1..120: mol_type = other DNA

SEQ ID NO: 101539 - DNA, 120 bp, synthetic construct; identical to SEQ ID NO: 24108
  source 1..120: mol_type = other DNA

SEQ ID NO: 101540 - DNA, 120 bp, synthetic construct; identical to SEQ ID NO: 24109
  source 1..120: mol_type = other DNA

SEQ ID NO: 101541 - DNA, 120 bp, synthetic construct
  source 1..120: mol_type = other DNA
caaccctacaatctcagtgctttgggaactctacatgggaggattgattgaggccaggagttcaacagcagcctggccaacatagtaagaccttgtctttacaaaaaatttaaaaattag

SEQ ID NO: 101542 - DNA, 120 bp, synthetic construct; identical to SEQ ID NO: 27117
  source 1..120: mol_type = other DNA

SEQ ID NO: 101543 - DNA, 120 bp, synthetic construct
  source 1..120: mol_type = other DNA
gggtgggggcagaggttacagtgagctgagatcccactactacattccagcctgggtgacagagagagactccatctcaaaaaaaaaaaaaaatttctattaaaaaaactgattctatta

SEQ ID NO: 101544 - DNA, 120 bp, synthetic construct; identical to SEQ ID NO: 27119
  source 1..120: mol_type = other DNA

SEQ ID NO: 101545 - DNA, 120 bp, synthetic construct; identical to SEQ ID NO: 27120
  source 1..120: mol_type = other DNA

SEQ ID NO: 101546 - DNA, 120 bp, synthetic construct; identical to SEQ ID NO: 22709
  source 1..120: mol_type = other DNA

SEQ ID NO: 101547 - DNA, 120 bp, synthetic construct
  source 1..120: mol_type = other DNA
ccaactttggtgaatctgacaattatgtgtcttggagttgttcttctcgaggagtatctttgtggcattctctgtatttcctgaatctgaatgttggcctgccttgctagattggggaag

SEQ ID NO: 101548 - DNA, 120 bp, synthetic construct; identical to SEQ ID NO: 33539
  source 1..120: mol_type = other DNA

SEQ ID NO: 101549 - DNA, 120 bp, synthetic construct
  source 1..120: mol_type = other DNA
attagaaccagtcccacgtgactaagagcagccacgtgagtgaagagagtcatttatagcttactcattagtatcaacaaaatgtaaatagttccagacaccaagtggtgaatgcaccca

SEQ ID NO: 101550 - DNA, 120 bp, synthetic construct
  source 1..120: mol_type = other DNA
ctccaggggacatttggcaatgtctggagacattgttgtttgttatgactaagatggaggtgaggtgctactggcatctaataaataaaggccagacatgctgccaaacatcttataatg

SEQ ID NO: 101551 - DNA, 120 bp, synthetic construct
  source 1..120: mol_type = other DNA
aaacaacaaaaaaaaaaataaattggactttttcaaaattaaaaacttttgggtatcaggctggtcgcagtggctcacgcctgtaatcccagcactttgggaggcagaggtgggcagatc

SEQ ID NO: 101552 - DNA, 120 bp, synthetic construct; identical to SEQ ID NO: 12050
  source 1..120: mol_type = other DNA

SEQ ID NO: 101553 - DNA, 120 bp, synthetic construct
  source 1..120: mol_type = other DNA
ggctgacccccccatctccctcccggatgaggtggctggccgggcacaggggctcctcacttcccagtaggggcagccgggcagaggcgcccctcacctcctggacggggcggctggccg

SEQ ID NO: 101554 - DNA, 120 bp, synthetic construct
  source 1..120: mol_type = other DNA
gagatcacgccactgcactccagcctgggcaccattgagcactgagtgaaccagacactgtctgcaatcccagcacctctggaggccgaggctggcggaccactcgcggttaggagctgg

SEQ ID NO: 101555 - DNA, 120 bp, synthetic construct; identical to SEQ ID NO: 12051
  source 1..120: mol_type = other DNA

SEQ ID NO: 101556 - DNA, 120 bp, synthetic construct; identical to SEQ ID NO: 12052
  source 1..120: mol_type = other DNA

SEQ ID NO: 101557 - DNA, 120 bp, synthetic construct; identical to SEQ ID NO: 12053
  source 1..120: mol_type = other DNA

SEQ ID NO: 101558 - DNA, 120 bp, synthetic construct
  source 1..120: mol_type = other DNA
agtctgtttgttgagatgaggaagacactggtttagaggagactaggaattgagccagggctgtgttcagaccagccttggcaacataggaagacctcatctctacaaaaaaaattaaaa

SEQ ID NO: 101559 - DNA, 120 bp, synthetic construct; identical to SEQ ID NO: 12054
  source 1..120: mol_type = other DNA

SEQ ID NO: 101560 - DNA, 120 bp, synthetic construct; identical to SEQ ID NO: 12055
  source 1..120: mol_type = other DNA

SEQ ID NO: 101561 - DNA, 120 bp, synthetic construct; identical to SEQ ID NO: 13098
  source 1..120: mol_type = other DNA

SEQ ID NO: 101562 - DNA, 120 bp, synthetic construct
  source 1..120: mol_type = other DNA
atatacaccatggaatactatgcagccataaaaaaggatgagtccatgtcctttgtagggacatggatgaaattggaaatcatcattctcagtaaactatcacaaggacaaaaaaccaaa

SEQ ID NO: 101563 - DNA, 120 bp, synthetic construct
  source 1..120: mol_type = other DNA
gtttatagtataaatactatattcctcgtgtattatctgcaaggatcaaatgagataacatttatggtaagagctttgtggggccgggcacggtgggtcacgcctgtaatcccagcactt

SEQ ID NO: 101564 - DNA, 120 bp, synthetic construct; identical to SEQ ID NO: 13099
  source 1..120: mol_type = other DNA

SEQ ID NO: 101565 - DNA, 120 bp, synthetic construct; identical to SEQ ID NO: 13100
  source 1..120: mol_type = other DNA

SEQ ID NO: 101566 - DNA, 120 bp, synthetic construct
  source 1..120: mol_type = other DNA
gttctgagaagtgcgtaattaggtgattttgtcatgtaaacatcatgacacaatacataaatctagatggcgagcctactacgcatctagcctatatggcatagcttactgctcctaggc

SEQ ID NO: 101567 - DNA, 120 bp, synthetic construct; identical to SEQ ID NO: 13101
  source 1..120: mol_type = other DNA

SEQ ID NO: 101568 - DNA, 120 bp, synthetic construct; identical to SEQ ID NO: 13102
  source 1..120: mol_type = other DNA

SEQ ID NO: 101569 - DNA, 120 bp, synthetic construct
  source 1..120: mol_type = other DNA
agaacttttttataagttaaagctaaagagaaaagtctaaataaacatcaggtagaaatgtatagtaatacccggccgtgtgaggtgtcagtctgcccctaccggggggtgcctcccagt

SEQ ID NO: 101570 - DNA, 120 bp, synthetic construct
  source 1..120: mol_type = other DNA
acccagccatcccattactgggtatatacccaaaggactataaatcatgctgctataaagacacatgcacacgtatgtttattgcggcactattcacaatagcaaagacttggaaccaat

SEQ ID NO: 101571 - DNA, 120 bp, synthetic construct; identical to SEQ ID NO: 12774
  source 1..120: mol_type = other DNA

SEQ ID NO: 101572 - DNA, 120 bp, synthetic construct; identical to SEQ ID NO: 12775
  source 1..120: mol_type = other DNA

SEQ ID NO: 101573 - DNA, 120 bp, synthetic construct; identical to SEQ ID NO: 12776
  source 1..120: mol_type = other DNA

SEQ ID NO: 101574 - DNA, 120 bp, synthetic construct; identical to SEQ ID NO: 12777
  source 1..120: mol_type = other DNA

SEQ ID NO: 101575 - DNA, 120 bp, synthetic construct; identical to SEQ ID NO: 12778
  source 1..120: mol_type = other DNA

SEQ ID NO: 101576 - DNA, 120 bp, synthetic construct; identical to SEQ ID NO: 12779
  source 1..120: mol_type = other DNA

SEQ ID NO: 101577 - DNA, 120 bp, synthetic construct; identical to SEQ ID NO: 11665
  source 1..120: mol_type = other DNA

SEQ ID NO: 101578 - DNA, 120 bp, synthetic construct; identical to SEQ ID NO: 12877
  source 1..120: mol_type = other DNA

SEQ ID NO: 101579 - DNA, 120 bp, synthetic construct
  source 1..120: mol_type = other DNA
tgggggaggcgcccctcacctcccagacggggtggtcgccgggcagaggcgctcctcacctcccagacggggtggtggccgggcagaggtgctccccacatcccagacgatgggcggccg

SEQ ID NO: 101580 - DNA, 120 bp, synthetic construct
  source 1..120: mol_type = other DNA
ttcaagcagagtgtaagatattttcggaaagtagagcattttgaaagcatttcataatctctcaaaaccggagactgctcctgtcccacctcgttagagaaaacagcgatgctcaaaggc

SEQ ID NO: 101581 - DNA, 120 bp, synthetic construct
  source 1..120: mol_type = other DNA
ctagcttggcctgggcgccgcagaccggagccagaagcacgctcgcgggggcttgcgaccgccttcctgggaagctgtcccctggcaggcatgggtgctttacatcctgagctgggaagc

SEQ ID NO: 101582 - DNA, 120 bp, synthetic construct
  source 1..120: mol_type = other DNA
ggggtaactgccaatgagggctttggctttagcgaaagtctgaaagggaagccataggaacttaaacgtaccgactataaagctctgagaaaagctgatgttttagaaagaccatacatt

SEQ ID NO: 101583 - DNA, 120 bp, synthetic construct
  source 1..120: mol_type = other DNA
actgcctgcagggccttatggctgtcaggagcagttcttgggaattaaagtaattactgaagaagtattctagtgagaaaatgaatttatgactcagaagcccctaaagacatgggtact

SEQ ID NO: 101584 - DNA, 120 bp, synthetic construct
  source 1..120: mol_type = other DNA
acaaatatagccaatgtgatacagaatgtcagatactatgatagaaacttggcccttagctgggtggttgaattaggtgctacttttttgagatggagttttgctctgttgccaggttgg

SEQ ID NO: 101585 - DNA, 120 bp, synthetic construct
  source 1..120: mol_type = other DNA
ggcctcccaaagtgctgggattacaggcgtgagccaccgcacccggcctatatgtgtaactctttaatggtaattggagaatcatgtttaatgacatttagtacaaaaggcttcagttaa

SEQ ID NO: 101586 - DNA, 120 bp, synthetic construct
  source 1..120: mol_type = other DNA
aggcaggaaaagcaaggagccagaattaagaggttgggtcagtctgcagtgagttcatgcatttagaggtgttcttcaagatgactaatgtcaaaaattgagacatctgttgcggttttt

SEQ ID NO: 101587 - DNA, 120 bp, synthetic construct
  source 1..120: mol_type = other DNA
aatttttgttttactgtctggttccttctgcgtgaattaccaccaccaccacttgtgcatctcagtcttgtgtgttgtctggttacgtattccctgggtgataccattcaatgtcttaat

SEQ ID NO: 101588 - DNA, 120 bp, synthetic construct
  source 1..120: mol_type = other DNA
acatacatattctattatgttacagggtctagggctttgggaggacaaggctgcaggcagccgagattgtgccactgcactccagcctgggcgacagagtgagaccttttctcaataata

SEQ ID NO: 101589 - DNA, 120 bp, synthetic construct; identical to SEQ ID NO: 8272
  source 1..120: mol_type = other DNA

SEQ ID NO: 101590 - DNA, 120 bp, synthetic construct; identical to SEQ ID NO: 8291
  source 1..120: mol_type = other DNA

SEQ ID NO: 101591 - DNA, 120 bp, synthetic construct
  source 1..120: mol_type = other DNA
tttattcacccaggatatgttattgtgtgcttagccttggactttgttgcttgtgtgttggacacctaatagtcttgacagctaaataggcttttgtaagcgagagtggtaaagtccaac

SEQ ID NO: 101592 - DNA, 120 bp, synthetic construct
  source 1..120: mol_type = other DNA
agtcctgtaaatattcctgaagactaaccaggcgtggtggtgcacacctgtaatcccagctactccagaggctgaggaagagaatcacttgaacctgggaggcagaggttgcaatgagct

SEQ ID NO: 101593 - DNA, 120 bp, synthetic construct
  source 1..120: mol_type = other DNA
gtacccaaagtgctccatggcttccacaatattcacacgttctttcaccttgccaaaggccacatgcttgccatccaaccactcagtcttggcagtgcagatgaataactgggagccatt

SEQ ID NO: 101594 - DNA, 120 bp, synthetic construct; identical to SEQ ID NO: 8145
  source 1..120: mol_type = other DNA

SEQ ID NO: 101595 - DNA, 120 bp, synthetic construct
  source 1..120: mol_type = other DNA
ctcatgcctataatcccagcactttgggatcctgaggtgggcagatcacctgaagtcaggagtttgagaccagcctggccagcatggtgaaaccccatctctactaaaaatgcaaaaatt

SEQ ID NO: 101596 - DNA, 120 bp, synthetic construct
  source 1..120: mol_type = other DNA
aaaaataaataaattagatgggtgttttggtgatgagggtctgtagtcccagatactcaagaggctgaggtgggaggatcccttgagcctaggaggttgcggttgcagtgaactatgatt

SEQ ID NO: 101597 - DNA, 120 bp, synthetic construct
  source 1..120: mol_type = other DNA
gatgtaacattatagtacattttaacttattaggttaattttggttgcaaacaatcaaaattcaaaatggcttgtataataaagagattttgaacaatagtataggctcaagatagttta

SEQ ID NO: 101598 - DNA, 120 bp, synthetic construct; identical to SEQ ID NO: 8146
  source 1..120: mol_type = other DNA

SEQ ID NO: 101599 - DNA, 120 bp, synthetic construct
  source 1..120: mol_type = other DNA
agaaaagatctcactctgtcgcccaggctggagtgcagcggcacaatctcggctgcctgcagccttgtcctcccaaagccctagaccctgtaacataatggaatatgtatgtttctaatt

SEQ ID NO: 101600 - DNA, 120 bp, synthetic construct; identical to SEQ ID NO: 8290
  source 1..120: mol_type = other DNA

SEQ ID NO: 101601 - DNA, 120 bp, synthetic construct; identical to SEQ ID NO: 8521
  source 1..120: mol_type = other DNA

SEQ ID NO: 101602 - DNA, 120 bp, synthetic construct
  source 1..120: mol_type = other DNA
caaaagcctatttagctgtcaagactattaggtgtccaacacacaagcaacaaagtccaaggctaagcacacaataacatatcctgggtgaataaaccagtcaccttttgtcagacttgt

SEQ ID NO: 101603 - DNA, 120 bp, synthetic construct
  source 1..120: mol_type = other DNA
tgcaatgagctgagattgtaccacttcactccagcctgggtgacagagcaaaactctgtctccaaaaaaaaaaaaaagaagaagaaagaaagaaagaaagaaagaaagaaagaaagaaag

SEQ ID NO: 101604 - DNA, 120 bp, synthetic construct
  source 1..120: mol_type = other DNA
gtttcagaactatttatctccctacccatccccaaactcctggcaaccactgagcttttttgttgttgttgttgttacttagtttttatttcataatcataaacttaactcaactctgca

SEQ ID NO: 101605 - DNA, 120 bp, synthetic construct; identical to SEQ ID NO: 8520
  source 1..120: mol_type = other DNA

SEQ ID NO: 101606 - DNA, 120 bp, synthetic construct; identical to SEQ ID NO: 8760
  source 1..120: mol_type = other DNA

SEQ ID NO: 101607 - DNA, 120 bp, synthetic construct
  source 1..120: mol_type = other DNA
attacctcaaaaatatgacctgctgaatttctgctgtcatgaattgactaacatattttgggcctaatacctttacatttagaatctttttgttttgtattggaaagtattgtaactcct

SEQ ID NO: 101608 - DNA, 120 bp, synthetic construct; identical to SEQ ID NO: 68532
  source 1..120: mol_type = other DNA

SEQ ID NO: 101609 - DNA, 120 bp, synthetic construct; identical to SEQ ID NO: 68531
  source 1..120: mol_type = other DNA

SEQ ID NO: 101610 - DNA, 120 bp, synthetic construct; identical to SEQ ID NO: 8271
  source 1..120: mol_type = other DNA

SEQ ID NO: 101611 - DNA, 120 bp, synthetic construct
  source 1..120: mol_type = other DNA
tgctgtgtcctcacatggtggaaggggcaaggaagttctctaaggtctcttttataagggcactaatcccattcatgagggctctgtcctcatgacctaatcaccccccgaagacccact

SEQ ID NO: 101612 - DNA, 120 bp, synthetic construct; identical to SEQ ID NO: 8292
  source 1..120: mol_type = other DNA

SEQ ID NO: 101613 - DNA, 120 bp, synthetic construct
  source 1..120: mol_type = other DNA
ggcaacagagtgagactttgtttcaaaataaaaaaataaaaataaaaaaataaaaacgtaactggatagacctaaggatcttgaataagcagaaaataatttaggtaaaagccaaataat

SEQ ID NO: 101614 - DNA, 120 bp, synthetic construct
  source 1..120: mol_type = other DNA
ttcctctccatttatccctctttttaaaacagggcttattgagggtgattaacttaatttttaaatgatatatggcagaatgtcaagagagtatagtgaagaacttcgtagaggaatgga

SEQ ID NO: 101615 - DNA, 120 bp, synthetic construct
  source 1..120: mol_type = other DNA
ggacttgtcatcggtgccattagggcgtgtgaagtcaccaccctgacacataaaccctggaataattctgtgaaagcaggaacccttataacgaaatcctttctctccagtgctcagagc

SEQ ID NO: 101616 - DNA, 120 bp, synthetic construct
  source 1..120: mol_type = other DNA
attctaggtttttgcagaattagtacccaaagggagagtcttagcagtattccattttacaatccatccttcgttagaggatgagagacttctatctagccttttaggttgcctgagacc

SEQ ID NO: 101617 - DNA, 120 bp, synthetic construct
  source 1..120: mol_type = other DNA
aaaactcattgccaccaatccttcagtctttgtctttccgagtccctaattatcttttcttttctttttttttttttttttttgagacagagtttcgctttgttgcccaggctggagtgc

SEQ ID NO: 101618 - DNA, 120 bp, synthetic construct
  source 1..120: mol_type = other DNA
ctggtcttgaactcctgatctcatgatccgcccacctcagcttccctaagtgctgggattacaggcgtgagccaccgcgtctggctgcatgaccttttaacttgtctcatacactcaata

SEQ ID NO: 101619 - DNA, 120 bp, synthetic construct
  source 1..120: mol_type = other DNA
tattgattatatataatatatatatatttattattatatatttttttgagacggagttttgcttttgttgcccaggctggagtgcaatggcgctatctcggctcaccacaacctctgcct

SEQ ID NO: 101620 - DNA, 120 bp, synthetic construct
  source 1..120: mol_type = other DNA
aaggttgcagtgtgctgagatagcgccattgcactctcgcctgggcaacaagagcgaaactccgtctcaagaaaaaaaaaaaaaaagagagagagagagagaaactgtaatttcatttca

SEQ ID NO: 101621 - DNA, 120 bp, synthetic construct; identical to SEQ ID NO: 8271
  source 1..120: mol_type = other DNA

SEQ ID NO: 101622 - DNA, 120 bp, synthetic construct; identical to SEQ ID NO: 101611
  source 1..120: mol_type = other DNA

SEQ ID NO: 101623 - DNA, 120 bp, synthetic construct; identical to SEQ ID NO: 8292
  source 1..120: mol_type = other DNA

SEQ ID NO: 101624 - DNA, 120 bp, synthetic construct; identical to SEQ ID NO: 101613
  source 1..120: mol_type = other DNA

SEQ ID NO: 101625 - DNA, 120 bp, synthetic construct; identical to SEQ ID NO: 101614
  source 1..120: mol_type = other DNA

SEQ ID NO: 101626 - DNA, 120 bp, synthetic construct
  source 1..120: mol_type = other DNA
ccatccaaccactcagtcttggcagtgcagatgaataactgggagccatttgtgttgggtccagcatttaccatggacaagatgccagaacctgtatgctttcggatgaggttctcatca

SEQ ID NO: 101627 - DNA, 120 bp, synthetic construct; identical to SEQ ID NO: 101616
  source 1..120: mol_type = other DNA

SEQ ID NO: 101628 - DNA, 120 bp, synthetic construct
  source 1..120: mol_type = other DNA
ctttgtctttctgagtccctaattatcttttcttttcttttttttttttttttttttgagacagagtttcgctttgttgcccaggctggagtgcagtggtgcaatcttggttcactgcaa

SEQ ID NO: 101629 - DNA, 120 bp, synthetic construct
  source 1..120: mol_type = other DNA
aaaaattatggcactttgcagccctgtccactaactgagaactttgatgctttggattttggagacctcattttatcacctggtccttttacttcatgacttgtcatgctgccacctttt

SEQ ID NO: 101630 - DNA, 120 bp, synthetic construct; identical to SEQ ID NO: 8272
  source 1..120: mol_type = other DNA

SEQ ID NO: 101631 - DNA, 120 bp, synthetic construct
  source 1..120: mol_type = other DNA
cacaccaaaataaatgcaataggaaaagatgacagttctatgtagtattcctgcttccatattgcacaaattagaaacatacatattccattatgttacagggtctagggctttgggagg

SEQ ID NO: 101632 - DNA, 120 bp, synthetic construct; identical to SEQ ID NO: 68542
  source 1..120: mol_type = other DNA

SEQ ID NO: 101633 - DNA, 120 bp, synthetic construct
  source 1..120: mol_type = other DNA
tgagattatagtgtacataaaagttttgaagtataattaaatatttaatatataaatatattaaatatgggctgctgactcaccaagcctggtttggcttccatcacttgtgtaatcaat

SEQ ID NO: 101634 - DNA, 120 bp, synthetic construct
  source 1..120: mol_type = other DNA
actgtcttcagcataatttgtttagtctaacttccaactcacttattttctttttggttctatccaatattgtgtttaacctgtccatttagtttttaattttcattatattttttattt

SEQ ID NO: 101635 - DNA, 120 bp, synthetic construct
  source 1..120: mol_type = other DNA
tctggtatttgtagatttcatatagcaggatagtgattcagcaaatttagtctaccacaatgctgggaatagaattcccctaatttttgaaaacattatattaaatcatgtttattgcca

SEQ ID NO: 101636 - DNA, 120 bp, synthetic construct
  source 1..120: mol_type = other DNA
catattgaccttttctcccattcttatttcaagttatcagcatgttgatacttgggaaatcccatcaagtgtttaacagtgcataccttactgattcattatttatttcaatttaatctt

SEQ ID NO: 101637 - DNA, 120 bp, synthetic construct; identical to SEQ ID NO: 8289
  source 1..120: mol_type = other DNA

SEQ ID NO: 101638 - DNA, 120 bp, synthetic construct; identical to SEQ ID NO: 101599
  source 1..120: mol_type = other DNA

SEQ ID NO: 101639 - DNA, 120 bp, synthetic construct; identical to SEQ ID NO: 8290
  source 1..120: mol_type = other DNA

SEQ ID NO: 101640 - DNA, 120 bp, synthetic construct; identical to SEQ ID NO: 8291
  source 1..120: mol_type = other DNA

SEQ ID NO: 101641 - DNA, 120 bp, synthetic construct; identical to SEQ ID NO: 101591
  source 1..120: mol_type = other DNA

SEQ ID NO: 101642 - DNA, 120 bp, synthetic construct
  source 1..120: mol_type = other DNA
ggctgaggaagagaatcacttgaacctgggaggcggaggttgcaatgagctgagattgtaccacttcactccagcctgggtgacagagcaaaactctgtctccaaaaaaaaaaaaaagaa

SEQ ID NO: 101643 - DNA, 120 bp, synthetic construct
  source 1..120: mol_type = other DNA
tgctccgtggcttccacaatattcacacgttctttcaccttgccaaacgccacatgcttgccatccaaccactcagtcttggcagcgcagatgaaaaactgggaaccatttgtgttgggt

SEQ ID NO: 101644 - DNA, 120 bp, synthetic construct; identical to SEQ ID NO: 8145
  source 1..120: mol_type = other DNA

SEQ ID NO: 101645 - DNA, 120 bp, synthetic construct
  source 1..120: mol_type = other DNA
ccctgtaatcccagctactcgggaggttgaggcaggagaatcacttgaacctgggaggcagaggttgcagtgagcccagatcatgccaatgcactccagctttggcaacagagcgagact

SEQ ID NO: 101646 - DNA, 120 bp, synthetic construct; identical to SEQ ID NO: 8292
  source 1..120: mol_type = other DNA

SEQ ID NO: 101647 - DNA, 120 bp, synthetic construct; identical to SEQ ID NO: 101611
  source 1..120: mol_type = other DNA

SEQ ID NO: 101648 - DNA, 120 bp, synthetic construct; identical to SEQ ID NO: 8271
  source 1..120: mol_type = other DNA

SEQ ID NO: 101649 - DNA, 120 bp, synthetic construct; identical to SEQ ID NO: 8146
  source 1..120: mol_type = other DNA

SEQ ID NO: 101650 - DNA, 120 bp, synthetic construct
  source 1..120: mol_type = other DNA
gtcatgaggacagagtcctcatgaatgagattagtgcccttataaaagagaccttagagaacttcctagccccttccaccatgtgagggcacagcaaaaagacagctgtctgtgaaccag

SEQ ID NO: 101651 - DNA, 120 bp, synthetic construct; identical to SEQ ID NO: 8292
  source 1..120: mol_type = other DNA

SEQ ID NO: 101652 - DNA, 120 bp, synthetic construct
  source 1..120: mol_type = other DNA
ctatccagttacgtttttatttttttatttttatttttttactttgaaacaaagtctcgctctgttgacaaagctggagtgcattggcatgatctcggctcactgcaacctctgcctccc

SEQ ID NO: 101653 - DNA, 120 bp, synthetic construct; identical to SEQ ID NO: 8520
  source 1..120: mol_type = other DNA

SEQ ID NO: 101654 - DNA, 120 bp, synthetic construct; identical to SEQ ID NO: 101593
  source 1..120: mol_type = other DNA

SEQ ID NO: 101655 - DNA, 120 bp, synthetic construct; identical to SEQ ID NO: 101592
  source 1..120: mol_type = other DNA

SEQ ID NO: 101656 - DNA, 120 bp, synthetic construct; identical to SEQ ID NO: 68538
  source 1..120: mol_type = other DNA

SEQ ID NO: 101657 - DNA, 120 bp, synthetic construct; identical to SEQ ID NO: 8521
  source 1..120: mol_type = other DNA

SEQ ID NO: 101658 - DNA, 120 bp, synthetic construct; identical to SEQ ID NO: 8290
  source 1..120: mol_type = other DNA

SEQ ID NO: 101659 - DNA, 120 bp, synthetic construct; identical to SEQ ID NO: 101588
  source 1..120: mol_type = other DNA

SEQ ID NO: 101660 - DNA, 120 bp, synthetic construct
  source 1..120: mol_type = other DNA
aaaatggaaatgacagagaccaagatgaagatttttaatttgagatgtgcctgcgatgcaattacatttgctgaatgaaactgcttcagtaattagatgcaggtttcttctctcttcttt

SEQ ID NO: 101661 - DNA, 120 bp, synthetic construct
  source 1..120: mol_type = other DNA
ctcagacggggcggccaggcagagacactcctcacctcccagatggggttgcagccaggcagaggcgctcctcacatcccagacgatgggtggctgggcagagacgctcctcacatccca

SEQ ID NO: 101662 - DNA, 120 bp, synthetic construct; identical to SEQ ID NO: 26924
  source 1..120: mol_type = other DNA

SEQ ID NO: 101663 - DNA, 120 bp, synthetic construct; identical to SEQ ID NO: 14375
  source 1..120: mol_type = other DNA

SEQ ID NO: 101664 - DNA, 120 bp, synthetic construct; identical to SEQ ID NO: 14376
  source 1..120: mol_type = other DNA

SEQ ID NO: 101665 - DNA, 120 bp, synthetic construct
  source 1..120: mol_type = other DNA
acaatgtatattctgttgatttggggtggagagttctgcagatgtctattaggtctgcagatgtctattaggtgcagagctgagttcaattcctggatatccttgttaatttcctgtctt

SEQ ID NO: 101666 - DNA, 120 bp, synthetic construct
  source 1..120: mol_type = other DNA
ccgctattagtctgatgggcttccctttgtgagtaacccaacctttctctctggctgcccttaacattttttccttcatttcaactttggtgaatctgacaattatgtgtcttggagttg

SEQ ID NO: 101667 - DNA, 120 bp, synthetic construct; identical to SEQ ID NO: 23600
  source 1..120: mol_type = other DNA

SEQ ID NO: 101668 - DNA, 120 bp, synthetic construct
  source 1..120: mol_type = other DNA
gctggaaaccatcattttgagcaaactatcacaaggacagaaaaccaagtatcacatattctcactcgcaggtgggaattgaacaatgagaacacttggacacagggtggggaacatcac

SEQ ID NO: 101669 - DNA, 120 bp, synthetic construct; identical to SEQ ID NO: 25600
  source 1..120: mol_type = other DNA

SEQ ID NO: 101670 - DNA, 120 bp, synthetic construct; identical to SEQ ID NO: 25601
  source 1..120: mol_type = other DNA

SEQ ID NO: 101671 - DNA, 120 bp, synthetic construct
  source 1..120: mol_type = other DNA
gccagagcactgtatctttaaactttttgatttttgcaagttggataaagatggaatctcatttttctctctctctctctctctctctctctctctgtgtgtgtgtgtgtgtgtgtgtgt

SEQ ID NO: 101672 - DNA, 120 bp, synthetic construct
  source 1..120: mol_type = other DNA
agcagctgccctttataatgtctgggtgtatttttacccatccattttctctgaggactgctaaaagactacaatttctaagactctctaactttttaggttatatggtcaagcagaaag

SEQ ID NO: 101673 - DNA, 120 bp, synthetic construct
  source 1..120: mol_type = other DNA
ctcagctcaaatgatccgcccacctcagcctcccaaaatcctaggattacgggagtgagccactgtgtccggacttaatctgctttttattatgaatattttcctacataatttagtact

SEQ ID NO: 101674 - DNA, 120 bp, synthetic construct
  source 1..120: mol_type = other DNA
taatttctttactttttatttttttggtagagatggggtttcaccatgtttgccagttggtctcaaagtcctgacctcaagtgattcacccaccttagcctcccaaagtgctgggattac

SEQ ID NO: 101675 - DNA, 120 bp, synthetic construct; identical to SEQ ID NO: 24850
  source 1..120: mol_type = other DNA

SEQ ID NO: 101676 - DNA, 120 bp, synthetic construct
  source 1..120: mol_type = other DNA
aatttttaatgattgccattgtaactggtgtgagatggtatctcattgtggttttgatttgcatttctctgatggccagtgatgatgagcattttttcatgtgttttttggctgcataaa

SEQ ID NO: 101677 - DNA, 120 bp, synthetic construct
  source 1..120: mol_type = other DNA
atggcattgaatctgtaaattgccttgggcagtatggccattttcacgatattgagtcttctgacccatgagcatggaatgttcttccatttgtttgtatccttttttatttccttgagc

SEQ ID NO: 101678 - DNA, 120 bp, synthetic construct
  source 1..120: mol_type = other DNA
tgtgccactggattcggtttgccagtattttattgaggatttttgcatcaatgttcatcaaggatattggtctaaaattctcttttttggttgtgtctctgcccggctttggtatcagga

SEQ ID NO: 101679 - DNA, 120 bp, synthetic construct
  source 1..120: mol_type = other DNA
ggacatttgggttggttccaagtctttgctattgtgaataatgccacaataaacatatatgtgcatgtgtcttcatagcagcatgatttatagtcgtttgggtatatacccagtaatggg

SEQ ID NO: 101680 - DNA, 120 bp, synthetic construct
  source 1..120: mol_type = other DNA
tagttgtagataggtggcgttatttctgagggctctgttctgttccattgatctatatgtctgttttggtaccagtaccatgctgttttggttactgtagccttgtagtatagtttgaag

SEQ ID NO: 101681 - DNA, 120 bp, synthetic construct
  source 1..120: mol_type = other DNA
gtttatatgctggattacatttattgatttgcgtatattgaaccagccttgcatcccagggatgaagcccacttgatcatggtggataagctttttgatgtgccgctggattcggtttgc

SEQ ID NO: 101682 - DNA, 120 bp, synthetic construct
  source 1..120: mol_type = other DNA
ttattggtatgttgtgtctttgttctcattggtttcaaagaacatctttatttctgccttcattttgttatgtacccagtagtcattcaggagcaggttgttcagtttccatgtagttga

SEQ ID NO: 101683 - DNA, 120 bp, synthetic construct
  source 1..120: mol_type = other DNA
cacatcccttgtaagttggattcctaggtattttattctctttgatgcaattgtgaatgggagttcactcatgatttggttctctgtttgtctgttgttggtgtataagaaggcttgtga

SEQ ID NO: 101684 - DNA, 120 bp, synthetic construct
  source 1..120: mol_type = other DNA
atgtgttgaggaatttatcaatttcttctagattttctagtttatttgtgtagaggtgtttatatattctctgatggtattttgtatttctgtgggatcggtggtgatatcccctttatc

SEQ ID NO: 101685 - DNA, 120 bp, synthetic construct
  source 1..120: mol_type = other DNA
gactctgtctcaaaaaaaaaaaaaaaaaaaaaaaatcaatgaatacaggagctggttttttgaaaagatcaacaaaattgatagaccgctagcaagactaataaagaagaaaagagagaa

SEQ ID NO: 101686 - DNA, 120 bp, synthetic construct
  source 1..120: mol_type = other DNA
tattaagcaaatgtggcatatatacaccatggaatactatgctgccataaaaaaggatgagttcatgtcctttgtagggacatggatgaagctggaaaccatcattctcagcaaactatc

SEQ ID NO: 101687 - DNA, 120 bp, synthetic construct; identical to SEQ ID NO: 12101
  source 1..120: mol_type = other DNA

SEQ ID NO: 101688 - DNA, 120 bp, synthetic construct
  source 1..120: mol_type = other DNA
catgtccttcgcccactttttgatggggttgtttgtttttttcttgtaaatttgtttgagttcattgtagattctggatattagccctttgtcagatgagtaagttgcgaaaattttctc

SEQ ID NO: 101689 - DNA, 120 bp, synthetic construct
  source 1..120: mol_type = other DNA
atttggttctctgtttgtctgttattggtgtataagaatgcttgtgatttttgtacattgattttgtatcctgagactttgctgaagttgcttatcagcttaaggagattttgggctgag

SEQ ID NO: 101690 - DNA, 120 bp, synthetic construct
  source 1..120: mol_type = other DNA
gctttgcggagctgggcggtgccgaggaggaggaggtggcggcctgggtctgacgcggccctgttcgagggggcctctcttgtttatttatttattttccgtgggtgcctccgagtgtgc

SEQ ID NO: 101691 - DNA, 120 bp, synthetic construct; identical to SEQ ID NO: 13223
  source 1..120: mol_type = other DNA

SEQ ID NO: 101692 - DNA, 120 bp, synthetic construct; identical to SEQ ID NO: 13224
  source 1..120: mol_type = other DNA

SEQ ID NO: 101693 - DNA, 120 bp, synthetic construct; identical to SEQ ID NO: 13081
  source 1..120: mol_type = other DNA

SEQ ID NO: 101694 - DNA, 120 bp, synthetic construct; identical to SEQ ID NO: 13082
  source 1..120: mol_type = other DNA

SEQ ID NO: 101695 - DNA, 120 bp, synthetic construct; identical to SEQ ID NO: 9168
  source 1..120: mol_type = other DNA

SEQ ID NO: 101696 - DNA, 120 bp, synthetic construct
  source 1..120: mol_type = other DNA
caaatgttcatcagcttatggataatcaaaatgtgtatccatacaatggaatattatttagccataaaaaggaatgaaatactgattcatgctacagtttggatgagccttgaaaacaga

SEQ ID NO: 101697 - DNA, 120 bp, synthetic construct
  source 1..120: mol_type = other DNA
gtggagggaaggtcagcagataaacaagtgaacaaaggtctctggttttcctaggcagaggaccctgcagccttccacagtgtttgtgtccctgcgtacttgagattagggagtggtgat

SEQ ID NO: 101698 - DNA, 120 bp, synthetic construct
  source 1..120: mol_type = other DNA
aaaaatacgaaaaccagtcaggcgtggcggcgtgcgcctgcaatcacaggcacttggcaggctgaggcaggagaatcaggcagggaggttgcagtgagccgagatggcagcagtacagtc

SEQ ID NO: 101699 - DNA, 120 bp, synthetic construct; identical to SEQ ID NO: 9169
  source 1..120: mol_type = other DNA

SEQ ID NO: 101700 - DNA, 120 bp, synthetic construct; identical to SEQ ID NO: 9170
  source 1..120: mol_type = other DNA

SEQ ID NO: 101701 - DNA, 120 bp, synthetic construct
  source 1..120: mol_type = other DNA
ctgagaatggtcctgcaagcaatgctgtcctcccttgttttgtaggatgtctctctctttttttttttttttaattatactttaagttttagggtacatgtgcagaacgtacaggttagt

SEQ ID NO: 101702 - DNA, 120 bp, synthetic construct
  source 1..120: mol_type = other DNA
agtttcttttgctgtgcagaagctctttagtttaattagatcccatttgtcaattttggcttttgttgccattgcttttggtgttttagtcataaagtccttgcccatgcctatgtcctg

SEQ ID NO: 101703 - DNA, 120 bp, synthetic construct; identical to SEQ ID NO: 20030
  source 1..120: mol_type = other DNA

SEQ ID NO: 101704 - DNA, 120 bp, synthetic construct
  source 1..120: mol_type = other DNA
ctcagacccaggagcccagaccccagcccctcctccctcagacccaggagtccagacctccagcccctcctccctcagacccaggagtccaggccccagcccctcctccctcagacccag

SEQ ID NO: 101705 - DNA, 120 bp, synthetic construct; identical to SEQ ID NO: 20031
  source 1..120: mol_type = other DNA

SEQ ID NO: 101706 - DNA, 120 bp, synthetic construct; identical to SEQ ID NO: 20032
  source 1..120: mol_type = other DNA

SEQ ID NO: 101707 - DNA, 120 bp, synthetic construct; identical to SEQ ID NO: 20033
  source 1..120: mol_type = other DNA

SEQ ID NO: 101708 - DNA, 120 bp, synthetic construct
  source 1..120: mol_type = other DNA
gtgagtcaagaccatgccactgcactccagcctgggcaacaagagtgaaactccattgctgctgtttttcacaatagcaaagacttggaaccaacccaaatgtccatcaatgatagactg

SEQ ID NO: 101709 - DNA, 120 bp, synthetic construct; identical to SEQ ID NO: 14669
  source 1..120: mol_type = other DNA

SEQ ID NO: 101710 - DNA, 120 bp, synthetic construct; identical to SEQ ID NO: 14670
  source 1..120: mol_type = other DNA

SEQ ID NO: 101711 - DNA, 120 bp, synthetic construct
  source 1..120: mol_type = other DNA
gtggtcctcccacctcagcctcctgagtagctgagactataggtatagcctcgcaccaccacacccagctaattttttttttttttttttttttttttttttttttgagacggagtcttg

SEQ ID NO: 101712 - DNA, 120 bp, synthetic construct
  source 1..120: mol_type = other DNA
ctggccacaggagtgacctgagccattcagaccccaaaggcaggcacacgaggaatcccttagagagatttgaagaaaaagagttgaatactagttatctgaaataatttacatatatag

SEQ ID NO: 101713 - DNA, 120 bp, synthetic construct; identical to SEQ ID NO: 28413
  source 1..120: mol_type = other DNA

SEQ ID NO: 101714 - DNA, 120 bp, synthetic construct; identical to SEQ ID NO: 28414
  source 1..120: mol_type = other DNA

SEQ ID NO: 101715 - DNA, 120 bp, synthetic construct
  source 1..120: mol_type = other DNA
tctctactaaaaatacaaatattagccgggtgttgtggcacacacctataattgcagctactcaggaggctgaggcaggagaatcatttgaacccaggagctggaggttgcagtatttca

SEQ ID NO: 101716 - DNA, 120 bp, synthetic construct; identical to SEQ ID NO: 22499
  source 1..120: mol_type = other DNA

SEQ ID NO: 101717 - DNA, 120 bp, synthetic construct; identical to SEQ ID NO: 22500
  source 1..120: mol_type = other DNA

SEQ ID NO: 101718 - DNA, 120 bp, synthetic construct; identical to SEQ ID NO: 21856
  source 1..120: mol_type = other DNA

SEQ ID NO: 101719 - DNA, 120 bp, synthetic construct
  source 1..120: mol_type = other DNA
gcagaagctctttagtttaattagatcccatttgtcaattttgtcttttgttgccattgcttttggtgttttggacatgaagtccttgcccatgcctatgtcctgaatggtaatgcctag

SEQ ID NO: 101720 - DNA, 120 bp, synthetic construct
  source 1..120: mol_type = other DNA
tatgttgaataggagtggtgagagagggcatccctgtcttgtgccagttttcaaagggaatgcttccagtttttgcccatttagtatgatattggctgtgggtctgtcatagatagctct

SEQ ID NO: 101721 - DNA, 120 bp, synthetic construct
  source 1..120: mol_type = other DNA
ttattgtgtctatttgattcttctctctttttttctttcttagtcttgctagcggtctatcaattttgttgatcctttcaaaaaaccagctcctggattcattaattttttgaagggttt

SEQ ID NO: 101722 - DNA, 120 bp, synthetic construct
  source 1..120: mol_type = other DNA
agtctgttttatcagagactaggattgcaacccctgcctttttttgttttcccttggcttggtagatcttcctccatccttttattttgagcctatgtgtgtctcggcatgtgagatggg

SEQ ID NO: 101723 - DNA, 120 bp, synthetic construct
  source 1..120: mol_type = other DNA
attctccccatcactttcaggtacaccaatcagacgtagatttggtcttttcacatagtcccatatttcttggaggctttgctcatttctttttattcttttttctctaaacttcccttc

SEQ ID NO: 101724 - DNA, 120 bp, synthetic construct
  source 1..120: mol_type = other DNA
caatcagtgagactctgtgggcgtaggaccctctgagccaggtgccggatataatctcgtggtgcgccgttttttaagccggtccgaaaagcacaatattcgggtgggagtgacccgatt

SEQ ID NO: 101725 - DNA, 120 bp, synthetic construct
  source 1..120: mol_type = other DNA
tctcagcccggagccccgcgtgaacttcggggaggaactcggttggcgccggggccccgcacgctcccttcccgcggctccgagcgctttcccacggccacgccccccgcgcccagaact

SEQ ID NO: 101726 - DNA, 120 bp, synthetic construct; identical to SEQ ID NO: 31250
  source 1..120: mol_type = other DNA

SEQ ID NO: 101727 - DNA, 120 bp, synthetic construct; identical to SEQ ID NO: 33847
  source 1..120: mol_type = other DNA

SEQ ID NO: 101728 - DNA, 120 bp, synthetic construct; identical to SEQ ID NO: 31571
  source 1..120: mol_type = other DNA

SEQ ID NO: 101729 - DNA, 120 bp, synthetic construct; identical to SEQ ID NO: 22251
  source 1..120: mol_type = other DNA

SEQ ID NO: 101730 - DNA, 120 bp, synthetic construct; identical to SEQ ID NO: 22252
  source 1..120: mol_type = other DNA

SEQ ID NO: 101731 - DNA, 120 bp, synthetic construct; identical to SEQ ID NO: 22253
  source 1..120: mol_type = other DNA

SEQ ID NO: 101732 - DNA, 120 bp, synthetic construct
  source 1..120: mol_type = other DNA
tttgggttggttccaagtctttgctattgtgaatagtgccacagtaaacataggtgtgcatgtgtctttatagtagtatgatttataattctttgggtatatacccagtaatgggatcac

SEQ ID NO: 101733 - DNA, 120 bp, synthetic construct
  source 1..120: mol_type = other DNA
attaaatagggaattcctatttaataaattcctcattgcttgtttttgtcaaatttgtcaaagatcagatggttgtagatgtgtggtgttatttctgagggctctgttctgttctattgg

SEQ ID NO: 101734 - DNA, 120 bp, synthetic construct; identical to SEQ ID NO: 29733
  source 1..120: mol_type = other DNA

SEQ ID NO: 101735 - DNA, 120 bp, synthetic construct
  source 1..120: mol_type = other DNA
ccactttttgatggggttgtttgtttttttcttgtaaatttgtttgagttcattgtagattctggatattagccctttgtcagatgagtaggtttgcgaaaattttctcccattttgtag

SEQ ID NO: 101736 - DNA, 120 bp, synthetic construct
  source 1..120: mol_type = other DNA
tgaggccagcatcatcctgataccaaagccgggcagagacacaaccaaaaaagagaattttagaccaatatccttgatgaacattgatccaaaaatcctcaataaaatactggcaaactg

SEQ ID NO: 101737 - DNA, 120 bp, synthetic construct; identical to SEQ ID NO: 29734
  source 1..120: mol_type = other DNA

SEQ ID NO: 101738 - DNA, 120 bp, synthetic construct; identical to SEQ ID NO: 29735
  source 1..120: mol_type = other DNA

SEQ ID NO: 101739 - DNA, 120 bp, synthetic construct
  source 1..120: mol_type = other DNA
tgatttataatcctttgggtatatacccagtaatgggattgctgggtcaaatggtatttctagttctagatccttgaggaatcgccacactgtcttccacaatggttgaactagtttaca

SEQ ID NO: 101740 - DNA, 120 bp, synthetic construct
  source 1..120: mol_type = other DNA
tgtagatgtctattaggttctcttggtgcagagctgagttcaattcctggatatccttgttaactttctgtctcgttgatctgtctaatgttgacagtggggtgttaaagtctcccatta

SEQ ID NO: 101741 - DNA, 120 bp, synthetic construct
  source 1..120: mol_type = other DNA
gggtaacccgatgtttctctctggctgcccttaacattttttccttcatttcaactttggtgaatttgacaattatgtgtcttggagttgctcttctcaaggagtatctttgtggcgttc

SEQ ID NO: 101742 - DNA, 120 bp, synthetic construct; identical to SEQ ID NO: 29736
  source 1..120: mol_type = other DNA

SEQ ID NO: 101743 - DNA, 120 bp, synthetic construct; identical to SEQ ID NO: 29737
  source 1..120: mol_type = other DNA

SEQ ID NO: 101744 - DNA, 120 bp, synthetic construct
  source 1..120: mol_type = other DNA
cattgttggacatttgggttggttccaagtctttgctattgtgaatagtgctgcaataaacatatgtgtgcatgtgtcttaatagcagcatgatttataatcctttgggtatatacccag

SEQ ID NO: 101745 - DNA, 120 bp, synthetic construct; identical to SEQ ID NO: 29738
  source 1..120: mol_type = other DNA

SEQ ID NO: 101746 - DNA, 120 bp, synthetic construct
  source 1..120: mol_type = other DNA
gccgagatcacaccactgcactacagcctgggcgactgagcaagactccctctcaaaaaaaaaaaaaaaaaaacacagtgtctatgaagcacaataaaagtatgcctgtataatctcgca

SEQ ID NO: 101747 - DNA, 120 bp, synthetic construct; identical to SEQ ID NO: 31417
  source 1..120: mol_type = other DNA

SEQ ID NO: 101748 - DNA, 120 bp, synthetic construct; identical to SEQ ID NO: 27097
  source 1..120: mol_type = other DNA

SEQ ID NO: 101749 - DNA, 120 bp, synthetic construct
  source 1..120: mol_type = other DNA
tggggaaaaaacagaacagaaaaactggaaactctaaaacgcagagcgcctctcctcctccaaaggaacgcagttcctcaccagcaacagaacaaagctggatggagaatgattttgacg

SEQ ID NO: 101750 - DNA, 120 bp, synthetic construct
  source 1..120: mol_type = other DNA
aaggaagcgctaaacatggaaaggaacaaccggtaccagccgctgcaaaatcatgccaaaatgtaaagaccatcgagactaggaagaaactgcatcaactaatgagcaaaatcaccagct

SEQ ID NO: 101751 - DNA, 120 bp, synthetic construct
  source 1..120: mol_type = other DNA
ccagaatctctgggacgcattcaaagcagtgtgtagagggaaatttatagcactaaatgcctacaagagaaagcaggaaagatccaaaattgacaccctaacatcacaattaaaagaact

SEQ ID NO: 101752 - DNA, 120 bp, synthetic construct
  source 1..120: mol_type = other DNA
agagccaaagacaaaaaccacatgattatctcaatagatgcagaaaaagcctttgacaaaattcaacaacccttcatgctaaaaactctcaataaattaggtattgatgggacgtatttc

SEQ ID NO: 101753 - DNA, 120 bp, synthetic construct
  source 1..120: mol_type = other DNA
agatatagatcaatggaacagaacagagccctcagaaataatgtcgcatatctacaactatctgatctttgacaaacctgagaaaaacaagcaatggggaaaggattccctatttaataa

SEQ ID NO: 101754 - DNA, 120 bp, synthetic construct
  source 1..120: mol_type = other DNA
accatggaatactatgcagccataaaaaatgatgagttcatgtcctttgtagggacatggatgaaattggaaaccatcattctcagtaaactatcgcaagaacaaaaaaccaaacaccgc

SEQ ID NO: 101755 - DNA, 120 bp, synthetic construct; identical to SEQ ID NO: 27098
  source 1..120: mol_type = other DNA

SEQ ID NO: 101756 - DNA, 120 bp, synthetic construct
  source 1..120: mol_type = other DNA
tgaaggagaactacaaaccactgctcaaggaaataaaagaggatacaaacaaatggaagaacattccatgctcatgggtaggaagaatcaatatcgtgaaaatggccatactgcccaagg

SEQ ID NO: 101757 - DNA, 120 bp, synthetic construct
  source 1..120: mol_type = other DNA
ttgtggttttgatttgcatttctctgatggccagtgatgatgagcattttttcatgtgttttttggctgcataaatgtcttcttttgagaagtgtctgttcatgtccttcgcccactttt

SEQ ID NO: 101758 - DNA, 120 bp, synthetic construct; identical to SEQ ID NO: 27099
  source 1..120: mol_type = other DNA

SEQ ID NO: 101759 - DNA, 120 bp, synthetic construct; identical to SEQ ID NO: 27100
  source 1..120: mol_type = other DNA

SEQ ID NO: 101760 - DNA, 120 bp, synthetic construct
  source 1..120: mol_type = other DNA
tctcctttgctagattgaaagatccctgaggacagagaccacgtctgtattggaacatcccgtatcacctctgcaaaacgtcagtatttgttgaaggaattaaaggcagaatgaatcaat

SEQ ID NO: 101761 - DNA, 120 bp, synthetic construct
  source 1..120: mol_type = other DNA
tacactgagataaaaccattgcaatctttcccagaataagagctgatggttaaaggaaaatgaagtagtgcagaatttcctagtgggagaacctggccttcagacactggcttgagtttg

SEQ ID NO: 101762 - DNA, 120 bp, synthetic construct
  source 1..120: mol_type = other DNA
tcttaaggaattcattggaagaacagggactcttccccctctggcaacaaaattgcatgaatcttccctgaaacgaataggtcaaaactgtagggaacttcttgttctatccaacttctg

SEQ ID NO: 101763 - DNA, 120 bp, synthetic construct
  source 1..120: mol_type = other DNA
gaacttccagggatgtttatagaagatgccacctttacccccagatgtgtgtgtgtctttttatttctttcagagcttgaactcttttactccccccatcacatttctctagcagtcttt

SEQ ID NO: 101764 - DNA, 120 bp, synthetic construct
  source 1..120: mol_type = other DNA
cttcttatctccccccaagacccctgcgaacatctcggggaaggggtcatctgccttcctggggtcatctttctgggcgagagccccaccctgaaaaagcctaatccctgagggccattt

SEQ ID NO: 101765 - DNA, 120 bp, synthetic construct
  source 1..120: mol_type = other DNA
cagccgcgacaaaatggtgcctttctggacccgagctgcagtggcgagatggcagggacaggattcaggcttgcctggccggaatgagggtgctggtcccacgggagggcggctccggca

SEQ ID NO: 101766 - DNA, 120 bp, synthetic construct
  source 1..120: mol_type = other DNA
ctaccctgggggaatttcaggagtccaattaatacagaaaagagacctgtcttcctacttcaactaggaagaaaatgtagaattccctccccacccatgttttcccaaatttcaaactct

SEQ ID NO: 101767 - DNA, 120 bp, synthetic construct
  source 1..120: mol_type = other DNA
agttacacattgcagcttctcttggatattggcacaatttggagtaggagcagagtggggaaaagctaagttcatctcttagtgaatcaaaatgatgagaagacattgtgccttcggttg

SEQ ID NO: 101768 - DNA, 120 bp, synthetic construct
  source 1..120: mol_type = other DNA
tattttctttttttattttatttattttatttttctgagccagagtctctctgtcacccaggctggattgcagtgacacgatcaaggctcactgcaacctctgcctcccaggttcaagtg

SEQ ID NO: 101769 - DNA, 120 bp, synthetic construct
  source 1..120: mol_type = other DNA
gcaatacagcaaatgcattctatatcgacagactatagtgcaatgttaagtgccaaggctccgatatcattttctgtcacttatttttctgtcctcaagcaagttacaagatctccctaa

SEQ ID NO: 101770 - DNA, 120 bp, synthetic construct
  source 1..120: mol_type = other DNA
gtttaacatctctgaacctctatatttgcaaaatggaagaaaacaatagttgctacttcacagggttgttgggtggcttcagaggtaaggaaagtgcttagtccaggtttggctcagagc

SEQ ID NO: 101771 - DNA, 120 bp, synthetic construct; identical to SEQ ID NO: 25240
  source 1..120: mol_type = other DNA

SEQ ID NO: 101772 - DNA, 120 bp, synthetic construct; identical to SEQ ID NO: 25241
  source 1..120: mol_type = other DNA

SEQ ID NO: 101773 - DNA, 120 bp, synthetic construct; identical to SEQ ID NO: 25242
  source 1..120: mol_type = other DNA

SEQ ID NO: 101774 - DNA, 120 bp, synthetic construct
  source 1..120: mol_type = other DNA
tcaggaggctgaggcaggagaatcacttgaacctgggaggcagaggttgcagtgagctgagatcgtgccacgtattccggcctgggtgacagagtgagactctgcctggaaaaaaaaaaa

SEQ ID NO: 101775 - DNA, 120 bp, synthetic construct
  source 1..120: mol_type = other DNA
gcgacctcaatctccctccatcgttcacaggggcgcccttctcagtggcccgagctttcctctttccacaagggcacattgaagggaggaccagaaagaaaatcagcaccatgggaagga

SEQ ID NO: 101776 - DNA, 120 bp, synthetic construct
  source 1..120: mol_type = other DNA
gtttttctttgttaagccaaagaaggatcaaccacagttcccttttctctctgatgcctaccgtaaagaaaatcacttcgaacgcttgattccctaaaggggtgatgttgtgctgccttt

SEQ ID NO: 101777 - DNA, 120 bp, synthetic construct; identical to SEQ ID NO: 25243
  source 1..120: mol_type = other DNA

SEQ ID NO: 101778 - DNA, 120 bp, synthetic construct; identical to SEQ ID NO: 25244
  source 1..120: mol_type = other DNA

SEQ ID NO: 101779 - DNA, 120 bp, synthetic construct; identical to SEQ ID NO: 25245
  source 1..120: mol_type = other DNA

SEQ ID NO: 101780 - DNA, 120 bp, synthetic construct; identical to SEQ ID NO: 11350
  source 1..120: mol_type = other DNA

SEQ ID NO: 101781 - DNA, 120 bp, synthetic construct; identical to SEQ ID NO: 11351
  source 1..120: mol_type = other DNA

SEQ ID NO: 101782 - DNA, 120 bp, synthetic construct; identical to SEQ ID NO: 11345
  source 1..120: mol_type = other DNA

SEQ ID NO: 101783 - DNA, 120 bp, synthetic construct; identical to SEQ ID NO: 11346
  source 1..120: mol_type = other DNA

SEQ ID NO: 101784 - DNA, 120 bp, synthetic construct; identical to SEQ ID NO: 11347
  source 1..120: mol_type = other DNA

SEQ ID NO: 101785 - DNA, 120 bp, synthetic construct; identical to SEQ ID NO: 11348
  source 1..120: mol_type = other DNA

SEQ ID NO: 101786 - DNA, 120 bp, synthetic construct; identical to SEQ ID NO: 11349
  source 1..120: mol_type = other DNA

SEQ ID NO: 101787 - DNA, 120 bp, synthetic construct; identical to SEQ ID NO: 11352
  source 1..120: mol_type = other DNA

SEQ ID NO: 101788 - DNA, 120 bp, synthetic construct; identical to SEQ ID NO: 11353
  source 1..120: mol_type = other DNA

SEQ ID NO: 101789 - DNA, 120 bp, synthetic construct; identical to SEQ ID NO: 11354
  source 1..120: mol_type = other DNA

SEQ ID NO: 101790 - DNA, 120 bp, synthetic construct; identical to SEQ ID NO: 11355
  source 1..120: mol_type = other DNA

SEQ ID NO: 101791 - DNA, 120 bp, synthetic construct; identical to SEQ ID NO: 11356
  source 1..120: mol_type = other DNA

SEQ ID NO: 101792 - DNA, 120 bp, synthetic construct; identical to SEQ ID NO: 11357
  source 1..120: mol_type = other DNA

SEQ ID NO: 101793 - DNA, 120 bp, synthetic construct; identical to SEQ ID NO: 11358
  source 1..120: mol_type = other DNA

SEQ ID NO: 101794 - DNA, 120 bp, synthetic construct; identical to SEQ ID NO: 11359
  source 1..120: mol_type = other DNA

SEQ ID NO: 101795 - DNA, 120 bp, synthetic construct
  source 1..120: mol_type = other DNA
ctcactcataggtgggaattgaacaatgagaacacatggacacaggaaggggaacatcacactctggggactgttgtggggtggggggaggggggagggatagcatttggagatacacct

SEQ ID NO: 101796 - DNA, 120 bp, synthetic construct
  source 1..120: mol_type = other DNA
gctctgcaacaagcgacctaatagacatctacagaactctccaccccaaatcaacagaatatacattcttctcagcaccacatcacacttattccaaaattgaccacatagttggaagta

SEQ ID NO: 101797 - DNA, 120 bp, synthetic construct
  source 1..120: mol_type = other DNA
ctcagagccatttccaaagtgaaagtcccagagctggattctgagatgcagaaggaagccaggcggcgtggacggtggggctcccctttgccttagagggcacgggggtgggtgggagga

SEQ ID NO: 101798 - DNA, 120 bp, synthetic construct
  source 1..120: mol_type = other DNA
ggttctctaggtcacccctcggggggtgtcgacgccccgaataggaggttcttgcactgtgagactaggcacctgtggtgctggccctcctcacaaactcagtaggacagcgcctcacag

SEQ ID NO: 101799 - DNA, 120 bp, synthetic construct
  source 1..120: mol_type = other DNA
gcggctccaagaccgacttgtaaagagcagaatattcaggcctcaaaggtacagctttcagacggagagagagacctcgagtgtgatcacggaaacaaacacgtttcaaccaaaggttca

SEQ ID NO: 101800 - DNA, 120 bp, synthetic construct
  source 1..120: mol_type = other DNA
ggaggcgggagggagacctcgccaacgggaggcgggagggagacctcgccaacgggaggcgggagggagacctcgccaacgggaggcgggagggagacctcgccaacgggaggcgggagt

SEQ ID NO: 101801 - DNA, 120 bp, synthetic construct
  source 1..120: mol_type = other DNA
cctcaccaacgggaggccggagtgagacctcaccaaggagaggcgggagtgagacctcaccaacgggaggccggagtgagacctcaccaacgggaggcgggagggagacctcaccaacgg

SEQ ID NO: 101802 - DNA, 120 bp, synthetic construct; identical to SEQ ID NO: 33285
  source 1..120: mol_type = other DNA

SEQ ID NO: 101803 - DNA, 120 bp, synthetic construct; identical to SEQ ID NO: 33286
  source 1..120: mol_type = other DNA

SEQ ID NO: 101804 - DNA, 120 bp, synthetic construct; identical to SEQ ID NO: 6474
  source 1..120: mol_type = other DNA

SEQ ID NO: 101805 - DNA, 120 bp, synthetic construct; identical to SEQ ID NO: 33288
  source 1..120: mol_type = other DNA

SEQ ID NO: 101806 - DNA, 120 bp, synthetic construct; identical to SEQ ID NO: 33289
  source 1..120: mol_type = other DNA

SEQ ID NO: 101807 - DNA, 120 bp, synthetic construct; identical to SEQ ID NO: 33290
  source 1..120: mol_type = other DNA

SEQ ID NO: 101808 - DNA, 120 bp, synthetic construct; identical to SEQ ID NO: 33291
  source 1..120: mol_type = other DNA

SEQ ID NO: 101809 - DNA, 120 bp, synthetic construct
  source 1..120: mol_type = other DNA
cccagctacttgagaggctgaggcaggagaatcgcttcaacacaggaggcggaggttgcagtgagctgagatcgcactactgcactccagcctgggcgacagagtgagactctgtctcaa

SEQ ID NO: 101810 - DNA, 120 bp, synthetic construct
  source 1..120: mol_type = other DNA
tggtggcacatgcctgtaatcccagctacttgagaggctgaggcaggagaatcgcttcaacacaggaggcagaggttgcagtgagctgagatcgcactactgcactccagcctgggcgac

SEQ ID NO: 101811 - DNA, 120 bp, synthetic construct; identical to SEQ ID NO: 33292
  source 1..120: mol_type = other DNA

SEQ ID NO: 101812 - DNA, 120 bp, synthetic construct
  source 1..120: mol_type = other DNA
ggcacagacacggggaaggccgggaccacccaccttgggcaccgacggggggaaggccgggaccacccaccttgggcaccgacacggggaaggccgggaccacccaccccgggcaccgac

SEQ ID NO: 101813 - DNA, 120 bp, synthetic construct; identical to SEQ ID NO: 33295
  source 1..120: mol_type = other DNA

SEQ ID NO: 101814 - DNA, 120 bp, synthetic construct; identical to SEQ ID NO: 33296
  source 1..120: mol_type = other DNA

SEQ ID NO: 101815 - DNA, 120 bp, synthetic construct; identical to SEQ ID NO: 33297
  source 1..120: mol_type = other DNA

SEQ ID NO: 101816 - DNA, 120 bp, synthetic construct; identical to SEQ ID NO: 33298
  source 1..120: mol_type = other DNA

SEQ ID NO: 101817 - DNA, 120 bp, synthetic construct; identical to SEQ ID NO: 33299
  source 1..120: mol_type = other DNA

SEQ ID NO: 101818 - DNA, 120 bp, synthetic construct
  source 1..120: mol_type = other DNA
gggtgagagtgagaatctgtctcaaaaaaaaaaaaaaaaaaaaaaaactgattgcaatcactttatcctggtaactactcaccacggactggttctggccggttgacagaggctgcagag

SEQ ID NO: 101819 - DNA, 120 bp, synthetic construct
  source 1..120: mol_type = other DNA
ggcctcctaaaatgctgggattacagtcgtgagccaccatgcccagccaatacgtttctttttgataacttgaaatgagatttgcataaggtgaaaagtgagtggaaattgtagaagctg

SEQ ID NO: 101820 - DNA, 120 bp, synthetic construct
  source 1..120: mol_type = other DNA
ctgaccccccccacctccctcccggacggggtggctgccgggcggagacgctcctcacttcccagacggggtggttgccagacggaggggctcctcactaagatgaagtgaattgttaat

SEQ ID NO: 101821 - DNA, 120 bp, synthetic construct
  source 1..120: mol_type = other DNA
tcaggtgatccgcccgtctcagccttccaaagtgctgggattacaggcatgagccactgtgcccagcctatgtgttctttttcttacagattgtttttttttttttttttttttattgat

SEQ ID NO: 101822 - DNA, 120 bp, synthetic construct
  source 1..120: mol_type = other DNA
ctcagacggggcggccgggcagagacgctcctcacatcccagacagggtggcagggcagaggtgctccccacatctcagacgatgggcggcctggcagagatgctcctcacttcctagat

SEQ ID NO: 101823 - DNA, 120 bp, synthetic construct; identical to SEQ ID NO: 9337
  source 1..120: mol_type = other DNA

SEQ ID NO: 101824 - DNA, 120 bp, synthetic construct
  source 1..120: mol_type = other DNA
ctctctccttccctcattcccttcatccttctctccctgtgtgcctccttccctccctccctctctcccccttctctctttctccctctcccactccctctctccccaccctttcttccc

SEQ ID NO: 101825 - DNA, 120 bp, synthetic construct
  source 1..120: mol_type = other DNA
tctctctttctccccttccccctgcctctctttcccctttctctcttgttctcccccttcccctccctctctcctccctctcttttcctcctccccccttcccctccctctttctccccc

SEQ ID NO: 101826 - DNA, 120 bp, synthetic construct; identical to SEQ ID NO: 14653
  source 1..120: mol_type = other DNA

SEQ ID NO: 101827 - DNA, 120 bp, synthetic construct; identical to SEQ ID NO: 14654
  source 1..120: mol_type = other DNA

SEQ ID NO: 101828 - DNA, 120 bp, synthetic construct
  source 1..120: mol_type = other DNA
agtatgtgcctgagatgtgtatctccatttactaacagcagtagtaatcccaactcttaactgttctttaaatgttcactccagcaaaatcgaaagcttcacagccatatccacccctcg

SEQ ID NO: 101829 - DNA, 120 bp, synthetic construct
  source 1..120: mol_type = other DNA
ctttttgaccagcgaaagaattccaaaagacatccccttctaaaattctgaggtaagaagtgaaagtaggcgccccgcctgtggagtagccattgttttactcctttactgcattaaata

SEQ ID NO: 101830 - DNA, 120 bp, synthetic construct; identical to SEQ ID NO: 14391
  source 1..120: mol_type = other DNA

SEQ ID NO: 101831 - DNA, 120 bp, synthetic construct; identical to SEQ ID NO: 14392
  source 1..120: mol_type = other DNA

SEQ ID NO: 101832 - DNA, 120 bp, synthetic construct; identical to SEQ ID NO: 14393
  source 1..120: mol_type = other DNA

SEQ ID NO: 101833 - DNA, 120 bp, synthetic construct; identical to SEQ ID NO: 14394
  source 1..120: mol_type = other DNA

SEQ ID NO: 101834 - DNA, 120 bp, synthetic construct; identical to SEQ ID NO: 14395
  source 1..120: mol_type = other DNA

SEQ ID NO: 101835 - DNA, 120 bp, synthetic construct
  source 1..120: mol_type = other DNA
ggctaatttttgtatttttagtacagatgggctttcaccatgttggacaggctagtctcaaactcctggcctcaagtgatccacgcgcctcagcctcccaaagtgctaggattacaggcg

SEQ ID NO: 101836 - DNA, 120 bp, synthetic construct; identical to SEQ ID NO: 14396
  source 1..120: mol_type = other DNA

SEQ ID NO: 101837 - DNA, 120 bp, synthetic construct
  source 1..120: mol_type = other DNA
ccgcgaccccgtctgggaggagaggagcgtctctgcccggccgcgaccccgtctgggaggagaggagcgtctctgcccggccgccccgtctgagaagtgaggagcccctccgcccggaag

SEQ ID NO: 101838 - DNA, 120 bp, synthetic construct
  source 1..120: mol_type = other DNA
tgtcccgtgaccctgccaaatccccctctgtgagaaacacccaagaatgatcaaaaataaataaattaaaaaaaaaaacaaaggttacacgctaaaaaaaaaaaaaaaattaatttgatg

SEQ ID NO: 101839 - DNA, 120 bp, synthetic construct; identical to SEQ ID NO: 25681
  source 1..120: mol_type = other DNA

SEQ ID NO: 101840 - DNA, 120 bp, synthetic construct; identical to SEQ ID NO: 25682
  source 1..120: mol_type = other DNA

SEQ ID NO: 101841 - DNA, 120 bp, synthetic construct
  source 1..120: mol_type = other DNA
taaactttataaacactgaacacttaggctacactaaatttaaaacaaatttttcttggctgggcatggtggctcactcctgtaatcccagcactttgggatgctgaggtcggcagatca

SEQ ID NO: 101842 - DNA, 120 bp, synthetic construct; identical to SEQ ID NO: 31403
  source 1..120: mol_type = other DNA

SEQ ID NO: 101843 - DNA, 120 bp, synthetic construct; identical to SEQ ID NO: 18792
  source 1..120: mol_type = other DNA

SEQ ID NO: 101844 - DNA, 120 bp, synthetic construct
  source 1..120: mol_type = other DNA
cccaaagtgctgggattacaggtgtgagccaccttgcctgacataaaatttaaatttctctttacctatttttggtgcaaagaaatgtgactgggcaatcaactctcaagcatgaaaata

SEQ ID NO: 101845 - DNA, 120 bp, synthetic construct
  source 1..120: mol_type = other DNA
cgcgagcctcttccttcctagagtgacgggggaaggggacaccaggggcagaaacacacccaaaccccacttcaaatcctgccccaccgcttctccttccaaaacagccgcgccactgct

SEQ ID NO: 101846 - DNA, 120 bp, synthetic construct; identical to SEQ ID NO: 24425
  source 1..120: mol_type = other DNA

SEQ ID NO: 101847 - DNA, 120 bp, synthetic construct; identical to SEQ ID NO: 14597
  source 1..120: mol_type = other DNA

SEQ ID NO: 101848 - DNA, 120 bp, synthetic construct; identical to SEQ ID NO: 14598
  source 1..120: mol_type = other DNA

SEQ ID NO: 101849 - DNA, 120 bp, synthetic construct
  source 1..120: mol_type = other DNA
taatacatcataagtctcaaatgataaaaccctgaataaaaattagaatacacattaaagccgggcgcagtggctcacgtctgtaatcctagcactttgggaggcgggcagatcacgagg

SEQ ID NO: 101850 - DNA, 120 bp, synthetic construct; identical to SEQ ID NO: 3805
  source 1..120: mol_type = other DNA

SEQ ID NO: 101851 - DNA, 120 bp, synthetic construct
  source 1..120: mol_type = other DNA
gtgctgggattacaggcatgagccactgccccgggccgccgacatagtttttattaaaaccatcccggctaaaacggtgaaaccccgtctctactaaaaatacaaacaattagctgggca

SEQ ID NO: 101852 - DNA, 120 bp, synthetic construct
  source 1..120: mol_type = other DNA
gcgaggattgttttgtggctacaacaaaattaactatgcttgcacaaaactttagccaatacctcaaagggaaacgtaaaaggggaaagacgcactcttaccccacccactccaaggcag

SEQ ID NO: 101853 - DNA, 120 bp, synthetic construct
  source 1..120: mol_type = other DNA
cctctagtcagttcccccccagtcagtgccccctctagtcagttcccccccagtcagtgccccctctagtcagttcccccccagtcagtgccccctctagtcagtttccccccagtcagt

SEQ ID NO: 101854 - DNA, 120 bp, synthetic construct
  source 1..120: mol_type = other DNA
tccagtcaattccccccagtcagtgccccctccagtcagttcccccccaagtcagtgccccctccagtcagttcccccagtcagtgccccctccagtcagttcccccccagtcagtgcct

SEQ ID NO: 101855 - DNA, 120 bp, synthetic construct
  source 1..120: mol_type = other DNA
caagtcagtcactgtcccctccagtcagtgcccctccagtaagttctccccagtcagtgcatcccctagtcagttccccccagtcagtgcccccttcagtgtcccccagtcagttcccct

SEQ ID NO: 101856 - DNA, 120 bp, synthetic construct
  source 1..120: mol_type = other DNA
cctgttgtcagttcctgtcccctttcatgctacctccttcatcccttatctgttagggacccattagtaccctgccctgctgttagtgaccccacctgtcagtgtctccccactgcttct

SEQ ID NO: 101857 - DNA, 120 bp, synthetic construct
  source 1..120: mol_type = other DNA
ttgatccatgggctgcagtatggagtatgttagcaggcatgacaacattagtctccttgtacatcttaatcagagctcttgggtgactagatgcatggtcaatgagcagtaatattttga

SEQ ID NO: 101858 - DNA, 120 bp, synthetic construct; identical to SEQ ID NO: 24003
  source 1..120: mol_type = other DNA

SEQ ID NO: 101859 - DNA, 120 bp, synthetic construct; identical to SEQ ID NO: 5030
  source 1..120: mol_type = other DNA

SEQ ID NO: 101860 - DNA, 120 bp, synthetic construct
  source 1..120: mol_type = other DNA
atcacttacgcccaggagttgaagaccagcctgggcaatatagcgagactccatctcttttttttttttttttttggtctgagatggagtctcactctgtcgcccaggctggagtacggt

SEQ ID NO: 101861 - DNA, 120 bp, synthetic construct; identical to SEQ ID NO: 24005
  source 1..120: mol_type = other DNA

SEQ ID NO: 101862 - DNA, 120 bp, synthetic construct; identical to SEQ ID NO: 24006
  source 1..120: mol_type = other DNA

SEQ ID NO: 101863 - DNA, 120 bp, synthetic construct; identical to SEQ ID NO: 5031
  source 1..120: mol_type = other DNA

SEQ ID NO: 101864 - DNA, 120 bp, synthetic construct; identical to SEQ ID NO: 24008
  source 1..120: mol_type = other DNA

SEQ ID NO: 101865 - DNA, 120 bp, synthetic construct; identical to SEQ ID NO: 24009
  source 1..120: mol_type = other DNA

SEQ ID NO: 101866 - DNA, 120 bp, synthetic construct; identical to SEQ ID NO: 24010
  source 1..120: mol_type = other DNA

SEQ ID NO: 101867 - DNA, 120 bp, synthetic construct
  source 1..120: mol_type = other DNA
acagaacaaaatgaagtctcccatgtctacttctttctacacagagacagcaacaatctgatttctctgtcttttccccacctttcccccttttctattccacaaaaccgccatcgtcat

SEQ ID NO: 101868 - DNA, 120 bp, synthetic construct
  source 1..120: mol_type = other DNA
cagtacagtccagcttcggctgggcatcagagggagaccgtggggagaggggggagggggagggggagggggagggctatttaacttcttaaacagtatgtttaggtcattaattttcaa

SEQ ID NO: 101869 - DNA, 120 bp, synthetic construct
  source 1..120: mol_type = other DNA
tgctataaatttccttctagacactgtttttgctgtatcccacaagttttgataaattgtatttttcaaggccaggtgcaatggctcatacctgtaatcccagcactttgggaagctgag

SEQ ID NO: 101870 - DNA, 120 bp, synthetic construct; identical to SEQ ID NO: 12029
  source 1..120: mol_type = other DNA

SEQ ID NO: 101871 - DNA, 120 bp, synthetic construct; identical to SEQ ID NO: 12030
  source 1..120: mol_type = other DNA

SEQ ID NO: 101872 - DNA, 120 bp, synthetic construct; identical to SEQ ID NO: 13221
  source 1..120: mol_type = other DNA

SEQ ID NO: 101873 - DNA, 120 bp, synthetic construct
  source 1..120: mol_type = other DNA
ctccccacaattgtcttgtgaccctgacacatccccctctttgagaaacacccacagataatcaataaatactaagggaactcagaggctggcgggatcctccatatgctgaacgctggt

SEQ ID NO: 101874 - DNA, 120 bp, synthetic construct; identical to SEQ ID NO: 13222
  source 1..120: mol_type = other DNA

SEQ ID NO: 101875 - DNA, 120 bp, synthetic construct
  source 1..120: mol_type = other DNA
acaagcccaaggtcaccctgcggggaagcggaggaatcagggctcgaacttacgtttttcctcagagagttcaccacaccgcgaagttgctggaaggaaagaacgagacaatggctcagc

SEQ ID NO: 101876 - DNA, 120 bp, synthetic construct
  source 1..120: mol_type = other DNA
agaaaaacaaagggttggggagggggagggaaaagaggcagagagtgggggagggggtggggatgtggaaagaaagtcagaaggtggggggtgaggggtggggatgggtgaatacgtgat

SEQ ID NO: 101877 - DNA, 120 bp, synthetic construct
  source 1..120: mol_type = other DNA
tagggcttgttggagtgcacctgtaattcccagctacttgggaggcagaagtgagagaattgcttgaacccagaaggttgaggctgcagtgagctgaaatcgtgccactgcactccagcc

SEQ ID NO: 101878 - DNA, 120 bp, synthetic construct
  source 1..120: mol_type = other DNA
gatcttgcagtcacacccagttaatcctgattgagttttcagctttcttctgactaattgatcgaattagatacacatttacggaagtaaaagaataaataatagggtgaaagtccaaaa

SEQ ID NO: 101879 - DNA, 120 bp, synthetic construct
  source 1..120: mol_type = other DNA
tttttcagatggagtttccctattgttgcccaggctgcagtgccatggtgtgatttggctcactgaaatttctgcctcctagttacatgcgattctcctgcttcagcctcctgagtagct

SEQ ID NO: 101880 - DNA, 120 bp, synthetic construct; identical to SEQ ID NO: 7079
  source 1..120: mol_type = other DNA

SEQ ID NO: 101881 - DNA, 120 bp, synthetic construct
  source 1..120: mol_type = other DNA
acgagtttgcgaagattcttcatctccttcaggtaacaacgaagctttcttatcagacgtggccaggacatgttgcgaatttccagctgttgaatactattcaggtatattattttcaat

SEQ ID NO: 101882 - DNA, 120 bp, synthetic construct
  source 1..120: mol_type = other DNA
aggaccctgatcgttcaggggctgtcccattttagcctcagccctttcaacattgcttgtgtgattggttcaaggccataaaatctctaaagcctttttttttttttttttcatctttta

SEQ ID NO: 101883 - DNA, 120 bp, synthetic construct
  source 1..120: mol_type = other DNA
ttcgctgtgttgctccagctggtctcaaactgctgggcttatgggatcctcctgcctcagcttcctaaagtgctgggattactggcatgagtgactgtgtccaggccacatgcaacttaa

SEQ ID NO: 101884 - DNA, 120 bp, synthetic construct
  source 1..120: mol_type = other DNA
agatcgcttgaacccaggaaattgaggctgcaatgaggtatgattgtgccactgcactgtagcctgagtgacaggagacctttaaaaaacaaaaacaaaaacaaaaacaaaagcctgaca

SEQ ID NO: 101885 - DNA, 120 bp, synthetic construct
  source 1..120: mol_type = other DNA
gtcataaaatgacctgtcgccatggtcagggcagttgtcagtacagaacaagatcctcttggggtgccttaagtgcctcactttcttcatcagctcagccctaatttgagcaaatctgct

SEQ ID NO: 101886 - DNA, 120 bp, synthetic construct
  source 1..120: mol_type = other DNA
actccagcctgggtgacagagtgatactctattaaaaaaaaaaaaaggagaaaaaataattccatttcaggctgagtcatttcaccatcatttataggaatggatcaagttcacagaatc

SEQ ID NO: 101887 - DNA, 120 bp, synthetic construct; identical to SEQ ID NO: 23
  source 1..120: mol_type = other DNA

SEQ ID NO: 101888 - DNA, 120 bp, synthetic construct
  source 1..120: mol_type = other DNA
caagtctccttctgtcgcccaggctagagtgcagtggtgtgatgtcacctcactgcaacctcttcttcccgggttcaaatgattctcctgcctcaacctcacaagtagctgggattacag

SEQ ID NO: 101889 - DNA, 120 bp, synthetic construct
  source 1..120: mol_type = other DNA
acaaacccagagaaaaggcatcactctcaggccaagcccatgcaatcttatcttctcccaaggccaaagtcactgctctggcaatggtgaaacagccctcagtttactccaattctgccc

SEQ ID NO: 101890 - DNA, 120 bp, synthetic construct
  source 1..120: mol_type = other DNA
caacatagtgggattataggtgtgagcctccgccccagcctcattattgaaaatttcagtgagatgcagtggtctccgcctgtagtccaagctaatagggaggctgaggtaggaggatca

SEQ ID NO: 101891 - DNA, 120 bp, synthetic construct
  source 1..120: mol_type = other DNA
ctgtaatcccagcactttgggaggccaaggcaggtggatcacttgaggtcaggtgttcgacaccaacctggccagcatggtgaaaccccacctctactaaaaatacaaaaattagcgagg

SEQ ID NO: 101892 - DNA, 120 bp, synthetic construct
  source 1..120: mol_type = other DNA
aatcgacagtgttagggatagggtagaagtcaagaatacattcattcaagggtgggtgaggtggttcatagctgtaattccagcactttggaaggacaaggtgagtagatcacctgatgt

SEQ ID NO: 101893 - DNA, 120 bp, synthetic construct
  source 1..120: mol_type = other DNA
tcacctggtgtcgggagtttgagaccaccctgaccaacatggagaaatctcgtctctactaaaaatacaaaattagccgagtgtggtggtgcatgtctgtaaccccagctactccagagg

SEQ ID NO: 101894 - DNA, 120 bp, synthetic construct
  source 1..120: mol_type = other DNA
tgtatgaaatttttagactgacgtttttagattgatgtttgatgtttgcagtttttagattgctttgggcagtgtggtcattttcacaatattgtgtctgtcaatccgtgagcatgggct

SEQ ID NO: 101895 - DNA, 120 bp, synthetic construct
  source 1..120: mol_type = other DNA
actcttctggccagaaacctctgtggctgggggcacctttgccagagttttgatggggttcactgggttcgttctgcccatgcagcctggtagactatgcttggctcatgtttcaagcct

SEQ ID NO: 101896 - DNA, 120 bp, synthetic construct
  source 1..120: mol_type = other DNA
actggtcttcctaatgttctccctgagtctggggtttttttgacatcagacaggagaaagtatgcactcattgggtcataggtggccatgagcaggcacagaaaaggcaacacatgttcc

SEQ ID NO: 101897 - DNA, 120 bp, synthetic construct
  source 1..120: mol_type = other DNA
aggagtggttcatggttcccaggcccagcaatcgggctggtcacccctatggggggcggatctcggaaacacagcctggggtggatccgcatagaacctcccttcaagacctgggagctt

SEQ ID NO: 101898 - DNA, 120 bp, synthetic construct
  source 1..120: mol_type = other DNA
gccagtaatcccagcactttaggaagctgaggcaggaggaccccataagcccagctgaggcaggaggatcccagagcaacacagagaaaccctgtctcaaattgtctttaataaaaattt

SEQ ID NO: 101899 - DNA, 120 bp, synthetic construct
  source 1..120: mol_type = other DNA
tttagcctcagccctttcaacattgcttgtgtgattggttcaaggccataaaatctctaaagcctttttttttttttttttcatcttttagcagaaaactttatctctgggctacaggta

SEQ ID NO: 101900 - DNA, 120 bp, synthetic construct
  source 1..120: mol_type = other DNA
acgccgattaaatatctcagaaagtcattgaaaataatatacctgaatagtattcaagagctggaaattcgcaacatgtcctggccacgtctgataagaaagcttcgttgttacctgaag

SEQ ID NO: 101901 - DNA, 120 bp, synthetic construct
  source 1..120: mol_type = other DNA
agcatatgaagcccttccagcaatgcttttaaggtctccaaatgaagcgtcttcatcagtgatcccagagggaggcaggtgaagggccaggcctgcaccatcaccgtcagagtctggaag

SEQ ID NO: 101902 - DNA, 120 bp, synthetic construct
  source 1..120: mol_type = other DNA
tcatttgactccagaaggcagaggttgcagagagccaagatctcaccactgctctccagcctgggtgacagagttggactcagactcaaacaaaaacaaattgataaattaattaattaa

SEQ ID NO: 101903 - DNA, 120 bp, synthetic construct
  source 1..120: mol_type = other DNA
cttcgataagaattttaaaatgacaaaaactaagcacaaatcacaatttgatggatgaagacaaaactacatttagaggaaaaatgaaagcctaaatctgttcatctcacgaaacagaca

SEQ ID NO: 101904 - DNA, 120 bp, synthetic construct
  source 1..120: mol_type = other DNA
ctgaggtgaggagatcacttgaggtcaggagtttgagaccagccgggccaacatggtgaaaccccatctcgactaaaatacaaaaattagtagggcttgttggagtgcacctgtaattcc

SEQ ID NO: 101905 - DNA, 120 bp, synthetic construct
  source 1..120: mol_type = other DNA
aagaaagaaagaaagaagaaagaaggaaggaaggaaggaaggaaggaaggaaggaaggaaagaaagaagaaagaaagagaaagaaagaaagaaagaaagaaagaaagaaagaaagaaaga

SEQ ID NO: 101906 - DNA, 120 bp, synthetic construct
  source 1..120: mol_type = other DNA
taattaagaaaatttcctcaatttatattgagtgatgttggtgaacatggcaaggcacaaagcaggaaactccacagctgctgctctggacctaaagaggcaccctggacttctgggtgg

SEQ ID NO: 101907 - DNA, 120 bp, synthetic construct
  source 1..120: mol_type = other DNA
tgcagtcttttcctacacagggtcacctacaggtgttatggttgcatctcccctagaagagccaatggggatgggtgaggaatctgaaatcactcaggcaccccacatacaaatgagagc

SEQ ID NO: 101908 - DNA, 120 bp, synthetic construct; identical to SEQ ID NO: 2245
  source 1..120: mol_type = other DNA

SEQ ID NO: 101909 - DNA, 120 bp, synthetic construct; identical to SEQ ID NO: 101893
  source 1..120: mol_type = other DNA

SEQ ID NO: 101910 - DNA, 120 bp, synthetic construct
  source 1..120: mol_type = other DNA
gatgaactacaagacactgctgaaaaaaatcatagacaacaaaaaagtagaaaaatatcccatgctcatggattgacagacacaatgttgtgaaaatcaccacactgcccaaagcaatct

SEQ ID NO: 101911 - DNA, 120 bp, synthetic construct; identical to SEQ ID NO: 101895
  source 1..120: mol_type = other DNA

SEQ ID NO: 101912 - DNA, 120 bp, synthetic construct
  source 1..120: mol_type = other DNA
tgcaccatcccactgctgtcttgaaccctctggactttgggccttgatgagtgtaggagggaggctgaggggtgttgcggactgatcagcactggtctttggatgctccttggtacaagt

SEQ ID NO: 101913 - DNA, 120 bp, synthetic construct
  source 1..120: mol_type = other DNA
gggtgagaagcagaaatggcacctgtttcaaggacctggccagctatctggccactgtgcccatcctgctaacagtgtcaagctcccaggtcttgaagggagggtctatgcggatccacc

SEQ ID NO: 101914 - DNA, 120 bp, synthetic construct
  source 1..120: mol_type = other DNA
cagtgtgagggaaaaaacataacagcagggggcaaggttggaggaaaatgttgaggtgacatcagtgagaacttcagggacccgtgtcctagagtcggaaagagaagctaaagttctaca

SEQ ID NO: 101915 - DNA, 120 bp, synthetic construct
  source 1..120: mol_type = other DNA
atcatgcagcaacttccatgaggaccatcatcagatggtgggaacaaacttgtgtttgtttgacgcaggcattttcctagatgaaggcactaccttcatctaactggtatcactgcccag

SEQ ID NO: 101916 - DNA, 120 bp, synthetic construct
  source 1..120: mol_type = other DNA
gagatgaagaatcttcgcaaactcgttttctccaggtgccatcattacacgtcagataatgaactcgaaggacggttagttgccaaattcagctctgtgttcctcaggctggaacacctt

SEQ ID NO: 101917 - DNA, 120 bp, synthetic construct
  source 1..120: mol_type = other DNA
tgccctgccagctccaggagtctgggtggggcctggatgctcatcctgatagatctgcaagaaaaatctctagaagacaaatccagggaaaatgtatcactctcatggcaaacacaatca

SEQ ID NO: 101918 - DNA, 120 bp, synthetic construct
  source 1..120: mol_type = other DNA
caggagatctgcccacctcagactcccaaagtgctgggattacatgagtgagccaccgcgcccagctacagttagcatttctatacataccttccaaatgctgtggaataccatcacacc

SEQ ID NO: 101919 - DNA, 120 bp, synthetic construct
  source 1..120: mol_type = other DNA
tcagatgggcatgaccctaagaaggtggtgacttaccagcgctggactcactttgcagagttctgggacctctcagggaaccaagcagtagctccaggaatgagtgctgtgggtctcttc

SEQ ID NO: 101920 - DNA, 120 bp, synthetic construct
  source 1..120: mol_type = other DNA
ggccgtcaccatgttggcccggctggtctcaaactcctgacctcaagtgatctcctcaccttggcctcccaaaaggctgggataacaggcatcagccatctcacccaccctagattgagt

SEQ ID NO: 101921 - DNA, 120 bp, synthetic construct
  source 1..120: mol_type = other DNA
ggtgacagcatgacactgtcaaaaaagaacaaaagaaaaagcaagcaagcatgcaagaaagaaagaaagaaagaaagaaagaaagaaagaaagaaagaaagaaagaaagaaagaaggaag

SEQ ID NO: 101922 - DNA, 120 bp, synthetic construct
  source 1..120: mol_type = other DNA
tgcacttggggtcttttctaccatgttctgtcgccagttcttctcgaggtgctcatctgctgccaagctcagagcaaccttcgaaacccatctcaggaaacgacctgacctattctccac

SEQ ID NO: 101923 - DNA, 120 bp, synthetic construct; identical to SEQ ID NO: 2244
  source 1..120: mol_type = other DNA

SEQ ID NO: 101924 - DNA, 120 bp, synthetic construct; identical to SEQ ID NO: 2245
  source 1..120: mol_type = other DNA

SEQ ID NO: 101925 - DNA, 120 bp, synthetic construct
  source 1..120: mol_type = other DNA
aagggttaagtcaagggcccctacccttaaaaaatgaactatatactttttttttttttttttttgaggcagcgtctcgctttgtagcccaggctgaagtgcagtggcatgatcttggct

SEQ ID NO: 101926 - DNA, 120 bp, synthetic construct
  source 1..120: mol_type = other DNA
ctaggagggcggatcacaaggtcaggagatcgagacaatcctggttaacacagagaaaccccgtctctactaaaaatacaaaaattagctgggcgtggcggcgtgtgcctgtagtccgag

SEQ ID NO: 101927 - DNA, 120 bp, synthetic construct
  source 1..120: mol_type = other DNA
gctgggattacaggcgtgagccaccacacccggcctagaaatatatgttataataaaatagagccatgtgtggtggctcatgcctgtaatcccaatactttgtaaggctaagattggagc

SEQ ID NO: 101928 - DNA, 120 bp, synthetic construct
  source 1..120: mol_type = other DNA
attggttagagacctgacaaatagccatcacattagagtcacccactagatttctgctttgtcattttggggaggtcacagtttcctgtttgctctagtttcttgtagatatagatctgt

SEQ ID NO: 101929 - DNA, 120 bp, synthetic construct; identical to SEQ ID NO: 45
  source 1..120: mol_type = other DNA

SEQ ID NO: 101930 - DNA, 120 bp, synthetic construct; identical to SEQ ID NO: 46
  source 1..120: mol_type = other DNA

SEQ ID NO: 101931 - DNA, 120 bp, synthetic construct
  source 1..120: mol_type = other DNA
cgcagtgcaccatgactcagattcagctgcttcagttgactgagacttgggtaccggggcaggcatttcaagtcctcttcttctaggaagccataagttaatgccaatgtctccaacggg

SEQ ID NO: 101932 - DNA, 120 bp, synthetic construct
  source 1..120: mol_type = other DNA
acacgatgtccctctctgtagcttctaccccaggtcatccctctgcccttactggagcgatcctgtgatacccacttcaggatatagagcaccaaacaggacaatgcattctagtgtccc

SEQ ID NO: 101933 - DNA, 120 bp, synthetic construct; identical to SEQ ID NO: 2740
  source 1..120: mol_type = other DNA

SEQ ID NO: 101934 - DNA, 120 bp, synthetic construct; identical to SEQ ID NO: 7174
  source 1..120: mol_type = other DNA

SEQ ID NO: 101935 - DNA, 120 bp, synthetic construct; identical to SEQ ID NO: 7175
  source 1..120: mol_type = other DNA

SEQ ID NO: 101936 - DNA, 120 bp, synthetic construct; identical to SEQ ID NO: 7145
  source 1..120: mol_type = other DNA

SEQ ID NO: 101937 - DNA, 120 bp, synthetic construct
  source 1..120: mol_type = other DNA
caagaagagtgtctcccaacctccaaggagcgggcaagatcactcctactccatgaattttcatccattgctccaccctggccaggcgcggtggctcacgcctgtaatcccagcactttg

SEQ ID NO: 101938 - DNA, 120 bp, synthetic construct
  source 1..120: mol_type = other DNA
aaagtcgtgtattagcgaaacttcatcagtatttgaggaataaatgaatgaatgagttttggactttcaccctattatttattcttttacttccataaatgtgtatctaattcgatcaat

SEQ ID NO: 101939 - DNA, 120 bp, synthetic construct
  source 1..120: mol_type = other DNA
tagacacagggttttgccatgttggccatgctggcctcaaactcctgacctcaggagatctgcccccctcagactcccaaagtgctgggattacaggagtaagccagcatgcccagctac

SEQ ID NO: 101940 - DNA, 120 bp, synthetic construct; identical to SEQ ID NO: 7087
  source 1..120: mol_type = other DNA

SEQ ID NO: 101941 - DNA, 120 bp, synthetic construct; identical to SEQ ID NO: 7088
  source 1..120: mol_type = other DNA

SEQ ID NO: 101942 - DNA, 120 bp, synthetic construct
  source 1..120: mol_type = other DNA
ggacctcatttggtaactgtgacctggacaacttcagttgcgtctttggagctactgccctgccaactcaggaggaccaggactccctcttgtcccaggctcccatcagctctgaagtgt

SEQ ID NO: 101943 - DNA, 120 bp, synthetic construct; identical to SEQ ID NO: 7089
  source 1..120: mol_type = other DNA

SEQ ID NO: 101944 - DNA, 120 bp, synthetic construct; identical to SEQ ID NO: 7090
  source 1..120: mol_type = other DNA

SEQ ID NO: 101945 - DNA, 120 bp, synthetic construct; identical to SEQ ID NO: 7167
  source 1..120: mol_type = other DNA

SEQ ID NO: 101946 - DNA, 120 bp, synthetic construct; identical to SEQ ID NO: 7100
  source 1..120: mol_type = other DNA

SEQ ID NO: 101947 - DNA, 120 bp, synthetic construct; identical to SEQ ID NO: 7101
  source 1..120: mol_type = other DNA

SEQ ID NO: 101948 - DNA, 120 bp, synthetic construct; identical to SEQ ID NO: 7102
  source 1..120: mol_type = other DNA

SEQ ID NO: 101949 - DNA, 120 bp, synthetic construct; identical to SEQ ID NO: 7158
  source 1..120: mol_type = other DNA

SEQ ID NO: 101950 - DNA, 120 bp, synthetic construct; identical to SEQ ID NO: 7157
  source 1..120: mol_type = other DNA

SEQ ID NO: 101951 - DNA, 120 bp, synthetic construct; identical to SEQ ID NO: 7103
  source 1..120: mol_type = other DNA

SEQ ID NO: 101952 - DNA, 120 bp, synthetic construct; identical to SEQ ID NO: 7104
  source 1..120: mol_type = other DNA

SEQ ID NO: 101953 - DNA, 120 bp, synthetic construct; identical to SEQ ID NO: 7156
  source 1..120: mol_type = other DNA

SEQ ID NO: 101954 - DNA, 120 bp, synthetic construct; identical to SEQ ID NO: 7105
  source 1..120: mol_type = other DNA

SEQ ID NO: 101955 - DNA, 120 bp, synthetic construct; identical to SEQ ID NO: 7106
  source 1..120: mol_type = other DNA

SEQ ID NO: 101956 - DNA, 120 bp, synthetic construct
  source 1..120: mol_type = other DNA
ggctctgctgtttgggggaatcacgattaagtggtggtggtgtgtagaagttgagtcccattgcctgccgtgggtttctgctgcctccctattatcaggaatagaaggtgagattgaagg

SEQ ID NO: 101957 - DNA, 120 bp, synthetic construct
  source 1..120: mol_type = other DNA
accaaaagctcttcagtgatagactagataaagaaaatatggcacatatacaccattcaatactatgcagccataaaaaatgatgagttcaggtcattttcagggacatggatgaagctg

SEQ ID NO: 101958 - DNA, 120 bp, synthetic construct
  source 1..120: mol_type = other DNA
tctctgtctacatgagattgtcaaggaaaaaatcattatcaaacacaacctaggcacatggtccagcagccacgctccttggcatttacccaaatgagaaaacctaaaacctggatgttt

SEQ ID NO: 101959 - DNA, 120 bp, synthetic construct
  source 1..120: mol_type = other DNA
atgtgacatgtatatttgcttaccatacatgcatgcatcccccaccctgtgaattttcatagctgctccaatgacctgctgaatatgcacacttggtggccaacaggttcagcatagatt

SEQ ID NO: 101960 - DNA, 120 bp, synthetic construct
  source 1..120: mol_type = other DNA
ttggatgcagagaacctaattataatgcatttaaatgtaaagcctcaaccaccaggtgaacctgggatgtatgtgacatgtatatttgcttaccatacatgcatgcatcccccaccctgt

SEQ ID NO: 101961 - DNA, 120 bp, synthetic construct
  source 1..120: mol_type = other DNA
gcaaaaggagggtgacttcatccatattcaacgtgtttatattattggtggcagctcatgttgactgcccgacatttgcattgtagtggctataaagtgatttctgagcactatgtgatc

SEQ ID NO: 101962 - DNA, 120 bp, synthetic construct
  source 1..120: mol_type = other DNA
tacttcaagttctgggacacatgtgcagaacgtgcaggtttgttacatagggatacatatgccatggtggtttgctgcacatatcaagccatcatctacactaggtatttatcctaatgc

SEQ ID NO: 101963 - DNA, 120 bp, synthetic construct
  source 1..120: mol_type = other DNA
gtatattgaaattttaaattataatgggaatttagtattttaaagtatgtagtgcaatattttaaaaaggtttgtaggctgggcacagtggctcacgactgtaatcccagcactttggga

SEQ ID NO: 101964 - DNA, 120 bp, synthetic construct
  source 1..120: mol_type = other DNA
atcactaacccatgcctgtcatggtgggtagcggcccttgctgaattaaagtagttgtggccaataaagacatccaaattccctttcagcaaaatgctgacattatgtaggcatataata

SEQ ID NO: 101965 - DNA, 120 bp, synthetic construct
  source 1..120: mol_type = other DNA
ctctggagagttatgacacccagggtgctctctgctgggggagatttgctgaacttggggctgagctgatgaacacactgagggacttaaggcagcccaagatcattgtgttctgcaccg

SEQ ID NO: 101966 - DNA, 120 bp, synthetic construct
  source 1..120: mol_type = other DNA
gaggatagacctcatattttaaaatataggagtgggatgggcattctctttagtgccctcttcacctccctatttcccatcatcttaacttagacacacatcctcaggaggaattcacaa

SEQ ID NO: 101967 - DNA, 120 bp, synthetic construct
  source 1..120: mol_type = other DNA
aatatgtcgcagaagttctcatccacattcctcaagtccagcacttgaagttttgactgcctgtgggtaaaggagaagagaggctccaaactaaggcaaggacctgagcttttatttaca

SEQ ID NO: 101968 - DNA, 120 bp, synthetic construct
  source 1..120: mol_type = other DNA
aagtaacaaaaaaatttccctcaaaaaggtggagcttagctttcaggatcctgagtgacagatcccagtaatcctgagtttcagtggagcaatgtatagaaattaatgggccactggcca

SEQ ID NO: 101969 - DNA, 120 bp, synthetic construct
  source 1..120: mol_type = other DNA
caggtgaccattggataaaggagctttttaatccgttttcttagggtggacatcactgtctttttaaagctgttttaactgtcttaacgaaacgttttgataatttcgatgtggccacag

SEQ ID NO: 101970 - DNA, 120 bp, synthetic construct
  source 1..120: mol_type = other DNA
actgtgtgatcctgcttaggatgggagccatccctgaacttagcagatcttttaacatgaaatagagcttccaggttttgttggggaaatgtattgtacatttgcacacaatacaaccag

SEQ ID NO: 101971 - DNA, 120 bp, synthetic construct
  source 1..120: mol_type = other DNA
tgctttatggcttctcatgttcaccaaaatagctcaatagaattttgggagaattcctcaatgactgctctggggtgaaggtctcccagcattgtggccatgttctgttgttcaggagat

SEQ ID NO: 101972 - DNA, 120 bp, synthetic construct
  source 1..120: mol_type = other DNA
tcagaggaggtttggaataacttggatgtcagggactctgagccagaccccattctttttcattccctcctgaaaagcccagtcctcaccgtcccataaggctctgaccagtgaaaagat

SEQ ID NO: 101973 - DNA, 120 bp, synthetic construct
  source 1..120: mol_type = other DNA
ctcgcctatccccattggctcttcttgggaagatgaatttatggggcacctgcaggtggccacgtgtgggaaggaatctcagaacttacatggatccatgcaaatgaggcttccttcagg

SEQ ID NO: 101974 - DNA, 120 bp, synthetic construct
  source 1..120: mol_type = other DNA
ctagtagcctggactataggcgcagaccaccgcaactggctaatttttgtaattttagtagaggtagggttttaccatgttggccaggcttgtctcaaactcctgacctcagataatcca

SEQ ID NO: 101975 - DNA, 120 bp, synthetic construct; identical to SEQ ID NO: 101891
  source 1..120: mol_type = other DNA

SEQ ID NO: 101976 - DNA, 120 bp, synthetic construct; identical to SEQ ID NO: 42
  source 1..120: mol_type = other DNA

SEQ ID NO: 101977 - DNA, 120 bp, synthetic construct
  source 1..120: mol_type = other DNA
acctgttctagggatgtcccatgaatgttcccaacaaacttatttgtaggaactgaaaatgtgggcatgtaggcttgtgacactcccattcccattgttttagaaccttgagtaatcagt

SEQ ID NO: 101978 - DNA, 120 bp, synthetic construct
  source 1..120: mol_type = other DNA
ccaacatggtaaaccccaactctactaaaaatactaaaattagctgggcatggtggtgggctcctgtaatcccagctacttgtgaggttgaggcaggagaatcatttgaacccaggaagc

SEQ ID NO: 101979 - DNA, 120 bp, synthetic construct
  source 1..120: mol_type = other DNA
cgctagtgggcatctactgtgagccagcctatgaggatgaaacagtgaaggggacactagaatgtccatacattgtcctgttggcggccctgtcctgaaatgggtatcatgcaaccatcc

SEQ ID NO: 101980 - DNA, 120 bp, synthetic construct; identical to SEQ ID NO: 43
  source 1..120: mol_type = other DNA

SEQ ID NO: 101981 - DNA, 120 bp, synthetic construct; identical to SEQ ID NO: 44
  source 1..120: mol_type = other DNA

SEQ ID NO: 101982 - DNA, 120 bp, synthetic construct
  source 1..120: mol_type = other DNA
aagaaaatcaaggcatttaaatgaaatttggttattgtaatcactttcctcccattcttttattggagacagagtttcactcttgttgcccaggctggagtttagagtgcaatggtgcca

SEQ ID NO: 101983 - DNA, 120 bp, synthetic construct
  source 1..120: mol_type = other DNA
ggttccagaagccttagttggtggatgtcagcttcactgcacaaggagccactctcttcccgctgccctggaaggggatgtccatattgtgtattagctggagactctgggcagcaccaa

SEQ ID NO: 101984 - DNA, 120 bp, synthetic construct
  source 1..120: mol_type = other DNA
tataattgagtgttgcaaggattatattttatggtgttttcaaaaatgtactattatgagccaggtgcagtgagtcatacctgtaattccagcactttgggaggctgaggcaggtggatc

SEQ ID NO: 101985 - DNA, 120 bp, synthetic construct
  source 1..120: mol_type = other DNA
gtaatcccagatagtcaggaggctgaggcaagagaatcgcttgaacctgcgaggcaaaggttgcagtgagccaagaatgcaccactgcactccagcctgggtgaaagaggaagactccgt

SEQ ID NO: 101986 - DNA, 120 bp, synthetic construct
  source 1..120: mol_type = other DNA
tattattttttttagtagagacagggttttgtcattttagctaggctggtctggaacccctgacctcaggtgatccacctgcctcggcttcccaaaatgctatgactatagacgtgagcc

SEQ ID NO: 101987 - DNA, 120 bp, synthetic construct
  source 1..120: mol_type = other DNA
ggatatagtcactaaattgctaccttggggacatcaacattagctcactaccaataatataaataaattggattatggaaaaaaatggcccttgtgatactgtggatactccaggtgtat

SEQ ID NO: 101988 - DNA, 120 bp, synthetic construct
  source 1..120: mol_type = other DNA
tttacacagatgggaactggaacatattttataacagtgagaagctgaaaccaccctcagtgtccagtgacacagattggttaaagaaatcacggtgcagccacataatggagtagtata

SEQ ID NO: 101989 - DNA, 120 bp, synthetic construct
  source 1..120: mol_type = other DNA
gcctcctgctggaggtgggggaccttgaggattgttgccttcttgttggggtggtccttgtggctttcctggaggagatcgggcactttgggacttgctgcctccttgtgcgggtggtcc

SEQ ID NO: 101990 - DNA, 120 bp, synthetic construct
  source 1..120: mol_type = other DNA
aagcatctctgccattcaatttggtggcctgctcatgatgcccagaatcaaggttgcacgaagagtgcctatattgttaggggcactaacattaatcaactcctgaaaggaaagttttga

SEQ ID NO: 101991 - DNA, 120 bp, synthetic construct
  source 1..120: mol_type = other DNA
cttactgagatcagtttaggatcttcacagctggacttccatgaatctgccttgcattctctactgcatccttcacagcacagttctatctataaatgcaaatcttaccttctcattccc

SEQ ID NO: 101992 - DNA, 120 bp, synthetic construct; identical to SEQ ID NO: 12691
  source 1..120: mol_type = other DNA

SEQ ID NO: 101993 - DNA, 120 bp, synthetic construct; identical to SEQ ID NO: 12692
  source 1..120: mol_type = other DNA

SEQ ID NO: 101994 - DNA, 120 bp, synthetic construct; identical to SEQ ID NO: 12693
  source 1..120: mol_type = other DNA

SEQ ID NO: 101995 - DNA, 120 bp, synthetic construct
  source 1..120: mol_type = other DNA
aaacagattgagaacgaatcaggctttacctgctattagggagggagattcttcctggctgacatctagaagagaagcacaggatgatgggaaaagttacatcttgaacctttcaagact

SEQ ID NO: 101996 - DNA, 120 bp, synthetic construct; identical to SEQ ID NO: 12694
  source 1..120: mol_type = other DNA

SEQ ID NO: 101997 - DNA, 120 bp, synthetic construct; identical to SEQ ID NO: 12695
  source 1..120: mol_type = other DNA

SEQ ID NO: 101998 - DNA, 120 bp, synthetic construct; identical to SEQ ID NO: 12688
  source 1..120: mol_type = other DNA

SEQ ID NO: 101999 - DNA, 120 bp, synthetic construct; identical to SEQ ID NO: 12689
  source 1..120: mol_type = other DNA

SEQ ID NO: 102000 - DNA, 120 bp, synthetic construct; identical to SEQ ID NO: 12690
  source 1..120: mol_type = other DNA

SEQ ID NO: 102001 - DNA, 120 bp, synthetic construct; identical to SEQ ID NO: 8877
  source 1..120: mol_type = other DNA

SEQ ID NO: 102002 - DNA, 120 bp, synthetic construct
  source 1..120: mol_type = other DNA
ctggccgaggttatcacctccgacatcctgcacagcttcctgtacggccgctggcgcaacgtgctcggggagcagctcttcgaggacaagagccaccacgccagccccaagacagccttc

SEQ ID NO: 102003 - DNA, 120 bp, synthetic construct
  source 1..120: mol_type = other DNA
taatcccccttttttgtaaggggaattcctcggccccttttaaacaagtcccctccgcattgagctacaatttactgctacagcattcttccagggctaatgaatttagaattagcaatt

SEQ ID NO: 102004 - DNA, 120 bp, synthetic construct
  source 1..120: mol_type = other DNA
tcggcatcttctccaagacgtggatcaaggcgggaaccgagatgggccccttcaccggccgcgtgatcgccccggagcacgtggacatctgcaagaacaacaacctcatgtgggaggtac

SEQ ID NO: 102005 - DNA, 120 bp, synthetic construct
  source 1..120: mol_type = other DNA
tgcatcccttgagagagctcagggccactttgtctgggcagtgatcccttggagaccctcttcttctgggggtagggaggacacggcaacaggagcgtgtatcatggtcagcccatagag

SEQ ID NO: 102006 - DNA, 120 bp, synthetic construct
  source 1..120: mol_type = other DNA
cgtgtgtcaggcttctcccagatgctggatatgcagtatggtatttaatccccacggggccccaggaggaggattctgtgattatttacagtttactgaccagaaaaccaggtctccctc

SEQ ID NO: 102007 - DNA, 120 bp, synthetic construct
  source 1..120: mol_type = other DNA
tccagcctgggtgacagagtgagactccatctcaaaaaaaaaaaaaaaaaaaaaaggtaaccggtaaatatcacttcctgtggtgtggcaggggtgaggctgagccaggaaggttcagag

SEQ ID NO: 102008 - DNA, 120 bp, synthetic construct
  source 1..120: mol_type = other DNA
ccacatcctaaaattggcttccagtgtagctgaaccccacatataacagaatgcaccctcccagatcctcaccccaccaccctctgtcacacacatcttcgccttcatacgctctttccc

SEQ ID NO: 102009 - DNA, 120 bp, synthetic construct
  source 1..120: mol_type = other DNA
tcacatatgtgatatagacagatccaccaatttggctatcagtgcttttacagagttagcaagccttctaagaaggggctgtctgcgtgaatgacaaggaaataaaatgccacccatttt

SEQ ID NO: 102010 - DNA, 120 bp, synthetic construct
  source 1..120: mol_type = other DNA
ctggccagcaactattaaaaaatagaatctgctcagccctcggggtgctgctctctgttactatcctcatttttatgacggcgaaactgaaatgttacggagattacgggaagttgctga

SEQ ID NO: 102011 - DNA, 120 bp, synthetic construct
  source 1..120: mol_type = other DNA
ctgcaacctccacctcctgggttcaggtgattaaacaattctcgtgcctcagccacctgaatagatgggagtacaggcatgtgccaccactcacggctaatttttttttttttttttttt

SEQ ID NO: 102012 - DNA, 120 bp, synthetic construct
  source 1..120: mol_type = other DNA
cctctcaaaatgctgggattacaggtgagagccaccacacccaaactgtaggctcttcttaactgattttcttgcttttaaaagataatttgtgtgtgtgtgtgtgtgtgtgtgtgtgtg

SEQ ID NO: 102013 - DNA, 120 bp, synthetic construct
  source 1..120: mol_type = other DNA
gcttagtatttgatgacccccaggcctggagcctggaggtggagttcagctgggggcttgctgagcctcccatctcatcccacatctgtgctggaggagttggtttcccttctgggggag

SEQ ID NO: 102014 - DNA, 120 bp, synthetic construct
  source 1..120: mol_type = other DNA
gaggtggagcttgcagtgagccaagatcgcgccactgcactccagcctgggcgacagcgcgagactccgtctcaaaaaaaaacaaaaaagaaaaacaaaaaaaaccacgcaaatcagaac

SEQ ID NO: 102015 - DNA, 120 bp, synthetic construct
  source 1..120: mol_type = other DNA
ctggctaatttttctatttttttgtagagacagggttttgctatgttgcccaggctagtctcaaactcctggcctcaagtaatccacccgcctcagcctcccaaagtgctaggattacag

SEQ ID NO: 102016 - DNA, 120 bp, synthetic construct
  source 1..120: mol_type = other DNA
acatcatttgcggggttctctgtcattgacctaggacgcggtgaactggactctgtgtaaggcagtgtaccccaatgtttcctggggtggaggtgttcatccatccgaatgcttcttttt

SEQ ID NO: 102017 - DNA, 120 bp, synthetic construct
  source 1..120: mol_type = other DNA
gttctagttctgctgtacaatcttggaaatgtcctgtgcctcagtttcctcacctgtaaagggaaggtcctaggcaagataatctctaagttcccttctggttctgacaacctgtatatt

SEQ ID NO: 102018 - DNA, 120 bp, synthetic construct
  source 1..120: mol_type = other DNA
ccttatttttggaggatgaacctgagctggtgagctactgtttattaagtccttgctctgcagctgatgttttacaaacattaatttctctaggccgggcatggtggcttatgcctataa

SEQ ID NO: 102019 - DNA, 120 bp, synthetic construct
  source 1..120: mol_type = other DNA
aaaggcagtgctagctttccattttacagatgagaaagctgaggtttagctaggctgagtcgctaagtccccgaggtctcgcatcgcgatcgggagtccaactccctattggacccccca

SEQ ID NO: 102020 - DNA, 120 bp, synthetic construct
  source 1..120: mol_type = other DNA
cggaggcggatctcaggcacccccgccttggcccgtgtcgcagatgaggacactgagggcggcgtccctcacccaggccacgcagctggtgcggctgttcggccgcctcctctgggaggg

SEQ ID NO: 102021 - DNA, 120 bp, synthetic construct
  source 1..120: mol_type = other DNA
ccaggattcccgtagggcgttttgtaaaataaactataatattaatgaaaagtataaaatgtatagagttttcaagaaactgcgttctacttccagaagatggtcactttaaccttgtaa

SEQ ID NO: 102022 - DNA, 120 bp, synthetic construct; identical to SEQ ID NO: 23111
  source 1..120: mol_type = other DNA

SEQ ID NO: 102023 - DNA, 120 bp, synthetic construct
  source 1..120: mol_type = other DNA
tcactaccaccaacatcaccaccatcaccatcaccataccaccaccatcaccaccaccaccattactaccaccaccatcatcaccaccatcatcaccaccaccaccatcaccaccaccat

SEQ ID NO: 102024 - DNA, 120 bp, synthetic construct; identical to SEQ ID NO: 23112
  source 1..120: mol_type = other DNA

SEQ ID NO: 102025 - DNA, 120 bp, synthetic construct; identical to SEQ ID NO: 23113
  source 1..120: mol_type = other DNA

SEQ ID NO: 102026 - DNA, 120 bp, synthetic construct; identical to SEQ ID NO: 23114
  source 1..120: mol_type = other DNA

SEQ ID NO: 102027 - DNA, 120 bp, synthetic construct; identical to SEQ ID NO: 23115
  source 1..120: mol_type = other DNA

SEQ ID NO: 102028 - DNA, 120 bp, synthetic construct
  source 1..120: mol_type = other DNA
ctttctgaggctgttttaagcattgttacatatttcttcaacttaaaacagccttttctttccttccttccttcctttccttccctccctccctccctcccttccttcctttccttccct

SEQ ID NO: 102029 - DNA, 120 bp, synthetic construct; identical to SEQ ID NO: 6958
  source 1..120: mol_type = other DNA

SEQ ID NO: 102030 - DNA, 120 bp, synthetic construct; identical to SEQ ID NO: 6959
  source 1..120: mol_type = other DNA

SEQ ID NO: 102031 - DNA, 120 bp, synthetic construct; identical to SEQ ID NO: 6960
  source 1..120: mol_type = other DNA

SEQ ID NO: 102032 - DNA, 120 bp, synthetic construct; identical to SEQ ID NO: 6961
  source 1..120: mol_type = other DNA

SEQ ID NO: 102033 - DNA, 120 bp, synthetic construct; identical to SEQ ID NO: 6962
  source 1..120: mol_type = other DNA

SEQ ID NO: 102034 - DNA, 120 bp, synthetic construct; identical to SEQ ID NO: 6963
  source 1..120: mol_type = other DNA

SEQ ID NO: 102035 - DNA, 120 bp, synthetic construct
  source 1..120: mol_type = other DNA
aggtggaaaagactctgtttggcacaggcattttgaagacccaggagagacttctgattgaggaactcctgctctcctgggctgggtttagggaaaaagctccatccagggcccacgtgg

SEQ ID NO: 102036 - DNA, 120 bp, synthetic construct
  source 1..120: mol_type = other DNA
cacttcaggagcatttctctgatctgagacagaaaagcagtggcttctgaagttctgtccaagctcctcctccatctgctccctccttcaggagttcccagatgggtccagcaggacccc

SEQ ID NO: 102037 - DNA, 120 bp, synthetic construct
  source 1..120: mol_type = other DNA
cccccccaactcacccctcccaacacacccctcccagcacacccctcccagcacacccctcccaaaacacccctcccaacacacccctcccagcacacctctcccagcacacccctccca

SEQ ID NO: 102038 - DNA, 120 bp, synthetic construct; identical to SEQ ID NO: 6966
  source 1..120: mol_type = other DNA

SEQ ID NO: 102039 - DNA, 120 bp, synthetic construct; identical to SEQ ID NO: 6967
  source 1..120: mol_type = other DNA

SEQ ID NO: 102040 - DNA, 120 bp, synthetic construct; identical to SEQ ID NO: 6943
  source 1..120: mol_type = other DNA

SEQ ID NO: 102041 - DNA, 120 bp, synthetic construct; identical to SEQ ID NO: 6944
  source 1..120: mol_type = other DNA

SEQ ID NO: 102042 - DNA, 120 bp, synthetic construct; identical to SEQ ID NO: 6945
  source 1..120: mol_type = other DNA

SEQ ID NO: 102043 - DNA, 120 bp, synthetic construct; identical to SEQ ID NO: 6946
  source 1..120: mol_type = other DNA

SEQ ID NO: 102044 - DNA, 120 bp, synthetic construct; identical to SEQ ID NO: 6947
  source 1..120: mol_type = other DNA

SEQ ID NO: 102045 - DNA, 120 bp, synthetic construct; identical to SEQ ID NO: 6948
  source 1..120: mol_type = other DNA

SEQ ID NO: 102046 - DNA, 120 bp, synthetic construct; identical to SEQ ID NO: 6949
  source 1..120: mol_type = other DNA

SEQ ID NO: 102047 - DNA, 120 bp, synthetic construct; identical to SEQ ID NO: 6950
  source 1..120: mol_type = other DNA

SEQ ID NO: 102048 - DNA, 120 bp, synthetic construct; identical to SEQ ID NO: 6951
  source 1..120: mol_type = other DNA

SEQ ID NO: 102049 - DNA, 120 bp, synthetic construct; identical to SEQ ID NO: 6952
  source 1..120: mol_type = other DNA

SEQ ID NO: 102050 - DNA, 120 bp, synthetic construct; identical to SEQ ID NO: 6953
  source 1..120: mol_type = other DNA

SEQ ID NO: 102051 - DNA, 120 bp, synthetic construct; identical to SEQ ID NO: 6954
  source 1..120: mol_type = other DNA

SEQ ID NO: 102052 - DNA, 120 bp, synthetic construct; identical to SEQ ID NO: 6955
  source 1..120: mol_type = other DNA

SEQ ID NO: 102053 - DNA, 120 bp, synthetic construct; identical to SEQ ID NO: 6956
  source 1..120: mol_type = other DNA

SEQ ID NO: 102054 - DNA, 120 bp, synthetic construct; identical to SEQ ID NO: 6957
  source 1..120: mol_type = other DNA

SEQ ID NO: 102055 - DNA, 120 bp, synthetic construct
  source 1..120: mol_type = other DNA
gcagaagctctttagtttaattagatcccatttgtcaattttggcttttgttgcacaaaacaaaagggatgccctctctcaccactcctattcaacatagtgttggaagttctggccagg

SEQ ID NO: 102056 - DNA, 120 bp, synthetic construct
  source 1..120: mol_type = other DNA
cgcatgtctacaactatctgatctttgacaaacctgagaaaaacaagcaatggggaaaggattccctatttaataaatggtgctgggaaaactggctagccatatgtagaaagctgaaac

SEQ ID NO: 102057 - DNA, 120 bp, synthetic construct; identical to SEQ ID NO: 7176
  source 1..120: mol_type = other DNA

SEQ ID NO: 102058 - DNA, 120 bp, synthetic construct; identical to SEQ ID NO: 7177
  source 1..120: mol_type = other DNA

SEQ ID NO: 102059 - DNA, 120 bp, synthetic construct; identical to SEQ ID NO: 7178
  source 1..120: mol_type = other DNA

SEQ ID NO: 102060 - DNA, 120 bp, synthetic construct; identical to SEQ ID NO: 7179
  source 1..120: mol_type = other DNA

SEQ ID NO: 102061 - DNA, 120 bp, synthetic construct
  source 1..120: mol_type = other DNA
cctcaagtgggtccctgacccctgaccccccgagcagcctaactgggaggcaccctccagcaggggcacactaacacctcacactgcagggtactccaacagacctgaagctgagggtct

SEQ ID NO: 102062 - DNA, 120 bp, synthetic construct
  source 1..120: mol_type = other DNA
tagcggatctctcggcagaaaccctacaagccagaagagagtgggggccgatattcaacattcttaaagaaaagaattttcaacccagaatttcatatccagccaaactaagcttcataa

SEQ ID NO: 102063 - DNA, 120 bp, synthetic construct
  source 1..120: mol_type = other DNA
cgcaggattaagaatctcactcaaaaccgctcaactacatggaaactgaacaacgtgctcctgaatgactactgggtacataacgaaatgaaggcagaaataaagatgttctttgaaacc

SEQ ID NO: 102064 - DNA, 120 bp, synthetic construct
  source 1..120: mol_type = other DNA
caggcagagacacaaccaaaaaagagaattttagaccaatatccttgattaacactgatgcaaaaatcctcaataaaatactggcaaaccgaatccagcagcacatcaaaaagcttatcc

SEQ ID NO: 102065 - DNA, 120 bp, synthetic construct
  source 1..120: mol_type = other DNA
agcccgcatttccaagtcaatcctaagccaaaagaacaaagctggaggcatcacactacctgacttcaaactatactacaaggctacagtaaccaaaacagcatggtactggtaccaaaa

SEQ ID NO: 102066 - DNA, 120 bp, synthetic construct
  source 1..120: mol_type = other DNA
aagacacatgcacacgtatgtttattgcagcattattcacaatagcaaagacttggaaccaacccaaatgtccaacaatgatagattggattaagaaaatgtggcacatatacaccatag

SEQ ID NO: 102067 - DNA, 120 bp, synthetic construct
  source 1..120: mol_type = other DNA
gtacacacattcatctcttggagatccttctaagaatccaaaatacttatctgaaactggttctaagaagttaacaaggacacaggaagggcaacatcacacaccggtgcctgttgtggg

SEQ ID NO: 102068 - DNA, 120 bp, synthetic construct; identical to SEQ ID NO: 26990
  source 1..120: mol_type = other DNA

SEQ ID NO: 102069 - DNA, 120 bp, synthetic construct; identical to SEQ ID NO: 26991
  source 1..120: mol_type = other DNA

SEQ ID NO: 102070 - DNA, 120 bp, synthetic construct; identical to SEQ ID NO: 26466
  source 1..120: mol_type = other DNA

SEQ ID NO: 102071 - DNA, 120 bp, synthetic construct; identical to SEQ ID NO: 26467
  source 1..120: mol_type = other DNA

SEQ ID NO: 102072 - DNA, 120 bp, synthetic construct; identical to SEQ ID NO: 7546
  source 1..120: mol_type = other DNA

SEQ ID NO: 102073 - DNA, 120 bp, synthetic construct
  source 1..120: mol_type = other DNA
ttggaatatagttcacatataatacaatacccatttaaagaatacaattcagctgggcatggtagttcatgcctgtaatcccagctctttgggagacctaggtgggaggatcccttgagc

SEQ ID NO: 102074 - DNA, 120 bp, synthetic construct; identical to SEQ ID NO: 33595
  source 1..120: mol_type = other DNA

SEQ ID NO: 102075 - DNA, 120 bp, synthetic construct
  source 1..120: mol_type = other DNA
gcattgtgttttttgttttttgtttttttttgagacggagtctttctgtgtcgcccaggctggagtgcagtgacgcaatctctgctcactgcagcctccgcctcccgggttcaagcgatt

SEQ ID NO: 102076 - DNA, 120 bp, synthetic construct; identical to SEQ ID NO: 27095
  source 1..120: mol_type = other DNA

SEQ ID NO: 102077 - DNA, 120 bp, synthetic construct
  source 1..120: mol_type = other DNA
aggattacaggcacgtgccaccatgcccagctaatttttgtatttttagtagagacggggtttcaccatgttggccaggatggtctccatctcttgacctcgtgatccacccgccttggc

SEQ ID NO: 102078 - DNA, 120 bp, synthetic construct
  source 1..120: mol_type = other DNA
cgtgggacacggtcatccaggcggccatgcgcaagtacccgaacccgatgaacccgagcgtgctgggcgtggatgtgctacagcgccgcgtggacggccgcggccgcctgcacagcttgc

SEQ ID NO: 102079 - DNA, 120 bp, synthetic construct; identical to SEQ ID NO: 28162
  source 1..120: mol_type = other DNA

SEQ ID NO: 102080 - DNA, 120 bp, synthetic construct
  source 1..120: mol_type = other DNA
taggaaaagagaaagtcaaaatatccctgtttgcagatgacacgattgtatatttagaaaaccccactgtgtcagcccaaaacctccttaagctgataagcaacttcagcaaaatctcag

SEQ ID NO: 102081 - DNA, 120 bp, synthetic construct; identical to SEQ ID NO: 4850
  source 1..120: mol_type = other DNA

SEQ ID NO: 102082 - DNA, 120 bp, synthetic construct; identical to SEQ ID NO: 22549
  source 1..120: mol_type = other DNA

SEQ ID NO: 102083 - DNA, 120 bp, synthetic construct; identical to SEQ ID NO: 31581
  source 1..120: mol_type = other DNA

SEQ ID NO: 102084 - DNA, 120 bp, synthetic construct; identical to SEQ ID NO: 31582
  source 1..120: mol_type = other DNA

SEQ ID NO: 102085 - DNA, 120 bp, synthetic construct; identical to SEQ ID NO: 9109
  source 1..120: mol_type = other DNA

SEQ ID NO: 102086 - DNA, 120 bp, synthetic construct; identical to SEQ ID NO: 9110
  source 1..120: mol_type = other DNA

SEQ ID NO: 102087 - DNA, 120 bp, synthetic construct
  source 1..120: mol_type = other DNA
agacttgccatgctaacagaaatatcctagtttctctttttaagtttttaaaaaactttctcagagacagggtcttgctctgttgcccaggctggagtgcagtggtgcgatcatagatca

SEQ ID NO: 102088 - DNA, 120 bp, synthetic construct; identical to SEQ ID NO: 27865
  source 1..120: mol_type = other DNA

SEQ ID NO: 102089 - DNA, 120 bp, synthetic construct; identical to SEQ ID NO: 27866
  source 1..120: mol_type = other DNA

SEQ ID NO: 102090 - DNA, 120 bp, synthetic construct; identical to SEQ ID NO: 27867
  source 1..120: mol_type = other DNA

SEQ ID NO: 102091 - DNA, 120 bp, synthetic construct
  source 1..120: mol_type = other DNA
gtttgtgtatttcagtcagtaaacatttcatcaggtattgtggtaagaactgggaatataggctgtgtgcggtagctcgcgcctgtgatcccagcactttgggaggccaaggcaggagga

SEQ ID NO: 102092 - DNA, 120 bp, synthetic construct
  source 1..120: mol_type = other DNA
gtttagaaacacattgaattccttagaattctatctatagctttttttttttttttttttgagatggagtctcaccctgccacctgcgctggagtgcagtggtgcgatctcagctcactg

SEQ ID NO: 102093 - DNA, 120 bp, synthetic construct; identical to SEQ ID NO: 27868
  source 1..120: mol_type = other DNA

SEQ ID NO: 102094 - DNA, 120 bp, synthetic construct
  source 1..120: mol_type = other DNA
agggtagtgtgatgccaccagctttgttctttttgcttagggttgtcttggttatttgggctcctttttggttccatatgaattttaaaatagttttaaaaaaattctgtgaagaacgtc

SEQ ID NO: 102095 - DNA, 120 bp, synthetic construct
  source 1..120: mol_type = other DNA
gccacctcactcagctggaatgctagtgatttttgcatgttagtttagtatcttgagactttgctgaagttgcttattagcttaagaagcttttgggctgagacaatggggttttctaga

SEQ ID NO: 102096 - DNA, 120 bp, synthetic construct
  source 1..120: mol_type = other DNA
cacccagctaattaaaaaaaattttttttagtttgggtataatggtttatgcctgtaatcttagcctattgggaggccaaggtgggagaatcacttgattctagggatttgagactaggc

SEQ ID NO: 102097 - DNA, 120 bp, synthetic construct; identical to SEQ ID NO: 27869
  source 1..120: mol_type = other DNA

SEQ ID NO: 102098 - DNA, 120 bp, synthetic construct; identical to SEQ ID NO: 27870
  source 1..120: mol_type = other DNA

SEQ ID NO: 102099 - DNA, 120 bp, synthetic construct; identical to SEQ ID NO: 27871
  source 1..120: mol_type = other DNA

SEQ ID NO: 102100 - DNA, 120 bp, synthetic construct; identical to SEQ ID NO: 27872
  source 1..120: mol_type = other DNA

SEQ ID NO: 102101 - DNA, 120 bp, synthetic construct; identical to SEQ ID NO: 27873
  source 1..120: mol_type = other DNA

SEQ ID NO: 102102 - DNA, 120 bp, synthetic construct; identical to SEQ ID NO: 27874
  source 1..120: mol_type = other DNA

SEQ ID NO: 102103 - DNA, 120 bp, synthetic construct
  source 1..120: mol_type = other DNA
gcaccccagcttgggcgacagagtgataccctgtctcaaaaaaaaaaaaaaaaaaaaaagaacgaaagaaagaaagaaagaaaaggatttgtcctgattacaggtgggttgtggagagtt

SEQ ID NO: 102104 - DNA, 120 bp, synthetic construct; identical to SEQ ID NO: 27875
  source 1..120: mol_type = other DNA

SEQ ID NO: 102105 - DNA, 120 bp, synthetic construct; identical to SEQ ID NO: 27876
  source 1..120: mol_type = other DNA

SEQ ID NO: 102106 - DNA, 120 bp, synthetic construct
  source 1..120: mol_type = other DNA
acacagtgtgactatttatttttatttttattttttatttttagacagggtctctactctgtcacccaggctggagtgcagtggtgcaattacaactcaccatggccttgacctcccagg

SEQ ID NO: 102107 - DNA, 120 bp, synthetic construct
  source 1..120: mol_type = other DNA
gccatgagactattaggatggtgcaaaagtaatgtggtttttttctttacttttaatggcaaagactgcaattacttttgcgccaacctaataacagaaaaaaaatcatttttcggggga

SEQ ID NO: 102108 - DNA, 120 bp, synthetic construct
  source 1..120: mol_type = other DNA
taagtgttccctcctcttcgcaacttcatcagcatctgttattttttgacttcttagtaatagccattctgactggtatgagatggtatctcattgtggttttgatttgcatttctctaa

SEQ ID NO: 102109 - DNA, 120 bp, synthetic construct
  source 1..120: mol_type = other DNA
tttctcccttcttttcttggttaatcttgctaatggtctattaattgtatttatcttttgaaaggaccagctttttgtttcatttatcttttgtattgtttttcttgtttcagtttcatt

SEQ ID NO: 102110 - DNA, 120 bp, synthetic construct
  source 1..120: mol_type = other DNA
ccacccctcactttaagtttatgtgagtccttatgtgttaggtgagtctcttgaaggcagcagataattggttggtgaattcttatccattctgcaattctgtatcttctgagtggagca

SEQ ID NO: 102111 - DNA, 120 bp, synthetic construct; identical to SEQ ID NO: 27856
  source 1..120: mol_type = other DNA

SEQ ID NO: 102112 - DNA, 120 bp, synthetic construct
  source 1..120: mol_type = other DNA
agcagtggttctcccagcacccagctggagatctgagaatgggcagactgcctcctcaagtgggtccctgacccctgacccccgagcagcctaactgggaggcaccccccagcaggggca

SEQ ID NO: 102113 - DNA, 120 bp, synthetic construct
  source 1..120: mol_type = other DNA
gttgaaatgaaggaaacaatgttaagggcagccagagagaaaggttgggttaccctcaaagggaagcccatcagactaacagtggatctctcggcacaaactctccaagccagaagagag

SEQ ID NO: 102114 - DNA, 120 bp, synthetic construct
  source 1..120: mol_type = other DNA
caactacatggaaactgaacaacctgctcctgaatgactactgggtatataatgaaatgaaggcagaaataaagatgttctttgaaaccaacgagaacaaagacacaacataccagaatc

SEQ ID NO: 102115 - DNA, 120 bp, synthetic construct
  source 1..120: mol_type = other DNA
atcaaaaagcttatccaccatgatcaagtgggcttcatccctgggatgcaaggctcgttcaatatacgcaaatcaataaatgtaatccagcatataaacagaaagacaaaaaccacatga

SEQ ID NO: 102116 - DNA, 120 bp, synthetic construct
  source 1..120: mol_type = other DNA
aagctggaggcagcacactacctgacttcaaactatactacaaggctacagtaaccaaaacagcatggtactggtaccaaaacagagatatagatcaatggaacagaacagagccctcag

SEQ ID NO: 102117 - DNA, 120 bp, synthetic construct
  source 1..120: mol_type = other DNA
gtccaacaatgatagactggattaagtaaatgtggcacatatacaccatggaatactatgcagccataaaaaatgatgagttcatgtcctttgtagggacatggatgaaattggaaatca

SEQ ID NO: 102118 - DNA, 120 bp, synthetic construct
  source 1..120: mol_type = other DNA
tttttttttttttttgagacggagtcttgctctgttgccaggctgtgagatctttctttctttctttctttttttttttgagacggagtcttgctcttgttccaggctggagtgcagtgg

SEQ ID NO: 102119 - DNA, 120 bp, synthetic construct
  source 1..120: mol_type = other DNA
gaatagtgccgcagtaaacacacgtgtgcatatgtctttatagcagcatgatttataatcctttggatatatacccagtaatgggattgctgggtcaaatggtatttctagttctagatc

SEQ ID NO: 102120 - DNA, 120 bp, synthetic construct
  source 1..120: mol_type = other DNA
tttcagctgagtgatctgctgttagcctgatggggttccctttgtaggtgacatgtcctttctctctagctgcctttaacatactttcttccattttgacctttgaaaatctgttgatta

SEQ ID NO: 102121 - DNA, 120 bp, synthetic construct; identical to SEQ ID NO: 27882
  source 1..120: mol_type = other DNA

SEQ ID NO: 102122 - DNA, 120 bp, synthetic construct
  source 1..120: mol_type = other DNA
ggttcacaccattctcctgcctcagcctccctagtagctgggactacaggcgcctgccatcacacccggctaatttttttttttgtattttttagtagagacggggtttcaccatgttag

SEQ ID NO: 102123 - DNA, 120 bp, synthetic construct; identical to SEQ ID NO: 27883
  source 1..120: mol_type = other DNA

SEQ ID NO: 102124 - DNA, 120 bp, synthetic construct; identical to SEQ ID NO: 27884
  source 1..120: mol_type = other DNA

SEQ ID NO: 102125 - DNA, 120 bp, synthetic construct; identical to SEQ ID NO: 27885
  source 1..120: mol_type = other DNA

SEQ ID NO: 102126 - DNA, 120 bp, synthetic construct; identical to SEQ ID NO: 27886
  source 1..120: mol_type = other DNA

SEQ ID NO: 102127 - DNA, 120 bp, synthetic construct; identical to SEQ ID NO: 27887
  source 1..120: mol_type = other DNA

SEQ ID NO: 102128 - DNA, 120 bp, synthetic construct; identical to SEQ ID NO: 27888
  source 1..120: mol_type = other DNA

SEQ ID NO: 102129 - DNA, 120 bp, synthetic construct; identical to SEQ ID NO: 27889
  source 1..120: mol_type = other DNA

SEQ ID NO: 102130 - DNA, 120 bp, synthetic construct
  source 1..120: mol_type = other DNA
gtttggatcatgcgggcagatctctcatggttggtgatgtcttcatggtaatgagttctcctgagatctggtcatttaaaagtgtgtggcacctatccccccaactctctctctcttgct

SEQ ID NO: 102131 - DNA, 120 bp, synthetic construct; identical to SEQ ID NO: 27890
  source 1..120: mol_type = other DNA

SEQ ID NO: 102132 - DNA, 120 bp, synthetic construct; identical to SEQ ID NO: 27891
  source 1..120: mol_type = other DNA

SEQ ID NO: 102133 - DNA, 120 bp, synthetic construct; identical to SEQ ID NO: 27892
  source 1..120: mol_type = other DNA

SEQ ID NO: 102134 - DNA, 120 bp, synthetic construct
  source 1..120: mol_type = other DNA
gttgatcaggctggtctcaaactcctgacctcaagcaatccaccctccttggcctcccgaagtgccgatattacaggcctgagccaccgtgcctggccgaggtgttcttttttaatgtta

SEQ ID NO: 102135 - DNA, 120 bp, synthetic construct; identical to SEQ ID NO: 27893
  source 1..120: mol_type = other DNA

SEQ ID NO: 102136 - DNA, 120 bp, synthetic construct; identical to SEQ ID NO: 27894
  source 1..120: mol_type = other DNA

SEQ ID NO: 102137 - DNA, 120 bp, synthetic construct; identical to SEQ ID NO: 27895
  source 1..120: mol_type = other DNA

SEQ ID NO: 102138 - DNA, 120 bp, synthetic construct; identical to SEQ ID NO: 27896
  source 1..120: mol_type = other DNA

SEQ ID NO: 102139 - DNA, 120 bp, synthetic construct; identical to SEQ ID NO: 27897
  source 1..120: mol_type = other DNA

SEQ ID NO: 102140 - DNA, 120 bp, synthetic construct; identical to SEQ ID NO: 27898
  source 1..120: mol_type = other DNA

SEQ ID NO: 102141 - DNA, 120 bp, synthetic construct
  source 1..120: mol_type = other DNA
gatctaccacctcagactctcaaagtgctgggattacaggtgtgagccaccgcatctagcctgatatagtaacattgtagtacttatgttaggaagtgaatctttattcgataattggat

SEQ ID NO: 102142 - DNA, 120 bp, synthetic construct
  source 1..120: mol_type = other DNA
agtaatgggattgctgggtcaaatggtatttctagttctagatccctgaggaatcaccacactgacttccacaatggttgaactagtttacagtcccaccaacagtgtaaaagtgttcct

SEQ ID NO: 102143 - DNA, 120 bp, synthetic construct
  source 1..120: mol_type = other DNA
ttttattctctttgaagcaattgtgaatgggagttcactcatgatttggctctctgtttgtctgttgttggtgtataagaatgcttgtgatttttgcatgttgattttgcatcttgagac

SEQ ID NO: 102144 - DNA, 120 bp, synthetic construct
  source 1..120: mol_type = other DNA
attgcctcaatttcagagcctgttattggtctattcagagattcaacttcttactggtttagacttgggagagtgtatgtgtccaggaatttatccatttcttctagattctctagtttg

SEQ ID NO: 102145 - DNA, 120 bp, synthetic construct
  source 1..120: mol_type = other DNA
gtgcagagctgagttcaattcctggatatccttgttaactttctgtctcgttgatctgtctaatgttgacagtggggtgttaaagtctcccattattattgtgtggtagtctaagtctct

SEQ ID NO: 102146 - DNA, 120 bp, synthetic construct
  source 1..120: mol_type = other DNA
gaggctttgttcgtttctttttattcttttttctctaaacttctcttcttgcttcatttgattcatttgattttccatcactaataccctttcttccagttgatcgaatcggctactgag

SEQ ID NO: 102147 - DNA, 120 bp, synthetic construct; identical to SEQ ID NO: 27899
  source 1..120: mol_type = other DNA

SEQ ID NO: 102148 - DNA, 120 bp, synthetic construct; identical to SEQ ID NO: 27900
  source 1..120: mol_type = other DNA

SEQ ID NO: 102149 - DNA, 120 bp, synthetic construct; identical to SEQ ID NO: 27857
  source 1..120: mol_type = other DNA

SEQ ID NO: 102150 - DNA, 120 bp, synthetic construct; identical to SEQ ID NO: 27901
  source 1..120: mol_type = other DNA

SEQ ID NO: 102151 - DNA, 120 bp, synthetic construct; identical to SEQ ID NO: 27902
  source 1..120: mol_type = other DNA

SEQ ID NO: 102152 - DNA, 120 bp, synthetic construct; identical to SEQ ID NO: 27903
  source 1..120: mol_type = other DNA

SEQ ID NO: 102153 - DNA, 120 bp, synthetic construct; identical to SEQ ID NO: 27904
  source 1..120: mol_type = other DNA

SEQ ID NO: 102154 - DNA, 120 bp, synthetic construct; identical to SEQ ID NO: 27905
  source 1..120: mol_type = other DNA

SEQ ID NO: 102155 - DNA, 120 bp, synthetic construct
  source 1..120: mol_type = other DNA
ctcctcagcttaagcaatccttctacctcagcctctcaagtagctgggattacaggcacgtgccaccacactcagctgattttttttttatttttagtggagatgaagtcttgctatatt

SEQ ID NO: 102156 - DNA, 120 bp, synthetic construct; identical to SEQ ID NO: 5766
  source 1..120: mol_type = other DNA

SEQ ID NO: 102157 - DNA, 120 bp, synthetic construct; identical to SEQ ID NO: 27907
  source 1..120: mol_type = other DNA

SEQ ID NO: 102158 - DNA, 120 bp, synthetic construct; identical to SEQ ID NO: 27908
  source 1..120: mol_type = other DNA

SEQ ID NO: 102159 - DNA, 120 bp, synthetic construct; identical to SEQ ID NO: 27909
  source 1..120: mol_type = other DNA

SEQ ID NO: 102160 - DNA, 120 bp, synthetic construct; identical to SEQ ID NO: 27910
  source 1..120: mol_type = other DNA

SEQ ID NO: 102161 - DNA, 120 bp, synthetic construct; identical to SEQ ID NO: 27911
  source 1..120: mol_type = other DNA

SEQ ID NO: 102162 - DNA, 120 bp, synthetic construct; identical to SEQ ID NO: 27912
  source 1..120: mol_type = other DNA

SEQ ID NO: 102163 - DNA, 120 bp, synthetic construct; identical to SEQ ID NO: 27913
  source 1..120: mol_type = other DNA

SEQ ID NO: 102164 - DNA, 120 bp, synthetic construct; identical to SEQ ID NO: 27914
  source 1..120: mol_type = other DNA

SEQ ID NO: 102165 - DNA, 120 bp, synthetic construct; identical to SEQ ID NO: 27915
  source 1..120: mol_type = other DNA

SEQ ID NO: 102166 - DNA, 120 bp, synthetic construct; identical to SEQ ID NO: 27916
  source 1..120: mol_type = other DNA

SEQ ID NO: 102167 - DNA, 120 bp, synthetic construct; identical to SEQ ID NO: 27917
  source 1..120: mol_type = other DNA

SEQ ID NO: 102168 - DNA, 120 bp, synthetic construct; identical to SEQ ID NO: 27918
  source 1..120: mol_type = other DNA

SEQ ID NO: 102169 - DNA, 120 bp, synthetic construct
  source 1..120: mol_type = other DNA
ataaactataacctgccagatagaaaggagtaaatggtgttaacctctttaggcttaagaatactgggaaatgcttgacaaagaatggaaatatgttttatatgttattgttttatgaac

SEQ ID NO: 102170 - DNA, 120 bp, synthetic construct
  source 1..120: mol_type = other DNA
ttttatggactaagtctttgaaatccagtgtgtactttgtacttgttgaacatctcaatttagtttaagctacatttcaagtgctcaatggtcacatttggctaatggatactatataac

SEQ ID NO: 102171 - DNA, 120 bp, synthetic construct
  source 1..120: mol_type = other DNA
taacagtcagtgccacagcatgaaaagattattattatttttcttaaccagctaatcttgccatgagacccataaatccactttcatgtaatttctgctttttgttttcaactctgagtt

SEQ ID NO: 102172 - DNA, 120 bp, synthetic construct
  source 1..120: mol_type = other DNA
tcctcccacctcagcctcccaagtagctgggaatacaggcgcatgccaccctgcctggctaattttttcttttatagaaataagttcttactgtgttgcctaggctggtcttgaacttca

SEQ ID NO: 102173 - DNA, 120 bp, synthetic construct; identical to SEQ ID NO: 27859
  source 1..120: mol_type = other DNA

SEQ ID NO: 102174 - DNA, 120 bp, synthetic construct
  source 1..120: mol_type = other DNA
tttaacgttgttaaactacaaatgataaaaatattaaaacaaccaggcctttgactttttttgtgattatcacatcctacttctaaacctccaagcttaaactattttccaactacattc

SEQ ID NO: 102175 - DNA, 120 bp, synthetic construct
  source 1..120: mol_type = other DNA
aaaagtgatgcatagcttgccttgtctttttccttttaaacttgtggaaaattagtggctaaactgagaattaaggaaatcaaattcagatttttcaagattctctgattaatcaaacat

SEQ ID NO: 102176 - DNA, 120 bp, synthetic construct
  source 1..120: mol_type = other DNA
gaaaaaaccattcacctggaaacattgtaaagatgagtgaagaaaatttattatcaaaacttgtattttcataatttctttgtaagtttattcctgaattacagttttattgtttaggct

SEQ ID NO: 102177 - DNA, 120 bp, synthetic construct
  source 1..120: mol_type = other DNA
ccagctaatttttttttttttttttatagcgatgatgtcttgctatatgttgcccaggctgatctctaactcctgggctcaagcggtcctcctgccttggcttcccaaactgctgggaat

SEQ ID NO: 102178 - DNA, 120 bp, synthetic construct
  source 1..120: mol_type = other DNA
atcctagctaacacggtgaaaccccgtcactactcaaaaatacaaaaattagccggtcgtggtggtgggcgcctgtattcccagctacttgggaggctgaggcaggagaatggcgtgaac

SEQ ID NO: 102179 - DNA, 120 bp, synthetic construct
  source 1..120: mol_type = other DNA
tgtacctggtgagagctttcttgctggtggggactctctgaagagtcttgaggtggtgtagggtatcacatggcgagggggctgagtgtgttaacatgccagctcaagtctctcttcctc

SEQ ID NO: 102180 - DNA, 120 bp, synthetic construct; identical to SEQ ID NO: 27929
  source 1..120: mol_type = other DNA

SEQ ID NO: 102181 - DNA, 120 bp, synthetic construct; identical to SEQ ID NO: 27930
  source 1..120: mol_type = other DNA

SEQ ID NO: 102182 - DNA, 120 bp, synthetic construct; identical to SEQ ID NO: 27931
  source 1..120: mol_type = other DNA

SEQ ID NO: 102183 - DNA, 120 bp, synthetic construct
  source 1..120: mol_type = other DNA
agcaggagaatcgcatgaacctgggaggcagaggttatagtgagccgagatggcactgctgcactccagcctgggcaacagagtgagattccatctcaaaaaaataaaaaaagaagaaaa

SEQ ID NO: 102184 - DNA, 120 bp, synthetic construct; identical to SEQ ID NO: 27932
  source 1..120: mol_type = other DNA

SEQ ID NO: 102185 - DNA, 120 bp, synthetic construct; identical to SEQ ID NO: 27933
  source 1..120: mol_type = other DNA

SEQ ID NO: 102186 - DNA, 120 bp, synthetic construct; identical to SEQ ID NO: 27934
  source 1..120: mol_type = other DNA

SEQ ID NO: 102187 - DNA, 120 bp, synthetic construct; identical to SEQ ID NO: 27935
  source 1..120: mol_type = other DNA

SEQ ID NO: 102188 - DNA, 120 bp, synthetic construct
  source 1..120: mol_type = other DNA
aaccctgaacttcccccagtactcgcagaaggaagactagacttagtgtttaggttgacactgataatgataactatgtaaactttagagaacacaattaacaatagagatttttcagtt

SEQ ID NO: 102189 - DNA, 120 bp, synthetic construct
  source 1..120: mol_type = other DNA
gagctgagatctcaccattgcactccagcctgggcaacaagagcgaaactccgtgtcccccctaaacccccctcaaaaaaaagtttcttgcaaaaatagtctaatctttgtcattattat

SEQ ID NO: 102190 - DNA, 120 bp, synthetic construct
  source 1..120: mol_type = other DNA
ggacaaattgggtacgtataagctccaaaatgggtcagacttctgatactgaaggatttttctttggaagatttattaatattaggaatctcaggggcttgaagtgtggggcaagtatat

SEQ ID NO: 102191 - DNA, 120 bp, synthetic construct
  source 1..120: mol_type = other DNA
gaatgctgtttagtgcctggatgtggttttaaatagggtggtcatggaaggcttaaacaaaaacatgatgttttgccacaacgtaagttttatgtaagaactctaggcttggcatttttc

SEQ ID NO: 102192 - DNA, 120 bp, synthetic construct
  source 1..120: mol_type = other DNA
ctccagttgcattcctgtatgccatccttaccctttgaattttcatgtaagcctcaaaaaaacaaatatttctacatagtttctctccacctatcttttctgccccttcctttggcagtt

SEQ ID NO: 102193 - DNA, 120 bp, synthetic construct
  source 1..120: mol_type = other DNA
acttgctctgaggtttggtatcctattctttagttatattgcgactgcagaaacactgcagtgtggtctttagagtttcaagggtgtcatagtacttaaggctactttttgtcctccttt

SEQ ID NO: 102194 - DNA, 120 bp, synthetic construct
  source 1..120: mol_type = other DNA
atcttaaagtttttatgttctccccacccatctcttgcataggaaagaatgctctgcacctagtcttttcttagtatatattcgttggccgaaaatggaccttaagtgtgttaagccatt

SEQ ID NO: 102195 - DNA, 120 bp, synthetic construct
  source 1..120: mol_type = other DNA
ggctcactgcaagctccacctcccagctatgagcgattctcctgcttcagcctcccaagtacctgggactatagttgtgcaccaccacgtctggctaatttttgtatttttagtagagac

SEQ ID NO: 102196 - DNA, 120 bp, synthetic construct
  source 1..120: mol_type = other DNA
accaaaacaacatggtactggtacaaaaacagacatagaccaatggaacagaatagaaagcccagaaataaggctgcacacctacgaccatctgatcttcaacaaagccgacaaaagcaa

SEQ ID NO: 102197 - DNA, 120 bp, synthetic construct
  source 1..120: mol_type = other DNA
tagcaaactaatgcaggaacagaaaatcaaatgctgcacattctcatttataagtgggagttaaatgatgagaactcatgagcatagagaagggaacaacagacactggagcttccttga

SEQ ID NO: 102198 - DNA, 120 bp, synthetic construct
  source 1..120: mol_type = other DNA
acctttgtaaaagctgagagcatgttattaagtttcagttaaagtattcctgctggatgctgagaaattacaggttggttttattgctgtcttctgatctttatctttcttaatatatat

SEQ ID NO: 102199 - DNA, 120 bp, synthetic construct
  source 1..120: mol_type = other DNA
ataaacatctttcctcattttcagcaaagataaatttacttgctgatttaaaataattgaagaattggtttagaatagtacataggatacttgacgggatagatcctagacaacatagat

SEQ ID NO: 102200 - DNA, 120 bp, synthetic construct
  source 1..120: mol_type = other DNA
tattttgatctcttcccaagagtcacaaatattcttaatgacatttagaatggtgaattctttccaggttttccatttactttgcctagatccatcagaggaatcacaatctatggcaat

SEQ ID NO: 102201 - DNA, 120 bp, synthetic construct; identical to SEQ ID NO: 27947
  source 1..120: mol_type = other DNA

SEQ ID NO: 102202 - DNA, 120 bp, synthetic construct; identical to SEQ ID NO: 27948
  source 1..120: mol_type = other DNA

SEQ ID NO: 102203 - DNA, 120 bp, synthetic construct; identical to SEQ ID NO: 27949
  source 1..120: mol_type = other DNA

SEQ ID NO: 102204 - DNA, 120 bp, synthetic construct; identical to SEQ ID NO: 27950
  source 1..120: mol_type = other DNA

SEQ ID NO: 102205 - DNA, 120 bp, synthetic construct; identical to SEQ ID NO: 27951
  source 1..120: mol_type = other DNA

SEQ ID NO: 102206 - DNA, 120 bp, synthetic construct; identical to SEQ ID NO: 27952
  source 1..120: mol_type = other DNA

SEQ ID NO: 102207 - DNA, 120 bp, synthetic construct
  source 1..120: mol_type = other DNA
gagatggagtcttgctctgttgccaggctggagtgtagtggcacgatcttggctcactgcaacctctgcttcccaggttcaggctattctgccttagcctcctgagtagctgggactaca

SEQ ID NO: 102208 - DNA, 120 bp, synthetic construct
  source 1..120: mol_type = other DNA
aatataggtaaaacagtgcctagaacagagtaagccctcaataaatagctattattatggttagaaaataacttttatttgccaaacagtaaatcacaaattttgaactatgcattcaag

SEQ ID NO: 102209 - DNA, 120 bp, synthetic construct; identical to SEQ ID NO: 27955
  source 1..120: mol_type = other DNA

SEQ ID NO: 102210 - DNA, 120 bp, synthetic construct; identical to SEQ ID NO: 27956
  source 1..120: mol_type = other DNA

SEQ ID NO: 102211 - DNA, 120 bp, synthetic construct; identical to SEQ ID NO: 27957
  source 1..120: mol_type = other DNA

SEQ ID NO: 102212 - DNA, 120 bp, synthetic construct; identical to SEQ ID NO: 27958
  source 1..120: mol_type = other DNA

SEQ ID NO: 102213 - DNA, 120 bp, synthetic construct; identical to SEQ ID NO: 27959
  source 1..120: mol_type = other DNA

SEQ ID NO: 102214 - DNA, 120 bp, synthetic construct; identical to SEQ ID NO: 27960
  source 1..120: mol_type = other DNA

SEQ ID NO: 102215 - DNA, 120 bp, synthetic construct; identical to SEQ ID NO: 27961
  source 1..120: mol_type = other DNA

SEQ ID NO: 102216 - DNA, 120 bp, synthetic construct; identical to SEQ ID NO: 27962
  source 1..120: mol_type = other DNA

SEQ ID NO: 102217 - DNA, 120 bp, synthetic construct
  source 1..120: mol_type = other DNA
ttgcatttaattcctcaaaacatttttaaaaatcataattcttgtttctgtgaagaaaaggcagcttctctctagattagctctgatcagctaattgtgcagtctctgaatgcagtattg

SEQ ID NO: 102218 - DNA, 120 bp, synthetic construct
  source 1..120: mol_type = other DNA
aactcctggactcaagcagttctcctgcctcagcctcccaaagtgctgggattagaggtgggagcgaccatgcctgttagaaaggttttttttctaactcacttagaaactggaacttag

SEQ ID NO: 102219 - DNA, 120 bp, synthetic construct
  source 1..120: mol_type = other DNA
ccccacaacagtccccagagtgtgatgttccccttcctgtgtccatgtgttctcattgttcaattcccacctatgagtgataacatgtggtgtttggttttttgtccttgcgatggttta

SEQ ID NO: 102220 - DNA, 120 bp, synthetic construct; identical to SEQ ID NO: 1471
  source 1..120: mol_type = other DNA

SEQ ID NO: 102221 - DNA, 120 bp, synthetic construct
  source 1..120: mol_type = other DNA
tctctgtaacactttgctgcttcacaagcctgtaaacagttctcaccgatgagaaatgaattaactcttacagagcagaaaaaggaatatttaatacaccataggaggtaatttgctgaa

SEQ ID NO: 102222 - DNA, 120 bp, synthetic construct; identical to SEQ ID NO: 27967
  source 1..120: mol_type = other DNA

SEQ ID NO: 102223 - DNA, 120 bp, synthetic construct; identical to SEQ ID NO: 27968
  source 1..120: mol_type = other DNA

SEQ ID NO: 102224 - DNA, 120 bp, synthetic construct; identical to SEQ ID NO: 27969
  source 1..120: mol_type = other DNA

SEQ ID NO: 102225 - DNA, 120 bp, synthetic construct; identical to SEQ ID NO: 27970
  source 1..120: mol_type = other DNA

SEQ ID NO: 102226 - DNA, 120 bp, synthetic construct; identical to SEQ ID NO: 27971
  source 1..120: mol_type = other DNA

SEQ ID NO: 102227 - DNA, 120 bp, synthetic construct; identical to SEQ ID NO: 27972
  source 1..120: mol_type = other DNA

SEQ ID NO: 102228 - DNA, 120 bp, synthetic construct; identical to SEQ ID NO: 27860
  source 1..120: mol_type = other DNA

SEQ ID NO: 102229 - DNA, 120 bp, synthetic construct; identical to SEQ ID NO: 27973
  source 1..120: mol_type = other DNA

SEQ ID NO: 102230 - DNA, 120 bp, synthetic construct; identical to SEQ ID NO: 27974
  source 1..120: mol_type = other DNA

SEQ ID NO: 102231 - DNA, 120 bp, synthetic construct
  source 1..120: mol_type = other DNA
cggcctcccaaagtgctgggattacaggcgtgagccaccgcgcccggcctgagctcttaatccatgagagatctgcacgagctccagttagtgtcagaagtgaattgaatatagcccaca

SEQ ID NO: 102232 - DNA, 120 bp, synthetic construct
  source 1..120: mol_type = other DNA
agggaggggaatgttgactgagaagaagcaagagggaattctacaggttgatagaaatgttctatcttctggtaggggtgtgggttatataggtatagtcacttacccaaactgatcaaa

SEQ ID NO: 102233 - DNA, 120 bp, synthetic construct
  source 1..120: mol_type = other DNA
aatataatccccatagcaatttaatgcattaatattactgtccctatagattaggataattgaggattgaagtaatatcctttataaatggacaagctggggattctttcccaggtttct

SEQ ID NO: 102234 - DNA, 120 bp, synthetic construct
  source 1..120: mol_type = other DNA
tagtggaattagaaaatcatcaaccaagggcccggcatagtggctcacatctgcaatcccagggctttaggaggccaaggtgggaggattgcttgagcccaggagtttgagaccagcctg

SEQ ID NO: 102235 - DNA, 120 bp, synthetic construct; identical to SEQ ID NO: 1472
  source 1..120: mol_type = other DNA

SEQ ID NO: 102236 - DNA, 120 bp, synthetic construct
  source 1..120: mol_type = other DNA
aagtgataattctgcctcaggctcctgagtagctgagacgacaggtgcatgccaccacacccagctaatatttaattttttgtagagatgggtctcactgtgttgcccaggctggtcttg

SEQ ID NO: 102237 - DNA, 120 bp, synthetic construct
  source 1..120: mol_type = other DNA
tcagtcgtcactgtcaagctagagctccattactcttagaacaatttgtcttattactgaactaggtcaggcaagagaaattcattcagctgcacttcagtttgtgctggattaggcttt

SEQ ID NO: 102238 - DNA, 120 bp, synthetic construct
  source 1..120: mol_type = other DNA
tcccaaagtgctaggattacaggcctgagccaccacacccagcctggtaatagatattgagtggtttttatcacttatttcagagtcccttgaggtgcttttttaggaatgcagattctc

SEQ ID NO: 102239 - DNA, 120 bp, synthetic construct; identical to SEQ ID NO: 27982
  source 1..120: mol_type = other DNA

SEQ ID NO: 102240 - DNA, 120 bp, synthetic construct; identical to SEQ ID NO: 27983
  source 1..120: mol_type = other DNA

SEQ ID NO: 102241 - DNA, 120 bp, synthetic construct
  source 1..120: mol_type = other DNA
ctataggaaatcgatgtttttttaaaatttttggagacagagtcttgctctgtcttccaggctggaatgcaatggcgcaatctcggctcactgcaacctccacctgccggcttcaagtga

SEQ ID NO: 102242 - DNA, 120 bp, synthetic construct
  source 1..120: mol_type = other DNA
ttggaaaagaagaaagaaaacctttttctattctcaaagtgattatcaatgtaaaaaatctcaaagaacctagcaagatgctactgtaactagtaggtcgaaggatactaactcaatata

SEQ ID NO: 102243 - DNA, 120 bp, synthetic construct
  source 1..120: mol_type = other DNA
aactctcaaaactcagtaactagaaaacagttttttaaacaggcaaaacatttgagtagacagttcaccaaagaaaaagtgtgaatggtaaatataagcacatgaaaaaatatagctcat

SEQ ID NO: 102244 - DNA, 120 bp, synthetic construct
  source 1..120: mol_type = other DNA
ttttttttttttttttaaatagacagggtcttgctctgtcacgcaggctggagtgcagtagtgtgatcatatcttattgcaacctcgaactcctgggtctaagtgatcctcttgcctcag

SEQ ID NO: 102245 - DNA, 120 bp, synthetic construct; identical to SEQ ID NO: 27987
  source 1..120: mol_type = other DNA

SEQ ID NO: 102246 - DNA, 120 bp, synthetic construct
  source 1..120: mol_type = other DNA
actttgggaagccaagacctatgggttgcttgagcccaggagttcgagaccagcctgggtaacttggcaaaacccagtctctacaaaaaaatacaaaaattagccaggcgtcgaggcatg

SEQ ID NO: 102247 - DNA, 120 bp, synthetic construct; identical to SEQ ID NO: 27988
  source 1..120: mol_type = other DNA

SEQ ID NO: 102248 - DNA, 120 bp, synthetic construct; identical to SEQ ID NO: 27989
  source 1..120: mol_type = other DNA

SEQ ID NO: 102249 - DNA, 120 bp, synthetic construct; identical to SEQ ID NO: 27990
  source 1..120: mol_type = other DNA

SEQ ID NO: 102250 - DNA, 120 bp, synthetic construct; identical to SEQ ID NO: 27991
  source 1..120: mol_type = other DNA

SEQ ID NO: 102251 - DNA, 120 bp, synthetic construct
  source 1..120: mol_type = other DNA
gggagacagactgtattactctgttttcatgctgctgataaagacatgcccaagacttggcactttataaagaaaaaaaggtttaatggactcacagttccatgtggcataggaggcctc

SEQ ID NO: 102252 - DNA, 120 bp, synthetic construct; identical to SEQ ID NO: 27992
  source 1..120: mol_type = other DNA

SEQ ID NO: 102253 - DNA, 120 bp, synthetic construct; identical to SEQ ID NO: 27993
  source 1..120: mol_type = other DNA

SEQ ID NO: 102254 - DNA, 120 bp, synthetic construct; identical to SEQ ID NO: 27994
  source 1..120: mol_type = other DNA

SEQ ID NO: 102255 - DNA, 120 bp, synthetic construct; identical to SEQ ID NO: 27995
  source 1..120: mol_type = other DNA

SEQ ID NO: 102256 - DNA, 120 bp, synthetic construct; identical to SEQ ID NO: 27996
  source 1..120: mol_type = other DNA

SEQ ID NO: 102257 - DNA, 120 bp, synthetic construct; identical to SEQ ID NO: 27997
  source 1..120: mol_type = other DNA

SEQ ID NO: 102258 - DNA, 120 bp, synthetic construct; identical to SEQ ID NO: 27998
  source 1..120: mol_type = other DNA

SEQ ID NO: 102259 - DNA, 120 bp, synthetic construct; identical to SEQ ID NO: 27999
  source 1..120: mol_type = other DNA

SEQ ID NO: 102260 - DNA, 120 bp, synthetic construct
  source 1..120: mol_type = other DNA
atatcaccactgatcccacagaaatacaaactaccatcagagaatactgtaaactagaaagtttagaagaaatggatacatttctggacacatacaccctcccaagactaaaccaggaag

SEQ ID NO: 102261 - DNA, 120 bp, synthetic construct; identical to SEQ ID NO: 28000
  source 1..120: mol_type = other DNA

SEQ ID NO: 102262 - DNA, 120 bp, synthetic construct; identical to SEQ ID NO: 27861
  source 1..120: mol_type = other DNA

SEQ ID NO: 102263 - DNA, 120 bp, synthetic construct; identical to SEQ ID NO: 28001
  source 1..120: mol_type = other DNA

SEQ ID NO: 102264 - DNA, 120 bp, synthetic construct; identical to SEQ ID NO: 28002
  source 1..120: mol_type = other DNA

SEQ ID NO: 102265 - DNA, 120 bp, synthetic construct; identical to SEQ ID NO: 28003
  source 1..120: mol_type = other DNA

SEQ ID NO: 102266 - DNA, 120 bp, synthetic construct
  source 1..120: mol_type = other DNA
ggttgcagtaagctgagattgcgccactgcactccagcctgggtaacagcgagactctgtctcaaaaaaaaaaaaaaaaataagtaaataaaaaagaggaaaaaaaagaatatttaacag

SEQ ID NO: 102267 - DNA, 120 bp, synthetic construct; identical to SEQ ID NO: 27862
  source 1..120: mol_type = other DNA

SEQ ID NO: 102268 - DNA, 120 bp, synthetic construct; identical to SEQ ID NO: 27863
  source 1..120: mol_type = other DNA

SEQ ID NO: 102269 - DNA, 120 bp, synthetic construct; identical to SEQ ID NO: 27864
  source 1..120: mol_type = other DNA

SEQ ID NO: 102270 - DNA, 120 bp, synthetic construct; identical to SEQ ID NO: 14623
  source 1..120: mol_type = other DNA

SEQ ID NO: 102271 - DNA, 120 bp, synthetic construct; identical to SEQ ID NO: 14624
  source 1..120: mol_type = other DNA

SEQ ID NO: 102272 - DNA, 120 bp, synthetic construct
  source 1..120: mol_type = other DNA
tgatgaatctaatctcagggtagagggagaatttggagttggggaataggaattgaccagtgatgagaaaaaaagaaaaaagaaaaggagggaggaaggaaggaaagaagggaaagaagg

SEQ ID NO: 102273 - DNA, 120 bp, synthetic construct
  source 1..120: mol_type = other DNA
attgttctgccttttatgtttatgtttaatttattattttttagagacaaggtctcattctgttgcccaggctgaagtgcagtggtgcaatcctgccgccttaaactcctgggctcaagc

SEQ ID NO: 102274 - DNA, 120 bp, synthetic construct
  source 1..120: mol_type = other DNA
ccttcccttcccttctcccctccccttcccctttccctttcctttctatttccacctctctctctgtctctttctctctctttctttctaagtatcatagagcaacacaattttcttatt

SEQ ID NO: 102275 - DNA, 120 bp, synthetic construct; identical to SEQ ID NO: 7772
  source 1..120: mol_type = other DNA

SEQ ID NO: 102276 - DNA, 120 bp, synthetic construct
  source 1..120: mol_type = other DNA
tgcaagaattttctcccattttgtaggttgcctgttcactctgatggtagtttcttttgatgtgcagaagctctttagtttaattagatcccatttgtcaattttggcttttgttgccat

SEQ ID NO: 102277 - DNA, 120 bp, synthetic construct
  source 1..120: mol_type = other DNA
agcttaaggagattttgggctgagacaatggggttttctagatatacaatcatgtctgcaaacagggacaatttgacttcctcttttcctaattgaataccctttatttccttctcctgc

SEQ ID NO: 102278 - DNA, 120 bp, synthetic construct
  source 1..120: mol_type = other DNA
tcagatcctgttattggtctattcagagattcaacttcttcctggtttagtcttcagagagtgtatgtgtcgaggaatttatccatttcttctagattttctagtttatttgcgtagagg

SEQ ID NO: 102279 - DNA, 120 bp, synthetic construct
  source 1..120: mol_type = other DNA
tatttaggatagttagctcttcttgttgaattgatccctttaccattatgtaatggccttttttgactcttttgatctttgttggtttaaagtctgttttatcagagactaggattgcaa

SEQ ID NO: 102280 - DNA, 120 bp, synthetic construct
  source 1..120: mol_type = other DNA
atcactttcaggtacaccaatcagacgtagatttggtcttttcacatagtcccatatttcttggaggctttgctcgtttctttttattcttttttctctaaacttcccttctcgcttcat

SEQ ID NO: 102281 - DNA, 120 bp, synthetic construct
  source 1..120: mol_type = other DNA
ggcgtaggtccctccaagccaggtgcaggatataatctcctggtgcgccgttttttaagcccgtgggaaaagcgcagtattcgggtgggagtgacctgattttccaggtgccgtctgtca

SEQ ID NO: 102282 - DNA, 120 bp, synthetic construct
  source 1..120: mol_type = other DNA
gacggcaacgtctcctccacactttgagagacctcagcttttaaaacccagcagcggctatttcagaagtcatgtcctttccagatccaaacttaaataatgagaaatttgccatttcaa

SEQ ID NO: 102283 - DNA, 120 bp, synthetic construct
  source 1..120: mol_type = other DNA
ggtggcccaagctcccatctcccacccaatcgttcgggcagcttggatccacgtaacatcttgtcattctaaatatgtcagatttaacttggaaaacaaaaaaaaagaattccactctta

SEQ ID NO: 102284 - DNA, 120 bp, synthetic construct
  source 1..120: mol_type = other DNA
tttgtgcacggctttcagctcttttcatagcaacataggagggagacgggcctgtatcagccggctccttctctactgaagaaattggggctgaaggaggtgaagcgacttgcttacatt

SEQ ID NO: 102285 - DNA, 120 bp, synthetic construct
  source 1..120: mol_type = other DNA
gaaatttatatgaatttaatgatggtctggatgagcctggctccctctgttcaatgttgcctgtgagattcctccactgttgaatgcagctgtactgttcgttttcaatcctgtatcgta

SEQ ID NO: 102286 - DNA, 120 bp, synthetic construct
  source 1..120: mol_type = other DNA
tctaaagccctctcccgttctctctgctcctcactgtctgagactctgaaggcttgctcaaagtgaatctgtcaaaaaatgagtttaaccacactctatctgaaagtgaatgtgatttct

SEQ ID NO: 102287 - DNA, 120 bp, synthetic construct
  source 1..120: mol_type = other DNA
acagagtgagatcctgtctcagaaaaagaaaaaagcaacacacacacacacatcccataaatgaataaatgagggaaagtagccacagacagacccatacgatgaccttaggctctaatg

SEQ ID NO: 102288 - DNA, 120 bp, synthetic construct
  source 1..120: mol_type = other DNA
gatcacaagatcaagtgctcgagaccagcctgaccaacatggtgaaaccccgtctctaccaaaaccacaaaaattagctgggcgtggtggtgcattcctgtaatcccagctactcaggag

SEQ ID NO: 102289 - DNA, 120 bp, synthetic construct
  source 1..120: mol_type = other DNA
tctgaaggctaagggaaaccatctcatccagagaattaagcagttctctcagactgaaatgactccccacgtattttcttgtcatctgctgctgagtcaaacttatgtatgtcctttgtt

SEQ ID NO: 102290 - DNA, 120 bp, synthetic construct
  source 1..120: mol_type = other DNA
gtatttccagcttattgcacttcacaacaccttcaaaatactgtgaacggtgctgaagggcctgggtcaccgtgatatctaggttattgtatgttttctcagcagcaagattctgtaatg

SEQ ID NO: 102291 - DNA, 120 bp, synthetic construct
  source 1..120: mol_type = other DNA
gatgaaaaattataaaatgctactaatatataattggttgctaaaccaatgcagattaaaagtacaattactatagaaggtctataaaattctgataatatcctcacaccccaaaaggtt

SEQ ID NO: 102292 - DNA, 120 bp, synthetic construct
  source 1..120: mol_type = other DNA
ctattgcagagcattgatactgtaatctttttccatctcctcttcactcactaagaacgcgtatagaaccagggaagaacaggtctatttgggatattaagacctgtaagccacgaagaa

SEQ ID NO: 102293 - DNA, 120 bp, synthetic construct
  source 1..120: mol_type = other DNA
tcccagccacgcaaccttggcaaagctacttaacctttcttagctgcatccctataaaataggattaataaaaatacctacctgatagggtagcagcgaggatgagattatgtcaagtgc

SEQ ID NO: 102294 - DNA, 120 bp, synthetic construct
  source 1..120: mol_type = other DNA
agttctggatgactacggagccaggtcatttcaagtagctgagaaaacctacaggttaatacaggccttatttggaccaacatggtattctcttgccaaaattttatttgcttcgggttt

SEQ ID NO: 102295 - DNA, 120 bp, synthetic construct
  source 1..120: mol_type = other DNA
ccatagtgctgggattacgggcatgagcccttgcgcccagccaggaagaggagtttttttaaagagtgtatttagtgattttatttgaaagacgatgaaacctaaatccttagaaaagca

SEQ ID NO: 102296 - DNA, 120 bp, synthetic construct
  source 1..120: mol_type = other DNA
ctaaaggcttaaatgtttcttgtaaataaagctctgtatttatagaaagaaaatatgcagttagtaacacatttgctgtttgcagttataacacaaattcaaatacccttcagtttacgg

SEQ ID NO: 102297 - DNA, 120 bp, synthetic construct
  source 1..120: mol_type = other DNA
tccacccgcctcggcttcccaaagtgctgggattataggcgtgagctactgcgcctggctctaattttgtatttttagtagagagagggtttcaccatgttggtcaggctggtcttgaac

SEQ ID NO: 102298 - DNA, 120 bp, synthetic construct
  source 1..120: mol_type = other DNA
aggtttaaataagaacagatgcttgctttggttcaagttaggcatgcctctgatgcatttcttaataccaaggcaaatctctgagggcttagacttagtagtgagcggtggccccattgt

SEQ ID NO: 102299 - DNA, 120 bp, synthetic construct
  source 1..120: mol_type = other DNA
ctgcagcctcaacctcccaggcttaagtaatcctctcaactcagcctctgagtaacttggactacagatgtacaccaccatgcctggctaatttttgtgggttttttttttttttttttt

SEQ ID NO: 102300 - DNA, 120 bp, synthetic construct
  source 1..120: mol_type = other DNA
aatctcagatatcacaaagttagatgaaggacaaaagtggtttttaagctacgctctttccagaaccattgtactagggaccagagagttctgctactaaaatcagccaggagctgtctc

SEQ ID NO: 102301 - DNA, 120 bp, synthetic construct
  source 1..120: mol_type = other DNA
acgtgacaattctgggcacttggattgtttcccaagaagcattctaaacacaatggttttaacagttgccatttattgagtgcttttgacgtgctagacaccaggatgatacggatgaaa

SEQ ID NO: 102302 - DNA, 120 bp, synthetic construct
  source 1..120: mol_type = other DNA
agtgctgagattacgggcatgggccactgcaccctgccagcaagaatgttctttaacttggaaacatgtttactaggttgaattccaaaccggcatctattaaaatactttaggctttct

SEQ ID NO: 102303 - DNA, 120 bp, synthetic construct
  source 1..120: mol_type = other DNA
acaagcatactttctcagttcccaaggttgaggaaaaaaaaaggtatgaaagatacaatatatttttgcattttataccttccagacacaaatgggtcaggcactaacatatcatatctc

SEQ ID NO: 102304 - DNA, 120 bp, synthetic construct
  source 1..120: mol_type = other DNA
tttttttttttttaactaaaagtaaattattctcttctcactcactactcaaaaaaaaaccttgttggctgggcacagtggcccacgcctgtaatcctagcactctgggaggccccccga

SEQ ID NO: 102305 - DNA, 120 bp, synthetic construct
  source 1..120: mol_type = other DNA
gggggcaccttttatgttttatttgtatttatttattttttttggagacagggtctcactttttcacccaggctgaagtatagtggtaccttggctcattgtttcctcactgcacccctc

SEQ ID NO: 102306 - DNA, 120 bp, synthetic construct
  source 1..120: mol_type = other DNA
tggcaaagtaaggttttttggattaaaaaagcagagaaaattgtcaccaaccaaccagcattaagaaatacttaagggaggccaggtgcactggctcatgcctgtaatcccagcactttg

SEQ ID NO: 102307 - DNA, 120 bp, synthetic construct
  source 1..120: mol_type = other DNA
gtgggggtgggtgcggggaggaagtaggggcagttcatggataaaaaaatgtagttagatagaatgaatacggtctagtatttgatggcacagcagggtgactacagtcaacaataattt

SEQ ID NO: 102308 - DNA, 120 bp, synthetic construct
  source 1..120: mol_type = other DNA
aataaattctcagactaatctgctacaaaagcgttcagcccccaaaatgctgcagatactgtttacggtgaggccactgtgaacaacacaaacaggaaataactgcctaacaccaattct

SEQ ID NO: 102309 - DNA, 120 bp, synthetic construct
  source 1..120: mol_type = other DNA
gctgttataaaatggggctaatggatatttcctcacaggtgtagggtgtggattgaataggctagtatttgaagatgttcagtatggtgctcagcactaacagccaagaagaacaaatgc

SEQ ID NO: 102310 - DNA, 120 bp, synthetic construct
  source 1..120: mol_type = other DNA
gataagaaaagatgggaaataaaatgttcataggtaagtttttagaatagtgagcaggcccgagctgctctaagagactctggcagtctataccaaggagaacatctgtgttccccagaa

SEQ ID NO: 102311 - DNA, 120 bp, synthetic construct
  source 1..120: mol_type = other DNA
cttgagcccaggaactgggggctgcagtgggctgtgactgcactaccatactccagcctgggtaacacagtgaaaccctatctctaaaataaataaataaataaaaattctaaaaaagaa

SEQ ID NO: 102312 - DNA, 120 bp, synthetic construct
  source 1..120: mol_type = other DNA
gcgttcctgagctgccgccgcagagcccactgatgctgatgccagtgggatcttcctaggactgcatgtagctgctagcttctatcctcccctggcggaggaagctggggtacatgggat

SEQ ID NO: 102313 - DNA, 120 bp, synthetic construct
  source 1..120: mol_type = other DNA
aataatcaagcgccccttccctttgtgcctcttaattttaacactaaactaggattgtcctgggcagctccctcctattcaagctttccttttactttacttttgatcatgtgctctgca

SEQ ID NO: 102314 - DNA, 120 bp, synthetic construct
  source 1..120: mol_type = other DNA
ctaaggaggcatgatgacgagacgtgatggggtaacctagatgggatcctccaacagaaaacggcattatgcaaaaactaaggaaatctgaagaaagcatggactttagcaaataaccat

SEQ ID NO: 102315 - DNA, 120 bp, synthetic construct
  source 1..120: mol_type = other DNA
tttataaattacccagtctcaggtatgtctttattggcagcatgaaaacaggctaatacactaactgatacctatctttctctgaattcctgggcttatctggaagggaaggggatgtcc

SEQ ID NO: 102316 - DNA, 120 bp, synthetic construct
  source 1..120: mol_type = other DNA
agaccctgtctttaaaaaaaagaagaagaagaagaaaaaagaaactgccaagactggttcccaggaacagaggacttggaattggtttcccatccatgggtttaacacagtgttgagctc

SEQ ID NO: 102317 - DNA, 120 bp, synthetic construct
  source 1..120: mol_type = other DNA
aactgtgagatcttgccatttcacagctgcagaaaccgaagaagtatgtatgggaataggtgctagtaacgttaggacaaagacgagaaatttaacactagtttggtgggactgattgct

SEQ ID NO: 102318 - DNA, 120 bp, synthetic construct
  source 1..120: mol_type = other DNA
tcttctgtgtggccttaggacccagcaaggttgatattaggggtgctgtaggaagcctccaccaaaaggaaatttacagagcagacattgagggttttgagggaagattaaccccaaaac

SEQ ID NO: 102319 - DNA, 120 bp, synthetic construct
  source 1..120: mol_type = other DNA
atttaactggtctcttaggttgttttgggtacgcggctattttgtttgctttcttagctcttgagggtgtgtcaatggctattactgcagcctgtgtctagaaaatactcaaatcacccc

SEQ ID NO: 102320 - DNA, 120 bp, synthetic construct
  source 1..120: mol_type = other DNA
cttctgggggatgggcgtgaggctgaaataggttgagccagtagttcctttattttgggaattcagaacttctcattattttgttattgaaacatgtagtcacagttctcgagaccgcat

SEQ ID NO: 102321 - DNA, 120 bp, synthetic construct
  source 1..120: mol_type = other DNA
gaaagaccatgaggatatactgagcgaggccatacagtttaataatgaacagcttaggttctaacacacattagacaggcctgtgttcaaaaccccatcttgtactagctctgtggatta

SEQ ID NO: 102322 - DNA, 120 bp, synthetic construct
  source 1..120: mol_type = other DNA
cttaatggtaaaatacgaaatgttttcccagtatgatcaagggccaggcaaggatgctcactctcactaattctatgaacactatattggaggtcccagatggtgaaataaggcaagaga

SEQ ID NO: 102323 - DNA, 120 bp, synthetic construct
  source 1..120: mol_type = other DNA
ggaggctgaggcacgagaattgcttgaacctgggaggcggaggttgtagtgggctgagattgcggcactgcactccagctttggttacaaagtgagactgtcaaaaaaataaataaaaat

SEQ ID NO: 102324 - DNA, 120 bp, synthetic construct
  source 1..120: mol_type = other DNA
aagaagacatacaaatggccaacaggtatatgaaaaaatgtccaccatcgctagtcactggagaaatgcaaatcaaaaccacaatgagatatcacctcactccagttagaatggctatta

SEQ ID NO: 102325 - DNA, 120 bp, synthetic construct
  source 1..120: mol_type = other DNA
ctaactcattgttagcagacagaaatttaaaaaaattttaaaggtactatttacataaatgctgtatggaaatacggacttacacagggaacagagagcactgaaaatggtaacaatgtg

SEQ ID NO: 102326 - DNA, 120 bp, synthetic construct
  source 1..120: mol_type = other DNA
ttttgtggaagacaatttttccactgggggtggtagtgggtggtttcaggatgaaactgttccacctcagatcatcaggcaccagattctcatcaggagcacacaacctagatccctcgt

SEQ ID NO: 102327 - DNA, 120 bp, synthetic construct
  source 1..120: mol_type = other DNA
ctgacctctctttgggatattacaatttataatgcagagttttgtcactgcaactgcctcctggatatttctctctcaaatgtctccctcctgatgtggaataaattccagacgtctcct

SEQ ID NO: 102328 - DNA, 120 bp, synthetic construct
  source 1..120: mol_type = other DNA
atatttattgcatattgtctagtgtgcattcctcccaaagctgatcctgagaccatggaaagttaggggaggaaaaattcaaaagaaagggtgcccagtaagcaggttataccttcgtga

SEQ ID NO: 102329 - DNA, 120 bp, synthetic construct; identical to SEQ ID NO: 30303
  source 1..120: mol_type = other DNA

SEQ ID NO: 102330 - DNA, 120 bp, synthetic construct; identical to SEQ ID NO: 30304
  source 1..120: mol_type = other DNA
